United States Patent Application Publication US 2021/0061914 A1 - sequence listing, part 2

SEQ ID NO: 19198 - protein, 9 aa, Homo sapiens
  Table A; Target 19198; HLA-C*02:02; CTCFL; ENSG00000124092; CTA
FTQSGTMKI

SEQ ID NO: 19199 - protein, 9 aa, Homo sapiens
  Table A; Target 19199; HLA-C*03:03; CTCFL; ENSG00000124092; CTA
FTQSGTMKI

SEQ ID NO: 19200 - protein, 9 aa, Homo sapiens
  Table A; Target 19200; HLA-C*03:04; CTCFL; ENSG00000124092; CTA
FTQSGTMKI

SEQ ID NO: 19201 - protein, 9 aa, Homo sapiens
  Table A; Target 19201; HLA-C*06:02; CTCFL; ENSG00000124092; CTA
FTQSGTMKI

SEQ ID NO: 19202 - protein, 9 aa, Homo sapiens
  Table A; Target 19202; HLA-C*12:03; CTCFL; ENSG00000124092; CTA
FTQSGTMKI

SEQ ID NO: 19203 - protein, 9 aa, Homo sapiens
  Table A; Target 19203; HLA-C*16:02; CTCFL; ENSG00000124092; CTA
FTQSGTMKI

SEQ ID NO: 19204 - protein, 8 aa, Homo sapiens
  Table A; Target 19204; HLA-B*18:01; CTCFL; ENSG00000124092; CTA
FTSEAVEL

SEQ ID NO: 19205 - protein, 8 aa, Homo sapiens
  Table A; Target 19205; HLA-B*27:05; CTCFL; ENSG00000124092; CTA
FTSEAVEL

SEQ ID NO: 19206 - protein, 8 aa, Homo sapiens
  Table A; Target 19206; HLA-B*35:01; CTCFL; ENSG00000124092; CTA
FTSEAVEL

SEQ ID NO: 19207 - protein, 8 aa, Homo sapiens
  Table A; Target 19207; HLA-B*35:03; CTCFL; ENSG00000124092; CTA
FTSEAVEL

SEQ ID NO: 19208 - protein, 8 aa, Homo sapiens
  Table A; Target 19208; HLA-B*39:01; CTCFL; ENSG00000124092; CTA
FTSEAVEL

SEQ ID NO: 19209 - protein, 8 aa, Homo sapiens
  Table A; Target 19209; HLA-B*40:01; CTCFL; ENSG00000124092; CTA
FTSEAVEL

SEQ ID NO: 19210 - protein, 8 aa, Homo sapiens
  Table A; Target 19210; HLA-B*46:01; CTCFL; ENSG00000124092; CTA
FTSEAVEL

SEQ ID NO: 19211 - protein, 8 aa, Homo sapiens
  Table A; Target 19211; HLA-C*01:02; CTCFL; ENSG00000124092; CTA
FTSEAVEL

SEQ ID NO: 19212 - protein, 8 aa, Homo sapiens
  Table A; Target 19212; HLA-C*02:02; CTCFL; ENSG00000124092; CTA
FTSEAVEL

SEQ ID NO: 19213 - protein, 8 aa, Homo sapiens
  Table A; Target 19213; HLA-C*03:03; CTCFL; ENSG00000124092; CTA
FTSEAVEL

SEQ ID NO: 19214 - protein, 8 aa, Homo sapiens
  Table A; Target 19214; HLA-C*03:04; CTCFL; ENSG00000124092; CTA
FTSEAVEL

SEQ ID NO: 19215 - protein, 8 aa, Homo sapiens
  Table A; Target 19215; HLA-C*04:01; CTCFL; ENSG00000124092; CTA
FTSEAVEL

SEQ ID NO: 19216 - protein, 8 aa, Homo sapiens
  Table A; Target 19216; HLA-C*05:01; CTCFL; ENSG00000124092; CTA
FTSEAVEL

SEQ ID NO: 19217 - protein, 8 aa, Homo sapiens
  Table A; Target 19217; HLA-C*07:04; CTCFL; ENSG00000124092; CTA
FTSEAVEL

SEQ ID NO: 19218 - protein, 8 aa, Homo sapiens
  Table A; Target 19218; HLA-C*12:03; CTCFL; ENSG00000124092; CTA
FTSEAVEL

SEQ ID NO: 19219 - protein, 8 aa, Homo sapiens
  Table A; Target 19219; HLA-C*14:02; CTCFL; ENSG00000124092; CTA
FTSEAVEL

SEQ ID NO: 19220 - protein, 8 aa, Homo sapiens
  Table A; Target 19220; HLA-C*16:01; CTCFL; ENSG00000124092; CTA
FTSEAVEL

SEQ ID NO: 19221 - protein, 8 aa, Homo sapiens
  Table A; Target 19221; HLA-C*16:02; CTCFL; ENSG00000124092; CTA
FTSEAVEL

SEQ ID NO: 19222 - protein, 9 aa, Homo sapiens
  Table A; Target 19222; HLA-A*01:01; CTCFL; ENSG00000124092; CTA
FTSSRMSSF

SEQ ID NO: 19223 - protein, 9 aa, Homo sapiens
  Table A; Target 19223; HLA-A*25:01; CTCFL; ENSG00000124092; CTA
FTSSRMSSF

SEQ ID NO: 19224 - protein, 9 aa, Homo sapiens
  Table A; Target 19224; HLA-A*26:01; CTCFL; ENSG00000124092; CTA
FTSSRMSSF

SEQ ID NO: 19225 - protein, 9 aa, Homo sapiens
  Table A; Target 19225; HLA-A*32:01; CTCFL; ENSG00000124092; CTA
FTSSRMSSF

SEQ ID NO: 19226 - protein, 9 aa, Homo sapiens
  Table A; Target 19226; HLA-B*08:01; CTCFL; ENSG00000124092; CTA
FTSSRMSSF

SEQ ID NO: 19227 - protein, 9 aa, Homo sapiens
  Table A; Target 19227; HLA-B*15:01; CTCFL; ENSG00000124092; CTA
FTSSRMSSF

SEQ ID NO: 19228 - protein, 9 aa, Homo sapiens
  Table A; Target 19228; HLA-B*37:01; CTCFL; ENSG00000124092; CTA
FTSSRMSSF

SEQ ID NO: 19229 - protein, 9 aa, Homo sapiens
  Table A; Target 19229; HLA-B*46:01; CTCFL; ENSG00000124092; CTA
FTSSRMSSF

SEQ ID NO: 19230 - protein, 9 aa, Homo sapiens
  Table A; Target 19230; HLA-B*57:01; CTCFL; ENSG00000124092; CTA
FTSSRMSSF

SEQ ID NO: 19231 - protein, 9 aa, Homo sapiens
  Table A; Target 19231; HLA-C*01:02; CTCFL; ENSG00000124092; CTA
FTSSRMSSF

SEQ ID NO: 19232 - protein, 9 aa, Homo sapiens
  Table A; Target 19232; HLA-C*02:02; CTCFL; ENSG00000124092; CTA
FTSSRMSSF

SEQ ID NO: 19233 - protein, 9 aa, Homo sapiens
  Table A; Target 19233; HLA-C*03:03; CTCFL; ENSG00000124092; CTA
FTSSRMSSF

SEQ ID NO: 19234 - protein, 9 aa, Homo sapiens
  Table A; Target 19234; HLA-C*03:04; CTCFL; ENSG00000124092; CTA
FTSSRMSSF

SEQ ID NO: 19235 - protein, 9 aa, Homo sapiens
  Table A; Target 19235; HLA-C*07:04; CTCFL; ENSG00000124092; CTA
FTSSRMSSF

SEQ ID NO: 19236 - protein, 9 aa, Homo sapiens
  Table A; Target 19236; HLA-C*12:03; CTCFL; ENSG00000124092; CTA
FTSSRMSSF

SEQ ID NO: 19237 - protein, 9 aa, Homo sapiens
  Table A; Target 19237; HLA-C*14:02; CTCFL; ENSG00000124092; CTA
FTSSRMSSF

SEQ ID NO: 19238 - protein, 9 aa, Homo sapiens
  Table A; Target 19238; HLA-C*16:01; CTCFL; ENSG00000124092; CTA
FTSSRMSSF

SEQ ID NO: 19239 - protein, 9 aa, Homo sapiens
  Table A; Target 19239; HLA-C*16:02; CTCFL; ENSG00000124092; CTA
FTSSRMSSF

SEQ ID NO: 19240 - protein, 9 aa, Homo sapiens
  Table A; Target 19240; HLA-C*16:04; CTCFL; ENSG00000124092; CTA
FTSSRMSSF

SEQ ID NO: 19241 - protein, 10 aa, Homo sapiens
  Table A; Target 19241; HLA-B*27:05; CTCFL; ENSG00000124092; CTA
FVETMSGDER

SEQ ID NO: 19242 - protein, 8 aa, Homo sapiens
  Table A; Target 19242; HLA-B*39:01; CTCFL; ENSG00000124092; CTA
FVTSGELV

SEQ ID NO: 19243 - protein, 9 aa, Homo sapiens
  Table A; Target 19243; HLA-A*33:03; CTCFL; ENSG00000124092; CTA
FVTSGELVR

SEQ ID NO: 19244 - protein, 9 aa, Homo sapiens
  Table A; Target 19244; HLA-A*68:01; CTCFL; ENSG00000124092; CTA
FVTSGELVR

SEQ ID NO: 19245 - protein, 9 aa, Homo sapiens
  Table A; Target 19245; HLA-C*02:02; CTCFL; ENSG00000124092; CTA
FVTSGELVR

SEQ ID NO: 19246 - protein, 9 aa, Homo sapiens
  Table A; Target 19246; HLA-C*07:06; CTCFL; ENSG00000124092; CTA
FVTSGELVR

SEQ ID NO: 19247 - protein, 10 aa, Homo sapiens
  Table A; Target 19247; HLA-B*40:01; CTCFL; ENSG00000124092; CTA
GDERSDEIVL

SEQ ID NO: 19248 - protein, 8 aa, Homo sapiens
  Table A; Target 19248; HLA-A*30:01; CTCFL; ENSG00000124092; CTA
GEKPFTCL

SEQ ID NO: 19249 - protein, 8 aa, Homo sapiens
  Table A; Target 19249; HLA-B*18:01; CTCFL; ENSG00000124092; CTA
GEKPFTCL

SEQ ID NO: 19250 - protein, 8 aa, Homo sapiens
  Table A; Target 19250; HLA-B*37:01; CTCFL; ENSG00000124092; CTA
GEKPFTCL

SEQ ID NO: 19251 - protein, 8 aa, Homo sapiens
  Table A; Target 19251; HLA-B*40:01; CTCFL; ENSG00000124092; CTA
GEKPFTCL

SEQ ID NO: 19252 - protein, 8 aa, Homo sapiens
  Table A; Target 19252; HLA-B*40:02; CTCFL; ENSG00000124092; CTA
GEKPFTCL

SEQ ID NO: 19253 - protein, 8 aa, Homo sapiens
  Table A; Target 19253; HLA-B*49:01; CTCFL; ENSG00000124092; CTA
GEKPFTCL

SEQ ID NO: 19254 - protein, 9 aa, Homo sapiens
  Table A; Target 19254; HLA-B*40:02; CTCFL; ENSG00000124092; CTA
GEKPYECHI

SEQ ID NO: 19255 - protein, 9 aa, Homo sapiens
  Table A; Target 19255; HLA-B*49:01; CTCFL; ENSG00000124092; CTA
GEKPYECHI

SEQ ID NO: 19256 - protein, 8 aa, Homo sapiens
  Table A; Target 19256; HLA-B*49:01; CTCFL; ENSG00000124092; CTA
GEMFPVAC

SEQ ID NO: 19257 - protein, 9 aa, Homo sapiens
  Table A; Target 19257; HLA-B*37:01; CTCFL; ENSG00000124092; CTA
GENVPKYQC

SEQ ID NO: 19258 - protein, 9 aa, Homo sapiens
  Table A; Target 19258; HLA-B*40:01; CTCFL; ENSG00000124092; CTA
GEQFPGEMF

SEQ ID NO: 19259 - protein, 9 aa, Homo sapiens
  Table A; Target 19259; HLA-B*44:02; CTCFL; ENSG00000124092; CTA
GEQFPGEMF

SEQ ID NO: 19260 - protein, 9 aa, Homo sapiens
  Table A; Target 19260; HLA-B*44:03; CTCFL; ENSG00000124092; CTA
GEQFPGEMF

SEQ ID NO: 19261 - protein, 9 aa, Homo sapiens
  Table A; Target 19261; HLA-C*16:04; CTCFL; ENSG00000124092; CTA
GEQFPGEMF

SEQ ID NO: 19262 - protein, 9 aa, Homo sapiens
  Table A; Target 19262; HLA-B*07:02; CTCFL; ENSG00000124092; CTA
GPRQSLQQC

SEQ ID NO: 19263 - protein, 9 aa, Homo sapiens
  Table A; Target 19263; HLA-B*56:01; CTCFL; ENSG00000124092; CTA
GPRQSLQQC

SEQ ID NO: 19264 - protein, 10 aa, Homo sapiens
  Table A; Target 19264; HLA-B*07:02; CTCFL; ENSG00000124092; CTA
GPRQSLQQCV

SEQ ID NO: 19265 - protein, 11 aa, Homo sapiens
  Table A; Target 19265; HLA-B*56:01; CTCFL; ENSG00000124092; CTA
GPRQSLQQCVA

SEQ ID NO: 19266 - protein, 9 aa, Homo sapiens
  Table A; Target 19266; HLA-A*32:01; CTCFL; ENSG00000124092; CTA
GQKEAAKGW

SEQ ID NO: 19267 - protein, 9 aa, Homo sapiens
  Table A; Target 19267; HLA-C*16:04; CTCFL; ENSG00000124092; CTA
GQKEAAKGW

SEQ ID NO: 19268 - protein, 8 aa, Homo sapiens
  Table A; Target 19268; HLA-B*08:01; CTCFL; ENSG00000124092; CTA
GTMKIHIL

SEQ ID NO: 19269 - protein, 10 aa, Homo sapiens
  Table A; Target 19269; HLA-A*03:02; CTCFL; ENSG00000124092; CTA
GTMKIHILQK

SEQ ID NO: 19270 - protein, 10 aa, Homo sapiens
  Table A; Target 19270; HLA-A*31:01; CTCFL; ENSG00000124092; CTA
GTMKIHILQK

SEQ ID NO: 19271 - protein, 8 aa, Homo sapiens
  Table A; Target 19271; HLA-B*08:01; CTCFL; ENSG00000124092; CTA
HALEENVM

SEQ ID NO: 19272 - protein, 8 aa, Homo sapiens
  Table A; Target 19272; HLA-B*35:01; CTCFL; ENSG00000124092; CTA
HALEENVM

SEQ ID NO: 19273 - protein, 8 aa, Homo sapiens
  Table A; Target 19273; HLA-B*35:03; CTCFL; ENSG00000124092; CTA
HALEENVM

SEQ ID NO: 19274 - protein, 8 aa, Homo sapiens
  Table A; Target 19274; HLA-B*51:01; CTCFL; ENSG00000124092; CTA
HALEENVM

SEQ ID NO: 19275 - protein, 8 aa, Homo sapiens
  Table A; Target 19275; HLA-B*55:01; CTCFL; ENSG00000124092; CTA
HALEENVM

SEQ ID NO: 19276 - protein, 8 aa, Homo sapiens
  Table A; Target 19276; HLA-C*03:03; CTCFL; ENSG00000124092; CTA
HALEENVM

SEQ ID NO: 19277 - protein, 8 aa, Homo sapiens
  Table A; Target 19277; HLA-C*03:04; CTCFL; ENSG00000124092; CTA
HALEENVM

SEQ ID NO: 19278 - protein, 8 aa, Homo sapiens
  Table A; Target 19278; HLA-C*05:01; CTCFL; ENSG00000124092; CTA
HALEENVM

SEQ ID NO: 19279 - protein, 9 aa, Homo sapiens
  Table A; Target 19279; HLA-A*02:01; CTCFL; ENSG00000124092; CTA
HALEENVMV

SEQ ID NO: 19280 - protein, 9 aa, Homo sapiens
  Table A; Target 19280; HLA-A*68:02; CTCFL; ENSG00000124092; CTA
HALEENVMV

SEQ ID NO: 19281 - protein, 9 aa, Homo sapiens
  Table A; Target 19281; HLA-B*13:02; CTCFL; ENSG00000124092; CTA
HALEENVMV

SEQ ID NO: 19282 - protein, 9 aa, Homo sapiens
  Table A; Target 19282; HLA-B*27:05; CTCFL; ENSG00000124092; CTA
HALEENVMV

SEQ ID NO: 19283 - protein, 9 aa, Homo sapiens
  Table A; Target 19283; HLA-B*35:03; CTCFL; ENSG00000124092; CTA
HALEENVMV

SEQ ID NO: 19284 - protein, 9 aa, Homo sapiens
  Table A; Target 19284; HLA-B*38:01; CTCFL; ENSG00000124092; CTA
HALEENVMV

SEQ ID NO: 19285 - protein, 9 aa, Homo sapiens
  Table A; Target 19285; HLA-B*39:01; CTCFL; ENSG00000124092; CTA
HALEENVMV

SEQ ID NO: 19286 - protein, 9 aa, Homo sapiens
  Table A; Target 19286; HLA-B*51:01; CTCFL; ENSG00000124092; CTA
HALEENVMV

SEQ ID NO: 19287 - protein, 9 aa, Homo sapiens
  Table A; Target 19287; HLA-B*54:01; CTCFL; ENSG00000124092; CTA
HALEENVMV

SEQ ID NO: 19288 - protein, 9 aa, Homo sapiens
  Table A; Target 19288; HLA-B*55:01; CTCFL; ENSG00000124092; CTA
HALEENVMV

SEQ ID NO: 19289 - protein, 9 aa, Homo sapiens
  Table A; Target 19289; HLA-C*02:02; CTCFL; ENSG00000124092; CTA
HALEENVMV

SEQ ID NO: 19290 - protein, 9 aa, Homo sapiens
  Table A; Target 19290; HLA-C*03:03; CTCFL; ENSG00000124092; CTA
HALEENVMV

SEQ ID NO: 19291 - protein, 9 aa, Homo sapiens
  Table A; Target 19291; HLA-C*03:04; CTCFL; ENSG00000124092; CTA
HALEENVMV

SEQ ID NO: 19292 - protein, 9 aa, Homo sapiens
  Table A; Target 19292; HLA-C*04:01; CTCFL; ENSG00000124092; CTA
HALEENVMV

SEQ ID NO: 19293 - protein, 9 aa, Homo sapiens
  Table A; Target 19293; HLA-C*05:01; CTCFL; ENSG00000124092; CTA
HALEENVMV

SEQ ID NO: 19294 - protein, 9 aa, Homo sapiens
  Table A; Target 19294; HLA-C*12:03; CTCFL; ENSG00000124092; CTA
HALEENVMV

SEQ ID NO: 19295 - protein, 9 aa, Homo sapiens
  Table A; Target 19295; HLA-C*16:01; CTCFL; ENSG00000124092; CTA
HALEENVMV

SEQ ID NO: 19296 - protein, 9 aa, Homo sapiens
  Table A; Target 19296; HLA-C*16:02; CTCFL; ENSG00000124092; CTA
HALEENVMV

SEQ ID NO: 19297 - protein, 9 aa, Homo sapiens
  Table A; Target 19297; HLA-C*16:04; CTCFL; ENSG00000124092; CTA
HALEENVMV

SEQ ID NO: 19298 - protein, 10 aa, Homo sapiens
  Table A; Target 19298; HLA-B*54:01; CTCFL; ENSG00000124092; CTA
HALEENVMVA

SEQ ID NO: 19299 - protein, 10 aa, Homo sapiens
  Table A; Target 19299; HLA-B*56:01; CTCFL; ENSG00000124092; CTA
HALEENVMVA

SEQ ID NO: 19300 - protein, 8 aa, Homo sapiens
  Table A; Target 19300; HLA-A*23:01; CTCFL; ENSG00000124092; CTA
HAYSAAEL

SEQ ID NO: 19301 - protein, 8 aa, Homo sapiens
  Table A; Target 19301; HLA-A*30:01; CTCFL; ENSG00000124092; CTA
HAYSAAEL

SEQ ID NO: 19302 - protein, 8 aa, Homo sapiens
  Table A; Target 19302; HLA-A*32:01; CTCFL; ENSG00000124092; CTA
HAYSAAEL

SEQ ID NO: 19303 - protein, 8 aa, Homo sapiens
  Table A; Target 19303; HLA-B*07:02; CTCFL; ENSG00000124092; CTA
HAYSAAEL

SEQ ID NO: 19304 - protein, 8 aa, Homo sapiens
  Table A; Target 19304; HLA-B*08:01; CTCFL; ENSG00000124092; CTA
HAYSAAEL

SEQ ID NO: 19305 - protein, 8 aa, Homo sapiens
  Table A; Target 19305; HLA-B*13:02; CTCFL; ENSG00000124092; CTA
HAYSAAEL

SEQ ID NO: 19306 - protein, 8 aa, Homo sapiens
  Table A; Target 19306; HLA-B*15:03; CTCFL; ENSG00000124092; CTA
HAYSAAEL

SEQ ID NO: 19307 - protein, 8 aa, Homo sapiens
  Table A; Target 19307; HLA-B*18:01; CTCFL; ENSG00000124092; CTA
HAYSAAEL

SEQ ID NO: 19308 - protein, 8 aa, Homo sapiens
  Table A; Target 19308; HLA-B*27:05; CTCFL; ENSG00000124092; CTA
HAYSAAEL

SEQ ID NO: 19309 - protein, 8 aa, Homo sapiens
  Table A; Target 19309; HLA-B*35:01; CTCFL; ENSG00000124092; CTA
HAYSAAEL

SEQ ID NO: 19310 - protein, 8 aa, Homo sapiens
  Table A; Target 19310; HLA-B*35:03; CTCFL; ENSG00000124092; CTA
HAYSAAEL

SEQ ID NO: 19311 - protein, 8 aa, Homo sapiens
  Table A; Target 19311; HLA-B*37:01; CTCFL; ENSG00000124092; CTA
HAYSAAEL

SEQ ID NO: 19312 - protein, 8 aa, Homo sapiens
  Table A; Target 19312; HLA-B*38:01; CTCFL; ENSG00000124092; CTA
HAYSAAEL

SEQ ID NO: 19313 - protein, 8 aa, Homo sapiens
  Table A; Target 19313; HLA-B*39:01; CTCFL; ENSG00000124092; CTA
HAYSAAEL

SEQ ID NO: 19314 - protein, 8 aa, Homo sapiens
  Table A; Target 19314; HLA-B*40:01; CTCFL; ENSG00000124092; CTA
HAYSAAEL

SEQ ID NO: 19315 - protein, 8 aa, Homo sapiens
  Table A; Target 19315; HLA-B*40:02; CTCFL; ENSG00000124092; CTA
HAYSAAEL

SEQ ID NO: 19316 - protein, 8 aa, Homo sapiens
  Table A; Target 19316; HLA-B*46:01; CTCFL; ENSG00000124092; CTA
HAYSAAEL

SEQ ID NO: 19317 - protein, 8 aa, Homo sapiens
  Table A; Target 19317; HLA-B*51:01; CTCFL; ENSG00000124092; CTA
HAYSAAEL

SEQ ID NO: 19318 - protein, 8 aa, Homo sapiens
  Table A; Target 19318; HLA-B*54:01; CTCFL; ENSG00000124092; CTA
HAYSAAEL

SEQ ID NO: 19319 - protein, 8 aa, Homo sapiens
  Table A; Target 19319; HLA-B*58:01; CTCFL; ENSG00000124092; CTA
HAYSAAEL

SEQ ID NO: 19320 - protein, 8 aa, Homo sapiens
  Table A; Target 19320; HLA-C*01:02; CTCFL; ENSG00000124092; CTA
HAYSAAEL

SEQ ID NO: 19321 - protein, 8 aa, Homo sapiens
  Table A; Target 19321; HLA-C*02:02; CTCFL; ENSG00000124092; CTA
HAYSAAEL

SEQ ID NO: 19322 - protein, 8 aa, Homo sapiens
  Table A; Target 19322; HLA-C*03:03; CTCFL; ENSG00000124092; CTA
HAYSAAEL

SEQ ID NO: 19323 - protein, 8 aa, Homo sapiens
  Table A; Target 19323; HLA-C*05:01; CTCFL; ENSG00000124092; CTA
HAYSAAEL

SEQ ID NO: 19324 - protein, 8 aa, Homo sapiens
  Table A; Target 19324; HLA-C*06:02; CTCFL; ENSG00000124092; CTA
HAYSAAEL

SEQ ID NO: 19325 - protein, 8 aa, Homo sapiens
  Table A; Target 19325; HLA-C*07:01; CTCFL; ENSG00000124092; CTA
HAYSAAEL

SEQ ID NO: 19326 - protein, 8 aa, Homo sapiens
  Table A; Target 19326; HLA-C*07:02; CTCFL; ENSG00000124092; CTA
HAYSAAEL

SEQ ID NO: 19327 - protein, 8 aa, Homo sapiens
  Table A; Target 19327; HLA-C*07:04; CTCFL; ENSG00000124092; CTA
HAYSAAEL

SEQ ID NO: 19328 - protein, 8 aa, Homo sapiens
  Table A; Target 19328; HLA-C*07:06; CTCFL; ENSG00000124092; CTA
HAYSAAEL

SEQ ID NO: 19329 - protein, 8 aa, Homo sapiens
  Table A; Target 19329; HLA-C*12:03; CTCFL; ENSG00000124092; CTA
HAYSAAEL

SEQ ID NO: 19330 - protein, 8 aa, Homo sapiens
  Table A; Target 19330; HLA-C*14:02; CTCFL; ENSG00000124092; CTA
HAYSAAEL

SEQ ID NO: 19331 - protein, 8 aa, Homo sapiens
  Table A; Target 19331; HLA-C*16:01; CTCFL; ENSG00000124092; CTA
HAYSAAEL

SEQ ID NO: 19332 - protein, 8 aa, Homo sapiens
  Table A; Target 19332; HLA-C*16:02; CTCFL; ENSG00000124092; CTA
HAYSAAEL

SEQ ID NO: 19333 - protein, 8 aa, Homo sapiens
  Table A; Target 19333; HLA-C*16:04; CTCFL; ENSG00000124092; CTA
HAYSAAEL

SEQ ID NO: 19334 - protein, 9 aa, Homo sapiens
  Table A; Target 19334; HLA-A*01:01; CTCFL; ENSG00000124092; CTA
HAYSAAELK

SEQ ID NO: 19335 - protein, 9 aa, Homo sapiens
  Table A; Target 19335; HLA-A*03:01; CTCFL; ENSG00000124092; CTA
HAYSAAELK

SEQ ID NO: 19336 - protein, 9 aa, Homo sapiens
  Table A; Target 19336; HLA-A*03:02; CTCFL; ENSG00000124092; CTA
HAYSAAELK

SEQ ID NO: 19337 - protein, 9 aa, Homo sapiens
  Table A; Target 19337; HLA-A*11:01; CTCFL; ENSG00000124092; CTA
HAYSAAELK

SEQ ID NO: 19338 - protein, 9 aa, Homo sapiens
  Table A; Target 19338; HLA-A*33:01; CTCFL; ENSG00000124092; CTA
HAYSAAELK

SEQ ID NO: 19339 - protein, 9 aa, Homo sapiens
  Table A; Target 19339; HLA-A*33:03; CTCFL; ENSG00000124092; CTA
HAYSAAELK

SEQ ID NO: 19340 - protein, 9 aa, Homo sapiens
  Table A; Target 19340; HLA-A*68:01; CTCFL; ENSG00000124092; CTA
HAYSAAELK

SEQ ID NO: 19341 - protein, 9 aa, Homo sapiens
  Table A; Target 19341; HLA-B*27:02; CTCFL; ENSG00000124092; CTA
HAYSAAELK

SEQ ID NO: 19342 - protein, 9 aa, Homo sapiens
  Table A; Target 19342; HLA-B*27:05; CTCFL; ENSG00000124092; CTA
HAYSAAELK

SEQ ID NO: 19343 - protein, 9 aa, Homo sapiens
  Table A; Target 19343; HLA-B*57:01; CTCFL; ENSG00000124092; CTA
HAYSAAELK

SEQ ID NO: 19344 - protein, 9 aa, Homo sapiens
  Table A; Target 19344; HLA-C*02:02; CTCFL; ENSG00000124092; CTA
HAYSAAELK

SEQ ID NO: 19345 - protein, 9 aa, Homo sapiens
  Table A; Target 19345; HLA-C*03:03; CTCFL; ENSG00000124092; CTA
HAYSAAELK

SEQ ID NO: 19346 - protein, 9 aa, Homo sapiens
  Table A; Target 19346; HLA-C*07:06; CTCFL; ENSG00000124092; CTA
HAYSAAELK

SEQ ID NO: 19347 - protein, 10 aa, Homo sapiens
  Table A; Target 19347; HLA-B*51:01; CTCFL; ENSG00000124092; CTA
HAYSAAELKC

SEQ ID NO: 19348 - protein, 10 aa, Homo sapiens
  Table A; Target 19348; HLA-B*54:01; CTCFL; ENSG00000124092; CTA
HAYSAAELKC

SEQ ID NO: 19349 - protein, 11 aa, Homo sapiens
  Table A; Target 19349; HLA-A*33:01; CTCFL; ENSG00000124092; CTA
HAYSAAELKCR

SEQ ID NO: 19350 - protein, 11 aa, Homo sapiens
  Table A; Target 19350; HLA-A*33:03; CTCFL; ENSG00000124092; CTA
HAYSAAELKCR

SEQ ID NO: 19351 - protein, 8 aa, Homo sapiens
  Table A; Target 19351; HLA-A*68:01; CTCFL; ENSG00000124092; CTA
HCATIIAR

SEQ ID NO: 19352 - protein, 8 aa, Homo sapiens
  Table A; Target 19352; HLA-C*07:06; CTCFL; ENSG00000124092; CTA
HCATIIAR

SEQ ID NO: 19353 - protein, 9 aa, Homo sapiens
  Table A; Target 19353; HLA-A*03:01; CTCFL; ENSG00000124092; CTA
HCATIIARK

SEQ ID NO: 19354 - protein, 9 aa, Homo sapiens
  Table A; Target 19354; HLA-A*03:02; CTCFL; ENSG00000124092; CTA
HCATIIARK

SEQ ID NO: 19355 - protein, 9 aa, Homo sapiens
  Table A; Target 19355; HLA-A*11:01; CTCFL; ENSG00000124092; CTA
HCATIIARK

SEQ ID NO: 19356 - protein, 9 aa, Homo sapiens
  Table A; Target 19356; HLA-A*68:01; CTCFL; ENSG00000124092; CTA
HCATIIARK

SEQ ID NO: 19357 - protein, 9 aa, Homo sapiens
  Table A; Target 19357; HLA-A*02:01; CTCFL; ENSG00000124092; CTA
HDANFIPTV

SEQ ID NO: 19358 - protein, 9 aa, Homo sapiens
  Table A; Target 19358; HLA-A*02:03; CTCFL; ENSG00000124092; CTA
HDANFIPTV

SEQ ID NO: 19359 - protein, 9 aa, Homo sapiens
  Table A; Target 19359; HLA-A*30:01; CTCFL; ENSG00000124092; CTA
HDANFIPTV

SEQ ID NO: 19360 - protein, 9 aa, Homo sapiens
  Table A; Target 19360; HLA-A*68:02; CTCFL; ENSG00000124092; CTA
HDANFIPTV

SEQ ID NO: 19361 - protein, 9 aa, Homo sapiens
  Table A; Target 19361; HLA-B*13:02; CTCFL; ENSG00000124092; CTA
HDANFIPTV

SEQ ID NO: 19362 - protein, 9 aa, Homo sapiens
  Table A; Target 19362; HLA-B*49:01; CTCFL; ENSG00000124092; CTA
HDANFIPTV

SEQ ID NO: 19363 - protein, 9 aa, Homo sapiens
  Table A; Target 19363; HLA-B*51:01; CTCFL; ENSG00000124092; CTA
HDANFIPTV

SEQ ID NO: 19364 - protein, 10 aa, Homo sapiens
  Table A; Target 19364; HLA-A*25:01; CTCFL; ENSG00000124092; CTA
HDANFIPTVY

SEQ ID NO: 19365 - protein, 10 aa, Homo sapiens
  Table A; Target 19365; HLA-A*26:01; CTCFL; ENSG00000124092; CTA
HDANFIPTVY

SEQ ID NO: 19366 - protein, 10 aa, Homo sapiens
  Table A; Target 19366; HLA-A*29:02; CTCFL; ENSG00000124092; CTA
HDANFIPTVY

SEQ ID NO: 19367 - protein, 10 aa, Homo sapiens
  Table A; Target 19367; HLA-A*30:02; CTCFL; ENSG00000124092; CTA
HDANFIPTVY

SEQ ID NO: 19368 - protein, 10 aa, Homo sapiens
  Table A; Target 19368; HLA-B*15:03; CTCFL; ENSG00000124092; CTA
HDANFIPTVY

SEQ ID NO: 19369 - protein, 10 aa, Homo sapiens
  Table A; Target 19369; HLA-B*18:01; CTCFL; ENSG00000124092; CTA
HDANFIPTVY

SEQ ID NO: 19370 - protein, 10 aa, Homo sapiens
  Table A; Target 19370; HLA-B*27:02; CTCFL; ENSG00000124092; CTA
HDANFIPTVY

SEQ ID NO: 19371 - protein, 10 aa, Homo sapiens
  Table A; Target 19371; HLA-B*35:01; CTCFL; ENSG00000124092; CTA
HDANFIPTVY

SEQ ID NO: 19372 - protein, 10 aa, Homo sapiens
  Table A; Target 19372; HLA-B*44:03; CTCFL; ENSG00000124092; CTA
HDANFIPTVY

SEQ ID NO: 19373 - protein, 10 aa, Homo sapiens
  Table A; Target 19373; HLA-C*02:02; CTCFL; ENSG00000124092; CTA
HDANFIPTVY

SEQ ID NO: 19374 - protein, 10 aa, Homo sapiens
  Table A; Target 19374; HLA-C*07:01; CTCFL; ENSG00000124092; CTA
HDANFIPTVY

SEQ ID NO: 19375 - protein, 10 aa, Homo sapiens
  Table A; Target 19375; HLA-C*12:03; CTCFL; ENSG00000124092; CTA
HDANFIPTVY

SEQ ID NO: 19376 - protein, 10 aa, Homo sapiens
  Table A; Target 19376; HLA-C*16:04; CTCFL; ENSG00000124092; CTA
HDANFIPTVY

SEQ ID NO: 19377 - protein, 9 aa, Homo sapiens
  Table A; Target 19377; HLA-A*23:01; CTCFL; ENSG00000124092; CTA
HFTSEAVEL

SEQ ID NO: 19378 - protein, 9 aa, Homo sapiens
  Table A; Target 19378; HLA-A*24:02; CTCFL; ENSG00000124092; CTA
HFTSEAVEL

SEQ ID NO: 19379 - protein, 9 aa, Homo sapiens
  Table A; Target 19379; HLA-B*35:03; CTCFL; ENSG00000124092; CTA
HFTSEAVEL

SEQ ID NO: 19380 - protein, 9 aa, Homo sapiens
  Table A; Target 19380; HLA-C*14:02; CTCFL; ENSG00000124092; CTA
HFTSEAVEL

SEQ ID NO: 19381 - protein, 8 aa, Homo sapiens
  Table A; Target 19381; HLA-B*18:01; CTCFL; ENSG00000124092; CTA
HGENVPKY

SEQ ID NO: 19382 - protein, 8 aa, Homo sapiens
  Table A; Target 19382; HLA-B*39:01; CTCFL; ENSG00000124092; CTA
HGENVPKY

SEQ ID NO: 19383 - protein, 8 aa, Homo sapiens
  Table A; Target 19383; HLA-C*07:01; CTCFL; ENSG00000124092; CTA
HGENVPKY

SEQ ID NO: 19384 - protein, 8 aa, Homo sapiens
  Table A; Target 19384; HLA-C*07:04; CTCFL; ENSG00000124092; CTA
HGENVPKY

SEQ ID NO: 19385 - protein, 8 aa, Homo sapiens
  Table A; Target 19385; HLA-C*12:03; CTCFL; ENSG00000124092; CTA
HGENVPKY

SEQ ID NO: 19386 - protein, 8 aa, Homo sapiens
  Table A; Target 19386; HLA-C*16:02; CTCFL; ENSG00000124092; CTA
HGENVPKY

SEQ ID NO: 19387 - protein, 9 aa, Homo sapiens
  Table A; Target 19387; HLA-A*03:01; CTCFL; ENSG00000124092; CTA
HMKTHTSEK

SEQ ID NO: 19388 - protein, 11 aa, Homo sapiens
  Table A; Target 19388; HLA-B*27:02; CTCFL; ENSG00000124092; CTA
HRSPSELEAER

SEQ ID NO: 19389 - protein, 10 aa, Homo sapiens
  Table A; Target 19389; HLA-B*07:02; CTCFL; ENSG00000124092; CTA
HTRFTQSGTM

SEQ ID NO: 19390 - protein, 8 aa, Homo sapiens
  Table A; Target 19390; HLA-C*16:01; CTCFL; ENSG00000124092; CTA
HTSEKPHL

SEQ ID NO: 19391 - protein, 8 aa, Homo sapiens
  Table A; Target 19391; HLA-C*16:02; CTCFL; ENSG00000124092; CTA
HTSEKPHL

SEQ ID NO: 19392 - protein, 9 aa, Homo sapiens
  Table A; Target 19392; HLA-A*03:01; CTCFL; ENSG00000124092; CTA
HVNTHTGTR

SEQ ID NO: 19393 - protein, 9 aa, Homo sapiens
  Table A; Target 19393; HLA-A*31:01; CTCFL; ENSG00000124092; CTA
HVNTHTGTR

SEQ ID NO: 19394 - protein, 9 aa, Homo sapiens
  Table A; Target 19394; HLA-A*33:01; CTCFL; ENSG00000124092; CTA
HVNTHTGTR

SEQ ID NO: 19395 - protein, 9 aa, Homo sapiens
  Table A; Target 19395; HLA-A*33:03; CTCFL; ENSG00000124092; CTA
HVNTHTGTR

SEQ ID NO: 19396 - protein, 9 aa, Homo sapiens
  Table A; Target 19396; HLA-A*68:01; CTCFL; ENSG00000124092; CTA
HVNTHTGTR

SEQ ID NO: 19397 - protein, 9 aa, Homo sapiens
  Table A; Target 19397; HLA-C*07:06; CTCFL; ENSG00000124092; CTA
HVNTHTGTR

SEQ ID NO: 19398 - protein, 10 aa, Homo sapiens
  Table A; Target 19398; HLA-A*03:01; CTCFL; ENSG00000124092; CTA
ILKEATKGQK

SEQ ID NO: 19399 - protein, 11 aa, Homo sapiens
  Table A; Target 19399; HLA-A*03:02; CTCFL; ENSG00000124092; CTA
ILQKHGENVPK

SEQ ID NO: 19400 - protein, 9 aa, Homo sapiens
  Table A; Target 19400; HLA-A*23:01; CTCFL; ENSG00000124092; CTA
ILTLQTVHF

SEQ ID NO: 19401 - protein, 9 aa, Homo sapiens
  Table A; Target 19401; HLA-A*24:02; CTCFL; ENSG00000124092; CTA
ILTLQTVHF

SEQ ID NO: 19402 - protein, 11 aa, Homo sapiens
  Table A; Target 19402; HLA-C*04:01; CTCFL; ENSG00000124092; CTA
IQQELYSPQEM

SEQ ID NO: 19403 - protein, 9 aa, Homo sapiens
  Table A; Target 19403; HLA-B*13:02; CTCFL; ENSG00000124092; CTA
IQQQEGVQV

SEQ ID NO: 19404 - protein, 9 aa, Homo sapiens
  Table A; Target 19404; HLA-B*27:05; CTCFL; ENSG00000124092; CTA
IQQQEGVQV

SEQ ID NO: 19405 - protein, 9 aa, Homo sapiens
  Table A; Target 19405; HLA-B*38:01; CTCFL; ENSG00000124092; CTA
IQQQEGVQV

SEQ ID NO: 19406 - protein, 9 aa, Homo sapiens
  Table A; Target 19406; HLA-B*39:01; CTCFL; ENSG00000124092; CTA
IQQQEGVQV

SEQ ID NO: 19407 - protein, 10 aa, Homo sapiens
  Table A; Target 19407; HLA-B*13:02; CTCFL; ENSG00000124092; CTA
IQQQEGVQVV

SEQ ID NO: 19408 - protein, 11 aa, Homo sapiens
  Table A; Target 19408; HLA-A*30:01; CTCFL; ENSG00000124092; CTA
IQQQEGVQVVV

SEQ ID NO: 19409 - protein, 11 aa, Homo sapiens
  Table A; Target 19409; HLA-B*13:02; CTCFL; ENSG00000124092; CTA
IQQQEGVQVVV

SEQ ID NO: 19410 - protein, 8 aa, Homo sapiens
  Table A; Target 19410; HLA-B*15:01; CTCFL; ENSG00000124092; CTA
ISIQQELY

SEQ ID NO: 19411 - protein, 8 aa, Homo sapiens
  Table A; Target 19411; HLA-B*15:03; CTCFL; ENSG00000124092; CTA
ISIQQELY

SEQ ID NO: 19412 - protein, 8 aa, Homo sapiens
  Table A; Target 19412; HLA-B*58:01; CTCFL; ENSG00000124092; CTA
ISIQQELY

SEQ ID NO: 19413 - protein, 8 aa, Homo sapiens
  Table A; Target 19413; HLA-B*58:01; CTCFL; ENSG00000124092; CTA
ISVLSEQF

SEQ ID NO: 19414 - protein, 10 aa, Homo sapiens
  Table A; Target 19414; HLA-A*11:01; CTCFL; ENSG00000124092; CTA
ISVLSEQFTK

SEQ ID NO: 19415 - protein, 10 aa, Homo sapiens
  Table A; Target 19415; HLA-B*40:01; CTCFL; ENSG00000124092; CTA
KEAANGDEAA

SEQ ID NO: 19416 - protein, 11 aa, Homo sapiens
  Table A; Target 19416; HLA-B*40:01; CTCFL; ENSG00000124092; CTA
KEAANGDEAAA

SEQ ID NO: 19417 - protein, 10 aa, Homo sapiens
  Table A; Target 19417; HLA-B*40:01; CTCFL; ENSG00000124092; CTA
KEEVDEGVTC

SEQ ID NO: 19418 - protein, 10 aa, Homo sapiens
  Table A; Target 19418; HLA-A*30:01; CTCFL; ENSG00000124092; CTA
KEQLFFVETM

SEQ ID NO: 19419 - protein, 10 aa, Homo sapiens
  Table A; Target 19419; HLA-B*37:01; CTCFL; ENSG00000124092; CTA
KEQLFFVETM

SEQ ID NO: 19420 - protein, 10 aa, Homo sapiens
  Table A; Target 19420; HLA-B*40:01; CTCFL; ENSG00000124092; CTA
KEQLFFVETM

SEQ ID NO: 19421 - protein, 10 aa, Homo sapiens
  Table A; Target 19421; HLA-B*40:02; CTCFL; ENSG00000124092; CTA
KEQLFFVETM

SEQ ID NO: 19422 - protein, 10 aa, Homo sapiens
  Table A; Target 19422; HLA-B*49:01; CTCFL; ENSG00000124092; CTA
KEQLFFVETM

SEQ ID NO: 19423 - protein, 9 aa, Homo sapiens
  Table A; Target 19423; HLA-A*31:01; CTCFL; ENSG00000124092; CTA
KGFSRWINL

SEQ ID NO: 19424 - protein, 9 aa, Homo sapiens
  Table A; Target 19424; HLA-A*03:01; CTCFL; ENSG00000124092; CTA
KHGENVPKY

SEQ ID NO: 19425 - protein, 9 aa, Homo sapiens
  Table A; Target 19425; HLA-A*30:02; CTCFL; ENSG00000124092; CTA
KHGENVPKY

SEQ ID NO: 19426 - protein, 9 aa, Homo sapiens
  Table A; Target 19426; HLA-B*39:01; CTCFL; ENSG00000124092; CTA
KHGENVPKY

SEQ ID NO: 19427 - protein, 9 aa, Homo sapiens
  Table A; Target 19427; HLA-B*58:01; CTCFL; ENSG00000124092; CTA
KHGENVPKY

SEQ ID NO: 19428 - protein, 9 aa, Homo sapiens
  Table A; Target 19428; HLA-C*07:01; CTCFL; ENSG00000124092; CTA
KHGENVPKY

SEQ ID NO: 19429 - protein, 9 aa, Homo sapiens
  Table A; Target 19429; HLA-C*16:02; CTCFL; ENSG00000124092; CTA
KHGENVPKY

SEQ ID NO: 19430 - protein, 9 aa, Homo sapiens
  Table A; Target 19430; HLA-C*16:04; CTCFL; ENSG00000124092; CTA
KHGENVPKY

SEQ ID NO: 19431 - protein, 9 aa, Homo sapiens
  Table A; Target 19431; HLA-A*31:01; CTCFL; ENSG00000124092; CTA
KQLLNAHFR

SEQ ID NO: 19432 - protein, 8 aa, Homo sapiens
  Table A; Target 19432; HLA-B*40:02; CTCFL; ENSG00000124092; CTA
KTFRTVTL

SEQ ID NO: 19433 - protein, 8 aa, Homo sapiens
  Table A; Target 19433; HLA-B*57:01; CTCFL; ENSG00000124092; CTA
KTFRTVTL

SEQ ID NO: 19434 - protein, 8 aa, Homo sapiens
  Table A; Target 19434; HLA-B*58:01; CTCFL; ENSG00000124092; CTA
KTFRTVTL

SEQ ID NO: 19435 - protein, 9 aa, Homo sapiens
  Table A; Target 19435; HLA-A*02:04; CTCFL; ENSG00000124092; CTA
KTFRTVTLL

SEQ ID NO: 19436 - protein, 9 aa, Homo sapiens
  Table A; Target 19436; HLA-A*03:01; CTCFL; ENSG00000124092; CTA
KTFRTVTLL

SEQ ID NO: 19437 - protein, 9 aa, Homo sapiens
  Table A; Target 19437; HLA-A*31:01; CTCFL; ENSG00000124092; CTA
KTFRTVTLL

SEQ ID NO: 19438 - protein, 9 aa, Homo sapiens
  Table A; Target 19438; HLA-A*68:02; CTCFL; ENSG00000124092; CTA
KTFRTVTLL

SEQ ID NO: 19439 - protein, 9 aa, Homo sapiens
  Table A; Target 19439; HLA-B*57:01; CTCFL; ENSG00000124092; CTA
KTFRTVTLL

SEQ ID NO: 19440 - protein, 9 aa, Homo sapiens
  Table A; Target 19440; HLA-B*58:01; CTCFL; ENSG00000124092; CTA
KTFRTVTLL

SEQ ID NO: 19441 - protein, 10 aa, Homo sapiens
  Table A; Target 19441; HLA-A*03:01; CTCFL; ENSG00000124092; CTA
KTFRTVTLLR

SEQ ID NO: 19442 - protein, 10 aa, Homo sapiens
  Table A; Target 19442; HLA-A*31:01; CTCFL; ENSG00000124092; CTA
KTFRTVTLLR

SEQ ID NO: 19443 - protein, 10 aa, Homo sapiens
  Table A; Target 19443; HLA-B*57:01; CTCFL; ENSG00000124092; CTA
KTFRTVTLLR

SEQ ID NO: 19444 - protein, 9 aa, Homo sapiens
  Table A; Target 19444; HLA-A*32:01; CTCFL; ENSG00000124092; CTA
KTKGAKGTF

SEQ ID NO: 19445 - protein, 9 aa, Homo sapiens
  Table A; Target 19445; HLA-A*30:02; CTCFL; ENSG00000124092; CTA
KYASVEASK

SEQ ID NO: 19446 - protein, 9 aa, Homo sapiens
  Table A; Target 19446; HLA-C*06:02; CTCFL; ENSG00000124092; CTA
KYASVEASK

SEQ ID NO: 19447 - protein, 10 aa, Homo sapiens
  Table A; Target 19447; HLA-A*23:01; CTCFL; ENSG00000124092; CTA
KYASVEASKL

SEQ ID NO: 19448 - protein, 10 aa, Homo sapiens
  Table A; Target 19448; HLA-A*24:02; CTCFL; ENSG00000124092; CTA
KYASVEASKL

SEQ ID NO: 19449 - protein, 10 aa, Homo sapiens
  Table A; Target 19449; HLA-B*07:02; CTCFL; ENSG00000124092; CTA
KYASVEASKL

SEQ ID NO: 19450 - protein, 10 aa, Homo sapiens
  Table A; Target 19450; HLA-B*15:03; CTCFL; ENSG00000124092; CTA
KYASVEASKL

SEQ ID NO: 19451 - protein, 10 aa, Homo sapiens
  Table A; Target 19451; HLA-B*27:05; CTCFL; ENSG00000124092; CTA
KYASVEASKL

SEQ ID NO: 19452 - protein, 10 aa, Homo sapiens
  Table A; Target 19452; HLA-B*40:01; CTCFL; ENSG00000124092; CTA
KYASVEASKL

SEQ ID NO: 19453 - protein, 10 aa, Homo sapiens
  Table A; Target 19453; HLA-B*40:02; CTCFL; ENSG00000124092; CTA
KYASVEASKL

SEQ ID NO: 19454 - protein, 10 aa, Homo sapiens
  Table A; Target 19454; HLA-C*06:02; CTCFL; ENSG00000124092; CTA
KYASVEASKL

SEQ ID NO: 19455 - protein, 10 aa, Homo sapiens
  Table A; Target 19455; HLA-C*07:02; CTCFL; ENSG00000124092; CTA
KYASVEASKL

SEQ ID NO: 19456 - protein, 10 aa, Homo sapiens
  Table A; Target 19456; HLA-C*14:02; CTCFL; ENSG00000124092; CTA
KYASVEASKL

SEQ ID NO: 19457 - protein, 11 aa, Homo sapiens
  Table A; Target 19457; HLA-A*03:02; CTCFL; ENSG00000124092; CTA
KYASVEASKLK

SEQ ID NO: 19458 - protein, 11 aa, Homo sapiens
  Table A; Target 19458; HLA-A*31:01; CTCFL; ENSG00000124092; CTA
KYASVEASKLK

SEQ ID NO: 19459 - protein, 11 aa, Homo sapiens
  Table A; Target 19459; HLA-C*06:02; CTCFL; ENSG00000124092; CTA
KYASVEASKLK

SEQ ID NO: 19460 - protein, 11 aa, Homo sapiens
  Table A; Target 19460; HLA-C*07:01; CTCFL; ENSG00000124092; CTA
KYASVEASKLK

SEQ ID NO: 19461 - protein, 11 aa, Homo sapiens
  Table A; Target 19461; HLA-C*07:02; CTCFL; ENSG00000124092; CTA
KYASVEASKLK

SEQ ID NO: 19462 - protein, 9 aa, Homo sapiens
  Table A; Target 19462; HLA-A*23:01; CTCFL; ENSG00000124092; CTA
KYILTLQTV

SEQ ID NO: 19463 - protein, 9 aa, Homo sapiens
  Table A; Target 19463; HLA-A*24:02; CTCFL; ENSG00000124092; CTA
KYILTLQTV

SEQ ID NO: 19464 - protein, 9 aa, Homo sapiens
  Table A; Target 19464; HLA-C*14:02; CTCFL; ENSG00000124092; CTA
KYILTLQTV

SEQ ID NO: 19465 - protein, 11 aa, Homo sapiens
  Table A; Target 19465; HLA-A*23:01; CTCFL; ENSG00000124092; CTA
KYILTLQTVHF

SEQ ID NO: 19466 - protein, 11 aa, Homo sapiens
  Table A; Target 19466; HLA-A*24:02; CTCFL; ENSG00000124092; CTA
KYILTLQTVHF

SEQ ID NO: 19467 - protein, 8 aa, Homo sapiens
  Table A; Target 19467; HLA-C*05:01; CTCFL; ENSG00000124092; CTA
LAETTGLI

SEQ ID NO: 19468 - protein, 9 aa, Homo sapiens
  Table A; Target 19468; HLA-A*01:01; CTCFL; ENSG00000124092; CTA
LAETTGLIK

SEQ ID NO: 19469 - protein, 10 aa, Homo sapiens
  Table A; Target 19469; HLA-C*05:01; CTCFL; ENSG00000124092; CTA
LAETTGLIKL

SEQ ID NO: 19470 - protein, 10 aa, Homo sapiens
  Table A; Target 19470; HLA-B*55:01; CTCFL; ENSG00000124092; CTA
LAPSEESEKY

SEQ ID NO: 19471 - protein, 9 aa, Homo sapiens
  Table A; Target 19471; HLA-B*49:01; CTCFL; ENSG00000124092; CTA
LEAERTSGA

SEQ ID NO: 19472 - protein, 10 aa, Homo sapiens
  Table A; Target 19472; HLA-A*30:01; CTCFL; ENSG00000124092; CTA
LEAERTSGAF

SEQ ID NO: 19473 - protein, 10 aa, Homo sapiens
  Table A; Target 19473; HLA-B*18:01; CTCFL; ENSG00000124092; CTA
LEAERTSGAF

SEQ ID NO: 19474 - protein, 10 aa, Homo sapiens
  Table A; Target 19474; HLA-B*40:01; CTCFL; ENSG00000124092; CTA
LEAERTSGAF

SEQ ID NO: 19475 - protein, 10 aa, Homo sapiens
  Table A; Target 19475; HLA-B*44:02; CTCFL; ENSG00000124092; CTA
LEAERTSGAF

SEQ ID NO: 19476 - protein, 10 aa, Homo sapiens
  Table A; Target 19476; HLA-B*44:03; CTCFL; ENSG00000124092; CTA
LEAERTSGAF

SEQ ID NO: 19477 - protein, 10 aa, Homo sapiens
  Table A; Target 19477; HLA-A*30:01; CTCFL; ENSG00000124092; CTA
LEEEQEKNQL

SEQ ID NO: 19478 - protein, 10 aa, Homo sapiens
  Table A; Target 19478; HLA-B*40:01; CTCFL; ENSG00000124092; CTA
LEEEQEKNQL

SEQ ID NO: 19479 - protein, 11 aa, Homo sapiens
  Table A; Target 19479; HLA-A*30:01; CTCFL; ENSG00000124092; CTA
LEEEQEKNQLL

SEQ ID NO: 19480 - protein, 11 aa, Homo sapiens
  Table A; Target 19480; HLA-B*40:01; CTCFL; ENSG00000124092; CTA
LEEEQEKNQLL

SEQ ID NO: 19481 - protein, 8 aa, Homo sapiens
  Table A; Target 19481; HLA-B*49:01; CTCFL; ENSG00000124092; CTA
LEEEVELV

SEQ ID NO: 19482 - protein, 9 aa, Homo sapiens
  Table A; Target 19482; HLA-A*30:01; CTCFL; ENSG00000124092; CTA
LEEEVELVL

SEQ ID NO: 19483 - protein, 9 aa, Homo sapiens
  Table A; Target 19483; HLA-B*18:01; CTCFL; ENSG00000124092; CTA
LEEEVELVL

SEQ ID NO: 19484 - protein, 9 aa, Homo sapiens
  Table A; Target 19484; HLA-B*40:01; CTCFL; ENSG00000124092; CTA
LEEEVELVL

SEQ ID NO: 19485 - protein, 9 aa, Homo sapiens
  Table A; Target 19485; HLA-B*49:01; CTCFL; ENSG00000124092; CTA
LEEEVELVL

SEQ ID NO: 19486 - protein, 9 aa, Homo sapiens
  Table A; Target 19486; HLA-A*30:01; CTCFL; ENSG00000124092; CTA
LEEGPRQSL

SEQ ID NO: 19487 - protein, 9 aa, Homo sapiens
  Table A; Target 19487; HLA-B*07:02; CTCFL; ENSG00000124092; CTA
LEEGPRQSL

SEQ ID NO: 19488 - protein, 9 aa, Homo sapiens
  Table A; Target 19488; HLA-B*37:01; CTCFL; ENSG00000124092; CTA
LEEGPRQSL

SEQ ID NO: 19489 - protein, 9 aa, Homo sapiens
  Table A; Target 19489; HLA-B*40:02; CTCFL; ENSG00000124092; CTA
LEEGPRQSL

SEQ ID NO: 19490 - protein, 9 aa, Homo sapiens
  Table A; Target 19490; HLA-B*44:02; CTCFL; ENSG00000124092; CTA
LEEGPRQSL

SEQ ID NO: 19491 - protein, 9 aa, Homo sapiens
  Table A; Target 19491; HLA-B*44:03; CTCFL; ENSG00000124092; CTA
LEEGPRQSL

SEQ ID NO: 19492 - protein, 9 aa, Homo sapiens
  Table A; Target 19492; HLA-B*49:01; CTCFL; ENSG00000124092; CTA
LEEGPRQSL

SEQ ID NO: 19493 - protein, 9 aa, Homo sapiens
  Table A; Target 19493; HLA-C*03:04; CTCFL; ENSG00000124092; CTA
LEEGPRQSL

SEQ ID NO: 19494 - protein, 8 aa, Homo sapiens
  Table A; Target 19494; HLA-B*18:01; CTCFL; ENSG00000124092; CTA
LEENVMVA

SEQ ID NO: 19495 - protein, 8 aa, Homo sapiens
  Table A; Target 19495; HLA-B*49:01; CTCFL; ENSG00000124092; CTA
LEENVMVA

SEQ ID NO: 19496 - protein, 9 aa, Homo sapiens
  Table A; Target 19496; HLA-B*40:01; CTCFL; ENSG00000124092; CTA
LELMPEKGL

SEQ ID NO: 19497 - protein, 9 aa, Homo sapiens
  Table A; Target 19497; HLA-B*44:02; CTCFL; ENSG00000124092; CTA
LELMPEKGL

SEQ ID NO: 19498 - protein, 9 aa, Homo sapiens
  Table A; Target 19498; HLA-B*44:03; CTCFL; ENSG00000124092; CTA
LELMPEKGL

SEQ ID NO: 19499 - protein, 9 aa, Homo sapiens
  Table A; Target 19499; HLA-B*38:01; CTCFL; ENSG00000124092; CTA
LHAYSAAEL

SEQ ID NO: 19500 - protein, 9 aa, Homo sapiens
  Table A; Target 19500; HLA-B*39:01; CTCFL; ENSG00000124092; CTA
LHAYSAAEL

SEQ ID NO: 19501 - protein, 9 aa, Homo sapiens
  Table A; Target 19501; HLA-C*07:02; CTCFL; ENSG00000124092; CTA
LHAYSAAEL

SEQ ID NO: 19502 - protein, 9 aa, Homo sapiens
  Table A; Target 19502; HLA-C*07:04; CTCFL; ENSG00000124092; CTA
LHAYSAAEL

SEQ ID NO: 19503 - protein, 9 aa, Homo sapiens
  Table A; Target 19503; HLA-A*29:02; CTCFL; ENSG00000124092; CTA
LLNAHFRKY

SEQ ID NO: 19504 - protein, 9 aa, Homo sapiens
  Table A; Target 19504; HLA-B*13:02; CTCFL; ENSG00000124092; CTA
LQDMSLLSI

SEQ ID NO: 19505 - protein, 9 aa, Homo sapiens
  Table A; Target 19505; HLA-B*38:01; CTCFL; ENSG00000124092; CTA
LQDMSLLSI

SEQ ID NO: 19506 - protein, 9 aa, Homo sapiens
  Table A; Target 19506; HLA-B*13:02; CTCFL; ENSG00000124092; CTA
LQQCVAISI

SEQ ID NO: 19507 - protein, 9 aa, Homo sapiens
  Table A; Target 19507; HLA-C*07:04; CTCFL; ENSG00000124092; CTA
LQQCVAISI

SEQ ID NO: 19508 - protein, 9 aa, Homo sapiens
  Table A; Target 19508; HLA-B*58:01; CTCFL; ENSG00000124092; CTA
LSIQQQEGV

SEQ ID NO: 19509 - protein, 8 aa, Homo sapiens
  Table A; Target 19509; HLA-A*23:01; CTCFL; ENSG00000124092; CTA
LTLQTVHF

SEQ ID NO: 19510 - protein, 11 aa, Homo sapiens
  Table A; Target 19510; HLA-A*03:02; CTCFL; ENSG00000124092; CTA
LVLAPSEESEK

SEQ ID NO: 19511 - protein, 9 aa, Homo sapiens
  Table A; Target 19511; HLA-A*24:02; CTCFL; ENSG00000124092; CTA
LYSPQEMEV

SEQ ID NO: 19512 - protein, 9 aa, Homo sapiens
  Table A; Target 19512; HLA-C*04:01; CTCFL; ENSG00000124092; CTA
LYSPQEMEV

SEQ ID NO: 19513 - protein, 9 aa, Homo sapiens
  Table A; Target 19513; HLA-C*14:02; CTCFL; ENSG00000124092; CTA
LYSPQEMEV

SEQ ID NO: 19514 - protein, 9 aa, Homo sapiens
  Table A; Target 19514; HLA-C*16:02; CTCFL; ENSG00000124092; CTA
LYSPQEMEV

SEQ ID NO: 19515 - protein, 9 aa, Homo sapiens
  Table A; Target 19515; HLA-B*35:01; CTCFL; ENSG00000124092; CTA
MAATEISVL

SEQ ID NO: 19516 - protein, 9 aa, Homo sapiens
  Table A; Target 19516; HLA-B*35:03; CTCFL; ENSG00000124092; CTA
MAATEISVL

SEQ ID NO: 19517 - protein, 9 aa, Homo sapiens
  Table A; Target 19517; HLA-B*55:01; CTCFL; ENSG00000124092; CTA
MAATEISVL

SEQ ID NO: 19518 - protein, 9 aa, Homo sapiens
  Table A; Target 19518; HLA-C*02:02; CTCFL; ENSG00000124092; CTA
MAATEISVL

SEQ ID NO: 19519 - protein, 9 aa, Homo sapiens
  Table A; Target 19519; HLA-C*03:03; CTCFL; ENSG00000124092; CTA
MAATEISVL

SEQ ID NO: 19520 - protein, 9 aa, Homo sapiens
  Table A; Target 19520; HLA-C*03:04; CTCFL; ENSG00000124092; CTA
MAATEISVL

SEQ ID NO: 19521 - protein, 9 aa, Homo sapiens
  Table A; Target 19521; HLA-C*05:01; CTCFL; ENSG00000124092; CTA
MAATEISVL

SEQ ID NO: 19522 - protein, 9 aa, Homo sapiens
  Table A; Target 19522; HLA-C*07:06; CTCFL; ENSG00000124092; CTA
MAATEISVL

SEQ ID NO: 19523 - protein, 9 aa, Homo sapiens
  Table A; Target 19523; HLA-C*12:03; CTCFL; ENSG00000124092; CTA
MAATEISVL

SEQ ID NO: 19524 - protein, 9 aa, Homo sapiens
  Table A; Target 19524; HLA-B*07:02; CTCFL; ENSG00000124092; CTA
MAFVTSGEL

SEQ ID NO: 19525 - protein, 9 aa, Homo sapiens
  Table A; Target 19525; HLA-B*15:03; CTCFL; ENSG00000124092; CTA
MAFVTSGEL

SEQ ID NO: 19526 - protein, 9 aa, Homo sapiens
  Table A; Target 19526; HLA-B*27:05; CTCFL; ENSG00000124092; CTA
MAFVTSGEL

SEQ ID NO: 19527 - protein, 9 aa, Homo sapiens
  Table A; Target 19527; HLA-B*35:01; CTCFL; ENSG00000124092; CTA
MAFVTSGEL

SEQ ID NO: 19528 - protein, 9 aa, Homo sapiens
  Table A; Target 19528; HLA-B*35:03; CTCFL; ENSG00000124092; CTA
MAFVTSGEL

SEQ ID NO: 19529 - protein, 9 aa, Homo sapiens
  Table A; Target 19529; HLA-B*39:01; CTCFL; ENSG00000124092; CTA
MAFVTSGEL

SEQ ID NO: 19530 - protein, 9 aa, Homo sapiens
  Table A; Target 19530; HLA-B*40:01; CTCFL; ENSG00000124092; CTA
MAFVTSGEL

SEQ ID NO: 19531 - protein, 9 aa, Homo sapiens
  Table A; Target 19531; HLA-B*46:01; CTCFL; ENSG00000124092; CTA
MAFVTSGEL

SEQ ID NO: 19532 - protein, 9 aa, Homo sapiens
  Table A; Target 19532; HLA-B*51:01; CTCFL; ENSG00000124092; CTA
MAFVTSGEL

SEQ ID NO: 19533 - protein, 9 aa, Homo sapiens
  Table A; Target 19533; HLA-B*54:01; CTCFL; ENSG00000124092; CTA
MAFVTSGEL

SEQ ID NO: 19534 - protein, 9 aa, Homo sapiens
  Table A; Target 19534; HLA-B*55:01; CTCFL; ENSG00000124092; CTA
MAFVTSGEL

SEQ ID NO: 19535 - protein, 9 aa, Homo sapiens
  Table A; Target 19535; HLA-C*01:02; CTCFL; ENSG00000124092; CTA
MAFVTSGEL

SEQ ID NO: 19536 - protein, 9 aa, Homo sapiens
  Table A; Target 19536; HLA-C*02:02; CTCFL; ENSG00000124092; CTA
MAFVTSGEL

SEQ ID NO: 19537 - protein, 9 aa, Homo sapiens
  Table A; Target 19537; HLA-C*03:03; CTCFL; ENSG00000124092; CTA
MAFVTSGEL

SEQ ID NO: 19538 - protein, 9 aa, Homo sapiens
  Table A; Target 19538; HLA-C*03:04; CTCFL; ENSG00000124092; CTA
MAFVTSGEL

SEQ ID NO: 19539 - protein, 9 aa, Homo sapiens
  Table A; Target 19539; HLA-C*05:01; CTCFL; ENSG00000124092; CTA
MAFVTSGEL

SEQ ID NO: 19540 - protein, 9 aa, Homo sapiens
  Table A; Target 19540; HLA-C*07:02; CTCFL; ENSG00000124092; CTA
MAFVTSGEL

SEQ ID NO: 19541 - protein, 9 aa, Homo sapiens
  Table A; Target 19541; HLA-C*12:03; CTCFL; ENSG00000124092; CTA
MAFVTSGEL

SEQ ID NO: 19542 - protein, 9 aa, Homo sapiens
  Table A; Target 19542; HLA-C*14:02; CTCFL; ENSG00000124092; CTA
MAFVTSGEL

SEQ ID NO: 19543 - protein, 9 aa, Homo sapiens
  Table A; Target 19543; HLA-C*16:01; CTCFL; ENSG00000124092; CTA
MAFVTSGEL

SEQ ID NO: 19544 - protein, 9 aa, Homo sapiens
  Table A; Target 19544; HLA-C*16:02; CTCFL; ENSG00000124092; CTA
MAFVTSGEL

SEQ ID NO: 19545 - protein, 9 aa, Homo sapiens
  Table A; Target 19545; HLA-C*16:04; CTCFL; ENSG00000124092; CTA
MAFVTSGEL

SEQ ID NO: 19546 - protein, 10 aa, Homo sapiens
  Table A; Target 19546; HLA-B*51:01; CTCFL; ENSG00000124092; CTA
MAFVTSGELV

SEQ ID NO: 19547 - protein, 11 aa, Homo sapiens
  Table A; Target 19547; HLA-A*33:01; CTCFL; ENSG00000124092; CTA
MAFVTSGELVR

SEQ ID NO: 19548 - protein, 11 aa, Homo sapiens
  Table A; Target 19548; HLA-A*33:03; CTCFL; ENSG00000124092; CTA
MAFVTSGELVR

SEQ ID NO: 19549 - protein, 11 aa, Homo sapiens
  Table A; Target 19549; HLA-A*68:01; CTCFL; ENSG00000124092; CTA
MAFVTSGELVR

SEQ ID NO: 19550 - protein, 11 aa, Homo sapiens
  Table A; Target 19550; HLA-B*54:01; CTCFL; ENSG00000124092; CTA
MAFVTSGELVR

SEQ ID NO: 19551 - protein, 11 aa, Homo sapiens
  Table A; Target 19551; HLA-C*07:06; CTCFL; ENSG00000124092; CTA
MAFVTSGELVR

SEQ ID NO: 19552 - protein, 9 aa, Homo sapiens
  Table A; Target 19552; HLA-B*54:01; CTCFL; ENSG00000124092; CTA
MCKYASVEA

SEQ ID NO: 19553 - protein, 9 aa, Homo sapiens
  Table A; Target 19553; HLA-A*30:01; CTCFL; ENSG00000124092; CTA
MEVLQFHAL

SEQ ID NO: 19554 - protein, 9 aa, Homo sapiens
  Table A; Target 19554; HLA-B*18:01; CTCFL; ENSG00000124092; CTA
MEVLQFHAL

SEQ ID NO: 19555 - protein, 9 aa, Homo sapiens
  Table A; Target 19555; HLA-B*37:01; CTCFL; ENSG00000124092; CTA
MEVLQFHAL

SEQ ID NO: 19556 - protein, 9 aa, Homo sapiens
  Table A; Target 19556; HLA-B*40:01; CTCFL; ENSG00000124092; CTA
MEVLQFHAL

SEQ ID NO: 19557 - protein, 9 aa, Homo sapiens
  Table A; Target 19557; HLA-B*40:02; CTCFL; ENSG00000124092; CTA
MEVLQFHAL

SEQ ID NO: 19558 - protein, 9 aa, Homo sapiens
  Table A; Target 19558; HLA-B*44:02; CTCFL; ENSG00000124092; CTA
MEVLQFHAL

SEQ ID NO: 19559 - protein, 9 aa, Homo sapiens
  Table A; Target 19559; HLA-B*44:03; CTCFL; ENSG00000124092; CTA
MEVLQFHAL

SEQ ID NO: 19560 - protein, 9 aa, Homo sapiens
  Table A; Target 19560; HLA-B*49:01; CTCFL; ENSG00000124092; CTA
MEVLQFHAL

SEQ ID NO: 19561 - protein, 10 aa, Homo sapiens
  Table A; Target 19561; HLA-A*24:02; CTCFL; ENSG00000124092; CTA
MFTSSRMSSF

SEQ ID NO: 19562 - protein, 8 aa, Homo sapiens
  Table A; Target 19562; HLA-C*04:01; CTCFL; ENSG00000124092; CTA
MLLNTMDK

SEQ ID NO: 19563 - protein, 8 aa, Homo sapiens
  Table A; Target 19563; HLA-C*07:01; CTCFL; ENSG00000124092; CTA
MLLNTMDK

SEQ ID NO: 19564 - protein, 9 aa, Homo sapiens
  Table A; Target 19564; HLA-B*27:05; CTCFL; ENSG00000124092; CTA
MVASEDSKL

SEQ ID NO: 19565 - protein, 9 aa, Homo sapiens
  Table A; Target 19565; HLA-B*35:03; CTCFL; ENSG00000124092; CTA
MVASEDSKL

SEQ ID NO: 19566 - protein, 9 aa, Homo sapiens
  Table A; Target 19566; HLA-B*38:01; CTCFL; ENSG00000124092; CTA
MVASEDSKL

SEQ ID NO: 19567 - protein, 9 aa, Homo sapiens
  Table A; Target 19567; HLA-B*55:01; CTCFL; ENSG00000124092; CTA
MVASEDSKL

SEQ ID NO: 19568 - protein, 9 aa, Homo sapiens
  Table A; Target 19568; HLA-B*58:01; CTCFL; ENSG00000124092; CTA
MVASEDSKL

SEQ ID NO: 19569 - protein, 9 aa, Homo sapiens
  Table A; Target 19569; HLA-C*05:01; CTCFL; ENSG00000124092; CTA
MVASEDSKL

SEQ ID NO: 19570 - protein, 11 aa, Homo sapiens
  Table A; Target 19570; HLA-A*26:01; CTCFL; ENSG00000124092; CTA
MVASEDSKLAV

SEQ ID NO: 19571 - protein, 11 aa, Homo sapiens
  Table A; Target 19571; HLA-A*68:02; CTCFL; ENSG00000124092; CTA
MVASEDSKLAV

SEQ ID NO: 19572 - protein, 11 aa, Homo sapiens
  Table A; Target 19572; HLA-A*03:02; CTCFL; ENSG00000124092; CTA
NLHAYSAAELK

SEQ ID NO: 19573 - protein, 9 aa, Homo sapiens
  Table A; Target 19573; HLA-A*30:02; CTCFL; ENSG00000124092; CTA
NTHTGTRPY

SEQ ID NO: 19574 - protein, 9 aa, Homo sapiens
  Table A; Target 19574; HLA-C*16:01; CTCFL; ENSG00000124092; CTA
NTHTGTRPY

SEQ ID NO: 19575 - protein, 11 aa, Homo sapiens
  Table A; Target 19575; HLA-B*27:05; CTCFL; ENSG00000124092; CTA
NVMVASEDSKL

SEQ ID NO: 19576 - protein, 10 aa, Homo sapiens
  Table A; Target 19576; HLA-A*68:01; CTCFL; ENSG00000124092; CTA
PTAGQADAEK

SEQ ID NO: 19577 - protein, 10 aa, Homo sapiens
  Table A; Target 19577; HLA-B*27:02; CTCFL; ENSG00000124092; CTA
PTAGQADAEK

SEQ ID NO: 19578 - protein, 10 aa, Homo sapiens
  Table A; Target 19578; HLA-A*01:01; CTCFL; ENSG00000124092; CTA
QCSYASRDTY

SEQ ID NO: 19579 - protein, 10 aa, Homo sapiens
  Table A; Target 19579; HLA-A*30:02; CTCFL; ENSG00000124092; CTA
QCSYASRDTY

SEQ ID NO: 19580 - protein, 8 aa, Homo sapiens
  Table A; Target 19580; HLA-A*30:01; CTCFL; ENSG00000124092; CTA
QEGVQVVV

SEQ ID NO: 19581 - protein, 8 aa, Homo sapiens
  Table A; Target 19581; HLA-B*40:01; CTCFL; ENSG00000124092; CTA
QEGVQVVV

SEQ ID NO: 19582 - protein, 8 aa, Homo sapiens
  Table A; Target 19582; HLA-B*49:01; CTCFL; ENSG00000124092; CTA
QEGVQVVV

SEQ ID NO: 19583 - protein, 10 aa, Homo sapiens
  Table A; Target 19583; HLA-A*33:03; CTCFL; ENSG00000124092; CTA
QEKNQLLAER

SEQ ID NO: 19584 - protein, 9 aa, Homo sapiens
  Table A; Target 19584; HLA-A*30:01; CTCFL; ENSG00000124092; CTA
QELYSPQEM

SEQ ID NO: 19585 - protein, 9 aa, Homo sapiens
  Table A; Target 19585; HLA-B*18:01; CTCFL; ENSG00000124092; CTA
QELYSPQEM

SEQ ID NO: 19586 - protein, 9 aa, Homo sapiens
  Table A; Target 19586; HLA-B*37:01; CTCFL; ENSG00000124092; CTA
QELYSPQEM

SEQ ID NO: 19587 - protein, 9 aa, Homo sapiens
  Table A; Target 19587; HLA-B*40:01; CTCFL; ENSG00000124092; CTA
QELYSPQEM

SEQ ID NO: 19588 - protein, 9 aa, Homo sapiens
  Table A; Target 19588; HLA-B*44:02; CTCFL; ENSG00000124092; CTA
QELYSPQEM

SEQ ID NO: 19589 - protein, 9 aa, Homo sapiens
  Table A; Target 19589; HLA-B*44:03; CTCFL; ENSG00000124092; CTA
QELYSPQEM

SEQ ID NO: 19590 - protein, 9 aa, Homo sapiens
  Table A; Target 19590; HLA-B*49:01; CTCFL; ENSG00000124092; CTA
QELYSPQEM

SEQ ID NO: 19591 - protein, 8 aa, Homo sapiens
  Table A; Target 19591; HLA-A*30:01; CTCFL; ENSG00000124092; CTA
QEMEVLQF

SEQ ID NO: 19592 - protein, 8 aa, Homo sapiens
  Table A; Target 19592; HLA-B*18:01; CTCFL; ENSG00000124092; CTA
QEMEVLQF

SEQ ID NO: 19593 - protein, 8 aa, Homo sapiens
  Table A; Target 19593; HLA-B*37:01; CTCFL; ENSG00000124092; CTA
QEMEVLQF

SEQ ID NO: 19594 - protein, 8 aa, Homo sapiens
  Table A; Target 19594; HLA-B*44:02; CTCFL; ENSG00000124092; CTA
QEMEVLQF

SEQ ID NO: 19595 - protein, 8 aa, Homo sapiens
  Table A; Target 19595; HLA-B*44:03; CTCFL; ENSG00000124092; CTA
QEMEVLQF

SEQ ID NO: 19596 - protein, 8 aa, Homo sapiens
  Table A; Target 19596; HLA-B*49:01; CTCFL; ENSG00000124092; CTA
QEMEVLQF

SEQ ID NO: 19597 - protein, 9 aa, Homo sapiens
  Table A; Target 19597; HLA-B*44:02; CTCFL; ENSG00000124092; CTA
QEMEVLQFH

SEQ ID NO: 19598 - protein, 9 aa, Homo sapiens
  Table A; Target 19598; HLA-B*44:03; CTCFL; ENSG00000124092; CTA
QEMEVLQFH

SEQ ID NO: 19599 - protein, 11 aa, Homo sapiens
  Table A; Target 19599; HLA-A*30:01; CTCFL; ENSG00000124092; CTA
QEMEVLQFHAL

SEQ ID NO: 19600 - protein, 11 aa, Homo sapiens
  Table A; Target 19600; HLA-B*40:01; CTCFL; ENSG00000124092; CTA
QEMEVLQFHAL

SEQ ID NO: 19601 - protein, 11 aa, Homo sapiens
  Table A; Target 19601; HLA-B*44:02; CTCFL; ENSG00000124092; CTA
QEMEVLQFHAL

SEQ ID NO: 19602 - protein, 11 aa, Homo sapiens
  Table A; Target 19602; HLA-B*44:03; CTCFL; ENSG00000124092; CTA
QEMEVLQFHAL

SEQ ID NO: 19603 - protein, 11 aa, Homo sapiens
  Table A; Target 19603; HLA-B*49:01; CTCFL; ENSG00000124092; CTA
QEMEVLQFHAL

SEQ ID NO: 19604 - protein, 9 aa, Homo sapiens
  Table A; Target 19604; HLA-B*49:01; CTCFL; ENSG00000124092; CTA
QERHMTAHI

SEQ ID NO: 19605 - protein, 9 aa, Homo sapiens
  Table A; Target 19605; HLA-B*56:01; CTCFL; ENSG00000124092; CTA
QPTAGQADA

SEQ ID NO: 19606 - protein, 8 aa, Homo sapiens
  Table A; Target 19606; HLA-B*13:02; CTCFL; ENSG00000124092; CTA
QQCVAISI

SEQ ID NO: 19607 - protein, 9 aa, Homo sapiens
  Table A; Target 19607; HLA-A*30:01; CTCFL; ENSG00000124092; CTA
QQEGVQVVV

SEQ ID NO: 19608 - protein, 9 aa, Homo sapiens
  Table A; Target 19608; HLA-B*13:02; CTCFL; ENSG00000124092; CTA
QQEGVQVVV

SEQ ID NO: 19609 - protein, 9 aa, Homo sapiens
  Table A; Target 19609; HLA-B*27:05; CTCFL; ENSG00000124092; CTA
QQEGVQVVV

SEQ ID NO: 19610 - protein, 9 aa, Homo sapiens
  Table A; Target 19610; HLA-B*38:01; CTCFL; ENSG00000124092; CTA
QQEGVQVVV

SEQ ID NO: 19611 - protein, 9 aa, Homo sapiens
  Table A; Target 19611; HLA-B*39:01; CTCFL; ENSG00000124092; CTA
QQEGVQVVV

SEQ ID NO: 19612 - protein, 9 aa, Homo sapiens
  Table A; Target 19612; HLA-C*05:01; CTCFL; ENSG00000124092; CTA
QQEGVQVVV

SEQ ID NO: 19613 - protein, 9 aa, Homo sapiens
  Table A; Target 19613; HLA-C*07:04; CTCFL; ENSG00000124092; CTA
QQEGVQVVV

SEQ ID NO: 19614 - protein, 10 aa, Homo sapiens
  Table A; Target 19614; HLA-B*38:01; CTCFL; ENSG00000124092; CTA
QQELYSPQEM

SEQ ID NO: 19615 - protein, 10 aa, Homo sapiens
  Table A; Target 19615; HLA-B*39:01; CTCFL; ENSG00000124092; CTA
QQELYSPQEM

SEQ ID NO: 19616 - protein, 8 aa, Homo sapiens
  Table A; Target 19616; HLA-B*13:02; CTCFL; ENSG00000124092; CTA
QQQEGVQV

SEQ ID NO: 19617 - protein, 9 aa, Homo sapiens
  Table A; Target 19617; HLA-A*02:01; CTCFL; ENSG00000124092; CTA
QQQEGVQVV

SEQ ID NO: 19618 - protein, 9 aa, Homo sapiens
  Table A; Target 19618; HLA-A*02:03; CTCFL; ENSG00000124092; CTA
QQQEGVQVV

SEQ ID NO: 19619 - protein, 9 aa, Homo sapiens
  Table A; Target 19619; HLA-B*13:02; CTCFL; ENSG00000124092; CTA
QQQEGVQVV

SEQ ID NO: 19620 - protein, 9 aa, Homo sapiens
  Table A; Target 19620; HLA-B*15:01; CTCFL; ENSG00000124092; CTA
QQQEGVQVV

SEQ ID NO: 19621 - protein, 9 aa, Homo sapiens
  Table A; Target 19621; HLA-B*27:05; CTCFL; ENSG00000124092; CTA
QQQEGVQVV

SEQ ID NO: 19622 - protein, 9 aa, Homo sapiens
  Table A; Target 19622; HLA-B*38:01; CTCFL; ENSG00000124092; CTA
QQQEGVQVV

SEQ ID NO: 19623 - protein, 9 aa, Homo sapiens
  Table A; Target 19623; HLA-B*39:01; CTCFL; ENSG00000124092; CTA
QQQEGVQVV

SEQ ID NO: 19624 - protein, 9 aa, Homo sapiens
  Table A; Target 19624; HLA-C*16:02; CTCFL; ENSG00000124092; CTA
QQQEGVQVV

SEQ ID NO: 19625 - protein, 10 aa, Homo sapiens
  Table A; Target 19625; HLA-A*30:01; CTCFL; ENSG00000124092; CTA
QQQEGVQVVV

SEQ ID NO: 19626 - protein, 10 aa, Homo sapiens
  Table A; Target 19626; HLA-B*13:02; CTCFL; ENSG00000124092; CTA
QQQEGVQVVV

SEQ ID NO: 19627 - protein, 10 aa, Homo sapiens
  Table A; Target 19627; HLA-B*38:01; CTCFL; ENSG00000124092; CTA
QQQEGVQVVV

SEQ ID NO: 19628 - protein, 10 aa, Homo sapiens
  Table A; Target 19628; HLA-B*39:01; CTCFL; ENSG00000124092; CTA
QQQEGVQVVV

SEQ ID NO: 19629 - protein, 9 aa, Homo sapiens
  Table A; Target 19629; HLA-A*03:02; CTCFL; ENSG00000124092; CTA
QTILKEATK

SEQ ID NO: 19630 - protein, 9 aa, Homo sapiens
  Table A; Target 19630; HLA-A*11:01; CTCFL; ENSG00000124092; CTA
QTILKEATK

SEQ ID NO: 19631 - protein, 9 aa, Homo sapiens
  Table A; Target 19631; HLA-A*33:03; CTCFL; ENSG00000124092; CTA
QTILKEATK

SEQ ID NO: 19632 - protein, 9 aa, Homo sapiens
  Table A; Target 19632; HLA-A*68:01; CTCFL; ENSG00000124092; CTA
QTILKEATK

SEQ ID NO: 19633 - protein, 9 aa, Homo sapiens
  Table A; Target 19633; HLA-C*07:06; CTCFL; ENSG00000124092; CTA
QTILKEATK

SEQ ID NO: 19634 - protein, 10 aa, Homo sapiens
  Table A; Target 19634; HLA-A*68:02; CTCFL; ENSG00000124092; CTA
QTVHFTSEAV

SEQ ID NO: 19635 - protein, 11 aa, Homo sapiens
  Table A; Target 19635; HLA-A*31:01; CTCFL; ENSG00000124092; CTA
RQKQLLNAHFR

SEQ ID NO: 19636 - protein, 9 aa, Homo sapiens
  Table A; Target 19636; HLA-A*01:01; CTCFL; ENSG00000124092; CTA
RSDEIVLTV

SEQ ID NO: 19637 - protein, 9 aa, Homo sapiens
  Table A; Target 19637; HLA-A*02:07; CTCFL; ENSG00000124092; CTA
RSDEIVLTV

SEQ ID NO: 19638 - protein, 9 aa, Homo sapiens
  Table A; Target 19638; HLA-B*13:02; CTCFL; ENSG00000124092; CTA
RSDEIVLTV

SEQ ID NO: 19639 - protein, 9 aa, Homo sapiens
  Table A; Target 19639; HLA-C*05:01; CTCFL; ENSG00000124092; CTA
RSDEIVLTV

SEQ ID NO: 19640 - protein, 9 aa, Homo sapiens
  Table A; Target 19640; HLA-B*57:01; CTCFL; ENSG00000124092; CTA
RSHTGERPF

SEQ ID NO: 19641 - protein, 9 aa, Homo sapiens
  Table A; Target 19641; HLA-C*16:01; CTCFL; ENSG00000124092; CTA
RSHTGERPF

SEQ ID NO: 19642 - protein, 10 aa, Homo sapiens
  Table A; Target 19642; HLA-B*58:01; CTCFL; ENSG00000124092; CTA
RVKEEVDEGV

SEQ ID NO: 19643 - protein, 9 aa, Homo sapiens
  Table A; Target 19643; HLA-A*24:02; CTCFL; ENSG00000124092; CTA
RYALIQHQK

SEQ ID NO: 19644 - protein, 9 aa, Homo sapiens
  Table A; Target 19644; HLA-A*31:01; CTCFL; ENSG00000124092; CTA
RYALIQHQK

SEQ ID NO: 19645 - protein, 10 aa, Homo sapiens
  Table A; Target 19645; HLA-A*31:01; CTCFL; ENSG00000124092; CTA
RYCSAVFHER

SEQ ID NO: 19646 - protein, 9 aa, Homo sapiens
  Table A; Target 19646; HLA-A*26:01; CTCFL; ENSG00000124092; CTA
SAAELKCRY

SEQ ID NO: 19647 - protein, 9 aa, Homo sapiens
  Table A; Target 19647; HLA-A*29:02; CTCFL; ENSG00000124092; CTA
SAAELKCRY

SEQ ID NO: 19648 - protein, 9 aa, Homo sapiens
  Table A; Target 19648; HLA-A*30:02; CTCFL; ENSG00000124092; CTA
SAAELKCRY

SEQ ID NO: 19649 - protein, 9 aa, Homo sapiens
  Table A; Target 19649; HLA-A*32:01; CTCFL; ENSG00000124092; CTA
SAAELKCRY

SEQ ID NO: 19650 - protein, 9 aa, Homo sapiens
  Table A; Target 19650; HLA-B*35:01; CTCFL; ENSG00000124092; CTA
SAAELKCRY

SEQ ID NO: 19651 - protein, 9 aa, Homo sapiens
  Table A; Target 19651; HLA-B*58:01; CTCFL; ENSG00000124092; CTA
SAAELKCRY

SEQ ID NO: 19652 - protein, 9 aa, Homo sapiens
  Table A; Target 19652; HLA-C*02:02; CTCFL; ENSG00000124092; CTA
SAAELKCRY

SEQ ID NO: 19653 - protein, 9 aa, Homo sapiens
  Table A; Target 19653; HLA-C*12:03; CTCFL; ENSG00000124092; CTA
SAAELKCRY

SEQ ID NO: 19654 - protein, 9 aa, Homo sapiens
  Table A; Target 19654; HLA-C*16:01; CTCFL; ENSG00000124092; CTA
SAAELKCRY

SEQ ID NO: 19655 - protein, 9 aa, Homo sapiens
  Table A; Target 19655; HLA-C*16:02; CTCFL; ENSG00000124092; CTA
SAAELKCRY

SEQ ID NO: 19656 - protein, 8 aa, Homo sapiens
  Table A; Target 19656; HLA-B*08:01; CTCFL; ENSG00000124092; CTA
SAVFHERY

SEQ ID NO: 19657 - protein, 8 aa, Homo sapiens
  Table A; Target 19657; HLA-C*02:02; CTCFL; ENSG00000124092; CTA
SAVFHERY

SEQ ID NO: 19658 - protein, 8 aa, Homo sapiens
  Table A; Target 19658; HLA-C*07:01; CTCFL; ENSG00000124092; CTA
SAVFHERY

SEQ ID NO: 19659 - protein, 8 aa, Homo sapiens
  Table A; Target 19659; HLA-C*12:03; CTCFL; ENSG00000124092; CTA
SAVFHERY

SEQ ID NO: 19660 - protein, 8 aa, Homo sapiens
  Table A; Target 19660; HLA-C*16:01; CTCFL; ENSG00000124092; CTA
SAVFHERY

SEQ ID NO: 19661 - protein, 8 aa, Homo sapiens
  Table A; Target 19661; HLA-B*37:01; CTCFL; ENSG00000124092; CTA
SDEIVLTV

SEQ ID NO: 19662 - protein, 8 aa, Homo sapiens
  Table A; Target 19662; HLA-B*49:01; CTCFL; ENSG00000124092; CTA
SDEIVLTV

SEQ ID NO: 19663 - protein, 9 aa, Homo sapiens
  Table A; Target 19663; HLA-A*30:01; CTCFL; ENSG00000124092; CTA
SEAVELQDM

SEQ ID NO: 19664 - protein, 9 aa, Homo sapiens
  Table A; Target 19664; HLA-B*37:01; CTCFL; ENSG00000124092; CTA
SEAVELQDM

SEQ ID NO: 19665 - protein, 9 aa, Homo sapiens
  Table A; Target 19665; HLA-B*40:01; CTCFL; ENSG00000124092; CTA
SEAVELQDM

SEQ ID NO: 19666 - protein, 9 aa, Homo sapiens
  Table A; Target 19666; HLA-B*44:02; CTCFL; ENSG00000124092; CTA
SEAVELQDM

SEQ ID NO: 19667 - protein, 9 aa, Homo sapiens
  Table A; Target 19667; HLA-B*44:03; CTCFL; ENSG00000124092; CTA
SEAVELQDM

SEQ ID NO: 19668 - protein, 9 aa, Homo sapiens
  Table A; Target 19668; HLA-B*49:01; CTCFL; ENSG00000124092; CTA
SEAVELQDM

SEQ ID NO: 19669 - protein, 11 aa, Homo sapiens
  Table A; Target 19669; HLA-A*30:01; CTCFL; ENSG00000124092; CTA
SEAVELQDMSL

SEQ ID NO: 19670 - protein, 11 aa, Homo sapiens
  Table A; Target 19670; HLA-B*40:01; CTCFL; ENSG00000124092; CTA
SEAVELQDMSL

SEQ ID NO: 19671 - protein, 8 aa, Homo sapiens
  Table A; Target 19671; HLA-B*37:01; CTCFL; ENSG00000124092; CTA
SEDSKLAV

SEQ ID NO: 19672 - protein, 8 aa, Homo sapiens
  Table A; Target 19672; HLA-B*49:01; CTCFL; ENSG00000124092; CTA
SEDSKLAV

SEQ ID NO: 19673 - protein, 10 aa, Homo sapiens
  Table A; Target 19673; HLA-A*30:01; CTCFL; ENSG00000124092; CTA
SEDSKLAVSL

SEQ ID NO: 19674 - protein, 10 aa, Homo sapiens
  Table A; Target 19674; HLA-B*37:01; CTCFL; ENSG00000124092; CTA
SEDSKLAVSL

SEQ ID NO: 19675 - protein, 10 aa, Homo sapiens
  Table A; Target 19675; HLA-B*38:01; CTCFL; ENSG00000124092; CTA
SEDSKLAVSL

SEQ ID NO: 19676 - protein, 10 aa, Homo sapiens
  Table A; Target 19676; HLA-B*40:02; CTCFL; ENSG00000124092; CTA
SEDSKLAVSL

SEQ ID NO: 19677 - protein, 10 aa, Homo sapiens
  Table A; Target 19677; HLA-B*44:02; CTCFL; ENSG00000124092; CTA
SEDSKLAVSL

SEQ ID NO: 19678 - protein, 10 aa, Homo sapiens
  Table A; Target 19678; HLA-B*44:03; CTCFL; ENSG00000124092; CTA
SEDSKLAVSL

SEQ ID NO: 19679 - protein, 10 aa, Homo sapiens
  Table A; Target 19679; HLA-B*49:01; CTCFL; ENSG00000124092; CTA
SEDSKLAVSL

SEQ ID NO: 19680 - protein, 9 aa, Homo sapiens
  Table A; Target 19680; HLA-A*30:01; CTCFL; ENSG00000124092; CTA
SEESEKYIL

SEQ ID NO: 19681 - protein, 9 aa, Homo sapiens
  Table A; Target 19681; HLA-B*37:01; CTCFL; ENSG00000124092; CTA
SEESEKYIL

SEQ ID NO: 19682 - protein, 9 aa, Homo sapiens
  Table A; Target 19682; HLA-B*38:01; CTCFL; ENSG00000124092; CTA
SEESEKYIL

SEQ ID NO: 19683 - protein, 9 aa, Homo sapiens
  Table A; Target 19683; HLA-B*40:02; CTCFL; ENSG00000124092; CTA
SEESEKYIL

SEQ ID NO: 19684 - protein, 9 aa, Homo sapiens
  Table A; Target 19684; HLA-B*44:02; CTCFL; ENSG00000124092; CTA
SEESEKYIL

SEQ ID NO: 19685 - protein, 9 aa, Homo sapiens
  Table A; Target 19685; HLA-B*44:03; CTCFL; ENSG00000124092; CTA
SEESEKYIL

SEQ ID NO: 19686 - protein, 9 aa, Homo sapiens
  Table A; Target 19686; HLA-B*49:01; CTCFL; ENSG00000124092; CTA
SEESEKYIL

SEQ ID NO: 19687 - protein, 11 aa, Homo sapiens
  Table A; Target 19687; HLA-A*30:01; CTCFL; ENSG00000124092; CTA
SEESEKYILTL

SEQ ID NO: 19688 - protein, 11 aa, Homo sapiens
  Table A; Target 19688; HLA-B*40:01; CTCFL; ENSG00000124092; CTA
SEESEKYILTL

SEQ ID NO: 19689 - protein, 9 aa, Homo sapiens
  Table A; Target 19689; HLA-B*37:01; CTCFL; ENSG00000124092; CTA
SEKPHLCHL

SEQ ID NO: 19690 - protein, 9 aa, Homo sapiens
  Table A; Target 19690; HLA-B*40:02; CTCFL; ENSG00000124092; CTA
SEKPHLCHL

SEQ ID NO: 19691 - protein, 8 aa, Homo sapiens
  Table A; Target 19691; HLA-A*30:01; CTCFL; ENSG00000124092; CTA
SEKYILTL

SEQ ID NO: 19692 - protein, 8 aa, Homo sapiens
  Table A; Target 19692; HLA-B*18:01; CTCFL; ENSG00000124092; CTA
SEKYILTL

SEQ ID NO: 19693 - protein, 8 aa, Homo sapiens
  Table A; Target 19693; HLA-B*37:01; CTCFL; ENSG00000124092; CTA
SEKYILTL

SEQ ID NO: 19694 - protein, 8 aa, Homo sapiens
  Table A; Target 19694; HLA-B*40:02; CTCFL; ENSG00000124092; CTA
SEKYILTL

SEQ ID NO: 19695 - protein, 11 aa, Homo sapiens
  Table A; Target 19695; HLA-B*37:01; CTCFL; ENSG00000124092; CTA
SELEAERTSGA

SEQ ID NO: 19696 - protein, 10 aa, Homo sapiens
  Table A; Target 19696; HLA-B*44:02; CTCFL; ENSG00000124092; CTA
SEQFTKIKEL

SEQ ID NO: 19697 - protein, 10 aa, Homo sapiens
  Table A; Target 19697; HLA-B*44:03; CTCFL; ENSG00000124092; CTA
SEQFTKIKEL

SEQ ID NO: 19698 - protein, 9 aa, Homo sapiens
  Table A; Target 19698; HLA-B*35:03; CTCFL; ENSG00000124092; CTA
SGAFQDSVL

SEQ ID NO: 19699 - protein, 9 aa, Homo sapiens
  Table A; Target 19699; HLA-C*05:01; CTCFL; ENSG00000124092; CTA
SGDERSDEI

SEQ ID NO: 19700 - protein, 9 aa, Homo sapiens
  Table A; Target 19700; HLA-C*12:03; CTCFL; ENSG00000124092; CTA
SGTMKIHIL

SEQ ID NO: 19701 - protein, 9 aa, Homo sapiens
  Table A; Target 19701; HLA-C*16:01; CTCFL; ENSG00000124092; CTA
SGTMKIHIL

SEQ ID NO: 19702 - protein, 9 aa, Homo sapiens
  Table A; Target 19702; HLA-C*16:02; CTCFL; ENSG00000124092; CTA
SGTMKIHIL

SEQ ID NO: 19703 - protein, 8 aa, Homo sapiens
  Table A; Target 19703; HLA-A*02:03; CTCFL; ENSG00000124092; CTA
SLAETTGL

SEQ ID NO: 19704 - protein, 9 aa, Homo sapiens
  Table A; Target 19704; HLA-A*02:01; CTCFL; ENSG00000124092; CTA
SLAETTGLI

SEQ ID NO: 19705 - protein, 9 aa, Homo sapiens
  Table A; Target 19705; HLA-A*02:03; CTCFL; ENSG00000124092; CTA
SLAETTGLI

SEQ ID NO: 19706 - protein, 9 aa, Homo sapiens
  Table A; Target 19706; HLA-B*13:02; CTCFL; ENSG00000124092; CTA
SLAETTGLI

SEQ ID NO: 19707 - protein, 10 aa, Homo sapiens
  Table A; Target 19707; HLA-A*03:01; CTCFL; ENSG00000124092; CTA
SLAETTGLIK

SEQ ID NO: 19708 - protein, 10 aa, Homo sapiens
  Table A; Target 19708; HLA-A*03:02; CTCFL; ENSG00000124092; CTA
SLAETTGLIK

SEQ ID NO: 19709 - protein, 10 aa, Homo sapiens
  Table A; Target 19709; HLA-A*11:01; CTCFL; ENSG00000124092; CTA
SLAETTGLIK

SEQ ID NO: 19710 - protein, 10 aa, Homo sapiens
  Table A; Target 19710; HLA-A*68:01; CTCFL; ENSG00000124092; CTA
SLAETTGLIK

SEQ ID NO: 19711 - protein, 10 aa, Homo sapiens
  Table A; Target 19711; HLA-B*27:02; CTCFL; ENSG00000124092; CTA
SLAETTGLIK

SEQ ID NO: 19712 - protein, 11 aa, Homo sapiens
  Table A; Target 19712; HLA-A*02:01; CTCFL; ENSG00000124092; CTA
SLAETTGLIKL

SEQ ID NO: 19713 - protein, 11 aa, Homo sapiens
  Table A; Target 19713; HLA-A*02:03; CTCFL; ENSG00000124092; CTA
SLAETTGLIKL

SEQ ID NO: 19714 - protein, 11 aa, Homo sapiens
  Table A; Target 19714; HLA-A*02:04; CTCFL; ENSG00000124092; CTA
SLAETTGLIKL

SEQ ID NO: 19715 - protein, 11 aa, Homo sapiens
  Table A; Target 19715; HLA-A*02:07; CTCFL; ENSG00000124092; CTA
SLAETTGLIKL

SEQ ID NO: 19716 - protein, 11 aa, Homo sapiens
  Table A; Target 19716; HLA-A*03:01; CTCFL; ENSG00000124092; CTA
SLAETTGLIKL

SEQ ID NO: 19717 - protein, 11 aa, Homo sapiens
  Table A; Target 19717; HLA-A*03:02; CTCFL; ENSG00000124092; CTA
SLAETTGLIKL

SEQ ID NO: 19718 - protein, 11 aa, Homo sapiens
  Table A; Target 19718; HLA-B*55:01; CTCFL; ENSG00000124092; CTA
SLAETTGLIKL

SEQ ID NO: 19719 - protein, 11 aa, Homo sapiens
  Table A; Target 19719; HLA-A*02:01; CTCFL; ENSG00000124092; CTA
SLLSIQQQEGV

SEQ ID NO: 19720 - protein, 11 aa, Homo sapiens
  Table A; Target 19720; HLA-A*02:04; CTCFL; ENSG00000124092; CTA
SLLSIQQQEGV

SEQ ID NO: 19721 - protein, 11 aa, Homo sapiens
  Table A; Target 19721; HLA-A*02:07; CTCFL; ENSG00000124092; CTA
SLLSIQQQEGV

SEQ ID NO: 19722 - protein, 8 aa, Homo sapiens
  Table A; Target 19722; HLA-B*07:02; CTCFL; ENSG00000124092; CTA
SPQEMEVL

SEQ ID NO: 19723 - protein, 8 aa, Homo sapiens
  Table A; Target 19723; HLA-B*35:03; CTCFL; ENSG00000124092; CTA
SPQEMEVL

SEQ ID NO: 19724 - protein, 8 aa, Homo sapiens
  Table A; Target 19724; HLA-C*07:02; CTCFL; ENSG00000124092; CTA
SPQEMEVL

SEQ ID NO: 19725 - protein, 10 aa, Homo sapiens
  Table A; Target 19725; HLA-B*35:01; CTCFL; ENSG00000124092; CTA
SPQEMEVLQF

SEQ ID NO: 19726 - protein, 9 aa, Homo sapiens
  Table A; Target 19726; HLA-A*68:01; CTCFL; ENSG00000124092; CTA
SPSELEAER

SEQ ID NO: 19727 - protein, 9 aa, Homo sapiens
  Table A; Target 19727; HLA-C*07:06; CTCFL; ENSG00000124092; CTA
SPSELEAER

SEQ ID NO: 19728 - protein, 8 aa, Homo sapiens
  Table A; Target 19728; HLA-B*27:05; CTCFL; ENSG00000124092; CTA
SRMSSFNR

SEQ ID NO: 19729 - protein, 9 aa, Homo sapiens
  Table A; Target 19729; HLA-A*31:01; CTCFL; ENSG00000124092; CTA
SSRMSSFNR

SEQ ID NO: 19730 - protein, 9 aa, Homo sapiens
  Table A; Target 19730; HLA-A*33:01; CTCFL; ENSG00000124092; CTA
SSRMSSFNR

SEQ ID NO: 19731 - protein, 9 aa, Homo sapiens
  Table A; Target 19731; HLA-A*33:03; CTCFL; ENSG00000124092; CTA
SSRMSSFNR

SEQ ID NO: 19732 - protein, 8 aa, Homo sapiens
  Table A; Target 19732; HLA-B*58:01; CTCFL; ENSG00000124092; CTA
STTKGEQF

SEQ ID NO: 19733 - protein, 8 aa, Homo sapiens
  Table A; Target 19733; HLA-A*03:02; CTCFL; ENSG00000124092; CTA
SVEASKLK

SEQ ID NO: 19734 - protein, 9 aa, Homo sapiens
  Table A; Target 19734; HLA-C*07:06; CTCFL; ENSG00000124092; CTA
SVEASKLKR

SEQ ID NO: 19735 - protein, 9 aa, Homo sapiens
  Table A; Target 19735; HLA-A*02:01; CTCFL; ENSG00000124092; CTA
SVLEEEVEL

SEQ ID NO: 19736 - protein, 9 aa, Homo sapiens
  Table A; Target 19736; HLA-A*02:07; CTCFL; ENSG00000124092; CTA
SVLEEEVEL

SEQ ID NO: 19737 - protein, 9 aa, Homo sapiens
  Table A; Target 19737; HLA-B*15:01; CTCFL; ENSG00000124092; CTA
SVLEEEVEL

SEQ ID NO: 19738 - protein, 9 aa, Homo sapiens
  Table A; Target 19738; HLA-B*35:03; CTCFL; ENSG00000124092; CTA
SVLEEEVEL

SEQ ID NO: 19739 - protein, 9 aa, Homo sapiens
  Table A; Target 19739; HLA-B*38:01; CTCFL; ENSG00000124092; CTA
SVLEEEVEL

SEQ ID NO: 19740 - protein, 9 aa, Homo sapiens
  Table A; Target 19740; HLA-B*39:01; CTCFL; ENSG00000124092; CTA
SVLEEEVEL

SEQ ID NO: 19741 - protein, 9 aa, Homo sapiens
  Table A; Target 19741; HLA-B*40:01; CTCFL; ENSG00000124092; CTA
SVLEEEVEL

SEQ ID NO: 19742 - protein, 9 aa, Homo sapiens
  Table A; Target 19742; HLA-B*55:01; CTCFL; ENSG00000124092; CTA
SVLEEEVEL

SEQ ID NO: 19743 - protein, 9 aa, Homo sapiens
  Table A; Target 19743; HLA-C*03:03; CTCFL; ENSG00000124092; CTA
SVLEEEVEL

SEQ ID NO: 19744 - protein, 9 aa, Homo sapiens
  Table A; Target 19744; HLA-C*05:01; CTCFL; ENSG00000124092; CTA
SVLEEEVEL

SEQ ID NO: 19745 - protein, 9 aa, Homo sapiens
  Table A; Target 19745; HLA-A*03:01; CTCFL; ENSG00000124092; CTA
SVLSEQFTK

SEQ ID NO: 19746 - protein, 9 aa, Homo sapiens
  Table A; Target 19746; HLA-A*03:02; CTCFL; ENSG00000124092; CTA
SVLSEQFTK

SEQ ID NO: 19747 - protein, 9 aa, Homo sapiens
  Table A; Target 19747; HLA-C*07:06; CTCFL; ENSG00000124092; CTA
SVLSEQFTK

SEQ ID NO: 19748 - protein, 10 aa, Homo sapiens
  Table A; Target 19748; HLA-A*02:04; CTCFL; ENSG00000124092; CTA
SVLSEQFTKI

SEQ ID NO: 19749 - protein, 10 aa, Homo sapiens
  Table A; Target 19749; HLA-A*25:01; CTCFL; ENSG00000124092; CTA
SVLSEQFTKI

SEQ ID NO: 19750 - protein, 10 aa, Homo sapiens
  Table A; Target 19750; HLA-A*26:01; CTCFL; ENSG00000124092; CTA
SVLSEQFTKI

SEQ ID NO: 19751 - protein, 10 aa, Homo sapiens
  Table A; Target 19751; HLA-A*68:02; CTCFL; ENSG00000124092; CTA
SVLSEQFTKI

SEQ ID NO: 19752 - protein, 10 aa, Homo sapiens
  Table A; Target 19752; HLA-B*13:02; CTCFL; ENSG00000124092; CTA
SVLSEQFTKI

SEQ ID NO: 19753 - protein, 11 aa, Homo sapiens
  Table A; Target 19753; HLA-A*11:01; CTCFL; ENSG00000124092; CTA
SVLSEQFTKIK

SEQ ID NO: 19754 - protein, 8 aa, Homo sapiens
  Table A; Target 19754; HLA-A*30:02; CTCFL; ENSG00000124092; CTA
SYASRDTY

SEQ ID NO: 19755 - protein, 8 aa, Homo sapiens
  Table A; Target 19755; HLA-A*32:01; CTCFL; ENSG00000124092; CTA
SYASRDTY

SEQ ID NO: 19756 - protein, 8 aa, Homo sapiens
  Table A; Target 19756; HLA-C*14:02; CTCFL; ENSG00000124092; CTA
SYASRDTY

SEQ ID NO: 19757 - protein, 8 aa, Homo sapiens
  Table A; Target 19757; HLA-C*16:01; CTCFL; ENSG00000124092; CTA
SYASRDTY

SEQ ID NO: 19758 - protein, 10 aa, Homo sapiens
  Table A; Target 19758; HLA-A*24:02; CTCFL; ENSG00000124092; CTA
SYASRDTYKL

SEQ ID NO: 19759 - protein, 9 aa, Homo sapiens
  Table A; Target 19759; HLA-C*07:06; CTCFL; ENSG00000124092; CTA
TAGQADAEK

SEQ ID NO: 19760 - protein, 8 aa, Homo sapiens
  Table A; Target 19760; HLA-B*08:01; CTCFL; ENSG00000124092; CTA
TARVKEEV

SEQ ID NO: 19761 - protein, 9 aa, Homo sapiens
  Table A; Target 19761; HLA-B*49:01; CTCFL; ENSG00000124092; CTA
TEISVLSEQ

SEQ ID NO: 19762 - protein, 10 aa, Homo sapiens
  Table A; Target 19762; HLA-A*30:01; CTCFL; ENSG00000124092; CTA
TEISVLSEQF

SEQ ID NO: 19763 - protein, 10 aa, Homo sapiens
  Table A; Target 19763; HLA-B*18:01; CTCFL; ENSG00000124092; CTA
TEISVLSEQF

SEQ ID NO: 19764 - protein, 10 aa, Homo sapiens
  Table A; Target 19764; HLA-B*27:02; CTCFL; ENSG00000124092; CTA
TEISVLSEQF

SEQ ID NO: 19765 - protein, 10 aa, Homo sapiens
  Table A; Target 19765; HLA-B*38:01; CTCFL; ENSG00000124092; CTA
TEISVLSEQF

SEQ ID NO: 19766 - protein, 10 aa, Homo sapiens
  Table A; Target 19766; HLA-B*40:01; CTCFL; ENSG00000124092; CTA
TEISVLSEQF

SEQ ID NO: 19767 - protein, 10 aa, Homo sapiens
  Table A; Target 19767; HLA-B*44:02; CTCFL; ENSG00000124092; CTA
TEISVLSEQF

SEQ ID NO: 19768 - protein, 10 aa, Homo sapiens
  Table A; Target 19768; HLA-B*49:01; CTCFL; ENSG00000124092; CTA
TEISVLSEQF

SEQ ID NO: 19769 - protein, 10 aa, Homo sapiens
  Table A; Target 19769; HLA-C*16:04; CTCFL; ENSG00000124092; CTA
TEISVLSEQF

SEQ ID NO: 19770 - protein, 8 aa, Homo sapiens
  Table A; Target 19770; HLA-A*23:01; CTCFL; ENSG00000124092; CTA
TFRTVTLL

SEQ ID NO: 19771 - protein, 9 aa, Homo sapiens
  Table A; Target 19771; HLA-A*31:01; CTCFL; ENSG00000124092; CTA
TFRTVTLLR

SEQ ID NO: 19772 - protein, 9 aa, Homo sapiens
  Table A; Target 19772; HLA-A*33:03; CTCFL; ENSG00000124092; CTA
TFRTVTLLR

SEQ ID NO: 19773 - protein, 9 aa, Homo sapiens
  Table A; Target 19773; HLA-C*05:01; CTCFL; ENSG00000124092; CTA
TGEKPFTCL

SEQ ID NO: 19774 - protein, 9 aa, Homo sapiens
  Table A; Target 19774; HLA-B*38:01; CTCFL; ENSG00000124092; CTA
THTSEKPHL

SEQ ID NO: 19775 - protein, 9 aa, Homo sapiens
  Table A; Target 19775; HLA-B*39:01; CTCFL; ENSG00000124092; CTA
THTSEKPHL

SEQ ID NO: 19776 - protein, 9 aa, Homo sapiens
  Table A; Target 19776; HLA-B*08:01; CTCFL; ENSG00000124092; CTA
TIIARKSDL

SEQ ID NO: 19777 - protein, 9 aa, Homo sapiens
  Table A; Target 19777; HLA-A*03:01; CTCFL; ENSG00000124092; CTA
TMKIHILQK

SEQ ID NO: 19778 - protein, 9 aa, Homo sapiens
  Table A; Target 19778; HLA-A*31:01; CTCFL; ENSG00000124092; CTA
TMKIHILQK

SEQ ID NO: 19779 - protein, 8 aa, Homo sapiens
  Table A; Target 19779; HLA-A*30:01; CTCFL; ENSG00000124092; CTA
TQSGTMKI

SEQ ID NO: 19780 - protein, 8 aa, Homo sapiens
  Table A; Target 19780; HLA-B*13:02; CTCFL; ENSG00000124092; CTA
TQSGTMKI

SEQ ID NO: 19781 - protein, 8 aa, Homo sapiens
  Table A; Target 19781; HLA-B*38:01; CTCFL; ENSG00000124092; CTA
TQSGTMKI

SEQ ID NO: 19782 - protein, 8 aa, Homo sapiens
  Table A; Target 19782; HLA-C*06:02; CTCFL; ENSG00000124092; CTA
TQSGTMKI

SEQ ID NO: 19783 - protein, 10 aa, Homo sapiens
  Table A; Target 19783; HLA-B*13:02; CTCFL; ENSG00000124092; CTA
TQSGTMKIHI

SEQ ID NO: 19784 - protein, 10 aa, Homo sapiens
  Table A; Target 19784; HLA-B*38:01; CTCFL; ENSG00000124092; CTA
TQSGTMKIHI

SEQ ID NO: 19785 - protein, 9 aa, Homo sapiens
  Table A; Target 19785; HLA-B*27:05; CTCFL; ENSG00000124092; CTA
TRFTQSGTM

SEQ ID NO: 19786 - protein, 9 aa, Homo sapiens
  Table A; Target 19786; HLA-B*39:01; CTCFL; ENSG00000124092; CTA
TRFTQSGTM

SEQ ID NO: 19787 - protein, 9 aa, Homo sapiens
  Table A; Target 19787; HLA-C*06:02; CTCFL; ENSG00000124092; CTA
TRFTQSGTM

SEQ ID NO: 19788 - protein, 9 aa, Homo sapiens
  Table A; Target 19788; HLA-C*16:04; CTCFL; ENSG00000124092; CTA
TRFTQSGTM

SEQ ID NO: 19789 - protein, 10 aa, Homo sapiens
  Table A; Target 19789; HLA-B*27:05; CTCFL; ENSG00000124092; CTA
TRFTQSGTMK

SEQ ID NO: 19790 - protein, 9 aa, Homo sapiens
  Table A; Target 19790; HLA-A*31:01; CTCFL; ENSG00000124092; CTA
TSGELVRHR

SEQ ID NO: 19791 - protein, 9 aa, Homo sapiens
  Table A; Target 19791; HLA-A*33:01; CTCFL; ENSG00000124092; CTA
TSGELVRHR

SEQ ID NO: 19792 - protein, 9 aa, Homo sapiens
  Table A; Target 19792; HLA-A*33:03; CTCFL; ENSG00000124092; CTA
TSGELVRHR

SEQ ID NO: 19793 - protein, 9 aa, Homo sapiens
  Table A; Target 19793; HLA-A*68:01; CTCFL; ENSG00000124092; CTA
TSGELVRHR

SEQ ID NO: 19794 - protein, 9 aa, Homo sapiens
  Table A; Target 19794; HLA-C*07:06; CTCFL; ENSG00000124092; CTA
TSGELVRHR

SEQ ID NO: 19795 - protein, 8 aa, Homo sapiens
  Table A; Target 19795; HLA-B*37:01; CTCFL; ENSG00000124092; CTA
TSSRMSSF

SEQ ID NO: 19796 - protein, 8 aa, Homo sapiens
  Table A; Target 19796; HLA-B*58:01; CTCFL; ENSG00000124092; CTA
TSSRMSSF

SEQ ID NO: 19797 - protein, 9 aa, Homo sapiens
  Table A; Target 19797; HLA-A*68:02; CTCFL; ENSG00000124092; CTA
TTARVKEEV

SEQ ID NO: 19798 - protein, 9 aa, Homo sapiens
  Table A; Target 19798; HLA-B*13:02; CTCFL; ENSG00000124092; CTA
TVHFTSEAV

SEQ ID NO: 19799 - protein, 9 aa, Homo sapiens
  Table A; Target 19799; HLA-A*02:07; CTCFL; ENSG00000124092; CTA
VAISIQQEL

SEQ ID NO: 19800 - protein, 9 aa, Homo sapiens
  Table A; Target 19800; HLA-A*23:01; CTCFL; ENSG00000124092; CTA
VAISIQQEL

SEQ ID NO: 19801 - protein, 9 aa, Homo sapiens
  Table A; Target 19801; HLA-A*24:02; CTCFL; ENSG00000124092; CTA
VAISIQQEL

SEQ ID NO: 19802 - protein, 9 aa, Homo sapiens
  Table A; Target 19802; HLA-A*30:01; CTCFL; ENSG00000124092; CTA
VAISIQQEL

SEQ ID NO: 19803 - protein, 9 aa, Homo sapiens
  Table A; Target 19803; HLA-A*32:01; CTCFL; ENSG00000124092; CTA
VAISIQQEL

SEQ ID NO: 19804 - protein, 9 aa, Homo sapiens
  Table A; Target 19804; HLA-A*68:02; CTCFL; ENSG00000124092; CTA
VAISIQQEL

SEQ ID NO: 19805 - protein, 9 aa, Homo sapiens
  Table A; Target 19805; HLA-B*07:02; CTCFL; ENSG00000124092; CTA
VAISIQQEL

SEQ ID NO: 19806 - protein, 9 aa, Homo sapiens
  Table A; Target 19806; HLA-B*13:02; CTCFL; ENSG00000124092; CTA
VAISIQQEL

SEQ ID NO: 19807 - protein, 9 aa, Homo sapiens
  Table A; Target 19807; HLA-B*15:01; CTCFL; ENSG00000124092; CTA
VAISIQQEL

SEQ ID NO: 19808 - protein, 9 aa, Homo sapiens
  Table A; Target 19808; HLA-B*15:03; CTCFL; ENSG00000124092; CTA
VAISIQQEL

SEQ ID NO: 19809 - protein, 9 aa, Homo sapiens
  Table A; Target 19809; HLA-B*27:02; CTCFL; ENSG00000124092; CTA
VAISIQQEL

SEQ ID NO: 19810 - protein, 9 aa, Homo sapiens
  Table A; Target 19810; HLA-B*27:05; CTCFL; ENSG00000124092; CTA
VAISIQQEL

SEQ ID NO: 19811 - protein, 9 aa, Homo sapiens
  Table A; Target 19811; HLA-B*35:01; CTCFL; ENSG00000124092; CTA
VAISIQQEL

SEQ ID NO: 19812 - protein, 9 aa, Homo sapiens
  Table A; Target 19812; HLA-B*35:03; CTCFL; ENSG00000124092; CTA
VAISIQQEL

SEQ ID NO: 19813 - protein, 9 aa, Homo sapiens
  Table A; Target 19813; HLA-B*38:01; CTCFL; ENSG00000124092; CTA
VAISIQQEL

SEQ ID NO: 19814 - protein, 9 aa, Homo sapiens
  Table A; Target 19814; HLA-B*39:01; CTCFL; ENSG00000124092; CTA
VAISIQQEL

SEQ ID NO: 19815 - protein, 9 aa, Homo sapiens
  Table A; Target 19815; HLA-B*40:01; CTCFL; ENSG00000124092; CTA
VAISIQQEL

SEQ ID NO: 19816 - protein, 9 aa, Homo sapiens
  Table A; Target 19816; HLA-B*46:01; CTCFL; ENSG00000124092; CTA
VAISIQQEL

SEQ ID NO: 19817 - protein, 9 aa, Homo sapiens
  Table A; Target 19817; HLA-B*51:01; CTCFL; ENSG00000124092; CTA
VAISIQQEL

SEQ ID NO: 19818 - protein, 9 aa, Homo sapiens
  Table A; Target 19818; HLA-B*57:01; CTCFL; ENSG00000124092; CTA
VAISIQQEL

SEQ ID NO: 19819 - protein, 9 aa, Homo sapiens
  Table A; Target 19819; HLA-B*58:01; CTCFL; ENSG00000124092; CTA
VAISIQQEL

SEQ ID NO: 19820 - protein, 9 aa, Homo sapiens
  Table A; Target 19820; HLA-C*01:02; CTCFL; ENSG00000124092; CTA
VAISIQQEL

SEQ ID NO: 19821 - protein, 9 aa, Homo sapiens
  Table A; Target 19821; HLA-C*02:02; CTCFL; ENSG00000124092; CTA
VAISIQQEL

SEQ ID NO: 19822 - protein, 9 aa, Homo sapiens
  Table A; Target 19822; HLA-C*03:03; CTCFL; ENSG00000124092; CTA
VAISIQQEL

SEQ ID NO: 19823 - protein, 9 aa, Homo sapiens
  Table A; Target 19823; HLA-C*05:01; CTCFL; ENSG00000124092; CTA
VAISIQQEL

SEQ ID NO: 19824 - protein, 9 aa, Homo sapiens
  Table A; Target 19824; HLA-C*07:02; CTCFL; ENSG00000124092; CTA
VAISIQQEL

SEQ ID NO: 19825 - protein, 9 aa, Homo sapiens
  Table A; Target 19825; HLA-C*07:04; CTCFL; ENSG00000124092; CTA
VAISIQQEL

SEQ ID NO: 19826 - protein, 9 aa, Homo sapiens
  Table A; Target 19826; HLA-C*07:06; CTCFL; ENSG00000124092; CTA
VAISIQQEL

SEQ ID NO: 19827 - protein, 9 aa, Homo sapiens
  Table A; Target 19827; HLA-C*12:03; CTCFL; ENSG00000124092; CTA
VAISIQQEL

SEQ ID NO: 19828 - protein, 9 aa, Homo sapiens
  Table A; Target 19828; HLA-C*14:02; CTCFL; ENSG00000124092; CTA
VAISIQQEL

SEQ ID NO: 19829 - protein, 9 aa, Homo sapiens
  Table A; Target 19829; HLA-C*16:01; CTCFL; ENSG00000124092; CTA
VAISIQQEL

SEQ ID NO: 19830 - protein, 9 aa, Homo sapiens
  Table A; Target 19830; HLA-C*16:02; CTCFL; ENSG00000124092; CTA
VAISIQQEL

SEQ ID NO: 19831 - protein, 9 aa, Homo sapiens
  Table A; Target 19831; HLA-C*16:04; CTCFL; ENSG00000124092; CTA
VAISIQQEL

SEQ ID NO: 19832 - protein, 10 aa, Homo sapiens
  Table A; Target 19832; HLA-A*01:01; CTCFL; ENSG00000124092; CTA
VAISIQQELY

SEQ ID NO: 19833 - protein, 10 aa, Homo sapiens
  Table A; Target 19833; HLA-A*23:01; CTCFL; ENSG00000124092; CTA
VAISIQQELY

SEQ ID NO: 19834 - protein, 10 aa, Homo sapiens
  Table A; Target 19834; HLA-A*25:01; CTCFL; ENSG00000124092; CTA
VAISIQQELY

SEQ ID NO: 19835 - protein, 10 aa, Homo sapiens
  Table A; Target 19835; HLA-A*26:01; CTCFL; ENSG00000124092; CTA
VAISIQQELY

SEQ ID NO: 19836 - protein, 10 aa, Homo sapiens
  Table A; Target 19836; HLA-A*29:02; CTCFL; ENSG00000124092; CTA
VAISIQQELY

SEQ ID NO: 19837 - protein, 10 aa, Homo sapiens
  Table A; Target 19837; HLA-A*30:02; CTCFL; ENSG00000124092; CTA
VAISIQQELY

SEQ ID NO: 19838 - protein, 10 aa, Homo sapiens
  Table A; Target 19838; HLA-B*15:01; CTCFL; ENSG00000124092; CTA
VAISIQQELY

SEQ ID NO: 19839 - protein, 10 aa, Homo sapiens
  Table A; Target 19839; HLA-B*15:03; CTCFL; ENSG00000124092; CTA
VAISIQQELY

SEQ ID NO: 19840 - protein, 10 aa, Homo sapiens
  Table A; Target 19840; HLA-B*35:01; CTCFL; ENSG00000124092; CTA
VAISIQQELY

SEQ ID NO: 19841 - protein, 10 aa, Homo sapiens
  Table A; Target 19841; HLA-B*46:01; CTCFL; ENSG00000124092; CTA
VAISIQQELY

SEQ ID NO: 19842 - protein, 10 aa, Homo sapiens
  Table A; Target 19842; HLA-B*57:01; CTCFL; ENSG00000124092; CTA
VAISIQQELY

SEQ ID NO: 19843 - protein, 10 aa, Homo sapiens
  Table A; Target 19843; HLA-B*58:01; CTCFL; ENSG00000124092; CTA
VAISIQQELY

SEQ ID NO: 19844 - protein, 10 aa, Homo sapiens
  Table A; Target 19844; HLA-C*02:02; CTCFL; ENSG00000124092; CTA
VAISIQQELY

SEQ ID NO: 19845 - protein, 10 aa, Homo sapiens
  Table A; Target 19845; HLA-C*07:06; CTCFL; ENSG00000124092; CTA
VAISIQQELY

SEQ ID NO: 19846 - protein, 10 aa, Homo sapiens
  Table A; Target 19846; HLA-C*16:02; CTCFL; ENSG00000124092; CTA
VAISIQQELY

SEQ ID NO: 19847 - protein, 10 aa, Homo sapiens
  Table A; Target 19847; HLA-C*16:04; CTCFL; ENSG00000124092; CTA
VAISIQQELY

SEQ ID NO: 19848 - protein, 8 aa, Homo sapiens
  Table A; Target 19848; HLA-C*03:03; CTCFL; ENSG00000124092; CTA
VASEDSKL

SEQ ID NO: 19849 - protein, 8 aa, Homo sapiens
  Table A; Target 19849; HLA-C*03:04; CTCFL; ENSG00000124092; CTA
VASEDSKL

SEQ ID NO: 19850 - protein, 8 aa, Homo sapiens
  Table A; Target 19850; HLA-C*05:01; CTCFL; ENSG00000124092; CTA
VASEDSKL

SEQ ID NO: 19851 - protein, 10 aa, Homo sapiens
  Table A; Target 19851; HLA-C*02:02; CTCFL; ENSG00000124092; CTA
VASEDSKLAV

SEQ ID NO: 19852 - protein, 10 aa, Homo sapiens
  Table A; Target 19852; HLA-C*03:03; CTCFL; ENSG00000124092; CTA
VASEDSKLAV

SEQ ID NO: 19853 - protein, 10 aa, Homo sapiens
  Table A; Target 19853; HLA-C*03:04; CTCFL; ENSG00000124092; CTA
VASEDSKLAV

SEQ ID NO: 19854 - protein, 10 aa, Homo sapiens
  Table A; Target 19854; HLA-C*16:02; CTCFL; ENSG00000124092; CTA
VASEDSKLAV

SEQ ID NO: 19855 - protein, 9 aa, Homo sapiens
  Table A; Target 19855; HLA-A*30:01; CTCFL; ENSG00000124092; CTA
VDEGVTCEM

SEQ ID NO: 19856 - protein, 9 aa, Homo sapiens
  Table A; Target 19856; HLA-B*37:01; CTCFL; ENSG00000124092; CTA
VDEGVTCEM

SEQ ID NO: 19857 - protein, 9 aa, Homo sapiens
  Table A; Target 19857; HLA-B*39:01; CTCFL; ENSG00000124092; CTA
VDEGVTCEM

SEQ ID NO: 19858 - protein, 9 aa, Homo sapiens
  Table A; Target 19858; HLA-A*30:01; CTCFL; ENSG00000124092; CTA
VELQDMSLL

SEQ ID NO: 19859 - protein, 9 aa, Homo sapiens
  Table A; Target 19859; HLA-B*37:01; CTCFL; ENSG00000124092; CTA
VELQDMSLL

SEQ ID NO: 19860 - protein, 9 aa, Homo sapiens
  Table A; Target 19860; HLA-B*40:02; CTCFL; ENSG00000124092; CTA
VELQDMSLL

SEQ ID NO: 19861 - protein, 9 aa, Homo sapiens
  Table A; Target 19861; HLA-B*44:02; CTCFL; ENSG00000124092; CTA
VELQDMSLL

SEQ ID NO: 19862 - protein, 9 aa, Homo sapiens
  Table A; Target 19862; HLA-B*49:01; CTCFL; ENSG00000124092; CTA
VELQDMSLL

SEQ ID NO: 19863 - protein, 8 aa, Homo sapiens
  Table A; Target 19863; HLA-B*08:01; CTCFL; ENSG00000124092; CTA
VFHERYAL

SEQ ID NO: 19864 - protein, 9 aa, Homo sapiens
  Table A; Target 19864; HLA-A*24:02; CTCFL; ENSG00000124092; CTA
VFHERYALI

SEQ ID NO: 19865 - protein, 8 aa, Homo sapiens
  Table A; Target 19865; HLA-B*39:01; CTCFL; ENSG00000124092; CTA
VHFTSEAV

SEQ ID NO: 19866 - protein, 10 aa, Homo sapiens
  Table A; Target 19866; HLA-B*27:05; CTCFL; ENSG00000124092; CTA
VHFTSEAVEL

SEQ ID NO: 19867 - protein, 10 aa, Homo sapiens
  Table A; Target 19867; HLA-B*38:01; CTCFL; ENSG00000124092; CTA
VHFTSEAVEL

SEQ ID NO: 19868 - protein, 10 aa, Homo sapiens
  Table A; Target 19868; HLA-B*39:01; CTCFL; ENSG00000124092; CTA
VHFTSEAVEL

SEQ ID NO: 19869 - protein, 10 aa, Homo sapiens
  Table A; Target 19869; HLA-C*07:04; CTCFL; ENSG00000124092; CTA
VHFTSEAVEL

SEQ ID NO: 19870 - protein, 9 aa, Homo sapiens
  Table A; Target 19870; HLA-A*29:02; CTCFL; ENSG00000124092; CTA
VHMRNLHAY

SEQ ID NO: 19871 - protein, 9 aa, Homo sapiens
  Table A; Target 19871; HLA-A*30:02; CTCFL; ENSG00000124092; CTA
VHMRNLHAY

SEQ ID NO: 19872 - protein, 10 aa, Homo sapiens
  Table A; Target 19872; HLA-A*03:02; CTCFL; ENSG00000124092; CTA
VLAPSEESEK

SEQ ID NO: 19873 - protein, 10 aa, Homo sapiens
  Table A; Target 19873; HLA-B*27:02; CTCFL; ENSG00000124092; CTA
VLAPSEESEK

SEQ ID NO: 19874 - protein, 11 aa, Homo sapiens
  Table A; Target 19874; HLA-A*01:01; CTCFL; ENSG00000124092; CTA
VLAPSEESEKY

SEQ ID NO: 19875 - protein, 11 aa, Homo sapiens
  Table A; Target 19875; HLA-A*25:01; CTCFL; ENSG00000124092; CTA
VLAPSEESEKY

SEQ ID NO: 19876 - protein, 11 aa, Homo sapiens
  Table A; Target 19876; HLA-A*26:01; CTCFL; ENSG00000124092; CTA
VLAPSEESEKY

SEQ ID NO: 19877 - protein, 11 aa, Homo sapiens
  Table A; Target 19877; HLA-A*29:02; CTCFL; ENSG00000124092; CTA
VLAPSEESEKY

SEQ ID NO: 19878 - protein, 11 aa, Homo sapiens
  Table A; Target 19878; HLA-A*30:02; CTCFL; ENSG00000124092; CTA
VLAPSEESEKY

SEQ ID NO: 19879 - protein, 11 aa, Homo sapiens
  Table A; Target 19879; HLA-A*32:01; CTCFL; ENSG00000124092; CTA
VLAPSEESEKY

SEQ ID NO: 19880 - protein, 11 aa, Homo sapiens
  Table A; Target 19880; HLA-B*15:03; CTCFL; ENSG00000124092; CTA
VLAPSEESEKY

SEQ ID NO: 19881 - protein, 11 aa, Homo sapiens
  Table A; Target 19881; HLA-B*46:01; CTCFL; ENSG00000124092; CTA
VLAPSEESEKY

SEQ ID NO: 19882 - protein, 11 aa, Homo sapiens
  Table A; Target 19882; HLA-B*55:01; CTCFL; ENSG00000124092; CTA
VLAPSEESEKY

SEQ ID NO: 19883 - protein, 11 aa, Homo sapiens
  Table A; Target 19883; HLA-B*58:01; CTCFL; ENSG00000124092; CTA
VLAPSEESEKY

SEQ ID NO: 19884 - protein, 11 aa, Homo sapiens
  Table A; Target 19884; HLA-C*07:04; CTCFL; ENSG00000124092; CTA
VLAPSEESEKY

SEQ ID NO: 19885 - protein, 11 aa, Homo sapiens
  Table A; Target 19885; HLA-C*16:04; CTCFL; ENSG00000124092; CTA
VLAPSEESEKY

SEQ ID NO: 19886 - protein, 8 aa, Homo sapiens
  Table A; Target 19886; HLA-C*05:01; CTCFL; ENSG00000124092; CTA
VLEEEVEL

SEQ ID NO: 19887 - protein, 9 aa, Homo sapiens
  Table A; Target 19887; HLA-A*02:01; CTCFL; ENSG00000124092; CTA
VLEEEVELV

SEQ ID NO: 19888 - protein, 9 aa, Homo sapiens
  Table A; Target 19888; HLA-A*02:07; CTCFL; ENSG00000124092; CTA
VLEEEVELV

SEQ ID NO: 19889 - protein, 9 aa, Homo sapiens
  Table A; Target 19889; HLA-C*05:01; CTCFL; ENSG00000124092; CTA
VLEEEVELV

SEQ ID NO: 19890 - protein, 8 aa, Homo sapiens
  Table A; Target 19890; HLA-A*03:02; CTCFL; ENSG00000124092; CTA
VLSEQFTK

SEQ ID NO: 19891 - protein, 8 aa, Homo sapiens
  Table A; Target 19891; HLA-A*11:01; CTCFL; ENSG00000124092; CTA
VLSEQFTK

SEQ ID NO: 19892 - protein, 9 aa, Homo sapiens
  Table A; Target 19892; HLA-A*02:01; CTCFL; ENSG00000124092; CTA
VLSEQFTKI

SEQ ID NO: 19893 - protein, 9 aa, Homo sapiens
  Table A; Target 19893; HLA-A*02:03; CTCFL; ENSG00000124092; CTA
VLSEQFTKI

SEQ ID NO: 19894 - protein, 9 aa, Homo sapiens
  Table A; Target 19894; HLA-A*02:04; CTCFL; ENSG00000124092; CTA
VLSEQFTKI

SEQ ID NO: 19895 - protein, 9 aa, Homo sapiens
  Table A; Target 19895; HLA-A*02:07; CTCFL; ENSG00000124092; CTA
VLSEQFTKI

SEQ ID NO: 19896 - protein, 9 aa, Homo sapiens
  Table A; Target 19896; HLA-A*23:01; CTCFL; ENSG00000124092; CTA
VLSEQFTKI

SEQ ID NO: 19897 - protein, 9 aa, Homo sapiens
  Table A; Target 19897; HLA-A*24:02; CTCFL; ENSG00000124092; CTA
VLSEQFTKI

SEQ ID NO: 19898 - protein, 9 aa, Homo sapiens
  Table A; Target 19898; HLA-A*30:01; CTCFL; ENSG00000124092; CTA
VLSEQFTKI

SEQ ID NO: 19899 - protein, 9 aa, Homo sapiens
  Table A; Target 19899; HLA-A*68:02; CTCFL; ENSG00000124092; CTA
VLSEQFTKI

SEQ ID NO: 19900 - protein, 9 aa, Homo sapiens
  Table A; Target 19900; HLA-B*13:02; CTCFL; ENSG00000124092; CTA
VLSEQFTKI

SEQ ID NO: 19901 - protein, 9 aa, Homo sapiens
  Table A; Target 19901; HLA-B*38:01; CTCFL; ENSG00000124092; CTA
VLSEQFTKI

SEQ ID NO: 19902 - protein, 9 aa, Homo sapiens
  Table A; Target 19902; HLA-B*49:01; CTCFL; ENSG00000124092; CTA
VLSEQFTKI

SEQ ID NO: 19903 - protein, 9 aa, Homo sapiens
  Table A; Target 19903; HLA-B*51:01; CTCFL; ENSG00000124092; CTA
VLSEQFTKI

SEQ ID NO: 19904 - protein, 9 aa, Homo sapiens
  Table A; Target 19904; HLA-B*55:01; CTCFL; ENSG00000124092; CTA
VLSEQFTKI

SEQ ID NO: 19905 - protein, 9 aa, Homo sapiens
  Table A; Target 19905; HLA-C*02:02; CTCFL; ENSG00000124092; CTA
VLSEQFTKI

SEQ ID NO: 19906 - protein, 9 aa, Homo sapiens
  Table A; Target 19906; HLA-A*02:01; CTCFL; ENSG00000124092; CTA
VLTVSNSNV

SEQ ID NO: 19907 - protein, 9 aa, Homo sapiens
  Table A; Target 19907; HLA-A*02:03; CTCFL; ENSG00000124092; CTA
VLTVSNSNV

SEQ ID NO: 19908 - protein, 10 aa, Homo sapiens
  Table A; Target 19908; HLA-C*16:01; CTCFL; ENSG00000124092; CTA
VNTHTGTRPY

SEQ ID NO: 19909 - protein, 9 aa, Homo sapiens
  Table A; Target 19909; HLA-B*15:01; CTCFL; ENSG00000124092; CTA
VQQPGPGLL

SEQ ID NO: 19910 - protein, 9 aa, Homo sapiens
  Table A; Target 19910; HLA-B*39:01; CTCFL; ENSG00000124092; CTA
VQQPGPGLL

SEQ ID NO: 19911 - protein, 10 aa, Homo sapiens
  Table A; Target 19911; HLA-A*23:01; CTCFL; ENSG00000124092; CTA
VQQPGPGLLW

SEQ ID NO: 19912 - protein, 10 aa, Homo sapiens
  Table A; Target 19912; HLA-A*25:01; CTCFL; ENSG00000124092; CTA
VQQPGPGLLW

SEQ ID NO: 19913 - protein, 10 aa, Homo sapiens
  Table A; Target 19913; HLA-A*32:01; CTCFL; ENSG00000124092; CTA
VQQPGPGLLW

SEQ ID NO: 19914 - protein, 10 aa, Homo sapiens
  Table A; Target 19914; HLA-B*58:01; CTCFL; ENSG00000124092; CTA
VQQPGPGLLW

SEQ ID NO: 19915 - protein, 9 aa, Homo sapiens
  Table A; Target 19915; HLA-C*01:02; CTCFL; ENSG00000124092; CTA
VSLAETTGL

SEQ ID NO: 19916 - protein, 9 aa, Homo sapiens
  Table A; Target 19916; HLA-C*03:04; CTCFL; ENSG00000124092; CTA
VSLAETTGL

SEQ ID NO: 19917 - protein, 9 aa, Homo sapiens
  Table A; Target 19917; HLA-C*05:01; CTCFL; ENSG00000124092; CTA
VSLAETTGL

SEQ ID NO: 19918 - protein, 11 aa, Homo sapiens
  Table A; Target 19918; HLA-A*11:01; CTCFL; ENSG00000124092; CTA
VSLAETTGLIK

SEQ ID NO: 19919 - protein, 9 aa, Homo sapiens
  Table A; Target 19919; HLA-A*11:01; CTCFL; ENSG00000124092; CTA
VTSGELVRH

SEQ ID NO: 19920 - protein, 10 aa, Homo sapiens
  Table A; Target 19920; HLA-A*11:01; CTCFL; ENSG00000124092; CTA
VTSGELVRHR

SEQ ID NO: 19921 - protein, 10 aa, Homo sapiens
  Table A; Target 19921; HLA-A*31:01; CTCFL; ENSG00000124092; CTA
VTSGELVRHR

SEQ ID NO: 19922 - protein, 10 aa, Homo sapiens
  Table A; Target 19922; HLA-A*68:01; CTCFL; ENSG00000124092; CTA
VTSGELVRHR

SEQ ID NO: 19923 - protein, 10 aa, Homo sapiens
  Table A; Target 19923; HLA-C*07:06; CTCFL; ENSG00000124092; CTA
VTSGELVRHR

SEQ ID NO: 19924 - protein, 9 aa, Homo sapiens
  Table A; Target 19924; HLA-C*03:03; CTCFL; ENSG00000124092; CTA
VVQQPGPGL

SEQ ID NO: 19925 - protein, 9 aa, Homo sapiens
  Table A; Target 19925; HLA-C*03:04; CTCFL; ENSG00000124092; CTA
VVQQPGPGL

SEQ ID NO: 19926 - protein, 9 aa, Homo sapiens
  Table A; Target 19926; HLA-C*05:01; CTCFL; ENSG00000124092; CTA
VVQQPGPGL

SEQ ID NO: 19927 - protein, 11 aa, Homo sapiens
  Table A; Target 19927; HLA-B*57:01; CTCFL; ENSG00000124092; CTA
VVQQPGPGLLW

SEQ ID NO: 19928 - protein, 9 aa, Homo sapiens
  Table A; Target 19928; HLA-A*02:04; CTCFL; ENSG00000124092; CTA
YASRDTYKL

SEQ ID NO: 19929 - protein, 9 aa, Homo sapiens
  Table A; Target 19929; HLA-A*24:02; CTCFL; ENSG00000124092; CTA
YASRDTYKL

SEQ ID NO: 19930 - protein, 9 aa, Homo sapiens
  Table A; Target 19930; HLA-A*68:02; CTCFL; ENSG00000124092; CTA
YASRDTYKL

SEQ ID NO: 19931 - protein, 9 aa, Homo sapiens
  Table A; Target 19931; HLA-B*27:05; CTCFL; ENSG00000124092; CTA
YASRDTYKL

SEQ ID NO: 19932 - protein, 9 aa, Homo sapiens
  Table A; Target 19932; HLA-B*35:03; CTCFL; ENSG00000124092; CTA
YASRDTYKL

SEQ ID NO: 19933 - protein, 9 aa, Homo sapiens
  Table A; Target 19933; HLA-B*38:01; CTCFL; ENSG00000124092; CTA
YASRDTYKL

SEQ ID NO: 19934 - protein, 9 aa, Homo sapiens
  Table A; Target 19934; HLA-B*40:01; CTCFL; ENSG00000124092; CTA
YASRDTYKL

SEQ ID NO: 19935 - protein, 9 aa, Homo sapiens
  Table A; Target 19935; HLA-C*02:02; CTCFL; ENSG00000124092; CTA
YASRDTYKL

SEQ ID NO: 19936 - protein, 9 aa, Homo sapiens
  Table A; Target 19936; HLA-C*03:03; CTCFL; ENSG00000124092; CTA
YASRDTYKL

SEQ ID NO: 19937 - protein, 9 aa, Homo sapiens
  Table A; Target 19937; HLA-C*03:04; CTCFL; ENSG00000124092; CTA
YASRDTYKL

SEQ ID NO: 19938 - protein, 9 aa, Homo sapiens
  Table A; Target 19938; HLA-C*12:03; CTCFL; ENSG00000124092; CTA
YASRDTYKL

SEQ ID NO: 19939 - protein, 9 aa, Homo sapiens
  Table A; Target 19939; HLA-C*16:02; CTCFL; ENSG00000124092; CTA
YASRDTYKL

SEQ ID NO: 19940 - protein, 9 aa, Homo sapiens
  Table A; Target 19940; HLA-A*23:01; CTCFL; ENSG00000124092; CTA
YASVEASKL

SEQ ID NO: 19941 - protein, 9 aa, Homo sapiens
  Table A; Target 19941; HLA-A*25:01; CTCFL; ENSG00000124092; CTA
YASVEASKL

SEQ ID NO: 19942 - protein, 9 aa, Homo sapiens
  Table A; Target 19942; HLA-A*30:01; CTCFL; ENSG00000124092; CTA
YASVEASKL

SEQ ID NO: 19943 - protein, 9 aa, Homo sapiens
  Table A; Target 19943; HLA-A*32:01; CTCFL; ENSG00000124092; CTA
YASVEASKL

SEQ ID NO: 19944 - protein, 9 aa, Homo sapiens
  Table A; Target 19944; HLA-B*07:02; CTCFL; ENSG00000124092; CTA
YASVEASKL

SEQ ID NO: 19945 - protein, 9 aa, Homo sapiens
  Table A; Target 19945; HLA-B*13:02; CTCFL; ENSG00000124092; CTA
YASVEASKL

SEQ ID NO: 19946 - protein, 9 aa, Homo sapiens
  Table A; Target 19946; HLA-B*15:01; CTCFL; ENSG00000124092; CTA
YASVEASKL

SEQ ID NO: 19947 - protein, 9 aa, Homo sapiens
  Table A; Target 19947; HLA-B*15:03; CTCFL; ENSG00000124092; CTA
YASVEASKL

SEQ ID NO: 19948 - protein, 9 aa, Homo sapiens
  Table A; Target 19948; HLA-B*27:05; CTCFL; ENSG00000124092; CTA
YASVEASKL

SEQ ID NO: 19949 - protein, 9 aa, Homo sapiens
  Table A; Target 19949; HLA-B*35:01; CTCFL; ENSG00000124092; CTA
YASVEASKL

SEQ ID NO: 19950 - protein, 9 aa, Homo sapiens
  Table A; Target 19950; HLA-B*35:03; CTCFL; ENSG00000124092; CTA
YASVEASKL

SEQ ID NO: 19951 - protein, 9 aa, Homo sapiens
  Table A; Target 19951; HLA-B*38:01; CTCFL; ENSG00000124092; CTA
YASVEASKL

SEQ ID NO: 19952 - protein, 9 aa, Homo sapiens
  Table A; Target 19952; HLA-B*39:01; CTCFL; ENSG00000124092; CTA
YASVEASKL

SEQ ID NO: 19953 - protein, 9 aa, Homo sapiens
  Table A; Target 19953; HLA-B*40:01; CTCFL; ENSG00000124092; CTA
YASVEASKL

SEQ ID NO: 19954 - protein, 9 aa, Homo sapiens
  Table A; Target 19954; HLA-B*40:02; CTCFL; ENSG00000124092; CTA
YASVEASKL

SEQ ID NO: 19955 - protein, 9 aa, Homo sapiens
  Table A; Target 19955; HLA-B*46:01; CTCFL; ENSG00000124092; CTA
YASVEASKL

SEQ ID NO: 19956 - protein, 9 aa, Homo sapiens
  Table A; Target 19956; HLA-B*51:01; CTCFL; ENSG00000124092; CTA
YASVEASKL

SEQ ID NO: 19957 - protein, 9 aa, Homo sapiens
  Table A; Target 19957; HLA-B*55:01; CTCFL; ENSG00000124092; CTA
YASVEASKL

SEQ ID NO: 19958 - protein, 9 aa, Homo sapiens
  Table A; Target 19958; HLA-B*58:01; CTCFL; ENSG00000124092; CTA
YASVEASKL

SEQ ID NO: 19959 - protein, 9 aa, Homo sapiens
  Table A; Target 19959; HLA-C*01:02; CTCFL; ENSG00000124092; CTA
YASVEASKL

SEQ ID NO: 19960 - protein, 9 aa, Homo sapiens
  Table A; Target 19960; HLA-C*02:02; CTCFL; ENSG00000124092; CTA
YASVEASKL

SEQ ID NO: 19961 - protein, 9 aa, Homo sapiens
  Table A; Target 19961; HLA-C*03:03; CTCFL; ENSG00000124092; CTA
YASVEASKL

SEQ ID NO: 19962 - protein, 9 aa, Homo sapiens
  Table A; Target 19962; HLA-C*03:04; CTCFL; ENSG00000124092; CTA
YASVEASKL

SEQ ID NO: 19963 - protein, 9 aa, Homo sapiens
  Table A; Target 19963; HLA-C*04:01; CTCFL; ENSG00000124092; CTA
YASVEASKL

SEQ ID NO: 19964 - protein, 9 aa, Homo sapiens
  Table A; Target 19964; HLA-C*05:01; CTCFL; ENSG00000124092; CTA
YASVEASKL

SEQ ID NO: 19965 - protein, 9 aa, Homo sapiens
  Table A; Target 19965; HLA-C*06:02; CTCFL; ENSG00000124092; CTA
YASVEASKL

SEQ ID NO: 19966 - protein, 9 aa, Homo sapiens
  Table A; Target 19966; HLA-C*07:04; CTCFL; ENSG00000124092; CTA
YASVEASKL

SEQ ID NO: 19967 - protein, 9 aa, Homo sapiens
  Table A; Target 19967; HLA-C*07:06; CTCFL; ENSG00000124092; CTA
YASVEASKL

SEQ ID NO: 19968 - protein, 9 aa, Homo sapiens
  Table A; Target 19968; HLA-C*12:03; CTCFL; ENSG00000124092; CTA
YASVEASKL

SEQ ID NO: 19969 - protein, 9 aa, Homo sapiens
  Table A; Target 19969; HLA-C*14:02; CTCFL; ENSG00000124092; CTA
YASVEASKL

SEQ ID NO: 19970 - protein, 9 aa, Homo sapiens
  Table A; Target 19970; HLA-C*16:01; CTCFL; ENSG00000124092; CTA
YASVEASKL

SEQ ID NO: 19971 - protein, 9 aa, Homo sapiens
  Table A; Target 19971; HLA-C*16:02; CTCFL; ENSG00000124092; CTA
YASVEASKL

SEQ ID NO: 19972 - protein, 9 aa, Homo sapiens
  Table A; Target 19972; HLA-C*16:04; CTCFL; ENSG00000124092; CTA
YASVEASKL

SEQ ID NO: 19973 - protein, 10 aa, Homo sapiens
  Table A; Target 19973; HLA-B*27:02; CTCFL; ENSG00000124092; CTA
YASVEASKLK

SEQ ID NO: 19974 - protein, 10 aa, Homo sapiens
  Table A; Target 19974; HLA-C*07:06; CTCFL; ENSG00000124092; CTA
YASVEASKLK

SEQ ID NO: 19975 - protein, 9 aa, Homo sapiens
  Table A; Target 19975; HLA-A*31:01; CTCFL; ENSG00000124092; CTA
YCSAVFHER

SEQ ID NO: 19976 - protein, 9 aa, Homo sapiens
  Table A; Target 19976; HLA-A*33:01; CTCFL; ENSG00000124092; CTA
YCSAVFHER

SEQ ID NO: 19977 - protein, 9 aa, Homo sapiens
  Table A; Target 19977; HLA-A*33:03; CTCFL; ENSG00000124092; CTA
YCSAVFHER

SEQ ID NO: 19978 - protein, 9 aa, Homo sapiens
  Table A; Target 19978; HLA-A*68:01; CTCFL; ENSG00000124092; CTA
YCSAVFHER

SEQ ID NO: 19979 - protein, 10 aa, Homo sapiens
  Table A; Target 19979; HLA-A*01:01; CTCFL; ENSG00000124092; CTA
YCSAVFHERY

SEQ ID NO: 19980 - protein, 10 aa, Homo sapiens
  Table A; Target 19980; HLA-A*29:02; CTCFL; ENSG00000124092; CTA
YCSAVFHERY

SEQ ID NO: 19981 - protein, 10 aa, Homo sapiens
  Table A; Target 19981; HLA-B*38:01; CTCFL; ENSG00000124092; CTA
YHDANFIPTV

SEQ ID NO: 19982 - protein, 8 aa, Homo sapiens
  Table A; Target 19982; HLA-A*02:01; CTCFL; ENSG00000124092; CTA
YILTLQTV

SEQ ID NO: 19983 - protein, 8 aa, Homo sapiens
  Table A; Target 19983; HLA-B*08:01; CTCFL; ENSG00000124092; CTA
YILTLQTV

SEQ ID NO: 19984 - protein, 8 aa, Homo sapiens
  Table A; Target 19984; HLA-B*13:02; CTCFL; ENSG00000124092; CTA
YILTLQTV

SEQ ID NO: 19985 - protein, 8 aa, Homo sapiens
  Table A; Target 19985; HLA-B*51:01; CTCFL; ENSG00000124092; CTA
YILTLQTV

SEQ ID NO: 19986 - protein, 10 aa, Homo sapiens
  Table A; Target 19986; HLA-A*23:01; CTCFL; ENSG00000124092; CTA
YILTLQTVHF

SEQ ID NO: 19987 - protein, 10 aa, Homo sapiens
  Table A; Target 19987; HLA-A*24:02; CTCFL; ENSG00000124092; CTA
YILTLQTVHF

SEQ ID NO: 19988 - protein, 9 aa, Homo sapiens
  Table A; Target 19988; HLA-A*33:01; CTCFL; ENSG00000124092; CTA
YSAAELKCR

SEQ ID NO: 19989 - protein, 9 aa, Homo sapiens
  Table A; Target 19989; HLA-A*33:03; CTCFL; ENSG00000124092; CTA
YSAAELKCR

SEQ ID NO: 19990 - protein, 10 aa, Homo sapiens
  Table A; Target 19990; HLA-A*01:01; CTCFL; ENSG00000124092; CTA
YSAAELKCRY

SEQ ID NO: 19991 - protein, 10 aa, Homo sapiens
  Table A; Target 19991; HLA-A*29:02; CTCFL; ENSG00000124092; CTA
YSAAELKCRY

SEQ ID NO: 19992 - protein, 8 aa, Homo sapiens
  Table A; Target 19992; HLA-B*51:01; CTCFL; ENSG00000124092; CTA
YSPQEMEV

SEQ ID NO: 19993 - protein, 9 aa, Homo sapiens
  Table A; Target 19993; HLA-C*03:03; DCAF12L1; ENSG00000198889; CTA
AAADGEGPL

SEQ ID NO: 19994 - protein, 9 aa, Homo sapiens
  Table A; Target 19994; HLA-C*03:04; DCAF12L1; ENSG00000198889; CTA
AAADGEGPL

SEQ ID NO: 19995 - protein, 9 aa, Homo sapiens
  Table A; Target 19995; HLA-C*05:01; DCAF12L1; ENSG00000198889; CTA
AAADGEGPL

SEQ ID NO: 19996 - protein, 10 aa, Homo sapiens
  Table A; Target 19996; HLA-B*38:01; DCAF12L1; ENSG00000198889; CTA
AAADGEGPLL

SEQ ID NO: 19997 - protein, 10 aa, Homo sapiens
  Table A; Target 19997; HLA-B*40:01; DCAF12L1; ENSG00000198889; CTA
AAADGEGPLL

SEQ ID NO: 19998 - protein, 10 aa, Homo sapiens
  Table A; Target 19998; HLA-B*58:01; DCAF12L1; ENSG00000198889; CTA
AAADGEGPLL

SEQ ID NO: 19999 - protein, 10 aa, Homo sapiens
  Table A; Target 19999; HLA-C*03:03; DCAF12L1; ENSG00000198889; CTA
AAADGEGPLL

SEQ ID NO: 20000 - protein, 10 aa, Homo sapiens
  Table A; Target 20000; HLA-C*03:04; DCAF12L1; ENSG00000198889; CTA
AAADGEGPLL

SEQ ID NO: 20001 - protein, 10 aa, Homo sapiens
  Table A; Target 20001; HLA-C*05:01; DCAF12L1; ENSG00000198889; CTA
AAADGEGPLL

SEQ ID NO: 20002 - protein, 10 aa, Homo sapiens
  Table A; Target 20002; HLA-C*16:01; DCAF12L1; ENSG00000198889; CTA
AAADGEGPLL

SEQ ID NO: 20003 - protein, 10 aa, Homo sapiens
  Table A; Target 20003; HLA-C*16:04; DCAF12L1; ENSG00000198889; CTA
AAADGEGPLL

SEQ ID NO: 20004 - protein, 11 aa, Homo sapiens
  Table A; Target 20004; HLA-A*01:01; DCAF12L1; ENSG00000198889; CTA
AAADGEGPLLL

SEQ ID NO: 20005 - protein, 11 aa, Homo sapiens
  Table A; Target 20005; HLA-C*02:02; DCAF12L1; ENSG00000198889; CTA
AAADGEGPLLL

SEQ ID NO: 20006 - protein, 11 aa, Homo sapiens
  Table A; Target 20006; HLA-C*05:01; DCAF12L1; ENSG00000198889; CTA
AAADGEGPLLL

SEQ ID NO: 20007 - protein, 11 aa, Homo sapiens
  Table A; Target 20007; HLA-C*12:03; DCAF12L1; ENSG00000198889; CTA
AAADGEGPLLL

SEQ ID NO: 20008 - protein, 11 aa, Homo sapiens
  Table A; Target 20008; HLA-C*16:04; DCAF12L1; ENSG00000198889; CTA
AAADGEGPLLL

SEQ ID NO: 20009 - protein, 8 aa, Homo sapiens
  Table A; Target 20009; HLA-C*05:01; DCAF12L1; ENSG00000198889; CTA
AADGEGPL

SEQ ID NO: 20010 - protein, 9 aa, Homo sapiens
  Table A; Target 20010; HLA-A*02:07; DCAF12L1; ENSG00000198889; CTA
AADGEGPLL

SEQ ID NO: 20011 - protein, 9 aa, Homo sapiens
  Table A; Target 20011; HLA-A*32:01; DCAF12L1; ENSG00000198889; CTA
AADGEGPLL

SEQ ID NO: 20012 - protein, 9 aa, Homo sapiens
  Table A; Target 20012; HLA-B*35:03; DCAF12L1; ENSG00000198889; CTA
AADGEGPLL

SEQ ID NO: 20013 - protein, 9 aa, Homo sapiens
  Table A; Target 20013; HLA-B*38:01; DCAF12L1; ENSG00000198889; CTA
AADGEGPLL

SEQ ID NO: 20014 - protein, 9 aa, Homo sapiens
  Table A; Target 20014; HLA-B*39:01; DCAF12L1; ENSG00000198889; CTA
AADGEGPLL

SEQ ID NO: 20015 - protein, 9 aa, Homo sapiens
  Table A; Target 20015; HLA-B*40:01; DCAF12L1; ENSG00000198889; CTA
AADGEGPLL

SEQ ID NO: 20016 - protein, 9 aa, Homo sapiens
  Table A; Target 20016; HLA-C*03:03; DCAF12L1; ENSG00000198889; CTA
AADGEGPLL

SEQ ID NO: 20017 - protein, 9 aa, Homo sapiens
  Table A; Target 20017; HLA-C*03:04; DCAF12L1; ENSG00000198889; CTA
AADGEGPLL

SEQ ID NO: 20018 - protein, 9 aa, Homo sapiens
  Table A; Target 20018; HLA-C*05:01; DCAF12L1; ENSG00000198889; CTA
AADGEGPLL

SEQ ID NO: 20019 - protein, 10 aa, Homo sapiens
  Table A; Target 20019; HLA-A*01:01; DCAF12L1; ENSG00000198889; CTA
AADGEGPLLL

SEQ ID NO: 20020 - protein, 10 aa, Homo sapiens
  Table A; Target 20020; HLA-B*35:03; DCAF12L1; ENSG00000198889; CTA
AADGEGPLLL

SEQ ID NO: 20021 - protein, 10 aa, Homo sapiens
  Table A; Target 20021; HLA-B*38:01; DCAF12L1; ENSG00000198889; CTA
AADGEGPLLL

SEQ ID NO: 20022 - protein, 10 aa, Homo sapiens
  Table A; Target 20022; HLA-B*39:01; DCAF12L1; ENSG00000198889; CTA
AADGEGPLLL

SEQ ID NO: 20023 - protein, 10 aa, Homo sapiens
  Table A; Target 20023; HLA-B*40:01; DCAF12L1; ENSG00000198889; CTA
AADGEGPLLL

SEQ ID NO: 20024 - protein, 10 aa, Homo sapiens
  Table A; Target 20024; HLA-C*03:03; DCAF12L1; ENSG00000198889; CTA
AADGEGPLLL

SEQ ID NO: 20025 - protein, 10 aa, Homo sapiens
  Table A; Target 20025; HLA-C*03:04; DCAF12L1; ENSG00000198889; CTA
AADGEGPLLL

SEQ ID NO: 20026 - protein, 10 aa, Homo sapiens
  Table A; Target 20026; HLA-C*04:01; DCAF12L1; ENSG00000198889; CTA
AADGEGPLLL

SEQ ID NO: 20027 - protein, 10 aa, Homo sapiens
  Table A; Target 20027; HLA-C*05:01; DCAF12L1; ENSG00000198889; CTA
AADGEGPLLL

SEQ ID NO: 20028 - protein, 10 aa, Homo sapiens
  Table A; Target 20028; HLA-C*07:04; DCAF12L1; ENSG00000198889; CTA
AADGEGPLLL

SEQ ID NO: 20029 - protein, 11 aa, Homo sapiens
  Table A; Target 20029; HLA-A*01:01; DCAF12L1; ENSG00000198889; CTA
AADGEGPLLLK

SEQ ID NO: 20030 - protein, 11 aa, Homo sapiens
  Table A; Target 20030; HLA-A*03:01; DCAF12L1; ENSG00000198889; CTA
AADGEGPLLLK

SEQ ID NO: 20031 - protein, 11 aa, Homo sapiens
  Table A; Target 20031; HLA-A*03:02; DCAF12L1; ENSG00000198889; CTA
AADGEGPLLLK

SEQ ID NO: 20032 - protein, 11 aa, Homo sapiens
  Table A; Target 20032; HLA-A*11:01; DCAF12L1; ENSG00000198889; CTA
AADGEGPLLLK

SEQ ID NO: 20033 - protein, 11 aa, Homo sapiens
  Table A; Target 20033; HLA-B*27:02; DCAF12L1; ENSG00000198889; CTA
AADGEGPLLLK

SEQ ID NO: 20034 - protein, 11 aa, Homo sapiens
  Table A; Target 20034; HLA-C*05:01; DCAF12L1; ENSG00000198889; CTA
AADGEGPLLLK

SEQ ID NO: 20035 - protein, 11 aa, Homo sapiens
  Table A; Target 20035; HLA-A*30:01; DCAF12L1; ENSG00000198889; CTA
ADAESSPSQGL

SEQ ID NO: 20036 - protein, 8 aa, Homo sapiens
  Table A; Target 20036; HLA-B*37:01; DCAF12L1; ENSG00000198889; CTA
ADGEGPLL

SEQ ID NO: 20037 - protein, 8 aa, Homo sapiens
  Table A; Target 20037; HLA-B*40:01; DCAF12L1; ENSG00000198889; CTA
ADGEGPLL

SEQ ID NO: 20038 - protein, 9 aa, Homo sapiens
  Table A; Target 20038; HLA-A*30:01; DCAF12L1; ENSG00000198889; CTA
ADGEGPLLL

SEQ ID NO: 20039 - protein, 9 aa, Homo sapiens
  Table A; Target 20039; HLA-B*37:01; DCAF12L1; ENSG00000198889; CTA
ADGEGPLLL

SEQ ID NO: 20040 - protein, 9 aa, Homo sapiens
  Table A; Target 20040; HLA-B*40:01; DCAF12L1; ENSG00000198889; CTA
ADGEGPLLL

SEQ ID NO: 20041 - protein, 9 aa, Homo sapiens
  Table A; Target 20041; HLA-B*44:02; DCAF12L1; ENSG00000198889; CTA
ADGEGPLLL

SEQ ID NO: 20042 - protein, 10 aa, Homo sapiens
  Table A; Target 20042; HLA-A*03:01; DCAF12L1; ENSG00000198889; CTA
ADGEGPLLLK

SEQ ID NO: 20043 - protein, 10 aa, Homo sapiens
  Table A; Target 20043; HLA-A*11:01; DCAF12L1; ENSG00000198889; CTA
ADGEGPLLLK

SEQ ID NO: 20044 - protein, 10 aa, Homo sapiens
  Table A; Target 20044; HLA-B*27:02; DCAF12L1; ENSG00000198889; CTA
ADGEGPLLLK

SEQ ID NO: 20045 - protein, 9 aa, Homo sapiens
  Table A; Target 20045; HLA-A*30:01; DCAF12L1; ENSG00000198889; CTA
AESSPSQGL

SEQ ID NO: 20046 - protein, 9 aa, Homo sapiens
  Table A; Target 20046; HLA-B*13:02; DCAF12L1; ENSG00000198889; CTA
AESSPSQGL

SEQ ID NO: 20047 - protein, 9 aa, Homo sapiens
  Table A; Target 20047; HLA-B*27:02; DCAF12L1; ENSG00000198889; CTA
AESSPSQGL

SEQ ID NO: 20048 - protein, 9 aa, Homo sapiens
  Table A; Target 20048; HLA-B*27:05; DCAF12L1; ENSG00000198889; CTA
AESSPSQGL

SEQ ID NO: 20049 - protein, 9 aa, Homo sapiens
  Table A; Target 20049; HLA-B*37:01; DCAF12L1; ENSG00000198889; CTA
AESSPSQGL

SEQ ID NO: 20050 - protein, 9 aa, Homo sapiens
  Table A; Target 20050; HLA-B*38:01; DCAF12L1; ENSG00000198889; CTA
AESSPSQGL

SEQ ID NO: 20051 - protein, 9 aa, Homo sapiens
  Table A; Target 20051; HLA-B*39:01; DCAF12L1; ENSG00000198889; CTA
AESSPSQGL

SEQ ID NO: 20052 - protein, 9 aa, Homo sapiens
  Table A; Target 20052; HLA-B*40:01; DCAF12L1; ENSG00000198889; CTA
AESSPSQGL

SEQ ID NO: 20053 - protein, 9 aa, Homo sapiens
  Table A; Target 20053; HLA-B*40:02; DCAF12L1; ENSG00000198889; CTA
AESSPSQGL

SEQ ID NO: 20054 - protein, 9 aa, Homo sapiens
  Table A; Target 20054; HLA-B*44:02; DCAF12L1; ENSG00000198889; CTA
AESSPSQGL

SEQ ID NO: 20055 - protein, 9 aa, Homo sapiens
  Table A; Target 20055; HLA-B*44:03; DCAF12L1; ENSG00000198889; CTA
AESSPSQGL

SEQ ID NO: 20056 - protein, 9 aa, Homo sapiens
  Table A; Target 20056; HLA-B*49:01; DCAF12L1; ENSG00000198889; CTA
AESSPSQGL

SEQ ID NO: 20057 - protein, 9 aa, Homo sapiens
  Table A; Target 20057; HLA-C*03:04; DCAF12L1; ENSG00000198889; CTA
AESSPSQGL

SEQ ID NO: 20058 - protein, 9 aa, Homo sapiens
  Table A; Target 20058; HLA-C*16:04; DCAF12L1; ENSG00000198889; CTA
AESSPSQGL

SEQ ID NO: 20059 - protein, 10 aa, Homo sapiens
  Table A; Target 20059; HLA-B*49:01; DCAF12L1; ENSG00000198889; CTA
AESSPSQGLA

SEQ ID NO: 20060 - protein, 11 aa, Homo sapiens
  Table A; Target 20060; HLA-A*30:01; DCAF12L1; ENSG00000198889; CTA
AESSPSQGLAA

SEQ ID NO: 20061 - protein, 11 aa, Homo sapiens
  Table A; Target 20061; HLA-B*40:01; DCAF12L1; ENSG00000198889; CTA
AESSPSQGLAA

SEQ ID NO: 20062 - protein, 11 aa, Homo sapiens
  Table A; Target 20062; HLA-B*44:03; DCAF12L1; ENSG00000198889; CTA
AESSPSQGLAA

SEQ ID NO: 20063 - protein, 11 aa, Homo sapiens
  Table A; Target 20063; HLA-B*49:01; DCAF12L1; ENSG00000198889; CTA
AESSPSQGLAA

SEQ ID NO: 20064 - protein, 11 aa, Homo sapiens
  Table A; Target 20064; HLA-C*16:04; DCAF12L1; ENSG00000198889; CTA
AESSPSQGLAA

SEQ ID NO: 20065 - protein, 9 aa, Homo sapiens
  Table A; Target 20065; HLA-A*32:01; DCAF12L1; ENSG00000198889; CTA
AGGPLPAGL

SEQ ID NO: 20066 - protein, 9 aa, Homo sapiens
  Table A; Target 20066; HLA-B*27:05; DCAF12L1; ENSG00000198889; CTA
AGGPLPAGL

SEQ ID NO: 20067 - protein, 9 aa, Homo sapiens
  Table A; Target 20067; HLA-B*37:01; DCAF12L1; ENSG00000198889; CTA
AGGPLPAGL

SEQ ID NO: 20068 - protein, 9 aa, Homo sapiens
  Table A; Target 20068; HLA-C*07:02; DCAF12L1; ENSG00000198889; CTA
AGGPLPAGL

SEQ ID NO: 20069 - protein, 9 aa, Homo sapiens
  Table A; Target 20069; HLA-C*07:04; DCAF12L1; ENSG00000198889; CTA
AGGPLPAGL

SEQ ID NO: 20070 - protein, 9 aa, Homo sapiens
  Table A; Target 20070; HLA-C*14:02; DCAF12L1; ENSG00000198889; CTA
AGGPLPAGL

SEQ ID NO: 20071 - protein, 9 aa, Homo sapiens
  Table A; Target 20071; HLA-C*16:02; DCAF12L1; ENSG00000198889; CTA
AGGPLPAGL

SEQ ID NO: 20072 - protein, 9 aa, Homo sapiens
  Table A; Target 20072; HLA-B*07:02; DCAF12L1; ENSG00000198889; CTA
AGSALSRLL

SEQ ID NO: 20073 - protein, 9 aa, Homo sapiens
  Table A; Target 20073; HLA-C*06:02; DCAF12L1; ENSG00000198889; CTA
AGSALSRLL

SEQ ID NO: 20074 - protein, 9 aa, Homo sapiens
  Table A; Target 20074; HLA-C*07:02; DCAF12L1; ENSG00000198889; CTA
AGSALSRLL

SEQ ID NO: 20075 - protein, 9 aa, Homo sapiens
  Table A; Target 20075; HLA-C*12:03; DCAF12L1; ENSG00000198889; CTA
AGSALSRLL

SEQ ID NO: 20076 - protein, 9 aa, Homo sapiens
  Table A; Target 20076; HLA-C*16:01; DCAF12L1; ENSG00000198889; CTA
AGSALSRLL

SEQ ID NO: 20077 - protein, 9 aa, Homo sapiens
  Table A; Target 20077; HLA-C*16:02; DCAF12L1; ENSG00000198889; CTA
AGSALSRLL

SEQ ID NO: 20078 - protein, 8 aa, Homo sapiens
  Table A; Target 20078; HLA-A*31:01; DCAF12L1; ENSG00000198889; CTA
AIINPSNR

SEQ ID NO: 20079 - protein, 9 aa, Homo sapiens
  Table A; Target 20079; HLA-A*03:01; DCAF12L1; ENSG00000198889; CTA
AIINPSNRK

SEQ ID NO: 20080 - protein, 9 aa, Homo sapiens
  Table A; Target 20080; HLA-A*03:02; DCAF12L1; ENSG00000198889; CTA
AIINPSNRK

SEQ ID NO: 20081 - protein, 9 aa, Homo sapiens
  Table A; Target 20081; HLA-A*11:01; DCAF12L1; ENSG00000198889; CTA
AIINPSNRK

SEQ ID NO: 20082 - protein, 11 aa, Homo sapiens
  Table A; Target 20082; HLA-A*31:01; DCAF12L1; ENSG00000198889; CTA
AIINPSNRKVR

SEQ ID NO: 20083 - protein, 9 aa, Homo sapiens
  Table A; Target 20083; HLA-B*13:02; DCAF12L1; ENSG00000198889; CTA
AQDQQGCGI

SEQ ID NO: 20084 - protein, 9 aa, Homo sapiens
  Table A; Target 20084; HLA-B*38:01; DCAF12L1; ENSG00000198889; CTA
AQDQQGCGI

SEQ ID NO: 20085 - protein, 11 aa, Homo sapiens
  Table A; Target 20085; HLA-A*03:01; DCAF12L1; ENSG00000198889; CTA
ATLESSSGPAR

SEQ ID NO: 20086 - protein, 11 aa, Homo sapiens
  Table A; Target 20086; HLA-A*03:02; DCAF12L1; ENSG00000198889; CTA
ATLESSSGPAR

SEQ ID NO: 20087 - protein, 11 aa, Homo sapiens
  Table A; Target 20087; HLA-A*11:01; DCAF12L1; ENSG00000198889; CTA
ATLESSSGPAR

SEQ ID NO: 20088 - protein, 11 aa, Homo sapiens
  Table A; Target 20088; HLA-A*31:01; DCAF12L1; ENSG00000198889; CTA
ATLESSSGPAR

SEQ ID NO: 20089 - protein, 11 aa, Homo sapiens
  Table A; Target 20089; HLA-A*33:03; DCAF12L1; ENSG00000198889; CTA
ATLESSSGPAR

SEQ ID NO: 20090 - protein, 11 aa, Homo sapiens
  Table A; Target 20090; HLA-A*68:01; DCAF12L1; ENSG00000198889; CTA
ATLESSSGPAR

SEQ ID NO: 20091 - protein, 11 aa, Homo sapiens
  Table A; Target 20091; HLA-B*57:01; DCAF12L1; ENSG00000198889; CTA
ATLESSSGPAR

SEQ ID NO: 20092 - protein, 11 aa, Homo sapiens
  Table A; Target 20092; HLA-C*07:06; DCAF12L1; ENSG00000198889; CTA
ATLESSSGPAR

SEQ ID NO: 20093 - protein, 9 aa, Homo sapiens
  Table A; Target 20093; HLA-A*01:01; DCAF12L1; ENSG00000198889; CTA
ATYRSMAHY

SEQ ID NO: 20094 - protein, 9 aa, Homo sapiens
  Table A; Target 20094; HLA-A*03:01; DCAF12L1; ENSG00000198889; CTA
ATYRSMAHY

SEQ ID NO: 20095 - protein, 9 aa, Homo sapiens
  Table A; Target 20095; HLA-A*25:01; DCAF12L1; ENSG00000198889; CTA
ATYRSMAHY

SEQ ID NO: 20096 - protein, 9 aa, Homo sapiens
  Table A; Target 20096; HLA-A*29:02; DCAF12L1; ENSG00000198889; CTA
ATYRSMAHY

SEQ ID NO: 20097 - protein, 9 aa, Homo sapiens
  Table A; Target 20097; HLA-A*30:02; DCAF12L1; ENSG00000198889; CTA
ATYRSMAHY

SEQ ID NO: 20098 - protein, 10 aa, Homo sapiens
  Table A; Target 20098; HLA-A*03:01; DCAF12L1; ENSG00000198889; CTA
ATYRSMAHYL

SEQ ID NO: 20099 - protein, 10 aa, Homo sapiens
  Table A; Target 20099; HLA-A*32:01; DCAF12L1; ENSG00000198889; CTA
AVGSHSHVSF

SEQ ID NO: 20100 - protein, 10 aa, Homo sapiens
  Table A; Target 20100; HLA-C*07:04; DCAF12L1; ENSG00000198889; CTA
AVGSHSHVSF

SEQ ID NO: 20101 - protein, 11 aa, Homo sapiens
  Table A; Target 20101; HLA-B*44:02; DCAF12L1; ENSG00000198889; CTA
AVSLDGYFHLW

SEQ ID NO: 20102 - protein, 11 aa, Homo sapiens
  Table A; Target 20102; HLA-B*57:01; DCAF12L1; ENSG00000198889; CTA
AVSLDGYFHLW

SEQ ID NO: 20103 - protein, 11 aa, Homo sapiens
  Table A; Target 20103; HLA-A*30:02; DCAF12L1; ENSG00000198889; CTA
AWHSEVGLPVY

SEQ ID NO: 20104 - protein, 9 aa, Homo sapiens
  Table A; Target 20104; HLA-C*04:01; DCAF12L1; ENSG00000198889; CTA
AWLSDTVAV

SEQ ID NO: 20105 - protein, 10 aa, Homo sapiens
  Table A; Target 20105; HLA-B*35:03; DCAF12L1; ENSG00000198889; CTA
DAESSPSQGL

SEQ ID NO: 20106 - protein, 10 aa, Homo sapiens
  Table A; Target 20106; HLA-C*05:01; DCAF12L1; ENSG00000198889; CTA
DAESSPSQGL

SEQ ID NO: 20107 - protein, 8 aa, Homo sapiens
  Table A; Target 20107; HLA-B*18:01; DCAF12L1; ENSG00000198889; CTA
DDMSVYAV

SEQ ID NO: 20108 - protein, 8 aa, Homo sapiens
  Table A; Target 20108; HLA-B*37:01; DCAF12L1; ENSG00000198889; CTA
DDMSVYAV

SEQ ID NO: 20109 - protein, 8 aa, Homo sapiens
  Table A; Target 20109; HLA-B*40:02; DCAF12L1; ENSG00000198889; CTA
DDMSVYAV

SEQ ID NO: 20110 - protein, 8 aa, Homo sapiens
  Table A; Target 20110; HLA-C*05:01; DCAF12L1; ENSG00000198889; CTA
DGEGPLLL

SEQ ID NO: 20111 - protein, 9 aa, Homo sapiens
  Table A; Target 20111; HLA-A*11:01; DCAF12L1; ENSG00000198889; CTA
DGEGPLLLK

SEQ ID NO: 20112 - protein, 9 aa, Homo sapiens
  Table A; Target 20112; HLA-A*33:01; DCAF12L1; ENSG00000198889; CTA
DGEGPLLLK

SEQ ID NO: 20113 - protein, 9 aa, Homo sapiens
  Table A; Target 20113; HLA-A*68:01; DCAF12L1; ENSG00000198889; CTA
DGEGPLLLK

SEQ ID NO: 20114 - protein, 9 aa, Homo sapiens
  Table A; Target 20114; HLA-B*27:02; DCAF12L1; ENSG00000198889; CTA
DGEGPLLLK

SEQ ID NO: 20115 - protein, 10 aa, Homo sapiens
  Table A; Target 20115; HLA-A*33:01; DCAF12L1; ENSG00000198889; CTA
DGEGPLLLKR

SEQ ID NO: 20116 - protein, 10 aa, Homo sapiens
  Table A; Target 20116; HLA-A*68:01; DCAF12L1; ENSG00000198889; CTA
DGEGPLLLKR

SEQ ID NO: 20117 - protein, 10 aa, Homo sapiens
  Table A; Target 20117; HLA-C*07:06; DCAF12L1; ENSG00000198889; CTA
DGEGPLLLKR

SEQ ID NO: 20118 - protein, 9 aa, Homo sapiens
  Table A; Target 20118; HLA-B*08:01; DCAF12L1; ENSG00000198889; CTA
DGELRGYAV

SEQ ID NO: 20119 - protein, 9 aa, Homo sapiens
  Table A; Target 20119; HLA-B*51:01; DCAF12L1; ENSG00000198889; CTA
DGELRGYAV

SEQ ID NO: 20120 - protein, 11 aa, Homo sapiens
  Table A; Target 20120; HLA-A*33:01; DCAF12L1; ENSG00000198889; CTA
DGELRGYAVQR

SEQ ID NO: 20121 - protein, 10 aa, Homo sapiens
  Table A; Target 20121; HLA-A*33:01; DCAF12L1; ENSG00000198889; CTA
DLRQDQQNIR

SEQ ID NO: 20122 - protein, 11 aa, Homo sapiens
  Table A; Target 20122; HLA-A*33:01; DCAF12L1; ENSG00000198889; CTA
DQQNIRPLCSR

SEQ ID NO: 20123 - protein, 9 aa, Homo sapiens
  Table A; Target 20123; HLA-A*26:01; DCAF12L1; ENSG00000198889; CTA
DTVAVSGSR

SEQ ID NO: 20124 - protein, 9 aa, Homo sapiens
  Table A; Target 20124; HLA-A*33:01; DCAF12L1; ENSG00000198889; CTA
DTVAVSGSR

SEQ ID NO: 20125 - protein, 9 aa, Homo sapiens
  Table A; Target 20125; HLA-A*33:03; DCAF12L1; ENSG00000198889; CTA
DTVAVSGSR

SEQ ID NO: 20126 - protein, 9 aa, Homo sapiens
  Table A; Target 20126; HLA-A*68:01; DCAF12L1; ENSG00000198889; CTA
DTVAVSGSR

SEQ ID NO: 20127 - protein, 9 aa, Homo sapiens
  Table A; Target 20127; HLA-C*07:06; DCAF12L1; ENSG00000198889; CTA
DTVAVSGSR

SEQ ID NO: 20128 - protein, 9 aa, Homo sapiens
  Table A; Target 20128; HLA-A*26:01; DCAF12L1; ENSG00000198889; CTA
DTVAWHSEV

SEQ ID NO: 20129 - protein, 9 aa, Homo sapiens
  Table A; Target 20129; HLA-A*68:02; DCAF12L1; ENSG00000198889; CTA
DTVAWHSEV

SEQ ID NO: 20130 - protein, 9 aa, Homo sapiens
  Table A; Target 20130; HLA-B*51:01; DCAF12L1; ENSG00000198889; CTA
DVEAIPRAI

SEQ ID NO: 20131 - protein, 9 aa, Homo sapiens
  Table A; Target 20131; HLA-A*33:01; DCAF12L1; ENSG00000198889; CTA
DVESGHIAR

SEQ ID NO: 20132 - protein, 9 aa, Homo sapiens
  Table A; Target 20132; HLA-A*33:03; DCAF12L1; ENSG00000198889; CTA
DVESGHIAR

SEQ ID NO: 20133 - protein, 9 aa, Homo sapiens
  Table A; Target 20133; HLA-A*68:01; DCAF12L1; ENSG00000198889; CTA
DVESGHIAR

SEQ ID NO: 20134 - protein, 9 aa, Homo sapiens
  Table A; Target 20134; HLA-C*07:06; DCAF12L1; ENSG00000198889; CTA
DVESGHIAR

SEQ ID NO: 20135 - protein, 10 aa, Homo sapiens
  Table A; Target 20135; HLA-A*25:01; DCAF12L1; ENSG00000198889; CTA
DVESGHIARI

SEQ ID NO: 20136 - protein, 10 aa, Homo sapiens
  Table A; Target 20136; HLA-A*26:01; DCAF12L1; ENSG00000198889; CTA
DVESGHIARI

SEQ ID NO: 20137 - protein, 11 aa, Homo sapiens
  Table A; Target 20137; HLA-A*33:01; DCAF12L1; ENSG00000198889; CTA
DVRAQKFLEER

SEQ ID NO: 20138 - protein, 8 aa, Homo sapiens
  Table A; Target 20138; HLA-B*08:01; DCAF12L1; ENSG00000198889; CTA
EAIPRAII

SEQ ID NO: 20139 - protein, 8 aa, Homo sapiens
  Table A; Target 20139; HLA-B*51:01; DCAF12L1; ENSG00000198889; CTA
EAIPRAII

SEQ ID NO: 20140 - protein, 8 aa, Homo sapiens
  Table A; Target 20140; HLA-B*18:01; DCAF12L1; ENSG00000198889; CTA
EERASATL

SEQ ID NO: 20141 - protein, 9 aa, Homo sapiens
  Table A; Target 20141; HLA-C*01:02; DCAF12L1; ENSG00000198889; CTA
EGGTGVRSL

SEQ ID NO: 20142 - protein, 10 aa, Homo sapiens
  Table A; Target 20142; HLA-A*01:01; DCAF12L1; ENSG00000198889; CTA
ELGAVSLDGY

SEQ ID NO: 20143 - protein, 9 aa, Homo sapiens
  Table A; Target 20143; HLA-A*25:01; DCAF12L1; ENSG00000198889; CTA
ELGTVNKVF

SEQ ID NO: 20144 - protein, 9 aa, Homo sapiens
  Table A; Target 20144; HLA-B*44:02; DCAF12L1; ENSG00000198889; CTA
ELGTVNKVF

SEQ ID NO: 20145 - protein, 9 aa, Homo sapiens
  Table A; Target 20145; HLA-B*44:03; DCAF12L1; ENSG00000198889; CTA
ELGTVNKVF

SEQ ID NO: 20146 - protein, 9 aa, Homo sapiens
  Table A; Target 20146; HLA-A*02:04; DCAF12L1; ENSG00000198889; CTA
ELNPSKTLL

SEQ ID NO: 20147 - protein, 9 aa, Homo sapiens
  Table A; Target 20147; HLA-A*23:01; DCAF12L1; ENSG00000198889; CTA
ELNPSKTLL

SEQ ID NO: 20148 - protein, 9 aa, Homo sapiens
  Table A; Target 20148; HLA-A*24:02; DCAF12L1; ENSG00000198889; CTA
ELNPSKTLL

SEQ ID NO: 20149 - protein, 9 aa, Homo sapiens
  Table A; Target 20149; HLA-A*25:01; DCAF12L1; ENSG00000198889; CTA
ELNPSKTLL

SEQ ID NO: 20150 - protein, 9 aa, Homo sapiens
  Table A; Target 20150; HLA-A*26:01; DCAF12L1; ENSG00000198889; CTA
ELNPSKTLL

SEQ ID NO: 20151 - protein, 9 aa, Homo sapiens
  Table A; Target 20151; HLA-A*32:01; DCAF12L1; ENSG00000198889; CTA
ELNPSKTLL

SEQ ID NO: 20152 - protein, 9 aa, Homo sapiens
  Table A; Target 20152; HLA-B*07:02; DCAF12L1; ENSG00000198889; CTA
ELNPSKTLL

SEQ ID NO: 20153 - protein, 9 aa, Homo sapiens
  Table A; Target 20153; HLA-B*08:01; DCAF12L1; ENSG00000198889; CTA
ELNPSKTLL

SEQ ID NO: 20154 - protein, 9 aa, Homo sapiens
  Table A; Target 20154; HLA-B*15:01; DCAF12L1; ENSG00000198889; CTA
ELNPSKTLL

SEQ ID NO: 20155 - protein, 9 aa, Homo sapiens
  Table A; Target 20155; HLA-B*37:01; DCAF12L1; ENSG00000198889; CTA
ELNPSKTLL

SEQ ID NO: 20156 - protein, 9 aa, Homo sapiens
  Table A; Target 20156; HLA-B*38:01; DCAF12L1; ENSG00000198889; CTA
ELNPSKTLL

SEQ ID NO: 20157 - protein, 9 aa, Homo sapiens
  Table A; Target 20157; HLA-C*07:04; DCAF12L1; ENSG00000198889; CTA
ELNPSKTLL

SEQ ID NO: 20158 - protein, 9 aa, Homo sapiens
  Table A; Target 20158; HLA-A*33:01; DCAF12L1; ENSG00000198889; CTA
ELRGYAVQR

SEQ ID NO: 20159 - protein, 9 aa, Homo sapiens
  Table A; Target 20159; HLA-A*33:03; DCAF12L1; ENSG00000198889; CTA
ELRGYAVQR

SEQ ID NO: 20160 - protein, 9 aa, Homo sapiens
  Table A; Target 20160; HLA-A*68:01; DCAF12L1; ENSG00000198889; CTA
ELRGYAVQR

SEQ ID NO: 20161 - protein, 9 aa, Homo sapiens
  Table A; Target 20161; HLA-A*26:01; DCAF12L1; ENSG00000198889; CTA
ENPNSLAIY

SEQ ID NO: 20162 - protein, 8 aa, Homo sapiens
  Table A; Target 20162; HLA-A*33:03; DCAF12L1; ENSG00000198889; CTA
ESSSGPAR

SEQ ID NO: 20163 - protein, 9 aa, Homo sapiens
  Table A; Target 20163; HLA-A*33:03; DCAF12L1; ENSG00000198889; CTA
ESSSGPARR

SEQ ID NO: 20164 - protein, 9 aa, Homo sapiens
  Table A; Target 20164; HLA-A*68:01; DCAF12L1; ENSG00000198889; CTA
ESSSGPARR

SEQ ID NO: 20165 - protein, 8 aa, Homo sapiens
  Table A; Target 20165; HLA-A*26:01; DCAF12L1; ENSG00000198889; CTA
EVFPNALY

SEQ ID NO: 20166 - protein, 9 aa, Homo sapiens
  Table A; Target 20166; HLA-A*26:01; DCAF12L1; ENSG00000198889; CTA
EVFPNALYT

SEQ ID NO: 20167 - protein, 10 aa, Homo sapiens
  Table A; Target 20167; HLA-A*25:01; DCAF12L1; ENSG00000198889; CTA
EVFPNALYTH

SEQ ID NO: 20168 - protein, 10 aa, Homo sapiens
  Table A; Target 20168; HLA-A*26:01; DCAF12L1; ENSG00000198889; CTA
EVFPNALYTH

SEQ ID NO: 20169 - protein, 10 aa, Homo sapiens
  Table A; Target 20169; HLA-A*68:02; DCAF12L1; ENSG00000198889; CTA
EVFPNALYTH

SEQ ID NO: 20170 - protein, 9 aa, Homo sapiens
  Table A; Target 20170; HLA-A*26:01; DCAF12L1; ENSG00000198889; CTA
EVGGWGPAR

SEQ ID NO: 20171 - protein, 9 aa, Homo sapiens
  Table A; Target 20171; HLA-A*33:01; DCAF12L1; ENSG00000198889; CTA
EVGGWGPAR

SEQ ID NO: 20172 - protein, 9 aa, Homo sapiens
  Table A; Target 20172; HLA-A*33:03; DCAF12L1; ENSG00000198889; CTA
EVGGWGPAR

SEQ ID NO: 20173 - protein, 9 aa, Homo sapiens
  Table A; Target 20173; HLA-A*68:01; DCAF12L1; ENSG00000198889; CTA
EVGGWGPAR

SEQ ID NO: 20174 - protein, 9 aa, Homo sapiens
  Table A; Target 20174; HLA-C*07:06; DCAF12L1; ENSG00000198889; CTA
EVGGWGPAR

SEQ ID NO: 20175 - protein, 9 aa, Homo sapiens
  Table A; Target 20175; HLA-A*33:03; DCAF12L1; ENSG00000198889; CTA
EVGLPVYAH

SEQ ID NO: 20176 - protein, 10 aa, Homo sapiens
  Table A; Target 20176; HLA-A*68:02; DCAF12L1; ENSG00000198889; CTA
EVGLPVYAHI

SEQ ID NO: 20177 - protein, 8 aa, Homo sapiens
  Table A; Target 20177; HLA-C*07:01; DCAF12L1; ENSG00000198889; CTA
FDGELRGY

SEQ ID NO: 20178 - protein, 8 aa, Homo sapiens
  Table A; Target 20178; HLA-C*16:01; DCAF12L1; ENSG00000198889; CTA
FDGELRGY

SEQ ID NO: 20179 - protein, 10 aa, Homo sapiens
  Table A; Target 20179; HLA-A*02:01; DCAF12L1; ENSG00000198889; CTA
FLEERASATL

SEQ ID NO: 20180 - protein, 10 aa, Homo sapiens
  Table A; Target 20180; HLA-A*02:03; DCAF12L1; ENSG00000198889; CTA
FLEERASATL

SEQ ID NO: 20181 - protein, 10 aa, Homo sapiens
  Table A; Target 20181; HLA-A*02:07; DCAF12L1; ENSG00000198889; CTA
FLEERASATL

SEQ ID NO: 20182 - protein, 9 aa, Homo sapiens
  Table A; Target 20182; HLA-B*54:01; DCAF12L1; ENSG00000198889; CTA
FPNALYTHC

SEQ ID NO: 20183 - protein, 9 aa, Homo sapiens
  Table A; Target 20183; HLA-B*56:01; DCAF12L1; ENSG00000198889; CTA
FPNALYTHC

SEQ ID NO: 20184 - protein, 10 aa, Homo sapiens
  Table A; Target 20184; HLA-B*35:01; DCAF12L1; ENSG00000198889; CTA
FPNALYTHCY

SEQ ID NO: 20185 - protein, 9 aa, Homo sapiens
  Table A; Target 20185; HLA-A*01:01; DCAF12L1; ENSG00000198889; CTA
FRDNVCLTY

SEQ ID NO: 20186 - protein, 9 aa, Homo sapiens
  Table A; Target 20186; HLA-A*02:01; DCAF12L1; ENSG00000198889; CTA
FVAGGPLPA

SEQ ID NO: 20187 - protein, 9 aa, Homo sapiens
  Table A; Target 20187; HLA-A*02:03; DCAF12L1; ENSG00000198889; CTA
FVAGGPLPA

SEQ ID NO: 20188 - protein, 9 aa, Homo sapiens
  Table A; Target 20188; HLA-B*13:02; DCAF12L1; ENSG00000198889; CTA
FVAGGPLPA

SEQ ID NO: 20189 - protein, 9 aa, Homo sapiens
  Table A; Target 20189; HLA-B*54:01; DCAF12L1; ENSG00000198889; CTA
FVAGGPLPA

SEQ ID NO: 20190 - protein, 9 aa, Homo sapiens
  Table A; Target 20190; HLA-B*56:01; DCAF12L1; ENSG00000198889; CTA
FVAGGPLPA

SEQ ID NO: 20191 - protein, 9 aa, Homo sapiens
  Table A; Target 20191; HLA-C*02:02; DCAF12L1; ENSG00000198889; CTA
FVAGGPLPA

SEQ ID NO: 20192 - protein, 9 aa, Homo sapiens
  Table A; Target 20192; HLA-C*03:03; DCAF12L1; ENSG00000198889; CTA
FVAGGPLPA

SEQ ID NO: 20193 - protein, 9 aa, Homo sapiens
  Table A; Target 20193; HLA-C*03:04; DCAF12L1; ENSG00000198889; CTA
FVAGGPLPA

SEQ ID NO: 20194 - protein, 9 aa, Homo sapiens
  Table A; Target 20194; HLA-C*07:04; DCAF12L1; ENSG00000198889; CTA
FVAGGPLPA

SEQ ID NO: 20195 - protein, 10 aa, Homo sapiens
  Table A; Target 20195; HLA-A*25:01; DCAF12L1; ENSG00000198889; CTA
FVAGGPLPAG

SEQ ID NO: 20196 - protein, 10 aa, Homo sapiens
  Table A; Target 20196; HLA-A*26:01; DCAF12L1; ENSG00000198889; CTA
FVAGGPLPAG

SEQ ID NO: 20197 - protein, 10 aa, Homo sapiens
  Table A; Target 20197; HLA-A*68:02; DCAF12L1; ENSG00000198889; CTA
FVAGGPLPAG

SEQ ID NO: 20198 - protein, 10 aa, Homo sapiens
  Table A; Target 20198; HLA-B*46:01; DCAF12L1; ENSG00000198889; CTA
FVAGGPLPAG

SEQ ID NO: 20199 - protein, 10 aa, Homo sapiens
  Table A; Target 20199; HLA-B*54:01; DCAF12L1; ENSG00000198889; CTA
FVAGGPLPAG

SEQ ID NO: 20200 - protein, 10 aa, Homo sapiens
  Table A; Target 20200; HLA-C*03:04; DCAF12L1; ENSG00000198889; CTA
FVAGGPLPAG

SEQ ID NO: 20201 - protein, 11 aa, Homo sapiens
  Table A; Target 20201; HLA-A*26:01; DCAF12L1; ENSG00000198889; CTA
FVAGGPLPAGL

SEQ ID NO: 20202 - protein, 11 aa, Homo sapiens
  Table A; Target 20202; HLA-A*68:02; DCAF12L1; ENSG00000198889; CTA
FVAGGPLPAGL

SEQ ID NO: 20203 - protein, 11 aa, Homo sapiens
  Table A; Target 20203; HLA-C*07:04; DCAF12L1; ENSG00000198889; CTA
FVAGGPLPAGL

SEQ ID NO: 20204 - protein, 9 aa, Homo sapiens
  Table A; Target 20204; HLA-A*26:01; DCAF12L1; ENSG00000198889; CTA
FVVDVESGH

SEQ ID NO: 20205 - protein, 10 aa, Homo sapiens
  Table A; Target 20205; HLA-A*02:03; DCAF12L1; ENSG00000198889; CTA
FVVDVESGHI

SEQ ID NO: 20206 - protein, 10 aa, Homo sapiens
  Table A; Target 20206; HLA-A*02:07; DCAF12L1; ENSG00000198889; CTA
FVVDVESGHI

SEQ ID NO: 20207 - protein, 10 aa, Homo sapiens
  Table A; Target 20207; HLA-A*25:01; DCAF12L1; ENSG00000198889; CTA
FVVDVESGHI

SEQ ID NO: 20208 - protein, 10 aa, Homo sapiens
  Table A; Target 20208; HLA-A*26:01; DCAF12L1; ENSG00000198889; CTA
FVVDVESGHI

SEQ ID NO: 20209 - protein, 10 aa, Homo sapiens
  Table A; Target 20209; HLA-A*68:01; DCAF12L1; ENSG00000198889; CTA
FVVDVESGHI

SEQ ID NO: 20210 - protein, 10 aa, Homo sapiens
  Table A; Target 20210; HLA-A*68:02; DCAF12L1; ENSG00000198889; CTA
FVVDVESGHI

SEQ ID NO: 20211 - protein, 10 aa, Homo sapiens
  Table A; Target 20211; HLA-C*16:04; DCAF12L1; ENSG00000198889; CTA
FVVDVESGHI

SEQ ID NO: 20212 - protein, 11 aa, Homo sapiens
  Table A; Target 20212; HLA-A*26:01; DCAF12L1; ENSG00000198889; CTA
FVVDVESGHIA

SEQ ID NO: 20213 - protein, 11 aa, Homo sapiens
  Table A; Target 20213; HLA-A*68:02; DCAF12L1; ENSG00000198889; CTA
FVVDVESGHIA

SEQ ID NO: 20214 - protein, 11 aa, Homo sapiens
  Table A; Target 20214; HLA-B*54:01; DCAF12L1; ENSG00000198889; CTA
FVVDVESGHIA

SEQ ID NO: 20215 - protein, 11 aa, Homo sapiens
  Table A; Target 20215; HLA-C*03:04; DCAF12L1; ENSG00000198889; CTA
FVVDVESGHIA

SEQ ID NO: 20216 - protein, 9 aa, Homo sapiens
  Table A; Target 20216; HLA-A*23:01; DCAF12L1; ENSG00000198889; CTA
FYDVRAQKF

SEQ ID NO: 20217 - protein, 9 aa, Homo sapiens
  Table A; Target 20217; HLA-A*24:02; DCAF12L1; ENSG00000198889; CTA
FYDVRAQKF

SEQ ID NO: 20218 - protein, 9 aa, Homo sapiens
  Table A; Target 20218; HLA-A*29:02; DCAF12L1; ENSG00000198889; CTA
FYDVRAQKF

SEQ ID NO: 20219 - protein, 9 aa, Homo sapiens
  Table A; Target 20219; HLA-A*32:01; DCAF12L1; ENSG00000198889; CTA
FYDVRAQKF

SEQ ID NO: 20220 - protein, 9 aa, Homo sapiens
  Table A; Target 20220; HLA-B*35:01; DCAF12L1; ENSG00000198889; CTA
FYDVRAQKF

SEQ ID NO: 20221 - protein, 9 aa, Homo sapiens
  Table A; Target 20221; HLA-B*35:03; DCAF12L1; ENSG00000198889; CTA
FYDVRAQKF

SEQ ID NO: 20222 - protein, 9 aa, Homo sapiens
  Table A; Target 20222; HLA-C*04:01; DCAF12L1; ENSG00000198889; CTA
FYDVRAQKF

SEQ ID NO: 20223 - protein, 9 aa, Homo sapiens
  Table A; Target 20223; HLA-C*07:04; DCAF12L1; ENSG00000198889; CTA
FYDVRAQKF

SEQ ID NO: 20224 - protein, 9 aa, Homo sapiens
  Table A; Target 20224; HLA-C*14:02; DCAF12L1; ENSG00000198889; CTA
FYDVRAQKF

SEQ ID NO: 20225 - protein, 9 aa, Homo sapiens
  Table A; Target 20225; HLA-B*44:02; DCAF12L1; ENSG00000198889; CTA
GEGPLLLKR

SEQ ID NO: 20226 - protein, 9 aa, Homo sapiens
  Table A; Target 20226; HLA-B*44:03; DCAF12L1; ENSG00000198889; CTA
GEGPLLLKR

SEQ ID NO: 20227 - protein, 8 aa, Homo sapiens
  Table A; Target 20227; HLA-A*30:01; DCAF12L1; ENSG00000198889; CTA
GELRGYAV

SEQ ID NO: 20228 - protein, 8 aa, Homo sapiens
  Table A; Target 20228; HLA-B*18:01; DCAF12L1; ENSG00000198889; CTA
GELRGYAV

SEQ ID NO: 20229 - protein, 8 aa, Homo sapiens
  Table A; Target 20229; HLA-B*37:01; DCAF12L1; ENSG00000198889; CTA
GELRGYAV

SEQ ID NO: 20230 - protein, 8 aa, Homo sapiens
  Table A; Target 20230; HLA-B*40:02; DCAF12L1; ENSG00000198889; CTA
GELRGYAV

SEQ ID NO: 20231 - protein, 8 aa, Homo sapiens
  Table A; Target 20231; HLA-B*49:01; DCAF12L1; ENSG00000198889; CTA
GELRGYAV

SEQ ID NO: 20232 - protein, 9 aa, Homo sapiens
  Table A; Target 20232; HLA-A*30:01; DCAF12L1; ENSG00000198889; CTA
GENPNSLAI

SEQ ID NO: 20233 - protein, 9 aa, Homo sapiens
  Table A; Target 20233; HLA-B*13:02; DCAF12L1; ENSG00000198889; CTA
GENPNSLAI

SEQ ID NO: 20234 - protein, 9 aa, Homo sapiens
  Table A; Target 20234; HLA-B*18:01; DCAF12L1; ENSG00000198889; CTA
GENPNSLAI

SEQ ID NO: 20235 - protein, 9 aa, Homo sapiens
  Table A; Target 20235; HLA-B*27:02; DCAF12L1; ENSG00000198889; CTA
GENPNSLAI

SEQ ID NO: 20236 - protein, 9 aa, Homo sapiens
  Table A; Target 20236; HLA-B*27:05; DCAF12L1; ENSG00000198889; CTA
GENPNSLAI

SEQ ID NO: 20237 - protein, 9 aa, Homo sapiens
  Table A; Target 20237; HLA-B*37:01; DCAF12L1; ENSG00000198889; CTA
GENPNSLAI

SEQ ID NO: 20238 - protein, 9 aa, Homo sapiens
  Table A; Target 20238; HLA-B*40:01; DCAF12L1; ENSG00000198889; CTA
GENPNSLAI

SEQ ID NO: 20239 - protein, 9 aa, Homo sapiens
  Table A; Target 20239; HLA-B*40:02; DCAF12L1; ENSG00000198889; CTA
GENPNSLAI

SEQ ID NO: 20240 - protein, 9 aa, Homo sapiens
  Table A; Target 20240; HLA-B*44:02; DCAF12L1; ENSG00000198889; CTA
GENPNSLAI

SEQ ID NO: 20241 - protein, 9 aa, Homo sapiens
  Table A; Target 20241; HLA-B*44:03; DCAF12L1; ENSG00000198889; CTA
GENPNSLAI

SEQ ID NO: 20242 - protein, 9 aa, Homo sapiens
  Table A; Target 20242; HLA-B*49:01; DCAF12L1; ENSG00000198889; CTA
GENPNSLAI

SEQ ID NO: 20243 - protein, 9 aa, Homo sapiens
  Table A; Target 20243; HLA-C*16:04; DCAF12L1; ENSG00000198889; CTA
GENPNSLAI

SEQ ID NO: 20244 - protein, 10 aa, Homo sapiens
  Table A; Target 20244; HLA-A*29:02; DCAF12L1; ENSG00000198889; CTA
GENPNSLAIY

SEQ ID NO: 20245 - protein, 10 aa, Homo sapiens
  Table A; Target 20245; HLA-A*30:02; DCAF12L1; ENSG00000198889; CTA
GENPNSLAIY

SEQ ID NO: 20246 - protein, 10 aa, Homo sapiens
  Table A; Target 20246; HLA-B*15:01; DCAF12L1; ENSG00000198889; CTA
GENPNSLAIY

SEQ ID NO: 20247 - protein, 10 aa, Homo sapiens
  Table A; Target 20247; HLA-B*15:03; DCAF12L1; ENSG00000198889; CTA
GENPNSLAIY

SEQ ID NO: 20248 - protein, 10 aa, Homo sapiens
  Table A; Target 20248; HLA-B*18:01; DCAF12L1; ENSG00000198889; CTA
GENPNSLAIY

SEQ ID NO: 20249 - protein, 10 aa, Homo sapiens
  Table A; Target 20249; HLA-B*27:02; DCAF12L1; ENSG00000198889; CTA
GENPNSLAIY

SEQ ID NO: 20250 - protein, 10 aa, Homo sapiens
  Table A; Target 20250; HLA-B*40:01; DCAF12L1; ENSG00000198889; CTA
GENPNSLAIY

SEQ ID NO: 20251 - protein, 10 aa, Homo sapiens
  Table A; Target 20251; HLA-B*44:02; DCAF12L1; ENSG00000198889; CTA
GENPNSLAIY

SEQ ID NO: 20252 - protein, 10 aa, Homo sapiens
  Table A; Target 20252; HLA-B*44:03; DCAF12L1; ENSG00000198889; CTA
GENPNSLAIY

SEQ ID NO: 20253 - protein, 10 aa, Homo sapiens
  Table A; Target 20253; HLA-C*02:02; DCAF12L1; ENSG00000198889; CTA
GENPNSLAIY

SEQ ID NO: 20254 - protein, 10 aa, Homo sapiens
  Table A; Target 20254; HLA-C*16:04; DCAF12L1; ENSG00000198889; CTA
GENPNSLAIY

SEQ ID NO: 20255 - protein, 9 aa, Homo sapiens
  Table A; Target 20255; HLA-A*29:02; DCAF12L1; ENSG00000198889; CTA
GFDGELRGY

SEQ ID NO: 20256 - protein, 9 aa, Homo sapiens
  Table A; Target 20256; HLA-A*30:02; DCAF12L1; ENSG00000198889; CTA
GFDGELRGY

SEQ ID NO: 20257 - protein, 9 aa, Homo sapiens
  Table A; Target 20257; HLA-B*44:02; DCAF12L1; ENSG00000198889; CTA
GFDGELRGY

SEQ ID NO: 20258 - protein, 11 aa, Homo sapiens
  Table A; Target 20258; HLA-A*01:01; DCAF12L1; ENSG00000198889; CTA
GGENPNSLAIY

SEQ ID NO: 20259 - protein, 11 aa, Homo sapiens
  Table A; Target 20259; HLA-A*30:02; DCAF12L1; ENSG00000198889; CTA
GGENPNSLAIY

SEQ ID NO: 20260 - protein, 8 aa, Homo sapiens
  Table A; Target 20260; HLA-C*16:01; DCAF12L1; ENSG00000198889; CTA
GGTGVRSL

SEQ ID NO: 20261 - protein, 8 aa, Homo sapiens
  Table A; Target 20261; HLA-C*16:02; DCAF12L1; ENSG00000198889; CTA
GGTGVRSL

SEQ ID NO: 20262 - protein, 10 aa, Homo sapiens
  Table A; Target 20262; HLA-C*16:01; DCAF12L1; ENSG00000198889; CTA
GGTGVRSLSF

SEQ ID NO: 20263 - protein, 11 aa, Homo sapiens
  Table A; Target 20263; HLA-A*30:02; DCAF12L1; ENSG00000198889; CTA
GGTGVRSLSFY

SEQ ID NO: 20264 - protein, 9 aa, Homo sapiens
  Table A; Target 20264; HLA-A*02:04; DCAF12L1; ENSG00000198889; CTA
GHIARIPLL

SEQ ID NO: 20265 - protein, 9 aa, Homo sapiens
  Table A; Target 20265; HLA-A*24:02; DCAF12L1; ENSG00000198889; CTA
GHIARIPLL

SEQ ID NO: 20266 - protein, 9 aa, Homo sapiens
  Table A; Target 20266; HLA-B*38:01; DCAF12L1; ENSG00000198889; CTA
GHIARIPLL

SEQ ID NO: 20267 - protein, 9 aa, Homo sapiens
  Table A; Target 20267; HLA-A*02:04; DCAF12L1; ENSG00000198889; CTA
GHKDWIFAV

SEQ ID NO: 20268 - protein, 10 aa, Homo sapiens
  Table A; Target 20268; HLA-A*01:01; DCAF12L1; ENSG00000198889; CTA
GMEVFPNALY

SEQ ID NO: 20269 - protein, 10 aa, Homo sapiens
  Table A; Target 20269; HLA-A*29:02; DCAF12L1; ENSG00000198889; CTA
GMEVFPNALY

SEQ ID NO: 20270 - protein, 10 aa, Homo sapiens
  Table A; Target 20270; HLA-A*30:02; DCAF12L1; ENSG00000198889; CTA
GMEVFPNALY

SEQ ID NO: 20271 - protein, 11 aa, Homo sapiens
  Table A; Target 20271; HLA-A*29:02; DCAF12L1; ENSG00000198889; CTA
GPLPAGLHGNY

SEQ ID NO: 20272 - protein, 11 aa, Homo sapiens
  Table A; Target 20272; HLA-A*30:02; DCAF12L1; ENSG00000198889; CTA
GPLPAGLHGNY

SEQ ID NO: 20273 - protein, 11 aa, Homo sapiens
  Table A; Target 20273; HLA-B*35:01; DCAF12L1; ENSG00000198889; CTA
GPLPAGLHGNY

SEQ ID NO: 20274 - protein, 8 aa, Homo sapiens
  Table A; Target 20274; HLA-A*30:02; DCAF12L1; ENSG00000198889; CTA
GQGSLLFY

SEQ ID NO: 20275 - protein, 8 aa, Homo sapiens
  Table A; Target 20275; HLA-B*15:01; DCAF12L1; ENSG00000198889; CTA
GQGSLLFY

SEQ ID NO: 20276 - protein, 8 aa, Homo sapiens
  Table A; Target 20276; HLA-C*16:01; DCAF12L1; ENSG00000198889; CTA
GSALSRLL

SEQ ID NO: 20277 - protein, 8 aa, Homo sapiens
  Table A; Target 20277; HLA-A*32:01; DCAF12L1; ENSG00000198889; CTA
GSHSHVSF

SEQ ID NO: 20278 - protein, 8 aa, Homo sapiens
  Table A; Target 20278; HLA-B*37:01; DCAF12L1; ENSG00000198889; CTA
GSHSHVSF

SEQ ID NO: 20279 - protein, 8 aa, Homo sapiens
  Table A; Target 20279; HLA-B*58:01; DCAF12L1; ENSG00000198889; CTA
GSHSHVSF

SEQ ID NO: 20280 - protein, 8 aa, Homo sapiens
  Table A; Target 20280; HLA-C*16:01; DCAF12L1; ENSG00000198889; CTA
GSHSHVSF

SEQ ID NO: 20281 - protein, 9 aa, Homo sapiens
  Table A; Target 20281; HLA-B*07:02; DCAF12L1; ENSG00000198889; CTA
GSRDGTVAL

SEQ ID NO: 20282 - protein, 9 aa, Homo sapiens
  Table A; Target 20282; HLA-B*15:03; DCAF12L1; ENSG00000198889; CTA
GSRDGTVAL

SEQ ID NO: 20283 - protein, 9 aa, Homo sapiens
  Table A; Target 20283; HLA-B*46:01; DCAF12L1; ENSG00000198889; CTA
GSRDGTVAL

SEQ ID NO: 20284 - protein, 9 aa, Homo sapiens
  Table A; Target 20284; HLA-C*01:02; DCAF12L1; ENSG00000198889; CTA
GSRDGTVAL

SEQ ID NO: 20285 - protein, 9 aa, Homo sapiens
  Table A; Target 20285; HLA-C*03:03; DCAF12L1; ENSG00000198889; CTA
GSRDGTVAL

SEQ ID NO: 20286 - protein, 9 aa, Homo sapiens
  Table A; Target 20286; HLA-C*03:04; DCAF12L1; ENSG00000198889; CTA
GSRDGTVAL

SEQ ID NO: 20287 - protein, 9 aa, Homo sapiens
  Table A; Target 20287; HLA-C*07:02; DCAF12L1; ENSG00000198889; CTA
GSRDGTVAL

SEQ ID NO: 20288 - protein, 9 aa, Homo sapiens
  Table A; Target 20288; HLA-C*16:01; DCAF12L1; ENSG00000198889; CTA
GSRDGTVAL

SEQ ID NO: 20289 - protein, 10 aa, Homo sapiens
  Table A; Target 20289; HLA-A*25:01; DCAF12L1; ENSG00000198889; CTA
GSRDGTVALW

SEQ ID NO: 20290 - protein, 10 aa, Homo sapiens
  Table A; Target 20290; HLA-B*57:01; DCAF12L1; ENSG00000198889; CTA
GSRDGTVALW

SEQ ID NO: 20291 - protein, 10 aa, Homo sapiens
  Table A; Target 20291; HLA-B*58:01; DCAF12L1; ENSG00000198889; CTA
GSRDGTVALW

SEQ ID NO: 20292 - protein, 11 aa, Homo sapiens
  Table A; Target 20292; HLA-A*31:01; DCAF12L1; ENSG00000198889; CTA
GSRDGTVALWR

SEQ ID NO: 20293 - protein, 10 aa, Homo sapiens
  Table A; Target 20293; HLA-A*01:01; DCAF12L1; ENSG00000198889; CTA
GTGQGSLLFY

SEQ ID NO: 20294 - protein, 10 aa, Homo sapiens
  Table A; Target 20294; HLA-A*29:02; DCAF12L1; ENSG00000198889; CTA
GTGQGSLLFY

SEQ ID NO: 20295 - protein, 10 aa, Homo sapiens
  Table A; Target 20295; HLA-A*30:02; DCAF12L1; ENSG00000198889; CTA
GTGQGSLLFY

SEQ ID NO: 20296 - protein, 9 aa, Homo sapiens
  Table A; Target 20296; HLA-A*25:01; DCAF12L1; ENSG00000198889; CTA
GTGVRSLSF

SEQ ID NO: 20297 - protein, 9 aa, Homo sapiens
  Table A; Target 20297; HLA-A*32:01; DCAF12L1; ENSG00000198889; CTA
GTGVRSLSF

SEQ ID NO: 20298 - protein, 9 aa, Homo sapiens
  Table A; Target 20298; HLA-B*37:01; DCAF12L1; ENSG00000198889; CTA
GTGVRSLSF

SEQ ID NO: 20299 - protein, 9 aa, Homo sapiens
  Table A; Target 20299; HLA-B*58:01; DCAF12L1; ENSG00000198889; CTA
GTGVRSLSF

SEQ ID NO: 20300 - protein, 9 aa, Homo sapiens
  Table A; Target 20300; HLA-C*16:01; DCAF12L1; ENSG00000198889; CTA
GTGVRSLSF

SEQ ID NO: 20301 - protein, 11 aa, Homo sapiens
  Table A; Target 20301; HLA-A*31:01; DCAF12L1; ENSG00000198889; CTA
GTGVRSLSFYR

SEQ ID NO: 20302 - protein, 11 aa, Homo sapiens
  Table A; Target 20302; HLA-A*25:01; DCAF12L1; ENSG00000198889; CTA
GTVNKVFASQW

SEQ ID NO: 20303 - protein, 11 aa, Homo sapiens
  Table A; Target 20303; HLA-B*57:01; DCAF12L1; ENSG00000198889; CTA
GTVNKVFASQW

SEQ ID NO: 20304 - protein, 9 aa, Homo sapiens
  Table A; Target 20304; HLA-A*31:01; DCAF12L1; ENSG00000198889; CTA
GVRSLSFYR

SEQ ID NO: 20305 - protein, 9 aa, Homo sapiens
  Table A; Target 20305; HLA-A*11:01; DCAF12L1; ENSG00000198889; CTA
HAIELNPSK

SEQ ID NO: 20306 - protein, 9 aa, Homo sapiens
  Table A; Target 20306; HLA-A*26:01; DCAF12L1; ENSG00000198889; CTA
HAIELNPSK

SEQ ID NO: 20307 - protein, 9 aa, Homo sapiens
  Table A; Target 20307; HLA-A*68:01; DCAF12L1; ENSG00000198889; CTA
HAIELNPSK

SEQ ID NO: 20308 - protein, 9 aa, Homo sapiens
  Table A; Target 20308; HLA-B*35:01; DCAF12L1; ENSG00000198889; CTA
HAIELNPSK

SEQ ID NO: 20309 - protein, 9 aa, Homo sapiens
  Table A; Target 20309; HLA-B*54:01; DCAF12L1; ENSG00000198889; CTA
HAIELNPSK

SEQ ID NO: 20310 - protein, 9 aa, Homo sapiens
  Table A; Target 20310; HLA-C*07:06; DCAF12L1; ENSG00000198889; CTA
HAIELNPSK

SEQ ID NO: 20311 - protein, 11 aa, Homo sapiens
  Table A; Target 20311; HLA-C*03:03; DCAF12L1; ENSG00000198889; CTA
HAIELNPSKTL

SEQ ID NO: 20312 - protein, 11 aa, Homo sapiens
  Table A; Target 20312; HLA-C*03:04; DCAF12L1; ENSG00000198889; CTA
HAIELNPSKTL

SEQ ID NO: 20313 - protein, 9 aa, Homo sapiens
  Table A; Target 20313; HLA-A*29:02; DCAF12L1; ENSG00000198889; CTA
HIARIPLLR

SEQ ID NO: 20314 - protein, 9 aa, Homo sapiens
  Table A; Target 20314; HLA-A*33:03; DCAF12L1; ENSG00000198889; CTA
HIARIPLLR

SEQ ID NO: 20315 - protein, 9 aa, Homo sapiens
  Table A; Target 20315; HLA-A*01:01; DCAF12L1; ENSG00000198889; CTA
HSEVGLPVY

SEQ ID NO: 20316 - protein, 9 aa, Homo sapiens
  Table A; Target 20316; HLA-A*30:02; DCAF12L1; ENSG00000198889; CTA
HSEVGLPVY

SEQ ID NO: 20317 - protein, 9 aa, Homo sapiens
  Table A; Target 20317; HLA-B*35:01; DCAF12L1; ENSG00000198889; CTA
HSEVGLPVY

SEQ ID NO: 20318 - protein, 9 aa, Homo sapiens
  Table A; Target 20318; HLA-B*39:01; DCAF12L1; ENSG00000198889; CTA
HSEVGLPVY

SEQ ID NO: 20319 - protein, 9 aa, Homo sapiens
  Table A; Target 20319; HLA-B*46:01; DCAF12L1; ENSG00000198889; CTA
HSEVGLPVY

SEQ ID NO: 20320 - protein, 9 aa, Homo sapiens
  Table A; Target 20320; HLA-B*55:01; DCAF12L1; ENSG00000198889; CTA
HSEVGLPVY

SEQ ID NO: 20321 - protein, 9 aa, Homo sapiens
  Table A; Target 20321; HLA-B*58:01; DCAF12L1; ENSG00000198889; CTA
HSEVGLPVY

SEQ ID NO: 20322 - protein, 9 aa, Homo sapiens
  Table A; Target 20322; HLA-C*03:03; DCAF12L1; ENSG00000198889; CTA
HSEVGLPVY

SEQ ID NO: 20323 - protein, 9 aa, Homo sapiens
  Table A; Target 20323; HLA-C*05:01; DCAF12L1; ENSG00000198889; CTA
HSEVGLPVY

SEQ ID NO: 20324 - protein, 9 aa, Homo sapiens
  Table A; Target 20324; HLA-C*07:01; DCAF12L1; ENSG00000198889; CTA
HSEVGLPVY

SEQ ID NO: 20325 - protein, 9 aa, Homo sapiens
  Table A; Target 20325; HLA-C*07:04; DCAF12L1; ENSG00000198889; CTA
HSEVGLPVY

SEQ ID NO: 20326 - protein, 9 aa, Homo sapiens
  Table A; Target 20326; HLA-C*16:02; DCAF12L1; ENSG00000198889; CTA
HSEVGLPVY

SEQ ID NO: 20327 - protein, 9 aa, Homo sapiens
  Table A; Target 20327; HLA-A*30:01; DCAF12L1; ENSG00000198889; CTA
IELNPSKTL

SEQ ID NO: 20328 - protein, 9 aa, Homo sapiens
  Table A; Target 20328; HLA-B*37:01; DCAF12L1; ENSG00000198889; CTA
IELNPSKTL

SEQ ID NO: 20329 - protein, 9 aa, Homo sapiens
  Table A; Target 20329; HLA-B*40:01; DCAF12L1; ENSG00000198889; CTA
IELNPSKTL

SEQ ID NO: 20330 - protein, 9 aa, Homo sapiens
  Table A; Target 20330; HLA-B*40:02; DCAF12L1; ENSG00000198889; CTA
IELNPSKTL

SEQ ID NO: 20331 - protein, 9 aa, Homo sapiens
  Table A; Target 20331; HLA-B*44:02; DCAF12L1; ENSG00000198889; CTA
IELNPSKTL

SEQ ID NO: 20332 - protein, 9 aa, Homo sapiens
  Table A; Target 20332; HLA-B*44:03; DCAF12L1; ENSG00000198889; CTA
IELNPSKTL

SEQ ID NO: 20333 - protein, 9 aa, Homo sapiens
  Table A; Target 20333; HLA-B*49:01; DCAF12L1; ENSG00000198889; CTA
IELNPSKTL

SEQ ID NO: 20334 - protein, 9 aa, Homo sapiens
  Table A; Target 20334; HLA-C*16:04; DCAF12L1; ENSG00000198889; CTA
IELNPSKTL

SEQ ID NO: 20335 - protein, 10 aa, Homo sapiens
  Table A; Target 20335; HLA-A*23:01; DCAF12L1; ENSG00000198889; CTA
IELNPSKTLL

SEQ ID NO: 20336 - protein, 10 aa, Homo sapiens
  Table A; Target 20336; HLA-A*30:01; DCAF12L1; ENSG00000198889; CTA
IELNPSKTLL

SEQ ID NO: 20337 - protein, 10 aa, Homo sapiens
  Table A; Target 20337; HLA-B*37:01; DCAF12L1; ENSG00000198889; CTA
IELNPSKTLL

SEQ ID NO: 20338 - protein, 10 aa, Homo sapiens
  Table A; Target 20338; HLA-B*40:01; DCAF12L1; ENSG00000198889; CTA
IELNPSKTLL

SEQ ID NO: 20339 - protein, 10 aa, Homo sapiens
  Table A; Target 20339; HLA-B*40:02; DCAF12L1; ENSG00000198889; CTA
IELNPSKTLL

SEQ ID NO: 20340 - protein, 10 aa, Homo sapiens
  Table A; Target 20340; HLA-B*44:02; DCAF12L1; ENSG00000198889; CTA
IELNPSKTLL

SEQ ID NO: 20341 - protein, 10 aa, Homo sapiens
  Table A; Target 20341; HLA-B*44:03; DCAF12L1; ENSG00000198889; CTA
IELNPSKTLL

SEQ ID NO: 20342 - protein, 10 aa, Homo sapiens
  Table A; Target 20342; HLA-B*49:01; DCAF12L1; ENSG00000198889; CTA
IELNPSKTLL

SEQ ID NO: 20343 - protein, 9 aa, Homo sapiens
  Table A; Target 20343; HLA-C*16:02; DCAF12L1; ENSG00000198889; CTA
IINPSNRKV

SEQ ID NO: 20344 - protein, 9 aa, Homo sapiens
  Table A; Target 20344; HLA-B*07:02; DCAF12L1; ENSG00000198889; CTA
IPLLRDSEA

SEQ ID NO: 20345 - protein, 9 aa, Homo sapiens
  Table A; Target 20345; HLA-B*54:01; DCAF12L1; ENSG00000198889; CTA
IPLLRDSEA

SEQ ID NO: 20346 - protein, 9 aa, Homo sapiens
  Table A; Target 20346; HLA-B*55:01; DCAF12L1; ENSG00000198889; CTA
IPLLRDSEA

SEQ ID NO: 20347 - protein, 9 aa, Homo sapiens
  Table A; Target 20347; HLA-B*56:01; DCAF12L1; ENSG00000198889; CTA
IPLLRDSEA

SEQ ID NO: 20348 - protein, 10 aa, Homo sapiens
  Table A; Target 20348; HLA-B*58:01; DCAF12L1; ENSG00000198889; CTA
ITVGTGQGSL

SEQ ID NO: 20349 - protein, 10 aa, Homo sapiens
  Table A; Target 20349; HLA-C*03:03; DCAF12L1; ENSG00000198889; CTA
ITVGTGQGSL

SEQ ID NO: 20350 - protein, 10 aa, Homo sapiens
  Table A; Target 20350; HLA-C*03:04; DCAF12L1; ENSG00000198889; CTA
ITVGTGQGSL

SEQ ID NO: 20351 - protein, 11 aa, Homo sapiens
  Table A; Target 20351; HLA-B*58:01; DCAF12L1; ENSG00000198889; CTA
ITVGTGQGSLL

SEQ ID NO: 20352 - protein, 11 aa, Homo sapiens
  Table A; Target 20352; HLA-C*07:04; DCAF12L1; ENSG00000198889; CTA
ITVGTGQGSLL

SEQ ID NO: 20353 - protein, 10 aa, Homo sapiens
  Table A; Target 20353; HLA-C*07:02; DCAF12L1; ENSG00000198889; CTA
IYQLPSLDPL

SEQ ID NO: 20354 - protein, 10 aa, Homo sapiens
  Table A; Target 20354; HLA-C*14:02; DCAF12L1; ENSG00000198889; CTA
IYQLPSLDPL

SEQ ID NO: 20355 - protein, 11 aa, Homo sapiens
  Table A; Target 20355; HLA-A*23:01; DCAF12L1; ENSG00000198889; CTA
KFLEERASATL

SEQ ID NO: 20356 - protein, 11 aa, Homo sapiens
  Table A; Target 20356; HLA-A*24:02; DCAF12L1; ENSG00000198889; CTA
KFLEERASATL

SEQ ID NO: 20357 - protein, 11 aa, Homo sapiens
  Table A; Target 20357; HLA-A*02:01; DCAF12L1; ENSG00000198889; CTA
KLFVAGGPLPA

SEQ ID NO: 20358 - protein, 11 aa, Homo sapiens
  Table A; Target 20358; HLA-A*02:03; DCAF12L1; ENSG00000198889; CTA
KLFVAGGPLPA

SEQ ID NO: 20359 - protein, 11 aa, Homo sapiens
  Table A; Target 20359; HLA-B*56:01; DCAF12L1; ENSG00000198889; CTA
KLFVAGGPLPA

SEQ ID NO: 20360 - protein, 11 aa, Homo sapiens
  Table A; Target 20360; HLA-A*31:01; DCAF12L1; ENSG00000198889; CTA
KVFASQWLNSR

SEQ ID NO: 20361 - protein, 8 aa, Homo sapiens
  Table A; Target 20361; HLA-B*57:01; DCAF12L1; ENSG00000198889; CTA
KVREVGGW

SEQ ID NO: 20362 - protein, 11 aa, Homo sapiens
  Table A; Target 20362; HLA-C*03:04; DCAF12L1; ENSG00000198889; CTA
LAAADGEGPLL

SEQ ID NO: 20363 - protein, 9 aa, Homo sapiens
  Table A; Target 20363; HLA-B*46:01; DCAF12L1; ENSG00000198889; CTA
LAIYQLPSL

SEQ ID NO: 20364 - protein, 9 aa, Homo sapiens
  Table A; Target 20364; HLA-C*03:03; DCAF12L1; ENSG00000198889; CTA
LAIYQLPSL

SEQ ID NO: 20365 - protein, 9 aa, Homo sapiens
  Table A; Target 20365; HLA-C*03:04; DCAF12L1; ENSG00000198889; CTA
LAIYQLPSL

SEQ ID NO: 20366 - protein, 11 aa, Homo sapiens
  Table A; Target 20366; HLA-B*39:01; DCAF12L1; ENSG00000198889; CTA
LATGGENPNSL

SEQ ID NO: 20367 - protein, 9 aa, Homo sapiens
  Table A; Target 20367; HLA-A*30:01; DCAF12L1; ENSG00000198889; CTA
LEERASATL

SEQ ID NO: 20368 - protein, 9 aa, Homo sapiens
  Table A; Target 20368; HLA-B*18:01; DCAF12L1; ENSG00000198889; CTA
LEERASATL

SEQ ID NO: 20369 - protein, 9 aa, Homo sapiens
  Table A; Target 20369; HLA-B*40:01; DCAF12L1; ENSG00000198889; CTA
LEERASATL

SEQ ID NO: 20370 - protein, 9 aa, Homo sapiens
  Table A; Target 20370; HLA-B*40:02; DCAF12L1; ENSG00000198889; CTA
LEERASATL

SEQ ID NO: 20371 - protein, 9 aa, Homo sapiens
  Table A; Target 20371; HLA-B*49:01; DCAF12L1; ENSG00000198889; CTA
LEERASATL

SEQ ID NO: 20372 - protein, 9 aa, Homo sapiens
  Table A; Target 20372; HLA-A*30:01; DCAF12L1; ENSG00000198889; CTA
LELGTVNKV

SEQ ID NO: 20373 - protein, 9 aa, Homo sapiens
  Table A; Target 20373; HLA-B*40:01; DCAF12L1; ENSG00000198889; CTA
LELGTVNKV

SEQ ID NO: 20374 - protein, 9 aa, Homo sapiens
  Table A; Target 20374; HLA-B*49:01; DCAF12L1; ENSG00000198889; CTA
LELGTVNKV

SEQ ID NO: 20375 - protein, 10 aa, Homo sapiens
  Table A; Target 20375; HLA-B*44:02; DCAF12L1; ENSG00000198889; CTA
LELGTVNKVF

SEQ ID NO: 20376 - protein, 10 aa, Homo sapiens
  Table A; Target 20376; HLA-B*44:03; DCAF12L1; ENSG00000198889; CTA
LELGTVNKVF

SEQ ID NO: 20377 - protein, 9 aa, Homo sapiens
  Table A; Target 20377; HLA-B*39:01; DCAF12L1; ENSG00000198889; CTA
LESSSGPAR

SEQ ID NO: 20378 - protein, 8 aa, Homo sapiens
  Table A; Target 20378; HLA-C*14:02; DCAF12L1; ENSG00000198889; CTA
LFVAGGPL

SEQ ID NO: 20379 - protein, 10 aa, Homo sapiens
  Table A; Target 20379; HLA-A*24:02; DCAF12L1; ENSG00000198889; CTA
LFYDVRAQKF

SEQ ID NO: 20380 - protein, 9 aa, Homo sapiens
  Table A; Target 20380; HLA-A*01:01; DCAF12L1; ENSG00000198889; CTA
LGAVSLDGY

SEQ ID NO: 20381 - protein, 9 aa, Homo sapiens
  Table A; Target 20381; HLA-A*30:02; DCAF12L1; ENSG00000198889; CTA
LGAVSLDGY

SEQ ID NO: 20382 - protein, 9 aa, Homo sapiens
  Table A; Target 20382; HLA-B*46:01; DCAF12L1; ENSG00000198889; CTA
LGAVSLDGY

SEQ ID NO: 20383 - protein, 8 aa, Homo sapiens
  Table A; Target 20383; HLA-C*16:01; DCAF12L1; ENSG00000198889; CTA
LGTVNKVF

SEQ ID NO: 20384 - protein, 9 aa, Homo sapiens
  Table A; Target 20384; HLA-A*02:04; DCAF12L1; ENSG00000198889; CTA
LLSIRLPYF

SEQ ID NO: 20385 - protein, 9 aa, Homo sapiens
  Table A; Target 20385; HLA-A*24:02; DCAF12L1; ENSG00000198889; CTA
LLSIRLPYF

SEQ ID NO: 20386 - protein, 9 aa, Homo sapiens
  Table A; Target 20386; HLA-A*02:01; DCAF12L1; ENSG00000198889; CTA
LLTERQLEL

SEQ ID NO: 20387 - protein, 9 aa, Homo sapiens
  Table A; Target 20387; HLA-A*02:03; DCAF12L1; ENSG00000198889; CTA
LLTERQLEL

SEQ ID NO: 20388 - protein, 9 aa, Homo sapiens
  Table A; Target 20388; HLA-A*02:04; DCAF12L1; ENSG00000198889; CTA
LLTERQLEL

SEQ ID NO: 20389 - protein, 9 aa, Homo sapiens
  Table A; Target 20389; HLA-A*02:07; DCAF12L1; ENSG00000198889; CTA
LLTERQLEL

SEQ ID NO: 20390 - protein, 9 aa, Homo sapiens
  Table A; Target 20390; HLA-B*08:01; DCAF12L1; ENSG00000198889; CTA
LLTERQLEL

SEQ ID NO: 20391 - protein, 9 aa, Homo sapiens
  Table A; Target 20391; HLA-C*03:04; DCAF12L1; ENSG00000198889; CTA
LLTERQLEL

SEQ ID NO: 20392 - protein, 9 aa, Homo sapiens
  Table A; Target 20392; HLA-C*16:01; DCAF12L1; ENSG00000198889; CTA
LLTERQLEL

SEQ ID NO: 20393 - protein, 9 aa, Homo sapiens
  Table A; Target 20393; HLA-C*16:02; DCAF12L1; ENSG00000198889; CTA
LLTERQLEL

SEQ ID NO: 20394 - protein, 9 aa, Homo sapiens
  Table A; Target 20394; HLA-A*26:01; DCAF12L1; ENSG00000198889; CTA
LPAGLHGNY

SEQ ID NO: 20395 - protein, 9 aa, Homo sapiens
  Table A; Target 20395; HLA-A*29:02; DCAF12L1; ENSG00000198889; CTA
LPAGLHGNY

SEQ ID NO: 20396 - protein, 9 aa, Homo sapiens
  Table A; Target 20396; HLA-A*30:02; DCAF12L1; ENSG00000198889; CTA
LPAGLHGNY

SEQ ID NO: 20397 - protein, 9 aa, Homo sapiens
  Table A; Target 20397; HLA-B*35:01; DCAF12L1; ENSG00000198889; CTA
LPAGLHGNY

SEQ ID NO: 20398 - protein, 9 aa, Homo sapiens
  Table A; Target 20398; HLA-B*55:01; DCAF12L1; ENSG00000198889; CTA
LPAGLHGNY

SEQ ID NO: 20399 - protein, 10 aa, Homo sapiens
  Table A; Target 20399; HLA-B*54:01; DCAF12L1; ENSG00000198889; CTA
LPAGLHGNYA

SEQ ID NO: 20400 - protein, 10 aa, Homo sapiens
  Table A; Target 20400; HLA-B*56:01; DCAF12L1; ENSG00000198889; CTA
LPAGLHGNYA

SEQ ID NO: 20401 - protein, 10 aa, Homo sapiens
  Table A; Target 20401; HLA-B*35:01; DCAF12L1; ENSG00000198889; CTA
LPELLTERQL

SEQ ID NO: 20402 - protein, 10 aa, Homo sapiens
  Table A; Target 20402; HLA-B*35:03; DCAF12L1; ENSG00000198889; CTA
LPELLTERQL

SEQ ID NO: 20403 - protein, 9 aa, Homo sapiens
  Table A; Target 20403; HLA-B*07:02; DCAF12L1; ENSG00000198889; CTA
LPSLDPLCL

SEQ ID NO: 20404 - protein, 9 aa, Homo sapiens
  Table A; Target 20404; HLA-B*35:01; DCAF12L1; ENSG00000198889; CTA
LPSLDPLCL

SEQ ID NO: 20405 - protein, 9 aa, Homo sapiens
  Table A; Target 20405; HLA-B*35:03; DCAF12L1; ENSG00000198889; CTA
LPSLDPLCL

SEQ ID NO: 20406 - protein, 9 aa, Homo sapiens
  Table A; Target 20406; HLA-B*51:01; DCAF12L1; ENSG00000198889; CTA
LPSLDPLCL

SEQ ID NO: 20407 - protein, 8 aa, Homo sapiens
  Table A; Target 20407; HLA-B*51:01; DCAF12L1; ENSG00000198889; CTA
LPYFRDNV

SEQ ID NO: 20408 - protein, 9 aa, Homo sapiens
  Table A; Target 20408; HLA-B*51:01; DCAF12L1; ENSG00000198889; CTA
LPYFRDNVC

SEQ ID NO: 20409 - protein, 9 aa, Homo sapiens
  Table A; Target 20409; HLA-B*54:01; DCAF12L1; ENSG00000198889; CTA
LPYFRDNVC

SEQ ID NO: 20410 - protein, 9 aa, Homo sapiens
  Table A; Target 20410; HLA-B*27:05; DCAF12L1; ENSG00000198889; CTA
LRQDQQNIR

SEQ ID NO: 20411 - protein, 9 aa, Homo sapiens
  Table A; Target 20411; HLA-A*01:01; DCAF12L1; ENSG00000198889; CTA
LSDTVAVSG

SEQ ID NO: 20412 - protein, 9 aa, Homo sapiens
  Table A; Target 20412; HLA-C*05:01; DCAF12L1; ENSG00000198889; CTA
LSDTVAVSG

SEQ ID NO: 20413 - protein, 8 aa, Homo sapiens
  Table A; Target 20413; HLA-B*57:01; DCAF12L1; ENSG00000198889; CTA
LSIRLPYF

SEQ ID NO: 20414 - protein, 10 aa, Homo sapiens
  Table A; Target 20414; HLA-A*01:01; DCAF12L1; ENSG00000198889; CTA
LTYCDDMSVY

SEQ ID NO: 20415 - protein, 9 aa, Homo sapiens
  Table A; Target 20415; HLA-A*33:03; DCAF12L1; ENSG00000198889; CTA
MAQQQTGSR

SEQ ID NO: 20416 - protein, 9 aa, Homo sapiens
  Table A; Target 20416; HLA-C*07:06; DCAF12L1; ENSG00000198889; CTA
MAQQQTGSR

SEQ ID NO: 20417 - protein, 8 aa, Homo sapiens
  Table A; Target 20417; HLA-A*30:01; DCAF12L1; ENSG00000198889; CTA
MEVFPNAL

SEQ ID NO: 20418 - protein, 8 aa, Homo sapiens
  Table A; Target 20418; HLA-B*18:01; DCAF12L1; ENSG00000198889; CTA
MEVFPNAL

SEQ ID NO: 20419 - protein, 8 aa, Homo sapiens
  Table A; Target 20419; HLA-B*40:01; DCAF12L1; ENSG00000198889; CTA
MEVFPNAL

SEQ ID NO: 20420 - protein, 8 aa, Homo sapiens
  Table A; Target 20420; HLA-B*49:01; DCAF12L1; ENSG00000198889; CTA
MEVFPNAL

SEQ ID NO: 20421 - protein, 9 aa, Homo sapiens
  Table A; Target 20421; HLA-A*29:02; DCAF12L1; ENSG00000198889; CTA
MEVFPNALY

SEQ ID NO: 20422 - protein, 9 aa, Homo sapiens
  Table A; Target 20422; HLA-B*18:01; DCAF12L1; ENSG00000198889; CTA
MEVFPNALY

SEQ ID NO: 20423 - protein, 9 aa, Homo sapiens
  Table A; Target 20423; HLA-B*44:02; DCAF12L1; ENSG00000198889; CTA
MEVFPNALY

SEQ ID NO: 20424 - protein, 9 aa, Homo sapiens
  Table A; Target 20424; HLA-B*44:03; DCAF12L1; ENSG00000198889; CTA
MEVFPNALY

SEQ ID NO: 20425 - protein, 8 aa, Homo sapiens
  Table A; Target 20425; HLA-B*37:01; DCAF12L1; ENSG00000198889; CTA
NDFWVNYF

SEQ ID NO: 20426 - protein, 9 aa, Homo sapiens
  Table A; Target 20426; HLA-A*29:02; DCAF12L1; ENSG00000198889; CTA
NHNDFWVNY

SEQ ID NO: 20427 - protein, 8 aa, Homo sapiens
  Table A; Target 20427; HLA-B*35:01; DCAF12L1; ENSG00000198889; CTA
NPNSLAIY

SEQ ID NO: 20428 - protein, 10 aa, Homo sapiens
  Table A; Target 20428; HLA-B*35:03; DCAF12L1; ENSG00000198889; CTA
NPNSLAIYQL

SEQ ID NO: 20429 - protein, 9 aa, Homo sapiens
  Table A; Target 20429; HLA-B*07:02; DCAF12L1; ENSG00000198889; CTA
NPSKTLLAT

SEQ ID NO: 20430 - protein, 10 aa, Homo sapiens
  Table A; Target 20430; HLA-B*07:02; DCAF12L1; ENSG00000198889; CTA
NPSNRKVRAL

SEQ ID NO: 20431 - protein, 10 aa, Homo sapiens
  Table A; Target 20431; HLA-C*07:02; DCAF12L1; ENSG00000198889; CTA
NPSNRKVRAL

SEQ ID NO: 20432 - protein, 9 aa, Homo sapiens
  Table A; Target 20432; HLA-B*27:05; DCAF12L1; ENSG00000198889; CTA
NQELGAVSL

SEQ ID NO: 20433 - protein, 9 aa, Homo sapiens
  Table A; Target 20433; HLA-B*38:01; DCAF12L1; ENSG00000198889; CTA
NQELGAVSL

SEQ ID NO: 20434 - protein, 9 aa, Homo sapiens
  Table A; Target 20434; HLA-B*39:01; DCAF12L1; ENSG00000198889; CTA
NQELGAVSL

SEQ ID NO: 20435 - protein, 9 aa, Homo sapiens
  Table A; Target 20435; HLA-C*05:01; DCAF12L1; ENSG00000198889; CTA
NQELGAVSL

SEQ ID NO: 20436 - protein, 9 aa, Homo sapiens
  Table A; Target 20436; HLA-C*07:04; DCAF12L1; ENSG00000198889; CTA
NQELGAVSL

SEQ ID NO: 20437 - protein, 8 aa, Homo sapiens
  Table A; Target 20437; HLA-C*14:02; DCAF12L1; ENSG00000198889; CTA
NYFGGMEV

SEQ ID NO: 20438 - protein, 9 aa, Homo sapiens
  Table A; Target 20438; HLA-A*23:01; DCAF12L1; ENSG00000198889; CTA
NYFGGMEVF

SEQ ID NO: 20439 - protein, 9 aa, Homo sapiens
  Table A; Target 20439; HLA-A*24:02; DCAF12L1; ENSG00000198889; CTA
NYFGGMEVF

SEQ ID NO: 20440 - protein, 9 aa, Homo sapiens
  Table A; Target 20440; HLA-C*14:02; DCAF12L1; ENSG00000198889; CTA
NYFGGMEVF

SEQ ID NO: 20441 - protein, 10 aa, Homo sapiens
  Table A; Target 20441; HLA-A*29:02; DCAF12L1; ENSG00000198889; CTA
PLPAGLHGNY

SEQ ID NO: 20442 - protein, 9 aa, Homo sapiens
  Table A; Target 20442; HLA-A*31:01; DCAF12L1; ENSG00000198889; CTA
PVYAHIRPR

SEQ ID NO: 20443 - protein, 9 aa, Homo sapiens
  Table A; Target 20443; HLA-B*37:01; DCAF12L1; ENSG00000198889; CTA
QDQQNIRPL

SEQ ID NO: 20444 - protein, 9 aa, Homo sapiens
  Table A; Target 20444; HLA-C*07:01; DCAF12L1; ENSG00000198889; CTA
QDQQNIRPL

SEQ ID NO: 20445 - protein, 8 aa, Homo sapiens
  Table A; Target 20445; HLA-A*30:01; DCAF12L1; ENSG00000198889; CTA
QELGAVSL

SEQ ID NO: 20446 - protein, 8 aa, Homo sapiens
  Table A; Target 20446; HLA-B*18:01; DCAF12L1; ENSG00000198889; CTA
QELGAVSL

SEQ ID NO: 20447 - protein, 8 aa, Homo sapiens
  Table A; Target 20447; HLA-B*37:01; DCAF12L1; ENSG00000198889; CTA
QELGAVSL

SEQ ID NO: 20448 - protein, 8 aa, Homo sapiens
  Table A; Target 20448; HLA-B*40:01; DCAF12L1; ENSG00000198889; CTA
QELGAVSL

SEQ ID NO: 20449 - protein, 11 aa, Homo sapiens
  Table A; Target 20449; HLA-A*30:02; DCAF12L1; ENSG00000198889; CTA
QELGAVSLDGY

SEQ ID NO: 20450 - protein, 11 aa, Homo sapiens
  Table A; Target 20450; HLA-B*18:01; DCAF12L1; ENSG00000198889; CTA
QELGAVSLDGY

SEQ ID NO: 20451 - protein, 11 aa, Homo sapiens
  Table A; Target 20451; HLA-B*44:02; DCAF12L1; ENSG00000198889; CTA
QELGAVSLDGY

SEQ ID NO: 20452 - protein, 11 aa, Homo sapiens
  Table A; Target 20452; HLA-B*44:03; DCAF12L1; ENSG00000198889; CTA
QELGAVSLDGY

SEQ ID NO: 20453 - protein, 11 aa, Homo sapiens
  Table A; Target 20453; HLA-C*16:04; DCAF12L1; ENSG00000198889; CTA
QELGAVSLDGY

SEQ ID NO: 20454 - protein, 10 aa, Homo sapiens
  Table A; Target 20454; HLA-A*25:01; DCAF12L1; ENSG00000198889; CTA
QGFDGELRGY

SEQ ID NO: 20455 - protein, 10 aa, Homo sapiens
  Table A; Target 20455; HLA-A*26:01; DCAF12L1; ENSG00000198889; CTA
QGFDGELRGY

SEQ ID NO: 20456 - protein, 10 aa, Homo sapiens
  Table A; Target 20456; HLA-A*30:02; DCAF12L1; ENSG00000198889; CTA
QGFDGELRGY

SEQ ID NO: 20457 - protein, 10 aa, Homo sapiens
  Table A; Target 20457; HLA-B*15:03; DCAF12L1; ENSG00000198889; CTA
QGFDGELRGY

SEQ ID NO: 20458 - protein, 10 aa, Homo sapiens
  Table A; Target 20458; HLA-B*35:01; DCAF12L1; ENSG00000198889; CTA
QGFDGELRGY

SEQ ID NO: 20459 - protein, 10 aa, Homo sapiens
  Table A; Target 20459; HLA-B*44:02; DCAF12L1; ENSG00000198889; CTA
QGFDGELRGY

SEQ ID NO: 20460 - protein, 10 aa, Homo sapiens
  Table A; Target 20460; HLA-B*44:03; DCAF12L1; ENSG00000198889; CTA
QGFDGELRGY

SEQ ID NO: 20461 - protein, 10 aa, Homo sapiens
  Table A; Target 20461; HLA-B*46:01; DCAF12L1; ENSG00000198889; CTA
QGFDGELRGY

SEQ ID NO: 20462 - protein, 10 aa, Homo sapiens
  Table A; Target 20462; HLA-C*12:03; DCAF12L1; ENSG00000198889; CTA
QGFDGELRGY

SEQ ID NO: 20463 - protein, 10 aa, Homo sapiens
  Table A; Target 20463; HLA-C*16:01; DCAF12L1; ENSG00000198889; CTA
QGFDGELRGY

SEQ ID NO: 20464 - protein, 10 aa, Homo sapiens
  Table A; Target 20464; HLA-C*16:02; DCAF12L1; ENSG00000198889; CTA
QGFDGELRGY

SEQ ID NO: 20465 - protein, 9 aa, Homo sapiens
  Table A; Target 20465; HLA-A*03:02; DCAF12L1; ENSG00000198889; CTA
QLELGTVNK

SEQ ID NO: 20466 - protein, 9 aa, Homo sapiens
  Table A; Target 20466; HLA-A*31:01; DCAF12L1; ENSG00000198889; CTA
QNIRPLCSR

SEQ ID NO: 20467 - protein, 9 aa, Homo sapiens
  Table A; Target 20467; HLA-A*33:01; DCAF12L1; ENSG00000198889; CTA
QNIRPLCSR

SEQ ID NO: 20468 - protein, 9 aa, Homo sapiens
  Table A; Target 20468; HLA-A*33:03; DCAF12L1; ENSG00000198889; CTA
QNIRPLCSR

SEQ ID NO: 20469 - protein, 9 aa, Homo sapiens
  Table A; Target 20469; HLA-B*13:02; DCAF12L1; ENSG00000198889; CTA
QQGCGIHAI

SEQ ID NO: 20470 - protein, 10 aa, Homo sapiens
  Table A; Target 20470; HLA-A*31:01; DCAF12L1; ENSG00000198889; CTA
QQNIRPLCSR

SEQ ID NO: 20471 - protein, 10 aa, Homo sapiens
  Table A; Target 20471; HLA-B*27:02; DCAF12L1; ENSG00000198889; CTA
QRLPELLTER

SEQ ID NO: 20472 - protein, 9 aa, Homo sapiens
  Table A; Target 20472; HLA-A*31:01; DCAF12L1; ENSG00000198889; CTA
RAIINPSNR

SEQ ID NO: 20473 - protein, 9 aa, Homo sapiens
  Table A; Target 20473; HLA-C*07:06; DCAF12L1; ENSG00000198889; CTA
RAIINPSNR

SEQ ID NO: 20474 - protein, 9 aa, Homo sapiens
  Table A; Target 20474; HLA-A*31:01; DCAF12L1; ENSG00000198889; CTA
RAQKFLEER

SEQ ID NO: 20475 - protein, 8 aa, Homo sapiens
  Table A; Target 20475; HLA-B*37:01; DCAF12L1; ENSG00000198889; CTA
RDGTVALW

SEQ ID NO: 20476 - protein, 8 aa, Homo sapiens
  Table A; Target 20476; HLA-B*37:01; DCAF12L1; ENSG00000198889; CTA
RDSEARLA

SEQ ID NO: 20477 - protein, 10 aa, Homo sapiens
  Table A; Target 20477; HLA-B*40:01; DCAF12L1; ENSG00000198889; CTA
REGGTGVRSL

SEQ ID NO: 20478 - protein, 10 aa, Homo sapiens
  Table A; Target 20478; HLA-B*57:01; DCAF12L1; ENSG00000198889; CTA
RGWLNHNDFW

SEQ ID NO: 20479 - protein, 9 aa, Homo sapiens
  Table A; Target 20479; HLA-A*03:01; DCAF12L1; ENSG00000198889; CTA
RLLSIRLPY

SEQ ID NO: 20480 - protein, 9 aa, Homo sapiens
  Table A; Target 20480; HLA-A*29:02; DCAF12L1; ENSG00000198889; CTA
RLLSIRLPY

SEQ ID NO: 20481 - protein, 9 aa, Homo sapiens
  Table A; Target 20481; HLA-B*57:01; DCAF12L1; ENSG00000198889; CTA
RLLSIRLPY

SEQ ID NO: 20482 - protein, 10 aa, Homo sapiens
  Table A; Target 20482; HLA-A*02:04; DCAF12L1; ENSG00000198889; CTA
RLLSIRLPYF

SEQ ID NO: 20483 - protein, 10 aa, Homo sapiens
  Table A; Target 20483; HLA-A*24:02; DCAF12L1; ENSG00000198889; CTA
RLLSIRLPYF

SEQ ID NO: 20484 - protein, 9 aa, Homo sapiens
  Table A; Target 20484; HLA-A*02:07; DCAF12L1; ENSG00000198889; CTA
RLPELLTER

SEQ ID NO: 20485 - protein, 9 aa, Homo sapiens
  Table A; Target 20485; HLA-A*03:01; DCAF12L1; ENSG00000198889; CTA
RLPELLTER

SEQ ID NO: 20486 - protein, 9 aa, Homo sapiens
  Table A; Target 20486; HLA-A*31:01; DCAF12L1; ENSG00000198889; CTA
RLPELLTER

SEQ ID NO: 20487 - protein, 11 aa, Homo sapiens
  Table A; Target 20487; HLA-A*02:07; DCAF12L1; ENSG00000198889; CTA
RLPELLTERQL

SEQ ID NO: 20488 - protein, 9 aa, Homo sapiens
  Table A; Target 20488; HLA-A*02:07; DCAF12L1; ENSG00000198889; CTA
RLPYFRDNV

SEQ ID NO: 20489 - protein, 8 aa, Homo sapiens
  Table A; Target 20489; HLA-B*07:02; DCAF12L1; ENSG00000198889; CTA
RPATYRSM

SEQ ID NO: 20490 - protein, 9 aa, Homo sapiens
  Table A; Target 20490; HLA-B*07:02; DCAF12L1; ENSG00000198889; CTA
RPATYRSMA

SEQ ID NO: 20491 - protein, 10 aa, Homo sapiens
  Table A; Target 20491; HLA-A*31:01; DCAF12L1; ENSG00000198889; CTA
RPRDVEAIPR

SEQ ID NO: 20492 - protein, 10 aa, Homo sapiens
  Table A; Target 20492; HLA-A*03:01; DCAF12L1; ENSG00000198889; CTA
RQLELGTVNK

SEQ ID NO: 20493 - protein, 10 aa, Homo sapiens
  Table A; Target 20493; HLA-A*03:02; DCAF12L1; ENSG00000198889; CTA
RQLELGTVNK

SEQ ID NO: 20494 - protein, 10 aa, Homo sapiens
  Table A; Target 20494; HLA-A*11:01; DCAF12L1; ENSG00000198889; CTA
RQLELGTVNK

SEQ ID NO: 20495 - protein, 10 aa, Homo sapiens
  Table A; Target 20495; HLA-A*31:01; DCAF12L1; ENSG00000198889; CTA
RQLELGTVNK

SEQ ID NO: 20496 - protein, 10 aa, Homo sapiens
  Table A; Target 20496; HLA-B*27:05; DCAF12L1; ENSG00000198889; CTA
RQLELGTVNK

SEQ ID NO: 20497 - protein, 11 aa, Homo sapiens
  Table A; Target 20497; HLA-A*02:01; DCAF12L1; ENSG00000198889; CTA
RQLELGTVNKV

SEQ ID NO: 20498 - protein, 11 aa, Homo sapiens
  Table A; Target 20498; HLA-A*02:04; DCAF12L1; ENSG00000198889; CTA
RQLELGTVNKV

SEQ ID NO: 20499 - protein, 11 aa, Homo sapiens
  Table A; Target 20499; HLA-B*13:02; DCAF12L1; ENSG00000198889; CTA
RQLELGTVNKV

SEQ ID NO: 20500 - protein, 9 aa, Homo sapiens
  Table A; Target 20500; HLA-A*03:01; DCAF12L1; ENSG00000198889; CTA
RQRRPATYR

SEQ ID NO: 20501 - protein, 9 aa, Homo sapiens
  Table A; Target 20501; HLA-A*31:01; DCAF12L1; ENSG00000198889; CTA
RQRRPATYR

SEQ ID NO: 20502 - protein, 9 aa, Homo sapiens
  Table A; Target 20502; HLA-A*02:01; DCAF12L1; ENSG00000198889; CTA
SALSRLLSI

SEQ ID NO: 20503 - protein, 9 aa, Homo sapiens
  Table A; Target 20503; HLA-A*02:03; DCAF12L1; ENSG00000198889; CTA
SALSRLLSI

SEQ ID NO: 20504 - protein, 9 aa, Homo sapiens
  Table A; Target 20504; HLA-A*02:04; DCAF12L1; ENSG00000198889; CTA
SALSRLLSI

SEQ ID NO: 20505 - protein, 9 aa, Homo sapiens
  Table A; Target 20505; HLA-A*23:01; DCAF12L1; ENSG00000198889; CTA
SALSRLLSI

SEQ ID NO: 20506 - protein, 9 aa, Homo sapiens
  Table A; Target 20506; HLA-B*08:01; DCAF12L1; ENSG00000198889; CTA
SALSRLLSI

SEQ ID NO: 20507 - protein, 9 aa, Homo sapiens
  Table A; Target 20507; HLA-B*13:02; DCAF12L1; ENSG00000198889; CTA
SALSRLLSI

SEQ ID NO: 20508 - protein, 9 aa, Homo sapiens
  Table A; Target 20508; HLA-B*51:01; DCAF12L1; ENSG00000198889; CTA
SALSRLLSI

SEQ ID NO: 20509 - protein, 9 aa, Homo sapiens
  Table A; Target 20509; HLA-B*54:01; DCAF12L1; ENSG00000198889; CTA
SALSRLLSI

SEQ ID NO: 20510 - protein, 9 aa, Homo sapiens
  Table A; Target 20510; HLA-C*03:03; DCAF12L1; ENSG00000198889; CTA
SALSRLLSI

SEQ ID NO: 20511 - protein, 9 aa, Homo sapiens
  Table A; Target 20511; HLA-C*03:04; DCAF12L1; ENSG00000198889; CTA
SALSRLLSI

SEQ ID NO: 20512 - protein, 9 aa, Homo sapiens
  Table A; Target 20512; HLA-C*16:01; DCAF12L1; ENSG00000198889; CTA
SALSRLLSI

SEQ ID NO: 20513 - protein, 9 aa, Homo sapiens
  Table A; Target 20513; HLA-C*16:02; DCAF12L1; ENSG00000198889; CTA
SALSRLLSI

SEQ ID NO: 20514 - protein, 8 aa, Homo sapiens
  Table A; Target 20514; HLA-A*30:01; DCAF12L1; ENSG00000198889; CTA
SEVGLPVY

SEQ ID NO: 20515 - protein, 8 aa, Homo sapiens
  Table A; Target 20515; HLA-B*15:01; DCAF12L1; ENSG00000198889; CTA
SEVGLPVY

SEQ ID NO: 20516 - protein, 8 aa, Homo sapiens
  Table A; Target 20516; HLA-B*15:03; DCAF12L1; ENSG00000198889; CTA
SEVGLPVY

SEQ ID NO: 20517 - protein, 8 aa, Homo sapiens
  Table A; Target 20517; HLA-B*18:01; DCAF12L1; ENSG00000198889; CTA
SEVGLPVY

SEQ ID NO: 20518 - protein, 8 aa, Homo sapiens
  Table A; Target 20518; HLA-B*37:01; DCAF12L1; ENSG00000198889; CTA
SEVGLPVY

SEQ ID NO: 20519 - protein, 8 aa, Homo sapiens
  Table A; Target 20519; HLA-B*39:01; DCAF12L1; ENSG00000198889; CTA
SEVGLPVY

SEQ ID NO: 20520 - protein, 8 aa, Homo sapiens
  Table A; Target 20520; HLA-B*40:02; DCAF12L1; ENSG00000198889; CTA
SEVGLPVY

SEQ ID NO: 20521 - protein, 8 aa, Homo sapiens
  Table A; Target 20521; HLA-B*44:02; DCAF12L1; ENSG00000198889; CTA
SEVGLPVY

SEQ ID NO: 20522 - protein, 8 aa, Homo sapiens
  Table A; Target 20522; HLA-B*44:03; DCAF12L1; ENSG00000198889; CTA
SEVGLPVY

SEQ ID NO: 20523 - protein, 8 aa, Homo sapiens
  Table A; Target 20523; HLA-B*49:01; DCAF12L1; ENSG00000198889; CTA
SEVGLPVY

SEQ ID NO: 20524 - protein, 8 aa, Homo sapiens
  Table A; Target 20524; HLA-C*02:02; DCAF12L1; ENSG00000198889; CTA
SEVGLPVY

SEQ ID NO: 20525 - protein, 8 aa, Homo sapiens
  Table A; Target 20525; HLA-C*07:04; DCAF12L1; ENSG00000198889; CTA
SEVGLPVY

SEQ ID NO: 20526 - protein, 8 aa, Homo sapiens
  Table A; Target 20526; HLA-C*12:03; DCAF12L1; ENSG00000198889; CTA
SEVGLPVY

SEQ ID NO: 20527 - protein, 8 aa, Homo sapiens
  Table A; Target 20527; HLA-C*16:04; DCAF12L1; ENSG00000198889; CTA
SEVGLPVY

SEQ ID NO: 20528 - protein, 9 aa, Homo sapiens
  Table A; Target 20528; HLA-A*30:01; DCAF12L1; ENSG00000198889; CTA
SEVGLPVYA

SEQ ID NO: 20529 - protein, 9 aa, Homo sapiens
  Table A; Target 20529; HLA-B*18:01; DCAF12L1; ENSG00000198889; CTA
SEVGLPVYA

SEQ ID NO: 20530 - protein, 9 aa, Homo sapiens
  Table A; Target 20530; HLA-B*40:01; DCAF12L1; ENSG00000198889; CTA
SEVGLPVYA

SEQ ID NO: 20531 - protein, 9 aa, Homo sapiens
  Table A; Target 20531; HLA-B*40:02; DCAF12L1; ENSG00000198889; CTA
SEVGLPVYA

SEQ ID NO: 20532 - protein, 9 aa, Homo sapiens
  Table A; Target 20532; HLA-B*44:02; DCAF12L1; ENSG00000198889; CTA
SEVGLPVYA

SEQ ID NO: 20533 - protein, 9 aa, Homo sapiens
  Table A; Target 20533; HLA-B*44:03; DCAF12L1; ENSG00000198889; CTA
SEVGLPVYA

SEQ ID NO: 20534 - protein, 9 aa, Homo sapiens
  Table A; Target 20534; HLA-B*49:01; DCAF12L1; ENSG00000198889; CTA
SEVGLPVYA

SEQ ID NO: 20535 - protein, 9 aa, Homo sapiens
  Table A; Target 20535; HLA-C*02:02; DCAF12L1; ENSG00000198889; CTA
SEVGLPVYA

SEQ ID NO: 20536 - protein, 9 aa, Homo sapiens
  Table A; Target 20536; HLA-C*12:03; DCAF12L1; ENSG00000198889; CTA
SEVGLPVYA

SEQ ID NO: 20537 - protein, 11 aa, Homo sapiens
  Table A; Target 20537; HLA-B*44:02; DCAF12L1; ENSG00000198889; CTA
SEVGLPVYAHI

SEQ ID NO: 20538 - protein, 11 aa, Homo sapiens
  Table A; Target 20538; HLA-B*44:03; DCAF12L1; ENSG00000198889; CTA
SEVGLPVYAHI

SEQ ID NO: 20539 - protein, 9 aa, Homo sapiens
  Table A; Target 20539; HLA-A*02:01; DCAF12L1; ENSG00000198889; CTA
SFYRHIITV

SEQ ID NO: 20540 - protein, 9 aa, Homo sapiens
  Table A; Target 20540; HLA-A*02:03; DCAF12L1; ENSG00000198889; CTA
SFYRHIITV

SEQ ID NO: 20541 - protein, 9 aa, Homo sapiens
  Table A; Target 20541; HLA-A*02:04; DCAF12L1; ENSG00000198889; CTA
SFYRHIITV

SEQ ID NO: 20542 - protein, 11 aa, Homo sapiens
  Table A; Target 20542; HLA-B*57:01; DCAF12L1; ENSG00000198889; CTA
SGSRDGTVALW

SEQ ID NO: 20543 - protein, 8 aa, Homo sapiens
  Table A; Target 20543; HLA-A*02:07; DCAF12L1; ENSG00000198889; CTA
SLDGYFHL

SEQ ID NO: 20544 - protein, 9 aa, Homo sapiens
  Table A; Target 20544; HLA-A*01:01; DCAF12L1; ENSG00000198889; CTA
SLDGYFHLW

SEQ ID NO: 20545 - protein, 9 aa, Homo sapiens
  Table A; Target 20545; HLA-A*02:07; DCAF12L1; ENSG00000198889; CTA
SLDGYFHLW

SEQ ID NO: 20546 - protein, 9 aa, Homo sapiens
  Table A; Target 20546; HLA-A*24:02; DCAF12L1; ENSG00000198889; CTA
SLDGYFHLW

SEQ ID NO: 20547 - protein, 9 aa, Homo sapiens
  Table A; Target 20547; HLA-A*29:02; DCAF12L1; ENSG00000198889; CTA
SLDGYFHLW

SEQ ID NO: 20548 - protein, 9 aa, Homo sapiens
  Table A; Target 20548; HLA-B*44:02; DCAF12L1; ENSG00000198889; CTA
SLDGYFHLW

SEQ ID NO: 20549 - protein, 9 aa, Homo sapiens
  Table A; Target 20549; HLA-B*44:03; DCAF12L1; ENSG00000198889; CTA
SLDGYFHLW

SEQ ID NO: 20550 - protein, 9 aa, Homo sapiens
  Table A; Target 20550; HLA-B*57:01; DCAF12L1; ENSG00000198889; CTA
SLDGYFHLW

SEQ ID NO: 20551 - protein, 9 aa, Homo sapiens
  Table A; Target 20551; HLA-A*02:04; DCAF12L1; ENSG00000198889; CTA
SLLFYDVRA

SEQ ID NO: 20552 - protein, 9 aa, Homo sapiens
  Table A; Target 20552; HLA-A*31:01; DCAF12L1; ENSG00000198889; CTA
SMAHYLKVR

SEQ ID NO: 20553 - protein, 9 aa, Homo sapiens
  Table A; Target 20553; HLA-A*33:01; DCAF12L1; ENSG00000198889; CTA
SMAHYLKVR

SEQ ID NO: 20554 - protein, 8 aa, Homo sapiens
  Table A; Target 20554; HLA-B*56:01; DCAF12L1; ENSG00000198889; CTA
SPSQGLAA

SEQ ID NO: 20555 - protein, 9 aa, Homo sapiens
  Table A; Target 20555; HLA-B*07:02; DCAF12L1; ENSG00000198889; CTA
SPSQGLAAA

SEQ ID NO: 20556 - protein, 9 aa, Homo sapiens
  Table A; Target 20556; HLA-B*54:01; DCAF12L1; ENSG00000198889; CTA
SPSQGLAAA

SEQ ID NO: 20557 - protein, 9 aa, Homo sapiens
  Table A; Target 20557; HLA-B*55:01; DCAF12L1; ENSG00000198889; CTA
SPSQGLAAA

SEQ ID NO: 20558 - protein, 9 aa, Homo sapiens
  Table A; Target 20558; HLA-B*56:01; DCAF12L1; ENSG00000198889; CTA
SPSQGLAAA

SEQ ID NO: 20559 - protein, 9 aa, Homo sapiens
  Table A; Target 20559; HLA-B*13:02; DCAF12L1; ENSG00000198889; CTA
SQWLNSRQV

SEQ ID NO: 20560 - protein, 9 aa, Homo sapiens
  Table A; Target 20560; HLA-B*38:01; DCAF12L1; ENSG00000198889; CTA
SRDGTVALW

SEQ ID NO: 20561 - protein, 9 aa, Homo sapiens
  Table A; Target 20561; HLA-C*16:04; DCAF12L1; ENSG00000198889; CTA
SRDGTVALW

SEQ ID NO: 20562 - protein, 9 aa, Homo sapiens
  Table A; Target 20562; HLA-B*27:05; DCAF12L1; ENSG00000198889; CTA
SREGGTGVR

SEQ ID NO: 20563 - protein, 11 aa, Homo sapiens
  Table A; Target 20563; HLA-C*06:02; DCAF12L1; ENSG00000198889; CTA
SREGGTGVRSL

SEQ ID NO: 20564 - protein, 11 aa, Homo sapiens
  Table A; Target 20564; HLA-C*07:02; DCAF12L1; ENSG00000198889; CTA
SREGGTGVRSL

SEQ ID NO: 20565 - protein, 9 aa, Homo sapiens
  Table A; Target 20565; HLA-C*01:02; DCAF12L1; ENSG00000198889; CTA
SSPSQGLAA

SEQ ID NO: 20566 - protein, 10 aa, Homo sapiens
  Table A; Target 20566; HLA-A*03:01; DCAF12L1; ENSG00000198889; CTA
SVYAVGSHSH

SEQ ID NO: 20567 - protein, 10 aa, Homo sapiens
  Table A; Target 20567; HLA-A*03:02; DCAF12L1; ENSG00000198889; CTA
SVYAVGSHSH

SEQ ID NO: 20568 - protein, 10 aa, Homo sapiens
  Table A; Target 20568; HLA-A*11:01; DCAF12L1; ENSG00000198889; CTA
SVYAVGSHSH

SEQ ID NO: 20569 - protein, 10 aa, Homo sapiens
  Table A; Target 20569; HLA-A*30:02; DCAF12L1; ENSG00000198889; CTA
SVYAVGSHSH

SEQ ID NO: 20570 - protein, 11 aa, Homo sapiens
  Table A; Target 20570; HLA-A*68:02; DCAF12L1; ENSG00000198889; CTA
SVYAVGSHSHV

SEQ ID NO: 20571 - protein, 10 aa, Homo sapiens
  Table A; Target 20571; HLA-B*40:02; DCAF12L1; ENSG00000198889; CTA
TERQLELGTV

SEQ ID NO: 20572 - protein, 10 aa, Homo sapiens
  Table A; Target 20572; HLA-B*49:01; DCAF12L1; ENSG00000198889; CTA
TERQLELGTV

SEQ ID NO: 20573 - protein, 9 aa, Homo sapiens
  Table A; Target 20573; HLA-B*35:03; DCAF12L1; ENSG00000198889; CTA
TGGENPNSL

SEQ ID NO: 20574 - protein, 9 aa, Homo sapiens
  Table A; Target 20574; HLA-B*39:01; DCAF12L1; ENSG00000198889; CTA
TGGENPNSL

SEQ ID NO: 20575 - protein, 9 aa, Homo sapiens
  Table A; Target 20575; HLA-C*01:02; DCAF12L1; ENSG00000198889; CTA
TGGENPNSL

SEQ ID NO: 20576 - protein, 9 aa, Homo sapiens
  Table A; Target 20576; HLA-C*14:02; DCAF12L1; ENSG00000198889; CTA
TGGENPNSL

SEQ ID NO: 20577 - protein, 9 aa, Homo sapiens
  Table A; Target 20577; HLA-C*16:02; DCAF12L1; ENSG00000198889; CTA
TGGENPNSL

SEQ ID NO: 20578 - protein, 9 aa, Homo sapiens
  Table A; Target 20578; HLA-A*30:02; DCAF12L1; ENSG00000198889; CTA
TGQGSLLFY

SEQ ID NO: 20579 - protein, 10 aa, Homo sapiens
  Table A; Target 20579; HLA-A*68:01; DCAF12L1; ENSG00000198889; CTA
TLESSSGPAR

SEQ ID NO: 20580 - protein, 9 aa, Homo sapiens
  Table A; Target 20580; HLA-C*01:02; DCAF12L1; ENSG00000198889; CTA
TVGTGQGSL

SEQ ID NO: 20581 - protein, 10 aa, Homo sapiens
  Table A; Target 20581; HLA-A*25:01; DCAF12L1; ENSG00000198889; CTA
TVNKVFASQW

SEQ ID NO: 20582 - protein, 10 aa, Homo sapiens
  Table A; Target 20582; HLA-A*32:01; DCAF12L1; ENSG00000198889; CTA
TVNKVFASQW

SEQ ID NO: 20583 - protein, 10 aa, Homo sapiens
  Table A; Target 20583; HLA-B*44:02; DCAF12L1; ENSG00000198889; CTA
TVNKVFASQW

SEQ ID NO: 20584 - protein, 10 aa, Homo sapiens
  Table A; Target 20584; HLA-B*44:03; DCAF12L1; ENSG00000198889; CTA
TVNKVFASQW

SEQ ID NO: 20585 - protein, 10 aa, Homo sapiens
  Table A; Target 20585; HLA-B*57:01; DCAF12L1; ENSG00000198889; CTA
TVNKVFASQW

SEQ ID NO: 20586 - protein, 10 aa, Homo sapiens
  Table A; Target 20586; HLA-B*58:01; DCAF12L1; ENSG00000198889; CTA
TVNKVFASQW

SEQ ID NO: 20587 - protein, 9 aa, Homo sapiens
  Table A; Target 20587; HLA-A*29:02; DCAF12L1; ENSG00000198889; CTA
TYCDDMSVY

SEQ ID NO: 20588 - protein, 9 aa, Homo sapiens
  Table A; Target 20588; HLA-C*07:01; DCAF12L1; ENSG00000198889; CTA
TYCDDMSVY

SEQ ID NO: 20589 - protein, 9 aa, Homo sapiens
  Table A; Target 20589; HLA-C*14:02; DCAF12L1; ENSG00000198889; CTA
TYCDDMSVY

SEQ ID NO: 20590 - protein, 9 aa, Homo sapiens
  Table A; Target 20590; HLA-A*24:02; DCAF12L1; ENSG00000198889; CTA
TYRSMAHYL

SEQ ID NO: 20591 - protein, 9 aa, Homo sapiens
  Table A; Target 20591; HLA-B*46:01; DCAF12L1; ENSG00000198889; CTA
VAGGPLPAG

SEQ ID NO: 20592 - protein, 9 aa, Homo sapiens
  Table A; Target 20592; HLA-B*56:01; DCAF12L1; ENSG00000198889; CTA
VAGGPLPAG

SEQ ID NO: 20593 - protein, 10 aa, Homo sapiens
  Table A; Target 20593; HLA-B*07:02; DCAF12L1; ENSG00000198889; CTA
VAGGPLPAGL

SEQ ID NO: 20594 - protein, 10 aa, Homo sapiens
  Table A; Target 20594; HLA-C*07:02; DCAF12L1; ENSG00000198889; CTA
VAGGPLPAGL

SEQ ID NO: 20595 - protein, 11 aa, Homo sapiens
  Table A; Target 20595; HLA-C*16:02; DCAF12L1; ENSG00000198889; CTA
VAVSGSRDGTV

SEQ ID NO: 20596 - protein, 9 aa, Homo sapiens
  Table A; Target 20596; HLA-C*03:04; DCAF12L1; ENSG00000198889; CTA
VAWHSEVGL

SEQ ID NO: 20597 - protein, 8 aa, Homo sapiens
  Table A; Target 20597; HLA-B*51:01; DCAF12L1; ENSG00000198889; CTA
VAWLSDTV

SEQ ID NO: 20598 - protein, 9 aa, Homo sapiens
  Table A; Target 20598; HLA-B*54:01; DCAF12L1; ENSG00000198889; CTA
VAWLSDTVA

SEQ ID NO: 20599 - protein, 8 aa, Homo sapiens
  Table A; Target 20599; HLA-B*49:01; DCAF12L1; ENSG00000198889; CTA
VDVESGHI

SEQ ID NO: 20600 - protein, 8 aa, Homo sapiens
  Table A; Target 20600; HLA-B*49:01; DCAF12L1; ENSG00000198889; CTA
VEAIPRAI

SEQ ID NO: 20601 - protein, 9 aa, Homo sapiens
  Table A; Target 20601; HLA-B*40:01; DCAF12L1; ENSG00000198889; CTA
VEAIPRAII

SEQ ID NO: 20602 - protein, 9 aa, Homo sapiens
  Table A; Target 20602; HLA-B*44:02; DCAF12L1; ENSG00000198889; CTA
VEAIPRAII

SEQ ID NO: 20603 - protein, 9 aa, Homo sapiens
  Table A; Target 20603; HLA-B*44:03; DCAF12L1; ENSG00000198889; CTA
VEAIPRAII

SEQ ID NO: 20604 - protein, 9 aa, Homo sapiens
  Table A; Target 20604; HLA-B*49:01; DCAF12L1; ENSG00000198889; CTA
VEAIPRAII

SEQ ID NO: 20605 - protein, 9 aa, Homo sapiens
  Table A; Target 20605; HLA-A*30:01; DCAF12L1; ENSG00000198889; CTA
VESGHIARI

SEQ ID NO: 20606 - protein, 9 aa, Homo sapiens
  Table A; Target 20606; HLA-B*37:01; DCAF12L1; ENSG00000198889; CTA
VESGHIARI

SEQ ID NO: 20607 - protein, 9 aa, Homo sapiens
  Table A; Target 20607; HLA-B*40:01; DCAF12L1; ENSG00000198889; CTA
VESGHIARI

SEQ ID NO: 20608 - protein, 9 aa, Homo sapiens
  Table A; Target 20608; HLA-B*44:02; DCAF12L1; ENSG00000198889; CTA
VESGHIARI

SEQ ID NO: 20609 - protein, 9 aa, Homo sapiens
  Table A; Target 20609; HLA-B*44:03; DCAF12L1; ENSG00000198889; CTA
VESGHIARI

SEQ ID NO: 20610 - protein, 9 aa, Homo sapiens
  Table A; Target 20610; HLA-B*49:01; DCAF12L1; ENSG00000198889; CTA
VESGHIARI

SEQ ID NO: 20611 - protein, 9 aa, Homo sapiens
  Table A; Target 20611; HLA-C*02:02; DCAF12L1; ENSG00000198889; CTA
VESGHIARI

SEQ ID NO: 20612 - protein, 9 aa, Homo sapiens
  Table A; Target 20612; HLA-A*24:02; DCAF12L1; ENSG00000198889; CTA
VFPNALYTH

SEQ ID NO: 20613 - protein, 11 aa, Homo sapiens
  Table A; Target 20613; HLA-A*29:02; DCAF12L1; ENSG00000198889; CTA
VFPNALYTHCY

SEQ ID NO: 20614 - protein, 9 aa, Homo sapiens
  Table A; Target 20614; HLA-A*23:01; DCAF12L1; ENSG00000198889; CTA
VGLPVYAHI

SEQ ID NO: 20615 - protein, 9 aa, Homo sapiens
  Table A; Target 20615; HLA-A*24:02; DCAF12L1; ENSG00000198889; CTA
VGLPVYAHI

SEQ ID NO: 20616 - protein, 9 aa, Homo sapiens
  Table A; Target 20616; HLA-B*51:01; DCAF12L1; ENSG00000198889; CTA
VGLPVYAHI

SEQ ID NO: 20617 - protein, 10 aa, Homo sapiens
  Table A; Target 20617; HLA-A*31:01; DCAF12L1; ENSG00000198889; CTA
VGLPVYAHIR

SEQ ID NO: 20618 - protein, 9 aa, Homo sapiens
  Table A; Target 20618; HLA-B*15:03; DCAF12L1; ENSG00000198889; CTA
VGSHSHVSF

SEQ ID NO: 20619 - protein, 9 aa, Homo sapiens
  Table A; Target 20619; HLA-B*46:01; DCAF12L1; ENSG00000198889; CTA
VGSHSHVSF

SEQ ID NO: 20620 - protein, 9 aa, Homo sapiens
  Table A; Target 20620; HLA-C*02:02; DCAF12L1; ENSG00000198889; CTA
VGSHSHVSF

SEQ ID NO: 20621 - protein, 9 aa, Homo sapiens
  Table A; Target 20621; HLA-C*03:04; DCAF12L1; ENSG00000198889; CTA
VGSHSHVSF

SEQ ID NO: 20622 - protein, 9 aa, Homo sapiens
  Table A; Target 20622; HLA-C*07:04; DCAF12L1; ENSG00000198889; CTA
VGSHSHVSF

SEQ ID NO: 20623 - protein, 9 aa, Homo sapiens
  Table A; Target 20623; HLA-C*12:03; DCAF12L1; ENSG00000198889; CTA
VGSHSHVSF

SEQ ID NO: 20624 - protein, 9 aa, Homo sapiens
  Table A; Target 20624; HLA-C*14:02; DCAF12L1; ENSG00000198889; CTA
VGSHSHVSF

SEQ ID NO: 20625 - protein, 9 aa, Homo sapiens
  Table A; Target 20625; HLA-C*16:01; DCAF12L1; ENSG00000198889; CTA
VGSHSHVSF

SEQ ID NO: 20626 - protein, 9 aa, Homo sapiens
  Table A; Target 20626; HLA-C*16:02; DCAF12L1; ENSG00000198889; CTA
VGSHSHVSF

SEQ ID NO: 20627 - protein, 9 aa, Homo sapiens
  Table A; Target 20627; HLA-C*01:02; DCAF12L1; ENSG00000198889; CTA
VGTGQGSLL

SEQ ID NO: 20628 - protein, 9 aa, Homo sapiens
  Table A; Target 20628; HLA-C*03:03; DCAF12L1; ENSG00000198889; CTA
VGTGQGSLL

SEQ ID NO: 20629 - protein, 9 aa, Homo sapiens
  Table A; Target 20629; HLA-C*03:04; DCAF12L1; ENSG00000198889; CTA
VGTGQGSLL

SEQ ID NO: 20630 - protein, 9 aa, Homo sapiens
  Table A; Target 20630; HLA-C*05:01; DCAF12L1; ENSG00000198889; CTA
VGTGQGSLL

SEQ ID NO: 20631 - protein, 9 aa, Homo sapiens
  Table A; Target 20631; HLA-C*14:02; DCAF12L1; ENSG00000198889; CTA
VGTGQGSLL

SEQ ID NO: 20632 - protein, 11 aa, Homo sapiens
  Table A; Target 20632; HLA-A*30:02; DCAF12L1; ENSG00000198889; CTA
VGTGQGSLLFY

SEQ ID NO: 20633 - protein, 11 aa, Homo sapiens
  Table A; Target 20633; HLA-A*31:01; DCAF12L1; ENSG00000198889; CTA
VQRLPELLTER

SEQ ID NO: 20634 - protein, 11 aa, Homo sapiens
  Table A; Target 20634; HLA-A*33:01; DCAF12L1; ENSG00000198889; CTA
VQRLPELLTER

SEQ ID NO: 20635 - protein, 9 aa, Homo sapiens
  Table A; Target 20635; HLA-A*02:04; DCAF12L1; ENSG00000198889; CTA
VSLDGYFHL

SEQ ID NO: 20636 - protein, 9 aa, Homo sapiens
  Table A; Target 20636; HLA-A*23:01; DCAF12L1; ENSG00000198889; CTA
VSLDGYFHL

SEQ ID NO: 20637 - protein, 9 aa, Homo sapiens
  Table A; Target 20637; HLA-A*24:02; DCAF12L1; ENSG00000198889; CTA
VSLDGYFHL

SEQ ID NO: 20638 - protein, 10 aa, Homo sapiens
  Table A; Target 20638; HLA-A*24:02; DCAF12L1; ENSG00000198889; CTA
VSLDGYFHLW

SEQ ID NO: 20639 - protein, 10 aa, Homo sapiens
  Table A; Target 20639; HLA-B*44:02; DCAF12L1; ENSG00000198889; CTA
VSLDGYFHLW

SEQ ID NO: 20640 - protein, 10 aa, Homo sapiens
  Table A; Target 20640; HLA-B*57:01; DCAF12L1; ENSG00000198889; CTA
VSLDGYFHLW

SEQ ID NO: 20641 - protein, 8 aa, Homo sapiens
  Table A; Target 20641; HLA-C*05:01; DCAF12L1; ENSG00000198889; CTA
VVDVESGH

SEQ ID NO: 20642 - protein, 9 aa, Homo sapiens
  Table A; Target 20642; HLA-C*04:01; DCAF12L1; ENSG00000198889; CTA
VVDVESGHI

SEQ ID NO: 20643 - protein, 9 aa, Homo sapiens
  Table A; Target 20643; HLA-C*05:01; DCAF12L1; ENSG00000198889; CTA
VVDVESGHI

SEQ ID NO: 20644 - protein, 11 aa, Homo sapiens
  Table A; Target 20644; HLA-A*31:01; DCAF12L1; ENSG00000198889; CTA
VVDVESGHIAR

SEQ ID NO: 20645 - protein, 11 aa, Homo sapiens
  Table A; Target 20645; HLA-A*33:01; DCAF12L1; ENSG00000198889; CTA
VVDVESGHIAR

SEQ ID NO: 20646 - protein, 8 aa, Homo sapiens
  Table A; Target 20646; HLA-C*14:02; DCAF12L1; ENSG00000198889; CTA
VYAVGSHS

SEQ ID NO: 20647 - protein, 9 aa, Homo sapiens
  Table A; Target 20647; HLA-A*24:02; DCAF12L1; ENSG00000198889; CTA
VYAVGSHSH

SEQ ID NO: 20648 - protein, 9 aa, Homo sapiens
  Table A; Target 20648; HLA-C*14:02; DCAF12L1; ENSG00000198889; CTA
VYAVGSHSH

SEQ ID NO: 20649 - protein, 8 aa, Homo sapiens
  Table A; Target 20649; HLA-B*08:01; DCAF12L1; ENSG00000198889; CTA
WLNSRQVV

SEQ ID NO: 20650 - protein, 9 aa, Homo sapiens
  Table A; Target 20650; HLA-A*26:01; DCAF12L1; ENSG00000198889; CTA
YAVGSHSHV

SEQ ID NO: 20651 - protein, 9 aa, Homo sapiens
  Table A; Target 20651; HLA-A*68:02; DCAF12L1; ENSG00000198889; CTA
YAVGSHSHV

SEQ ID NO: 20652 - protein, 9 aa, Homo sapiens
  Table A; Target 20652; HLA-B*49:01; DCAF12L1; ENSG00000198889; CTA
YAVGSHSHV

SEQ ID NO: 20653 - protein, 9 aa, Homo sapiens
  Table A; Target 20653; HLA-B*51:01; DCAF12L1; ENSG00000198889; CTA
YAVGSHSHV

SEQ ID NO: 20654 - protein, 9 aa, Homo sapiens
  Table A; Target 20654; HLA-C*02:02; DCAF12L1; ENSG00000198889; CTA
YAVGSHSHV

SEQ ID NO: 20655 - protein, 9 aa, Homo sapiens
  Table A; Target 20655; HLA-C*03:03; DCAF12L1; ENSG00000198889; CTA
YAVGSHSHV

SEQ ID NO: 20656 - protein, 9 aa, Homo sapiens
  Table A; Target 20656; HLA-C*03:04; DCAF12L1; ENSG00000198889; CTA
YAVGSHSHV

SEQ ID NO: 20657 - protein, 9 aa, Homo sapiens
  Table A; Target 20657; HLA-C*12:03; DCAF12L1; ENSG00000198889; CTA
YAVGSHSHV

SEQ ID NO: 20658 - protein, 9 aa, Homo sapiens
  Table A; Target 20658; HLA-C*16:02; DCAF12L1; ENSG00000198889; CTA
YAVGSHSHV

SEQ ID NO: 20659 - protein, 9 aa, Homo sapiens
  Table A; Target 20659; HLA-C*16:04; DCAF12L1; ENSG00000198889; CTA
YAVGSHSHV

SEQ ID NO: 20660 - protein, 11 aa, Homo sapiens
  Table A; Target 20660; HLA-B*35:01; DCAF12L1; ENSG00000198889; CTA
YAVGSHSHVSF

SEQ ID NO: 20661 - protein, 11 aa, Homo sapiens
  Table A; Target 20661; HLA-B*46:01; DCAF12L1; ENSG00000198889; CTA
YAVGSHSHVSF

SEQ ID NO: 20662 - protein, 11 aa, Homo sapiens
  Table A; Target 20662; HLA-C*02:02; DCAF12L1; ENSG00000198889; CTA
YAVGSHSHVSF

SEQ ID NO: 20663 - protein, 11 aa, Homo sapiens
  Table A; Target 20663; HLA-C*12:03; DCAF12L1; ENSG00000198889; CTA
YAVGSHSHVSF

SEQ ID NO: 20664 - protein, 11 aa, Homo sapiens
  Table A; Target 20664; HLA-C*16:01; DCAF12L1; ENSG00000198889; CTA
YAVGSHSHVSF

SEQ ID NO: 20665 - protein, 9 aa, Homo sapiens
  Table A; Target 20665; HLA-A*02:04; DCAF12L1; ENSG00000198889; CTA
YAVQRLPEL

SEQ ID NO: 20666 - protein, 9 aa, Homo sapiens
  Table A; Target 20666; HLA-A*02:07; DCAF12L1; ENSG00000198889; CTA
YAVQRLPEL

SEQ ID NO: 20667 - protein, 9 aa, Homo sapiens
  Table A; Target 20667; HLA-A*23:01; DCAF12L1; ENSG00000198889; CTA
YAVQRLPEL

SEQ ID NO: 20668 - protein, 9 aa, Homo sapiens
  Table A; Target 20668; HLA-A*24:02; DCAF12L1; ENSG00000198889; CTA
YAVQRLPEL

SEQ ID NO: 20669 - protein, 9 aa, Homo sapiens
  Table A; Target 20669; HLA-A*30:01; DCAF12L1; ENSG00000198889; CTA
YAVQRLPEL

SEQ ID NO: 20670 - protein, 9 aa, Homo sapiens
  Table A; Target 20670; HLA-B*08:01; DCAF12L1; ENSG00000198889; CTA
YAVQRLPEL

SEQ ID NO: 20671 - protein, 9 aa, Homo sapiens
  Table A; Target 20671; HLA-B*35:03; DCAF12L1; ENSG00000198889; CTA
YAVQRLPEL

SEQ ID NO: 20672 - protein, 9 aa, Homo sapiens
  Table A; Target 20672; HLA-B*46:01; DCAF12L1; ENSG00000198889; CTA
YAVQRLPEL

SEQ ID NO: 20673 - protein, 9 aa, Homo sapiens
  Table A; Target 20673; HLA-B*51:01; DCAF12L1; ENSG00000198889; CTA
YAVQRLPEL

SEQ ID NO: 20674 - protein, 9 aa, Homo sapiens
  Table A; Target 20674; HLA-B*54:01; DCAF12L1; ENSG00000198889; CTA
YAVQRLPEL

SEQ ID NO: 20675 - protein, 9 aa, Homo sapiens
  Table A; Target 20675; HLA-B*58:01; DCAF12L1; ENSG00000198889; CTA
YAVQRLPEL

SEQ ID NO: 20676 - protein, 9 aa, Homo sapiens
  Table A; Target 20676; HLA-C*02:02; DCAF12L1; ENSG00000198889; CTA
YAVQRLPEL

SEQ ID NO: 20677 - protein, 9 aa, Homo sapiens
  Table A; Target 20677; HLA-C*03:03; DCAF12L1; ENSG00000198889; CTA
YAVQRLPEL

SEQ ID NO: 20678 - protein, 9 aa, Homo sapiens
  Table A; Target 20678; HLA-C*03:04; DCAF12L1; ENSG00000198889; CTA
YAVQRLPEL

SEQ ID NO: 20679 - protein, 9 aa, Homo sapiens
  Table A; Target 20679; HLA-C*12:03; DCAF12L1; ENSG00000198889; CTA
YAVQRLPEL

SEQ ID NO: 20680 - protein, 9 aa, Homo sapiens
  Table A; Target 20680; HLA-C*16:01; DCAF12L1; ENSG00000198889; CTA
YAVQRLPEL

SEQ ID NO: 20681 - protein, 9 aa, Homo sapiens
  Table A; Target 20681; HLA-C*16:02; DCAF12L1; ENSG00000198889; CTA
YAVQRLPEL

SEQ ID NO: 20682 - protein, 9 aa, Homo sapiens
  Table A; Target 20682; HLA-C*16:04; DCAF12L1; ENSG00000198889; CTA
YAVQRLPEL

SEQ ID NO: 20683 - protein, 8 aa, Homo sapiens
  Table A; Target 20683; HLA-A*01:01; DCAF12L1; ENSG00000198889; CTA
YCDDMSVY

SEQ ID NO: 20684 - protein, 8 aa, Homo sapiens
  Table A; Target 20684; HLA-C*05:01; DCAF12L1; ENSG00000198889; CTA
YCDDMSVY

SEQ ID NO: 20685 - protein, 10 aa, Homo sapiens
  Table A; Target 20685; HLA-A*02:01; DCAF12L1; ENSG00000198889; CTA
YCDDMSVYAV

SEQ ID NO: 20686 - protein, 8 aa, Homo sapiens
  Table A; Target 20686; HLA-B*18:01; DCAF12L1; ENSG00000198889; CTA
YDVRAQKF

SEQ ID NO: 20687 - protein, 8 aa, Homo sapiens
  Table A; Target 20687; HLA-B*37:01; DCAF12L1; ENSG00000198889; CTA
YDVRAQKF

SEQ ID NO: 20688 - protein, 8 aa, Homo sapiens
  Table A; Target 20688; HLA-B*40:02; DCAF12L1; ENSG00000198889; CTA
YDVRAQKF

SEQ ID NO: 20689 - protein, 10 aa, Homo sapiens
  Table A; Target 20689; HLA-A*29:02; DCAF12L1; ENSG00000198889; CTA
YFRDNVCLTY

SEQ ID NO: 20690 - protein, 9 aa, Homo sapiens
  Table A; Target 20690; HLA-A*02:01; DCAF12L1; ENSG00000198889; CTA
YQLPSLDPL

SEQ ID NO: 20691 - protein, 9 aa, Homo sapiens
  Table A; Target 20691; HLA-A*02:03; DCAF12L1; ENSG00000198889; CTA
YQLPSLDPL

SEQ ID NO: 20692 - protein, 9 aa, Homo sapiens
  Table A; Target 20692; HLA-A*02:04; DCAF12L1; ENSG00000198889; CTA
YQLPSLDPL

SEQ ID NO: 20693 - protein, 9 aa, Homo sapiens
  Table A; Target 20693; HLA-A*02:07; DCAF12L1; ENSG00000198889; CTA
YQLPSLDPL

SEQ ID NO: 20694 - protein, 9 aa, Homo sapiens
  Table A; Target 20694; HLA-B*13:02; DCAF12L1; ENSG00000198889; CTA
YQLPSLDPL

SEQ ID NO: 20695 - protein, 9 aa, Homo sapiens
  Table A; Target 20695; HLA-B*39:01; DCAF12L1; ENSG00000198889; CTA
YQLPSLDPL

SEQ ID NO: 20696 - protein, 9 aa, Homo sapiens
  Table A; Target 20696; HLA-B*40:01; DCAF12L1; ENSG00000198889; CTA
YQLPSLDPL

SEQ ID NO: 20697 - protein, 9 aa, Homo sapiens
  Table A; Target 20697; HLA-B*40:02; DCAF12L1; ENSG00000198889; CTA
YQLPSLDPL

SEQ ID NO: 20698 - protein, 9 aa, Homo sapiens
  Table A; Target 20698; HLA-C*03:03; DCAF12L1; ENSG00000198889; CTA
YQLPSLDPL

SEQ ID NO: 20699 - protein, 9 aa, Homo sapiens
  Table A; Target 20699; HLA-C*03:04; DCAF12L1; ENSG00000198889; CTA
YQLPSLDPL

SEQ ID NO: 20700 - protein, 9 aa, Homo sapiens
  Table A; Target 20700; HLA-C*07:04; DCAF12L1; ENSG00000198889; CTA
YQLPSLDPL

SEQ ID NO: 20701 - protein, 11 aa, Homo sapiens
  Table A; Target 20701; HLA-A*23:01; DCAF12L1; ENSG00000198889; CTA
YQLPSLDPLCL

SEQ ID NO: 20702 - protein, 11 aa, Homo sapiens
  Table A; Target 20702; HLA-B*38:01; DCAF12L1; ENSG00000198889; CTA
YQLPSLDPLCL

SEQ ID NO: 20703 - protein, 8 aa, Homo sapiens
  Table A; Target 20703; HLA-B*39:01; DCAF4L2; ENSG00000176566; CTA
AAVGQDCY

SEQ ID NO: 20704 - protein, 9 aa, Homo sapiens
  Table A; Target 20704; HLA-C*04:01; DCAF4L2; ENSG00000176566; CTA
AAVGQDCYT

SEQ ID NO: 20705 - protein, 8 aa, Homo sapiens
  Table A; Target 20705; HLA-B*37:01; DCAF4L2; ENSG00000176566; CTA
ADTPSCAV

SEQ ID NO: 20706 - protein, 9 aa, Homo sapiens
  Table A; Target 20706; HLA-B*37:01; DCAF4L2; ENSG00000176566; CTA
ADTPSCAVL

SEQ ID NO: 20707 - protein, 10 aa, Homo sapiens
  Table A; Target 20707; HLA-C*16:02; DCAF4L2; ENSG00000176566; CTA
ADTPSCAVLL

SEQ ID NO: 20708 - protein, 9 aa, Homo sapiens
  Table A; Target 20708; HLA-C*16:01; DCAF4L2; ENSG00000176566; CTA
AFSSRLGGF

SEQ ID NO: 20709 - protein, 8 aa, Homo sapiens
  Table A; Target 20709; HLA-B*56:01; DCAF4L2; ENSG00000176566; CTA
APGLLMAV

SEQ ID NO: 20710 - protein, 10 aa, Homo sapiens
  Table A; Target 20710; HLA-B*08:01; DCAF4L2; ENSG00000176566; CTA
APSMLRKNQL

SEQ ID NO: 20711 - protein, 10 aa, Homo sapiens
  Table A; Target 20711; HLA-C*07:02; DCAF4L2; ENSG00000176566; CTA
APSMLRKNQL

SEQ ID NO: 20712 - protein, 8 aa, Homo sapiens
  Table A; Target 20712; HLA-A*30:02; DCAF4L2; ENSG00000176566; CTA
ATKCVTQY

SEQ ID NO: 20713 - protein, 8 aa, Homo sapiens
  Table A; Target 20713; HLA-A*32:01; DCAF4L2; ENSG00000176566; CTA
ATKCVTQY

SEQ ID NO: 20714 - protein, 8 aa, Homo sapiens
  Table A; Target 20714; HLA-B*15:01; DCAF4L2; ENSG00000176566; CTA
ATKCVTQY

SEQ ID NO: 20715 - protein, 9 aa, Homo sapiens
  Table A; Target 20715; HLA-B*57:01; DCAF4L2; ENSG00000176566; CTA
AVREDLYCF

SEQ ID NO: 20716 - protein, 9 aa, Homo sapiens
  Table A; Target 20716; HLA-A*29:02; DCAF4L2; ENSG00000176566; CTA
AWSLSIHAY

SEQ ID NO: 20717 - protein, 9 aa, Homo sapiens
  Table A; Target 20717; HLA-A*30:02; DCAF4L2; ENSG00000176566; CTA
AWSLSIHAY

SEQ ID NO: 20718 - protein, 9 aa, Homo sapiens
  Table A; Target 20718; HLA-B*15:01; DCAF4L2; ENSG00000176566; CTA
AWSLSIHAY

SEQ ID NO: 20719 - protein, 9 aa, Homo sapiens
  Table A; Target 20719; HLA-B*44:02; DCAF4L2; ENSG00000176566; CTA
AWSLSIHAY

SEQ ID NO: 20720 - protein, 9 aa, Homo sapiens
  Table A; Target 20720; HLA-A*23:01; DCAF4L2; ENSG00000176566; CTA
AYHSFSTGL

SEQ ID NO: 20721 - protein, 9 aa, Homo sapiens
  Table A; Target 20721; HLA-A*24:02; DCAF4L2; ENSG00000176566; CTA
AYHSFSTGL

SEQ ID NO: 20722 - protein, 9 aa, Homo sapiens
  Table A; Target 20722; HLA-A*31:01; DCAF4L2; ENSG00000176566; CTA
AYHSFSTGL

SEQ ID NO: 20723 - protein, 9 aa, Homo sapiens
  Table A; Target 20723; HLA-B*15:03; DCAF4L2; ENSG00000176566; CTA
AYHSFSTGL

SEQ ID NO: 20724 - protein, 9 aa, Homo sapiens
  Table A; Target 20724; HLA-B*46:01; DCAF4L2; ENSG00000176566; CTA
AYHSFSTGL

SEQ ID NO: 20725 - protein, 9 aa, Homo sapiens
  Table A; Target 20725; HLA-C*01:02; DCAF4L2; ENSG00000176566; CTA
AYHSFSTGL

SEQ ID NO: 20726 - protein, 9 aa, Homo sapiens
  Table A; Target 20726; HLA-C*14:02; DCAF4L2; ENSG00000176566; CTA
AYHSFSTGL

SEQ ID NO: 20727 - protein, 9 aa, Homo sapiens
  Table A; Target 20727; HLA-A*23:01; DCAF4L2; ENSG00000176566; CTA
AYLPVHVNE

SEQ ID NO: 20728 - protein, 9 aa, Homo sapiens
  Table A; Target 20728; HLA-A*24:02; DCAF4L2; ENSG00000176566; CTA
AYLPVHVNE

SEQ ID NO: 20729 - protein, 9 aa, Homo sapiens
  Table A; Target 20729; HLA-A*31:01; DCAF4L2; ENSG00000176566; CTA
AYLPVHVNE

SEQ ID NO: 20730 - protein, 9 aa, Homo sapiens
  Table A; Target 20730; HLA-B*35:03; DCAF4L2; ENSG00000176566; CTA
CAVLLPASL

SEQ ID NO: 20731 - protein, 9 aa, Homo sapiens
  Table A; Target 20731; HLA-C*03:03; DCAF4L2; ENSG00000176566; CTA
CAVLLPASL

SEQ ID NO: 20732 - protein, 9 aa, Homo sapiens
  Table A; Target 20732; HLA-C*03:04; DCAF4L2; ENSG00000176566; CTA
CAVLLPASL

SEQ ID NO: 20733 - protein, 9 aa, Homo sapiens
  Table A; Target 20733; HLA-B*54:01; DCAF4L2; ENSG00000176566; CTA
CAWSLSIHA

SEQ ID NO: 20734 - protein, 10 aa, Homo sapiens
  Table A; Target 20734; HLA-A*30:02; DCAF4L2; ENSG00000176566; CTA
CAWSLSIHAY

SEQ ID NO: 20735 - protein, 9 aa, Homo sapiens
  Table A; Target 20735; HLA-B*57:01; DCAF4L2; ENSG00000176566; CTA
CSFQIPDAW

SEQ ID NO: 20736 - protein, 9 aa, Homo sapiens
  Table A; Target 20736; HLA-B*58:01; DCAF4L2; ENSG00000176566; CTA
CSFQIPDAW

SEQ ID NO: 20737 - protein, 8 aa, Homo sapiens
  Table A; Target 20737; HLA-A*24:02; DCAF4L2; ENSG00000176566; CTA
CYTRIWSL

SEQ ID NO: 20738 - protein, 9 aa, Homo sapiens
  Table A; Target 20738; HLA-B*08:01; DCAF4L2; ENSG00000176566; CTA
DCYTRIWSL

SEQ ID NO: 20739 - protein, 10 aa, Homo sapiens
  Table A; Target 20739; HLA-A*25:01; DCAF4L2; ENSG00000176566; CTA
DIPSVAFSSR

SEQ ID NO: 20740 - protein, 10 aa, Homo sapiens
  Table A; Target 20740; HLA-A*26:01; DCAF4L2; ENSG00000176566; CTA
DIPSVAFSSR

SEQ ID NO: 20741 - protein, 10 aa, Homo sapiens
  Table A; Target 20741; HLA-A*33:01; DCAF4L2; ENSG00000176566; CTA
DIPSVAFSSR

SEQ ID NO: 20742 - protein, 10 aa, Homo sapiens
  Table A; Target 20742; HLA-A*33:03; DCAF4L2; ENSG00000176566; CTA
DIPSVAFSSR

SEQ ID NO: 20743 - protein, 10 aa, Homo sapiens
  Table A; Target 20743; HLA-A*68:01; DCAF4L2; ENSG00000176566; CTA
DIPSVAFSSR

SEQ ID NO: 20744 - protein, 10 aa, Homo sapiens
  Table A; Target 20744; HLA-C*07:06; DCAF4L2; ENSG00000176566; CTA
DIPSVAFSSR

SEQ ID NO: 20745 - protein, 8 aa, Homo sapiens
  Table A; Target 20745; HLA-B*08:01; DCAF4L2; ENSG00000176566; CTA
DMTGTIKL

SEQ ID NO: 20746 - protein, 9 aa, Homo sapiens
  Table A; Target 20746; HLA-A*25:01; DCAF4L2; ENSG00000176566; CTA
DMTGTIKLW

SEQ ID NO: 20747 - protein, 9 aa, Homo sapiens
  Table A; Target 20747; HLA-B*44:02; DCAF4L2; ENSG00000176566; CTA
DMTGTIKLW

SEQ ID NO: 20748 - protein, 9 aa, Homo sapiens
  Table A; Target 20748; HLA-A*68:01; DCAF4L2; ENSG00000176566; CTA
DPSSLASDR

SEQ ID NO: 20749 - protein, 10 aa, Homo sapiens
  Table A; Target 20749; HLA-B*35:01; DCAF4L2; ENSG00000176566; CTA
DPSSLASDRF

SEQ ID NO: 20750 - protein, 9 aa, Homo sapiens
  Table A; Target 20750; HLA-B*13:02; DCAF4L2; ENSG00000176566; CTA
DQLFTVNQV

SEQ ID NO: 20751 - protein, 9 aa, Homo sapiens
  Table A; Target 20751; HLA-B*39:01; DCAF4L2; ENSG00000176566; CTA
DQLFTVNQV

SEQ ID NO: 20752 - protein, 9 aa, Homo sapiens
  Table A; Target 20752; HLA-B*51:01; DCAF4L2; ENSG00000176566; CTA
DQLFTVNQV

SEQ ID NO: 20753 - protein, 9 aa, Homo sapiens
  Table A; Target 20753; HLA-B*51:01; DCAF4L2; ENSG00000176566; CTA
DSAVTSLQI

SEQ ID NO: 20754 - protein, 9 aa, Homo sapiens
  Table A; Target 20754; HLA-B*51:01; DCAF4L2; ENSG00000176566; CTA
DVLAQQFAI

SEQ ID NO: 20755 - protein, 10 aa, Homo sapiens
  Table A; Target 20755; HLA-A*25:01; DCAF4L2; ENSG00000176566; CTA
DVLAQQFAIM

SEQ ID NO: 20756 - protein, 10 aa, Homo sapiens
  Table A; Target 20756; HLA-A*26:01; DCAF4L2; ENSG00000176566; CTA
DVLAQQFAIM

SEQ ID NO: 20757 - protein, 9 aa, Homo sapiens
  Table A; Target 20757; HLA-B*51:01; DCAF4L2; ENSG00000176566; CTA
EADKQKKTV

SEQ ID NO: 20758 - protein, 10 aa, Homo sapiens
  Table A; Target 20758; HLA-A*33:03; DCAF4L2; ENSG00000176566; CTA
EADKQKKTVR

SEQ ID NO: 20759 - protein, 10 aa, Homo sapiens
  Table A; Target 20759; HLA-B*44:03; DCAF4L2; ENSG00000176566; CTA
EEADKQKKTV

SEQ ID NO: 20760 - protein, 9 aa, Homo sapiens
  Table A; Target 20760; HLA-B*18:01; DCAF4L2; ENSG00000176566; CTA
EEEGVVAAV

SEQ ID NO: 20761 - protein, 9 aa, Homo sapiens
  Table A; Target 20761; HLA-B*40:01; DCAF4L2; ENSG00000176566; CTA
EEEGVVAAV

SEQ ID NO: 20762 - protein, 9 aa, Homo sapiens
  Table A; Target 20762; HLA-B*49:01; DCAF4L2; ENSG00000176566; CTA
EEEGVVAAV

SEQ ID NO: 20763 - protein, 8 aa, Homo sapiens
  Table A; Target 20763; HLA-B*18:01; DCAF4L2; ENSG00000176566; CTA
EEGVVAAV

SEQ ID NO: 20764 - protein, 8 aa, Homo sapiens
  Table A; Target 20764; HLA-B*49:01; DCAF4L2; ENSG00000176566; CTA
EEGVVAAV

SEQ ID NO: 20765 - protein, 9 aa, Homo sapiens
  Table A; Target 20765; HLA-A*25:01; DCAF4L2; ENSG00000176566; CTA
EGHVNNSAY

SEQ ID NO: 20766 - protein, 9 aa, Homo sapiens
  Table A; Target 20766; HLA-A*26:01; DCAF4L2; ENSG00000176566; CTA
EGHVNNSAY

SEQ ID NO: 20767 - protein, 9 aa, Homo sapiens
  Table A; Target 20767; HLA-A*30:02; DCAF4L2; ENSG00000176566; CTA
EGHVNNSAY

SEQ ID NO: 20768 - protein, 9 aa, Homo sapiens
  Table A; Target 20768; HLA-B*15:01; DCAF4L2; ENSG00000176566; CTA
EGHVNNSAY

SEQ ID NO: 20769 - protein, 9 aa, Homo sapiens
  Table A; Target 20769; HLA-B*46:01; DCAF4L2; ENSG00000176566; CTA
EGHVNNSAY

SEQ ID NO: 20770 - protein, 9 aa, Homo sapiens
  Table A; Target 20770; HLA-C*14:02; DCAF4L2; ENSG00000176566; CTA
EGHVNNSAY

SEQ ID NO: 20771 - protein, 9 aa, Homo sapiens
  Table A; Target 20771; HLA-A*68:02; DCAF4L2; ENSG00000176566; CTA
EIFGIDLRC

SEQ ID NO: 20772 - protein, 9 aa, Homo sapiens
  Table A; Target 20772; HLA-A*33:01; DCAF4L2; ENSG00000176566; CTA
ELRVSCMQR

SEQ ID NO: 20773 - protein, 9 aa, Homo sapiens
  Table A; Target 20773; HLA-A*33:03; DCAF4L2; ENSG00000176566; CTA
ELRVSCMQR

SEQ ID NO: 20774 - protein, 9 aa, Homo sapiens
  Table A; Target 20774; HLA-A*33:01; DCAF4L2; ENSG00000176566; CTA
ENDIPSVAF

SEQ ID NO: 20775 - protein, 9 aa, Homo sapiens
  Table A; Target 20775; HLA-A*33:03; DCAF4L2; ENSG00000176566; CTA
ENDIPSVAF

SEQ ID NO: 20776 - protein, 9 aa, Homo sapiens
  Table A; Target 20776; HLA-B*38:01; DCAF4L2; ENSG00000176566; CTA
ENDIPSVAF

SEQ ID NO: 20777 - protein, 9 aa, Homo sapiens
  Table A; Target 20777; HLA-C*04:01; DCAF4L2; ENSG00000176566; CTA
ENDIPSVAF

SEQ ID NO: 20778 - protein, 9 aa, Homo sapiens
  Table A; Target 20778; HLA-C*05:01; DCAF4L2; ENSG00000176566; CTA
ENDIPSVAF

SEQ ID NO: 20779 - protein, 8 aa, Homo sapiens
  Table A; Target 20779; HLA-A*23:01; DCAF4L2; ENSG00000176566; CTA
FAIMTPLL

SEQ ID NO: 20780 - protein, 8 aa, Homo sapiens
  Table A; Target 20780; HLA-B*51:01; DCAF4L2; ENSG00000176566; CTA
FAIMTPLL

SEQ ID NO: 20781 - protein, 8 aa, Homo sapiens
  Table A; Target 20781; HLA-C*03:03; DCAF4L2; ENSG00000176566; CTA
FAIMTPLL

SEQ ID NO: 20782 - protein, 8 aa, Homo sapiens
  Table A; Target 20782; HLA-C*03:04; DCAF4L2; ENSG00000176566; CTA
FAIMTPLL

SEQ ID NO: 20783 - protein, 9 aa, Homo sapiens
  Table A; Target 20783; HLA-A*23:01; DCAF4L2; ENSG00000176566; CTA
FAIMTPLLF

SEQ ID NO: 20784 - protein, 9 aa, Homo sapiens
  Table A; Target 20784; HLA-A*24:02; DCAF4L2; ENSG00000176566; CTA
FAIMTPLLF

SEQ ID NO: 20785 - protein, 9 aa, Homo sapiens
  Table A; Target 20785; HLA-A*26:01; DCAF4L2; ENSG00000176566; CTA
FAIMTPLLF

SEQ ID NO: 20786 - protein, 9 aa, Homo sapiens
  Table A; Target 20786; HLA-A*29:02; DCAF4L2; ENSG00000176566; CTA
FAIMTPLLF

SEQ ID NO: 20787 - protein, 9 aa, Homo sapiens
  Table A; Target 20787; HLA-B*27:02; DCAF4L2; ENSG00000176566; CTA
FAIMTPLLF

SEQ ID NO: 20788 - protein, 9 aa, Homo sapiens
  Table A; Target 20788; HLA-B*35:01; DCAF4L2; ENSG00000176566; CTA
FAIMTPLLF

SEQ ID NO: 20789 - protein, 9 aa, Homo sapiens
  Table A; Target 20789; HLA-C*02:02; DCAF4L2; ENSG00000176566; CTA
FAIMTPLLF

SEQ ID NO: 20790 - protein, 9 aa, Homo sapiens
  Table A; Target 20790; HLA-C*03:03; DCAF4L2; ENSG00000176566; CTA
FAIMTPLLF

SEQ ID NO: 20791 - protein, 9 aa, Homo sapiens
  Table A; Target 20791; HLA-C*03:04; DCAF4L2; ENSG00000176566; CTA
FAIMTPLLF

SEQ ID NO: 20792 - protein, 9 aa, Homo sapiens
  Table A; Target 20792; HLA-C*12:03; DCAF4L2; ENSG00000176566; CTA
FAIMTPLLF

SEQ ID NO: 20793 - protein, 8 aa, Homo sapiens
  Table A; Target 20793; HLA-B*35:03; DCAF4L2; ENSG00000176566; CTA
FGTSSDVL

SEQ ID NO: 20794 - protein, 8 aa, Homo sapiens
  Table A; Target 20794; HLA-B*39:01; DCAF4L2; ENSG00000176566; CTA
FGTSSDVL

SEQ ID NO: 20795 - protein, 8 aa, Homo sapiens
  Table A; Target 20795; HLA-C*03:03; DCAF4L2; ENSG00000176566; CTA
FGTSSDVL

SEQ ID NO: 20796 - protein, 8 aa, Homo sapiens
  Table A; Target 20796; HLA-C*03:04; DCAF4L2; ENSG00000176566; CTA
FGTSSDVL

SEQ ID NO: 20797 - protein, 9 aa, Homo sapiens
  Table A; Target 20797; HLA-A*02:01; DCAF4L2; ENSG00000176566; CTA
FQIPDAWSC

SEQ ID NO: 20798 - protein, 9 aa, Homo sapiens
  Table A; Target 20798; HLA-A*68:02; DCAF4L2; ENSG00000176566; CTA
FSTGLSQQV

SEQ ID NO: 20799 - protein, 9 aa, Homo sapiens
  Table A; Target 20799; HLA-B*13:02; DCAF4L2; ENSG00000176566; CTA
FSTGLSQQV

SEQ ID NO: 20800 - protein, 9 aa, Homo sapiens
  Table A; Target 20800; HLA-C*02:02; DCAF4L2; ENSG00000176566; CTA
FSTGLSQQV

SEQ ID NO: 20801 - protein, 9 aa, Homo sapiens
  Table A; Target 20801; HLA-C*12:03; DCAF4L2; ENSG00000176566; CTA
FSTGLSQQV

SEQ ID NO: 20802 - protein, 9 aa, Homo sapiens
  Table A; Target 20802; HLA-C*16:02; DCAF4L2; ENSG00000176566; CTA
FSTGLSQQV

SEQ ID NO: 20803 - protein, 9 aa, Homo sapiens
  Table A; Target 20803; HLA-A*02:07; DCAF4L2; ENSG00000176566; CTA
GAPGLLMAV

SEQ ID NO: 20804 - protein, 8 aa, Homo sapiens
  Table A; Target 20804; HLA-A*30:01; DCAF4L2; ENSG00000176566; CTA
GEIFGIDL

SEQ ID NO: 20805 - protein, 8 aa, Homo sapiens
  Table A; Target 20805; HLA-B*40:01; DCAF4L2; ENSG00000176566; CTA
GEIFGIDL

SEQ ID NO: 20806 - protein, 8 aa, Homo sapiens
  Table A; Target 20806; HLA-B*49:01; DCAF4L2; ENSG00000176566; CTA
GEIFGIDL

SEQ ID NO: 20807 - protein, 8 aa, Homo sapiens
  Table A; Target 20807; HLA-A*29:02; DCAF4L2; ENSG00000176566; CTA
GFLRFANY

SEQ ID NO: 20808 - protein, 9 aa, Homo sapiens
  Table A; Target 20808; HLA-B*27:05; DCAF4L2; ENSG00000176566; CTA
GHVNNSAYL

SEQ ID NO: 20809 - protein, 9 aa, Homo sapiens
  Table A; Target 20809; HLA-B*38:01; DCAF4L2; ENSG00000176566; CTA
GHVNNSAYL

SEQ ID NO: 20810 - protein, 9 aa, Homo sapiens
  Table A; Target 20810; HLA-B*39:01; DCAF4L2; ENSG00000176566; CTA
GHVNNSAYL

SEQ ID NO: 20811 - protein, 9 aa, Homo sapiens
  Table A; Target 20811; HLA-A*02:01; DCAF4L2; ENSG00000176566; CTA
GLADTPSCA

SEQ ID NO: 20812 - protein, 9 aa, Homo sapiens
  Table A; Target 20812; HLA-A*02:03; DCAF4L2; ENSG00000176566; CTA
GLADTPSCA

SEQ ID NO: 20813 - protein, 9 aa, Homo sapiens
  Table A; Target 20813; HLA-B*55:01; DCAF4L2; ENSG00000176566; CTA
GLADTPSCA

SEQ ID NO: 20814 - protein, 10 aa, Homo sapiens
  Table A; Target 20814; HLA-A*02:01; DCAF4L2; ENSG00000176566; CTA
GLADTPSCAV

SEQ ID NO: 20815 - protein, 10 aa, Homo sapiens
  Table A; Target 20815; HLA-A*02:03; DCAF4L2; ENSG00000176566; CTA
GLADTPSCAV

SEQ ID NO: 20816 - protein, 10 aa, Homo sapiens
  Table A; Target 20816; HLA-B*55:01; DCAF4L2; ENSG00000176566; CTA
GLADTPSCAV

SEQ ID NO: 20817 - protein, 9 aa, Homo sapiens
  Table A; Target 20817; HLA-A*03:01; DCAF4L2; ENSG00000176566; CTA
GLNAPSMLR

SEQ ID NO: 20818 - protein, 9 aa, Homo sapiens
  Table A; Target 20818; HLA-A*03:02; DCAF4L2; ENSG00000176566; CTA
GLNAPSMLR

SEQ ID NO: 20819 - protein, 9 aa, Homo sapiens
  Table A; Target 20819; HLA-A*31:01; DCAF4L2; ENSG00000176566; CTA
GLNAPSMLR

SEQ ID NO: 20820 - protein, 9 aa, Homo sapiens
  Table A; Target 20820; HLA-A*33:03; DCAF4L2; ENSG00000176566; CTA
GLNAPSMLR

SEQ ID NO: 20821 - protein, 10 aa, Homo sapiens
  Table A; Target 20821; HLA-A*03:01; DCAF4L2; ENSG00000176566; CTA
GLNAPSMLRK

SEQ ID NO: 20822 - protein, 10 aa, Homo sapiens
  Table A; Target 20822; HLA-A*03:02; DCAF4L2; ENSG00000176566; CTA
GLNAPSMLRK

SEQ ID NO: 20823 - protein, 10 aa, Homo sapiens
  Table A; Target 20823; HLA-A*11:01; DCAF4L2; ENSG00000176566; CTA
GLNAPSMLRK

SEQ ID NO: 20824 - protein, 11 aa, Homo sapiens
  Table A; Target 20824; HLA-A*02:01; DCAF4L2; ENSG00000176566; CTA
GLSQQVLLTNV

SEQ ID NO: 20825 - protein, 11 aa, Homo sapiens
  Table A; Target 20825; HLA-A*02:03; DCAF4L2; ENSG00000176566; CTA
GLSQQVLLTNV

SEQ ID NO: 20826 - protein, 11 aa, Homo sapiens
  Table A; Target 20826; HLA-A*02:04; DCAF4L2; ENSG00000176566; CTA
GLSQQVLLTNV

SEQ ID NO: 20827 - protein, 11 aa, Homo sapiens
  Table A; Target 20827; HLA-B*55:01; DCAF4L2; ENSG00000176566; CTA
GLSQQVLLTNV

SEQ ID NO: 20828 - protein, 9 aa, Homo sapiens
  Table A; Target 20828; HLA-B*13:02; DCAF4L2; ENSG00000176566; CTA
GLTTPELRV

SEQ ID NO: 20829 - protein, 10 aa, Homo sapiens
  Table A; Target 20829; HLA-A*29:02; DCAF4L2; ENSG00000176566; CTA
GLTTPELRVY

SEQ ID NO: 20830 - protein, 10 aa, Homo sapiens
  Table A; Target 20830; HLA-A*30:02; DCAF4L2; ENSG00000176566; CTA
GLTTPELRVY

SEQ ID NO: 20831 - protein, 10 aa, Homo sapiens
  Table A; Target 20831; HLA-A*32:01; DCAF4L2; ENSG00000176566; CTA
GLTTPELRVY

SEQ ID NO: 20832 - protein, 10 aa, Homo sapiens
  Table A; Target 20832; HLA-B*15:01; DCAF4L2; ENSG00000176566; CTA
GLTTPELRVY

SEQ ID NO: 20833 - protein, 10 aa, Homo sapiens
  Table A; Target 20833; HLA-B*15:03; DCAF4L2; ENSG00000176566; CTA
GLTTPELRVY

SEQ ID NO: 20834 - protein, 10 aa, Homo sapiens
  Table A; Target 20834; HLA-C*16:01; DCAF4L2; ENSG00000176566; CTA
GLTTPELRVY

SEQ ID NO: 20835 - protein, 10 aa, Homo sapiens
  Table A; Target 20835; HLA-C*16:02; DCAF4L2; ENSG00000176566; CTA
GLTTPELRVY

SEQ ID NO: 20836 - protein, 9 aa, Homo sapiens
  Table A; Target 20836; HLA-B*13:02; DCAF4L2; ENSG00000176566; CTA
GQFLVSSDM

SEQ ID NO: 20837 - protein, 9 aa, Homo sapiens
  Table A; Target 20837; HLA-B*15:01; DCAF4L2; ENSG00000176566; CTA
GQFLVSSDM

SEQ ID NO: 20838 - protein, 9 aa, Homo sapiens
  Table A; Target 20838; HLA-B*15:03; DCAF4L2; ENSG00000176566; CTA
GQFLVSSDM

SEQ ID NO: 20839 - protein, 9 aa, Homo sapiens
  Table A; Target 20839; HLA-B*27:05; DCAF4L2; ENSG00000176566; CTA
GQFLVSSDM

SEQ ID NO: 20840 - protein, 9 aa, Homo sapiens
  Table A; Target 20840; HLA-B*39:01; DCAF4L2; ENSG00000176566; CTA
GQFLVSSDM

SEQ ID NO: 20841 - protein, 11 aa, Homo sapiens
  Table A; Target 20841; HLA-B*27:05; DCAF4L2; ENSG00000176566; CTA
GQFLVSSDMTG

SEQ ID NO: 20842 - protein, 9 aa, Homo sapiens
  Table A; Target 20842; HLA-A*31:01; DCAF4L2; ENSG00000176566; CTA
GSKYGIITM

SEQ ID NO: 20843 - protein, 9 aa, Homo sapiens
  Table A; Target 20843; HLA-B*40:02; DCAF4L2; ENSG00000176566; CTA
GSKYGIITM

SEQ ID NO: 20844 - protein, 9 aa, Homo sapiens
  Table A; Target 20844; HLA-B*46:01; DCAF4L2; ENSG00000176566; CTA
GSKYGIITM

SEQ ID NO: 20845 - protein, 9 aa, Homo sapiens
  Table A; Target 20845; HLA-B*57:01; DCAF4L2; ENSG00000176566; CTA
GSKYGIITM

SEQ ID NO: 20846 - protein, 9 aa, Homo sapiens
  Table A; Target 20846; HLA-C*07:04; DCAF4L2; ENSG00000176566; CTA
GSKYGIITM

SEQ ID NO: 20847 - protein, 9 aa, Homo sapiens
  Table A; Target 20847; HLA-C*12:03; DCAF4L2; ENSG00000176566; CTA
GSKYGIITM

SEQ ID NO: 20848 - protein, 10 aa, Homo sapiens
  Table A; Target 20848; HLA-A*31:01; DCAF4L2; ENSG00000176566; CTA
GSKYGIITMR

SEQ ID NO: 20849 - protein, 10 aa, Homo sapiens
  Table A; Target 20849; HLA-A*33:03; DCAF4L2; ENSG00000176566; CTA
GSKYGIITMR

SEQ ID NO: 20850 - protein, 10 aa, Homo sapiens
  Table A; Target 20850; HLA-A*11:01; DCAF4L2; ENSG00000176566; CTA
GTSSDVLAQQ

SEQ ID NO: 20851 - protein, 11 aa, Homo sapiens
  Table A; Target 20851; HLA-A*11:01; DCAF4L2; ENSG00000176566; CTA
GTSSDVLAQQF

SEQ ID NO: 20852 - protein, 11 aa, Homo sapiens
  Table A; Target 20852; HLA-A*29:02; DCAF4L2; ENSG00000176566; CTA
GTSSDVLAQQF

SEQ ID NO: 20853 - protein, 11 aa, Homo sapiens
  Table A; Target 20853; HLA-A*30:02; DCAF4L2; ENSG00000176566; CTA
GTSSDVLAQQF

SEQ ID NO: 20854 - protein, 11 aa, Homo sapiens
  Table A; Target 20854; HLA-A*32:01; DCAF4L2; ENSG00000176566; CTA
GTSSDVLAQQF

SEQ ID NO: 20855 - protein, 11 aa, Homo sapiens
  Table A; Target 20855; HLA-B*27:02; DCAF4L2; ENSG00000176566; CTA
GTSSDVLAQQF

SEQ ID NO: 20856 - protein, 11 aa, Homo sapiens
  Table A; Target 20856; HLA-B*27:05; DCAF4L2; ENSG00000176566; CTA
GTSSDVLAQQF

SEQ ID NO: 20857 - protein, 11 aa, Homo sapiens
  Table A; Target 20857; HLA-B*39:01; DCAF4L2; ENSG00000176566; CTA
GTSSDVLAQQF

SEQ ID NO: 20858 - protein, 11 aa, Homo sapiens
  Table A; Target 20858; HLA-B*57:01; DCAF4L2; ENSG00000176566; CTA
GTSSDVLAQQF

SEQ ID NO: 20859 - protein, 11 aa, Homo sapiens
  Table A; Target 20859; HLA-B*58:01; DCAF4L2; ENSG00000176566; CTA
GTSSDVLAQQF

SEQ ID NO: 20860 - protein, 11 aa, Homo sapiens
  Table A; Target 20860; HLA-A*30:02; DCAF4L2; ENSG00000176566; CTA
GVVAAVGQDCY

SEQ ID NO: 20861 - protein, 11 aa, Homo sapiens
  Table A; Target 20861; HLA-B*15:01; DCAF4L2; ENSG00000176566; CTA
GVVAAVGQDCY

SEQ ID NO: 20862 - protein, 11 aa, Homo sapiens
  Table A; Target 20862; HLA-B*15:03; DCAF4L2; ENSG00000176566; CTA
GVVAAVGQDCY

SEQ ID NO: 20863 - protein, 8 aa, Homo sapiens
  Table A; Target 20863; HLA-A*30:01; DCAF4L2; ENSG00000176566; CTA
HDSAVTSL

SEQ ID NO: 20864 - protein, 8 aa, Homo sapiens
  Table A; Target 20864; HLA-B*18:01; DCAF4L2; ENSG00000176566; CTA
HDSAVTSL

SEQ ID NO: 20865 - protein, 8 aa, Homo sapiens
  Table A; Target 20865; HLA-B*37:01; DCAF4L2; ENSG00000176566; CTA
HDSAVTSL

SEQ ID NO: 20866 - protein, 8 aa, Homo sapiens
  Table A; Target 20866; HLA-B*38:01; DCAF4L2; ENSG00000176566; CTA
HDSAVTSL

SEQ ID NO: 20867 - protein, 8 aa, Homo sapiens
  Table A; Target 20867; HLA-B*40:01; DCAF4L2; ENSG00000176566; CTA
HDSAVTSL

SEQ ID NO: 20868 - protein, 8 aa, Homo sapiens
  Table A; Target 20868; HLA-B*40:02; DCAF4L2; ENSG00000176566; CTA
HDSAVTSL

SEQ ID NO: 20869 - protein, 10 aa, Homo sapiens
  Table A; Target 20869; HLA-B*38:01; DCAF4L2; ENSG00000176566; CTA
HDSAVTSLQI

SEQ ID NO: 20870 - protein, 8 aa, Homo sapiens
  Table A; Target 20870; HLA-B*51:01; DCAF4L2; ENSG00000176566; CTA
HGHLLTTI

SEQ ID NO: 20871 - protein, 9 aa, Homo sapiens
  Table A; Target 20871; HLA-A*02:01; DCAF4L2; ENSG00000176566; CTA
HLDSHLLLC

SEQ ID NO: 20872 - protein, 9 aa, Homo sapiens
  Table A; Target 20872; HLA-A*02:07; DCAF4L2; ENSG00000176566; CTA
HLDSHLLLC

SEQ ID NO: 20873 - protein, 10 aa, Homo sapiens
  Table A; Target 20873; HLA-A*29:02; DCAF4L2; ENSG00000176566; CTA
HLLTTIPSPY

SEQ ID NO: 20874 - protein, 11 aa, Homo sapiens
  Table A; Target 20874; HLA-A*68:02; DCAF4L2; ENSG00000176566; CTA
HSFSTGLSQQV

SEQ ID NO: 20875 - protein, 8 aa, Homo sapiens
  Table A; Target 20875; HLA-C*03:03; DCAF4L2; ENSG00000176566; CTA
HSWDPSSL

SEQ ID NO: 20876 - protein, 8 aa, Homo sapiens
  Table A; Target 20876; HLA-C*03:04; DCAF4L2; ENSG00000176566; CTA
HSWDPSSL

SEQ ID NO: 20877 - protein, 8 aa, Homo sapiens
  Table A; Target 20877; HLA-C*05:01; DCAF4L2; ENSG00000176566; CTA
HSWDPSSL

SEQ ID NO: 20878 - protein, 10 aa, Homo sapiens
  Table A; Target 20878; HLA-B*54:01; DCAF4L2; ENSG00000176566; CTA
HVNEEEGVVA

SEQ ID NO: 20879 - protein, 9 aa, Homo sapiens
  Table A; Target 20879; HLA-B*38:01; DCAF4L2; ENSG00000176566; CTA
IHSWDPSSL

SEQ ID NO: 20880 - protein, 9 aa, Homo sapiens
  Table A; Target 20880; HLA-B*39:01; DCAF4L2; ENSG00000176566; CTA
IHSWDPSSL

SEQ ID NO: 20881 - protein, 11 aa, Homo sapiens
  Table A; Target 20881; HLA-A*23:01; DCAF4L2; ENSG00000176566; CTA
ILANTNTDQLF

SEQ ID NO: 20882 - protein, 9 aa, Homo sapiens
  Table A; Target 20882; HLA-A*02:03; DCAF4L2; ENSG00000176566; CTA
ILQDGQFLV

SEQ ID NO: 20883 - protein, 9 aa, Homo sapiens
  Table A; Target 20883; HLA-A*02:04; DCAF4L2; ENSG00000176566; CTA
ILQDGQFLV

SEQ ID NO: 20884 - protein, 9 aa, Homo sapiens
  Table A; Target 20884; HLA-A*02:07; DCAF4L2; ENSG00000176566; CTA
ILQDGQFLV

SEQ ID NO: 20885 - protein, 9 aa, Homo sapiens
  Table A; Target 20885; HLA-A*30:01; DCAF4L2; ENSG00000176566; CTA
ILQDGQFLV

SEQ ID NO: 20886 - protein, 9 aa, Homo sapiens
  Table A; Target 20886; HLA-B*13:02; DCAF4L2; ENSG00000176566; CTA
ILQDGQFLV

SEQ ID NO: 20887 - protein, 9 aa, Homo sapiens
  Table A; Target 20887; HLA-B*55:01; DCAF4L2; ENSG00000176566; CTA
ILQDGQFLV

SEQ ID NO: 20888 - protein, 9 aa, Homo sapiens
  Table A; Target 20888; HLA-A*68:01; DCAF4L2; ENSG00000176566; CTA
IPSVAFSSR

SEQ ID NO: 20889 - protein, 9 aa, Homo sapiens
  Table A; Target 20889; HLA-C*07:06; DCAF4L2; ENSG00000176566; CTA
IPSVAFSSR

SEQ ID NO: 20890 - protein, 10 aa, Homo sapiens
  Table A; Target 20890; HLA-B*07:02; DCAF4L2; ENSG00000176566; CTA
IPSVAFSSRL

SEQ ID NO: 20891 - protein, 9 aa, Homo sapiens
  Table A; Target 20891; HLA-A*03:01; DCAF4L2; ENSG00000176566; CTA
KLWDLRATK

SEQ ID NO: 20892 - protein, 8 aa, Homo sapiens
  Table A; Target 20892; HLA-A*31:01; DCAF4L2; ENSG00000176566; CTA
KTLYVPNR

SEQ ID NO: 20893 - protein, 9 aa, Homo sapiens
  Table A; Target 20893; HLA-A*03:01; DCAF4L2; ENSG00000176566; CTA
KTLYVPNRK

SEQ ID NO: 20894 - protein, 9 aa, Homo sapiens
  Table A; Target 20894; HLA-A*11:01; DCAF4L2; ENSG00000176566; CTA
KTLYVPNRK

SEQ ID NO: 20895 - protein, 9 aa, Homo sapiens
  Table A; Target 20895; HLA-B*58:01; DCAF4L2; ENSG00000176566; CTA
KTVRVGLNA

SEQ ID NO: 20896 - protein, 8 aa, Homo sapiens
  Table A; Target 20896; HLA-A*31:01; DCAF4L2; ENSG00000176566; CTA
KYGIITMR

SEQ ID NO: 20897 - protein, 8 aa, Homo sapiens
  Table A; Target 20897; HLA-C*05:01; DCAF4L2; ENSG00000176566; CTA
LADTPSCA

SEQ ID NO: 20898 - protein, 9 aa, Homo sapiens
  Table A; Target 20898; HLA-B*51:01; DCAF4L2; ENSG00000176566; CTA
LADTPSCAV

SEQ ID NO: 20899 - protein, 9 aa, Homo sapiens
  Table A; Target 20899; HLA-C*03:03; DCAF4L2; ENSG00000176566; CTA
LADTPSCAV

SEQ ID NO: 20900 - protein, 9 aa, Homo sapiens
  Table A; Target 20900; HLA-C*03:04; DCAF4L2; ENSG00000176566; CTA
LADTPSCAV

SEQ ID NO: 20901 - protein, 9 aa, Homo sapiens
  Table A; Target 20901; HLA-C*05:01; DCAF4L2; ENSG00000176566; CTA
LADTPSCAV

SEQ ID NO: 20902 - protein, 10 aa, Homo sapiens
  Table A; Target 20902; HLA-C*03:04; DCAF4L2; ENSG00000176566; CTA
LADTPSCAVL

SEQ ID NO: 20903 - protein, 10 aa, Homo sapiens
  Table A; Target 20903; HLA-C*05:01; DCAF4L2; ENSG00000176566; CTA
LADTPSCAVL

SEQ ID NO: 20904 - protein, 9 aa, Homo sapiens
  Table A; Target 20904; HLA-C*02:02; DCAF4L2; ENSG00000176566; CTA
LANTNTDQL

SEQ ID NO: 20905 - protein, 9 aa, Homo sapiens
  Table A; Target 20905; HLA-C*03:03; DCAF4L2; ENSG00000176566; CTA
LANTNTDQL

SEQ ID NO: 20906 - protein, 9 aa, Homo sapiens
  Table A; Target 20906; HLA-C*03:04; DCAF4L2; ENSG00000176566; CTA
LANTNTDQL

SEQ ID NO: 20907 - protein, 9 aa, Homo sapiens
  Table A; Target 20907; HLA-C*05:01; DCAF4L2; ENSG00000176566; CTA
LANTNTDQL

SEQ ID NO: 20908 - protein, 9 aa, Homo sapiens
  Table A; Target 20908; HLA-C*16:02; DCAF4L2; ENSG00000176566; CTA
LANTNTDQL

SEQ ID NO: 20909 - protein, 10 aa, Homo sapiens
  Table A; Target 20909; HLA-B*58:01; DCAF4L2; ENSG00000176566; CTA
LANTNTDQLF

SEQ ID NO: 20910 - protein, 9 aa, Homo sapiens
  Table A; Target 20910; HLA-A*23:01; DCAF4L2; ENSG00000176566; CTA
LFIGSFPGM

SEQ ID NO: 20911 - protein, 9 aa, Homo sapiens
  Table A; Target 20911; HLA-A*24:02; DCAF4L2; ENSG00000176566; CTA
LFIGSFPGM

SEQ ID NO: 20912 - protein, 9 aa, Homo sapiens
  Table A; Target 20912; HLA-C*14:02; DCAF4L2; ENSG00000176566; CTA
LFIGSFPGM

SEQ ID NO: 20913 - protein, 10 aa, Homo sapiens
  Table A; Target 20913; HLA-A*01:01; DCAF4L2; ENSG00000176566; CTA
LLMAVREDLY

SEQ ID NO: 20914 - protein, 9 aa, Homo sapiens
  Table A; Target 20914; HLA-A*02:01; DCAF4L2; ENSG00000176566; CTA
LLTNVVTGH

SEQ ID NO: 20915 - protein, 9 aa, Homo sapiens
  Table A; Target 20915; HLA-A*02:03; DCAF4L2; ENSG00000176566; CTA
LLTNVVTGH

SEQ ID NO: 20916 - protein, 9 aa, Homo sapiens
  Table A; Target 20916; HLA-A*01:01; DCAF4L2; ENSG00000176566; CTA
LLTTIPSPY

SEQ ID NO: 20917 - protein, 9 aa, Homo sapiens
  Table A; Target 20917; HLA-A*29:02; DCAF4L2; ENSG00000176566; CTA
LLTTIPSPY

SEQ ID NO: 20918 - protein, 9 aa, Homo sapiens
  Table A; Target 20918; HLA-A*30:02; DCAF4L2; ENSG00000176566; CTA
LLTTIPSPY

SEQ ID NO: 20919 - protein, 9 aa, Homo sapiens
  Table A; Target 20919; HLA-B*46:01; DCAF4L2; ENSG00000176566; CTA
LLTTIPSPY

SEQ ID NO: 20920 - protein, 9 aa, Homo sapiens
  Table A; Target 20920; HLA-A*01:01; DCAF4L2; ENSG00000176566; CTA
LMAVREDLY

SEQ ID NO: 20921 - protein, 9 aa, Homo sapiens
  Table A; Target 20921; HLA-A*29:02; DCAF4L2; ENSG00000176566; CTA
LMAVREDLY

SEQ ID NO: 20922 - protein, 9 aa, Homo sapiens
  Table A; Target 20922; HLA-C*16:01; DCAF4L2; ENSG00000176566; CTA
LMAVREDLY

SEQ ID NO: 20923 - protein, 10 aa, Homo sapiens
  Table A; Target 20923; HLA-B*35:01; DCAF4L2; ENSG00000176566; CTA
LPASLFIGSF

SEQ ID NO: 20924 - protein, 9 aa, Homo sapiens
  Table A; Target 20924; HLA-B*15:01; DCAF4L2; ENSG00000176566; CTA
LQILQDGQF

SEQ ID NO: 20925 - protein, 9 aa, Homo sapiens
  Table A; Target 20925; HLA-B*15:03; DCAF4L2; ENSG00000176566; CTA
LQILQDGQF

SEQ ID NO: 20926 - protein, 10 aa, Homo sapiens
  Table A; Target 20926; HLA-C*16:04; DCAF4L2; ENSG00000176566; CTA
LRCGNQGSGW

SEQ ID NO: 20927 - protein, 10 aa, Homo sapiens
  Table A; Target 20927; HLA-C*01:02; DCAF4L2; ENSG00000176566; CTA
LSHDSAVTSL

SEQ ID NO: 20928 - protein, 10 aa, Homo sapiens
  Table A; Target 20928; HLA-C*03:04; DCAF4L2; ENSG00000176566; CTA
LSHDSAVTSL

SEQ ID NO: 20929 - protein, 9 aa, Homo sapiens
  Table A; Target 20929; HLA-B*46:01; DCAF4L2; ENSG00000176566; CTA
LSIHAYHSF

SEQ ID NO: 20930 - protein, 9 aa, Homo sapiens
  Table A; Target 20930; HLA-B*57:01; DCAF4L2; ENSG00000176566; CTA
LSIHAYHSF

SEQ ID NO: 20931 - protein, 9 aa, Homo sapiens
  Table A; Target 20931; HLA-B*58:01; DCAF4L2; ENSG00000176566; CTA
LSIHAYHSF

SEQ ID NO: 20932 - protein, 8 aa, Homo sapiens
  Table A; Target 20932; HLA-A*01:01; DCAF4L2; ENSG00000176566; CTA
LTTIPSPY

SEQ ID NO: 20933 - protein, 9 aa, Homo sapiens
  Table A; Target 20933; HLA-A*01:01; DCAF4L2; ENSG00000176566; CTA
LTTPELRVY

SEQ ID NO: 20934 - protein, 9 aa, Homo sapiens
  Table A; Target 20934; HLA-A*29:02; DCAF4L2; ENSG00000176566; CTA
LTTPELRVY

SEQ ID NO: 20935 - protein, 9 aa, Homo sapiens
  Table A; Target 20935; HLA-A*30:02; DCAF4L2; ENSG00000176566; CTA
LTTPELRVY

SEQ ID NO: 20936 - protein, 9 aa, Homo sapiens
  Table A; Target 20936; HLA-A*32:01; DCAF4L2; ENSG00000176566; CTA
LTTPELRVY

SEQ ID NO: 20937 - protein, 9 aa, Homo sapiens
  Table A; Target 20937; HLA-B*46:01; DCAF4L2; ENSG00000176566; CTA
LTTPELRVY

SEQ ID NO: 20938 - protein, 9 aa, Homo sapiens
  Table A; Target 20938; HLA-B*57:01; DCAF4L2; ENSG00000176566; CTA
LTTPELRVY

SEQ ID NO: 20939 - protein, 9 aa, Homo sapiens
  Table A; Target 20939; HLA-B*58:01; DCAF4L2; ENSG00000176566; CTA
LTTPELRVY

SEQ ID NO: 20940 - protein, 9 aa, Homo sapiens
  Table A; Target 20940; HLA-C*02:02; DCAF4L2; ENSG00000176566; CTA
LTTPELRVY

SEQ ID NO: 20941 - protein, 9 aa, Homo sapiens
  Table A; Target 20941; HLA-C*16:01; DCAF4L2; ENSG00000176566; CTA
LTTPELRVY

SEQ ID NO: 20942 - protein, 9 aa, Homo sapiens
  Table A; Target 20942; HLA-C*16:02; DCAF4L2; ENSG00000176566; CTA
LTTPELRVY

SEQ ID NO: 20943 - protein, 10 aa, Homo sapiens
  Table A; Target 20943; HLA-B*35:01; DCAF4L2; ENSG00000176566; CTA
MAVREDLYCF

SEQ ID NO: 20944 - protein, 8 aa, Homo sapiens
  Table A; Target 20944; HLA-B*08:01; DCAF4L2; ENSG00000176566; CTA
MQRKKVQI

SEQ ID NO: 20945 - protein, 9 aa, Homo sapiens
  Table A; Target 20945; HLA-B*27:02; DCAF4L2; ENSG00000176566; CTA
MRGLTTPEL

SEQ ID NO: 20946 - protein, 9 aa, Homo sapiens
  Table A; Target 20946; HLA-B*27:05; DCAF4L2; ENSG00000176566; CTA
MRGLTTPEL

SEQ ID NO: 20947 - protein, 8 aa, Homo sapiens
  Table A; Target 20947; HLA-B*57:01; DCAF4L2; ENSG00000176566; CTA
MTGTIKLW

SEQ ID NO: 20948 - protein, 8 aa, Homo sapiens
  Table A; Target 20948; HLA-B*51:01; DCAF4L2; ENSG00000176566; CTA
NAPSMLRK

SEQ ID NO: 20949 - protein, 8 aa, Homo sapiens
  Table A; Target 20949; HLA-A*30:01; DCAF4L2; ENSG00000176566; CTA
NDIPSVAF

SEQ ID NO: 20950 - protein, 8 aa, Homo sapiens
  Table A; Target 20950; HLA-B*18:01; DCAF4L2; ENSG00000176566; CTA
NDIPSVAF

SEQ ID NO: 20951 - protein, 8 aa, Homo sapiens
  Table A; Target 20951; HLA-B*37:01; DCAF4L2; ENSG00000176566; CTA
NDIPSVAF

SEQ ID NO: 20952 - protein, 8 aa, Homo sapiens
  Table A; Target 20952; HLA-B*40:02; DCAF4L2; ENSG00000176566; CTA
NDIPSVAF

SEQ ID NO: 20953 - protein, 8 aa, Homo sapiens
  Table A; Target 20953; HLA-B*44:02; DCAF4L2; ENSG00000176566; CTA
NDIPSVAF

SEQ ID NO: 20954 - protein, 8 aa, Homo sapiens
  Table A; Target 20954; HLA-B*44:03; DCAF4L2; ENSG00000176566; CTA
NDIPSVAF

SEQ ID NO: 20955 - protein, 11 aa, Homo sapiens
  Table A; Target 20955; HLA-A*33:01; DCAF4L2; ENSG00000176566; CTA
NDIPSVAFSSR

SEQ ID NO: 20956 - protein, 8 aa, Homo sapiens
  Table A; Target 20956; HLA-B*18:01; DCAF4L2; ENSG00000176566; CTA
NEEEGVVA

SEQ ID NO: 20957 - protein, 9 aa, Homo sapiens
  Table A; Target 20957; HLA-A*30:01; DCAF4L2; ENSG00000176566; CTA
NEEEGVVAA

SEQ ID NO: 20958 - protein, 9 aa, Homo sapiens
  Table A; Target 20958; HLA-B*18:01; DCAF4L2; ENSG00000176566; CTA
NEEEGVVAA

SEQ ID NO: 20959 - protein, 9 aa, Homo sapiens
  Table A; Target 20959; HLA-B*40:01; DCAF4L2; ENSG00000176566; CTA
NEEEGVVAA

SEQ ID NO: 20960 - protein, 10 aa, Homo sapiens
  Table A; Target 20960; HLA-B*40:01; DCAF4L2; ENSG00000176566; CTA
NEEEGVVAAV

SEQ ID NO: 20961 - protein, 8 aa, Homo sapiens
  Table A; Target 20961; HLA-B*38:01; DCAF4L2; ENSG00000176566; CTA
NHLDSHLL

SEQ ID NO: 20962 - protein, 9 aa, Homo sapiens
  Table A; Target 20962; HLA-B*38:01; DCAF4L2; ENSG00000176566; CTA
NHLDSHLLL

SEQ ID NO: 20963 - protein, 10 aa, Homo sapiens
  Table A; Target 20963; HLA-A*25:01; DCAF4L2; ENSG00000176566; CTA
NQVEAGGSKY

SEQ ID NO: 20964 - protein, 10 aa, Homo sapiens
  Table A; Target 20964; HLA-A*26:01; DCAF4L2; ENSG00000176566; CTA
NQVEAGGSKY

SEQ ID NO: 20965 - protein, 10 aa, Homo sapiens
  Table A; Target 20965; HLA-A*30:02; DCAF4L2; ENSG00000176566; CTA
NQVEAGGSKY

SEQ ID NO: 20966 - protein, 10 aa, Homo sapiens
  Table A; Target 20966; HLA-B*15:01; DCAF4L2; ENSG00000176566; CTA
NQVEAGGSKY

SEQ ID NO: 20967 - protein, 10 aa, Homo sapiens
  Table A; Target 20967; HLA-B*15:03; DCAF4L2; ENSG00000176566; CTA
NQVEAGGSKY

SEQ ID NO: 20968 - protein, 10 aa, Homo sapiens
  Table A; Target 20968; HLA-B*18:01; DCAF4L2; ENSG00000176566; CTA
NQVEAGGSKY

SEQ ID NO: 20969 - protein, 10 aa, Homo sapiens
  Table A; Target 20969; HLA-B*38:01; DCAF4L2; ENSG00000176566; CTA
NQVEAGGSKY

SEQ ID NO: 20970 - protein, 10 aa, Homo sapiens
  Table A; Target 20970; HLA-B*39:01; DCAF4L2; ENSG00000176566; CTA
NQVEAGGSKY

SEQ ID NO: 20971 - protein, 10 aa, Homo sapiens
  Table A; Target 20971; HLA-B*44:03; DCAF4L2; ENSG00000176566; CTA
NQVEAGGSKY

SEQ ID NO: 20972 - protein, 10 aa, Homo sapiens
  Table A; Target 20972; HLA-C*07:04; DCAF4L2; ENSG00000176566; CTA
NQVEAGGSKY

SEQ ID NO: 20973 - protein, 10 aa, Homo sapiens
  Table A; Target 20973; HLA-C*16:04; DCAF4L2; ENSG00000176566; CTA
NQVEAGGSKY

SEQ ID NO: 20974 - protein, 9 aa, Homo sapiens
  Table A; Target 20974; HLA-A*68:02; DCAF4L2; ENSG00000176566; CTA
NSAYLPVHV

SEQ ID NO: 20975 - protein, 8 aa, Homo sapiens
  Table A; Target 20975; HLA-C*05:01; DCAF4L2; ENSG00000176566; CTA
NTDQLFTV

SEQ ID NO: 20976 - protein, 9 aa, Homo sapiens
  Table A; Target 20976; HLA-A*01:01; DCAF4L2; ENSG00000176566; CTA
NTDQLFTVN

SEQ ID NO: 20977 - protein, 10 aa, Homo sapiens
  Table A; Target 20977; HLA-A*23:01; DCAF4L2; ENSG00000176566; CTA
NVVTGHQQSF

SEQ ID NO: 20978 - protein, 10 aa, Homo sapiens
  Table A; Target 20978; HLA-A*25:01; DCAF4L2; ENSG00000176566; CTA
NVVTGHQQSF

SEQ ID NO: 20979 - protein, 10 aa, Homo sapiens
  Table A; Target 20979; HLA-A*26:01; DCAF4L2; ENSG00000176566; CTA
NVVTGHQQSF

SEQ ID NO: 20980 - protein, 10 aa, Homo sapiens
  Table A; Target 20980; HLA-A*32:01; DCAF4L2; ENSG00000176566; CTA
NVVTGHQQSF

SEQ ID NO: 20981 - protein, 10 aa, Homo sapiens
  Table A; Target 20981; HLA-B*35:01; DCAF4L2; ENSG00000176566; CTA
NVVTGHQQSF

SEQ ID NO: 20982 - protein, 10 aa, Homo sapiens
  Table A; Target 20982; HLA-B*58:01; DCAF4L2; ENSG00000176566; CTA
NVVTGHQQSF

SEQ ID NO: 20983 - protein, 10 aa, Homo sapiens
  Table A; Target 20983; HLA-C*07:06; DCAF4L2; ENSG00000176566; CTA
NVVTGHQQSF

SEQ ID NO: 20984 - protein, 9 aa, Homo sapiens
  Table A; Target 20984; HLA-A*23:01; DCAF4L2; ENSG00000176566; CTA
QFAIMTPLL

SEQ ID NO: 20985 - protein, 9 aa, Homo sapiens
  Table A; Target 20985; HLA-A*24:02; DCAF4L2; ENSG00000176566; CTA
QFAIMTPLL

SEQ ID NO: 20986 - protein, 10 aa, Homo sapiens
  Table A; Target 20986; HLA-A*24:02; DCAF4L2; ENSG00000176566; CTA
QFAIMTPLLF

SEQ ID NO: 20987 - protein, 8 aa, Homo sapiens
  Table A; Target 20987; HLA-C*14:02; DCAF4L2; ENSG00000176566; CTA
QFLVSSDM

SEQ ID NO: 20988 - protein, 9 aa, Homo sapiens
  Table A; Target 20988; HLA-B*38:01; DCAF4L2; ENSG00000176566; CTA
QILQDGQFL

SEQ ID NO: 20989 - protein, 10 aa, Homo sapiens
  Table A; Target 20989; HLA-A*25:01; DCAF4L2; ENSG00000176566; CTA
QIPDAWSCAW

SEQ ID NO: 20990 - protein, 8 aa, Homo sapiens
  Table A; Target 20990; HLA-A*02:01; DCAF4L2; ENSG00000176566; CTA
QLFTVNQV

SEQ ID NO: 20991 - protein, 8 aa, Homo sapiens
  Table A; Target 20991; HLA-A*02:03; DCAF4L2; ENSG00000176566; CTA
QLFTVNQV

SEQ ID NO: 20992 - protein, 8 aa, Homo sapiens
  Table A; Target 20992; HLA-A*02:04; DCAF4L2; ENSG00000176566; CTA
QLFTVNQV

SEQ ID NO: 20993 - protein, 8 aa, Homo sapiens
  Table A; Target 20993; HLA-B*13:02; DCAF4L2; ENSG00000176566; CTA
QLFTVNQV

SEQ ID NO: 20994 - protein, 10 aa, Homo sapiens
  Table A; Target 20994; HLA-B*56:01; DCAF4L2; ENSG00000176566; CTA
QLFTVNQVEA

SEQ ID NO: 20995 - protein, 9 aa, Homo sapiens
  Table A; Target 20995; HLA-B*15:01; DCAF4L2; ENSG00000176566; CTA
QQFAIMTPL

SEQ ID NO: 20996 - protein, 9 aa, Homo sapiens
  Table A; Target 20996; HLA-B*15:03; DCAF4L2; ENSG00000176566; CTA
QQFAIMTPL

SEQ ID NO: 20997 - protein, 9 aa, Homo sapiens
  Table A; Target 20997; HLA-B*27:05; DCAF4L2; ENSG00000176566; CTA
QQFAIMTPL

SEQ ID NO: 20998 - protein, 9 aa, Homo sapiens
  Table A; Target 20998; HLA-C*02:02; DCAF4L2; ENSG00000176566; CTA
QQFAIMTPL

SEQ ID NO: 20999 - protein, 11 aa, Homo sapiens
  Table A; Target 20999; HLA-B*27:05; DCAF4L2; ENSG00000176566; CTA
QQSFGTSSDVL

SEQ ID NO: 21000 - protein, 11 aa, Homo sapiens
  Table A; Target 21000; HLA-B*38:01; DCAF4L2; ENSG00000176566; CTA
QQSFGTSSDVL

SEQ ID NO: 21001 - protein, 11 aa, Homo sapiens
  Table A; Target 21001; HLA-B*39:01; DCAF4L2; ENSG00000176566; CTA
QQSFGTSSDVL

SEQ ID NO: 21002 - protein, 11 aa, Homo sapiens
  Table A; Target 21002; HLA-C*07:04; DCAF4L2; ENSG00000176566; CTA
QQSFGTSSDVL

SEQ ID NO: 21003 - protein, 8 aa, Homo sapiens
  Table A; Target 21003; HLA-B*13:02; DCAF4L2; ENSG00000176566; CTA
QQVLLTNV

SEQ ID NO: 21004 - protein, 9 aa, Homo sapiens
  Table A; Target 21004; HLA-B*13:02; DCAF4L2; ENSG00000176566; CTA
QQVLLTNVV

SEQ ID NO: 21005 - protein, 9 aa, Homo sapiens
  Table A; Target 21005; HLA-B*39:01; DCAF4L2; ENSG00000176566; CTA
QQVLLTNVV

SEQ ID NO: 21006 - protein, 10 aa, Homo sapiens
  Table A; Target 21006; HLA-B*39:01; DCAF4L2; ENSG00000176566; CTA
QSFGTSSDVL

SEQ ID NO: 21007 - protein, 9 aa, Homo sapiens
  Table A; Target 21007; HLA-A*01:01; DCAF4L2; ENSG00000176566; CTA
QVEAGGSKY

SEQ ID NO: 21008 - protein, 9 aa, Homo sapiens
  Table A; Target 21008; HLA-A*25:01; DCAF4L2; ENSG00000176566; CTA
QVEAGGSKY

SEQ ID NO: 21009 - protein, 9 aa, Homo sapiens
  Table A; Target 21009; HLA-A*26:01; DCAF4L2; ENSG00000176566; CTA
QVEAGGSKY

SEQ ID NO: 21010 - protein, 9 aa, Homo sapiens
  Table A; Target 21010; HLA-A*30:02; DCAF4L2; ENSG00000176566; CTA
QVEAGGSKY

SEQ ID NO: 21011 - protein, 9 aa, Homo sapiens
  Table A; Target 21011; HLA-A*32:01; DCAF4L2; ENSG00000176566; CTA
QVEAGGSKY

SEQ ID NO: 21012 - protein, 9 aa, Homo sapiens
  Table A; Target 21012; HLA-B*15:01; DCAF4L2; ENSG00000176566; CTA
QVEAGGSKY

SEQ ID NO: 21013 - protein, 9 aa, Homo sapiens
  Table A; Target 21013; HLA-B*15:03; DCAF4L2; ENSG00000176566; CTA
QVEAGGSKY

SEQ ID NO: 21014 - protein, 9 aa, Homo sapiens
  Table A; Target 21014; HLA-B*35:01; DCAF4L2; ENSG00000176566; CTA
QVEAGGSKY

SEQ ID NO: 21015 - protein, 9 aa, Homo sapiens
  Table A; Target 21015; HLA-C*07:04; DCAF4L2; ENSG00000176566; CTA
QVEAGGSKY

SEQ ID NO: 21016 - protein, 11 aa, Homo sapiens
  Table A; Target 21016; HLA-A*30:02; DCAF4L2; ENSG00000176566; CTA
QYEGHVNNSAY

SEQ ID NO: 21017 - protein, 9 aa, Homo sapiens
  Table A; Target 21017; HLA-A*30:02; DCAF4L2; ENSG00000176566; CTA
RATKCVTQY

SEQ ID NO: 21018 - protein, 9 aa, Homo sapiens
  Table A; Target 21018; HLA-B*15:01; DCAF4L2; ENSG00000176566; CTA
RATKCVTQY

SEQ ID NO: 21019 - protein, 9 aa, Homo sapiens
  Table A; Target 21019; HLA-B*58:01; DCAF4L2; ENSG00000176566; CTA
RATKCVTQY

SEQ ID NO: 21020 - protein, 9 aa, Homo sapiens
  Table A; Target 21020; HLA-C*02:02; DCAF4L2; ENSG00000176566; CTA
RATKCVTQY

SEQ ID NO: 21021 - protein, 9 aa, Homo sapiens
  Table A; Target 21021; HLA-C*16:01; DCAF4L2; ENSG00000176566; CTA
RATKCVTQY

SEQ ID NO: 21022 - protein, 9 aa, Homo sapiens
  Table A; Target 21022; HLA-C*16:02; DCAF4L2; ENSG00000176566; CTA
RATKCVTQY

SEQ ID NO: 21023 - protein, 8 aa, Homo sapiens
  Table A; Target 21023; HLA-B*37:01; DCAF4L2; ENSG00000176566; CTA
RELRVSCM

SEQ ID NO: 21024 - protein, 8 aa, Homo sapiens
  Table A; Target 21024; HLA-C*03:04; DCAF4L2; ENSG00000176566; CTA
RGAPGLLM

SEQ ID NO: 21025 - protein, 11 aa, Homo sapiens
  Table A; Target 21025; HLA-A*31:01; DCAF4L2; ENSG00000176566; CTA
RGAPGLLMAVR

SEQ ID NO: 21026 - protein, 8 aa, Homo sapiens
  Table A; Target 21026; HLA-C*16:01; DCAF4L2; ENSG00000176566; CTA
RGLTTPEL

SEQ ID NO: 21027 - protein, 9 aa, Homo sapiens
  Table A; Target 21027; HLA-A*31:01; DCAF4L2; ENSG00000176566; CTA
RGLTTPELR

SEQ ID NO: 21028 - protein, 11 aa, Homo sapiens
  Table A; Target 21028; HLA-A*30:02; DCAF4L2; ENSG00000176566; CTA
RGLTTPELRVY

SEQ ID NO: 21029 - protein, 11 aa, Homo sapiens
  Table A; Target 21029; HLA-B*57:01; DCAF4L2; ENSG00000176566; CTA
RGLTTPELRVY

SEQ ID NO: 21030 - protein, 9 aa, Homo sapiens
  Table A; Target 21030; HLA-A*03:01; DCAF4L2; ENSG00000176566; CTA
RVYPHKTLY

SEQ ID NO: 21031 - protein, 9 aa, Homo sapiens
  Table A; Target 21031; HLA-A*29:02; DCAF4L2; ENSG00000176566; CTA
RVYPHKTLY

SEQ ID NO: 21032 - protein, 9 aa, Homo sapiens
  Table A; Target 21032; HLA-A*30:02; DCAF4L2; ENSG00000176566; CTA
RVYPHKTLY

SEQ ID NO: 21033 - protein, 9 aa, Homo sapiens
  Table A; Target 21033; HLA-A*32:01; DCAF4L2; ENSG00000176566; CTA
RVYPHKTLY

SEQ ID NO: 21034 - protein, 9 aa, Homo sapiens
  Table A; Target 21034; HLA-B*15:01; DCAF4L2; ENSG00000176566; CTA
RVYPHKTLY

SEQ ID NO: 21035 - protein, 9 aa, Homo sapiens
  Table A; Target 21035; HLA-B*57:01; DCAF4L2; ENSG00000176566; CTA
RVYPHKTLY

SEQ ID NO: 21036 - protein, 9 aa, Homo sapiens
  Table A; Target 21036; HLA-C*02:02; DCAF4L2; ENSG00000176566; CTA
RVYPHKTLY

SEQ ID NO: 21037 - protein, 10 aa, Homo sapiens
  Table A; Target 21037; HLA-A*02:03; DCAF4L2; ENSG00000176566; CTA
RVYPHKTLYV

SEQ ID NO: 21038 - protein, 10 aa, Homo sapiens
  Table A; Target 21038; HLA-A*03:01; DCAF4L2; ENSG00000176566; CTA
RVYPHKTLYV

SEQ ID NO: 21039 - protein, 8 aa, Homo sapiens
  Table A; Target 21039; HLA-B*51:01; DCAF4L2; ENSG00000176566; CTA
SAVTSLQI

SEQ ID NO: 21040 - protein, 9 aa, Homo sapiens
  Table A; Target 21040; HLA-B*35:03; DCAF4L2; ENSG00000176566; CTA
SAVTSLQIL

SEQ ID NO: 21041 - protein, 9 aa, Homo sapiens
  Table A; Target 21041; HLA-B*40:01; DCAF4L2; ENSG00000176566; CTA
SAVTSLQIL

SEQ ID NO: 21042 - protein, 9 aa, Homo sapiens
  Table A; Target 21042; HLA-B*46:01; DCAF4L2; ENSG00000176566; CTA
SAVTSLQIL

SEQ ID NO: 21043 - protein, 9 aa, Homo sapiens
  Table A; Target 21043; HLA-B*58:01; DCAF4L2; ENSG00000176566; CTA
SAVTSLQIL

SEQ ID NO: 21044 - protein, 9 aa, Homo sapiens
  Table A; Target 21044; HLA-C*01:02; DCAF4L2; ENSG00000176566; CTA
SAVTSLQIL

SEQ ID NO: 21045 - protein, 9 aa, Homo sapiens
  Table A; Target 21045; HLA-C*02:02; DCAF4L2; ENSG00000176566; CTA
SAVTSLQIL

SEQ ID NO: 21046 - protein, 9 aa, Homo sapiens
  Table A; Target 21046; HLA-C*03:03; DCAF4L2; ENSG00000176566; CTA
SAVTSLQIL

SEQ ID NO: 21047 - protein, 9 aa, Homo sapiens
  Table A; Target 21047; HLA-C*03:04; DCAF4L2; ENSG00000176566; CTA
SAVTSLQIL

SEQ ID NO: 21048 - protein, 9 aa, Homo sapiens
  Table A; Target 21048; HLA-C*12:03; DCAF4L2; ENSG00000176566; CTA
SAVTSLQIL

SEQ ID NO: 21049 - protein, 9 aa, Homo sapiens
  Table A; Target 21049; HLA-C*16:01; DCAF4L2; ENSG00000176566; CTA
SAVTSLQIL

SEQ ID NO: 21050 - protein, 9 aa, Homo sapiens
  Table A; Target 21050; HLA-C*16:02; DCAF4L2; ENSG00000176566; CTA
SAVTSLQIL

SEQ ID NO: 21051 - protein, 8 aa, Homo sapiens
  Table A; Target 21051; HLA-B*08:01; DCAF4L2; ENSG00000176566; CTA
SAYLPVHV

SEQ ID NO: 21052 - protein, 8 aa, Homo sapiens
  Table A; Target 21052; HLA-B*13:02; DCAF4L2; ENSG00000176566; CTA
SAYLPVHV

SEQ ID NO: 21053 - protein, 8 aa, Homo sapiens
  Table A; Target 21053; HLA-B*51:01; DCAF4L2; ENSG00000176566; CTA
SAYLPVHV

SEQ ID NO: 21054 - protein, 8 aa, Homo sapiens
  Table A; Target 21054; HLA-B*54:01; DCAF4L2; ENSG00000176566; CTA
SAYLPVHV

SEQ ID NO: 21055 - protein, 8 aa, Homo sapiens
  Table A; Target 21055; HLA-B*56:01; DCAF4L2; ENSG00000176566; CTA
SAYLPVHV

SEQ ID NO: 21056 - protein, 8 aa, Homo sapiens
  Table A; Target 21056; HLA-C*02:02; DCAF4L2; ENSG00000176566; CTA
SAYLPVHV

SEQ ID NO: 21057 - protein, 8 aa, Homo sapiens
  Table A; Target 21057; HLA-C*05:01; DCAF4L2; ENSG00000176566; CTA
SAYLPVHV

SEQ ID NO: 21058 - protein, 8 aa, Homo sapiens
  Table A; Target 21058; HLA-C*12:03; DCAF4L2; ENSG00000176566; CTA
SAYLPVHV

SEQ ID NO: 21059 - protein, 8 aa, Homo sapiens
  Table A; Target 21059; HLA-C*16:02; DCAF4L2; ENSG00000176566; CTA
SAYLPVHV

SEQ ID NO: 21060 - protein, 8 aa, Homo sapiens
  Table A; Target 21060; HLA-C*16:04; DCAF4L2; ENSG00000176566; CTA
SAYLPVHV

SEQ ID NO: 21061 - protein, 9 aa, Homo sapiens
  Table A; Target 21061; HLA-B*54:01; DCAF4L2; ENSG00000176566; CTA
SAYLPVHVN

SEQ ID NO: 21062 - protein, 9 aa, Homo sapiens
  Table A; Target 21062; HLA-C*12:03; DCAF4L2; ENSG00000176566; CTA
SAYLPVHVN

SEQ ID NO: 21063 - protein, 9 aa, Homo sapiens
  Table A; Target 21063; HLA-C*16:02; DCAF4L2; ENSG00000176566; CTA
SAYLPVHVN

SEQ ID NO: 21064 - protein, 9 aa, Homo sapiens
  Table A; Target 21064; HLA-A*30:01; DCAF4L2; ENSG00000176566; CTA
SDMTGTIKL

SEQ ID NO: 21065 - protein, 9 aa, Homo sapiens
  Table A; Target 21065; HLA-B*37:01; DCAF4L2; ENSG00000176566; CTA
SDMTGTIKL

SEQ ID NO: 21066 - protein, 9 aa, Homo sapiens
  Table A; Target 21066; HLA-B*40:01; DCAF4L2; ENSG00000176566; CTA
SDMTGTIKL

SEQ ID NO: 21067 - protein, 10 aa, Homo sapiens
  Table A; Target 21067; HLA-B*44:02; DCAF4L2; ENSG00000176566; CTA
SDMTGTIKLW

SEQ ID NO: 21068 - protein, 10 aa, Homo sapiens
  Table A; Target 21068; HLA-B*44:03; DCAF4L2; ENSG00000176566; CTA
SDMTGTIKLW

SEQ ID NO: 21069 - protein, 8 aa, Homo sapiens
  Table A; Target 21069; HLA-A*30:01; DCAF4L2; ENSG00000176566; CTA
SDVLAQQF

SEQ ID NO: 21070 - protein, 8 aa, Homo sapiens
  Table A; Target 21070; HLA-B*18:01; DCAF4L2; ENSG00000176566; CTA
SDVLAQQF

SEQ ID NO: 21071 - protein, 8 aa, Homo sapiens
  Table A; Target 21071; HLA-B*27:02; DCAF4L2; ENSG00000176566; CTA
SDVLAQQF

SEQ ID NO: 21072 - protein, 8 aa, Homo sapiens
  Table A; Target 21072; HLA-B*37:01; DCAF4L2; ENSG00000176566; CTA
SDVLAQQF

SEQ ID NO: 21073 - protein, 8 aa, Homo sapiens
  Table A; Target 21073; HLA-B*40:02; DCAF4L2; ENSG00000176566; CTA
SDVLAQQF

SEQ ID NO: 21074 - protein, 8 aa, Homo sapiens
  Table A; Target 21074; HLA-B*44:02; DCAF4L2; ENSG00000176566; CTA
SDVLAQQF

SEQ ID NO: 21075 - protein, 8 aa, Homo sapiens
  Table A; Target 21075; HLA-B*44:03; DCAF4L2; ENSG00000176566; CTA
SDVLAQQF

SEQ ID NO: 21076 - protein, 8 aa, Homo sapiens
  Table A; Target 21076; HLA-C*04:01; DCAF4L2; ENSG00000176566; CTA
SDVLAQQF

SEQ ID NO: 21077 - protein, 8 aa, Homo sapiens
  Table A; Target 21077; HLA-A*30:01; DCAF4L2; ENSG00000176566; CTA
SENDIPSV

SEQ ID NO: 21078 - protein, 8 aa, Homo sapiens
  Table A; Target 21078; HLA-B*18:01; DCAF4L2; ENSG00000176566; CTA
SENDIPSV

SEQ ID NO: 21079 - protein, 8 aa, Homo sapiens
  Table A; Target 21079; HLA-B*37:01; DCAF4L2; ENSG00000176566; CTA
SENDIPSV

SEQ ID NO: 21080 - protein, 8 aa, Homo sapiens
  Table A; Target 21080; HLA-B*49:01; DCAF4L2; ENSG00000176566; CTA
SENDIPSV

SEQ ID NO: 21081 - protein, 9 aa, Homo sapiens
  Table A; Target 21081; HLA-A*30:01; DCAF4L2; ENSG00000176566; CTA
SENDIPSVA

SEQ ID NO: 21082 - protein, 9 aa, Homo sapiens
  Table A; Target 21082; HLA-B*18:01; DCAF4L2; ENSG00000176566; CTA
SENDIPSVA

SEQ ID NO: 21083 - protein, 9 aa, Homo sapiens
  Table A; Target 21083; HLA-B*49:01; DCAF4L2; ENSG00000176566; CTA
SENDIPSVA

SEQ ID NO: 21084 - protein, 10 aa, Homo sapiens
  Table A; Target 21084; HLA-A*23:01; DCAF4L2; ENSG00000176566; CTA
SENDIPSVAF

SEQ ID NO: 21085 - protein, 10 aa, Homo sapiens
  Table A; Target 21085; HLA-A*25:01; DCAF4L2; ENSG00000176566; CTA
SENDIPSVAF

SEQ ID NO: 21086 - protein, 10 aa, Homo sapiens
  Table A; Target 21086; HLA-A*30:01; DCAF4L2; ENSG00000176566; CTA
SENDIPSVAF

SEQ ID NO: 21087 - protein, 10 aa, Homo sapiens
  Table A; Target 21087; HLA-B*18:01; DCAF4L2; ENSG00000176566; CTA
SENDIPSVAF

SEQ ID NO: 21088 - protein, 10 aa, Homo sapiens
  Table A; Target 21088; HLA-B*27:02; DCAF4L2; ENSG00000176566; CTA
SENDIPSVAF

SEQ ID NO: 21089 - protein, 10 aa, Homo sapiens
  Table A; Target 21089; HLA-B*37:01; DCAF4L2; ENSG00000176566; CTA
SENDIPSVAF

SEQ ID NO: 21090 - protein, 10 aa, Homo sapiens
  Table A; Target 21090; HLA-B*40:01; DCAF4L2; ENSG00000176566; CTA
SENDIPSVAF

SEQ ID NO: 21091 - protein, 10 aa, Homo sapiens
  Table A; Target 21091; HLA-B*40:02; DCAF4L2; ENSG00000176566; CTA
SENDIPSVAF

SEQ ID NO: 21092 - protein, 10 aa, Homo sapiens
  Table A; Target 21092; HLA-B*44:02; DCAF4L2; ENSG00000176566; CTA
SENDIPSVAF

SEQ ID NO: 21093 - protein, 10 aa, Homo sapiens
  Table A; Target 21093; HLA-B*49:01; DCAF4L2; ENSG00000176566; CTA
SENDIPSVAF

SEQ ID NO: 21094 - protein, 10 aa, Homo sapiens
  Table A; Target 21094; HLA-C*02:02; DCAF4L2; ENSG00000176566; CTA
SENDIPSVAF

SEQ ID NO: 21095 - protein, 10 aa, Homo sapiens
  Table A; Target 21095; HLA-C*16:04; DCAF4L2; ENSG00000176566; CTA
SENDIPSVAF

SEQ ID NO: 21096 - protein, 9 aa, Homo sapiens
  Table A; Target 21096; HLA-C*14:02; DCAF4L2; ENSG00000176566; CTA
SFGTSSDVL

SEQ ID NO: 21097 - protein, 9 aa, Homo sapiens
  Table A; Target 21097; HLA-A*02:07; DCAF4L2; ENSG00000176566; CTA
SHDSAVTSL

SEQ ID NO: 21098 - protein, 9 aa, Homo sapiens
  Table A; Target 21098; HLA-B*27:05; DCAF4L2; ENSG00000176566; CTA
SHDSAVTSL

SEQ ID NO: 21099 - protein, 9 aa, Homo sapiens
  Table A; Target 21099; HLA-B*35:03; DCAF4L2; ENSG00000176566; CTA
SHDSAVTSL

SEQ ID NO: 21100 - protein, 9 aa, Homo sapiens
  Table A; Target 21100; HLA-B*38:01; DCAF4L2; ENSG00000176566; CTA
SHDSAVTSL

SEQ ID NO: 21101 - protein, 9 aa, Homo sapiens
  Table A; Target 21101; HLA-B*39:01; DCAF4L2; ENSG00000176566; CTA
SHDSAVTSL

SEQ ID NO: 21102 - protein, 9 aa, Homo sapiens
  Table A; Target 21102; HLA-B*40:01; DCAF4L2; ENSG00000176566; CTA
SHDSAVTSL

SEQ ID NO: 21103 - protein, 9 aa, Homo sapiens
  Table A; Target 21103; HLA-C*05:01; DCAF4L2; ENSG00000176566; CTA
SHDSAVTSL

SEQ ID NO: 21104 - protein, 11 aa, Homo sapiens
  Table A; Target 21104; HLA-B*38:01; DCAF4L2; ENSG00000176566; CTA
SHDSAVTSLQI

SEQ ID NO: 21105 - protein, 8 aa, Homo sapiens
  Table A; Target 21105; HLA-B*15:03; DCAF4L2; ENSG00000176566; CTA
SKYGIITM

SEQ ID NO: 21106 - protein, 10 aa, Homo sapiens
  Table A; Target 21106; HLA-A*02:03; DCAF4L2; ENSG00000176566; CTA
SLFIGSFPGM

SEQ ID NO: 21107 - protein, 11 aa, Homo sapiens
  Table A; Target 21107; HLA-A*31:01; DCAF4L2; ENSG00000176566; CTA
SLFIGSFPGMR

SEQ ID NO: 21108 - protein, 9 aa, Homo sapiens
  Table A; Target 21108; HLA-A*02:04; DCAF4L2; ENSG00000176566; CTA
SLNHLDSHL

SEQ ID NO: 21109 - protein, 11 aa, Homo sapiens
  Table A; Target 21109; HLA-A*02:04; DCAF4L2; ENSG00000176566; CTA
SLNHLDSHLLL

SEQ ID NO: 21110 - protein, 8 aa, Homo sapiens
  Table A; Target 21110; HLA-B*08:01; DCAF4L2; ENSG00000176566; CTA
SMLRKNQL

SEQ ID NO: 21111 - protein, 9 aa, Homo sapiens
  Table A; Target 21111; HLA-A*02:01; DCAF4L2; ENSG00000176566; CTA
SQQVLLTNV

SEQ ID NO: 21112 - protein, 9 aa, Homo sapiens
  Table A; Target 21112; HLA-A*02:03; DCAF4L2; ENSG00000176566; CTA
SQQVLLTNV

SEQ ID NO: 21113 - protein, 9 aa, Homo sapiens
  Table A; Target 21113; HLA-A*02:04; DCAF4L2; ENSG00000176566; CTA
SQQVLLTNV

SEQ ID NO: 21114 - protein, 9 aa, Homo sapiens
  Table A; Target 21114; HLA-B*13:02; DCAF4L2; ENSG00000176566; CTA
SQQVLLTNV

SEQ ID NO: 21115 - protein, 8 aa, Homo sapiens
  Table A; Target 21115; HLA-C*05:01; DCAF4L2; ENSG00000176566; CTA
SSDMTGTI

SEQ ID NO: 21116 - protein, 11 aa, Homo sapiens
  Table A; Target 21116; HLA-B*44:02; DCAF4L2; ENSG00000176566; CTA
SSDMTGTIKLW

SEQ ID NO: 21117 - protein, 9 aa, Homo sapiens
  Table A; Target 21117; HLA-A*01:01; DCAF4L2; ENSG00000176566; CTA
SSDVLAQQF

SEQ ID NO: 21118 - protein, 9 aa, Homo sapiens
  Table A; Target 21118; HLA-A*32:01; DCAF4L2; ENSG00000176566; CTA
SSDVLAQQF

SEQ ID NO: 21119 - protein, 9 aa, Homo sapiens
  Table A; Target 21119; HLA-B*38:01; DCAF4L2; ENSG00000176566; CTA
SSDVLAQQF

SEQ ID NO: 21120 - protein, 9 aa, Homo sapiens
  Table A; Target 21120; HLA-B*58:01; DCAF4L2; ENSG00000176566; CTA
SSDVLAQQF

SEQ ID NO: 21121 - protein, 9 aa, Homo sapiens
  Table A; Target 21121; HLA-C*04:01; DCAF4L2; ENSG00000176566; CTA
SSDVLAQQF

SEQ ID NO: 21122 - protein, 9 aa, Homo sapiens
  Table A; Target 21122; HLA-C*05:01; DCAF4L2; ENSG00000176566; CTA
SSDVLAQQF

SEQ ID NO: 21123 - protein, 9 aa, Homo sapiens
  Table A; Target 21123; HLA-A*23:01; DCAF4L2; ENSG00000176566; CTA
TGLSQQVLL

SEQ ID NO: 21124 - protein, 8 aa, Homo sapiens
  Table A; Target 21124; HLA-A*03:01; DCAF4L2; ENSG00000176566; CTA
TLYVPNRK

SEQ ID NO: 21125 - protein, 9 aa, Homo sapiens
  Table A; Target 21125; HLA-A*02:03; DCAF4L2; ENSG00000176566; CTA
TLYVPNRKV

SEQ ID NO: 21126 - protein, 11 aa, Homo sapiens
  Table A; Target 21126; HLA-A*31:01; DCAF4L2; ENSG00000176566; CTA
TMRGLTTPELR

SEQ ID NO: 21127 - protein, 10 aa, Homo sapiens
  Table A; Target 21127; HLA-A*02:03; DCAF4L2; ENSG00000176566; CTA
TQYEGHVNNS

SEQ ID NO: 21128 - protein, 11 aa, Homo sapiens
  Table A; Target 21128; HLA-C*16:04; DCAF4L2; ENSG00000176566; CTA
TQYEGHVNNSA

SEQ ID NO: 21129 - protein, 10 aa, Homo sapiens
  Table A; Target 21129; HLA-A*23:01; DCAF4L2; ENSG00000176566; CTA
TSSDVLAQQF

SEQ ID NO: 21130 - protein, 10 aa, Homo sapiens
  Table A; Target 21130; HLA-A*25:01; DCAF4L2; ENSG00000176566; CTA
TSSDVLAQQF

SEQ ID NO: 21131 - protein, 10 aa, Homo sapiens
  Table A; Target 21131; HLA-A*26:01; DCAF4L2; ENSG00000176566; CTA
TSSDVLAQQF

SEQ ID NO: 21132 - protein, 10 aa, Homo sapiens
  Table A; Target 21132; HLA-A*29:02; DCAF4L2; ENSG00000176566; CTA
TSSDVLAQQF

SEQ ID NO: 21133 - protein, 10 aa, Homo sapiens
  Table A; Target 21133; HLA-A*30:02; DCAF4L2; ENSG00000176566; CTA
TSSDVLAQQF

SEQ ID NO: 21134 - protein, 10 aa, Homo sapiens
  Table A; Target 21134; HLA-A*32:01; DCAF4L2; ENSG00000176566; CTA
TSSDVLAQQF

SEQ ID NO: 21135 - protein, 10 aa, Homo sapiens
  Table A; Target 21135; HLA-A*33:03; DCAF4L2; ENSG00000176566; CTA
TSSDVLAQQF

SEQ ID NO: 21136 - protein, 10 aa, Homo sapiens
  Table A; Target 21136; HLA-A*68:01; DCAF4L2; ENSG00000176566; CTA
TSSDVLAQQF

SEQ ID NO: 21137 - protein, 10 aa, Homo sapiens
  Table A; Target 21137; HLA-A*68:02; DCAF4L2; ENSG00000176566; CTA
TSSDVLAQQF

SEQ ID NO: 21138 - protein, 10 aa, Homo sapiens
  Table A; Target 21138; HLA-B*18:01; DCAF4L2; ENSG00000176566; CTA
TSSDVLAQQF

SEQ ID NO: 21139 - protein, 10 aa, Homo sapiens
  Table A; Target 21139; HLA-B*27:02; DCAF4L2; ENSG00000176566; CTA
TSSDVLAQQF

SEQ ID NO: 21140 - protein, 10 aa, Homo sapiens
  Table A; Target 21140; HLA-B*27:05; DCAF4L2; ENSG00000176566; CTA
TSSDVLAQQF

SEQ ID NO: 21141 - protein, 10 aa, Homo sapiens
  Table A; Target 21141; HLA-B*35:01; DCAF4L2; ENSG00000176566; CTA
TSSDVLAQQF

SEQ ID NO: 21142 - protein, 10 aa, Homo sapiens
  Table A; Target 21142; HLA-B*38:01; DCAF4L2; ENSG00000176566; CTA
TSSDVLAQQF

SEQ ID NO: 21143 - protein, 10 aa, Homo sapiens
  Table A; Target 21143; HLA-B*44:03; DCAF4L2; ENSG00000176566; CTA
TSSDVLAQQF

SEQ ID NO: 21144 - protein, 10 aa, Homo sapiens
  Table A; Target 21144; HLA-B*57:01; DCAF4L2; ENSG00000176566; CTA
TSSDVLAQQF

SEQ ID NO: 21145 - protein, 10 aa, Homo sapiens
  Table A; Target 21145; HLA-B*58:01; DCAF4L2; ENSG00000176566; CTA
TSSDVLAQQF

SEQ ID NO: 21146 - protein, 10 aa, Homo sapiens
  Table A; Target 21146; HLA-C*02:02; DCAF4L2; ENSG00000176566; CTA
TSSDVLAQQF

SEQ ID NO: 21147 - protein, 10 aa, Homo sapiens
  Table A; Target 21147; HLA-C*07:04; DCAF4L2; ENSG00000176566; CTA
TSSDVLAQQF

SEQ ID NO: 21148 - protein, 10 aa, Homo sapiens
  Table A; Target 21148; HLA-C*07:06; DCAF4L2; ENSG00000176566; CTA
TSSDVLAQQF

SEQ ID NO: 21149 - protein, 10 aa, Homo sapiens
  Table A; Target 21149; HLA-C*16:04; DCAF4L2; ENSG00000176566; CTA
TSSDVLAQQF

SEQ ID NO: 21150 - protein, 9 aa, Homo sapiens
  Table A; Target 21150; HLA-A*02:01; DCAF4L2; ENSG00000176566; CTA
TTIPSPYPA

SEQ ID NO: 21151 - protein, 9 aa, Homo sapiens
  Table A; Target 21151; HLA-A*31:01; DCAF4L2; ENSG00000176566; CTA
TTIPSPYPA

SEQ ID NO: 21152 - protein, 9 aa, Homo sapiens
  Table A; Target 21152; HLA-A*68:02; DCAF4L2; ENSG00000176566; CTA
TTIPSPYPA

SEQ ID NO: 21153 - protein, 9 aa, Homo sapiens
  Table A; Target 21153; HLA-B*54:01; DCAF4L2; ENSG00000176566; CTA
TTIPSPYPA

SEQ ID NO: 21154 - protein, 9 aa, Homo sapiens
  Table A; Target 21154; HLA-B*56:01; DCAF4L2; ENSG00000176566; CTA
TTIPSPYPA

SEQ ID NO: 21155 - protein, 11 aa, Homo sapiens
  Table A; Target 21155; HLA-A*03:02; DCAF4L2; ENSG00000176566; CTA
TVNQVEAGGSK

SEQ ID NO: 21156 - protein, 11 aa, Homo sapiens
  Table A; Target 21156; HLA-A*11:01; DCAF4L2; ENSG00000176566; CTA
TVNQVEAGGSK

SEQ ID NO: 21157 - protein, 11 aa, Homo sapiens
  Table A; Target 21157; HLA-A*68:01; DCAF4L2; ENSG00000176566; CTA
TVNQVEAGGSK

SEQ ID NO: 21158 - protein, 11 aa, Homo sapiens
  Table A; Target 21158; HLA-C*07:06; DCAF4L2; ENSG00000176566; CTA
TVNQVEAGGSK

SEQ ID NO: 21159 - protein, 9 aa, Homo sapiens
  Table A; Target 21159; HLA-A*01:01; DCAF4L2; ENSG00000176566; CTA
VAAVGQDCY

SEQ ID NO: 21160 - protein, 9 aa, Homo sapiens
  Table A; Target 21160; HLA-A*30:02; DCAF4L2; ENSG00000176566; CTA
VAAVGQDCY

SEQ ID NO: 21161 - protein, 9 aa, Homo sapiens
  Table A; Target 21161; HLA-B*15:01; DCAF4L2; ENSG00000176566; CTA
VAAVGQDCY

SEQ ID NO: 21162 - protein, 9 aa, Homo sapiens
  Table A; Target 21162; HLA-B*15:03; DCAF4L2; ENSG00000176566; CTA
VAAVGQDCY

SEQ ID NO: 21163 - protein, 9 aa, Homo sapiens
  Table A; Target 21163; HLA-B*35:01; DCAF4L2; ENSG00000176566; CTA
VAAVGQDCY

SEQ ID NO: 21164 - protein, 9 aa, Homo sapiens
  Table A; Target 21164; HLA-B*39:01; DCAF4L2; ENSG00000176566; CTA
VAAVGQDCY

SEQ ID NO: 21165 - protein, 9 aa, Homo sapiens
  Table A; Target 21165; HLA-B*46:01; DCAF4L2; ENSG00000176566; CTA
VAAVGQDCY

SEQ ID NO: 21166 - protein, 9 aa, Homo sapiens
  Table A; Target 21166; HLA-B*58:01; DCAF4L2; ENSG00000176566; CTA
VAAVGQDCY

SEQ ID NO: 21167 - protein, 9 aa, Homo sapiens
  Table A; Target 21167; HLA-C*02:02; DCAF4L2; ENSG00000176566; CTA
VAAVGQDCY

SEQ ID NO: 21168 - protein, 9 aa, Homo sapiens
  Table A; Target 21168; HLA-C*16:01; DCAF4L2; ENSG00000176566; CTA
VAAVGQDCY

SEQ ID NO: 21169 - protein, 9 aa, Homo sapiens
  Table A; Target 21169; HLA-C*16:04; DCAF4L2; ENSG00000176566; CTA
VAAVGQDCY

SEQ ID NO: 21170 - protein, 10 aa, Homo sapiens
  Table A; Target 21170; HLA-C*02:02; DCAF4L2; ENSG00000176566; CTA
VAFSSRLGGF

SEQ ID NO: 21171 - protein, 8 aa, Homo sapiens
  Table A; Target 21171; HLA-A*32:01; DCAF4L2; ENSG00000176566; CTA
VEAGGSKY

SEQ ID NO: 21172 - protein, 8 aa, Homo sapiens
  Table A; Target 21172; HLA-B*15:03; DCAF4L2; ENSG00000176566; CTA
VEAGGSKY

SEQ ID NO: 21173 - protein, 8 aa, Homo sapiens
  Table A; Target 21173; HLA-B*18:01; DCAF4L2; ENSG00000176566; CTA
VEAGGSKY

SEQ ID NO: 21174 - protein, 8 aa, Homo sapiens
  Table A; Target 21174; HLA-B*44:02; DCAF4L2; ENSG00000176566; CTA
VEAGGSKY

SEQ ID NO: 21175 - protein, 8 aa, Homo sapiens
  Table A; Target 21175; HLA-B*44:03; DCAF4L2; ENSG00000176566; CTA
VEAGGSKY

SEQ ID NO: 21176 - protein, 8 aa, Homo sapiens
  Table A; Target 21176; HLA-C*16:02; DCAF4L2; ENSG00000176566; CTA
VEAGGSKY

SEQ ID NO: 21177 - protein, 8 aa, Homo sapiens
  Table A; Target 21177; HLA-C*16:04; DCAF4L2; ENSG00000176566; CTA
VEAGGSKY

SEQ ID NO: 21178 - protein, 10 aa, Homo sapiens
  Table A; Target 21178; HLA-B*44:02; DCAF4L2; ENSG00000176566; CTA
VEAGGSKYGI

SEQ ID NO: 21179 - protein, 10 aa, Homo sapiens
  Table A; Target 21179; HLA-B*44:03; DCAF4L2; ENSG00000176566; CTA
VEAGGSKYGI

SEQ ID NO: 21180 - protein, 10 aa, Homo sapiens
  Table A; Target 21180; HLA-B*49:01; DCAF4L2; ENSG00000176566; CTA
VEAGGSKYGI

SEQ ID NO: 21181 - protein, 8 aa, Homo sapiens
  Table A; Target 21181; HLA-B*46:01; DCAF4L2; ENSG00000176566; CTA
VGLNAPSM

SEQ ID NO: 21182 - protein, 8 aa, Homo sapiens
  Table A; Target 21182; HLA-C*03:04; DCAF4L2; ENSG00000176566; CTA
VGLNAPSM

SEQ ID NO: 21183 - protein, 8 aa, Homo sapiens
  Table A; Target 21183; HLA-C*14:02; DCAF4L2; ENSG00000176566; CTA
VGLNAPSM

SEQ ID NO: 21184 - protein, 8 aa, Homo sapiens
  Table A; Target 21184; HLA-C*16:01; DCAF4L2; ENSG00000176566; CTA
VGLNAPSM

SEQ ID NO: 21185 - protein, 9 aa, Homo sapiens
  Table A; Target 21185; HLA-A*23:01; DCAF4L2; ENSG00000176566; CTA
VGLNAPSML

SEQ ID NO: 21186 - protein, 9 aa, Homo sapiens
  Table A; Target 21186; HLA-C*01:02; DCAF4L2; ENSG00000176566; CTA
VGLNAPSML

SEQ ID NO: 21187 - protein, 9 aa, Homo sapiens
  Table A; Target 21187; HLA-C*03:03; DCAF4L2; ENSG00000176566; CTA
VGLNAPSML

SEQ ID NO: 21188 - protein, 9 aa, Homo sapiens
  Table A; Target 21188; HLA-C*03:04; DCAF4L2; ENSG00000176566; CTA
VGLNAPSML

SEQ ID NO: 21189 - protein, 9 aa, Homo sapiens
  Table A; Target 21189; HLA-C*14:02; DCAF4L2; ENSG00000176566; CTA
VGLNAPSML

SEQ ID NO: 21190 - protein, 9 aa, Homo sapiens
  Table A; Target 21190; HLA-B*38:01; DCAF4L2; ENSG00000176566; CTA
VHVNEEEGV

SEQ ID NO: 21191 - protein, 9 aa, Homo sapiens
  Table A; Target 21191; HLA-B*39:01; DCAF4L2; ENSG00000176566; CTA
VHVNEEEGV

SEQ ID NO: 21192 - protein, 10 aa, Homo sapiens
  Table A; Target 21192; HLA-B*39:01; DCAF4L2; ENSG00000176566; CTA
VHVNEEEGVV

SEQ ID NO: 21193 - protein, 11 aa, Homo sapiens
  Table A; Target 21193; HLA-B*39:01; DCAF4L2; ENSG00000176566; CTA
VHVNEEEGVVA

SEQ ID NO: 21194 - protein, 8 aa, Homo sapiens
  Table A; Target 21194; HLA-B*13:02; DCAF4L2; ENSG00000176566; CTA
VLAQQFAI

SEQ ID NO: 21195 - protein, 8 aa, Homo sapiens
  Table A; Target 21195; HLA-A*23:01; DCAF4L2; ENSG00000176566; CTA
VLLPASLF

SEQ ID NO: 21196 - protein, 9 aa, Homo sapiens
  Table A; Target 21196; HLA-A*02:01; DCAF4L2; ENSG00000176566; CTA
VLLPASLFI

SEQ ID NO: 21197 - protein, 9 aa, Homo sapiens
  Table A; Target 21197; HLA-A*02:04; DCAF4L2; ENSG00000176566; CTA
VLLPASLFI

SEQ ID NO: 21198 - protein, 9 aa, Homo sapiens
  Table A; Target 21198; HLA-A*02:07; DCAF4L2; ENSG00000176566; CTA
VLLPASLFI

SEQ ID NO: 21199 - protein, 9 aa, Homo sapiens
  Table A; Target 21199; HLA-B*13:02; DCAF4L2; ENSG00000176566; CTA
VLLPASLFI

SEQ ID NO: 21200 - protein, 9 aa, Homo sapiens
  Table A; Target 21200; HLA-A*02:01; DCAF4L2; ENSG00000176566; CTA
VLLTNVVTG

SEQ ID NO: 21201 - protein, 11 aa, Homo sapiens
  Table A; Target 21201; HLA-A*30:02; DCAF4L2; ENSG00000176566; CTA
VNQVEAGGSKY

SEQ ID NO: 21202 - protein, 9 aa, Homo sapiens
  Table A; Target 21202; HLA-B*07:02; DCAF4L2; ENSG00000176566; CTA
VPNRKVNSM

SEQ ID NO: 21203 - protein, 9 aa, Homo sapiens
  Table A; Target 21203; HLA-B*35:01; DCAF4L2; ENSG00000176566; CTA
VPNRKVNSM

SEQ ID NO: 21204 - protein, 9 aa, Homo sapiens
  Table A; Target 21204; HLA-B*35:03; DCAF4L2; ENSG00000176566; CTA
VPNRKVNSM

SEQ ID NO: 21205 - protein, 9 aa, Homo sapiens
  Table A; Target 21205; HLA-B*51:01; DCAF4L2; ENSG00000176566; CTA
VPNRKVNSM

SEQ ID NO: 21206 - protein, 9 aa, Homo sapiens
  Table A; Target 21206; HLA-B*55:01; DCAF4L2; ENSG00000176566; CTA
VPNRKVNSM

SEQ ID NO: 21207 - protein, 9 aa, Homo sapiens
  Table A; Target 21207; HLA-B*56:01; DCAF4L2; ENSG00000176566; CTA
VPNRKVNSM

SEQ ID NO: 21208 - protein, 9 aa, Homo sapiens
  Table A; Target 21208; HLA-C*07:02; DCAF4L2; ENSG00000176566; CTA
VPNRKVNSM

SEQ ID NO: 21209 - protein, 9 aa, Homo sapiens
  Table A; Target 21209; HLA-C*14:02; DCAF4L2; ENSG00000176566; CTA
VPNRKVNSM

SEQ ID NO: 21210 - protein, 10 aa, Homo sapiens
  Table A; Target 21210; HLA-B*27:02; DCAF4L2; ENSG00000176566; CTA
VRVGLNAPSM

SEQ ID NO: 21211 - protein, 10 aa, Homo sapiens
  Table A; Target 21211; HLA-C*16:04; DCAF4L2; ENSG00000176566; CTA
VRVGLNAPSM

SEQ ID NO: 21212 - protein, 9 aa, Homo sapiens
  Table A; Target 21212; HLA-B*58:01; DCAF4L2; ENSG00000176566; CTA
VSSDMTGTI

SEQ ID NO: 21213 - protein, 9 aa, Homo sapiens
  Table A; Target 21213; HLA-C*05:01; DCAF4L2; ENSG00000176566; CTA
VSSDMTGTI

SEQ ID NO: 21214 - protein, 10 aa, Homo sapiens
  Table A; Target 21214; HLA-A*03:01; DCAF4L2; ENSG00000176566; CTA
VSSDMTGTIK

SEQ ID NO: 21215 - protein, 10 aa, Homo sapiens
  Table A; Target 21215; HLA-A*03:02; DCAF4L2; ENSG00000176566; CTA
VSSDMTGTIK

SEQ ID NO: 21216 - protein, 10 aa, Homo sapiens
  Table A; Target 21216; HLA-A*11:01; DCAF4L2; ENSG00000176566; CTA
VSSDMTGTIK

SEQ ID NO: 21217 - protein, 8 aa, Homo sapiens
  Table A; Target 21217; HLA-A*32:01; DCAF4L2; ENSG00000176566; CTA
VTGHQQSF

SEQ ID NO: 21218 - protein, 8 aa, Homo sapiens
  Table A; Target 21218; HLA-B*58:01; DCAF4L2; ENSG00000176566; CTA
VTGHQQSF

SEQ ID NO: 21219 - protein, 10 aa, Homo sapiens
  Table A; Target 21219; HLA-A*01:01; DCAF4L2; ENSG00000176566; CTA
VVAAVGQDCY

SEQ ID NO: 21220 - protein, 10 aa, Homo sapiens
  Table A; Target 21220; HLA-A*26:01; DCAF4L2; ENSG00000176566; CTA
VVAAVGQDCY

SEQ ID NO: 21221 - protein, 10 aa, Homo sapiens
  Table A; Target 21221; HLA-A*29:02; DCAF4L2; ENSG00000176566; CTA
VVAAVGQDCY

SEQ ID NO: 21222 - protein, 10 aa, Homo sapiens
  Table A; Target 21222; HLA-A*30:02; DCAF4L2; ENSG00000176566; CTA
VVAAVGQDCY

SEQ ID NO: 21223 - protein, 10 aa, Homo sapiens
  Table A; Target 21223; HLA-A*32:01; DCAF4L2; ENSG00000176566; CTA
VVAAVGQDCY

SEQ ID NO: 21224 - protein, 10 aa, Homo sapiens
  Table A; Target 21224; HLA-B*15:01; DCAF4L2; ENSG00000176566; CTA
VVAAVGQDCY

SEQ ID NO: 21225 - protein, 10 aa, Homo sapiens
  Table A; Target 21225; HLA-B*15:03; DCAF4L2; ENSG00000176566; CTA
VVAAVGQDCY

SEQ ID NO: 21226 - protein, 10 aa, Homo sapiens
  Table A; Target 21226; HLA-B*58:01; DCAF4L2; ENSG00000176566; CTA
VVAAVGQDCY

SEQ ID NO: 21227 - protein, 9 aa, Homo sapiens
  Table A; Target 21227; HLA-A*23:01; DCAF4L2; ENSG00000176566; CTA
VVTGHQQSF

SEQ ID NO: 21228 - protein, 9 aa, Homo sapiens
  Table A; Target 21228; HLA-A*24:02; DCAF4L2; ENSG00000176566; CTA
VVTGHQQSF

SEQ ID NO: 21229 - protein, 9 aa, Homo sapiens
  Table A; Target 21229; HLA-A*25:01; DCAF4L2; ENSG00000176566; CTA
VVTGHQQSF

SEQ ID NO: 21230 - protein, 9 aa, Homo sapiens
  Table A; Target 21230; HLA-A*26:01; DCAF4L2; ENSG00000176566; CTA
VVTGHQQSF

SEQ ID NO: 21231 - protein, 9 aa, Homo sapiens
  Table A; Target 21231; HLA-A*29:02; DCAF4L2; ENSG00000176566; CTA
VVTGHQQSF

SEQ ID NO: 21232 - protein, 9 aa, Homo sapiens
  Table A; Target 21232; HLA-A*30:02; DCAF4L2; ENSG00000176566; CTA
VVTGHQQSF

SEQ ID NO: 21233 - protein, 9 aa, Homo sapiens
  Table A; Target 21233; HLA-A*32:01; DCAF4L2; ENSG00000176566; CTA
VVTGHQQSF

SEQ ID NO: 21234 - protein, 9 aa, Homo sapiens
  Table A; Target 21234; HLA-A*33:03; DCAF4L2; ENSG00000176566; CTA
VVTGHQQSF

SEQ ID NO: 21235 - protein, 9 aa, Homo sapiens
  Table A; Target 21235; HLA-B*07:02; DCAF4L2; ENSG00000176566; CTA
VVTGHQQSF

SEQ ID NO: 21236 - protein, 9 aa, Homo sapiens
  Table A; Target 21236; HLA-B*13:02; DCAF4L2; ENSG00000176566; CTA
VVTGHQQSF

SEQ ID NO: 21237 - protein, 9 aa, Homo sapiens
  Table A; Target 21237; HLA-B*15:01; DCAF4L2; ENSG00000176566; CTA
VVTGHQQSF

SEQ ID NO: 21238 - protein, 9 aa, Homo sapiens
  Table A; Target 21238; HLA-B*15:03; DCAF4L2; ENSG00000176566; CTA
VVTGHQQSF

SEQ ID NO: 21239 - protein, 9 aa, Homo sapiens
  Table A; Target 21239; HLA-B*35:01; DCAF4L2; ENSG00000176566; CTA
VVTGHQQSF

SEQ ID NO: 21240 - protein, 9 aa, Homo sapiens
  Table A; Target 21240; HLA-B*37:01; DCAF4L2; ENSG00000176566; CTA
VVTGHQQSF

SEQ ID NO: 21241 - protein, 9 aa, Homo sapiens
  Table A; Target 21241; HLA-B*44:03; DCAF4L2; ENSG00000176566; CTA
VVTGHQQSF

SEQ ID NO: 21242 - protein, 9 aa, Homo sapiens
  Table A; Target 21242; HLA-B*46:01; DCAF4L2; ENSG00000176566; CTA
VVTGHQQSF

SEQ ID NO: 21243 - protein, 9 aa, Homo sapiens
  Table A; Target 21243; HLA-B*57:01; DCAF4L2; ENSG00000176566; CTA
VVTGHQQSF

SEQ ID NO: 21244 - protein, 9 aa, Homo sapiens
  Table A; Target 21244; HLA-B*58:01; DCAF4L2; ENSG00000176566; CTA
VVTGHQQSF

SEQ ID NO: 21245 - protein, 9 aa, Homo sapiens
  Table A; Target 21245; HLA-C*01:02; DCAF4L2; ENSG00000176566; CTA
VVTGHQQSF

SEQ ID NO: 21246 - protein, 9 aa, Homo sapiens
  Table A; Target 21246; HLA-C*02:02; DCAF4L2; ENSG00000176566; CTA
VVTGHQQSF

SEQ ID NO: 21247 - protein, 9 aa, Homo sapiens
  Table A; Target 21247; HLA-C*03:03; DCAF4L2; ENSG00000176566; CTA
VVTGHQQSF

SEQ ID NO: 21248 - protein, 9 aa, Homo sapiens
  Table A; Target 21248; HLA-C*03:04; DCAF4L2; ENSG00000176566; CTA
VVTGHQQSF

SEQ ID NO: 21249 - protein, 9 aa, Homo sapiens
  Table A; Target 21249; HLA-C*04:01; DCAF4L2; ENSG00000176566; CTA
VVTGHQQSF

SEQ ID NO: 21250 - protein, 9 aa, Homo sapiens
  Table A; Target 21250; HLA-C*07:02; DCAF4L2; ENSG00000176566; CTA
VVTGHQQSF

SEQ ID NO: 21251 - protein, 9 aa, Homo sapiens
  Table A; Target 21251; HLA-C*07:04; DCAF4L2; ENSG00000176566; CTA
VVTGHQQSF

SEQ ID NO: 21252 - protein, 9 aa, Homo sapiens
  Table A; Target 21252; HLA-C*12:03; DCAF4L2; ENSG00000176566; CTA
VVTGHQQSF

SEQ ID NO: 21253 - protein, 9 aa, Homo sapiens
  Table A; Target 21253; HLA-C*14:02; DCAF4L2; ENSG00000176566; CTA
VVTGHQQSF

SEQ ID NO: 21254 - protein, 9 aa, Homo sapiens
  Table A; Target 21254; HLA-C*16:01; DCAF4L2; ENSG00000176566; CTA
VVTGHQQSF

SEQ ID NO: 21255 - protein, 9 aa, Homo sapiens
  Table A; Target 21255; HLA-C*16:02; DCAF4L2; ENSG00000176566; CTA
VVTGHQQSF

SEQ ID NO: 21256 - protein, 9 aa, Homo sapiens
  Table A; Target 21256; HLA-C*16:04; DCAF4L2; ENSG00000176566; CTA
VVTGHQQSF

SEQ ID NO: 21257 - protein, 9 aa, Homo sapiens
  Table A; Target 21257; HLA-A*24:02; DCAF4L2; ENSG00000176566; CTA
VYPHKTLYV

SEQ ID NO: 21258 - protein, 8 aa, Homo sapiens
  Table A; Target 21258; HLA-A*30:02; DCAF4L2; ENSG00000176566; CTA
WSLSIHAY

SEQ ID NO: 21259 - protein, 9 aa, Homo sapiens
  Table A; Target 21259; HLA-A*30:01; DCAF4L2; ENSG00000176566; CTA
YEGHVNNSA

SEQ ID NO: 21260 - protein, 9 aa, Homo sapiens
  Table A; Target 21260; HLA-B*18:01; DCAF4L2; ENSG00000176566; CTA
YEGHVNNSA

SEQ ID NO: 21261 - protein, 9 aa, Homo sapiens
  Table A; Target 21261; HLA-B*40:01; DCAF4L2; ENSG00000176566; CTA
YEGHVNNSA

SEQ ID NO: 21262 - protein, 9 aa, Homo sapiens
  Table A; Target 21262; HLA-B*40:02; DCAF4L2; ENSG00000176566; CTA
YEGHVNNSA

SEQ ID NO: 21263 - protein, 9 aa, Homo sapiens
  Table A; Target 21263; HLA-B*49:01; DCAF4L2; ENSG00000176566; CTA
YEGHVNNSA

SEQ ID NO: 21264 - protein, 9 aa, Homo sapiens
  Table A; Target 21264; HLA-B*54:01; DCAF4L2; ENSG00000176566; CTA
YEGHVNNSA

SEQ ID NO: 21265 - protein, 10 aa, Homo sapiens
  Table A; Target 21265; HLA-A*30:02; DCAF4L2; ENSG00000176566; CTA
YEGHVNNSAY

SEQ ID NO: 21266 - protein, 10 aa, Homo sapiens
  Table A; Target 21266; HLA-B*18:01; DCAF4L2; ENSG00000176566; CTA
YEGHVNNSAY

SEQ ID NO: 21267 - protein, 10 aa, Homo sapiens
  Table A; Target 21267; HLA-B*44:02; DCAF4L2; ENSG00000176566; CTA
YEGHVNNSAY

SEQ ID NO: 21268 - protein, 10 aa, Homo sapiens
  Table A; Target 21268; HLA-B*44:03; DCAF4L2; ENSG00000176566; CTA
YEGHVNNSAY

SEQ ID NO: 21269 - protein, 10 aa, Homo sapiens
  Table A; Target 21269; HLA-C*16:04; DCAF4L2; ENSG00000176566; CTA
YEGHVNNSAY

SEQ ID NO: 21270 - protein, 8 aa, Homo sapiens
  Table A; Target 21270; HLA-B*38:01; DCAF4L2; ENSG00000176566; CTA
YHSFSTGL

SEQ ID NO: 21271 - protein, 8 aa, Homo sapiens
  Table A; Target 21271; HLA-B*39:01; DCAF4L2; ENSG00000176566; CTA
YHSFSTGL

SEQ ID NO: 21272 - protein, 8 aa, Homo sapiens
  Table A; Target 21272; HLA-C*07:04; DCAF4L2; ENSG00000176566; CTA
YHSFSTGL

SEQ ID NO: 21273 - protein, 11 aa, Homo sapiens
  Table A; Target 21273; HLA-B*35:03; DCAF4L2; ENSG00000176566; CTA
YPASENDIPSV

SEQ ID NO: 21274 - protein, 11 aa, Homo sapiens
  Table A; Target 21274; HLA-B*54:01; DCAF4L2; ENSG00000176566; CTA
YPASENDIPSV

SEQ ID NO: 21275 - protein, 11 aa, Homo sapiens
  Table A; Target 21275; HLA-B*55:01; DCAF4L2; ENSG00000176566; CTA
YPASENDIPSV

SEQ ID NO: 21276 - protein, 11 aa, Homo sapiens
  Table A; Target 21276; HLA-B*56:01; DCAF4L2; ENSG00000176566; CTA
YPASENDIPSV

SEQ ID NO: 21277 - protein, 8 aa, Homo sapiens
  Table A; Target 21277; HLA-B*51:01; DCAF4L2; ENSG00000176566; CTA
YPHKTLYV

SEQ ID NO: 21278 - protein, 8 aa, Homo sapiens
  Table A; Target 21278; HLA-B*54:01; DCAF4L2; ENSG00000176566; CTA
YPHKTLYV

SEQ ID NO: 21279 - protein, 9 aa, Homo sapiens
  Table A; Target 21279; HLA-B*54:01; DCAF4L2; ENSG00000176566; CTA
YPHKTLYVP

SEQ ID NO: 21280 - protein, 10 aa, Homo sapiens
  Table A; Target 21280; HLA-A*25:01; DCAF4L2; ENSG00000176566; CTA
YVPNRKVNSM

SEQ ID NO: 21281 - protein, 10 aa, Homo sapiens
  Table A; Target 21281; HLA-A*26:01; DCAF4L2; ENSG00000176566; CTA
YVPNRKVNSM

SEQ ID NO: 21282 - protein, 10 aa, Homo sapiens
  Table A; Target 21282; HLA-B*08:01; DCAF4L2; ENSG00000176566; CTA
YVPNRKVNSM

SEQ ID NO: 21283 - protein, 9 aa, Homo sapiens
  Table A; Target 21283; HLA-A*23:01; DEFB126; ENSG00000125788; CTA
APTPVSPTG

SEQ ID NO: 21284 - protein, 9 aa, Homo sapiens
  Table A; Target 21284; HLA-A*24:02; DEFB126; ENSG00000125788; CTA
APTPVSPTG

SEQ ID NO: 21285 - protein, 9 aa, Homo sapiens
  Table A; Target 21285; HLA-A*30:01; DEFB126; ENSG00000125788; CTA
APTPVSPTG

SEQ ID NO: 21286 - protein, 9 aa, Homo sapiens
  Table A; Target 21286; HLA-A*32:01; DEFB126; ENSG00000125788; CTA
APTPVSPTG

SEQ ID NO: 21287 - protein, 9 aa, Homo sapiens
  Table A; Target 21287; HLA-A*68:01; DEFB126; ENSG00000125788; CTA
APTPVSPTG

SEQ ID NO: 21288 - protein, 9 aa, Homo sapiens
  Table A; Target 21288; HLA-A*68:02; DEFB126; ENSG00000125788; CTA
APTPVSPTG

SEQ ID NO: 21289 - protein, 9 aa, Homo sapiens
  Table A; Target 21289; HLA-B*07:02; DEFB126; ENSG00000125788; CTA
APTPVSPTG

SEQ ID NO: 21290 - protein, 9 aa, Homo sapiens
  Table A; Target 21290; HLA-B*13:02; DEFB126; ENSG00000125788; CTA
APTPVSPTG

SEQ ID NO: 21291 - protein, 9 aa, Homo sapiens
  Table A; Target 21291; HLA-B*27:05; DEFB126; ENSG00000125788; CTA
APTPVSPTG

SEQ ID NO: 21292 - protein, 9 aa, Homo sapiens
  Table A; Target 21292; HLA-B*35:01; DEFB126; ENSG00000125788; CTA
APTPVSPTG

SEQ ID NO: 21293 - protein, 9 aa, Homo sapiens
  Table A; Target 21293; HLA-B*35:03; DEFB126; ENSG00000125788; CTA
APTPVSPTG

SEQ ID NO: 21294 - protein, 9 aa, Homo sapiens
  Table A; Target 21294; HLA-B*40:02; DEFB126; ENSG00000125788; CTA
APTPVSPTG

SEQ ID NO: 21295 - protein, 9 aa, Homo sapiens
  Table A; Target 21295; HLA-B*51:01; DEFB126; ENSG00000125788; CTA
APTPVSPTG

SEQ ID NO: 21296 - protein, 9 aa, Homo sapiens
  Table A; Target 21296; HLA-B*54:01; DEFB126; ENSG00000125788; CTA
APTPVSPTG

SEQ ID NO: 21297 - protein, 9 aa, Homo sapiens
  Table A; Target 21297; HLA-B*55:01; DEFB126; ENSG00000125788; CTA
APTPVSPTG

SEQ ID NO: 21298 - protein, 9 aa, Homo sapiens
  Table A; Target 21298; HLA-B*56:01; DEFB126; ENSG00000125788; CTA
APTPVSPTG

SEQ ID NO: 21299 - protein, 9 aa, Homo sapiens
  Table A; Target 21299; HLA-B*57:01; DEFB126; ENSG00000125788; CTA
APTPVSPTG

SEQ ID NO: 21300 - protein, 9 aa, Homo sapiens
  Table A; Target 21300; HLA-B*58:01; DEFB126; ENSG00000125788; CTA
APTPVSPTG

SEQ ID NO: 21301 - protein, 9 aa, Homo sapiens
  Table A; Target 21301; HLA-C*03:03; DEFB126; ENSG00000125788; CTA
APTPVSPTG

SEQ ID NO: 21302 - protein, 9 aa, Homo sapiens
  Table A; Target 21302; HLA-C*04:01; DEFB126; ENSG00000125788; CTA
APTPVSPTG

SEQ ID NO: 21303 - protein, 9 aa, Homo sapiens
  Table A; Target 21303; HLA-C*06:02; DEFB126; ENSG00000125788; CTA
APTPVSPTG

SEQ ID NO: 21304 - protein, 9 aa, Homo sapiens
  Table A; Target 21304; HLA-C*07:01; DEFB126; ENSG00000125788; CTA
APTPVSPTG

SEQ ID NO: 21305 - protein, 9 aa, Homo sapiens
  Table A; Target 21305; HLA-C*07:02; DEFB126; ENSG00000125788; CTA
APTPVSPTG

SEQ ID NO: 21306 - protein, 9 aa, Homo sapiens
  Table A; Target 21306; HLA-C*12:03; DEFB126; ENSG00000125788; CTA
APTPVSPTG

SEQ ID NO: 21307 - protein, 9 aa, Homo sapiens
  Table A; Target 21307; HLA-C*16:01; DEFB126; ENSG00000125788; CTA
APTPVSPTG

SEQ ID NO: 21308 - protein, 9 aa, Homo sapiens
  Table A; Target 21308; HLA-C*16:02; DEFB126; ENSG00000125788; CTA
APTPVSPTG

SEQ ID NO: 21309 - protein, 8 aa, Homo sapiens
  Table A; Target 21309; HLA-A*32:01; DEFB126; ENSG00000125788; CTA
AQLVSGNW

SEQ ID NO: 21310 - protein, 9 aa, Homo sapiens
  Table A; Target 21310; HLA-A*30:02; DEFB126; ENSG00000125788; CTA
AQLVSGNWY

SEQ ID NO: 21311 - protein, 9 aa, Homo sapiens
  Table A; Target 21311; HLA-B*15:01; DEFB126; ENSG00000125788; CTA
AQLVSGNWY

SEQ ID NO: 21312 - protein, 9 aa, Homo sapiens
  Table A; Target 21312; HLA-B*15:03; DEFB126; ENSG00000125788; CTA
AQLVSGNWY

SEQ ID NO: 21313 - protein, 10 aa, Homo sapiens
  Table A; Target 21313; HLA-A*02:01; DEFB126; ENSG00000125788; CTA
AQLVSGNWYV

SEQ ID NO: 21314 - protein, 8 aa, Homo sapiens
  Table A; Target 21314; HLA-B*58:01; DEFB126; ENSG00000125788; CTA
ATTATTTL

SEQ ID NO: 21315 - protein, 8 aa, Homo sapiens
  Table A; Target 21315; HLA-C*03:04; DEFB126; ENSG00000125788; CTA
ATTATTTL

SEQ ID NO: 21316 - protein, 9 aa, Homo sapiens
  Table A; Target 21316; HLA-A*01:01; DEFB126; ENSG00000125788; CTA
ATTATTTLM

SEQ ID NO: 21317 - protein, 9 aa, Homo sapiens
  Table A; Target 21317; HLA-A*26:01; DEFB126; ENSG00000125788; CTA
ATTATTTLM

SEQ ID NO: 21318 - protein, 9 aa, Homo sapiens
  Table A; Target 21318; HLA-A*29:02; DEFB126; ENSG00000125788; CTA
ATTATTTLM

SEQ ID NO: 21319 - protein, 9 aa, Homo sapiens
  Table A; Target 21319; HLA-A*32:01; DEFB126; ENSG00000125788; CTA
ATTATTTLM

SEQ ID NO: 21320 - protein, 9 aa, Homo sapiens
  Table A; Target 21320; HLA-B*58:01; DEFB126; ENSG00000125788; CTA
ATTATTTLM

SEQ ID NO: 21321 - protein, 9 aa, Homo sapiens
  Table A; Target 21321; HLA-C*02:02; DEFB126; ENSG00000125788; CTA
ATTATTTLM

SEQ ID NO: 21322 - protein, 9 aa, Homo sapiens
  Table A; Target 21322; HLA-C*14:02; DEFB126; ENSG00000125788; CTA
ATTATTTLM

SEQ ID NO: 21323 - protein, 9 aa, Homo sapiens
  Table A; Target 21323; HLA-C*16:02; DEFB126; ENSG00000125788; CTA
ATTATTTLM

SEQ ID NO: 21324 - protein, 9 aa, Homo sapiens
  Table A; Target 21324; HLA-A*02:04; DEFB126; ENSG00000125788; CTA
AVFMLLAQL

SEQ ID NO: 21325 - protein, 9 aa, Homo sapiens
  Table A; Target 21325; HLA-A*03:01; DEFB126; ENSG00000125788; CTA
CLNDVGICK

SEQ ID NO: 21326 - protein, 9 aa, Homo sapiens
  Table A; Target 21326; HLA-A*03:02; DEFB126; ENSG00000125788; CTA
CLNDVGICK

SEQ ID NO: 21327 - protein, 9 aa, Homo sapiens
  Table A; Target 21327; HLA-A*11:01; DEFB126; ENSG00000125788; CTA
CLNDVGICK

SEQ ID NO: 21328 - protein, 10 aa, Homo sapiens
  Table A; Target 21328; HLA-A*03:01; DEFB126; ENSG00000125788; CTA
CLNDVGICKK

SEQ ID NO: 21329 - protein, 10 aa, Homo sapiens
  Table A; Target 21329; HLA-A*03:02; DEFB126; ENSG00000125788; CTA
CLNDVGICKK

SEQ ID NO: 21330 - protein, 10 aa, Homo sapiens
  Table A; Target 21330; HLA-A*11:01; DEFB126; ENSG00000125788; CTA
CLNDVGICKK

SEQ ID NO: 21331 - protein, 9 aa, Homo sapiens
  Table A; Target 21331; HLA-B*18:01; DEFB126; ENSG00000125788; CTA
EEMHVKNGW

SEQ ID NO: 21332 - protein, 9 aa, Homo sapiens
  Table A; Target 21332; HLA-B*27:02; DEFB126; ENSG00000125788; CTA
EEMHVKNGW

SEQ ID NO: 21333 - protein, 9 aa, Homo sapiens
  Table A; Target 21333; HLA-B*44:02; DEFB126; ENSG00000125788; CTA
EEMHVKNGW

SEQ ID NO: 21334 - protein, 9 aa, Homo sapiens
  Table A; Target 21334; HLA-B*44:03; DEFB126; ENSG00000125788; CTA
EEMHVKNGW

SEQ ID NO: 21335 - protein, 9 aa, Homo sapiens
  Table A; Target 21335; HLA-C*16:04; DEFB126; ENSG00000125788; CTA
EEMHVKNGW

SEQ ID NO: 21336 - protein, 9 aa, Homo sapiens
  Table A; Target 21336; HLA-A*02:01; DEFB126; ENSG00000125788; CTA
FTLAVFMLL

SEQ ID NO: 21337 - protein, 9 aa, Homo sapiens
  Table A; Target 21337; HLA-A*02:07; DEFB126; ENSG00000125788; CTA
FTLAVFMLL

SEQ ID NO: 21338 - protein, 9 aa, Homo sapiens
  Table A; Target 21338; HLA-A*29:02; DEFB126; ENSG00000125788; CTA
FTLAVFMLL

SEQ ID NO: 21339 - protein, 9 aa, Homo sapiens
  Table A; Target 21339; HLA-A*68:02; DEFB126; ENSG00000125788; CTA
FTLAVFMLL

SEQ ID NO: 21340 - protein, 10 aa, Homo sapiens
  Table A; Target 21340; HLA-A*03:01; DEFB126; ENSG00000125788; CTA
KCLNDVGICK

SEQ ID NO: 21341 - protein, 10 aa, Homo sapiens
  Table A; Target 21341; HLA-A*03:02; DEFB126; ENSG00000125788; CTA
KCLNDVGICK

SEQ ID NO: 21342 - protein, 10 aa, Homo sapiens
  Table A; Target 21342; HLA-A*11:01; DEFB126; ENSG00000125788; CTA
KCLNDVGICK

SEQ ID NO: 21343 - protein, 10 aa, Homo sapiens
  Table A; Target 21343; HLA-B*57:01; DEFB126; ENSG00000125788; CTA
KSLLFTLAVF

SEQ ID NO: 21344 - protein, 9 aa, Homo sapiens
  Table A; Target 21344; HLA-A*32:01; DEFB126; ENSG00000125788; CTA
KTTRISTVT

SEQ ID NO: 21345 - protein, 9 aa, Homo sapiens
  Table A; Target 21345; HLA-B*58:01; DEFB126; ENSG00000125788; CTA
KTTRISTVT

SEQ ID NO: 21346 - protein, 9 aa, Homo sapiens
  Table A; Target 21346; HLA-B*57:01; DEFB126; ENSG00000125788; CTA
LAQLVSGNW

SEQ ID NO: 21347 - protein, 9 aa, Homo sapiens
  Table A; Target 21347; HLA-B*58:01; DEFB126; ENSG00000125788; CTA
LAQLVSGNW

SEQ ID NO: 21348 - protein, 10 aa, Homo sapiens
  Table A; Target 21348; HLA-A*02:04; DEFB126; ENSG00000125788; CTA
LLFTLAVFML

SEQ ID NO: 21349 - protein, 8 aa, Homo sapiens
  Table A; Target 21349; HLA-B*08:01; DEFB126; ENSG00000125788; CTA
LMMTTASM

SEQ ID NO: 21350 - protein, 8 aa, Homo sapiens
  Table A; Target 21350; HLA-B*46:01; DEFB126; ENSG00000125788; CTA
LMMTTASM

SEQ ID NO: 21351 - protein, 8 aa, Homo sapiens
  Table A; Target 21351; HLA-C*14:02; DEFB126; ENSG00000125788; CTA
LMMTTASM

SEQ ID NO: 21352 - protein, 10 aa, Homo sapiens
  Table A; Target 21352; HLA-B*54:01; DEFB126; ENSG00000125788; CTA
MAPTPVSPTG

SEQ ID NO: 21353 - protein, 10 aa, Homo sapiens
  Table A; Target 21353; HLA-C*07:01; DEFB126; ENSG00000125788; CTA
MAPTPVSPTG

SEQ ID NO: 21354 - protein, 10 aa, Homo sapiens
  Table A; Target 21354; HLA-C*07:02; DEFB126; ENSG00000125788; CTA
MAPTPVSPTG

SEQ ID NO: 21355 - protein, 10 aa, Homo sapiens
  Table A; Target 21355; HLA-C*04:01; DEFB126; ENSG00000125788; CTA
MMTTASMSSM

SEQ ID NO: 21356 - protein, 10 aa, Homo sapiens
  Table A; Target 21356; HLA-C*14:02; DEFB126; ENSG00000125788; CTA
MMTTASMSSM

SEQ ID NO: 21357 - protein, 9 aa, Homo sapiens
  Table A; Target 21357; HLA-C*06:02; DEFB126; ENSG00000125788; CTA
MSSMAPTPV

SEQ ID NO: 21358 - protein, 9 aa, Homo sapiens
  Table A; Target 21358; HLA-A*25:01; DEFB126; ENSG00000125788; CTA
MTTASMSSM

SEQ ID NO: 21359 - protein, 9 aa, Homo sapiens
  Table A; Target 21359; HLA-A*26:01; DEFB126; ENSG00000125788; CTA
MTTASMSSM

SEQ ID NO: 21360 - protein, 9 aa, Homo sapiens
  Table A; Target 21360; HLA-B*35:01; DEFB126; ENSG00000125788; CTA
MTTASMSSM

SEQ ID NO: 21361 - protein, 9 aa, Homo sapiens
  Table A; Target 21361; HLA-B*35:03; DEFB126; ENSG00000125788; CTA
MTTASMSSM

SEQ ID NO: 21362 - protein, 9 aa, Homo sapiens
  Table A; Target 21362; HLA-B*46:01; DEFB126; ENSG00000125788; CTA
MTTASMSSM

SEQ ID NO: 21363 - protein, 9 aa, Homo sapiens
  Table A; Target 21363; HLA-C*01:02; DEFB126; ENSG00000125788; CTA
MTTASMSSM

SEQ ID NO: 21364 - protein, 9 aa, Homo sapiens
  Table A; Target 21364; HLA-C*03:03; DEFB126; ENSG00000125788; CTA
MTTASMSSM

SEQ ID NO: 21365 - protein, 9 aa, Homo sapiens
  Table A; Target 21365; HLA-C*03:04; DEFB126; ENSG00000125788; CTA
MTTASMSSM

SEQ ID NO: 21366 - protein, 9 aa, Homo sapiens
  Table A; Target 21366; HLA-C*04:01; DEFB126; ENSG00000125788; CTA
MTTASMSSM

SEQ ID NO: 21367 - protein, 9 aa, Homo sapiens
  Table A; Target 21367; HLA-C*07:04; DEFB126; ENSG00000125788; CTA
MTTASMSSM

SEQ ID NO: 21368 - protein, 9 aa, Homo sapiens
  Table A; Target 21368; HLA-C*14:02; DEFB126; ENSG00000125788; CTA
MTTASMSSM

SEQ ID NO: 21369 - protein, 9 aa, Homo sapiens
  Table A; Target 21369; HLA-C*16:02; DEFB126; ENSG00000125788; CTA
MTTASMSSM

SEQ ID NO: 21370 - protein, 8 aa, Homo sapiens
  Table A; Target 21370; HLA-C*07:01; DEFB126; ENSG00000125788; CTA
NDVGICKK

SEQ ID NO: 21371 - protein, 8 aa, Homo sapiens
  Table A; Target 21371; HLA-B*07:02; DEFB126; ENSG00000125788; CTA
PTPVSPTG

SEQ ID NO: 21372 - protein, 8 aa, Homo sapiens
  Table A; Target 21372; HLA-C*07:02; DEFB126; ENSG00000125788; CTA
PTPVSPTG

SEQ ID NO: 21373 - protein, 8 aa, Homo sapiens
  Table A; Target 21373; HLA-C*07:01; DEFB126; ENSG00000125788; CTA
PVFCVQTK

SEQ ID NO: 21374 - protein, 9 aa, Homo sapiens
  Table A; Target 21374; HLA-A*02:01; DEFB126; ENSG00000125788; CTA
QLVSGNWYV

SEQ ID NO: 21375 - protein, 9 aa, Homo sapiens
  Table A; Target 21375; HLA-A*02:04; DEFB126; ENSG00000125788; CTA
QLVSGNWYV

SEQ ID NO: 21376 - protein, 9 aa, Homo sapiens
  Table A; Target 21376; HLA-B*13:02; DEFB126; ENSG00000125788; CTA
QLVSGNWYV

SEQ ID NO: 21377 - protein, 9 aa, Homo sapiens
  Table A; Target 21377; HLA-A*32:01; DEFB126; ENSG00000125788; CTA
QTKTTRIST

SEQ ID NO: 21378 - protein, 9 aa, Homo sapiens
  Table A; Target 21378; HLA-A*32:01; DEFB126; ENSG00000125788; CTA
RISTVTATT

SEQ ID NO: 21379 - protein, 10 aa, Homo sapiens
  Table A; Target 21379; HLA-A*32:01; DEFB126; ENSG00000125788; CTA
RISTVTATTA

SEQ ID NO: 21380 - protein, 9 aa, Homo sapiens
  Table A; Target 21380; HLA-A*02:04; DEFB126; ENSG00000125788; CTA
SLLFTLAVF

SEQ ID NO: 21381 - protein, 9 aa, Homo sapiens
  Table A; Target 21381; HLA-A*02:01; DEFB126; ENSG00000125788; CTA
SMAPTPVSP

SEQ ID NO: 21382 - protein, 9 aa, Homo sapiens
  Table A; Target 21382; HLA-A*02:03; DEFB126; ENSG00000125788; CTA
SMAPTPVSP

SEQ ID NO: 21383 - protein, 9 aa, Homo sapiens
  Table A; Target 21383; HLA-A*03:01; DEFB126; ENSG00000125788; CTA
SMAPTPVSP

SEQ ID NO: 21384 - protein, 9 aa, Homo sapiens
  Table A; Target 21384; HLA-A*32:01; DEFB126; ENSG00000125788; CTA
SMAPTPVSP

SEQ ID NO: 21385 - protein, 9 aa, Homo sapiens
  Table A; Target 21385; HLA-C*07:04; DEFB126; ENSG00000125788; CTA
SMAPTPVSP

SEQ ID NO: 21386 - protein, 10 aa, Homo sapiens
  Table A; Target 21386; HLA-C*04:01; DEFB126; ENSG00000125788; CTA
SMAPTPVSPT

SEQ ID NO: 21387 - protein, 11 aa, Homo sapiens
  Table A; Target 21387; HLA-A*02:01; DEFB126; ENSG00000125788; CTA
SMAPTPVSPTG

SEQ ID NO: 21388 - protein, 11 aa, Homo sapiens
  Table A; Target 21388; HLA-C*04:01; DEFB126; ENSG00000125788; CTA
SMAPTPVSPTG

SEQ ID NO: 21389 - protein, 11 aa, Homo sapiens
  Table A; Target 21389; HLA-C*06:02; DEFB126; ENSG00000125788; CTA
SMAPTPVSPTG

SEQ ID NO: 21390 - protein, 10 aa, Homo sapiens
  Table A; Target 21390; HLA-A*02:01; DEFB126; ENSG00000125788; CTA
SMSSMAPTPV

SEQ ID NO: 21391 - protein, 10 aa, Homo sapiens
  Table A; Target 21391; HLA-A*02:03; DEFB126; ENSG00000125788; CTA
SMSSMAPTPV

SEQ ID NO: 21392 - protein, 9 aa, Homo sapiens
  Table A; Target 21392; HLA-A*23:01; DEFB126; ENSG00000125788; CTA
TATTATTTL

SEQ ID NO: 21393 - protein, 9 aa, Homo sapiens
  Table A; Target 21393; HLA-A*24:02; DEFB126; ENSG00000125788; CTA
TATTATTTL

SEQ ID NO: 21394 - protein, 9 aa, Homo sapiens
  Table A; Target 21394; HLA-A*25:01; DEFB126; ENSG00000125788; CTA
TATTATTTL

SEQ ID NO: 21395 - protein, 9 aa, Homo sapiens
  Table A; Target 21395; HLA-A*30:01; DEFB126; ENSG00000125788; CTA
TATTATTTL

SEQ ID NO: 21396 - protein, 9 aa, Homo sapiens
  Table A; Target 21396; HLA-A*32:01; DEFB126; ENSG00000125788; CTA
TATTATTTL

SEQ ID NO: 21397 - protein, 9 aa, Homo sapiens
  Table A; Target 21397; HLA-B*07:02; DEFB126; ENSG00000125788; CTA
TATTATTTL

SEQ ID NO: 21398 - protein, 9 aa, Homo sapiens
  Table A; Target 21398; HLA-B*15:01; DEFB126; ENSG00000125788; CTA
TATTATTTL

SEQ ID NO: 21399 - protein, 9 aa, Homo sapiens
  Table A; Target 21399; HLA-B*15:03; DEFB126; ENSG00000125788; CTA
TATTATTTL

SEQ ID NO: 21400 - protein, 9 aa, Homo sapiens
  Table A; Target 21400; HLA-B*35:01; DEFB126; ENSG00000125788; CTA
TATTATTTL

SEQ ID NO: 21401 - protein, 9 aa, Homo sapiens
  Table A; Target 21401; HLA-B*35:03; DEFB126; ENSG00000125788; CTA
TATTATTTL

SEQ ID NO: 21402 - protein, 9 aa, Homo sapiens
  Table A; Target 21402; HLA-B*38:01; DEFB126; ENSG00000125788; CTA
TATTATTTL

SEQ ID NO: 21403 - protein, 9 aa, Homo sapiens
  Table A; Target 21403; HLA-B*39:01; DEFB126; ENSG00000125788; CTA
TATTATTTL

SEQ ID NO: 21404 - protein, 9 aa, Homo sapiens
  Table A; Target 21404; HLA-B*40:01; DEFB126; ENSG00000125788; CTA
TATTATTTL

SEQ ID NO: 21405 - protein, 9 aa, Homo sapiens
  Table A; Target 21405; HLA-B*46:01; DEFB126; ENSG00000125788; CTA
TATTATTTL

SEQ ID NO: 21406 - protein, 9 aa, Homo sapiens
  Table A; Target 21406; HLA-B*51:01; DEFB126; ENSG00000125788; CTA
TATTATTTL

SEQ ID NO: 21407 - protein, 9 aa, Homo sapiens
  Table A; Target 21407; HLA-B*55:01; DEFB126; ENSG00000125788; CTA
TATTATTTL

SEQ ID NO: 21408 - protein, 9 aa, Homo sapiens
  Table A; Target 21408; HLA-B*58:01; DEFB126; ENSG00000125788; CTA
TATTATTTL

SEQ ID NO: 21409 - protein, 9 aa, Homo sapiens
  Table A; Target 21409; HLA-C*01:02; DEFB126; ENSG00000125788; CTA
TATTATTTL

SEQ ID NO: 21410 - protein, 9 aa, Homo sapiens
  Table A; Target 21410; HLA-C*02:02; DEFB126; ENSG00000125788; CTA
TATTATTTL

SEQ ID NO: 21411 - protein, 9 aa, Homo sapiens
  Table A; Target 21411; HLA-C*03:03; DEFB126; ENSG00000125788; CTA
TATTATTTL

SEQ ID NO: 21412 - protein, 9 aa, Homo sapiens
  Table A; Target 21412; HLA-C*03:04; DEFB126; ENSG00000125788; CTA
TATTATTTL

SEQ ID NO: 21413 - protein, 9 aa, Homo sapiens
  Table A; Target 21413; HLA-C*05:01; DEFB126; ENSG00000125788; CTA
TATTATTTL

SEQ ID NO: 21414 - protein, 9 aa, Homo sapiens
  Table A; Target 21414; HLA-C*07:02; DEFB126; ENSG00000125788; CTA
TATTATTTL

SEQ ID NO: 21415 - protein, 9 aa, Homo sapiens
  Table A; Target 21415; HLA-C*07:04; DEFB126; ENSG00000125788; CTA
TATTATTTL

SEQ ID NO: 21416 - protein, 9 aa, Homo sapiens
  Table A; Target 21416; HLA-C*07:06; DEFB126; ENSG00000125788; CTA
TATTATTTL

SEQ ID NO: 21417 - protein, 9 aa, Homo sapiens
  Table A; Target 21417; HLA-C*12:03; DEFB126; ENSG00000125788; CTA
TATTATTTL

SEQ ID NO: 21418 - protein, 9 aa, Homo sapiens
  Table A; Target 21418; HLA-C*14:02; DEFB126; ENSG00000125788; CTA
TATTATTTL

SEQ ID NO: 21419 - protein, 9 aa, Homo sapiens
  Table A; Target 21419; HLA-C*16:01; DEFB126; ENSG00000125788; CTA
TATTATTTL

SEQ ID NO: 21420 - protein, 9 aa, Homo sapiens
  Table A; Target 21420; HLA-C*16:02; DEFB126; ENSG00000125788; CTA
TATTATTTL

SEQ ID NO: 21421 - protein, 9 aa, Homo sapiens
  Table A; Target 21421; HLA-C*16:04; DEFB126; ENSG00000125788; CTA
TATTATTTL

SEQ ID NO: 21422 - protein, 10 aa, Homo sapiens
  Table A; Target 21422; HLA-B*35:01; DEFB126; ENSG00000125788; CTA
TATTATTTLM

SEQ ID NO: 21423 - protein, 10 aa, Homo sapiens
  Table A; Target 21423; HLA-C*07:06; DEFB126; ENSG00000125788; CTA
TATTATTTLM

SEQ ID NO: 21424 - protein, 11 aa, Homo sapiens
  Table A; Target 21424; HLA-C*04:01; DEFB126; ENSG00000125788; CTA
TATTATTTLMM

SEQ ID NO: 21425 - protein, 8 aa, Homo sapiens
  Table A; Target 21425; HLA-B*35:01; DEFB126; ENSG00000125788; CTA
TATTTLMM

SEQ ID NO: 21426 - protein, 8 aa, Homo sapiens
  Table A; Target 21426; HLA-B*35:03; DEFB126; ENSG00000125788; CTA
TATTTLMM

SEQ ID NO: 21427 - protein, 8 aa, Homo sapiens
  Table A; Target 21427; HLA-B*51:01; DEFB126; ENSG00000125788; CTA
TATTTLMM

SEQ ID NO: 21428 - protein, 8 aa, Homo sapiens
  Table A; Target 21428; HLA-C*03:03; DEFB126; ENSG00000125788; CTA
TATTTLMM

SEQ ID NO: 21429 - protein, 8 aa, Homo sapiens
  Table A; Target 21429; HLA-C*03:04; DEFB126; ENSG00000125788; CTA
TATTTLMM

SEQ ID NO: 21430 - protein, 8 aa, Homo sapiens
  Table A; Target 21430; HLA-C*16:01; DEFB126; ENSG00000125788; CTA
TATTTLMM

SEQ ID NO: 21431 - protein, 9 aa, Homo sapiens
  Table A; Target 21431; HLA-C*16:02; DEFB126; ENSG00000125788; CTA
TATTTLMMT

SEQ ID NO: 21432 - protein, 9 aa, Homo sapiens
  Table A; Target 21432; HLA-C*16:02; DEFB126; ENSG00000125788; CTA
TKTTRISTV

SEQ ID NO: 21433 - protein, 9 aa, Homo sapiens
  Table A; Target 21433; HLA-A*02:01; DEFB126; ENSG00000125788; CTA
TLMMTTASM

SEQ ID NO: 21434 - protein, 9 aa, Homo sapiens
  Table A; Target 21434; HLA-A*32:01; DEFB126; ENSG00000125788; CTA
TLMMTTASM

SEQ ID NO: 21435 - protein, 9 aa, Homo sapiens
  Table A; Target 21435; HLA-B*07:02; DEFB126; ENSG00000125788; CTA
TLMMTTASM

SEQ ID NO: 21436 - protein, 9 aa, Homo sapiens
  Table A; Target 21436; HLA-B*08:01; DEFB126; ENSG00000125788; CTA
TLMMTTASM

SEQ ID NO: 21437 - protein, 9 aa, Homo sapiens
  Table A; Target 21437; HLA-B*15:01; DEFB126; ENSG00000125788; CTA
TLMMTTASM

SEQ ID NO: 21438 - protein, 9 aa, Homo sapiens
  Table A; Target 21438; HLA-B*15:03; DEFB126; ENSG00000125788; CTA
TLMMTTASM

SEQ ID NO: 21439 - protein, 9 aa, Homo sapiens
  Table A; Target 21439; HLA-B*35:01; DEFB126; ENSG00000125788; CTA
TLMMTTASM

SEQ ID NO: 21440 - protein, 9 aa, Homo sapiens
  Table A; Target 21440; HLA-B*35:03; DEFB126; ENSG00000125788; CTA
TLMMTTASM

SEQ ID NO: 21441 - protein, 9 aa, Homo sapiens
  Table A; Target 21441; HLA-B*46:01; DEFB126; ENSG00000125788; CTA
TLMMTTASM

SEQ ID NO: 21442 - protein, 9 aa, Homo sapiens
  Table A; Target 21442; HLA-C*01:02; DEFB126; ENSG00000125788; CTA
TLMMTTASM

SEQ ID NO: 21443 - protein, 9 aa, Homo sapiens
  Table A; Target 21443; HLA-C*07:04; DEFB126; ENSG00000125788; CTA
TLMMTTASM

SEQ ID NO: 21444 - protein, 9 aa, Homo sapiens
  Table A; Target 21444; HLA-C*14:02; DEFB126; ENSG00000125788; CTA
TLMMTTASM

SEQ ID NO: 21445 - protein, 9 aa, Homo sapiens
  Table A; Target 21445; HLA-B*27:05; DEFB126; ENSG00000125788; CTA
TRISTVTAT

SEQ ID NO: 21446 - protein, 9 aa, Homo sapiens
  Table A; Target 21446; HLA-B*39:01; DEFB126; ENSG00000125788; CTA
TRISTVTAT

SEQ ID NO: 21447 - protein, 9 aa, Homo sapiens
  Table A; Target 21447; HLA-C*06:02; DEFB126; ENSG00000125788; CTA
TRISTVTAT

SEQ ID NO: 21448 - protein, 8 aa, Homo sapiens
  Table A; Target 21448; HLA-C*01:02; DEFB126; ENSG00000125788; CTA
TTASMSSM

SEQ ID NO: 21449 - protein, 8 aa, Homo sapiens
  Table A; Target 21449; HLA-C*03:03; DEFB126; ENSG00000125788; CTA
TTASMSSM

SEQ ID NO: 21450 - protein, 8 aa, Homo sapiens
  Table A; Target 21450; HLA-C*03:04; DEFB126; ENSG00000125788; CTA
TTASMSSM

SEQ ID NO: 21451 - protein, 8 aa, Homo sapiens
  Table A; Target 21451; HLA-C*05:01; DEFB126; ENSG00000125788; CTA
TTATTTLM

SEQ ID NO: 21452 - protein, 9 aa, Homo sapiens
  Table A; Target 21452; HLA-A*01:01; DEFB126; ENSG00000125788; CTA
TTATTTLMM

SEQ ID NO: 21453 - protein, 9 aa, Homo sapiens
  Table A; Target 21453; HLA-A*26:01; DEFB126; ENSG00000125788; CTA
TTATTTLMM

SEQ ID NO: 21454 - protein, 9 aa, Homo sapiens
  Table A; Target 21454; HLA-A*68:01; DEFB126; ENSG00000125788; CTA
TTATTTLMM

SEQ ID NO: 21455 - protein, 9 aa, Homo sapiens
  Table A; Target 21455; HLA-B*58:01; DEFB126; ENSG00000125788; CTA
TTATTTLMM

SEQ ID NO: 21456 - protein, 9 aa, Homo sapiens
  Table A; Target 21456; HLA-C*01:02; DEFB126; ENSG00000125788; CTA
TTATTTLMM

SEQ ID NO: 21457 - protein, 9 aa, Homo sapiens
  Table A; Target 21457; HLA-C*04:01; DEFB126; ENSG00000125788; CTA
TTATTTLMM

SEQ ID NO: 21458 - protein, 9 aa, Homo sapiens
  Table A; Target 21458; HLA-C*07:06; DEFB126; ENSG00000125788; CTA
TTATTTLMM

SEQ ID NO: 21459 - protein, 10 aa, Homo sapiens
  Table A; Target 21459; HLA-C*06:02; DEFB126; ENSG00000125788; CTA
TTATTTLMMT

SEQ ID NO: 21460 - protein, 11 aa, Homo sapiens
  Table A; Target 21460; HLA-C*06:02; DEFB126; ENSG00000125788; CTA
TTATTTLMMTT

SEQ ID NO: 21461 - protein, 9 aa, Homo sapiens
  Table A; Target 21461; HLA-B*40:02; DEFB126; ENSG00000125788; CTA
TTRISTVTA

SEQ ID NO: 21462 - protein, 9 aa, Homo sapiens
  Table A; Target 21462; HLA-B*54:01; DEFB126; ENSG00000125788; CTA
TTRISTVTA

SEQ ID NO: 21463 - protein, 9 aa, Homo sapiens
  Table A; Target 21463; HLA-B*54:01; DEFB126; ENSG00000125788; CTA
TTTLMMTTA

SEQ ID NO: 21464 - protein, 9 aa, Homo sapiens
  Table A; Target 21464; HLA-B*56:01; DEFB126; ENSG00000125788; CTA
TTTLMMTTA

SEQ ID NO: 21465 - protein, 11 aa, Homo sapiens
  Table A; Target 21465; HLA-B*35:03; DEFB126; ENSG00000125788; CTA
TVTATTATTTL

SEQ ID NO: 21466 - protein, 11 aa, Homo sapiens
  Table A; Target 21466; HLA-B*39:01; DEFB126; ENSG00000125788; CTA
TVTATTATTTL

SEQ ID NO: 21467 - protein, 8 aa, Homo sapiens
  Table A; Target 21467; HLA-A*23:01; DEFB126; ENSG00000125788; CTA
VFMLLAQL

SEQ ID NO: 21468 - protein, 9 aa, Homo sapiens
  Table A; Target 21468; HLA-B*07:02; DEFB126; ENSG00000125788; CTA
VPADRRANY

SEQ ID NO: 21469 - protein, 9 aa, Homo sapiens
  Table A; Target 21469; HLA-C*16:01; DEFB126; ENSG00000125788; CTA
VPADRRANY

SEQ ID NO: 21470 - protein, 8 aa, Homo sapiens
  Table A; Target 21470; HLA-B*13:02; DEFB126; ENSG00000125788; CTA
VQTKTTRI

SEQ ID NO: 21471 - protein, 9 aa, Homo sapiens
  Table A; Target 21471; HLA-A*03:02; DEFB126; ENSG00000125788; CTA
VSGNWYVKK

SEQ ID NO: 21472 - protein, 9 aa, Homo sapiens
  Table A; Target 21472; HLA-A*11:01; DEFB126; ENSG00000125788; CTA
VSGNWYVKK

SEQ ID NO: 21473 - protein, 9 aa, Homo sapiens
  Table A; Target 21473; HLA-B*58:01; DEFB126; ENSG00000125788; CTA
VTATTATTT

SEQ ID NO: 21474 - protein, 10 aa, Homo sapiens
  Table A; Target 21474; HLA-B*58:01; DEFB126; ENSG00000125788; CTA
VTATTATTTL

SEQ ID NO: 21475 - protein, 10 aa, Homo sapiens
  Table A; Target 21475; HLA-C*01:02; DEFB126; ENSG00000125788; CTA
VTATTATTTL

SEQ ID NO: 21476 - protein, 9 aa, Homo sapiens
  Table A; Target 21476; HLA-B*27:02; DEFB126; ENSG00000125788; CTA
YPVFCVQTK

SEQ ID NO: 21477 - protein, 9 aa, Homo sapiens
  Table A; Target 21477; HLA-B*51:01; DEFB126; ENSG00000125788; CTA
YPVFCVQTK

SEQ ID NO: 21478 - protein, 9 aa, Homo sapiens
  Table A; Target 21478; HLA-C*05:01; DMRT1; ENSG00000137090; CTA
AADSASGEV

SEQ ID NO: 21479 - protein, 8 aa, Homo sapiens
  Table A; Target 21479; HLA-C*03:04; DMRT1; ENSG00000137090; CTA
AASEGRMV

SEQ ID NO: 21480 - protein, 8 aa, Homo sapiens
  Table A; Target 21480; HLA-C*16:01; DMRT1; ENSG00000137090; CTA
AASEGRMV

SEQ ID NO: 21481 - protein, 8 aa, Homo sapiens
  Table A; Target 21481; HLA-C*16:02; DMRT1; ENSG00000137090; CTA
AASEGRMV

SEQ ID NO: 21482 - protein, 9 aa, Homo sapiens
  Table A; Target 21482; HLA-A*32:01; DMRT1; ENSG00000137090; CTA
AASEGRMVI

SEQ ID NO: 21483 - protein, 9 aa, Homo sapiens
  Table A; Target 21483; HLA-B*07:02; DMRT1; ENSG00000137090; CTA
AASEGRMVI

SEQ ID NO: 21484 - protein, 9 aa, Homo sapiens
  Table A; Target 21484; HLA-B*13:02; DMRT1; ENSG00000137090; CTA
AASEGRMVI

SEQ ID NO: 21485 - protein, 9 aa, Homo sapiens
  Table A; Target 21485; HLA-B*38:01; DMRT1; ENSG00000137090; CTA
AASEGRMVI

SEQ ID NO: 21486 - protein, 9 aa, Homo sapiens
  Table A; Target 21486; HLA-B*46:01; DMRT1; ENSG00000137090; CTA
AASEGRMVI

SEQ ID NO: 21487 - protein, 9 aa, Homo sapiens
  Table A; Target 21487; HLA-B*49:01; DMRT1; ENSG00000137090; CTA
AASEGRMVI

SEQ ID NO: 21488 - protein, 9 aa, Homo sapiens
  Table A; Target 21488; HLA-B*51:01; DMRT1; ENSG00000137090; CTA
AASEGRMVI

SEQ ID NO: 21489 - protein, 9 aa, Homo sapiens
  Table A; Target 21489; HLA-B*58:01; DMRT1; ENSG00000137090; CTA
AASEGRMVI

SEQ ID NO: 21490 - protein, 9 aa, Homo sapiens
  Table A; Target 21490; HLA-C*02:02; DMRT1; ENSG00000137090; CTA
AASEGRMVI

SEQ ID NO: 21491 - protein, 9 aa, Homo sapiens
  Table A; Target 21491; HLA-C*03:03; DMRT1; ENSG00000137090; CTA
AASEGRMVI

SEQ ID NO: 21492 - protein, 9 aa, Homo sapiens
  Table A; Target 21492; HLA-C*03:04; DMRT1; ENSG00000137090; CTA
AASEGRMVI

SEQ ID NO: 21493 - protein, 9 aa, Homo sapiens
  Table A; Target 21493; HLA-C*05:01; DMRT1; ENSG00000137090; CTA
AASEGRMVI

SEQ ID NO: 21494 - protein, 9 aa, Homo sapiens
  Table A; Target 21494; HLA-C*07:02; DMRT1; ENSG00000137090; CTA
AASEGRMVI

SEQ ID NO: 21495 - protein, 9 aa, Homo sapiens
  Table A; Target 21495; HLA-C*12:03; DMRT1; ENSG00000137090; CTA
AASEGRMVI

SEQ ID NO: 21496 - protein, 9 aa, Homo sapiens
  Table A; Target 21496; HLA-C*16:01; DMRT1; ENSG00000137090; CTA
AASEGRMVI

SEQ ID NO: 21497 - protein, 9 aa, Homo sapiens
  Table A; Target 21497; HLA-C*16:02; DMRT1; ENSG00000137090; CTA
AASEGRMVI

SEQ ID NO: 21498 - protein, 9 aa, Homo sapiens
  Table A; Target 21498; HLA-C*16:04; DMRT1; ENSG00000137090; CTA
AASEGRMVI

SEQ ID NO: 21499 - protein, 8 aa, Homo sapiens
  Table A; Target 21499; HLA-B*37:01; DMRT1; ENSG00000137090; CTA
ADSASGEV

SEQ ID NO: 21500 - protein, 9 aa, Homo sapiens
  Table A; Target 21500; HLA-B*37:01; DMRT1; ENSG00000137090; CTA
AERQRVMAA

SEQ ID NO: 21501 - protein, 9 aa, Homo sapiens
  Table A; Target 21501; HLA-B*40:02; DMRT1; ENSG00000137090; CTA
AERQRVMAA

SEQ ID NO: 21502 - protein, 11 aa, Homo sapiens
  Table A; Target 21502; HLA-A*02:01; DMRT1; ENSG00000137090; CTA
ALAADSASGEV

SEQ ID NO: 21503 - protein, 11 aa, Homo sapiens
  Table A; Target 21503; HLA-A*02:03; DMRT1; ENSG00000137090; CTA
ALAADSASGEV

SEQ ID NO: 21504 - protein, 11 aa, Homo sapiens
  Table A; Target 21504; HLA-A*02:03; DMRT1; ENSG00000137090; CTA
ALVGAASGSSA

SEQ ID NO: 21505 - protein, 11 aa, Homo sapiens
  Table A; Target 21505; HLA-C*14:02; DMRT1; ENSG00000137090; CTA
ALVGAASGSSA

SEQ ID NO: 21506 - protein, 8 aa, Homo sapiens
  Table A; Target 21506; HLA-B*37:01; DMRT1; ENSG00000137090; CTA
AMSSQYRM

SEQ ID NO: 21507 - protein, 9 aa, Homo sapiens
  Table A; Target 21507; HLA-B*07:02; DMRT1; ENSG00000137090; CTA
APHAPGVPP

SEQ ID NO: 21508 - protein, 9 aa, Homo sapiens
  Table A; Target 21508; HLA-B*54:01; DMRT1; ENSG00000137090; CTA
APHAPGVPP

SEQ ID NO: 21509 - protein, 9 aa, Homo sapiens
  Table A; Target 21509; HLA-B*56:01; DMRT1; ENSG00000137090; CTA
APHAPGVPP

SEQ ID NO: 21510 - protein, 9 aa, Homo sapiens
  Table A; Target 21510; HLA-B*54:01; DMRT1; ENSG00000137090; CTA
APSYPEARA

SEQ ID NO: 21511 - protein, 9 aa, Homo sapiens
  Table A; Target 21511; HLA-B*55:01; DMRT1; ENSG00000137090; CTA
APSYPEARA

SEQ ID NO: 21512 - protein, 9 aa, Homo sapiens
  Table A; Target 21512; HLA-B*56:01; DMRT1; ENSG00000137090; CTA
APSYPEARA

SEQ ID NO: 21513 - protein, 11 aa, Homo sapiens
  Table A; Target 21513; HLA-B*07:02; DMRT1; ENSG00000137090; CTA
APSYPEARASV

SEQ ID NO: 21514 - protein, 11 aa, Homo sapiens
  Table A; Target 21514; HLA-B*56:01; DMRT1; ENSG00000137090; CTA
APSYPEARASV

SEQ ID NO: 21515 - protein, 11 aa, Homo sapiens
  Table A; Target 21515; HLA-C*07:02; DMRT1; ENSG00000137090; CTA
APSYPEARASV

SEQ ID NO: 21516 - protein, 9 aa, Homo sapiens
  Table A; Target 21516; HLA-A*01:01; DMRT1; ENSG00000137090; CTA
ASDLGAGSK

SEQ ID NO: 21517 - protein, 9 aa, Homo sapiens
  Table A; Target 21517; HLA-A*11:01; DMRT1; ENSG00000137090; CTA
ASDLGAGSK

SEQ ID NO: 21518 - protein, 10 aa, Homo sapiens
  Table A; Target 21518; HLA-A*01:01; DMRT1; ENSG00000137090; CTA
ASDLGAGSKK

SEQ ID NO: 21519 - protein, 10 aa, Homo sapiens
  Table A; Target 21519; HLA-A*03:01; DMRT1; ENSG00000137090; CTA
ASDLGAGSKK

SEQ ID NO: 21520 - protein, 10 aa, Homo sapiens
  Table A; Target 21520; HLA-A*03:02; DMRT1; ENSG00000137090; CTA
ASDLGAGSKK

SEQ ID NO: 21521 - protein, 10 aa, Homo sapiens
  Table A; Target 21521; HLA-A*11:01; DMRT1; ENSG00000137090; CTA
ASDLGAGSKK

SEQ ID NO: 21522 - protein, 9 aa, Homo sapiens
  Table A; Target 21522; HLA-B*07:02; DMRT1; ENSG00000137090; CTA
ASGEVGNPL

SEQ ID NO: 21523 - protein, 9 aa, Homo sapiens
  Table A; Target 21523; HLA-B*46:01; DMRT1; ENSG00000137090; CTA
ASGEVGNPL

SEQ ID NO: 21524 - protein, 9 aa, Homo sapiens
  Table A; Target 21524; HLA-B*58:01; DMRT1; ENSG00000137090; CTA
ASGEVGNPL

SEQ ID NO: 21525 - protein, 9 aa, Homo sapiens
  Table A; Target 21525; HLA-C*01:02; DMRT1; ENSG00000137090; CTA
ASGEVGNPL

SEQ ID NO: 21526 - protein, 9 aa, Homo sapiens
  Table A; Target 21526; HLA-C*03:03; DMRT1; ENSG00000137090; CTA
ASGEVGNPL

SEQ ID NO: 21527 - protein, 9 aa, Homo sapiens
  Table A; Target 21527; HLA-C*03:04; DMRT1; ENSG00000137090; CTA
ASGEVGNPL

SEQ ID NO: 21528 - protein, 9 aa, Homo sapiens
  Table A; Target 21528; HLA-C*05:01; DMRT1; ENSG00000137090; CTA
ASGEVGNPL

SEQ ID NO: 21529 - protein, 9 aa, Homo sapiens
  Table A; Target 21529; HLA-C*14:02; DMRT1; ENSG00000137090; CTA
ASGEVGNPL

SEQ ID NO: 21530 - protein, 9 aa, Homo sapiens
  Table A; Target 21530; HLA-C*16:02; DMRT1; ENSG00000137090; CTA
ASGEVGNPL

SEQ ID NO: 21531 - protein, 10 aa, Homo sapiens
  Table A; Target 21531; HLA-A*30:01; DMRT1; ENSG00000137090; CTA
CEPASEPSSF

SEQ ID NO: 21532 - protein, 10 aa, Homo sapiens
  Table A; Target 21532; HLA-B*37:01; DMRT1; ENSG00000137090; CTA
CEPASEPSSF

SEQ ID NO: 21533 - protein, 10 aa, Homo sapiens
  Table A; Target 21533; HLA-B*40:01; DMRT1; ENSG00000137090; CTA
CEPASEPSSF

SEQ ID NO: 21534 - protein, 10 aa, Homo sapiens
  Table A; Target 21534; HLA-B*44:03; DMRT1; ENSG00000137090; CTA
CEPASEPSSF

SEQ ID NO: 21535 - protein, 8 aa, Homo sapiens
  Table A; Target 21535; HLA-B*07:02; DMRT1; ENSG00000137090; CTA
CPQYSMAL

SEQ ID NO: 21536 - protein, 9 aa, Homo sapiens
  Table A; Target 21536; HLA-B*56:01; DMRT1; ENSG00000137090; CTA
CPQYSMALA

SEQ ID NO: 21537 - protein, 10 aa, Homo sapiens
  Table A; Target 21537; HLA-B*56:01; DMRT1; ENSG00000137090; CTA
CPQYSMALAA

SEQ ID NO: 21538 - protein, 8 aa, Homo sapiens
  Table A; Target 21538; HLA-B*51:01; DMRT1; ENSG00000137090; CTA
DAPSYPEA

SEQ ID NO: 21539 - protein, 9 aa, Homo sapiens
  Table A; Target 21539; HLA-A*33:01; DMRT1; ENSG00000137090; CTA
DAPSYPEAR

SEQ ID NO: 21540 - protein, 9 aa, Homo sapiens
  Table A; Target 21540; HLA-A*33:03; DMRT1; ENSG00000137090; CTA
DAPSYPEAR

SEQ ID NO: 21541 - protein, 9 aa, Homo sapiens
  Table A; Target 21541; HLA-A*68:01; DMRT1; ENSG00000137090; CTA
DAPSYPEAR

SEQ ID NO: 21542 - protein, 9 aa, Homo sapiens
  Table A; Target 21542; HLA-B*51:01; DMRT1; ENSG00000137090; CTA
DAPSYPEAR

SEQ ID NO: 21543 - protein, 9 aa, Homo sapiens
  Table A; Target 21543; HLA-C*07:06; DMRT1; ENSG00000137090; CTA
DAPSYPEAR

SEQ ID NO: 21544 - protein, 10 aa, Homo sapiens
  Table A; Target 21544; HLA-B*51:01; DMRT1; ENSG00000137090; CTA
DAPSYPEARA

SEQ ID NO: 21545 - protein, 9 aa, Homo sapiens
  Table A; Target 21545; HLA-B*18:01; DMRT1; ENSG00000137090; CTA
DEAFSKPST

SEQ ID NO: 21546 - protein, 11 aa, Homo sapiens
  Table A; Target 21546; HLA-A*33:01; DMRT1; ENSG00000137090; CTA
DLGAGSKKSPR

SEQ ID NO: 21547 - protein, 9 aa, Homo sapiens
  Table A; Target 21547; HLA-A*01:01; DMRT1; ENSG00000137090; CTA
DLVSDSTYY

SEQ ID NO: 21548 - protein, 9 aa, Homo sapiens
  Table A; Target 21548; HLA-A*25:01; DMRT1; ENSG00000137090; CTA
DLVSDSTYY

SEQ ID NO: 21549 - protein, 9 aa, Homo sapiens
  Table A; Target 21549; HLA-A*26:01; DMRT1; ENSG00000137090; CTA
DLVSDSTYY

SEQ ID NO: 21550 - protein, 9 aa, Homo sapiens
  Table A; Target 21550; HLA-B*15:03; DMRT1; ENSG00000137090; CTA
DLVSDSTYY

SEQ ID NO: 21551 - protein, 9 aa, Homo sapiens
  Table A; Target 21551; HLA-B*18:01; DMRT1; ENSG00000137090; CTA
DLVSDSTYY

SEQ ID NO: 21552 - protein, 9 aa, Homo sapiens
  Table A; Target 21552; HLA-C*07:04; DMRT1; ENSG00000137090; CTA
DLVSDSTYY

SEQ ID NO: 21553 - protein, 11 aa, Homo sapiens
  Table A; Target 21553; HLA-A*33:01; DMRT1; ENSG00000137090; CTA
DSASGEVGNPL

SEQ ID NO: 21554 - protein, 11 aa, Homo sapiens
  Table A; Target 21554; HLA-A*68:01; DMRT1; ENSG00000137090; CTA
DSASGEVGNPL

SEQ ID NO: 21555 - protein, 11 aa, Homo sapiens
  Table A; Target 21555; HLA-A*68:02; DMRT1; ENSG00000137090; CTA
DSASGEVGNPL

SEQ ID NO: 21556 - protein, 11 aa, Homo sapiens
  Table A; Target 21556; HLA-B*38:01; DMRT1; ENSG00000137090; CTA
DSASGEVGNPL

SEQ ID NO: 21557 - protein, 11 aa, Homo sapiens
  Table A; Target 21557; HLA-B*39:01; DMRT1; ENSG00000137090; CTA
DSASGEVGNPL

SEQ ID NO: 21558 - protein, 11 aa, Homo sapiens
  Table A; Target 21558; HLA-C*07:06; DMRT1; ENSG00000137090; CTA
DSASGEVGNPL

SEQ ID NO: 21559 - protein, 8 aa, Homo sapiens
  Table A; Target 21559; HLA-A*25:01; DMRT1; ENSG00000137090; CTA
DSTYYSSF

SEQ ID NO: 21560 - protein, 9 aa, Homo sapiens
  Table A; Target 21560; HLA-A*01:01; DMRT1; ENSG00000137090; CTA
DSTYYSSFY

SEQ ID NO: 21561 - protein, 9 aa, Homo sapiens
  Table A; Target 21561; HLA-A*26:01; DMRT1; ENSG00000137090; CTA
DSTYYSSFY

SEQ ID NO: 21562 - protein, 9 aa, Homo sapiens
  Table A; Target 21562; HLA-A*26:01; DMRT1; ENSG00000137090; CTA
EAFSKPSTP

SEQ ID NO: 21563 - protein, 8 aa, Homo sapiens
  Table A; Target 21563; HLA-B*51:01; DMRT1; ENSG00000137090; CTA
EAPHAPGV

SEQ ID NO: 21564 - protein, 10 aa, Homo sapiens
  Table A; Target 21564; HLA-A*33:01; DMRT1; ENSG00000137090; CTA
EDAPSYPEAR

SEQ ID NO: 21565 - protein, 10 aa, Homo sapiens
  Table A; Target 21565; HLA-A*33:03; DMRT1; ENSG00000137090; CTA
EDAPSYPEAR

SEQ ID NO: 21566 - protein, 10 aa, Homo sapiens
  Table A; Target 21566; HLA-A*68:01; DMRT1; ENSG00000137090; CTA
EDAPSYPEAR

SEQ ID NO: 21567 - protein, 10 aa, Homo sapiens
  Table A; Target 21567; HLA-B*27:02; DMRT1; ENSG00000137090; CTA
EDAPSYPEAR

SEQ ID NO: 21568 - protein, 10 aa, Homo sapiens
  Table A; Target 21568; HLA-C*07:06; DMRT1; ENSG00000137090; CTA
EDAPSYPEAR

SEQ ID NO: 21569 - protein, 8 aa, Homo sapiens
  Table A; Target 21569; HLA-B*18:01; DMRT1; ENSG00000137090; CTA
EEELGISH

SEQ ID NO: 21570 - protein, 10 aa, Homo sapiens
  Table A; Target 21570; HLA-B*27:02; DMRT1; ENSG00000137090; CTA
EEELGISHPI

SEQ ID NO: 21571 - protein, 10 aa, Homo sapiens
  Table A; Target 21571; HLA-B*40:01; DMRT1; ENSG00000137090; CTA
EEELGISHPI

SEQ ID NO: 21572 - protein, 10 aa, Homo sapiens
  Table A; Target 21572; HLA-B*44:02; DMRT1; ENSG00000137090; CTA
EEELGISHPI

SEQ ID NO: 21573 - protein, 9 aa, Homo sapiens
  Table A; Target 21573; HLA-B*18:01; DMRT1; ENSG00000137090; CTA
EELGISHPI

SEQ ID NO: 21574 - protein, 9 aa, Homo sapiens
  Table A; Target 21574; HLA-B*44:02; DMRT1; ENSG00000137090; CTA
EELGISHPI

SEQ ID NO: 21575 - protein, 9 aa, Homo sapiens
  Table A; Target 21575; HLA-B*44:03; DMRT1; ENSG00000137090; CTA
EELGISHPI

SEQ ID NO: 21576 - protein, 9 aa, Homo sapiens
  Table A; Target 21576; HLA-B*49:01; DMRT1; ENSG00000137090; CTA
EELGISHPI

SEQ ID NO: 21577 - protein, 11 aa, Homo sapiens
  Table A; Target 21577; HLA-A*33:01; DMRT1; ENSG00000137090; CTA
ENRHAMSSQYR

SEQ ID NO: 21578 - protein, 9 aa, Homo sapiens
  Table A; Target 21578; HLA-A*25:01; DMRT1; ENSG00000137090; CTA
EPASEPSSF

SEQ ID NO: 21579 - protein, 9 aa, Homo sapiens
  Table A; Target 21579; HLA-A*26:01; DMRT1; ENSG00000137090; CTA
EPASEPSSF

SEQ ID NO: 21580 - protein, 9 aa, Homo sapiens
  Table A; Target 21580; HLA-B*07:02; DMRT1; ENSG00000137090; CTA
EPASEPSSF

SEQ ID NO: 21581 - protein, 9 aa, Homo sapiens
  Table A; Target 21581; HLA-B*35:01; DMRT1; ENSG00000137090; CTA
EPASEPSSF

SEQ ID NO: 21582 - protein, 9 aa, Homo sapiens
  Table A; Target 21582; HLA-B*35:03; DMRT1; ENSG00000137090; CTA
EPASEPSSF

SEQ ID NO: 21583 - protein, 9 aa, Homo sapiens
  Table A; Target 21583; HLA-B*39:01; DMRT1; ENSG00000137090; CTA
EPASEPSSF

SEQ ID NO: 21584 - protein, 9 aa, Homo sapiens
  Table A; Target 21584; HLA-B*55:01; DMRT1; ENSG00000137090; CTA
EPASEPSSF

SEQ ID NO: 21585 - protein, 9 aa, Homo sapiens
  Table A; Target 21585; HLA-C*03:03; DMRT1; ENSG00000137090; CTA
EPASEPSSF

SEQ ID NO: 21586 - protein, 9 aa, Homo sapiens
  Table A; Target 21586; HLA-C*07:06; DMRT1; ENSG00000137090; CTA
EPASEPSSF

SEQ ID NO: 21587 - protein, 11 aa, Homo sapiens
  Table A; Target 21587; HLA-A*26:01; DMRT1; ENSG00000137090; CTA
EVGNPLGGSPV

SEQ ID NO: 21588 - protein, 10 aa, Homo sapiens
  Table A; Target 21588; HLA-A*29:02; DMRT1; ENSG00000137090; CTA
FFTFEDAPSY

SEQ ID NO: 21589 - protein, 8 aa, Homo sapiens
  Table A; Target 21589; HLA-B*08:01; DMRT1; ENSG00000137090; CTA
FGKASGAL

SEQ ID NO: 21590 - protein, 8 aa, Homo sapiens
  Table A; Target 21590; HLA-B*40:02; DMRT1; ENSG00000137090; CTA
FGKASGAL

SEQ ID NO: 21591 - protein, 8 aa, Homo sapiens
  Table A; Target 21591; HLA-B*46:01; DMRT1; ENSG00000137090; CTA
FGKASGAL

SEQ ID NO: 21592 - protein, 8 aa, Homo sapiens
  Table A; Target 21592; HLA-C*03:03; DMRT1; ENSG00000137090; CTA
FGKASGAL

SEQ ID NO: 21593 - protein, 8 aa, Homo sapiens
  Table A; Target 21593; HLA-C*03:04; DMRT1; ENSG00000137090; CTA
FGKASGAL

SEQ ID NO: 21594 - protein, 8 aa, Homo sapiens
  Table A; Target 21594; HLA-C*07:02; DMRT1; ENSG00000137090; CTA
FGKASGAL

SEQ ID NO: 21595 - protein, 8 aa, Homo sapiens
  Table A; Target 21595; HLA-C*12:03; DMRT1; ENSG00000137090; CTA
FGKASGAL

SEQ ID NO: 21596 - protein, 9 aa, Homo sapiens
  Table A; Target 21596; HLA-B*40:02; DMRT1; ENSG00000137090; CTA
FGKASGALV

SEQ ID NO: 21597 - protein, 9 aa, Homo sapiens
  Table A; Target 21597; HLA-B*46:01; DMRT1; ENSG00000137090; CTA
FGKASGALV

SEQ ID NO: 21598 - protein, 9 aa, Homo sapiens
  Table A; Target 21598; HLA-C*02:02; DMRT1; ENSG00000137090; CTA
FGKASGALV

SEQ ID NO: 21599 - protein, 9 aa, Homo sapiens
  Table A; Target 21599; HLA-C*03:03; DMRT1; ENSG00000137090; CTA
FGKASGALV

SEQ ID NO: 21600 - protein, 9 aa, Homo sapiens
  Table A; Target 21600; HLA-C*03:04; DMRT1; ENSG00000137090; CTA
FGKASGALV

SEQ ID NO: 21601 - protein, 9 aa, Homo sapiens
  Table A; Target 21601; HLA-C*12:03; DMRT1; ENSG00000137090; CTA
FGKASGALV

SEQ ID NO: 21602 - protein, 11 aa, Homo sapiens
  Table A; Target 21602; HLA-B*54:01; DMRT1; ENSG00000137090; CTA
FGKASGALVGA

SEQ ID NO: 21603 - protein, 8 aa, Homo sapiens
  Table A; Target 21603; HLA-B*35:01; DMRT1; ENSG00000137090; CTA
FPYYNNLY

SEQ ID NO: 21604 - protein, 9 aa, Homo sapiens
  Table A; Target 21604; HLA-B*46:01; DMRT1; ENSG00000137090; CTA
FSKPSTPSE

SEQ ID NO: 21605 - protein, 9 aa, Homo sapiens
  Table A; Target 21605; HLA-A*01:01; DMRT1; ENSG00000137090; CTA
FTFEDAPSY

SEQ ID NO: 21606 - protein, 9 aa, Homo sapiens
  Table A; Target 21606; HLA-A*25:01; DMRT1; ENSG00000137090; CTA
FTFEDAPSY

SEQ ID NO: 21607 - protein, 9 aa, Homo sapiens
  Table A; Target 21607; HLA-A*26:01; DMRT1; ENSG00000137090; CTA
FTFEDAPSY

SEQ ID NO: 21608 - protein, 9 aa, Homo sapiens
  Table A; Target 21608; HLA-A*29:02; DMRT1; ENSG00000137090; CTA
FTFEDAPSY

SEQ ID NO: 21609 - protein, 9 aa, Homo sapiens
  Table A; Target 21609; HLA-A*30:02; DMRT1; ENSG00000137090; CTA
FTFEDAPSY

SEQ ID NO: 21610 - protein, 9 aa, Homo sapiens
  Table A; Target 21610; HLA-A*32:01; DMRT1; ENSG00000137090; CTA
FTFEDAPSY

SEQ ID NO: 21611 - protein, 9 aa, Homo sapiens
  Table A; Target 21611; HLA-A*68:01; DMRT1; ENSG00000137090; CTA
FTFEDAPSY

SEQ ID NO: 21612 - protein, 9 aa, Homo sapiens
  Table A; Target 21612; HLA-B*15:01; DMRT1; ENSG00000137090; CTA
FTFEDAPSY

SEQ ID NO: 21613 - protein, 9 aa, Homo sapiens
  Table A; Target 21613; HLA-B*15:03; DMRT1; ENSG00000137090; CTA
FTFEDAPSY

SEQ ID NO: 21614 - protein, 9 aa, Homo sapiens
  Table A; Target 21614; HLA-B*18:01; DMRT1; ENSG00000137090; CTA
FTFEDAPSY

SEQ ID NO: 21615 - protein, 9 aa, Homo sapiens
  Table A; Target 21615; HLA-B*27:05; DMRT1; ENSG00000137090; CTA
FTFEDAPSY

SEQ ID NO: 21616 - protein, 9 aa, Homo sapiens
  Table A; Target 21616; HLA-B*35:01; DMRT1; ENSG00000137090; CTA
FTFEDAPSY

SEQ ID NO: 21617 - protein, 9 aa, Homo sapiens
  Table A; Target 21617; HLA-B*39:01; DMRT1; ENSG00000137090; CTA
FTFEDAPSY

SEQ ID NO: 21618 - protein, 9 aa, Homo sapiens
  Table A; Target 21618; HLA-B*46:01; DMRT1; ENSG00000137090; CTA
FTFEDAPSY

SEQ ID NO: 21619 - protein, 9 aa, Homo sapiens
  Table A; Target 21619; HLA-B*58:01; DMRT1; ENSG00000137090; CTA
FTFEDAPSY

SEQ ID NO: 21620 - protein, 9 aa, Homo sapiens
  Table A; Target 21620; HLA-C*02:02; DMRT1; ENSG00000137090; CTA
FTFEDAPSY

SEQ ID NO: 21621 - protein, 9 aa, Homo sapiens
  Table A; Target 21621; HLA-C*03:03; DMRT1; ENSG00000137090; CTA
FTFEDAPSY

SEQ ID NO: 21622 - protein, 9 aa, Homo sapiens
  Table A; Target 21622; HLA-C*03:04; DMRT1; ENSG00000137090; CTA
FTFEDAPSY

SEQ ID NO: 21623 - protein, 9 aa, Homo sapiens
  Table A; Target 21623; HLA-C*05:01; DMRT1; ENSG00000137090; CTA
FTFEDAPSY

SEQ ID NO: 21624 - protein, 9 aa, Homo sapiens
  Table A; Target 21624; HLA-C*07:04; DMRT1; ENSG00000137090; CTA
FTFEDAPSY

SEQ ID NO: 21625 - protein, 9 aa, Homo sapiens
  Table A; Target 21625; HLA-C*07:06; DMRT1; ENSG00000137090; CTA
FTFEDAPSY

SEQ ID NO: 21626 - protein, 9 aa, Homo sapiens
  Table A; Target 21626; HLA-C*12:03; DMRT1; ENSG00000137090; CTA
FTFEDAPSY

SEQ ID NO: 21627 - protein, 9 aa, Homo sapiens
  Table A; Target 21627; HLA-C*14:02; DMRT1; ENSG00000137090; CTA
FTFEDAPSY

SEQ ID NO: 21628 - protein, 9 aa, Homo sapiens
  Table A; Target 21628; HLA-C*16:01; DMRT1; ENSG00000137090; CTA
FTFEDAPSY

SEQ ID NO: 21629 - protein, 9 aa, Homo sapiens
  Table A; Target 21629; HLA-C*16:02; DMRT1; ENSG00000137090; CTA
FTFEDAPSY

SEQ ID NO: 21630 - protein, 9 aa, Homo sapiens
  Table A; Target 21630; HLA-C*16:04; DMRT1; ENSG00000137090; CTA
FTFEDAPSY

SEQ ID NO: 21631 - protein, 9 aa, Homo sapiens
  Table A; Target 21631; HLA-A*29:02; DMRT1; ENSG00000137090; CTA
FYQPSLFPY

SEQ ID NO: 21632 - protein, 9 aa, Homo sapiens
  Table A; Target 21632; HLA-C*14:02; DMRT1; ENSG00000137090; CTA
FYQPSLFPY

SEQ ID NO: 21633 - protein, 10 aa, Homo sapiens
  Table A; Target 21633; HLA-A*24:02; DMRT1; ENSG00000137090; CTA
FYQPSLFPYY

SEQ ID NO: 21634 - protein, 10 aa, Homo sapiens
  Table A; Target 21634; HLA-A*29:02; DMRT1; ENSG00000137090; CTA
FYQPSLFPYY

SEQ ID NO: 21635 - protein, 10 aa, Homo sapiens
  Table A; Target 21635; HLA-A*30:02; DMRT1; ENSG00000137090; CTA
FYQPSLFPYY

SEQ ID NO: 21636 - protein, 10 aa, Homo sapiens
  Table A; Target 21636; HLA-A*11:01; DMRT1; ENSG00000137090; CTA
GASDLGAGSK

SEQ ID NO: 21637 - protein, 10 aa, Homo sapiens
  Table A; Target 21637; HLA-B*27:02; DMRT1; ENSG00000137090; CTA
GASDLGAGSK

SEQ ID NO: 21638 - protein, 10 aa, Homo sapiens
  Table A; Target 21638; HLA-C*07:06; DMRT1; ENSG00000137090; CTA
GASDLGAGSK

SEQ ID NO: 21639 - protein, 11 aa, Homo sapiens
  Table A; Target 21639; HLA-A*03:01; DMRT1; ENSG00000137090; CTA
GASDLGAGSKK

SEQ ID NO: 21640 - protein, 11 aa, Homo sapiens
  Table A; Target 21640; HLA-A*03:02; DMRT1; ENSG00000137090; CTA
GASDLGAGSKK

SEQ ID NO: 21641 - protein, 11 aa, Homo sapiens
  Table A; Target 21641; HLA-A*11:01; DMRT1; ENSG00000137090; CTA
GASDLGAGSKK

SEQ ID NO: 21642 - protein, 11 aa, Homo sapiens
  Table A; Target 21642; HLA-B*27:02; DMRT1; ENSG00000137090; CTA
GASDLGAGSKK

SEQ ID NO: 21643 - protein, 11 aa, Homo sapiens
  Table A; Target 21643; HLA-B*27:05; DMRT1; ENSG00000137090; CTA
GASDLGAGSKK

SEQ ID NO: 21644 - protein, 9 aa, Homo sapiens
  Table A; Target 21644; HLA-B*49:01; DMRT1; ENSG00000137090; CTA
GEVGNPLGG

SEQ ID NO: 21645 - protein, 9 aa, Homo sapiens
  Table A; Target 21645; HLA-C*16:04; DMRT1; ENSG00000137090; CTA
GEVGNPLGG

SEQ ID NO: 21646 - protein, 10 aa, Homo sapiens
  Table A; Target 21646; HLA-B*27:05; DMRT1; ENSG00000137090; CTA
GEVGNPLGGS

SEQ ID NO: 21647 - protein, 11 aa, Homo sapiens
  Table A; Target 21647; HLA-B*39:01; DMRT1; ENSG00000137090; CTA
GEVGNPLGGSP

SEQ ID NO: 21648 - protein, 11 aa, Homo sapiens
  Table A; Target 21648; HLA-B*40:02; DMRT1; ENSG00000137090; CTA
GEVGNPLGGSP

SEQ ID NO: 21649 - protein, 11 aa, Homo sapiens
  Table A; Target 21649; HLA-C*16:04; DMRT1; ENSG00000137090; CTA
GEVGNPLGGSP

SEQ ID NO: 21650 - protein, 9 aa, Homo sapiens
  Table A; Target 21650; HLA-A*32:01; DMRT1; ENSG00000137090; CTA
GGSPVKNSL

SEQ ID NO: 21651 - protein, 9 aa, Homo sapiens
  Table A; Target 21651; HLA-B*07:02; DMRT1; ENSG00000137090; CTA
GGSPVKNSL

SEQ ID NO: 21652 - protein, 9 aa, Homo sapiens
  Table A; Target 21652; HLA-B*08:01; DMRT1; ENSG00000137090; CTA
GGSPVKNSL

SEQ ID NO: 21653 - protein, 9 aa, Homo sapiens
  Table A; Target 21653; HLA-B*13:02; DMRT1; ENSG00000137090; CTA
GGSPVKNSL

SEQ ID NO: 21654 - protein, 9 aa, Homo sapiens
  Table A; Target 21654; HLA-B*15:03; DMRT1; ENSG00000137090; CTA
GGSPVKNSL

SEQ ID NO: 21655 - protein, 9 aa, Homo sapiens
  Table A; Target 21655; HLA-B*27:05; DMRT1; ENSG00000137090; CTA
GGSPVKNSL

SEQ ID NO: 21656 - protein, 9 aa, Homo sapiens
  Table A; Target 21656; HLA-B*37:01; DMRT1; ENSG00000137090; CTA
GGSPVKNSL

SEQ ID NO: 21657 - protein, 9 aa, Homo sapiens
  Table A; Target 21657; HLA-B*38:01; DMRT1; ENSG00000137090; CTA
GGSPVKNSL

SEQ ID NO: 21658 - protein, 9 aa, Homo sapiens
  Table A; Target 21658; HLA-B*39:01; DMRT1; ENSG00000137090; CTA
GGSPVKNSL

SEQ ID NO: 21659 - protein, 9 aa, Homo sapiens
  Table A; Target 21659; HLA-B*40:01; DMRT1; ENSG00000137090; CTA
GGSPVKNSL

SEQ ID NO: 21660 - protein, 9 aa, Homo sapiens
  Table A; Target 21660; HLA-B*58:01; DMRT1; ENSG00000137090; CTA
GGSPVKNSL

SEQ ID NO: 21661 - protein, 9 aa, Homo sapiens
  Table A; Target 21661; HLA-C*01:02; DMRT1; ENSG00000137090; CTA
GGSPVKNSL

SEQ ID NO: 21662 - protein, 9 aa, Homo sapiens
  Table A; Target 21662; HLA-C*03:03; DMRT1; ENSG00000137090; CTA
GGSPVKNSL

SEQ ID NO: 21663 - protein, 9 aa, Homo sapiens
  Table A; Target 21663; HLA-C*03:04; DMRT1; ENSG00000137090; CTA
GGSPVKNSL

SEQ ID NO: 21664 - protein, 9 aa, Homo sapiens
  Table A; Target 21664; HLA-C*06:02; DMRT1; ENSG00000137090; CTA
GGSPVKNSL

SEQ ID NO: 21665 - protein, 9 aa, Homo sapiens
  Table A; Target 21665; HLA-C*07:02; DMRT1; ENSG00000137090; CTA
GGSPVKNSL

SEQ ID NO: 21666 - protein, 9 aa, Homo sapiens
  Table A; Target 21666; HLA-C*14:02; DMRT1; ENSG00000137090; CTA
GGSPVKNSL

SEQ ID NO: 21667 - protein, 9 aa, Homo sapiens
  Table A; Target 21667; HLA-C*16:01; DMRT1; ENSG00000137090; CTA
GGSPVKNSL

SEQ ID NO: 21668 - protein, 9 aa, Homo sapiens
  Table A; Target 21668; HLA-C*16:02; DMRT1; ENSG00000137090; CTA
GGSPVKNSL

SEQ ID NO: 21669 - protein, 9 aa, Homo sapiens
  Table A; Target 21669; HLA-C*16:04; DMRT1; ENSG00000137090; CTA
GGSPVKNSL

SEQ ID NO: 21670 - protein, 9 aa, Homo sapiens
  Table A; Target 21670; HLA-B*27:05; DMRT1; ENSG00000137090; CTA
GHVENTPDL

SEQ ID NO: 21671 - protein, 9 aa, Homo sapiens
  Table A; Target 21671; HLA-B*38:01; DMRT1; ENSG00000137090; CTA
GHVENTPDL

SEQ ID NO: 21672 - protein, 9 aa, Homo sapiens
  Table A; Target 21672; HLA-B*39:01; DMRT1; ENSG00000137090; CTA
GHVENTPDL

SEQ ID NO: 21673 - protein, 10 aa, Homo sapiens
  Table A; Target 21673; HLA-B*39:01; DMRT1; ENSG00000137090; CTA
GHVENTPDLV

SEQ ID NO: 21674 - protein, 9 aa, Homo sapiens
  Table A; Target 21674; HLA-B*07:02; DMRT1; ENSG00000137090; CTA
GPYVPGQTG

SEQ ID NO: 21675 - protein, 9 aa, Homo sapiens
  Table A; Target 21675; HLA-B*56:01; DMRT1; ENSG00000137090; CTA
GPYVPGQTG

SEQ ID NO: 21676 - protein, 9 aa, Homo sapiens
  Table A; Target 21676; HLA-C*07:02; DMRT1; ENSG00000137090; CTA
GPYVPGQTG

SEQ ID NO: 21677 - protein, 8 aa, Homo sapiens
  Table A; Target 21677; HLA-B*13:02; DMRT1; ENSG00000137090; CTA
GQSVPQFF

SEQ ID NO: 21678 - protein, 9 aa, Homo sapiens
  Table A; Target 21678; HLA-B*13:02; DMRT1; ENSG00000137090; CTA
GQSVPQFFT

SEQ ID NO: 21679 - protein, 10 aa, Homo sapiens
  Table A; Target 21679; HLA-C*16:04; DMRT1; ENSG00000137090; CTA
GQSVPQFFTF

SEQ ID NO: 21680 - protein, 9 aa, Homo sapiens
  Table A; Target 21680; HLA-B*13:02; DMRT1; ENSG00000137090; CTA
GQTGNQWQM

SEQ ID NO: 21681 - protein, 9 aa, Homo sapiens
  Table A; Target 21681; HLA-B*27:05; DMRT1; ENSG00000137090; CTA
GQTGNQWQM

SEQ ID NO: 21682 - protein, 8 aa, Homo sapiens
  Table A; Target 21682; HLA-B*27:05; DMRT1; ENSG00000137090; CTA
GRAGGFGK

SEQ ID NO: 21683 - protein, 8 aa, Homo sapiens
  Table A; Target 21683; HLA-B*08:01; DMRT1; ENSG00000137090; CTA
GSPVKNSL

SEQ ID NO: 21684 - protein, 8 aa, Homo sapiens
  Table A; Target 21684; HLA-C*01:02; DMRT1; ENSG00000137090; CTA
GSPVKNSL

SEQ ID NO: 21685 - protein, 9 aa, Homo sapiens
  Table A; Target 21685; HLA-C*07:06; DMRT1; ENSG00000137090; CTA
GSSAGGSSR

SEQ ID NO: 21686 - protein, 8 aa, Homo sapiens
  Table A; Target 21686; HLA-A*33:01; DMRT1; ENSG00000137090; CTA
HAMSSQYR

SEQ ID NO: 21687 - protein, 8 aa, Homo sapiens
  Table A; Target 21687; HLA-A*33:03; DMRT1; ENSG00000137090; CTA
HAMSSQYR

SEQ ID NO: 21688 - protein, 8 aa, Homo sapiens
  Table A; Target 21688; HLA-C*07:06; DMRT1; ENSG00000137090; CTA
HAMSSQYR

SEQ ID NO: 21689 - protein, 9 aa, Homo sapiens
  Table A; Target 21689; HLA-B*35:01; DMRT1; ENSG00000137090; CTA
HAMSSQYRM

SEQ ID NO: 21690 - protein, 9 aa, Homo sapiens
  Table A; Target 21690; HLA-B*35:03; DMRT1; ENSG00000137090; CTA
HAMSSQYRM

SEQ ID NO: 21691 - protein, 9 aa, Homo sapiens
  Table A; Target 21691; HLA-B*58:01; DMRT1; ENSG00000137090; CTA
HAMSSQYRM

SEQ ID NO: 21692 - protein, 9 aa, Homo sapiens
  Table A; Target 21692; HLA-C*02:02; DMRT1; ENSG00000137090; CTA
HAMSSQYRM

SEQ ID NO: 21693 - protein, 9 aa, Homo sapiens
  Table A; Target 21693; HLA-C*03:03; DMRT1; ENSG00000137090; CTA
HAMSSQYRM

SEQ ID NO: 21694 - protein, 9 aa, Homo sapiens
  Table A; Target 21694; HLA-C*03:04; DMRT1; ENSG00000137090; CTA
HAMSSQYRM

SEQ ID NO: 21695 - protein, 9 aa, Homo sapiens
  Table A; Target 21695; HLA-C*16:01; DMRT1; ENSG00000137090; CTA
HAMSSQYRM

SEQ ID NO: 21696 - protein, 10 aa, Homo sapiens
  Table A; Target 21696; HLA-A*68:01; DMRT1; ENSG00000137090; CTA
HAPGVPPQGR

SEQ ID NO: 21697 - protein, 10 aa, Homo sapiens
  Table A; Target 21697; HLA-C*07:06; DMRT1; ENSG00000137090; CTA
HAPGVPPQGR

SEQ ID NO: 21698 - protein, 8 aa, Homo sapiens
  Table A; Target 21698; HLA-A*11:01; DMRT1; ENSG00000137090; CTA
HGYASPLK

SEQ ID NO: 21699 - protein, 8 aa, Homo sapiens
  Table A; Target 21699; HLA-B*51:01; DMRT1; ENSG00000137090; CTA
HGYASPLK

SEQ ID NO: 21700 - protein, 8 aa, Homo sapiens
  Table A; Target 21700; HLA-C*06:02; DMRT1; ENSG00000137090; CTA
HGYASPLK

SEQ ID NO: 21701 - protein, 9 aa, Homo sapiens
  Table A; Target 21701; HLA-B*13:02; DMRT1; ENSG00000137090; CTA
HGYASPLKG

SEQ ID NO: 21702 - protein, 9 aa, Homo sapiens
  Table A; Target 21702; HLA-C*06:02; DMRT1; ENSG00000137090; CTA
HGYASPLKG

SEQ ID NO: 21703 - protein, 8 aa, Homo sapiens
  Table A; Target 21703; HLA-B*51:01; DMRT1; ENSG00000137090; CTA
HPIPLPSA

SEQ ID NO: 21704 - protein, 8 aa, Homo sapiens
  Table A; Target 21704; HLA-B*54:01; DMRT1; ENSG00000137090; CTA
HPIPLPSA

SEQ ID NO: 21705 - protein, 8 aa, Homo sapiens
  Table A; Target 21705; HLA-B*55:01; DMRT1; ENSG00000137090; CTA
HPIPLPSA

SEQ ID NO: 21706 - protein, 8 aa, Homo sapiens
  Table A; Target 21706; HLA-B*56:01; DMRT1; ENSG00000137090; CTA
HPIPLPSA

SEQ ID NO: 21707 - protein, 9 aa, Homo sapiens
  Table A; Target 21707; HLA-B*35:03; DMRT1; ENSG00000137090; CTA
HPIPLPSAA

SEQ ID NO: 21708 - protein, 9 aa, Homo sapiens
  Table A; Target 21708; HLA-B*54:01; DMRT1; ENSG00000137090; CTA
HPIPLPSAA

SEQ ID NO: 21709 - protein, 9 aa, Homo sapiens
  Table A; Target 21709; HLA-B*55:01; DMRT1; ENSG00000137090; CTA
HPIPLPSAA

SEQ ID NO: 21710 - protein, 9 aa, Homo sapiens
  Table A; Target 21710; HLA-B*56:01; DMRT1; ENSG00000137090; CTA
HPIPLPSAA

SEQ ID NO: 21711 - protein, 11 aa, Homo sapiens
  Table A; Target 21711; HLA-B*35:01; DMRT1; ENSG00000137090; CTA
HPIPLPSAAEL

SEQ ID NO: 21712 - protein, 11 aa, Homo sapiens
  Table A; Target 21712; HLA-B*35:03; DMRT1; ENSG00000137090; CTA
HPIPLPSAAEL

SEQ ID NO: 21713 - protein, 9 aa, Homo sapiens
  Table A; Target 21713; HLA-A*01:01; DMRT1; ENSG00000137090; CTA
HSYYPPPSY

SEQ ID NO: 21714 - protein, 9 aa, Homo sapiens
  Table A; Target 21714; HLA-A*03:01; DMRT1; ENSG00000137090; CTA
HSYYPPPSY

SEQ ID NO: 21715 - protein, 9 aa, Homo sapiens
  Table A; Target 21715; HLA-A*11:01; DMRT1; ENSG00000137090; CTA
HSYYPPPSY

SEQ ID NO: 21716 - protein, 9 aa, Homo sapiens
  Table A; Target 21716; HLA-A*25:01; DMRT1; ENSG00000137090; CTA
HSYYPPPSY

SEQ ID NO: 21717 - protein, 9 aa, Homo sapiens
  Table A; Target 21717; HLA-A*26:01; DMRT1; ENSG00000137090; CTA
HSYYPPPSY

SEQ ID NO: 21718 - protein, 9 aa, Homo sapiens
  Table A; Target 21718; HLA-A*29:02; DMRT1; ENSG00000137090; CTA
HSYYPPPSY

SEQ ID NO: 21719 - protein, 9 aa, Homo sapiens
  Table A; Target 21719; HLA-A*30:02; DMRT1; ENSG00000137090; CTA
HSYYPPPSY

SEQ ID NO: 21720 - protein, 9 aa, Homo sapiens
  Table A; Target 21720; HLA-A*31:01; DMRT1; ENSG00000137090; CTA
HSYYPPPSY

SEQ ID NO: 21721 - protein, 9 aa, Homo sapiens
  Table A; Target 21721; HLA-A*32:01; DMRT1; ENSG00000137090; CTA
HSYYPPPSY

SEQ ID NO: 21722 - protein, 9 aa, Homo sapiens
  Table A; Target 21722; HLA-A*33:01; DMRT1; ENSG00000137090; CTA
HSYYPPPSY

SEQ ID NO: 21723 - protein, 9 aa, Homo sapiens
  Table A; Target 21723; HLA-A*68:01; DMRT1; ENSG00000137090; CTA
HSYYPPPSY

SEQ ID NO: 21724 - protein, 9 aa, Homo sapiens
  Table A; Target 21724; HLA-B*13:02; DMRT1; ENSG00000137090; CTA
HSYYPPPSY

SEQ ID NO: 21725 - protein, 9 aa, Homo sapiens
  Table A; Target 21725; HLA-B*15:01; DMRT1; ENSG00000137090; CTA
HSYYPPPSY

SEQ ID NO: 21726 - protein, 9 aa, Homo sapiens
  Table A; Target 21726; HLA-B*15:03; DMRT1; ENSG00000137090; CTA
HSYYPPPSY

SEQ ID NO: 21727 - protein, 9 aa, Homo sapiens
  Table A; Target 21727; HLA-B*35:01; DMRT1; ENSG00000137090; CTA
HSYYPPPSY

SEQ ID NO: 21728 - protein, 9 aa, Homo sapiens
  Table A; Target 21728; HLA-B*46:01; DMRT1; ENSG00000137090; CTA
HSYYPPPSY

SEQ ID NO: 21729 - protein, 9 aa, Homo sapiens
  Table A; Target 21729; HLA-B*51:01; DMRT1; ENSG00000137090; CTA
HSYYPPPSY

SEQ ID NO: 21730 - protein, 9 aa, Homo sapiens
  Table A; Target 21730; HLA-B*54:01; DMRT1; ENSG00000137090; CTA
HSYYPPPSY

SEQ ID NO: 21731 - protein, 9 aa, Homo sapiens
  Table A; Target 21731; HLA-B*57:01; DMRT1; ENSG00000137090; CTA
HSYYPPPSY

SEQ ID NO: 21732 - protein, 9 aa, Homo sapiens
  Table A; Target 21732; HLA-B*58:01; DMRT1; ENSG00000137090; CTA
HSYYPPPSY

SEQ ID NO: 21733 - protein, 9 aa, Homo sapiens
  Table A; Target 21733; HLA-C*02:02; DMRT1; ENSG00000137090; CTA
HSYYPPPSY

SEQ ID NO: 21734 - protein, 9 aa, Homo sapiens
  Table A; Target 21734; HLA-C*03:03; DMRT1; ENSG00000137090; CTA
HSYYPPPSY

SEQ ID NO: 21735 - protein, 9 aa, Homo sapiens
  Table A; Target 21735; HLA-C*03:04; DMRT1; ENSG00000137090; CTA
HSYYPPPSY

SEQ ID NO: 21736 - protein, 9 aa, Homo sapiens
  Table A; Target 21736; HLA-C*07:06; DMRT1; ENSG00000137090; CTA
HSYYPPPSY

SEQ ID NO: 21737 - protein, 9 aa, Homo sapiens
  Table A; Target 21737; HLA-C*12:03; DMRT1; ENSG00000137090; CTA
HSYYPPPSY

SEQ ID NO: 21738 - protein, 9 aa, Homo sapiens
  Table A; Target 21738; HLA-C*16:01; DMRT1; ENSG00000137090; CTA
HSYYPPPSY

SEQ ID NO: 21739 - protein, 9 aa, Homo sapiens
  Table A; Target 21739; HLA-C*16:04; DMRT1; ENSG00000137090; CTA
HSYYPPPSY

SEQ ID NO: 21740 - protein, 10 aa, Homo sapiens
  Table A; Target 21740; HLA-A*03:01; DMRT1; ENSG00000137090; CTA
HSYYPPPSYL

SEQ ID NO: 21741 - protein, 10 aa, Homo sapiens
  Table A; Target 21741; HLA-A*68:02; DMRT1; ENSG00000137090; CTA
HSYYPPPSYL

SEQ ID NO: 21742 - protein, 8 aa, Homo sapiens
  Table A; Target 21742; HLA-C*05:01; DMRT1; ENSG00000137090; CTA
HVENTPDL

SEQ ID NO: 21743 - protein, 9 aa, Homo sapiens
  Table A; Target 21743; HLA-C*05:01; DMRT1; ENSG00000137090; CTA
HVENTPDLV

SEQ ID NO: 21744 - protein, 8 aa, Homo sapiens
  Table A; Target 21744; HLA-B*08:01; DMRT1; ENSG00000137090; CTA
IAERQRVM

SEQ ID NO: 21745 - protein, 8 aa, Homo sapiens
  Table A; Target 21745; HLA-C*03:03; DMRT1; ENSG00000137090; CTA
IAERQRVM

SEQ ID NO: 21746 - protein, 8 aa, Homo sapiens
  Table A; Target 21746; HLA-C*03:04; DMRT1; ENSG00000137090; CTA
IAERQRVM

SEQ ID NO: 21747 - protein, 8 aa, Homo sapiens
  Table A; Target 21747; HLA-C*16:01; DMRT1; ENSG00000137090; CTA
IAERQRVM

SEQ ID NO: 21748 - protein, 9 aa, Homo sapiens
  Table A; Target 21748; HLA-A*23:01; DMRT1; ENSG00000137090; CTA
IPLPSAAEL

SEQ ID NO: 21749 - protein, 9 aa, Homo sapiens
  Table A; Target 21749; HLA-B*07:02; DMRT1; ENSG00000137090; CTA
IPLPSAAEL

SEQ ID NO: 21750 - protein, 9 aa, Homo sapiens
  Table A; Target 21750; HLA-B*35:01; DMRT1; ENSG00000137090; CTA
IPLPSAAEL

SEQ ID NO: 21751 - protein, 9 aa, Homo sapiens
  Table A; Target 21751; HLA-B*35:03; DMRT1; ENSG00000137090; CTA
IPLPSAAEL

SEQ ID NO: 21752 - protein, 9 aa, Homo sapiens
  Table A; Target 21752; HLA-B*51:01; DMRT1; ENSG00000137090; CTA
IPLPSAAEL

SEQ ID NO: 21753 - protein, 9 aa, Homo sapiens
  Table A; Target 21753; HLA-B*56:01; DMRT1; ENSG00000137090; CTA
IPLPSAAEL

SEQ ID NO: 21754 - protein, 9 aa, Homo sapiens
  Table A; Target 21754; HLA-C*03:03; DMRT1; ENSG00000137090; CTA
IPLPSAAEL

SEQ ID NO: 21755 - protein, 9 aa, Homo sapiens
  Table A; Target 21755; HLA-C*03:04; DMRT1; ENSG00000137090; CTA
IPLPSAAEL

SEQ ID NO: 21756 - protein, 9 aa, Homo sapiens
  Table A; Target 21756; HLA-C*07:02; DMRT1; ENSG00000137090; CTA
IPLPSAAEL

SEQ ID NO: 21757 - protein, 9 aa, Homo sapiens
  Table A; Target 21757; HLA-C*14:02; DMRT1; ENSG00000137090; CTA
IPLPSAAEL

SEQ ID NO: 21758 - protein, 10 aa, Homo sapiens
  Table A; Target 21758; HLA-B*35:03; DMRT1; ENSG00000137090; CTA
IPLPSAAELL

SEQ ID NO: 21759 - protein, 11 aa, Homo sapiens
  Table A; Target 21759; HLA-A*23:01; DMRT1; ENSG00000137090; CTA
IPLPSAAELLV

SEQ ID NO: 21760 - protein, 11 aa, Homo sapiens
  Table A; Target 21760; HLA-B*51:01; DMRT1; ENSG00000137090; CTA
IPLPSAAELLV

SEQ ID NO: 21761 - protein, 11 aa, Homo sapiens
  Table A; Target 21761; HLA-B*54:01; DMRT1; ENSG00000137090; CTA
IPLPSAAELLV

SEQ ID NO: 21762 - protein, 8 aa, Homo sapiens
  Table A; Target 21762; HLA-C*05:01; DMRT1; ENSG00000137090; CTA
IQDIPAVT

SEQ ID NO: 21763 - protein, 9 aa, Homo sapiens
  Table A; Target 21763; HLA-C*05:01; DMRT1; ENSG00000137090; CTA
IQDIPAVTS

SEQ ID NO: 21764 - protein, 10 aa, Homo sapiens
  Table A; Target 21764; HLA-C*07:06; DMRT1; ENSG00000137090; CTA
IQDIPAVTSR

SEQ ID NO: 21765 - protein, 10 aa, Homo sapiens
  Table A; Target 21765; HLA-B*54:01; DMRT1; ENSG00000137090; CTA
ISHPIPLPSA

SEQ ID NO: 21766 - protein, 9 aa, Homo sapiens
  Table A; Target 21766; HLA-A*32:01; DMRT1; ENSG00000137090; CTA
KASGALVGA

SEQ ID NO: 21767 - protein, 9 aa, Homo sapiens
  Table A; Target 21767; HLA-B*55:01; DMRT1; ENSG00000137090; CTA
KASGALVGA

SEQ ID NO: 21768 - protein, 9 aa, Homo sapiens
  Table A; Target 21768; HLA-B*56:01; DMRT1; ENSG00000137090; CTA
KASGALVGA

SEQ ID NO: 21769 - protein, 9 aa, Homo sapiens
  Table A; Target 21769; HLA-C*16:02; DMRT1; ENSG00000137090; CTA
KASGALVGA

SEQ ID NO: 21770 - protein, 9 aa, Homo sapiens
  Table A; Target 21770; HLA-C*16:01; DMRT1; ENSG00000137090; CTA
KNMENRHAM

SEQ ID NO: 21771 - protein, 9 aa, Homo sapiens
  Table A; Target 21771; HLA-B*07:02; DMRT1; ENSG00000137090; CTA
KPSTPSEAP

SEQ ID NO: 21772 - protein, 10 aa, Homo sapiens
  Table A; Target 21772; HLA-B*39:01; DMRT1; ENSG00000137090; CTA
LAADSASGEV

SEQ ID NO: 21773 - protein, 9 aa, Homo sapiens
  Table A; Target 21773; HLA-A*29:02; DMRT1; ENSG00000137090; CTA
LFPYYNNLY

SEQ ID NO: 21774 - protein, 9 aa, Homo sapiens
  Table A; Target 21774; HLA-A*32:01; DMRT1; ENSG00000137090; CTA
LGAGSKKSP

SEQ ID NO: 21775 - protein, 9 aa, Homo sapiens
  Table A; Target 21775; HLA-B*08:01; DMRT1; ENSG00000137090; CTA
LIAERQRVM

SEQ ID NO: 21776 - protein, 9 aa, Homo sapiens
  Table A; Target 21776; HLA-C*16:01; DMRT1; ENSG00000137090; CTA
LIAERQRVM

SEQ ID NO: 21777 - protein, 8 aa, Homo sapiens
  Table A; Target 21777; HLA-B*35:03; DMRT1; ENSG00000137090; CTA
LPSAAELL

SEQ ID NO: 21778 - protein, 9 aa, Homo sapiens
  Table A; Target 21778; HLA-B*35:03; DMRT1; ENSG00000137090; CTA
LPSAAELLV

SEQ ID NO: 21779 - protein, 9 aa, Homo sapiens
  Table A; Target 21779; HLA-B*51:01; DMRT1; ENSG00000137090; CTA
LPSAAELLV

SEQ ID NO: 21780 - protein, 9 aa, Homo sapiens
  Table A; Target 21780; HLA-B*54:01; DMRT1; ENSG00000137090; CTA
LPSAAELLV

SEQ ID NO: 21781 - protein, 9 aa, Homo sapiens
  Table A; Target 21781; HLA-B*56:01; DMRT1; ENSG00000137090; CTA
LPSAAELLV

SEQ ID NO: 21782 - protein, 10 aa, Homo sapiens
  Table A; Target 21782; HLA-A*03:01; DMRT1; ENSG00000137090; CTA
LSSSSPISNK

SEQ ID NO: 21783 - protein, 10 aa, Homo sapiens
  Table A; Target 21783; HLA-A*03:02; DMRT1; ENSG00000137090; CTA
LSSSSPISNK

SEQ ID NO: 21784 - protein, 10 aa, Homo sapiens
  Table A; Target 21784; HLA-A*11:01; DMRT1; ENSG00000137090; CTA
LSSSSPISNK

SEQ ID NO: 21785 - protein, 10 aa, Homo sapiens
  Table A; Target 21785; HLA-C*14:02; DMRT1; ENSG00000137090; CTA
LVGAASGSSA

SEQ ID NO: 21786 - protein, 8 aa, Homo sapiens
  Table A; Target 21786; HLA-A*30:02; DMRT1; ENSG00000137090; CTA
LVSDSTYY

SEQ ID NO: 21787 - protein, 8 aa, Homo sapiens
  Table A; Target 21787; HLA-B*39:01; DMRT1; ENSG00000137090; CTA
LVSDSTYY

SEQ ID NO: 21788 - protein, 11 aa, Homo sapiens
  Table A; Target 21788; HLA-A*25:01; DMRT1; ENSG00000137090; CTA
LVSDSTYYSSF

SEQ ID NO: 21789 - protein, 9 aa, Homo sapiens
  Table A; Target 21789; HLA-A*24:02; DMRT1; ENSG00000137090; CTA
LYNCPQYSM

SEQ ID NO: 21790 - protein, 9 aa, Homo sapiens
  Table A; Target 21790; HLA-C*14:02; DMRT1; ENSG00000137090; CTA
LYNCPQYSM

SEQ ID NO: 21791 - protein, 8 aa, Homo sapiens
  Table A; Target 21791; HLA-A*33:01; DMRT1; ENSG00000137090; CTA
MAAQVALR

SEQ ID NO: 21792 - protein, 8 aa, Homo sapiens
  Table A; Target 21792; HLA-A*33:03; DMRT1; ENSG00000137090; CTA
MAAQVALR

SEQ ID NO: 21793 - protein, 8 aa, Homo sapiens
  Table A; Target 21793; HLA-A*68:01; DMRT1; ENSG00000137090; CTA
MAAQVALR

SEQ ID NO: 21794 - protein, 8 aa, Homo sapiens
  Table A; Target 21794; HLA-B*27:02; DMRT1; ENSG00000137090; CTA
MAAQVALR

SEQ ID NO: 21795 - protein, 8 aa, Homo sapiens
  Table A; Target 21795; HLA-C*07:06; DMRT1; ENSG00000137090; CTA
MAAQVALR

SEQ ID NO: 21796 - protein, 9 aa, Homo sapiens
  Table A; Target 21796; HLA-A*33:01; DMRT1; ENSG00000137090; CTA
MAAQVALRR

SEQ ID NO: 21797 - protein, 9 aa, Homo sapiens
  Table A; Target 21797; HLA-A*33:03; DMRT1; ENSG00000137090; CTA
MAAQVALRR

SEQ ID NO: 21798 - protein, 9 aa, Homo sapiens
  Table A; Target 21798; HLA-A*68:01; DMRT1; ENSG00000137090; CTA
MAAQVALRR

SEQ ID NO: 21799 - protein, 9 aa, Homo sapiens
  Table A; Target 21799; HLA-A*68:02; DMRT1; ENSG00000137090; CTA
MAAQVALRR

SEQ ID NO: 21800 - protein, 9 aa, Homo sapiens
  Table A; Target 21800; HLA-C*07:06; DMRT1; ENSG00000137090; CTA
MAAQVALRR

SEQ ID NO: 21801 - protein, 8 aa, Homo sapiens
  Table A; Target 21801; HLA-B*54:01; DMRT1; ENSG00000137090; CTA
MALAADSA

SEQ ID NO: 21802 - protein, 11 aa, Homo sapiens
  Table A; Target 21802; HLA-B*18:01; DMRT1; ENSG00000137090; CTA
MENRHAMSSQY

SEQ ID NO: 21803 - protein, 10 aa, Homo sapiens
  Table A; Target 21803; HLA-A*30:02; DMRT1; ENSG00000137090; CTA
MSSQYRMHSY

SEQ ID NO: 21804 - protein, 9 aa, Homo sapiens
  Table A; Target 21804; HLA-A*02:01; DMRT1; ENSG00000137090; CTA
MVIQDIPAV

SEQ ID NO: 21805 - protein, 9 aa, Homo sapiens
  Table A; Target 21805; HLA-A*02:03; DMRT1; ENSG00000137090; CTA
MVIQDIPAV

SEQ ID NO: 21806 - protein, 9 aa, Homo sapiens
  Table A; Target 21806; HLA-A*02:04; DMRT1; ENSG00000137090; CTA
MVIQDIPAV

SEQ ID NO: 21807 - protein, 9 aa, Homo sapiens
  Table A; Target 21807; HLA-A*02:07; DMRT1; ENSG00000137090; CTA
MVIQDIPAV

SEQ ID NO: 21808 - protein, 9 aa, Homo sapiens
  Table A; Target 21808; HLA-A*25:01; DMRT1; ENSG00000137090; CTA
MVIQDIPAV

SEQ ID NO: 21809 - protein, 9 aa, Homo sapiens
  Table A; Target 21809; HLA-A*26:01; DMRT1; ENSG00000137090; CTA
MVIQDIPAV

SEQ ID NO: 21810 - protein, 9 aa, Homo sapiens
  Table A; Target 21810; HLA-A*30:01; DMRT1; ENSG00000137090; CTA
MVIQDIPAV

SEQ ID NO: 21811 - protein, 9 aa, Homo sapiens
  Table A; Target 21811; HLA-A*68:02; DMRT1; ENSG00000137090; CTA
MVIQDIPAV

SEQ ID NO: 21812 - protein, 9 aa, Homo sapiens
  Table A; Target 21812; HLA-B*13:02; DMRT1; ENSG00000137090; CTA
MVIQDIPAV

SEQ ID NO: 21813 - protein, 9 aa, Homo sapiens
  Table A; Target 21813; HLA-B*35:01; DMRT1; ENSG00000137090; CTA
MVIQDIPAV

SEQ ID NO: 21814 - protein, 9 aa, Homo sapiens
  Table A; Target 21814; HLA-B*35:03; DMRT1; ENSG00000137090; CTA
MVIQDIPAV

SEQ ID NO: 21815 - protein, 9 aa, Homo sapiens
  Table A; Target 21815; HLA-B*40:02; DMRT1; ENSG00000137090; CTA
MVIQDIPAV

SEQ ID NO: 21816 - protein, 9 aa, Homo sapiens
  Table A; Target 21816; HLA-B*46:01; DMRT1; ENSG00000137090; CTA
MVIQDIPAV

SEQ ID NO: 21817 - protein, 9 aa, Homo sapiens
  Table A; Target 21817; HLA-B*54:01; DMRT1; ENSG00000137090; CTA
MVIQDIPAV

SEQ ID NO: 21818 - protein, 9 aa, Homo sapiens
  Table A; Target 21818; HLA-B*55:01; DMRT1; ENSG00000137090; CTA
MVIQDIPAV

SEQ ID NO: 21819 - protein, 9 aa, Homo sapiens
  Table A; Target 21819; HLA-B*56:01; DMRT1; ENSG00000137090; CTA
MVIQDIPAV

SEQ ID NO: 21820 - protein, 9 aa, Homo sapiens
  Table A; Target 21820; HLA-B*58:01; DMRT1; ENSG00000137090; CTA
MVIQDIPAV

SEQ ID NO: 21821 - protein, 9 aa, Homo sapiens
  Table A; Target 21821; HLA-C*02:02; DMRT1; ENSG00000137090; CTA
MVIQDIPAV

SEQ ID NO: 21822 - protein, 9 aa, Homo sapiens
  Table A; Target 21822; HLA-C*03:03; DMRT1; ENSG00000137090; CTA
MVIQDIPAV

SEQ ID NO: 21823 - protein, 9 aa, Homo sapiens
  Table A; Target 21823; HLA-C*03:04; DMRT1; ENSG00000137090; CTA
MVIQDIPAV

SEQ ID NO: 21824 - protein, 8 aa, Homo sapiens
  Table A; Target 21824; HLA-C*07:01; DMRT1; ENSG00000137090; CTA
NLYNCPQY

SEQ ID NO: 21825 - protein, 8 aa, Homo sapiens
  Table A; Target 21825; HLA-B*08:01; DMRT1; ENSG00000137090; CTA
NMENRHAM

SEQ ID NO: 21826 - protein, 9 aa, Homo sapiens
  Table A; Target 21826; HLA-C*07:01; DMRT1; ENSG00000137090; CTA
NNGSNPCLM

SEQ ID NO: 21827 - protein, 9 aa, Homo sapiens
  Table A; Target 21827; HLA-A*29:02; DMRT1; ENSG00000137090; CTA
NNLYNCPQY

SEQ ID NO: 21828 - protein, 9 aa, Homo sapiens
  Table A; Target 21828; HLA-C*07:01; DMRT1; ENSG00000137090; CTA
NNLYNCPQY

SEQ ID NO: 21829 - protein, 9 aa, Homo sapiens
  Table A; Target 21829; HLA-B*35:01; DMRT1; ENSG00000137090; CTA
NPLGGSPVK

SEQ ID NO: 21830 - protein, 9 aa, Homo sapiens
  Table A; Target 21830; HLA-B*35:03; DMRT1; ENSG00000137090; CTA
NPLGGSPVK

SEQ ID NO: 21831 - protein, 9 aa, Homo sapiens
  Table A; Target 21831; HLA-B*27:02; DMRT1; ENSG00000137090; CTA
NRHAMSSQY

SEQ ID NO: 21832 - protein, 9 aa, Homo sapiens
  Table A; Target 21832; HLA-B*27:05; DMRT1; ENSG00000137090; CTA
NRHAMSSQY

SEQ ID NO: 21833 - protein, 9 aa, Homo sapiens
  Table A; Target 21833; HLA-C*07:01; DMRT1; ENSG00000137090; CTA
NRHAMSSQY

SEQ ID NO: 21834 - protein, 9 aa, Homo sapiens
  Table A; Target 21834; HLA-C*16:04; DMRT1; ENSG00000137090; CTA
NRHAMSSQY

SEQ ID NO: 21835 - protein, 10 aa, Homo sapiens
  Table A; Target 21835; HLA-A*01:01; DMRT1; ENSG00000137090; CTA
NSLRGLPGPY

SEQ ID NO: 21836 - protein, 10 aa, Homo sapiens
  Table A; Target 21836; HLA-A*30:02; DMRT1; ENSG00000137090; CTA
NSLRGLPGPY

SEQ ID NO: 21837 - protein, 11 aa, Homo sapiens
  Table A; Target 21837; HLA-A*01:01; DMRT1; ENSG00000137090; CTA
NTPDLVSDSTY

SEQ ID NO: 21838 - protein, 11 aa, Homo sapiens
  Table A; Target 21838; HLA-A*25:01; DMRT1; ENSG00000137090; CTA
NTPDLVSDSTY

SEQ ID NO: 21839 - protein, 11 aa, Homo sapiens
  Table A; Target 21839; HLA-A*26:01; DMRT1; ENSG00000137090; CTA
NTPDLVSDSTY

SEQ ID NO: 21840 - protein, 8 aa, Homo sapiens
  Table A; Target 21840; HLA-C*05:01; DMRT1; ENSG00000137090; CTA
PASEPSSF

SEQ ID NO: 21841 - protein, 10 aa, Homo sapiens
  Table A; Target 21841; HLA-C*07:01; DMRT1; ENSG00000137090; CTA
PDLVSDSTYY

SEQ ID NO: 21842 - protein, 8 aa, Homo sapiens
  Table A; Target 21842; HLA-B*18:01; DMRT1; ENSG00000137090; CTA
PEARASVF

SEQ ID NO: 21843 - protein, 8 aa, Homo sapiens
  Table A; Target 21843; HLA-A*03:02; DMRT1; ENSG00000137090; CTA
PLGGSPVK

SEQ ID NO: 21844 - protein, 11 aa, Homo sapiens
  Table A; Target 21844; HLA-C*07:02; DMRT1; ENSG00000137090; CTA
PLGGSPVKNSL

SEQ ID NO: 21845 - protein, 9 aa, Homo sapiens
  Table A; Target 21845; HLA-B*56:01; DMRT1; ENSG00000137090; CTA
PPASVPTTA

SEQ ID NO: 21846 - protein, 10 aa, Homo sapiens
  Table A; Target 21846; HLA-B*56:01; DMRT1; ENSG00000137090; CTA
PPASVPTTAA

SEQ ID NO: 21847 - protein, 11 aa, Homo sapiens
  Table A; Target 21847; HLA-B*57:01; DMRT1; ENSG00000137090; CTA
PSYPEARASVF

SEQ ID NO: 21848 - protein, 11 aa, Homo sapiens
  Table A; Target 21848; HLA-A*23:01; DMRT1; ENSG00000137090; CTA
PYVPGQTGNQW

SEQ ID NO: 21849 - protein, 11 aa, Homo sapiens
  Table A; Target 21849; HLA-A*24:02; DMRT1; ENSG00000137090; CTA
PYVPGQTGNQW

SEQ ID NO: 21850 - protein, 9 aa, Homo sapiens
  Table A; Target 21850; HLA-A*11:01; DMRT1; ENSG00000137090; CTA
QDIPAVTSR

SEQ ID NO: 21851 - protein, 9 aa, Homo sapiens
  Table A; Target 21851; HLA-A*31:01; DMRT1; ENSG00000137090; CTA
QDIPAVTSR

SEQ ID NO: 21852 - protein, 9 aa, Homo sapiens
  Table A; Target 21852; HLA-A*33:01; DMRT1; ENSG00000137090; CTA
QDIPAVTSR

SEQ ID NO: 21853 - protein, 9 aa, Homo sapiens
  Table A; Target 21853; HLA-A*33:03; DMRT1; ENSG00000137090; CTA
QDIPAVTSR

SEQ ID NO: 21854 - protein, 9 aa, Homo sapiens
  Table A; Target 21854; HLA-A*68:01; DMRT1; ENSG00000137090; CTA
QDIPAVTSR

SEQ ID NO: 21855 - protein, 9 aa, Homo sapiens
  Table A; Target 21855; HLA-C*07:06; DMRT1; ENSG00000137090; CTA
QDIPAVTSR

SEQ ID NO: 21856 - protein, 8 aa, Homo sapiens
  Table A; Target 21856; HLA-B*37:01; DMRT1; ENSG00000137090; CTA
QDSGLVSL

SEQ ID NO: 21857 - protein, 9 aa, Homo sapiens
  Table A; Target 21857; HLA-B*18:01; DMRT1; ENSG00000137090; CTA
QEEELGISH

SEQ ID NO: 21858 - protein, 11 aa, Homo sapiens
  Table A; Target 21858; HLA-A*29:02; DMRT1; ENSG00000137090; CTA
QFFTFEDAPSY

SEQ ID NO: 21859 - protein, 11 aa, Homo sapiens
  Table A; Target 21859; HLA-B*07:02; DMRT1; ENSG00000137090; CTA
QPPPASVPTTA

SEQ ID NO: 21860 - protein, 11 aa, Homo sapiens
  Table A; Target 21860; HLA-B*51:01; DMRT1; ENSG00000137090; CTA
QPPPASVPTTA

SEQ ID NO: 21861 - protein, 11 aa, Homo sapiens
  Table A; Target 21861; HLA-B*54:01; DMRT1; ENSG00000137090; CTA
QPPPASVPTTA

SEQ ID NO: 21862 - protein, 11 aa, Homo sapiens
  Table A; Target 21862; HLA-B*55:01; DMRT1; ENSG00000137090; CTA
QPPPASVPTTA

SEQ ID NO: 21863 - protein, 11 aa, Homo sapiens
  Table A; Target 21863; HLA-B*56:01; DMRT1; ENSG00000137090; CTA
QPPPASVPTTA

SEQ ID NO: 21864 - protein, 10 aa, Homo sapiens
  Table A; Target 21864; HLA-B*13:02; DMRT1; ENSG00000137090; CTA
QQAQEEELGI

SEQ ID NO: 21865 - protein, 10 aa, Homo sapiens
  Table A; Target 21865; HLA-B*38:01; DMRT1; ENSG00000137090; CTA
QQAQEEELGI

SEQ ID NO: 21866 - protein, 10 aa, Homo sapiens
  Table A; Target 21866; HLA-B*27:02; DMRT1; ENSG00000137090; CTA
QRVMAAQVAL

SEQ ID NO: 21867 - protein, 10 aa, Homo sapiens
  Table A; Target 21867; HLA-B*27:05; DMRT1; ENSG00000137090; CTA
QRVMAAQVAL

SEQ ID NO: 21868 - protein, 9 aa, Homo sapiens
  Table A; Target 21868; HLA-A*23:01; DMRT1; ENSG00000137090; CTA
QSVPQFFTF

SEQ ID NO: 21869 - protein, 9 aa, Homo sapiens
  Table A; Target 21869; HLA-A*24:02; DMRT1; ENSG00000137090; CTA
QSVPQFFTF

SEQ ID NO: 21870 - protein, 9 aa, Homo sapiens
  Table A; Target 21870; HLA-A*25:01; DMRT1; ENSG00000137090; CTA
QSVPQFFTF

SEQ ID NO: 21871 - protein, 9 aa, Homo sapiens
  Table A; Target 21871; HLA-B*57:01; DMRT1; ENSG00000137090; CTA
QSVPQFFTF

SEQ ID NO: 21872 - protein, 9 aa, Homo sapiens
  Table A; Target 21872; HLA-B*58:01; DMRT1; ENSG00000137090; CTA
QSVPQFFTF

SEQ ID NO: 21873 - protein, 9 aa, Homo sapiens
  Table A; Target 21873; HLA-C*02:02; DMRT1; ENSG00000137090; CTA
QSVPQFFTF

SEQ ID NO: 21874 - protein, 10 aa, Homo sapiens
  Table A; Target 21874; HLA-A*30:01; DMRT1; ENSG00000137090; CTA
RENNGSNPCL

SEQ ID NO: 21875 - protein, 10 aa, Homo sapiens
  Table A; Target 21875; HLA-B*40:01; DMRT1; ENSG00000137090; CTA
RENNGSNPCL

SEQ ID NO: 21876 - protein, 10 aa, Homo sapiens
  Table A; Target 21876; HLA-B*40:02; DMRT1; ENSG00000137090; CTA
RENNGSNPCL

SEQ ID NO: 21877 - protein, 10 aa, Homo sapiens
  Table A; Target 21877; HLA-B*44:02; DMRT1; ENSG00000137090; CTA
RENNGSNPCL

SEQ ID NO: 21878 - protein, 10 aa, Homo sapiens
  Table A; Target 21878; HLA-B*44:03; DMRT1; ENSG00000137090; CTA
RENNGSNPCL

SEQ ID NO: 21879 - protein, 11 aa, Homo sapiens
  Table A; Target 21879; HLA-B*40:01; DMRT1; ENSG00000137090; CTA
RENNGSNPCLM

SEQ ID NO: 21880 - protein, 10 aa, Homo sapiens
  Table A; Target 21880; HLA-A*02:01; DMRT1; ENSG00000137090; CTA
RMVIQDIPAV

SEQ ID NO: 21881 - protein, 9 aa, Homo sapiens
  Table A; Target 21881; HLA-B*13:02; DMRT1; ENSG00000137090; CTA
RQRVMAAQV

SEQ ID NO: 21882 - protein, 9 aa, Homo sapiens
  Table A; Target 21882; HLA-A*02:04; DMRT1; ENSG00000137090; CTA
RVMAAQVAL

SEQ ID NO: 21883 - protein, 9 aa, Homo sapiens
  Table A; Target 21883; HLA-A*03:01; DMRT1; ENSG00000137090; CTA
RVMAAQVAL

SEQ ID NO: 21884 - protein, 9 aa, Homo sapiens
  Table A; Target 21884; HLA-A*03:02; DMRT1; ENSG00000137090; CTA
RVMAAQVAL

SEQ ID NO: 21885 - protein, 9 aa, Homo sapiens
  Table A; Target 21885; HLA-A*11:01; DMRT1; ENSG00000137090; CTA
RVMAAQVAL

SEQ ID NO: 21886 - protein, 9 aa, Homo sapiens
  Table A; Target 21886; HLA-A*23:01; DMRT1; ENSG00000137090; CTA
RVMAAQVAL

SEQ ID NO: 21887 - protein, 9 aa, Homo sapiens
  Table A; Target 21887; HLA-A*31:01; DMRT1; ENSG00000137090; CTA
RVMAAQVAL

SEQ ID NO: 21888 - protein, 9 aa, Homo sapiens
  Table A; Target 21888; HLA-A*32:01; DMRT1; ENSG00000137090; CTA
RVMAAQVAL

SEQ ID NO: 21889 - protein, 9 aa, Homo sapiens
  Table A; Target 21889; HLA-B*07:02; DMRT1; ENSG00000137090; CTA
RVMAAQVAL

SEQ ID NO: 21890 - protein, 9 aa, Homo sapiens
  Table A; Target 21890; HLA-B*08:01; DMRT1; ENSG00000137090; CTA
RVMAAQVAL

SEQ ID NO: 21891 - protein, 9 aa, Homo sapiens
  Table A; Target 21891; HLA-B*13:02; DMRT1; ENSG00000137090; CTA
RVMAAQVAL

SEQ ID NO: 21892 - protein, 9 aa, Homo sapiens
  Table A; Target 21892; HLA-B*15:01; DMRT1; ENSG00000137090; CTA
RVMAAQVAL

SEQ ID NO: 21893 - protein, 9 aa, Homo sapiens
  Table A; Target 21893; HLA-B*15:03; DMRT1; ENSG00000137090; CTA
RVMAAQVAL

SEQ ID NO: 21894 - protein, 9 aa, Homo sapiens
  Table A; Target 21894; HLA-B*46:01; DMRT1; ENSG00000137090; CTA
RVMAAQVAL

SEQ ID NO: 21895 - protein, 9 aa, Homo sapiens
  Table A; Target 21895; HLA-B*56:01; DMRT1; ENSG00000137090; CTA
RVMAAQVAL

SEQ ID NO: 21896 - protein, 9 aa, Homo sapiens
  Table A; Target 21896; HLA-B*58:01; DMRT1; ENSG00000137090; CTA
RVMAAQVAL

SEQ ID NO: 21897 - protein, 9 aa, Homo sapiens
  Table A; Target 21897; HLA-C*01:02; DMRT1; ENSG00000137090; CTA
RVMAAQVAL

SEQ ID NO: 21898 - protein, 9 aa, Homo sapiens
  Table A; Target 21898; HLA-C*03:03; DMRT1; ENSG00000137090; CTA
RVMAAQVAL

SEQ ID NO: 21899 - protein, 9 aa, Homo sapiens
  Table A; Target 21899; HLA-C*03:04; DMRT1; ENSG00000137090; CTA
RVMAAQVAL

SEQ ID NO: 21900 - protein, 9 aa, Homo sapiens
  Table A; Target 21900; HLA-C*07:02; DMRT1; ENSG00000137090; CTA
RVMAAQVAL

SEQ ID NO: 21901 - protein, 9 aa, Homo sapiens
  Table A; Target 21901; HLA-C*14:02; DMRT1; ENSG00000137090; CTA
RVMAAQVAL

SEQ ID NO: 21902 - protein, 10 aa, Homo sapiens
  Table A; Target 21902; HLA-A*03:01; DMRT1; ENSG00000137090; CTA
RVMAAQVALR

SEQ ID NO: 21903 - protein, 10 aa, Homo sapiens
  Table A; Target 21903; HLA-A*03:02; DMRT1; ENSG00000137090; CTA
RVMAAQVALR

SEQ ID NO: 21904 - protein, 10 aa, Homo sapiens
  Table A; Target 21904; HLA-A*11:01; DMRT1; ENSG00000137090; CTA
RVMAAQVALR

SEQ ID NO: 21905 - protein, 10 aa, Homo sapiens
  Table A; Target 21905; HLA-A*31:01; DMRT1; ENSG00000137090; CTA
RVMAAQVALR

SEQ ID NO: 21906 - protein, 10 aa, Homo sapiens
  Table A; Target 21906; HLA-A*33:03; DMRT1; ENSG00000137090; CTA
RVMAAQVALR

SEQ ID NO: 21907 - protein, 10 aa, Homo sapiens
  Table A; Target 21907; HLA-A*68:01; DMRT1; ENSG00000137090; CTA
RVMAAQVALR

SEQ ID NO: 21908 - protein, 10 aa, Homo sapiens
  Table A; Target 21908; HLA-B*27:02; DMRT1; ENSG00000137090; CTA
RVMAAQVALR

SEQ ID NO: 21909 - protein, 10 aa, Homo sapiens
  Table A; Target 21909; HLA-B*57:01; DMRT1; ENSG00000137090; CTA
RVMAAQVALR

SEQ ID NO: 21910 - protein, 10 aa, Homo sapiens
  Table A; Target 21910; HLA-C*07:06; DMRT1; ENSG00000137090; CTA
RVMAAQVALR

SEQ ID NO: 21911 - protein, 11 aa, Homo sapiens
  Table A; Target 21911; HLA-A*03:01; DMRT1; ENSG00000137090; CTA
RVMAAQVALRR

SEQ ID NO: 21912 - protein, 11 aa, Homo sapiens
  Table A; Target 21912; HLA-A*31:01; DMRT1; ENSG00000137090; CTA
RVMAAQVALRR

SEQ ID NO: 21913 - protein, 9 aa, Homo sapiens
  Table A; Target 21913; HLA-A*11:01; DMRT1; ENSG00000137090; CTA
SAAELLVKR

SEQ ID NO: 21914 - protein, 9 aa, Homo sapiens
  Table A; Target 21914; HLA-A*26:01; DMRT1; ENSG00000137090; CTA
SAAELLVKR

SEQ ID NO: 21915 - protein, 9 aa, Homo sapiens
  Table A; Target 21915; HLA-A*31:01; DMRT1; ENSG00000137090; CTA
SAAELLVKR

SEQ ID NO: 21916 - protein, 9 aa, Homo sapiens
  Table A; Target 21916; HLA-A*33:01; DMRT1; ENSG00000137090; CTA
SAAELLVKR

SEQ ID NO: 21917 - protein, 9 aa, Homo sapiens
  Table A; Target 21917; HLA-A*33:03; DMRT1; ENSG00000137090; CTA
SAAELLVKR

SEQ ID NO: 21918 - protein, 9 aa, Homo sapiens
  Table A; Target 21918; HLA-A*68:02; DMRT1; ENSG00000137090; CTA
SAAELLVKR

SEQ ID NO: 21919 - protein, 9 aa, Homo sapiens
  Table A; Target 21919; HLA-C*02:02; DMRT1; ENSG00000137090; CTA
SAAELLVKR

SEQ ID NO: 21920 - protein, 9 aa, Homo sapiens
  Table A; Target 21920; HLA-C*07:06; DMRT1; ENSG00000137090; CTA
SAAELLVKR

SEQ ID NO: 21921 - protein, 9 aa, Homo sapiens
  Table A; Target 21921; HLA-C*16:02; DMRT1; ENSG00000137090; CTA
SAAELLVKR

SEQ ID NO: 21922 - protein, 10 aa, Homo sapiens
  Table A; Target 21922; HLA-A*68:01; DMRT1; ENSG00000137090; CTA
SASGEVGNPL

SEQ ID NO: 21923 - protein, 10 aa, Homo sapiens
  Table A; Target 21923; HLA-B*07:02; DMRT1; ENSG00000137090; CTA
SASGEVGNPL

SEQ ID NO: 21924 - protein, 10 aa, Homo sapiens
  Table A; Target 21924; HLA-B*27:05; DMRT1; ENSG00000137090; CTA
SASGEVGNPL

SEQ ID NO: 21925 - protein, 10 aa, Homo sapiens
  Table A; Target 21925; HLA-B*35:03; DMRT1; ENSG00000137090; CTA
SASGEVGNPL

SEQ ID NO: 21926 - protein, 10 aa, Homo sapiens
  Table A; Target 21926; HLA-B*39:01; DMRT1; ENSG00000137090; CTA
SASGEVGNPL

SEQ ID NO: 21927 - protein, 10 aa, Homo sapiens
  Table A; Target 21927; HLA-B*40:01; DMRT1; ENSG00000137090; CTA
SASGEVGNPL

SEQ ID NO: 21928 - protein, 10 aa, Homo sapiens
  Table A; Target 21928; HLA-C*01:02; DMRT1; ENSG00000137090; CTA
SASGEVGNPL

SEQ ID NO: 21929 - protein, 10 aa, Homo sapiens
  Table A; Target 21929; HLA-C*03:03; DMRT1; ENSG00000137090; CTA
SASGEVGNPL

SEQ ID NO: 21930 - protein, 10 aa, Homo sapiens
  Table A; Target 21930; HLA-C*03:04; DMRT1; ENSG00000137090; CTA
SASGEVGNPL

SEQ ID NO: 21931 - protein, 10 aa, Homo sapiens
  Table A; Target 21931; HLA-C*05:01; DMRT1; ENSG00000137090; CTA
SASGEVGNPL

SEQ ID NO: 21932 - protein, 10 aa, Homo sapiens
  Table A; Target 21932; HLA-C*07:04; DMRT1; ENSG00000137090; CTA
SASGEVGNPL

SEQ ID NO: 21933 - protein, 10 aa, Homo sapiens
  Table A; Target 21933; HLA-C*07:06; DMRT1; ENSG00000137090; CTA
SASGEVGNPL

SEQ ID NO: 21934 - protein, 10 aa, Homo sapiens
  Table A; Target 21934; HLA-C*16:02; DMRT1; ENSG00000137090; CTA
SASGEVGNPL

SEQ ID NO: 21935 - protein, 9 aa, Homo sapiens
  Table A; Target 21935; HLA-B*37:01; DMRT1; ENSG00000137090; CTA
SDSTYYSSF

SEQ ID NO: 21936 - protein, 9 aa, Homo sapiens
  Table A; Target 21936; HLA-A*30:01; DMRT1; ENSG00000137090; CTA
SEAPHAPGV

SEQ ID NO: 21937 - protein, 9 aa, Homo sapiens
  Table A; Target 21937; HLA-B*13:02; DMRT1; ENSG00000137090; CTA
SEAPHAPGV

SEQ ID NO: 21938 - protein, 9 aa, Homo sapiens
  Table A; Target 21938; HLA-B*37:01; DMRT1; ENSG00000137090; CTA
SEAPHAPGV

SEQ ID NO: 21939 - protein, 9 aa, Homo sapiens
  Table A; Target 21939; HLA-B*40:01; DMRT1; ENSG00000137090; CTA
SEAPHAPGV

SEQ ID NO: 21940 - protein, 9 aa, Homo sapiens
  Table A; Target 21940; HLA-B*44:02; DMRT1; ENSG00000137090; CTA
SEAPHAPGV

SEQ ID NO: 21941 - protein, 9 aa, Homo sapiens
  Table A; Target 21941; HLA-B*44:03; DMRT1; ENSG00000137090; CTA
SEAPHAPGV

SEQ ID NO: 21942 - protein, 9 aa, Homo sapiens
  Table A; Target 21942; HLA-B*49:01; DMRT1; ENSG00000137090; CTA
SEAPHAPGV

SEQ ID NO: 21943 - protein, 9 aa, Homo sapiens
  Table A; Target 21943; HLA-C*02:02; DMRT1; ENSG00000137090; CTA
SEAPHAPGV

SEQ ID NO: 21944 - protein, 8 aa, Homo sapiens
  Table A; Target 21944; HLA-B*49:01; DMRT1; ENSG00000137090; CTA
SEPSSFTV

SEQ ID NO: 21945 - protein, 8 aa, Homo sapiens
  Table A; Target 21945; HLA-A*23:01; DMRT1; ENSG00000137090; CTA
SFTVTPVI

SEQ ID NO: 21946 - protein, 10 aa, Homo sapiens
  Table A; Target 21946; HLA-A*29:02; DMRT1; ENSG00000137090; CTA
SFYQPSLFPY

SEQ ID NO: 21947 - protein, 11 aa, Homo sapiens
  Table A; Target 21947; HLA-A*29:02; DMRT1; ENSG00000137090; CTA
SFYQPSLFPYY

SEQ ID NO: 21948 - protein, 11 aa, Homo sapiens
  Table A; Target 21948; HLA-A*30:02; DMRT1; ENSG00000137090; CTA
SFYQPSLFPYY

SEQ ID NO: 21949 - protein, 11 aa, Homo sapiens
  Table A; Target 21949; HLA-C*07:04; DMRT1; ENSG00000137090; CTA
SGALVGAASGS

SEQ ID NO: 21950 - protein, 8 aa, Homo sapiens
  Table A; Target 21950; HLA-C*01:02; DMRT1; ENSG00000137090; CTA
SGEVGNPL

SEQ ID NO: 21951 - protein, 8 aa, Homo sapiens
  Table A; Target 21951; HLA-C*03:04; DMRT1; ENSG00000137090; CTA
SGEVGNPL

SEQ ID NO: 21952 - protein, 8 aa, Homo sapiens
  Table A; Target 21952; HLA-C*05:01; DMRT1; ENSG00000137090; CTA
SGEVGNPL

SEQ ID NO: 21953 - protein, 10 aa, Homo sapiens
  Table A; Target 21953; HLA-C*07:06; DMRT1; ENSG00000137090; CTA
SGSSAGGSSR

SEQ ID NO: 21954 - protein, 9 aa, Homo sapiens
  Table A; Target 21954; HLA-B*54:01; DMRT1; ENSG00000137090; CTA
SGTSQPPPA

SEQ ID NO: 21955 - protein, 9 aa, Homo sapiens
  Table A; Target 21955; HLA-A*02:01; DMRT1; ENSG00000137090; CTA
SLFPYYNNL

SEQ ID NO: 21956 - protein, 9 aa, Homo sapiens
  Table A; Target 21956; HLA-A*02:03; DMRT1; ENSG00000137090; CTA
SLFPYYNNL

SEQ ID NO: 21957 - protein, 9 aa, Homo sapiens
  Table A; Target 21957; HLA-A*02:04; DMRT1; ENSG00000137090; CTA
SLFPYYNNL

SEQ ID NO: 21958 - protein, 9 aa, Homo sapiens
  Table A; Target 21958; HLA-A*02:07; DMRT1; ENSG00000137090; CTA
SLFPYYNNL

SEQ ID NO: 21959 - protein, 10 aa, Homo sapiens
  Table A; Target 21959; HLA-A*29:02; DMRT1; ENSG00000137090; CTA
SLFPYYNNLY

SEQ ID NO: 21960 - protein, 10 aa, Homo sapiens
  Table A; Target 21960; HLA-A*30:02; DMRT1; ENSG00000137090; CTA
SLFPYYNNLY

SEQ ID NO: 21961 - protein, 9 aa, Homo sapiens
  Table A; Target 21961; HLA-A*30:02; DMRT1; ENSG00000137090; CTA
SLRGLPGPY

SEQ ID NO: 21962 - protein, 9 aa, Homo sapiens
  Table A; Target 21962; HLA-B*46:01; DMRT1; ENSG00000137090; CTA
SLRGLPGPY

SEQ ID NO: 21963 - protein, 10 aa, Homo sapiens
  Table A; Target 21963; HLA-A*02:03; DMRT1; ENSG00000137090; CTA
SLRGLPGPYV

SEQ ID NO: 21964 - protein, 11 aa, Homo sapiens
  Table A; Target 21964; HLA-A*03:02; DMRT1; ENSG00000137090; CTA
SLSSSSPISNK

SEQ ID NO: 21965 - protein, 11 aa, Homo sapiens
  Table A; Target 21965; HLA-A*11:01; DMRT1; ENSG00000137090; CTA
SLSSSSPISNK

SEQ ID NO: 21966 - protein, 9 aa, Homo sapiens
  Table A; Target 21966; HLA-B*07:02; DMRT1; ENSG00000137090; CTA
SPISNKSTK

SEQ ID NO: 21967 - protein, 9 aa, Homo sapiens
  Table A; Target 21967; HLA-B*56:01; DMRT1; ENSG00000137090; CTA
SPISNKSTK

SEQ ID NO: 21968 - protein, 9 aa, Homo sapiens
  Table A; Target 21968; HLA-C*07:02; DMRT1; ENSG00000137090; CTA
SPISNKSTK

SEQ ID NO: 21969 - protein, 9 aa, Homo sapiens
  Table A; Target 21969; HLA-C*07:06; DMRT1; ENSG00000137090; CTA
SPISNKSTK

SEQ ID NO: 21970 - protein, 10 aa, Homo sapiens
  Table A; Target 21970; HLA-B*07:02; DMRT1; ENSG00000137090; CTA
SPISNKSTKA

SEQ ID NO: 21971 - protein, 10 aa, Homo sapiens
  Table A; Target 21971; HLA-B*54:01; DMRT1; ENSG00000137090; CTA
SPISNKSTKA

SEQ ID NO: 21972 - protein, 10 aa, Homo sapiens
  Table A; Target 21972; HLA-B*55:01; DMRT1; ENSG00000137090; CTA
SPISNKSTKA

SEQ ID NO: 21973 - protein, 10 aa, Homo sapiens
  Table A; Target 21973; HLA-B*56:01; DMRT1; ENSG00000137090; CTA
SPISNKSTKA

SEQ ID NO: 21974 - protein, 10 aa, Homo sapiens
  Table A; Target 21974; HLA-C*07:02; DMRT1; ENSG00000137090; CTA
SPISNKSTKA

SEQ ID NO: 21975 - protein, 11 aa, Homo sapiens
  Table A; Target 21975; HLA-B*07:02; DMRT1; ENSG00000137090; CTA
SPISNKSTKAV

SEQ ID NO: 21976 - protein, 11 aa, Homo sapiens
  Table A; Target 21976; HLA-B*56:01; DMRT1; ENSG00000137090; CTA
SPISNKSTKAV

SEQ ID NO: 21977 - protein, 11 aa, Homo sapiens
  Table A; Target 21977; HLA-C*07:02; DMRT1; ENSG00000137090; CTA
SPISNKSTKAV

SEQ ID NO: 21978 - protein, 10 aa, Homo sapiens
  Table A; Target 21978; HLA-B*07:02; DMRT1; ENSG00000137090; CTA
SPPSSQDSGL

SEQ ID NO: 21979 - protein, 10 aa, Homo sapiens
  Table A; Target 21979; HLA-B*07:02; DMRT1; ENSG00000137090; CTA
SPVKNSLRGL

SEQ ID NO: 21980 - protein, 9 aa, Homo sapiens
  Table A; Target 21980; HLA-A*02:01; DMRT1; ENSG00000137090; CTA
SQDSGLVSL

SEQ ID NO: 21981 - protein, 9 aa, Homo sapiens
  Table A; Target 21981; HLA-A*02:07; DMRT1; ENSG00000137090; CTA
SQDSGLVSL

SEQ ID NO: 21982 - protein, 9 aa, Homo sapiens
  Table A; Target 21982; HLA-B*13:02; DMRT1; ENSG00000137090; CTA
SQDSGLVSL

SEQ ID NO: 21983 - protein, 9 aa, Homo sapiens
  Table A; Target 21983; HLA-B*27:05; DMRT1; ENSG00000137090; CTA
SQDSGLVSL

SEQ ID NO: 21984 - protein, 9 aa, Homo sapiens
  Table A; Target 21984; HLA-B*35:03; DMRT1; ENSG00000137090; CTA
SQDSGLVSL

SEQ ID NO: 21985 - protein, 9 aa, Homo sapiens
  Table A; Target 21985; HLA-B*38:01; DMRT1; ENSG00000137090; CTA
SQDSGLVSL

SEQ ID NO: 21986 - protein, 9 aa, Homo sapiens
  Table A; Target 21986; HLA-B*39:01; DMRT1; ENSG00000137090; CTA
SQDSGLVSL

SEQ ID NO: 21987 - protein, 9 aa, Homo sapiens
  Table A; Target 21987; HLA-B*40:01; DMRT1; ENSG00000137090; CTA
SQDSGLVSL

SEQ ID NO: 21988 - protein, 9 aa, Homo sapiens
  Table A; Target 21988; HLA-C*05:01; DMRT1; ENSG00000137090; CTA
SQDSGLVSL

SEQ ID NO: 21989 - protein, 9 aa, Homo sapiens
  Table A; Target 21989; HLA-C*07:04; DMRT1; ENSG00000137090; CTA
SQDSGLVSL

SEQ ID NO: 21990 - protein, 8 aa, Homo sapiens
  Table A; Target 21990; HLA-A*30:02; DMRT1; ENSG00000137090; CTA
SQYRMHSY

SEQ ID NO: 21991 - protein, 8 aa, Homo sapiens
  Table A; Target 21991; HLA-A*32:01; DMRT1; ENSG00000137090; CTA
SQYRMHSY

SEQ ID NO: 21992 - protein, 8 aa, Homo sapiens
  Table A; Target 21992; HLA-B*15:01; DMRT1; ENSG00000137090; CTA
SQYRMHSY

SEQ ID NO: 21993 - protein, 8 aa, Homo sapiens
  Table A; Target 21993; HLA-B*15:03; DMRT1; ENSG00000137090; CTA
SQYRMHSY

SEQ ID NO: 21994 - protein, 9 aa, Homo sapiens
  Table A; Target 21994; HLA-A*30:02; DMRT1; ENSG00000137090; CTA
SQYRMHSYY

SEQ ID NO: 21995 - protein, 9 aa, Homo sapiens
  Table A; Target 21995; HLA-B*13:02; DMRT1; ENSG00000137090; CTA
SSFTVTPVI

SEQ ID NO: 21996 - protein, 9 aa, Homo sapiens
  Table A; Target 21996; HLA-B*58:01; DMRT1; ENSG00000137090; CTA
SSFTVTPVI

SEQ ID NO: 21997 - protein, 8 aa, Homo sapiens
  Table A; Target 21997; HLA-C*03:03; DMRT1; ENSG00000137090; CTA
SSFYQPSL

SEQ ID NO: 21998 - protein, 8 aa, Homo sapiens
  Table A; Target 21998; HLA-C*03:04; DMRT1; ENSG00000137090; CTA
SSFYQPSL

SEQ ID NO: 21999 - protein, 9 aa, Homo sapiens
  Table A; Target 21999; HLA-B*57:01; DMRT1; ENSG00000137090; CTA
SSFYQPSLF

SEQ ID NO: 22000 - protein, 9 aa, Homo sapiens
  Table A; Target 22000; HLA-C*02:02; DMRT1; ENSG00000137090; CTA
SSFYQPSLF

SEQ ID NO: 22001 - protein, 9 aa, Homo sapiens
  Table A; Target 22001; HLA-C*12:03; DMRT1; ENSG00000137090; CTA
SSFYQPSLF

SEQ ID NO: 22002 - protein, 9 aa, Homo sapiens
  Table A; Target 22002; HLA-C*01:02; DMRT1; ENSG00000137090; CTA
SSPISNKST

SEQ ID NO: 22003 - protein, 9 aa, Homo sapiens
  Table A; Target 22003; HLA-A*30:02; DMRT1; ENSG00000137090; CTA
SSQYRMHSY

SEQ ID NO: 22004 - protein, 9 aa, Homo sapiens
  Table A; Target 22004; HLA-A*32:01; DMRT1; ENSG00000137090; CTA
SSQYRMHSY

SEQ ID NO: 22005 - protein, 9 aa, Homo sapiens
  Table A; Target 22005; HLA-C*16:01; DMRT1; ENSG00000137090; CTA
SSQYRMHSY

SEQ ID NO: 22006 - protein, 8 aa, Homo sapiens
  Table A; Target 22006; HLA-A*03:02; DMRT1; ENSG00000137090; CTA
SSSPISNK

SEQ ID NO: 22007 - protein, 8 aa, Homo sapiens
  Table A; Target 22007; HLA-A*11:01; DMRT1; ENSG00000137090; CTA
SSSPISNK

SEQ ID NO: 22008 - protein, 11 aa, Homo sapiens
  Table A; Target 22008; HLA-A*03:01; DMRT1; ENSG00000137090; CTA
SSSPISNKSTK

SEQ ID NO: 22009 - protein, 11 aa, Homo sapiens
  Table A; Target 22009; HLA-A*03:02; DMRT1; ENSG00000137090; CTA
SSSPISNKSTK

SEQ ID NO: 22010 - protein, 11 aa, Homo sapiens
  Table A; Target 22010; HLA-A*11:01; DMRT1; ENSG00000137090; CTA
SSSPISNKSTK

SEQ ID NO: 22011 - protein, 11 aa, Homo sapiens
  Table A; Target 22011; HLA-A*31:01; DMRT1; ENSG00000137090; CTA
SSSPISNKSTK

SEQ ID NO: 22012 - protein, 11 aa, Homo sapiens
  Table A; Target 22012; HLA-A*68:01; DMRT1; ENSG00000137090; CTA
SSSPISNKSTK

SEQ ID NO: 22013 - protein, 9 aa, Homo sapiens
  Table A; Target 22013; HLA-A*03:02; DMRT1; ENSG00000137090; CTA
SSSSPISNK

SEQ ID NO: 22014 - protein, 9 aa, Homo sapiens
  Table A; Target 22014; HLA-A*31:01; DMRT1; ENSG00000137090; CTA
SSSSPISNK

SEQ ID NO: 22015 - protein, 9 aa, Homo sapiens
  Table A; Target 22015; HLA-A*33:03; DMRT1; ENSG00000137090; CTA
SSSSPISNK

SEQ ID NO: 22016 - protein, 9 aa, Homo sapiens
  Table A; Target 22016; HLA-A*68:01; DMRT1; ENSG00000137090; CTA
SSSSPISNK

SEQ ID NO: 22017 - protein, 9 aa, Homo sapiens
  Table A; Target 22017; HLA-B*27:02; DMRT1; ENSG00000137090; CTA
SSSSPISNK

SEQ ID NO: 22018 - protein, 9 aa, Homo sapiens
  Table A; Target 22018; HLA-B*27:05; DMRT1; ENSG00000137090; CTA
SSSSPISNK

SEQ ID NO: 22019 - protein, 9 aa, Homo sapiens
  Table A; Target 22019; HLA-C*06:02; DMRT1; ENSG00000137090; CTA
SSSSPISNK

SEQ ID NO: 22020 - protein, 9 aa, Homo sapiens
  Table A; Target 22020; HLA-C*07:06; DMRT1; ENSG00000137090; CTA
SSSSPISNK

SEQ ID NO: 22021 - protein, 9 aa, Homo sapiens
  Table A; Target 22021; HLA-A*26:01; DMRT1; ENSG00000137090; CTA
SVFSPPSSQ

SEQ ID NO: 22022 - protein, 9 aa, Homo sapiens
  Table A; Target 22022; HLA-A*31:01; DMRT1; ENSG00000137090; CTA
SVFSPPSSQ

SEQ ID NO: 22023 - protein, 10 aa, Homo sapiens
  Table A; Target 22023; HLA-A*23:01; DMRT1; ENSG00000137090; CTA
SYLGQSVPQF

SEQ ID NO: 22024 - protein, 10 aa, Homo sapiens
  Table A; Target 22024; HLA-A*24:02; DMRT1; ENSG00000137090; CTA
SYLGQSVPQF

SEQ ID NO: 22025 - protein, 11 aa, Homo sapiens
  Table A; Target 22025; HLA-A*23:01; DMRT1; ENSG00000137090; CTA
SYLGQSVPQFF

SEQ ID NO: 22026 - protein, 11 aa, Homo sapiens
  Table A; Target 22026; HLA-A*24:02; DMRT1; ENSG00000137090; CTA
SYLGQSVPQFF

SEQ ID NO: 22027 - protein, 9 aa, Homo sapiens
  Table A; Target 22027; HLA-C*01:02; DMRT1; ENSG00000137090; CTA
SYPEARASV

SEQ ID NO: 22028 - protein, 9 aa, Homo sapiens
  Table A; Target 22028; HLA-C*14:02; DMRT1; ENSG00000137090; CTA
SYPEARASV

SEQ ID NO: 22029 - protein, 10 aa, Homo sapiens
  Table A; Target 22029; HLA-A*23:01; DMRT1; ENSG00000137090; CTA
SYPEARASVF

SEQ ID NO: 22030 - protein, 10 aa, Homo sapiens
  Table A; Target 22030; HLA-A*24:02; DMRT1; ENSG00000137090; CTA
SYPEARASVF

SEQ ID NO: 22031 - protein, 10 aa, Homo sapiens
  Table A; Target 22031; HLA-C*01:02; DMRT1; ENSG00000137090; CTA
SYPEARASVF

SEQ ID NO: 22032 - protein, 10 aa, Homo sapiens
  Table A; Target 22032; HLA-C*14:02; DMRT1; ENSG00000137090; CTA
SYPEARASVF

SEQ ID NO: 22033 - protein, 8 aa, Homo sapiens
  Table A; Target 22033; HLA-A*23:01; DMRT1; ENSG00000137090; CTA
SYYPPPSY

SEQ ID NO: 22034 - protein, 8 aa, Homo sapiens
  Table A; Target 22034; HLA-A*29:02; DMRT1; ENSG00000137090; CTA
SYYPPPSY

SEQ ID NO: 22035 - protein, 8 aa, Homo sapiens
  Table A; Target 22035; HLA-A*30:02; DMRT1; ENSG00000137090; CTA
SYYPPPSY

SEQ ID NO: 22036 - protein, 8 aa, Homo sapiens
  Table A; Target 22036; HLA-A*32:01; DMRT1; ENSG00000137090; CTA
SYYPPPSY

SEQ ID NO: 22037 - protein, 8 aa, Homo sapiens
  Table A; Target 22037; HLA-B*15:03; DMRT1; ENSG00000137090; CTA
SYYPPPSY

SEQ ID NO: 22038 - protein, 8 aa, Homo sapiens
  Table A; Target 22038; HLA-B*39:01; DMRT1; ENSG00000137090; CTA
SYYPPPSY

SEQ ID NO: 22039 - protein, 8 aa, Homo sapiens
  Table A; Target 22039; HLA-C*14:02; DMRT1; ENSG00000137090; CTA
SYYPPPSY

SEQ ID NO: 22040 - protein, 9 aa, Homo sapiens
  Table A; Target 22040; HLA-A*23:01; DMRT1; ENSG00000137090; CTA
SYYPPPSYL

SEQ ID NO: 22041 - protein, 9 aa, Homo sapiens
  Table A; Target 22041; HLA-A*24:02; DMRT1; ENSG00000137090; CTA
SYYPPPSYL

SEQ ID NO: 22042 - protein, 9 aa, Homo sapiens
  Table A; Target 22042; HLA-A*29:02; DMRT1; ENSG00000137090; CTA
SYYPPPSYL

SEQ ID NO: 22043 - protein, 9 aa, Homo sapiens
  Table A; Target 22043; HLA-A*30:02; DMRT1; ENSG00000137090; CTA
SYYPPPSYL

SEQ ID NO: 22044 - protein, 9 aa, Homo sapiens
  Table A; Target 22044; HLA-A*31:01; DMRT1; ENSG00000137090; CTA
SYYPPPSYL

SEQ ID NO: 22045 - protein, 9 aa, Homo sapiens
  Table A; Target 22045; HLA-B*07:02; DMRT1; ENSG00000137090; CTA
SYYPPPSYL

SEQ ID NO: 22046 - protein, 9 aa, Homo sapiens
  Table A; Target 22046; HLA-C*04:01; DMRT1; ENSG00000137090; CTA
SYYPPPSYL

SEQ ID NO: 22047 - protein, 9 aa, Homo sapiens
  Table A; Target 22047; HLA-C*12:03; DMRT1; ENSG00000137090; CTA
SYYPPPSYL

SEQ ID NO: 22048 - protein, 9 aa, Homo sapiens
  Table A; Target 22048; HLA-C*14:02; DMRT1; ENSG00000137090; CTA
SYYPPPSYL

SEQ ID NO: 22049 - protein, 9 aa, Homo sapiens
  Table A; Target 22049; HLA-C*03:04; DMRT1; ENSG00000137090; CTA
TAASEGRMV

SEQ ID NO: 22050 - protein, 9 aa, Homo sapiens
  Table A; Target 22050; HLA-C*16:01; DMRT1; ENSG00000137090; CTA
TAASEGRMV

SEQ ID NO: 22051 - protein, 9 aa, Homo sapiens
  Table A; Target 22051; HLA-C*16:02; DMRT1; ENSG00000137090; CTA
TAASEGRMV

SEQ ID NO: 22052 - protein, 10 aa, Homo sapiens
  Table A; Target 22052; HLA-C*16:01; DMRT1; ENSG00000137090; CTA
TAASEGRMVI

SEQ ID NO: 22053 - protein, 11 aa, Homo sapiens
  Table A; Target 22053; HLA-C*06:02; DMRT1; ENSG00000137090; CTA
TECSGTSQPPP

SEQ ID NO: 22054 - protein, 8 aa, Homo sapiens
  Table A; Target 22054; HLA-C*14:02; DMRT1; ENSG00000137090; CTA
TFEDAPSY

SEQ ID NO: 22055 - protein, 10 aa, Homo sapiens
  Table A; Target 22055; HLA-A*01:01; DMRT1; ENSG00000137090; CTA
TPDLVSDSTY

SEQ ID NO: 22056 - protein, 10 aa, Homo sapiens
  Table A; Target 22056; HLA-B*35:01; DMRT1; ENSG00000137090; CTA
TPDLVSDSTY

SEQ ID NO: 22057 - protein, 10 aa, Homo sapiens
  Table A; Target 22057; HLA-B*55:01; DMRT1; ENSG00000137090; CTA
TPDLVSDSTY

SEQ ID NO: 22058 - protein, 10 aa, Homo sapiens
  Table A; Target 22058; HLA-C*03:03; DMRT1; ENSG00000137090; CTA
TPDLVSDSTY

SEQ ID NO: 22059 - protein, 11 aa, Homo sapiens
  Table A; Target 22059; HLA-A*01:01; DMRT1; ENSG00000137090; CTA
TPDLVSDSTYY

SEQ ID NO: 22060 - protein, 11 aa, Homo sapiens
  Table A; Target 22060; HLA-B*35:01; DMRT1; ENSG00000137090; CTA
TPDLVSDSTYY

SEQ ID NO: 22061 - protein, 11 aa, Homo sapiens
  Table A; Target 22061; HLA-B*55:01; DMRT1; ENSG00000137090; CTA
TPDLVSDSTYY

SEQ ID NO: 22062 - protein, 11 aa, Homo sapiens
  Table A; Target 22062; HLA-C*03:03; DMRT1; ENSG00000137090; CTA
TPDLVSDSTYY

SEQ ID NO: 22063 - protein, 9 aa, Homo sapiens
  Table A; Target 22063; HLA-A*02:03; DMRT1; ENSG00000137090; CTA
TSQPPPASV

SEQ ID NO: 22064 - protein, 9 aa, Homo sapiens
  Table A; Target 22064; HLA-A*32:01; DMRT1; ENSG00000137090; CTA
TSQPPPASV

SEQ ID NO: 22065 - protein, 9 aa, Homo sapiens
  Table A; Target 22065; HLA-B*46:01; DMRT1; ENSG00000137090; CTA
TSQPPPASV

SEQ ID NO: 22066 - protein, 9 aa, Homo sapiens
  Table A; Target 22066; HLA-B*56:01; DMRT1; ENSG00000137090; CTA
TSQPPPASV

SEQ ID NO: 22067 - protein, 9 aa, Homo sapiens
  Table A; Target 22067; HLA-C*01:02; DMRT1; ENSG00000137090; CTA
TSQPPPASV

SEQ ID NO: 22068 - protein, 9 aa, Homo sapiens
  Table A; Target 22068; HLA-C*03:03; DMRT1; ENSG00000137090; CTA
TSQPPPASV

SEQ ID NO: 22069 - protein, 9 aa, Homo sapiens
  Table A; Target 22069; HLA-C*03:04; DMRT1; ENSG00000137090; CTA
TSQPPPASV

SEQ ID NO: 22070 - protein, 9 aa, Homo sapiens
  Table A; Target 22070; HLA-C*05:01; DMRT1; ENSG00000137090; CTA
TSQPPPASV

SEQ ID NO: 22071 - protein, 9 aa, Homo sapiens
  Table A; Target 22071; HLA-C*06:02; DMRT1; ENSG00000137090; CTA
TSQPPPASV

SEQ ID NO: 22072 - protein, 9 aa, Homo sapiens
  Table A; Target 22072; HLA-C*12:03; DMRT1; ENSG00000137090; CTA
TSQPPPASV

SEQ ID NO: 22073 - protein, 9 aa, Homo sapiens
  Table A; Target 22073; HLA-C*16:02; DMRT1; ENSG00000137090; CTA
TSQPPPASV

SEQ ID NO: 22074 - protein, 10 aa, Homo sapiens
  Table A; Target 22074; HLA-B*27:05; DMRT1; ENSG00000137090; CTA
TVTPVIEEDE

SEQ ID NO: 22075 - protein, 8 aa, Homo sapiens
  Table A; Target 22075; HLA-B*49:01; DMRT1; ENSG00000137090; CTA
VENTPDLV

SEQ ID NO: 22076 - protein, 9 aa, Homo sapiens
  Table A; Target 22076; HLA-B*46:01; DMRT1; ENSG00000137090; CTA
VGAASGSSA

SEQ ID NO: 22077 - protein, 9 aa, Homo sapiens
  Table A; Target 22077; HLA-C*01:02; DMRT1; ENSG00000137090; CTA
VGAASGSSA

SEQ ID NO: 22078 - protein, 9 aa, Homo sapiens
  Table A; Target 22078; HLA-C*03:03; DMRT1; ENSG00000137090; CTA
VGAASGSSA

SEQ ID NO: 22079 - protein, 9 aa, Homo sapiens
  Table A; Target 22079; HLA-C*03:04; DMRT1; ENSG00000137090; CTA
VGAASGSSA

SEQ ID NO: 22080 - protein, 9 aa, Homo sapiens
  Table A; Target 22080; HLA-C*14:02; DMRT1; ENSG00000137090; CTA
VGAASGSSA

SEQ ID NO: 22081 - protein, 11 aa, Homo sapiens
  Table A; Target 22081; HLA-C*07:02; DMRT1; ENSG00000137090; CTA
VGAASGSSAGG

SEQ ID NO: 22082 - protein, 10 aa, Homo sapiens
  Table A; Target 22082; HLA-A*02:03; DMRT1; ENSG00000137090; CTA
VGNPLGGSPV

SEQ ID NO: 22083 - protein, 10 aa, Homo sapiens
  Table A; Target 22083; HLA-B*39:01; DMRT1; ENSG00000137090; CTA
VGNPLGGSPV

SEQ ID NO: 22084 - protein, 10 aa, Homo sapiens
  Table A; Target 22084; HLA-B*46:01; DMRT1; ENSG00000137090; CTA
VGNPLGGSPV

SEQ ID NO: 22085 - protein, 10 aa, Homo sapiens
  Table A; Target 22085; HLA-C*01:02; DMRT1; ENSG00000137090; CTA
VGNPLGGSPV

SEQ ID NO: 22086 - protein, 10 aa, Homo sapiens
  Table A; Target 22086; HLA-C*03:03; DMRT1; ENSG00000137090; CTA
VGNPLGGSPV

SEQ ID NO: 22087 - protein, 10 aa, Homo sapiens
  Table A; Target 22087; HLA-C*03:04; DMRT1; ENSG00000137090; CTA
VGNPLGGSPV

SEQ ID NO: 22088 - protein, 10 aa, Homo sapiens
  Table A; Target 22088; HLA-C*04:01; DMRT1; ENSG00000137090; CTA
VGNPLGGSPV

SEQ ID NO: 22089 - protein, 10 aa, Homo sapiens
  Table A; Target 22089; HLA-C*14:02; DMRT1; ENSG00000137090; CTA
VGNPLGGSPV

SEQ ID NO: 22090 - protein, 11 aa, Homo sapiens
  Table A; Target 22090; HLA-A*03:02; DMRT1; ENSG00000137090; CTA
VGNPLGGSPVK

SEQ ID NO: 22091 - protein, 11 aa, Homo sapiens
  Table A; Target 22091; HLA-A*11:01; DMRT1; ENSG00000137090; CTA
VGNPLGGSPVK

SEQ ID NO: 22092 - protein, 11 aa, Homo sapiens
  Table A; Target 22092; HLA-B*27:02; DMRT1; ENSG00000137090; CTA
VGNPLGGSPVK

SEQ ID NO: 22093 - protein, 11 aa, Homo sapiens
  Table A; Target 22093; HLA-B*27:05; DMRT1; ENSG00000137090; CTA
VGNPLGGSPVK

SEQ ID NO: 22094 - protein, 11 aa, Homo sapiens
  Table A; Target 22094; HLA-C*06:02; DMRT1; ENSG00000137090; CTA
VGNPLGGSPVK

SEQ ID NO: 22095 - protein, 8 aa, Homo sapiens
  Table A; Target 22095; HLA-A*02:01; DMRT1; ENSG00000137090; CTA
VIQDIPAV

SEQ ID NO: 22096 - protein, 8 aa, Homo sapiens
  Table A; Target 22096; HLA-A*02:04; DMRT1; ENSG00000137090; CTA
VIQDIPAV

SEQ ID NO: 22097 - protein, 8 aa, Homo sapiens
  Table A; Target 22097; HLA-B*13:02; DMRT1; ENSG00000137090; CTA
VIQDIPAV

SEQ ID NO: 22098 - protein, 9 aa, Homo sapiens
  Table A; Target 22098; HLA-A*02:03; DMRT1; ENSG00000137090; CTA
VIQDIPAVT

SEQ ID NO: 22099 - protein, 9 aa, Homo sapiens
  Table A; Target 22099; HLA-A*03:02; DMRT1; ENSG00000137090; CTA
VIQDIPAVT

SEQ ID NO: 22100 - protein, 9 aa, Homo sapiens
  Table A; Target 22100; HLA-A*32:01; DMRT1; ENSG00000137090; CTA
VIQDIPAVT

SEQ ID NO: 22101 - protein, 9 aa, Homo sapiens
  Table A; Target 22101; HLA-B*39:01; DMRT1; ENSG00000137090; CTA
VIQDIPAVT

SEQ ID NO: 22102 - protein, 9 aa, Homo sapiens
  Table A; Target 22102; HLA-C*12:03; DMRT1; ENSG00000137090; CTA
VIQDIPAVT

SEQ ID NO: 22103 - protein, 10 aa, Homo sapiens
  Table A; Target 22103; HLA-A*03:02; DMRT1; ENSG00000137090; CTA
VIQDIPAVTS

SEQ ID NO: 22104 - protein, 11 aa, Homo sapiens
  Table A; Target 22104; HLA-A*03:02; DMRT1; ENSG00000137090; CTA
VIQDIPAVTSR

SEQ ID NO: 22105 - protein, 11 aa, Homo sapiens
  Table A; Target 22105; HLA-A*11:01; DMRT1; ENSG00000137090; CTA
VIQDIPAVTSR

SEQ ID NO: 22106 - protein, 11 aa, Homo sapiens
  Table A; Target 22106; HLA-A*31:01; DMRT1; ENSG00000137090; CTA
VIQDIPAVTSR

SEQ ID NO: 22107 - protein, 11 aa, Homo sapiens
  Table A; Target 22107; HLA-A*33:01; DMRT1; ENSG00000137090; CTA
VIQDIPAVTSR

SEQ ID NO: 22108 - protein, 11 aa, Homo sapiens
  Table A; Target 22108; HLA-A*33:03; DMRT1; ENSG00000137090; CTA
VIQDIPAVTSR

SEQ ID NO: 22109 - protein, 11 aa, Homo sapiens
  Table A; Target 22109; HLA-A*68:01; DMRT1; ENSG00000137090; CTA
VIQDIPAVTSR

SEQ ID NO: 22110 - protein, 11 aa, Homo sapiens
  Table A; Target 22110; HLA-C*07:06; DMRT1; ENSG00000137090; CTA
VIQDIPAVTSR

SEQ ID NO: 22111 - protein, 8 aa, Homo sapiens
  Table A; Target 22111; HLA-B*37:01; DMRT1; ENSG00000137090; CTA
VMAAQVAL

SEQ ID NO: 22112 - protein, 9 aa, Homo sapiens
  Table A; Target 22112; HLA-A*02:03; DMRT1; ENSG00000137090; CTA
VMAAQVALR

SEQ ID NO: 22113 - protein, 9 aa, Homo sapiens
  Table A; Target 22113; HLA-A*03:01; DMRT1; ENSG00000137090; CTA
VMAAQVALR

SEQ ID NO: 22114 - protein, 9 aa, Homo sapiens
  Table A; Target 22114; HLA-A*03:02; DMRT1; ENSG00000137090; CTA
VMAAQVALR

SEQ ID NO: 22115 - protein, 9 aa, Homo sapiens
  Table A; Target 22115; HLA-A*31:01; DMRT1; ENSG00000137090; CTA
VMAAQVALR

SEQ ID NO: 22116 - protein, 9 aa, Homo sapiens
  Table A; Target 22116; HLA-A*33:01; DMRT1; ENSG00000137090; CTA
VMAAQVALR

SEQ ID NO: 22117 - protein, 9 aa, Homo sapiens
  Table A; Target 22117; HLA-A*33:03; DMRT1; ENSG00000137090; CTA
VMAAQVALR

SEQ ID NO: 22118 - protein, 9 aa, Homo sapiens
  Table A; Target 22118; HLA-A*68:01; DMRT1; ENSG00000137090; CTA
VMAAQVALR

SEQ ID NO: 22119 - protein, 9 aa, Homo sapiens
  Table A; Target 22119; HLA-B*27:05; DMRT1; ENSG00000137090; CTA
VMAAQVALR

SEQ ID NO: 22120 - protein, 9 aa, Homo sapiens
  Table A; Target 22120; HLA-C*07:06; DMRT1; ENSG00000137090; CTA
VMAAQVALR

SEQ ID NO: 22121 - protein, 10 aa, Homo sapiens
  Table A; Target 22121; HLA-A*03:01; DMRT1; ENSG00000137090; CTA
VMAAQVALRR

SEQ ID NO: 22122 - protein, 10 aa, Homo sapiens
  Table A; Target 22122; HLA-B*07:02; DMRT1; ENSG00000137090; CTA
VPPQGRAGGF

SEQ ID NO: 22123 - protein, 10 aa, Homo sapiens
  Table A; Target 22123; HLA-C*07:02; DMRT1; ENSG00000137090; CTA
VPPQGRAGGF

SEQ ID NO: 22124 - protein, 10 aa, Homo sapiens
  Table A; Target 22124; HLA-A*01:01; DMRT1; ENSG00000137090; CTA
VSDSTYYSSF

SEQ ID NO: 22125 - protein, 10 aa, Homo sapiens
  Table A; Target 22125; HLA-C*05:01; DMRT1; ENSG00000137090; CTA
VSDSTYYSSF

SEQ ID NO: 22126 - protein, 11 aa, Homo sapiens
  Table A; Target 22126; HLA-A*01:01; DMRT1; ENSG00000137090; CTA
VSDSTYYSSFY

SEQ ID NO: 22127 - protein, 9 aa, Homo sapiens
  Table A; Target 22127; HLA-C*03:03; DMRT1; ENSG00000137090; CTA
VSLSSSSPI

SEQ ID NO: 22128 - protein, 9 aa, Homo sapiens
  Table A; Target 22128; HLA-C*03:04; DMRT1; ENSG00000137090; CTA
VSLSSSSPI

SEQ ID NO: 22129 - protein, 9 aa, Homo sapiens
  Table A; Target 22129; HLA-A*23:01; DMRT1; ENSG00000137090; CTA
YLGQSVPQF

SEQ ID NO: 22130 - protein, 9 aa, Homo sapiens
  Table A; Target 22130; HLA-A*25:01; DMRT1; ENSG00000137090; CTA
YLGQSVPQF

SEQ ID NO: 22131 - protein, 9 aa, Homo sapiens
  Table A; Target 22131; HLA-A*26:01; DMRT1; ENSG00000137090; CTA
YLGQSVPQF

SEQ ID NO: 22132 - protein, 10 aa, Homo sapiens
  Table A; Target 22132; HLA-C*07:01; DMRT1; ENSG00000137090; CTA
YNCPQYSMAL

SEQ ID NO: 22133 - protein, 10 aa, Homo sapiens
  Table A; Target 22133; HLA-C*07:02; DMRT1; ENSG00000137090; CTA
YNCPQYSMAL

SEQ ID NO: 22134 - protein, 9 aa, Homo sapiens
  Table A; Target 22134; HLA-B*07:02; DMRT1; ENSG00000137090; CTA
YPEARASVF

SEQ ID NO: 22135 - protein, 9 aa, Homo sapiens
  Table A; Target 22135; HLA-B*08:01; DMRT1; ENSG00000137090; CTA
YPEARASVF

SEQ ID NO: 22136 - protein, 9 aa, Homo sapiens
  Table A; Target 22136; HLA-B*35:01; DMRT1; ENSG00000137090; CTA
YPEARASVF

SEQ ID NO: 22137 - protein, 9 aa, Homo sapiens
  Table A; Target 22137; HLA-B*35:03; DMRT1; ENSG00000137090; CTA
YPEARASVF

SEQ ID NO: 22138 - protein, 9 aa, Homo sapiens
  Table A; Target 22138; HLA-B*37:01; DMRT1; ENSG00000137090; CTA
YPEARASVF

SEQ ID NO: 22139 - protein, 9 aa, Homo sapiens
  Table A; Target 22139; HLA-B*51:01; DMRT1; ENSG00000137090; CTA
YPEARASVF

SEQ ID NO: 22140 - protein, 9 aa, Homo sapiens
  Table A; Target 22140; HLA-B*55:01; DMRT1; ENSG00000137090; CTA
YPEARASVF

SEQ ID NO: 22141 - protein, 9 aa, Homo sapiens
  Table A; Target 22141; HLA-C*03:03; DMRT1; ENSG00000137090; CTA
YPEARASVF

SEQ ID NO: 22142 - protein, 9 aa, Homo sapiens
  Table A; Target 22142; HLA-C*05:01; DMRT1; ENSG00000137090; CTA
YPEARASVF

SEQ ID NO: 22143 - protein, 9 aa, Homo sapiens
  Table A; Target 22143; HLA-C*07:02; DMRT1; ENSG00000137090; CTA
YPEARASVF

SEQ ID NO: 22144 - protein, 9 aa, Homo sapiens
  Table A; Target 22144; HLA-C*14:02; DMRT1; ENSG00000137090; CTA
YPEARASVF

SEQ ID NO: 22145 - protein, 11 aa, Homo sapiens
  Table A; Target 22145; HLA-B*51:01; DMRT1; ENSG00000137090; CTA
YPPPSYLGQSV

SEQ ID NO: 22146 - protein, 11 aa, Homo sapiens
  Table A; Target 22146; HLA-B*54:01; DMRT1; ENSG00000137090; CTA
YPPPSYLGQSV

SEQ ID NO: 22147 - protein, 11 aa, Homo sapiens
  Table A; Target 22147; HLA-B*56:01; DMRT1; ENSG00000137090; CTA
YPPPSYLGQSV

SEQ ID NO: 22148 - protein, 9 aa, Homo sapiens
  Table A; Target 22148; HLA-A*01:01; DMRT1; ENSG00000137090; CTA
YQPSLFPYY

SEQ ID NO: 22149 - protein, 9 aa, Homo sapiens
  Table A; Target 22149; HLA-A*02:07; DMRT1; ENSG00000137090; CTA
YQPSLFPYY

SEQ ID NO: 22150 - protein, 9 aa, Homo sapiens
  Table A; Target 22150; HLA-A*24:02; DMRT1; ENSG00000137090; CTA
YQPSLFPYY

SEQ ID NO: 22151 - protein, 9 aa, Homo sapiens
  Table A; Target 22151; HLA-A*26:01; DMRT1; ENSG00000137090; CTA
YQPSLFPYY

SEQ ID NO: 22152 - protein, 9 aa, Homo sapiens
  Table A; Target 22152; HLA-A*29:02; DMRT1; ENSG00000137090; CTA
YQPSLFPYY

SEQ ID NO: 22153 - protein, 9 aa, Homo sapiens
  Table A; Target 22153; HLA-C*02:02; DMRT1; ENSG00000137090; CTA
YQPSLFPYY

SEQ ID NO: 22154 - protein, 9 aa, Homo sapiens
  Table A; Target 22154; HLA-B*27:05; DMRT1; ENSG00000137090; CTA
YSSFYQPSL

SEQ ID NO: 22155 - protein, 9 aa, Homo sapiens
  Table A; Target 22155; HLA-B*35:03; DMRT1; ENSG00000137090; CTA
YSSFYQPSL

SEQ ID NO: 22156 - protein, 9 aa, Homo sapiens
  Table A; Target 22156; HLA-B*58:01; DMRT1; ENSG00000137090; CTA
YSSFYQPSL

SEQ ID NO: 22157 - protein, 9 aa, Homo sapiens
  Table A; Target 22157; HLA-C*02:02; DMRT1; ENSG00000137090; CTA
YSSFYQPSL

SEQ ID NO: 22158 - protein, 9 aa, Homo sapiens
  Table A; Target 22158; HLA-C*03:03; DMRT1; ENSG00000137090; CTA
YSSFYQPSL

SEQ ID NO: 22159 - protein, 9 aa, Homo sapiens
  Table A; Target 22159; HLA-C*03:04; DMRT1; ENSG00000137090; CTA
YSSFYQPSL

SEQ ID NO: 22160 - protein, 9 aa, Homo sapiens
  Table A; Target 22160; HLA-C*07:04; DMRT1; ENSG00000137090; CTA
YSSFYQPSL

SEQ ID NO: 22161 - protein, 9 aa, Homo sapiens
  Table A; Target 22161; HLA-C*16:01; DMRT1; ENSG00000137090; CTA
YSSFYQPSL

SEQ ID NO: 22162 - protein, 9 aa, Homo sapiens
  Table A; Target 22162; HLA-C*16:02; DMRT1; ENSG00000137090; CTA
YSSFYQPSL

SEQ ID NO: 22163 - protein, 9 aa, Homo sapiens
  Table A; Target 22163; HLA-C*16:04; DMRT1; ENSG00000137090; CTA
YSSFYQPSL

SEQ ID NO: 22164 - protein, 10 aa, Homo sapiens
  Table A; Target 22164; HLA-A*25:01; DMRT1; ENSG00000137090; CTA
YVPGQTGNQW

SEQ ID NO: 22165 - protein, 10 aa, Homo sapiens
  Table A; Target 22165; HLA-A*26:01; DMRT1; ENSG00000137090; CTA
YVPGQTGNQW

SEQ ID NO: 22166 - protein, 10 aa, Homo sapiens
  Table A; Target 22166; HLA-A*32:01; DMRT1; ENSG00000137090; CTA
YVPGQTGNQW

SEQ ID NO: 22167 - protein, 10 aa, Homo sapiens
  Table A; Target 22167; HLA-B*58:01; DMRT1; ENSG00000137090; CTA
YVPGQTGNQW

SEQ ID NO: 22168 - protein, 10 aa, Homo sapiens
  Table A; Target 22168; HLA-C*07:04; DMRT1; ENSG00000137090; CTA
YVPGQTGNQW

SEQ ID NO: 22169 - protein, 10 aa, Homo sapiens
  Table A; Target 22169; HLA-C*07:06; DMRT1; ENSG00000137090; CTA
YVPGQTGNQW

SEQ ID NO: 22170 - protein, 8 aa, Homo sapiens
  Table A; Target 22170; HLA-A*23:01; DMRT1; ENSG00000137090; CTA
YYPPPSYL

SEQ ID NO: 22171 - protein, 8 aa, Homo sapiens
  Table A; Target 22171; HLA-A*24:02; DMRT1; ENSG00000137090; CTA
YYPPPSYL

SEQ ID NO: 22172 - protein, 8 aa, Homo sapiens
  Table A; Target 22172; HLA-C*04:01; DMRT1; ENSG00000137090; CTA
YYPPPSYL

SEQ ID NO: 22173 - protein, 8 aa, Homo sapiens
  Table A; Target 22173; HLA-C*07:02; DMRT1; ENSG00000137090; CTA
YYPPPSYL

SEQ ID NO: 22174 - protein, 9 aa, Homo sapiens
  Table A; Target 22174; HLA-A*24:02; DMRT1; ENSG00000137090; CTA
YYPPPSYLG

SEQ ID NO: 22175 - protein, 10 aa, Homo sapiens
  Table A; Target 22175; HLA-A*23:01; DMRT1; ENSG00000137090; CTA
YYSSFYQPSL

SEQ ID NO: 22176 - protein, 11 aa, Homo sapiens
  Table A; Target 22176; HLA-A*24:02; DMRT1; ENSG00000137090; CTA
YYSSFYQPSLF

SEQ ID NO: 22177 - protein, 9 aa, Homo sapiens
  Table A; Target 22177; HLA-B*54:01; DPPA2; ENSG00000163530; CTA
AARAVQPKA

SEQ ID NO: 22178 - protein, 9 aa, Homo sapiens
  Table A; Target 22178; HLA-B*56:01; DPPA2; ENSG00000163530; CTA
AARAVQPKA

SEQ ID NO: 22179 - protein, 9 aa, Homo sapiens
  Table A; Target 22179; HLA-C*06:02; DPPA2; ENSG00000163530; CTA
AARAVQPKA

SEQ ID NO: 22180 - protein, 9 aa, Homo sapiens
  Table A; Target 22180; HLA-C*16:02; DPPA2; ENSG00000163530; CTA
AARAVQPKA

SEQ ID NO: 22181 - protein, 10 aa, Homo sapiens
  Table A; Target 22181; HLA-B*07:02; DPPA2; ENSG00000163530; CTA
AARAVQPKAL

SEQ ID NO: 22182 - protein, 10 aa, Homo sapiens
  Table A; Target 22182; HLA-B*40:02; DPPA2; ENSG00000163530; CTA
AARAVQPKAL

SEQ ID NO: 22183 - protein, 10 aa, Homo sapiens
  Table A; Target 22183; HLA-C*07:02; DPPA2; ENSG00000163530; CTA
AARAVQPKAL

SEQ ID NO: 22184 - protein, 9 aa, Homo sapiens
  Table A; Target 22184; HLA-A*30:01; DPPA2; ENSG00000163530; CTA
AEETNTVEV

SEQ ID NO: 22185 - protein, 9 aa, Homo sapiens
  Table A; Target 22185; HLA-B*37:01; DPPA2; ENSG00000163530; CTA
AEETNTVEV

SEQ ID NO: 22186 - protein, 9 aa, Homo sapiens
  Table A; Target 22186; HLA-B*40:01; DPPA2; ENSG00000163530; CTA
AEETNTVEV

SEQ ID NO: 22187 - protein, 9 aa, Homo sapiens
  Table A; Target 22187; HLA-B*40:02; DPPA2; ENSG00000163530; CTA
AEETNTVEV

SEQ ID NO: 22188 - protein, 10 aa, Homo sapiens
  Table A; Target 22188; HLA-A*30:01; DPPA2; ENSG00000163530; CTA
AEETNTVEVI

SEQ ID NO: 22189 - protein, 10 aa, Homo sapiens
  Table A; Target 22189; HLA-B*40:01; DPPA2; ENSG00000163530; CTA
AEETNTVEVI

SEQ ID NO: 22190 - protein, 10 aa, Homo sapiens
  Table A; Target 22190; HLA-B*49:01; DPPA2; ENSG00000163530; CTA
AEETNTVEVI

SEQ ID NO: 22191 - protein, 11 aa, Homo sapiens
  Table A; Target 22191; HLA-A*31:01; DPPA2; ENSG00000163530; CTA
AGQAWVPTTHR

SEQ ID NO: 22192 - protein, 9 aa, Homo sapiens
  Table A; Target 22192; HLA-A*02:01; DPPA2; ENSG00000163530; CTA
ALNSCSIPV

SEQ ID NO: 22193 - protein, 9 aa, Homo sapiens
  Table A; Target 22193; HLA-B*55:01; DPPA2; ENSG00000163530; CTA
ALNSCSIPV

SEQ ID NO: 22194 - protein, 11 aa, Homo sapiens
  Table A; Target 22194; HLA-A*02:07; DPPA2; ENSG00000163530; CTA
ALPLPTILPPI

SEQ ID NO: 22195 - protein, 9 aa, Homo sapiens
  Table A; Target 22195; HLA-A*25:01; DPPA2; ENSG00000163530; CTA
APGAMLASW

SEQ ID NO: 22196 - protein, 9 aa, Homo sapiens
  Table A; Target 22196; HLA-B*07:02; DPPA2; ENSG00000163530; CTA
APGAMLASW

SEQ ID NO: 22197 - protein, 9 aa, Homo sapiens
  Table A; Target 22197; HLA-B*35:01; DPPA2; ENSG00000163530; CTA
APGAMLASW

SEQ ID NO: 22198 - protein, 9 aa, Homo sapiens
  Table A; Target 22198; HLA-B*44:02; DPPA2; ENSG00000163530; CTA
APGAMLASW

SEQ ID NO: 22199 - protein, 9 aa, Homo sapiens
  Table A; Target 22199; HLA-B*44:03; DPPA2; ENSG00000163530; CTA
APGAMLASW

SEQ ID NO: 22200 - protein, 9 aa, Homo sapiens
  Table A; Target 22200; HLA-B*56:01; DPPA2; ENSG00000163530; CTA
APGAMLASW

SEQ ID NO: 22201 - protein, 9 aa, Homo sapiens
  Table A; Target 22201; HLA-B*07:02; DPPA2; ENSG00000163530; CTA
APQKARCKI

SEQ ID NO: 22202 - protein, 9 aa, Homo sapiens
  Table A; Target 22202; HLA-C*07:02; DPPA2; ENSG00000163530; CTA
APQKARCKI

SEQ ID NO: 22203 - protein, 9 aa, Homo sapiens
  Table A; Target 22203; HLA-B*07:02; DPPA2; ENSG00000163530; CTA
ARAVQPKAL

SEQ ID NO: 22204 - protein, 9 aa, Homo sapiens
  Table A; Target 22204; HLA-B*27:02; DPPA2; ENSG00000163530; CTA
ARAVQPKAL

SEQ ID NO: 22205 - protein, 9 aa, Homo sapiens
  Table A; Target 22205; HLA-B*27:05; DPPA2; ENSG00000163530; CTA
ARAVQPKAL

SEQ ID NO: 22206 - protein, 9 aa, Homo sapiens
  Table A; Target 22206; HLA-C*06:02; DPPA2; ENSG00000163530; CTA
ARAVQPKAL

SEQ ID NO: 22207 - protein, 9 aa, Homo sapiens
  Table A; Target 22207; HLA-C*07:02; DPPA2; ENSG00000163530; CTA
ARAVQPKAL

SEQ ID NO: 22208 - protein, 9 aa, Homo sapiens
  Table A; Target 22208; HLA-C*12:03; DPPA2; ENSG00000163530; CTA
ARAVQPKAL

SEQ ID NO: 22209 - protein, 9 aa, Homo sapiens
  Table A; Target 22209; HLA-C*16:01; DPPA2; ENSG00000163530; CTA
ARAVQPKAL

SEQ ID NO: 22210 - protein, 9 aa, Homo sapiens
  Table A; Target 22210; HLA-C*16:02; DPPA2; ENSG00000163530; CTA
ARAVQPKAL

SEQ ID NO: 22211 - protein, 9 aa, Homo sapiens
  Table A; Target 22211; HLA-C*16:04; DPPA2; ENSG00000163530; CTA
ARAVQPKAL

SEQ ID NO: 22212 - protein, 8 aa, Homo sapiens
  Table A; Target 22212; HLA-C*06:02; DPPA2; ENSG00000163530; CTA
ARIAARAV

SEQ ID NO: 22213 - protein, 10 aa, Homo sapiens
  Table A; Target 22213; HLA-B*27:05; DPPA2; ENSG00000163530; CTA
ARIAARAVQP

SEQ ID NO: 22214 - protein, 10 aa, Homo sapiens
  Table A; Target 22214; HLA-C*06:02; DPPA2; ENSG00000163530; CTA
ARIAARAVQP

SEQ ID NO: 22215 - protein, 11 aa, Homo sapiens
  Table A; Target 22215; HLA-B*27:05; DPPA2; ENSG00000163530; CTA
ARIAARAVQPK

SEQ ID NO: 22216 - protein, 11 aa, Homo sapiens
  Table A; Target 22216; HLA-C*06:02; DPPA2; ENSG00000163530; CTA
ARIAARAVQPK

SEQ ID NO: 22217 - protein, 9 aa, Homo sapiens
  Table A; Target 22217; HLA-B*08:01; DPPA2; ENSG00000163530; CTA
ARLQRSYEM

SEQ ID NO: 22218 - protein, 9 aa, Homo sapiens
  Table A; Target 22218; HLA-B*27:05; DPPA2; ENSG00000163530; CTA
ARLQRSYEM

SEQ ID NO: 22219 - protein, 9 aa, Homo sapiens
  Table A; Target 22219; HLA-B*37:01; DPPA2; ENSG00000163530; CTA
ARLQRSYEM

SEQ ID NO: 22220 - protein, 9 aa, Homo sapiens
  Table A; Target 22220; HLA-C*16:01; DPPA2; ENSG00000163530; CTA
ARLQRSYEM

SEQ ID NO: 22221 - protein, 9 aa, Homo sapiens
  Table A; Target 22221; HLA-C*16:04; DPPA2; ENSG00000163530; CTA
ARLQRSYEM

SEQ ID NO: 22222 - protein, 9 aa, Homo sapiens
  Table A; Target 22222; HLA-A*31:01; DPPA2; ENSG00000163530; CTA
ASWARIAAR

SEQ ID NO: 22223 - protein, 9 aa, Homo sapiens
  Table A; Target 22223; HLA-A*33:01; DPPA2; ENSG00000163530; CTA
ASWARIAAR

SEQ ID NO: 22224 - protein, 9 aa, Homo sapiens
  Table A; Target 22224; HLA-A*33:03; DPPA2; ENSG00000163530; CTA
ASWARIAAR

SEQ ID NO: 22225 - protein, 9 aa, Homo sapiens
  Table A; Target 22225; HLA-B*57:01; DPPA2; ENSG00000163530; CTA
ASWARIAAR

SEQ ID NO: 22226 - protein, 9 aa, Homo sapiens
  Table A; Target 22226; HLA-C*01:02; DPPA2; ENSG00000163530; CTA
AYPEQRQDM

SEQ ID NO: 22227 - protein, 9 aa, Homo sapiens
  Table A; Target 22227; HLA-C*14:02; DPPA2; ENSG00000163530; CTA
AYPEQRQDM

SEQ ID NO: 22228 - protein, 9 aa, Homo sapiens
  Table A; Target 22228; HLA-B*46:01; DPPA2; ENSG00000163530; CTA
CSIPVSVEA

SEQ ID NO: 22229 - protein, 9 aa, Homo sapiens
  Table A; Target 22229; HLA-B*54:01; DPPA2; ENSG00000163530; CTA
CSIPVSVEA

SEQ ID NO: 22230 - protein, 9 aa, Homo sapiens
  Table A; Target 22230; HLA-B*56:01; DPPA2; ENSG00000163530; CTA
CSIPVSVEA

SEQ ID NO: 22231 - protein, 10 aa, Homo sapiens
  Table A; Target 22231; HLA-B*15:03; DPPA2; ENSG00000163530; CTA
CSIPVSVEAF

SEQ ID NO: 22232 - protein, 10 aa, Homo sapiens
  Table A; Target 22232; HLA-B*57:01; DPPA2; ENSG00000163530; CTA
CSIPVSVEAF

SEQ ID NO: 22233 - protein, 10 aa, Homo sapiens
  Table A; Target 22233; HLA-B*58:01; DPPA2; ENSG00000163530; CTA
CSIPVSVEAF

SEQ ID NO: 22234 - protein, 10 aa, Homo sapiens
  Table A; Target 22234; HLA-B*54:01; DPPA2; ENSG00000163530; CTA
CVVHGRLLSA

SEQ ID NO: 22235 - protein, 9 aa, Homo sapiens
  Table A; Target 22235; HLA-A*33:01; DPPA2; ENSG00000163530; CTA
DANLDSSKK

SEQ ID NO: 22236 - protein, 9 aa, Homo sapiens
  Table A; Target 22236; HLA-B*51:01; DPPA2; ENSG00000163530; CTA
DANLDSSKK

SEQ ID NO: 22237 - protein, 11 aa, Homo sapiens
  Table A; Target 22237; HLA-A*33:01; DPPA2; ENSG00000163530; CTA
DANLDSSKKNF

SEQ ID NO: 22238 - protein, 9 aa, Homo sapiens
  Table A; Target 22238; HLA-A*30:01; DPPA2; ENSG00000163530; CTA
DEESVILTL

SEQ ID NO: 22239 - protein, 9 aa, Homo sapiens
  Table A; Target 22239; HLA-B*18:01; DPPA2; ENSG00000163530; CTA
DEESVILTL

SEQ ID NO: 22240 - protein, 9 aa, Homo sapiens
  Table A; Target 22240; HLA-B*40:01; DPPA2; ENSG00000163530; CTA
DEESVILTL

SEQ ID NO: 22241 - protein, 9 aa, Homo sapiens
  Table A; Target 22241; HLA-B*44:02; DPPA2; ENSG00000163530; CTA
DEESVILTL

SEQ ID NO: 22242 - protein, 9 aa, Homo sapiens
  Table A; Target 22242; HLA-B*44:03; DPPA2; ENSG00000163530; CTA
DEESVILTL

SEQ ID NO: 22243 - protein, 8 aa, Homo sapiens
  Table A; Target 22243; HLA-B*08:01; DPPA2; ENSG00000163530; CTA
DSSKKNFL

SEQ ID NO: 22244 - protein, 8 aa, Homo sapiens
  Table A; Target 22244; HLA-B*08:01; DPPA2; ENSG00000163530; CTA
DTKGWVRL

SEQ ID NO: 22245 - protein, 9 aa, Homo sapiens
  Table A; Target 22245; HLA-A*33:01; DPPA2; ENSG00000163530; CTA
DVKLEKPKK

SEQ ID NO: 22246 - protein, 9 aa, Homo sapiens
  Table A; Target 22246; HLA-B*54:01; DPPA2; ENSG00000163530; CTA
EAFLMQASG

SEQ ID NO: 22247 - protein, 10 aa, Homo sapiens
  Table A; Target 22247; HLA-B*51:01; DPPA2; ENSG00000163530; CTA
EAFLMQASGV

SEQ ID NO: 22248 - protein, 11 aa, Homo sapiens
  Table A; Target 22248; HLA-A*68:01; DPPA2; ENSG00000163530; CTA
EAFLMQASGVR

SEQ ID NO: 22249 - protein, 8 aa, Homo sapiens
  Table A; Target 22249; HLA-A*30:01; DPPA2; ENSG00000163530; CTA
EESVILTL

SEQ ID NO: 22250 - protein, 8 aa, Homo sapiens
  Table A; Target 22250; HLA-B*18:01; DPPA2; ENSG00000163530; CTA
EESVILTL

SEQ ID NO: 22251 - protein, 8 aa, Homo sapiens
  Table A; Target 22251; HLA-B*37:01; DPPA2; ENSG00000163530; CTA
EESVILTL

SEQ ID NO: 22252 - protein, 8 aa, Homo sapiens
  Table A; Target 22252; HLA-B*40:01; DPPA2; ENSG00000163530; CTA
EESVILTL

SEQ ID NO: 22253 - protein, 8 aa, Homo sapiens
  Table A; Target 22253; HLA-B*44:02; DPPA2; ENSG00000163530; CTA
EESVILTL

SEQ ID NO: 22254 - protein, 8 aa, Homo sapiens
  Table A; Target 22254; HLA-B*44:03; DPPA2; ENSG00000163530; CTA
EESVILTL

SEQ ID NO: 22255 - protein, 8 aa, Homo sapiens
  Table A; Target 22255; HLA-B*49:01; DPPA2; ENSG00000163530; CTA
EESVILTL

SEQ ID NO: 22256 - protein, 9 aa, Homo sapiens
  Table A; Target 22256; HLA-A*68:02; DPPA2; ENSG00000163530; CTA
EESVILTLV

SEQ ID NO: 22257 - protein, 9 aa, Homo sapiens
  Table A; Target 22257; HLA-B*18:01; DPPA2; ENSG00000163530; CTA
EESVILTLV

SEQ ID NO: 22258 - protein, 9 aa, Homo sapiens
  Table A; Target 22258; HLA-B*44:02; DPPA2; ENSG00000163530; CTA
EESVILTLV

SEQ ID NO: 22259 - protein, 9 aa, Homo sapiens
  Table A; Target 22259; HLA-B*44:03; DPPA2; ENSG00000163530; CTA
EESVILTLV

SEQ ID NO: 22260 - protein, 9 aa, Homo sapiens
  Table A; Target 22260; HLA-B*49:01; DPPA2; ENSG00000163530; CTA
EESVILTLV

SEQ ID NO: 22261 - protein, 8 aa, Homo sapiens
  Table A; Target 22261; HLA-B*18:01; DPPA2; ENSG00000163530; CTA
EETNTVEV

SEQ ID NO: 22262 - protein, 8 aa, Homo sapiens
  Table A; Target 22262; HLA-B*49:01; DPPA2; ENSG00000163530; CTA
EETNTVEV

SEQ ID NO: 22263 - protein, 9 aa, Homo sapiens
  Table A; Target 22263; HLA-A*30:01; DPPA2; ENSG00000163530; CTA
EETNTVEVI

SEQ ID NO: 22264 - protein, 9 aa, Homo sapiens
  Table A; Target 22264; HLA-A*68:02; DPPA2; ENSG00000163530; CTA
EETNTVEVI

SEQ ID NO: 22265 - protein, 9 aa, Homo sapiens
  Table A; Target 22265; HLA-B*18:01; DPPA2; ENSG00000163530; CTA
EETNTVEVI

SEQ ID NO: 22266 - protein, 9 aa, Homo sapiens
  Table A; Target 22266; HLA-B*38:01; DPPA2; ENSG00000163530; CTA
EETNTVEVI

SEQ ID NO: 22267 - protein, 9 aa, Homo sapiens
  Table A; Target 22267; HLA-B*39:01; DPPA2; ENSG00000163530; CTA
EETNTVEVI

SEQ ID NO: 22268 - protein, 9 aa, Homo sapiens
  Table A; Target 22268; HLA-B*40:01; DPPA2; ENSG00000163530; CTA
EETNTVEVI

SEQ ID NO: 22269 - protein, 9 aa, Homo sapiens
  Table A; Target 22269; HLA-B*44:02; DPPA2; ENSG00000163530; CTA
EETNTVEVI

SEQ ID NO: 22270 - protein, 9 aa, Homo sapiens
  Table A; Target 22270; HLA-B*44:03; DPPA2; ENSG00000163530; CTA
EETNTVEVI

SEQ ID NO: 22271 - protein, 9 aa, Homo sapiens
  Table A; Target 22271; HLA-B*49:01; DPPA2; ENSG00000163530; CTA
EETNTVEVI

SEQ ID NO: 22272 - protein, 9 aa, Homo sapiens
  Table A; Target 22272; HLA-C*16:04; DPPA2; ENSG00000163530; CTA
EETNTVEVI

SEQ ID NO: 22273 - protein, 11 aa, Homo sapiens
  Table A; Target 22273; HLA-B*27:05; DPPA2; ENSG00000163530; CTA
EETNTVEVITS

SEQ ID NO: 22274 - protein, 11 aa, Homo sapiens
  Table A; Target 22274; HLA-B*39:01; DPPA2; ENSG00000163530; CTA
EETNTVEVITS

SEQ ID NO: 22275 - protein, 10 aa, Homo sapiens
  Table A; Target 22275; HLA-A*33:03; DPPA2; ENSG00000163530; CTA
EMSQETRLQR

SEQ ID NO: 22276 - protein, 11 aa, Homo sapiens
  Table A; Target 22276; HLA-A*68:01; DPPA2; ENSG00000163530; CTA
EPSVSSTSDVK

SEQ ID NO: 22277 - protein, 11 aa, Homo sapiens
  Table A; Target 22277; HLA-C*07:06; DPPA2; ENSG00000163530; CTA
EPSVSSTSDVK

SEQ ID NO: 22278 - protein, 8 aa, Homo sapiens
  Table A; Target 22278; HLA-A*03:02; DPPA2; ENSG00000163530; CTA
EQFTAPQK

SEQ ID NO: 22279 - protein, 8 aa, Homo sapiens
  Table A; Target 22279; HLA-A*11:01; DPPA2; ENSG00000163530; CTA
EQFTAPQK

SEQ ID NO: 22280 - protein, 8 aa, Homo sapiens
  Table A; Target 22280; HLA-A*68:01; DPPA2; ENSG00000163530; CTA
EQFTAPQK

SEQ ID NO: 22281 - protein, 8 aa, Homo sapiens
  Table A; Target 22281; HLA-B*13:02; DPPA2; ENSG00000163530; CTA
EQFTAPQK

SEQ ID NO: 22282 - protein, 8 aa, Homo sapiens
  Table A; Target 22282; HLA-B*27:02; DPPA2; ENSG00000163530; CTA
EQFTAPQK

SEQ ID NO: 22283 - protein, 8 aa, Homo sapiens
  Table A; Target 22283; HLA-B*27:05; DPPA2; ENSG00000163530; CTA
EQFTAPQK

SEQ ID NO: 22284 - protein, 8 aa, Homo sapiens
  Table A; Target 22284; HLA-C*06:02; DPPA2; ENSG00000163530; CTA
EQFTAPQK

SEQ ID NO: 22285 - protein, 8 aa, Homo sapiens
  Table A; Target 22285; HLA-C*07:01; DPPA2; ENSG00000163530; CTA
EQFTAPQK

SEQ ID NO: 22286 - protein, 9 aa, Homo sapiens
  Table A; Target 22286; HLA-A*26:01; DPPA2; ENSG00000163530; CTA
EQFTAPQKA

SEQ ID NO: 22287 - protein, 9 aa, Homo sapiens
  Table A; Target 22287; HLA-B*13:02; DPPA2; ENSG00000163530; CTA
EQFTAPQKA

SEQ ID NO: 22288 - protein, 9 aa, Homo sapiens
  Table A; Target 22288; HLA-B*39:01; DPPA2; ENSG00000163530; CTA
EQFTAPQKA

SEQ ID NO: 22289 - protein, 10 aa, Homo sapiens
  Table A; Target 22289; HLA-A*33:03; DPPA2; ENSG00000163530; CTA
EQFTAPQKAR

SEQ ID NO: 22290 - protein, 10 aa, Homo sapiens
  Table A; Target 22290; HLA-A*68:01; DPPA2; ENSG00000163530; CTA
EQFTAPQKAR

SEQ ID NO: 22291 - protein, 10 aa, Homo sapiens
  Table A; Target 22291; HLA-C*07:06; DPPA2; ENSG00000163530; CTA
EQFTAPQKAR

SEQ ID NO: 22292 - protein, 9 aa, Homo sapiens
  Table A; Target 22292; HLA-A*26:01; DPPA2; ENSG00000163530; CTA
EQRQDMPEM

SEQ ID NO: 22293 - protein, 9 aa, Homo sapiens
  Table A; Target 22293; HLA-B*15:01; DPPA2; ENSG00000163530; CTA
EQRQDMPEM

SEQ ID NO: 22294 - protein, 9 aa, Homo sapiens
  Table A; Target 22294; HLA-B*38:01; DPPA2; ENSG00000163530; CTA
ERAEETNTV

SEQ ID NO: 22295 - protein, 9 aa, Homo sapiens
  Table A; Target 22295; HLA-B*39:01; DPPA2; ENSG00000163530; CTA
ERAEETNTV

SEQ ID NO: 22296 - protein, 10 aa, Homo sapiens
  Table A; Target 22296; HLA-A*33:03; DPPA2; ENSG00000163530; CTA
ETNTVEVITS

SEQ ID NO: 22297 - protein, 10 aa, Homo sapiens
  Table A; Target 22297; HLA-A*68:01; DPPA2; ENSG00000163530; CTA
ETNTVEVITS

SEQ ID NO: 22298 - protein, 11 aa, Homo sapiens
  Table A; Target 22298; HLA-A*26:01; DPPA2; ENSG00000163530; CTA
ETNTVEVITSA

SEQ ID NO: 22299 - protein, 11 aa, Homo sapiens
  Table A; Target 22299; HLA-A*68:01; DPPA2; ENSG00000163530; CTA
ETNTVEVITSA

SEQ ID NO: 22300 - protein, 9 aa, Homo sapiens
  Table A; Target 22300; HLA-A*33:03; DPPA2; ENSG00000163530; CTA
ETRLQRCSR

SEQ ID NO: 22301 - protein, 8 aa, Homo sapiens
  Table A; Target 22301; HLA-C*05:01; DPPA2; ENSG00000163530; CTA
EVDDEESV

SEQ ID NO: 22302 - protein, 9 aa, Homo sapiens
  Table A; Target 22302; HLA-C*05:01; DPPA2; ENSG00000163530; CTA
EVDDEESVI

SEQ ID NO: 22303 - protein, 10 aa, Homo sapiens
  Table A; Target 22303; HLA-B*39:01; DPPA2; ENSG00000163530; CTA
EVDDEESVIL

SEQ ID NO: 22304 - protein, 9 aa, Homo sapiens
  Table A; Target 22304; HLA-A*25:01; DPPA2; ENSG00000163530; CTA
EVITSAPGA

SEQ ID NO: 22305 - protein, 9 aa, Homo sapiens
  Table A; Target 22305; HLA-A*26:01; DPPA2; ENSG00000163530; CTA
EVITSAPGA

SEQ ID NO: 22306 - protein, 10 aa, Homo sapiens
  Table A; Target 22306; HLA-A*25:01; DPPA2; ENSG00000163530; CTA
EVITSAPGAM

SEQ ID NO: 22307 - protein, 10 aa, Homo sapiens
  Table A; Target 22307; HLA-A*26:01; DPPA2; ENSG00000163530; CTA
EVITSAPGAM

SEQ ID NO: 22308 - protein, 10 aa, Homo sapiens
  Table A; Target 22308; HLA-A*68:01; DPPA2; ENSG00000163530; CTA
EVITSAPGAM

SEQ ID NO: 22309 - protein, 10 aa, Homo sapiens
  Table A; Target 22309; HLA-B*39:01; DPPA2; ENSG00000163530; CTA
EVITSAPGAM

SEQ ID NO: 22310 - protein, 10 aa, Homo sapiens
  Table A; Target 22310; HLA-C*07:06; DPPA2; ENSG00000163530; CTA
EVITSAPGAM

SEQ ID NO: 22311 - protein, 11 aa, Homo sapiens
  Table A; Target 22311; HLA-A*25:01; DPPA2; ENSG00000163530; CTA
EVITSAPGAML

SEQ ID NO: 22312 - protein, 11 aa, Homo sapiens
  Table A; Target 22312; HLA-A*26:01; DPPA2; ENSG00000163530; CTA
EVITSAPGAML

SEQ ID NO: 22313 - protein, 11 aa, Homo sapiens
  Table A; Target 22313; HLA-A*68:01; DPPA2; ENSG00000163530; CTA
EVITSAPGAML

SEQ ID NO: 22314 - protein, 11 aa, Homo sapiens
  Table A; Target 22314; HLA-A*68:02; DPPA2; ENSG00000163530; CTA
EVITSAPGAML

SEQ ID NO: 22315 - protein, 8 aa, Homo sapiens
  Table A; Target 22315; HLA-B*08:01; DPPA2; ENSG00000163530; CTA
FLMQASGV

SEQ ID NO: 22316 - protein, 8 aa, Homo sapiens
  Table A; Target 22316; HLA-B*13:02; DPPA2; ENSG00000163530; CTA
FLMQASGV

SEQ ID NO: 22317 - protein, 10 aa, Homo sapiens
  Table A; Target 22317; HLA-A*24:02; DPPA2; ENSG00000163530; CTA
FLMQASGVRW

SEQ ID NO: 22318 - protein, 10 aa, Homo sapiens
  Table A; Target 22318; HLA-A*25:01; DPPA2; ENSG00000163530; CTA
FLMQASGVRW

SEQ ID NO: 22319 - protein, 10 aa, Homo sapiens
  Table A; Target 22319; HLA-B*44:02; DPPA2; ENSG00000163530; CTA
FLMQASGVRW

SEQ ID NO: 22320 - protein, 10 aa, Homo sapiens
  Table A; Target 22320; HLA-B*57:01; DPPA2; ENSG00000163530; CTA
FLMQASGVRW

SEQ ID NO: 22321 - protein, 10 aa, Homo sapiens
  Table A; Target 22321; HLA-B*35:01; DPPA2; ENSG00000163530; CTA
FPSPGIEDNM

SEQ ID NO: 22322 - protein, 10 aa, Homo sapiens
  Table A; Target 22322; HLA-B*35:03; DPPA2; ENSG00000163530; CTA
FPSPGIEDNM

SEQ ID NO: 22323 - protein, 10 aa, Homo sapiens
  Table A; Target 22323; HLA-B*38:01; DPPA2; ENSG00000163530; CTA
FPSPGIEDNM

SEQ ID NO: 22324 - protein, 10 aa, Homo sapiens
  Table A; Target 22324; HLA-B*55:01; DPPA2; ENSG00000163530; CTA
FPSPGIEDNM

SEQ ID NO: 22325 - protein, 10 aa, Homo sapiens
  Table A; Target 22325; HLA-C*03:03; DPPA2; ENSG00000163530; CTA
FPSPGIEDNM

SEQ ID NO: 22326 - protein, 11 aa, Homo sapiens
  Table A; Target 22326; HLA-B*27:05; DPPA2; ENSG00000163530; CTA
FPSPGIEDNML

SEQ ID NO: 22327 - protein, 11 aa, Homo sapiens
  Table A; Target 22327; HLA-B*35:01; DPPA2; ENSG00000163530; CTA
FPSPGIEDNML

SEQ ID NO: 22328 - protein, 11 aa, Homo sapiens
  Table A; Target 22328; HLA-B*35:03; DPPA2; ENSG00000163530; CTA
FPSPGIEDNML

SEQ ID NO: 22329 - protein, 11 aa, Homo sapiens
  Table A; Target 22329; HLA-B*38:01; DPPA2; ENSG00000163530; CTA
FPSPGIEDNML

SEQ ID NO: 22330 - protein, 11 aa, Homo sapiens
  Table A; Target 22330; HLA-B*55:01; DPPA2; ENSG00000163530; CTA
FPSPGIEDNML

SEQ ID NO: 22331 - protein, 9 aa, Homo sapiens
  Table A; Target 22331; HLA-A*30:01; DPPA2; ENSG00000163530; CTA
GEVDDEESV

SEQ ID NO: 22332 - protein, 9 aa, Homo sapiens
  Table A; Target 22332; HLA-B*40:01; DPPA2; ENSG00000163530; CTA
GEVDDEESV

SEQ ID NO: 22333 - protein, 9 aa, Homo sapiens
  Table A; Target 22333; HLA-B*49:01; DPPA2; ENSG00000163530; CTA
GEVDDEESV

SEQ ID NO: 22334 - protein, 10 aa, Homo sapiens
  Table A; Target 22334; HLA-A*30:01; DPPA2; ENSG00000163530; CTA
GEVDDEESVI

SEQ ID NO: 22335 - protein, 10 aa, Homo sapiens
  Table A; Target 22335; HLA-B*40:01; DPPA2; ENSG00000163530; CTA
GEVDDEESVI

SEQ ID NO: 22336 - protein, 10 aa, Homo sapiens
  Table A; Target 22336; HLA-B*49:01; DPPA2; ENSG00000163530; CTA
GEVDDEESVI

SEQ ID NO: 22337 - protein, 11 aa, Homo sapiens
  Table A; Target 22337; HLA-A*30:01; DPPA2; ENSG00000163530; CTA
GEVDDEESVIL

SEQ ID NO: 22338 - protein, 11 aa, Homo sapiens
  Table A; Target 22338; HLA-B*40:01; DPPA2; ENSG00000163530; CTA
GEVDDEESVIL

SEQ ID NO: 22339 - protein, 10 aa, Homo sapiens
  Table A; Target 22339; HLA-B*38:01; DPPA2; ENSG00000163530; CTA
GHLLQTNEQF

SEQ ID NO: 22340 - protein, 11 aa, Homo sapiens
  Table A; Target 22340; HLA-A*02:01; DPPA2; ENSG00000163530; CTA
GLSTNGKKIEV

SEQ ID NO: 22341 - protein, 9 aa, Homo sapiens
  Table A; Target 22341; HLA-A*32:01; DPPA2; ENSG00000163530; CTA
GQAWVPTTH

SEQ ID NO: 22342 - protein, 9 aa, Homo sapiens
  Table A; Target 22342; HLA-B*13:02; DPPA2; ENSG00000163530; CTA
GQAWVPTTH

SEQ ID NO: 22343 - protein, 9 aa, Homo sapiens
  Table A; Target 22343; HLA-B*15:01; DPPA2; ENSG00000163530; CTA
GQAWVPTTH

SEQ ID NO: 22344 - protein, 9 aa, Homo sapiens
  Table A; Target 22344; HLA-B*15:03; DPPA2; ENSG00000163530; CTA
GQAWVPTTH

SEQ ID NO: 22345 - protein, 9 aa, Homo sapiens
  Table A; Target 22345; HLA-B*27:05; DPPA2; ENSG00000163530; CTA
GQAWVPTTH

SEQ ID NO: 22346 - protein, 10 aa, Homo sapiens
  Table A; Target 22346; HLA-A*31:01; DPPA2; ENSG00000163530; CTA
GQAWVPTTHR

SEQ ID NO: 22347 - protein, 9 aa, Homo sapiens
  Table A; Target 22347; HLA-B*27:02; DPPA2; ENSG00000163530; CTA
GRLLSADTK

SEQ ID NO: 22348 - protein, 9 aa, Homo sapiens
  Table A; Target 22348; HLA-B*27:05; DPPA2; ENSG00000163530; CTA
GRLLSADTK

SEQ ID NO: 22349 - protein, 11 aa, Homo sapiens
  Table A; Target 22349; HLA-B*27:02; DPPA2; ENSG00000163530; CTA
GRLLSADTKGW

SEQ ID NO: 22350 - protein, 11 aa, Homo sapiens
  Table A; Target 22350; HLA-C*16:04; DPPA2; ENSG00000163530; CTA
GRLLSADTKGW

SEQ ID NO: 22351 - protein, 10 aa, Homo sapiens
  Table A; Target 22351; HLA-B*35:01; DPPA2; ENSG00000163530; CTA
HAYPEQRQDM

SEQ ID NO: 22352 - protein, 10 aa, Homo sapiens
  Table A; Target 22352; HLA-B*35:03; DPPA2; ENSG00000163530; CTA
HAYPEQRQDM

SEQ ID NO: 22353 - protein, 10 aa, Homo sapiens
  Table A; Target 22353; HLA-B*55:01; DPPA2; ENSG00000163530; CTA
HAYPEQRQDM

SEQ ID NO: 22354 - protein, 9 aa, Homo sapiens
  Table A; Target 22354; HLA-A*23:01; DPPA2; ENSG00000163530; CTA
HLLQTNEQF

SEQ ID NO: 22355 - protein, 9 aa, Homo sapiens
  Table A; Target 22355; HLA-A*32:01; DPPA2; ENSG00000163530; CTA
HLLQTNEQF

SEQ ID NO: 22356 - protein, 9 aa, Homo sapiens
  Table A; Target 22356; HLA-B*15:01; DPPA2; ENSG00000163530; CTA
HLLQTNEQF

SEQ ID NO: 22357 - protein, 9 aa, Homo sapiens
  Table A; Target 22357; HLA-B*37:01; DPPA2; ENSG00000163530; CTA
HLLQTNEQF

SEQ ID NO: 22358 - protein, 9 aa, Homo sapiens
  Table A; Target 22358; HLA-B*38:01; DPPA2; ENSG00000163530; CTA
HLLQTNEQF

SEQ ID NO: 22359 - protein, 9 aa, Homo sapiens
  Table A; Target 22359; HLA-C*07:04; DPPA2; ENSG00000163530; CTA
HLLQTNEQF

SEQ ID NO: 22360 - protein, 9 aa, Homo sapiens
  Table A; Target 22360; HLA-A*03:01; DPPA2; ENSG00000163530; CTA
IAARAVQPK

SEQ ID NO: 22361 - protein, 9 aa, Homo sapiens
  Table A; Target 22361; HLA-A*03:02; DPPA2; ENSG00000163530; CTA
IAARAVQPK

SEQ ID NO: 22362 - protein, 9 aa, Homo sapiens
  Table A; Target 22362; HLA-A*11:01; DPPA2; ENSG00000163530; CTA
IAARAVQPK

SEQ ID NO: 22363 - protein, 9 aa, Homo sapiens
  Table A; Target 22363; HLA-A*31:01; DPPA2; ENSG00000163530; CTA
IAARAVQPK

SEQ ID NO: 22364 - protein, 9 aa, Homo sapiens
  Table A; Target 22364; HLA-A*68:01; DPPA2; ENSG00000163530; CTA
IAARAVQPK

SEQ ID NO: 22365 - protein, 9 aa, Homo sapiens
  Table A; Target 22365; HLA-C*02:02; DPPA2; ENSG00000163530; CTA
IAARAVQPK

SEQ ID NO: 22366 - protein, 9 aa, Homo sapiens
  Table A; Target 22366; HLA-C*04:01; DPPA2; ENSG00000163530; CTA
IAARAVQPK

SEQ ID NO: 22367 - protein, 9 aa, Homo sapiens
  Table A; Target 22367; HLA-C*06:02; DPPA2; ENSG00000163530; CTA
IAARAVQPK

SEQ ID NO: 22368 - protein, 9 aa, Homo sapiens
  Table A; Target 22368; HLA-C*07:01; DPPA2; ENSG00000163530; CTA
IAARAVQPK

SEQ ID NO: 22369 - protein, 9 aa, Homo sapiens
  Table A; Target 22369; HLA-C*07:02; DPPA2; ENSG00000163530; CTA
IAARAVQPK

SEQ ID NO: 22370 - protein, 9 aa, Homo sapiens
  Table A; Target 22370; HLA-C*07:04; DPPA2; ENSG00000163530; CTA
IAARAVQPK

SEQ ID NO: 22371 - protein, 9 aa, Homo sapiens
  Table A; Target 22371; HLA-C*07:06; DPPA2; ENSG00000163530; CTA
IAARAVQPK

SEQ ID NO: 22372 - protein, 9 aa, Homo sapiens
  Table A; Target 22372; HLA-C*12:03; DPPA2; ENSG00000163530; CTA
IAARAVQPK

SEQ ID NO: 22373 - protein, 9 aa, Homo sapiens
  Table A; Target 22373; HLA-C*16:01; DPPA2; ENSG00000163530; CTA
IAARAVQPK

SEQ ID NO: 22374 - protein, 11 aa, Homo sapiens
  Table A; Target 22374; HLA-A*29:02; DPPA2; ENSG00000163530; CTA
IFPSPGIEDNM

SEQ ID NO: 22375 - protein, 8 aa, Homo sapiens
  Table A; Target 22375; HLA-A*02:07; DPPA2; ENSG00000163530; CTA
ILPPINKV

SEQ ID NO: 22376 - protein, 8 aa, Homo sapiens
  Table A; Target 22376; HLA-B*27:02; DPPA2; ENSG00000163530; CTA
ILTLVPVK

SEQ ID NO: 22377 - protein, 9 aa, Homo sapiens
  Table A; Target 22377; HLA-A*23:01; DPPA2; ENSG00000163530; CTA
IPALPLPTI

SEQ ID NO: 22378 - protein, 9 aa, Homo sapiens
  Table A; Target 22378; HLA-A*24:02; DPPA2; ENSG00000163530; CTA
IPALPLPTI

SEQ ID NO: 22379 - protein, 9 aa, Homo sapiens
  Table A; Target 22379; HLA-A*30:01; DPPA2; ENSG00000163530; CTA
IPALPLPTI

SEQ ID NO: 22380 - protein, 9 aa, Homo sapiens
  Table A; Target 22380; HLA-B*07:02; DPPA2; ENSG00000163530; CTA
IPALPLPTI

SEQ ID NO: 22381 - protein, 9 aa, Homo sapiens
  Table A; Target 22381; HLA-B*13:02; DPPA2; ENSG00000163530; CTA
IPALPLPTI

SEQ ID NO: 22382 - protein, 9 aa, Homo sapiens
  Table A; Target 22382; HLA-B*35:01; DPPA2; ENSG00000163530; CTA
IPALPLPTI

SEQ ID NO: 22383 - protein, 9 aa, Homo sapiens
  Table A; Target 22383; HLA-B*35:03; DPPA2; ENSG00000163530; CTA
IPALPLPTI

SEQ ID NO: 22384 - protein, 9 aa, Homo sapiens
  Table A; Target 22384; HLA-B*38:01; DPPA2; ENSG00000163530; CTA
IPALPLPTI

SEQ ID NO: 22385 - protein, 9 aa, Homo sapiens
  Table A; Target 22385; HLA-B*49:01; DPPA2; ENSG00000163530; CTA
IPALPLPTI

SEQ ID NO: 22386 - protein, 9 aa, Homo sapiens
  Table A; Target 22386; HLA-B*54:01; DPPA2; ENSG00000163530; CTA
IPALPLPTI

SEQ ID NO: 22387 - protein, 9 aa, Homo sapiens
  Table A; Target 22387; HLA-B*55:01; DPPA2; ENSG00000163530; CTA
IPALPLPTI

SEQ ID NO: 22388 - protein, 9 aa, Homo sapiens
  Table A; Target 22388; HLA-B*56:01; DPPA2; ENSG00000163530; CTA
IPALPLPTI

SEQ ID NO: 22389 - protein, 9 aa, Homo sapiens
  Table A; Target 22389; HLA-C*07:02; DPPA2; ENSG00000163530; CTA
IPALPLPTI

SEQ ID NO: 22390 - protein, 9 aa, Homo sapiens
  Table A; Target 22390; HLA-C*16:02; DPPA2; ENSG00000163530; CTA
IPALPLPTI

SEQ ID NO: 22391 - protein, 10 aa, Homo sapiens
  Table A; Target 22391; HLA-B*07:02; DPPA2; ENSG00000163530; CTA
IPALPLPTIL

SEQ ID NO: 22392 - protein, 10 aa, Homo sapiens
  Table A; Target 22392; HLA-B*35:03; DPPA2; ENSG00000163530; CTA
IPALPLPTIL

SEQ ID NO: 22393 - protein, 10 aa, Homo sapiens
  Table A; Target 22393; HLA-B*56:01; DPPA2; ENSG00000163530; CTA
IPALPLPTIL

SEQ ID NO: 22394 - protein, 10 aa, Homo sapiens
  Table A; Target 22394; HLA-C*07:02; DPPA2; ENSG00000163530; CTA
IPALPLPTIL

SEQ ID NO: 22395 - protein, 11 aa, Homo sapiens
  Table A; Target 22395; HLA-B*54:01; DPPA2; ENSG00000163530; CTA
IPALPLPTILP

SEQ ID NO: 22396 - protein, 8 aa, Homo sapiens
  Table A; Target 22396; HLA-A*23:01; DPPA2; ENSG00000163530; CTA
IPVSVEAF

SEQ ID NO: 22397 - protein, 8 aa, Homo sapiens
  Table A; Target 22397; HLA-B*07:02; DPPA2; ENSG00000163530; CTA
IPVSVEAF

SEQ ID NO: 22398 - protein, 8 aa, Homo sapiens
  Table A; Target 22398; HLA-B*15:01; DPPA2; ENSG00000163530; CTA
IPVSVEAF

SEQ ID NO: 22399 - protein, 8 aa, Homo sapiens
  Table A; Target 22399; HLA-B*15:03; DPPA2; ENSG00000163530; CTA
IPVSVEAF

SEQ ID NO: 22400 - protein, 8 aa, Homo sapiens
  Table A; Target 22400; HLA-B*18:01; DPPA2; ENSG00000163530; CTA
IPVSVEAF

SEQ ID NO: 22401 - protein, 8 aa, Homo sapiens
  Table A; Target 22401; HLA-B*35:01; DPPA2; ENSG00000163530; CTA
IPVSVEAF

SEQ ID NO: 22402 - protein, 8 aa, Homo sapiens
  Table A; Target 22402; HLA-B*35:03; DPPA2; ENSG00000163530; CTA
IPVSVEAF

SEQ ID NO: 22403 - protein, 8 aa, Homo sapiens
  Table A; Target 22403; HLA-B*37:01; DPPA2; ENSG00000163530; CTA
IPVSVEAF

SEQ ID NO: 22404 - protein, 8 aa, Homo sapiens
  Table A; Target 22404; HLA-B*51:01; DPPA2; ENSG00000163530; CTA
IPVSVEAF

SEQ ID NO: 22405 - protein, 8 aa, Homo sapiens
  Table A; Target 22405; HLA-B*54:01; DPPA2; ENSG00000163530; CTA
IPVSVEAF

SEQ ID NO: 22406 - protein, 8 aa, Homo sapiens
  Table A; Target 22406; HLA-B*55:01; DPPA2; ENSG00000163530; CTA
IPVSVEAF

SEQ ID NO: 22407 - protein, 8 aa, Homo sapiens
  Table A; Target 22407; HLA-B*56:01; DPPA2; ENSG00000163530; CTA
IPVSVEAF

SEQ ID NO: 22408 - protein, 8 aa, Homo sapiens
  Table A; Target 22408; HLA-C*04:01; DPPA2; ENSG00000163530; CTA
IPVSVEAF

SEQ ID NO: 22409 - protein, 8 aa, Homo sapiens
  Table A; Target 22409; HLA-C*07:02; DPPA2; ENSG00000163530; CTA
IPVSVEAF

SEQ ID NO: 22410 - protein, 8 aa, Homo sapiens
  Table A; Target 22410; HLA-C*14:02; DPPA2; ENSG00000163530; CTA
IPVSVEAF

SEQ ID NO: 22411 - protein, 9 aa, Homo sapiens
  Table A; Target 22411; HLA-A*23:01; DPPA2; ENSG00000163530; CTA
IPVSVEAFL

SEQ ID NO: 22412 - protein, 9 aa, Homo sapiens
  Table A; Target 22412; HLA-A*68:02; DPPA2; ENSG00000163530; CTA
IPVSVEAFL

SEQ ID NO: 22413 - protein, 9 aa, Homo sapiens
  Table A; Target 22413; HLA-B*07:02; DPPA2; ENSG00000163530; CTA
IPVSVEAFL

SEQ ID NO: 22414 - protein, 9 aa, Homo sapiens
  Table A; Target 22414; HLA-B*35:01; DPPA2; ENSG00000163530; CTA
IPVSVEAFL

SEQ ID NO: 22415 - protein, 9 aa, Homo sapiens
  Table A; Target 22415; HLA-B*35:03; DPPA2; ENSG00000163530; CTA
IPVSVEAFL

SEQ ID NO: 22416 - protein, 9 aa, Homo sapiens
  Table A; Target 22416; HLA-B*51:01; DPPA2; ENSG00000163530; CTA
IPVSVEAFL

SEQ ID NO: 22417 - protein, 9 aa, Homo sapiens
  Table A; Target 22417; HLA-B*54:01; DPPA2; ENSG00000163530; CTA
IPVSVEAFL

SEQ ID NO: 22418 - protein, 9 aa, Homo sapiens
  Table A; Target 22418; HLA-B*55:01; DPPA2; ENSG00000163530; CTA
IPVSVEAFL

SEQ ID NO: 22419 - protein, 9 aa, Homo sapiens
  Table A; Target 22419; HLA-B*56:01; DPPA2; ENSG00000163530; CTA
IPVSVEAFL

SEQ ID NO: 22420 - protein, 9 aa, Homo sapiens
  Table A; Target 22420; HLA-C*03:03; DPPA2; ENSG00000163530; CTA
IPVSVEAFL

SEQ ID NO: 22421 - protein, 10 aa, Homo sapiens
  Table A; Target 22421; HLA-B*27:02; DPPA2; ENSG00000163530; CTA
IPVSVEAFLM

SEQ ID NO: 22422 - protein, 10 aa, Homo sapiens
  Table A; Target 22422; HLA-B*35:01; DPPA2; ENSG00000163530; CTA
IPVSVEAFLM

SEQ ID NO: 22423 - protein, 10 aa, Homo sapiens
  Table A; Target 22423; HLA-B*35:03; DPPA2; ENSG00000163530; CTA
IPVSVEAFLM

SEQ ID NO: 22424 - protein, 8 aa, Homo sapiens
  Table A; Target 22424; HLA-C*05:01; DPPA2; ENSG00000163530; CTA
ITSAPGAM

SEQ ID NO: 22425 - protein, 9 aa, Homo sapiens
  Table A; Target 22425; HLA-A*23:01; DPPA2; ENSG00000163530; CTA
ITSAPGAML

SEQ ID NO: 22426 - protein, 9 aa, Homo sapiens
  Table A; Target 22426; HLA-A*32:01; DPPA2; ENSG00000163530; CTA
ITSAPGAML

SEQ ID NO: 22427 - protein, 9 aa, Homo sapiens
  Table A; Target 22427; HLA-A*68:02; DPPA2; ENSG00000163530; CTA
ITSAPGAML

SEQ ID NO: 22428 - protein, 9 aa, Homo sapiens
  Table A; Target 22428; HLA-B*07:02; DPPA2; ENSG00000163530; CTA
ITSAPGAML

SEQ ID NO: 22429 - protein, 9 aa, Homo sapiens
  Table A; Target 22429; HLA-B*13:02; DPPA2; ENSG00000163530; CTA
ITSAPGAML

SEQ ID NO: 22430 - protein, 9 aa, Homo sapiens
  Table A; Target 22430; HLA-B*15:01; DPPA2; ENSG00000163530; CTA
ITSAPGAML

SEQ ID NO: 22431 - protein, 9 aa, Homo sapiens
  Table A; Target 22431; HLA-B*15:03; DPPA2; ENSG00000163530; CTA
ITSAPGAML

SEQ ID NO: 22432 - protein, 9 aa, Homo sapiens
  Table A; Target 22432; HLA-B*35:03; DPPA2; ENSG00000163530; CTA
ITSAPGAML

SEQ ID NO: 22433 - protein, 9 aa, Homo sapiens
  Table A; Target 22433; HLA-B*38:01; DPPA2; ENSG00000163530; CTA
ITSAPGAML

SEQ ID NO: 22434 - protein, 9 aa, Homo sapiens
  Table A; Target 22434; HLA-B*39:01; DPPA2; ENSG00000163530; CTA
ITSAPGAML

SEQ ID NO: 22435 - protein, 9 aa, Homo sapiens
  Table A; Target 22435; HLA-B*46:01; DPPA2; ENSG00000163530; CTA
ITSAPGAML

SEQ ID NO: 22436 - protein, 9 aa, Homo sapiens
  Table A; Target 22436; HLA-B*58:01; DPPA2; ENSG00000163530; CTA
ITSAPGAML

SEQ ID NO: 22437 - protein, 9 aa, Homo sapiens
  Table A; Target 22437; HLA-C*01:02; DPPA2; ENSG00000163530; CTA
ITSAPGAML

SEQ ID NO: 22438 - protein, 9 aa, Homo sapiens
  Table A; Target 22438; HLA-C*02:02; DPPA2; ENSG00000163530; CTA
ITSAPGAML

SEQ ID NO: 22439 - protein, 9 aa, Homo sapiens
  Table A; Target 22439; HLA-C*03:03; DPPA2; ENSG00000163530; CTA
ITSAPGAML

SEQ ID NO: 22440 - protein, 9 aa, Homo sapiens
  Table A; Target 22440; HLA-C*03:04; DPPA2; ENSG00000163530; CTA
ITSAPGAML

SEQ ID NO: 22441 - protein, 9 aa, Homo sapiens
  Table A; Target 22441; HLA-C*04:01; DPPA2; ENSG00000163530; CTA
ITSAPGAML

SEQ ID NO: 22442 - protein, 9 aa, Homo sapiens
  Table A; Target 22442; HLA-C*05:01; DPPA2; ENSG00000163530; CTA
ITSAPGAML

SEQ ID NO: 22443 - protein, 9 aa, Homo sapiens
  Table A; Target 22443; HLA-C*06:02; DPPA2; ENSG00000163530; CTA
ITSAPGAML

SEQ ID NO: 22444 - protein, 9 aa, Homo sapiens
  Table A; Target 22444; HLA-C*07:02; DPPA2; ENSG00000163530; CTA
ITSAPGAML

SEQ ID NO: 22445 - protein, 9 aa, Homo sapiens
  Table A; Target 22445; HLA-C*07:04; DPPA2; ENSG00000163530; CTA
ITSAPGAML

SEQ ID NO: 22446 - protein, 9 aa, Homo sapiens
  Table A; Target 22446; HLA-C*12:03; DPPA2; ENSG00000163530; CTA
ITSAPGAML

SEQ ID NO: 22447 - protein, 9 aa, Homo sapiens
  Table A; Target 22447; HLA-C*14:02; DPPA2; ENSG00000163530; CTA
ITSAPGAML

SEQ ID NO: 22448 - protein, 9 aa, Homo sapiens
  Table A; Target 22448; HLA-C*16:01; DPPA2; ENSG00000163530; CTA
ITSAPGAML

SEQ ID NO: 22449 - protein, 9 aa, Homo sapiens
  Table A; Target 22449; HLA-C*16:02; DPPA2; ENSG00000163530; CTA
ITSAPGAML

SEQ ID NO: 22450 - protein, 8 aa, Homo sapiens
  Table A; Target 22450; HLA-C*16:01; DPPA2; ENSG00000163530; CTA
KAVTKRAR

SEQ ID NO: 22451 - protein, 10 aa, Homo sapiens
  Table A; Target 22451; HLA-A*02:01; DPPA2; ENSG00000163530; CTA
KIPALPLPTI

SEQ ID NO: 22452 - protein, 10 aa, Homo sapiens
  Table A; Target 22452; HLA-A*02:07; DPPA2; ENSG00000163530; CTA
KIPALPLPTI

SEQ ID NO: 22453 - protein, 9 aa, Homo sapiens
  Table A; Target 22453; HLA-B*15:03; DPPA2; ENSG00000163530; CTA
KKYNPGHLL

SEQ ID NO: 22454 - protein, 9 aa, Homo sapiens
  Table A; Target 22454; HLA-A*02:01; DPPA2; ENSG00000163530; CTA
KMMKRLMTV

SEQ ID NO: 22455 - protein, 9 aa, Homo sapiens
  Table A; Target 22455; HLA-A*02:03; DPPA2; ENSG00000163530; CTA
KMMKRLMTV

SEQ ID NO: 22456 - protein, 9 aa, Homo sapiens
  Table A; Target 22456; HLA-B*08:01; DPPA2; ENSG00000163530; CTA
KMMKRLMTV

SEQ ID NO: 22457 - protein, 8 aa, Homo sapiens
  Table A; Target 22457; HLA-B*27:02; DPPA2; ENSG00000163530; CTA
KRLMTVEK

SEQ ID NO: 22458 - protein, 8 aa, Homo sapiens
  Table A; Target 22458; HLA-B*27:05; DPPA2; ENSG00000163530; CTA
KRLMTVEK

SEQ ID NO: 22459 - protein, 8 aa, Homo sapiens
  Table A; Target 22459; HLA-C*06:02; DPPA2; ENSG00000163530; CTA
KRLMTVEK

SEQ ID NO: 22460 - protein, 8 aa, Homo sapiens
  Table A; Target 22460; HLA-C*07:01; DPPA2; ENSG00000163530; CTA
KRLMTVEK

SEQ ID NO: 22461 - protein, 8 aa, Homo sapiens
  Table A; Target 22461; HLA-C*07:02; DPPA2; ENSG00000163530; CTA
KRLMTVEK

SEQ ID NO: 22462 - protein, 8 aa, Homo sapiens
  Table A; Target 22462; HLA-A*23:01; DPPA2; ENSG00000163530; CTA
KYNPGHLL

SEQ ID NO: 22463 - protein, 8 aa, Homo sapiens
  Table A; Target 22463; HLA-A*24:02; DPPA2; ENSG00000163530; CTA
KYNPGHLL

SEQ ID NO: 22464 - protein, 8 aa, Homo sapiens
  Table A; Target 22464; HLA-B*58:01; DPPA2; ENSG00000163530; CTA
KYNPGHLL

SEQ ID NO: 22465 - protein, 8 aa, Homo sapiens
  Table A; Target 22465; HLA-C*14:02; DPPA2; ENSG00000163530; CTA
KYNPGHLL

SEQ ID NO: 22466 - protein, 9 aa, Homo sapiens
  Table A; Target 22466; HLA-A*24:02; DPPA2; ENSG00000163530; CTA
KYNPGHLLQ

SEQ ID NO: 22467 - protein, 9 aa, Homo sapiens
  Table A; Target 22467; HLA-B*54:01; DPPA2; ENSG00000163530; CTA
LASWARIAA

SEQ ID NO: 22468 - protein, 9 aa, Homo sapiens
  Table A; Target 22468; HLA-B*56:01; DPPA2; ENSG00000163530; CTA
LASWARIAA

SEQ ID NO: 22469 - protein, 9 aa, Homo sapiens
  Table A; Target 22469; HLA-C*16:01; DPPA2; ENSG00000163530; CTA
LASWARIAA

SEQ ID NO: 22470 - protein, 8 aa, Homo sapiens
  Table A; Target 22470; HLA-B*37:01; DPPA2; ENSG00000163530; CTA
LDSSKKNF

SEQ ID NO: 22471 - protein, 9 aa, Homo sapiens
  Table A; Target 22471; HLA-A*24:02; DPPA2; ENSG00000163530; CTA
LMQASGVRW

SEQ ID NO: 22472 - protein, 9 aa, Homo sapiens
  Table A; Target 22472; HLA-A*32:01; DPPA2; ENSG00000163530; CTA
LMQASGVRW

SEQ ID NO: 22473 - protein, 9 aa, Homo sapiens
  Table A; Target 22473; HLA-B*57:01; DPPA2; ENSG00000163530; CTA
LMQASGVRW

SEQ ID NO: 22474 - protein, 9 aa, Homo sapiens
  Table A; Target 22474; HLA-B*58:01; DPPA2; ENSG00000163530; CTA
LMQASGVRW

SEQ ID NO: 22475 - protein, 9 aa, Homo sapiens
  Table A; Target 22475; HLA-B*51:01; DPPA2; ENSG00000163530; CTA
LPACIFPSP

SEQ ID NO: 22476 - protein, 9 aa, Homo sapiens
  Table A; Target 22476; HLA-B*54:01; DPPA2; ENSG00000163530; CTA
LPACIFPSP

SEQ ID NO: 22477 - protein, 9 aa, Homo sapiens
  Table A; Target 22477; HLA-B*56:01; DPPA2; ENSG00000163530; CTA
LPACIFPSP

SEQ ID NO: 22478 - protein, 11 aa, Homo sapiens
  Table A; Target 22478; HLA-B*51:01; DPPA2; ENSG00000163530; CTA
LPACIFPSPGI

SEQ ID NO: 22479 - protein, 9 aa, Homo sapiens
  Table A; Target 22479; HLA-B*54:01; DPPA2; ENSG00000163530; CTA
LPLPTILPP

SEQ ID NO: 22480 - protein, 9 aa, Homo sapiens
  Table A; Target 22480; HLA-B*56:01; DPPA2; ENSG00000163530; CTA
LPLPTILPP

SEQ ID NO: 22481 - protein, 10 aa, Homo sapiens
  Table A; Target 22481; HLA-A*23:01; DPPA2; ENSG00000163530; CTA
LPLPTILPPI

SEQ ID NO: 22482 - protein, 10 aa, Homo sapiens
  Table A; Target 22482; HLA-B*51:01; DPPA2; ENSG00000163530; CTA
LPLPTILPPI

SEQ ID NO: 22483 - protein, 10 aa, Homo sapiens
  Table A; Target 22483; HLA-B*54:01; DPPA2; ENSG00000163530; CTA
LPLPTILPPI

SEQ ID NO: 22484 - protein, 8 aa, Homo sapiens
  Table A; Target 22484; HLA-B*51:01; DPPA2; ENSG00000163530; CTA
LPTILPPI

SEQ ID NO: 22485 - protein, 8 aa, Homo sapiens
  Table A; Target 22485; HLA-B*54:01; DPPA2; ENSG00000163530; CTA
LPTILPPI

SEQ ID NO: 22486 - protein, 11 aa, Homo sapiens
  Table A; Target 22486; HLA-B*51:01; DPPA2; ENSG00000163530; CTA
LPTILPPINKV

SEQ ID NO: 22487 - protein, 11 aa, Homo sapiens
  Table A; Target 22487; HLA-B*54:01; DPPA2; ENSG00000163530; CTA
LPTILPPINKV

SEQ ID NO: 22488 - protein, 11 aa, Homo sapiens
  Table A; Target 22488; HLA-B*56:01; DPPA2; ENSG00000163530; CTA
LPTILPPINKV

SEQ ID NO: 22489 - protein, 9 aa, Homo sapiens
  Table A; Target 22489; HLA-A*25:01; DPPA2; ENSG00000163530; CTA
LQFHAGQAW

SEQ ID NO: 22490 - protein, 9 aa, Homo sapiens
  Table A; Target 22490; HLA-A*32:01; DPPA2; ENSG00000163530; CTA
LQFHAGQAW

SEQ ID NO: 22491 - protein, 8 aa, Homo sapiens
  Table A; Target 22491; HLA-B*57:01; DPPA2; ENSG00000163530; CTA
LSADTKGW

SEQ ID NO: 22492 - protein, 8 aa, Homo sapiens
  Table A; Target 22492; HLA-B*58:01; DPPA2; ENSG00000163530; CTA
LSADTKGW

SEQ ID NO: 22493 - protein, 11 aa, Homo sapiens
  Table A; Target 22493; HLA-B*49:01; DPPA2; ENSG00000163530; CTA
MEPSVSSTSDV

SEQ ID NO: 22494 - protein, 8 aa, Homo sapiens
  Table A; Target 22494; HLA-B*18:01; DPPA2; ENSG00000163530; CTA
MEQMEPSV

SEQ ID NO: 22495 - protein, 8 aa, Homo sapiens
  Table A; Target 22495; HLA-B*40:02; DPPA2; ENSG00000163530; CTA
MEQMEPSV

SEQ ID NO: 22496 - protein, 8 aa, Homo sapiens
  Table A; Target 22496; HLA-B*49:01; DPPA2; ENSG00000163530; CTA
MEQMEPSV

SEQ ID NO: 22497 - protein, 9 aa, Homo sapiens
  Table A; Target 22497; HLA-B*54:01; DPPA2; ENSG00000163530; CTA
MISLFLLPA

SEQ ID NO: 22498 - protein, 9 aa, Homo sapiens
  Table A; Target 22498; HLA-A*02:03; DPPA2; ENSG00000163530; CTA
MLASWARIA

SEQ ID NO: 22499 - protein, 9 aa, Homo sapiens
  Table A; Target 22499; HLA-A*02:04; DPPA2; ENSG00000163530; CTA
MLASWARIA

SEQ ID NO: 22500 - protein, 10 aa, Homo sapiens
  Table A; Target 22500; HLA-B*54:01; DPPA2; ENSG00000163530; CTA
MLASWARIAA

SEQ ID NO: 22501 - protein, 8 aa, Homo sapiens
  Table A; Target 22501; HLA-B*08:01; DPPA2; ENSG00000163530; CTA
MMKRLMTV

SEQ ID NO: 22502 - protein, 9 aa, Homo sapiens
  Table A; Target 22502; HLA-B*35:03; DPPA2; ENSG00000163530; CTA
MPEMSQETR

SEQ ID NO: 22503 - protein, 10 aa, Homo sapiens
  Table A; Target 22503; HLA-B*07:02; DPPA2; ENSG00000163530; CTA
MPEMSQETRL

SEQ ID NO: 22504 - protein, 10 aa, Homo sapiens
  Table A; Target 22504; HLA-B*35:01; DPPA2; ENSG00000163530; CTA
MPEMSQETRL

SEQ ID NO: 22505 - protein, 10 aa, Homo sapiens
  Table A; Target 22505; HLA-B*35:03; DPPA2; ENSG00000163530; CTA
MPEMSQETRL

SEQ ID NO: 22506 - protein, 10 aa, Homo sapiens
  Table A; Target 22506; HLA-B*55:01; DPPA2; ENSG00000163530; CTA
MPEMSQETRL

SEQ ID NO: 22507 - protein, 10 aa, Homo sapiens
  Table A; Target 22507; HLA-C*03:03; DPPA2; ENSG00000163530; CTA
MPEMSQETRL

SEQ ID NO: 22508 - protein, 8 aa, Homo sapiens
  Table A; Target 22508; HLA-A*25:01; DPPA2; ENSG00000163530; CTA
MQASGVRW

SEQ ID NO: 22509 - protein, 8 aa, Homo sapiens
  Table A; Target 22509; HLA-A*32:01; DPPA2; ENSG00000163530; CTA
MQASGVRW

SEQ ID NO: 22510 - protein, 8 aa, Homo sapiens
  Table A; Target 22510; HLA-B*44:02; DPPA2; ENSG00000163530; CTA
MQASGVRW

SEQ ID NO: 22511 - protein, 8 aa, Homo sapiens
  Table A; Target 22511; HLA-B*44:03; DPPA2; ENSG00000163530; CTA
MQASGVRW

SEQ ID NO: 22512 - protein, 8 aa, Homo sapiens
  Table A; Target 22512; HLA-C*07:04; DPPA2; ENSG00000163530; CTA
MQASGVRW

SEQ ID NO: 22513 - protein, 10 aa, Homo sapiens
  Table A; Target 22513; HLA-A*01:01; DPPA2; ENSG00000163530; CTA
MSDANLDSSK

SEQ ID NO: 22514 - protein, 10 aa, Homo sapiens
  Table A; Target 22514; HLA-B*27:02; DPPA2; ENSG00000163530; CTA
MSDANLDSSK

SEQ ID NO: 22515 - protein, 9 aa, Homo sapiens
  Table A; Target 22515; HLA-A*33:03; DPPA2; ENSG00000163530; CTA
MSQETRLQR

SEQ ID NO: 22516 - protein, 9 aa, Homo sapiens
  Table A; Target 22516; HLA-A*03:02; DPPA2; ENSG00000163530; CTA
NEQFTAPQK

SEQ ID NO: 22517 - protein, 9 aa, Homo sapiens
  Table A; Target 22517; HLA-A*11:01; DPPA2; ENSG00000163530; CTA
NEQFTAPQK

SEQ ID NO: 22518 - protein, 10 aa, Homo sapiens
  Table A; Target 22518; HLA-B*49:01; DPPA2; ENSG00000163530; CTA
NERAEETNTV

SEQ ID NO: 22519 - protein, 8 aa, Homo sapiens
  Table A; Target 22519; HLA-B*15:01; DPPA2; ENSG00000163530; CTA
NGKKIEVY

SEQ ID NO: 22520 - protein, 8 aa, Homo sapiens
  Table A; Target 22520; HLA-B*15:03; DPPA2; ENSG00000163530; CTA
NGKKIEVY

SEQ ID NO: 22521 - protein, 8 aa, Homo sapiens
  Table A; Target 22521; HLA-B*18:01; DPPA2; ENSG00000163530; CTA
NGKKIEVY

SEQ ID NO: 22522 - protein, 8 aa, Homo sapiens
  Table A; Target 22522; HLA-B*46:01; DPPA2; ENSG00000163530; CTA
NGKKIEVY

SEQ ID NO: 22523 - protein, 9 aa, Homo sapiens
  Table A; Target 22523; HLA-C*04:01; DPPA2; ENSG00000163530; CTA
NLDSSKKNF

SEQ ID NO: 22524 - protein, 10 aa, Homo sapiens
  Table A; Target 22524; HLA-A*02:07; DPPA2; ENSG00000163530; CTA
NLDSSKKNFL

SEQ ID NO: 22525 - protein, 9 aa, Homo sapiens
  Table A; Target 22525; HLA-A*02:01; DPPA2; ENSG00000163530; CTA
NMEQMEPSV

SEQ ID NO: 22526 - protein, 9 aa, Homo sapiens
  Table A; Target 22526; HLA-C*05:01; DPPA2; ENSG00000163530; CTA
NMEQMEPSV

SEQ ID NO: 22527 - protein, 9 aa, Homo sapiens
  Table A; Target 22527; HLA-A*68:02; DPPA2; ENSG00000163530; CTA
NSCSIPVSV

SEQ ID NO: 22528 - protein, 9 aa, Homo sapiens
  Table A; Target 22528; HLA-C*02:02; DPPA2; ENSG00000163530; CTA
NSCSIPVSV

SEQ ID NO: 22529 - protein, 9 aa, Homo sapiens
  Table A; Target 22529; HLA-C*12:03; DPPA2; ENSG00000163530; CTA
NSCSIPVSV

SEQ ID NO: 22530 - protein, 9 aa, Homo sapiens
  Table A; Target 22530; HLA-A*02:01; DPPA2; ENSG00000163530; CTA
NTVEVITSA

SEQ ID NO: 22531 - protein, 9 aa, Homo sapiens
  Table A; Target 22531; HLA-A*02:03; DPPA2; ENSG00000163530; CTA
NTVEVITSA

SEQ ID NO: 22532 - protein, 9 aa, Homo sapiens
  Table A; Target 22532; HLA-A*25:01; DPPA2; ENSG00000163530; CTA
NTVEVITSA

SEQ ID NO: 22533 - protein, 9 aa, Homo sapiens
  Table A; Target 22533; HLA-A*26:01; DPPA2; ENSG00000163530; CTA
NTVEVITSA

SEQ ID NO: 22534 - protein, 9 aa, Homo sapiens
  Table A; Target 22534; HLA-A*68:02; DPPA2; ENSG00000163530; CTA
NTVEVITSA

SEQ ID NO: 22535 - protein, 9 aa, Homo sapiens
  Table A; Target 22535; HLA-B*46:01; DPPA2; ENSG00000163530; CTA
NTVEVITSA

SEQ ID NO: 22536 - protein, 9 aa, Homo sapiens
  Table A; Target 22536; HLA-B*54:01; DPPA2; ENSG00000163530; CTA
NTVEVITSA

SEQ ID NO: 22537 - protein, 9 aa, Homo sapiens
  Table A; Target 22537; HLA-B*56:01; DPPA2; ENSG00000163530; CTA
NTVEVITSA

SEQ ID NO: 22538 - protein, 9 aa, Homo sapiens
  Table A; Target 22538; HLA-C*07:06; DPPA2; ENSG00000163530; CTA
NTVEVITSA

SEQ ID NO: 22539 - protein, 8 aa, Homo sapiens
  Table A; Target 22539; HLA-B*51:01; DPPA2; ENSG00000163530; CTA
PALPLPTI

SEQ ID NO: 22540 - protein, 9 aa, Homo sapiens
  Table A; Target 22540; HLA-A*30:01; DPPA2; ENSG00000163530; CTA
PEMSQETRL

SEQ ID NO: 22541 - protein, 9 aa, Homo sapiens
  Table A; Target 22541; HLA-B*27:02; DPPA2; ENSG00000163530; CTA
PEMSQETRL

SEQ ID NO: 22542 - protein, 9 aa, Homo sapiens
  Table A; Target 22542; HLA-B*40:01; DPPA2; ENSG00000163530; CTA
PEMSQETRL

SEQ ID NO: 22543 - protein, 9 aa, Homo sapiens
  Table A; Target 22543; HLA-B*40:02; DPPA2; ENSG00000163530; CTA
PEMSQETRL

SEQ ID NO: 22544 - protein, 9 aa, Homo sapiens
  Table A; Target 22544; HLA-B*44:02; DPPA2; ENSG00000163530; CTA
PEMSQETRL

SEQ ID NO: 22545 - protein, 9 aa, Homo sapiens
  Table A; Target 22545; HLA-B*44:03; DPPA2; ENSG00000163530; CTA
PEMSQETRL

SEQ ID NO: 22546 - protein, 9 aa, Homo sapiens
  Table A; Target 22546; HLA-B*49:01; DPPA2; ENSG00000163530; CTA
PEMSQETRL

SEQ ID NO: 22547 - protein, 9 aa, Homo sapiens
  Table A; Target 22547; HLA-A*02:04; DPPA2; ENSG00000163530; CTA
PLPTILPPI

SEQ ID NO: 22548 - protein, 9 aa, Homo sapiens
  Table A; Target 22548; HLA-A*02:07; DPPA2; ENSG00000163530; CTA
PLPTILPPI

SEQ ID NO: 22549 - protein, 9 aa, Homo sapiens
  Table A; Target 22549; HLA-A*24:02; DPPA2; ENSG00000163530; CTA
PLPTILPPI

SEQ ID NO: 22550 - protein, 9 aa, Homo sapiens
  Table A; Target 22550; HLA-A*03:01; DPPA2; ENSG00000163530; CTA
PTILPPINK

SEQ ID NO: 22551 - protein, 9 aa, Homo sapiens
  Table A; Target 22551; HLA-A*03:02; DPPA2; ENSG00000163530; CTA
PTILPPINK

SEQ ID NO: 22552 - protein, 9 aa, Homo sapiens
  Table A; Target 22552; HLA-A*11:01; DPPA2; ENSG00000163530; CTA
PTILPPINK

SEQ ID NO: 22553 - protein, 8 aa, Homo sapiens
  Table A; Target 22553; HLA-C*12:03; DPPA2; ENSG00000163530; CTA
QAWVPTTH

SEQ ID NO: 22554 - protein, 9 aa, Homo sapiens
  Table A; Target 22554; HLA-A*31:01; DPPA2; ENSG00000163530; CTA
QAWVPTTHR

SEQ ID NO: 22555 - protein, 9 aa, Homo sapiens
  Table A; Target 22555; HLA-A*33:01; DPPA2; ENSG00000163530; CTA
QAWVPTTHR

SEQ ID NO: 22556 - protein, 9 aa, Homo sapiens
  Table A; Target 22556; HLA-A*33:03; DPPA2; ENSG00000163530; CTA
QAWVPTTHR

SEQ ID NO: 22557 - protein, 9 aa, Homo sapiens
  Table A; Target 22557; HLA-A*68:01; DPPA2; ENSG00000163530; CTA
QAWVPTTHR

SEQ ID NO: 22558 - protein, 9 aa, Homo sapiens
  Table A; Target 22558; HLA-B*51:01; DPPA2; ENSG00000163530; CTA
QAWVPTTHR

SEQ ID NO: 22559 - protein, 9 aa, Homo sapiens
  Table A; Target 22559; HLA-B*57:01; DPPA2; ENSG00000163530; CTA
QAWVPTTHR

SEQ ID NO: 22560 - protein, 9 aa, Homo sapiens
  Table A; Target 22560; HLA-C*07:06; DPPA2; ENSG00000163530; CTA
QAWVPTTHR

SEQ ID NO: 22561 - protein, 8 aa, Homo sapiens
  Table A; Target 22561; HLA-C*14:02; DPPA2; ENSG00000163530; CTA
QFHAGQAW

SEQ ID NO: 22562 - protein, 9 aa, Homo sapiens
  Table A; Target 22562; HLA-A*33:03; DPPA2; ENSG00000163530; CTA
QFTAPQKAR

SEQ ID NO: 22563 - protein, 9 aa, Homo sapiens
  Table A; Target 22563; HLA-A*03:01; DPPA2; ENSG00000163530; CTA
QLGLSTNGK

SEQ ID NO: 22564 - protein, 9 aa, Homo sapiens
  Table A; Target 22564; HLA-A*03:02; DPPA2; ENSG00000163530; CTA
QLGLSTNGK

SEQ ID NO: 22565 - protein, 8 aa, Homo sapiens
  Table A; Target 22565; HLA-B*56:01; DPPA2; ENSG00000163530; CTA
QPKALNSC

SEQ ID NO: 22566 - protein, 10 aa, Homo sapiens
  Table A; Target 22566; HLA-A*03:02; DPPA2; ENSG00000163530; CTA
QQLGLSTNGK

SEQ ID NO: 22567 - protein, 10 aa, Homo sapiens
  Table A; Target 22567; HLA-A*11:01; DPPA2; ENSG00000163530; CTA
QQLGLSTNGK

SEQ ID NO: 22568 - protein, 10 aa, Homo sapiens
  Table A; Target 22568; HLA-B*27:02; DPPA2; ENSG00000163530; CTA
QQLGLSTNGK

SEQ ID NO: 22569 - protein, 9 aa, Homo sapiens
  Table A; Target 22569; HLA-B*27:05; DPPA2; ENSG00000163530; CTA
QRSYEMNER

SEQ ID NO: 22570 - protein, 11 aa, Homo sapiens
  Table A; Target 22570; HLA-A*03:01; DPPA2; ENSG00000163530; CTA
QTNEQFTAPQK

SEQ ID NO: 22571 - protein, 11 aa, Homo sapiens
  Table A; Target 22571; HLA-A*03:02; DPPA2; ENSG00000163530; CTA
QTNEQFTAPQK

SEQ ID NO: 22572 - protein, 11 aa, Homo sapiens
  Table A; Target 22572; HLA-A*11:01; DPPA2; ENSG00000163530; CTA
QTNEQFTAPQK

SEQ ID NO: 22573 - protein, 11 aa, Homo sapiens
  Table A; Target 22573; HLA-A*68:01; DPPA2; ENSG00000163530; CTA
QTNEQFTAPQK

SEQ ID NO: 22574 - protein, 11 aa, Homo sapiens
  Table A; Target 22574; HLA-C*07:06; DPPA2; ENSG00000163530; CTA
QTNEQFTAPQK

SEQ ID NO: 22575 - protein, 8 aa, Homo sapiens
  Table A; Target 22575; HLA-C*05:01; DPPA2; ENSG00000163530; CTA
RAEETNTV

SEQ ID NO: 22576 - protein, 10 aa, Homo sapiens
  Table A; Target 22576; HLA-C*05:01; DPPA2; ENSG00000163530; CTA
RAEETNTVEV

SEQ ID NO: 22577 - protein, 8 aa, Homo sapiens
  Table A; Target 22577; HLA-B*08:01; DPPA2; ENSG00000163530; CTA
RAVQPKAL

SEQ ID NO: 22578 - protein, 8 aa, Homo sapiens
  Table A; Target 22578; HLA-B*58:01; DPPA2; ENSG00000163530; CTA
RAVQPKAL

SEQ ID NO: 22579 - protein, 8 aa, Homo sapiens
  Table A; Target 22579; HLA-C*03:04; DPPA2; ENSG00000163530; CTA
RAVQPKAL

SEQ ID NO: 22580 - protein, 8 aa, Homo sapiens
  Table A; Target 22580; HLA-C*16:01; DPPA2; ENSG00000163530; CTA
RAVQPKAL

SEQ ID NO: 22581 - protein, 10 aa, Homo sapiens
  Table A; Target 22581; HLA-A*03:01; DPPA2; ENSG00000163530; CTA
RIAARAVQPK

SEQ ID NO: 22582 - protein, 10 aa, Homo sapiens
  Table A; Target 22582; HLA-A*03:02; DPPA2; ENSG00000163530; CTA
RIAARAVQPK

SEQ ID NO: 22583 - protein, 10 aa, Homo sapiens
  Table A; Target 22583; HLA-B*57:01; DPPA2; ENSG00000163530; CTA
RLLSADTKGW

SEQ ID NO: 22584 - protein, 8 aa, Homo sapiens
  Table A; Target 22584; HLA-A*02:04; DPPA2; ENSG00000163530; CTA
RMISLFLL

SEQ ID NO: 22585 - protein, 8 aa, Homo sapiens
  Table A; Target 22585; HLA-A*31:01; DPPA2; ENSG00000163530; CTA
RSYEMNER

SEQ ID NO: 22586 - protein, 10 aa, Homo sapiens
  Table A; Target 22586; HLA-A*25:01; DPPA2; ENSG00000163530; CTA
SAPGAMLASW

SEQ ID NO: 22587 - protein, 10 aa, Homo sapiens
  Table A; Target 22587; HLA-A*26:01; DPPA2; ENSG00000163530; CTA
SAPGAMLASW

SEQ ID NO: 22588 - protein, 10 aa, Homo sapiens
  Table A; Target 22588; HLA-B*44:02; DPPA2; ENSG00000163530; CTA
SAPGAMLASW

SEQ ID NO: 22589 - protein, 10 aa, Homo sapiens
  Table A; Target 22589; HLA-B*58:01; DPPA2; ENSG00000163530; CTA
SAPGAMLASW

SEQ ID NO: 22590 - protein, 9 aa, Homo sapiens
  Table A; Target 22590; HLA-B*27:02; DPPA2; ENSG00000163530; CTA
SDANLDSSK

SEQ ID NO: 22591 - protein, 10 aa, Homo sapiens
  Table A; Target 22591; HLA-A*11:01; DPPA2; ENSG00000163530; CTA
SDANLDSSKK

SEQ ID NO: 22592 - protein, 10 aa, Homo sapiens
  Table A; Target 22592; HLA-B*27:02; DPPA2; ENSG00000163530; CTA
SDANLDSSKK

SEQ ID NO: 22593 - protein, 9 aa, Homo sapiens
  Table A; Target 22593; HLA-A*02:07; DPPA2; ENSG00000163530; CTA
SIPVSVEAF

SEQ ID NO: 22594 - protein, 9 aa, Homo sapiens
  Table A; Target 22594; HLA-A*24:02; DPPA2; ENSG00000163530; CTA
SIPVSVEAF

SEQ ID NO: 22595 - protein, 9 aa, Homo sapiens
  Table A; Target 22595; HLA-A*25:01; DPPA2; ENSG00000163530; CTA
SIPVSVEAF

SEQ ID NO: 22596 - protein, 9 aa, Homo sapiens
  Table A; Target 22596; HLA-A*26:01; DPPA2; ENSG00000163530; CTA
SIPVSVEAF

SEQ ID NO: 22597 - protein, 9 aa, Homo sapiens
  Table A; Target 22597; HLA-A*32:01; DPPA2; ENSG00000163530; CTA
SIPVSVEAF

SEQ ID NO: 22598 - protein, 9 aa, Homo sapiens
  Table A; Target 22598; HLA-B*15:01; DPPA2; ENSG00000163530; CTA
SIPVSVEAF

SEQ ID NO: 22599 - protein, 9 aa, Homo sapiens
  Table A; Target 22599; HLA-B*46:01; DPPA2; ENSG00000163530; CTA
SIPVSVEAF

SEQ ID NO: 22600 - protein, 9 aa, Homo sapiens
  Table A; Target 22600; HLA-C*01:02; DPPA2; ENSG00000163530; CTA
SIPVSVEAF

SEQ ID NO: 22601 - protein, 9 aa, Homo sapiens
  Table A; Target 22601; HLA-C*07:04; DPPA2; ENSG00000163530; CTA
SIPVSVEAF

SEQ ID NO: 22602 - protein, 9 aa, Homo sapiens
  Table A; Target 22602; HLA-C*14:02; DPPA2; ENSG00000163530; CTA
SIPVSVEAF

SEQ ID NO: 22603 - protein, 9 aa, Homo sapiens
  Table A; Target 22603; HLA-A*02:01; DPPA2; ENSG00000163530; CTA
SLFLLPACI

SEQ ID NO: 22604 - protein, 9 aa, Homo sapiens
  Table A; Target 22604; HLA-A*02:03; DPPA2; ENSG00000163530; CTA
SLFLLPACI

SEQ ID NO: 22605 - protein, 9 aa, Homo sapiens
  Table A; Target 22605; HLA-A*02:04; DPPA2; ENSG00000163530; CTA
SLFLLPACI

SEQ ID NO: 22606 - protein, 9 aa, Homo sapiens
  Table A; Target 22606; HLA-A*30:01; DPPA2; ENSG00000163530; CTA
SLFLLPACI

SEQ ID NO: 22607 - protein, 9 aa, Homo sapiens
  Table A; Target 22607; HLA-B*13:02; DPPA2; ENSG00000163530; CTA
SLFLLPACI

SEQ ID NO: 22608 - protein, 9 aa, Homo sapiens
  Table A; Target 22608; HLA-B*35:03; DPPA2; ENSG00000163530; CTA
SPGIEDNML

SEQ ID NO: 22609 - protein, 10 aa, Homo sapiens
  Table A; Target 22609; HLA-A*11:01; DPPA2; ENSG00000163530; CTA
SSTSDVKLEK

SEQ ID NO: 22610 - protein, 10 aa, Homo sapiens
  Table A; Target 22610; HLA-C*07:06; DPPA2; ENSG00000163530; CTA
SSTSDVKLEK

SEQ ID NO: 22611 - protein, 10 aa, Homo sapiens
  Table A; Target 22611; HLA-A*25:01; DPPA2; ENSG00000163530; CTA
STNGKKIEVY

SEQ ID NO: 22612 - protein, 10 aa, Homo sapiens
  Table A; Target 22612; HLA-A*26:01; DPPA2; ENSG00000163530; CTA
STNGKKIEVY

SEQ ID NO: 22613 - protein, 10 aa, Homo sapiens
  Table A; Target 22613; HLA-A*30:02; DPPA2; ENSG00000163530; CTA
STNGKKIEVY

SEQ ID NO: 22614 - protein, 10 aa, Homo sapiens
  Table A; Target 22614; HLA-A*32:01; DPPA2; ENSG00000163530; CTA
STNGKKIEVY

SEQ ID NO: 22615 - protein, 10 aa, Homo sapiens
  Table A; Target 22615; HLA-B*15:01; DPPA2; ENSG00000163530; CTA
STNGKKIEVY

SEQ ID NO: 22616 - protein, 9 aa, Homo sapiens
  Table A; Target 22616; HLA-A*01:01; DPPA2; ENSG00000163530; CTA
STSDVKLEK

SEQ ID NO: 22617 - protein, 9 aa, Homo sapiens
  Table A; Target 22617; HLA-A*03:01; DPPA2; ENSG00000163530; CTA
STSDVKLEK

SEQ ID NO: 22618 - protein, 9 aa, Homo sapiens
  Table A; Target 22618; HLA-A*03:02; DPPA2; ENSG00000163530; CTA
STSDVKLEK

SEQ ID NO: 22619 - protein, 9 aa, Homo sapiens
  Table A; Target 22619; HLA-A*29:02; DPPA2; ENSG00000163530; CTA
STSDVKLEK

SEQ ID NO: 22620 - protein, 9 aa, Homo sapiens
  Table A; Target 22620; HLA-A*31:01; DPPA2; ENSG00000163530; CTA
STSDVKLEK

SEQ ID NO: 22621 - protein, 9 aa, Homo sapiens
  Table A; Target 22621; HLA-A*33:01; DPPA2; ENSG00000163530; CTA
STSDVKLEK

SEQ ID NO: 22622 - protein, 9 aa, Homo sapiens
  Table A; Target 22622; HLA-A*33:03; DPPA2; ENSG00000163530; CTA
STSDVKLEK

SEQ ID NO: 22623 - protein, 9 aa, Homo sapiens
  Table A; Target 22623; HLA-A*68:01; DPPA2; ENSG00000163530; CTA
STSDVKLEK

SEQ ID NO: 22624 - protein, 9 aa, Homo sapiens
  Table A; Target 22624; HLA-B*13:02; DPPA2; ENSG00000163530; CTA
STSDVKLEK

SEQ ID NO: 22625 - protein, 9 aa, Homo sapiens
  Table A; Target 22625; HLA-B*57:01; DPPA2; ENSG00000163530; CTA
STSDVKLEK

SEQ ID NO: 22626 - protein, 9 aa, Homo sapiens
  Table A; Target 22626; HLA-C*07:06; DPPA2; ENSG00000163530; CTA
STSDVKLEK

SEQ ID NO: 22627 - protein, 9 aa, Homo sapiens
  Table A; Target 22627; HLA-C*16:01; DPPA2; ENSG00000163530; CTA
STSDVKLEK

SEQ ID NO: 22628 - protein, 9 aa, Homo sapiens
  Table A; Target 22628; HLA-C*16:02; DPPA2; ENSG00000163530; CTA
STSDVKLEK

SEQ ID NO: 22629 - protein, 11 aa, Homo sapiens
  Table A; Target 22629; HLA-A*03:02; DPPA2; ENSG00000163530; CTA
STSDVKLEKPK

SEQ ID NO: 22630 - protein, 11 aa, Homo sapiens
  Table A; Target 22630; HLA-A*11:01; DPPA2; ENSG00000163530; CTA
STSDVKLEKPK

SEQ ID NO: 22631 - protein, 9 aa, Homo sapiens
  Table A; Target 22631; HLA-A*02:01; DPPA2; ENSG00000163530; CTA
SVILTLVPV

SEQ ID NO: 22632 - protein, 9 aa, Homo sapiens
  Table A; Target 22632; HLA-A*02:07; DPPA2; ENSG00000163530; CTA
SVILTLVPV

SEQ ID NO: 22633 - protein, 9 aa, Homo sapiens
  Table A; Target 22633; HLA-A*68:02; DPPA2; ENSG00000163530; CTA
SVILTLVPV

SEQ ID NO: 22634 - protein, 9 aa, Homo sapiens
  Table A; Target 22634; HLA-B*56:01; DPPA2; ENSG00000163530; CTA
SVILTLVPV

SEQ ID NO: 22635 - protein, 10 aa, Homo sapiens
  Table A; Target 22635; HLA-A*03:01; DPPA2; ENSG00000163530; CTA
SVILTLVPVK

SEQ ID NO: 22636 - protein, 10 aa, Homo sapiens
  Table A; Target 22636; HLA-A*03:02; DPPA2; ENSG00000163530; CTA
SVILTLVPVK

SEQ ID NO: 22637 - protein, 10 aa, Homo sapiens
  Table A; Target 22637; HLA-A*11:01; DPPA2; ENSG00000163530; CTA
SVILTLVPVK

SEQ ID NO: 22638 - protein, 10 aa, Homo sapiens
  Table A; Target 22638; HLA-B*27:02; DPPA2; ENSG00000163530; CTA
SVILTLVPVK

SEQ ID NO: 22639 - protein, 9 aa, Homo sapiens
  Table A; Target 22639; HLA-A*03:02; DPPA2; ENSG00000163530; CTA
SVSSTSDVK

SEQ ID NO: 22640 - protein, 9 aa, Homo sapiens
  Table A; Target 22640; HLA-A*11:01; DPPA2; ENSG00000163530; CTA
SVSSTSDVK

SEQ ID NO: 22641 - protein, 9 aa, Homo sapiens
  Table A; Target 22641; HLA-C*07:06; DPPA2; ENSG00000163530; CTA
SVSSTSDVK

SEQ ID NO: 22642 - protein, 10 aa, Homo sapiens
  Table A; Target 22642; HLA-B*35:03; DPPA2; ENSG00000163530; CTA
SVSSTSDVKL

SEQ ID NO: 22643 - protein, 8 aa, Homo sapiens
  Table A; Target 22643; HLA-A*03:01; DPPA2; ENSG00000163530; CTA
TILPPINK

SEQ ID NO: 22644 - protein, 8 aa, Homo sapiens
  Table A; Target 22644; HLA-A*03:02; DPPA2; ENSG00000163530; CTA
TILPPINK

SEQ ID NO: 22645 - protein, 8 aa, Homo sapiens
  Table A; Target 22645; HLA-A*11:01; DPPA2; ENSG00000163530; CTA
TILPPINK

SEQ ID NO: 22646 - protein, 9 aa, Homo sapiens
  Table A; Target 22646; HLA-A*02:01; DPPA2; ENSG00000163530; CTA
TILPPINKV

SEQ ID NO: 22647 - protein, 9 aa, Homo sapiens
  Table A; Target 22647; HLA-A*02:03; DPPA2; ENSG00000163530; CTA
TILPPINKV

SEQ ID NO: 22648 - protein, 9 aa, Homo sapiens
  Table A; Target 22648; HLA-A*02:04; DPPA2; ENSG00000163530; CTA
TILPPINKV

SEQ ID NO: 22649 - protein, 9 aa, Homo sapiens
  Table A; Target 22649; HLA-A*02:07; DPPA2; ENSG00000163530; CTA
TILPPINKV

SEQ ID NO: 22650 - protein, 9 aa, Homo sapiens
  Table A; Target 22650; HLA-A*68:02; DPPA2; ENSG00000163530; CTA
TILPPINKV

SEQ ID NO: 22651 - protein, 9 aa, Homo sapiens
  Table A; Target 22651; HLA-B*13:02; DPPA2; ENSG00000163530; CTA
TILPPINKV

SEQ ID NO: 22652 - protein, 11 aa, Homo sapiens
  Table A; Target 22652; HLA-A*31:01; DPPA2; ENSG00000163530; CTA
TILPPINKVCR

SEQ ID NO: 22653 - protein, 9 aa, Homo sapiens
  Table A; Target 22653; HLA-A*02:03; DPPA2; ENSG00000163530; CTA
TLRDWCQQL

SEQ ID NO: 22654 - protein, 9 aa, Homo sapiens
  Table A; Target 22654; HLA-A*02:04; DPPA2; ENSG00000163530; CTA
TLRDWCQQL

SEQ ID NO: 22655 - protein, 10 aa, Homo sapiens
  Table A; Target 22655; HLA-B*27:02; DPPA2; ENSG00000163530; CTA
TNEQFTAPQK

SEQ ID NO: 22656 - protein, 9 aa, Homo sapiens
  Table A; Target 22656; HLA-B*39:01; DPPA2; ENSG00000163530; CTA
TNTVEVITS

SEQ ID NO: 22657 - protein, 8 aa, Homo sapiens
  Table A; Target 22657; HLA-C*01:02; DPPA2; ENSG00000163530; CTA
TSAPGAML

SEQ ID NO: 22658 - protein, 8 aa, Homo sapiens
  Table A; Target 22658; HLA-C*03:03; DPPA2; ENSG00000163530; CTA
TSAPGAML

SEQ ID NO: 22659 - protein, 8 aa, Homo sapiens
  Table A; Target 22659; HLA-C*03:04; DPPA2; ENSG00000163530; CTA
TSAPGAML

SEQ ID NO: 22660 - protein, 9 aa, Homo sapiens
  Table A; Target 22660; HLA-C*06:02; DPPA2; ENSG00000163530; CTA
TSAPGAMLA

SEQ ID NO: 22661 - protein, 9 aa, Homo sapiens
  Table A; Target 22661; HLA-C*16:02; DPPA2; ENSG00000163530; CTA
TSAPGAMLA

SEQ ID NO: 22662 - protein, 11 aa, Homo sapiens
  Table A; Target 22662; HLA-A*25:01; DPPA2; ENSG00000163530; CTA
TSAPGAMLASW

SEQ ID NO: 22663 - protein, 11 aa, Homo sapiens
  Table A; Target 22663; HLA-A*26:01; DPPA2; ENSG00000163530; CTA
TSAPGAMLASW

SEQ ID NO: 22664 - protein, 11 aa, Homo sapiens
  Table A; Target 22664; HLA-A*31:01; DPPA2; ENSG00000163530; CTA
TSAPGAMLASW

SEQ ID NO: 22665 - protein, 11 aa, Homo sapiens
  Table A; Target 22665; HLA-A*32:01; DPPA2; ENSG00000163530; CTA
TSAPGAMLASW

SEQ ID NO: 22666 - protein, 11 aa, Homo sapiens
  Table A; Target 22666; HLA-B*44:03; DPPA2; ENSG00000163530; CTA
TSAPGAMLASW

SEQ ID NO: 22667 - protein, 11 aa, Homo sapiens
  Table A; Target 22667; HLA-B*57:01; DPPA2; ENSG00000163530; CTA
TSAPGAMLASW

SEQ ID NO: 22668 - protein, 11 aa, Homo sapiens
  Table A; Target 22668; HLA-B*58:01; DPPA2; ENSG00000163530; CTA
TSAPGAMLASW

SEQ ID NO: 22669 - protein, 11 aa, Homo sapiens
  Table A; Target 22669; HLA-C*16:04; DPPA2; ENSG00000163530; CTA
TSAPGAMLASW

SEQ ID NO: 22670 - protein, 9 aa, Homo sapiens
  Table A; Target 22670; HLA-B*08:01; DPPA2; ENSG00000163530; CTA
TTHRRMISL

SEQ ID NO: 22671 - protein, 8 aa, Homo sapiens
  Table A; Target 22671; HLA-C*05:01; DPPA2; ENSG00000163530; CTA
VDDEESVI

SEQ ID NO: 22672 - protein, 9 aa, Homo sapiens
  Table A; Target 22672; HLA-B*38:01; DPPA2; ENSG00000163530; CTA
VDDEESVIL

SEQ ID NO: 22673 - protein, 9 aa, Homo sapiens
  Table A; Target 22673; HLA-B*40:01; DPPA2; ENSG00000163530; CTA
VDDEESVIL

SEQ ID NO: 22674 - protein, 9 aa, Homo sapiens
  Table A; Target 22674; HLA-C*05:01; DPPA2; ENSG00000163530; CTA
VDDEESVIL

SEQ ID NO: 22675 - protein, 8 aa, Homo sapiens
  Table A; Target 22675; HLA-B*18:01; DPPA2; ENSG00000163530; CTA
VEAFLMQA

SEQ ID NO: 22676 - protein, 8 aa, Homo sapiens
  Table A; Target 22676; HLA-B*49:01; DPPA2; ENSG00000163530; CTA
VEAFLMQA

SEQ ID NO: 22677 - protein, 8 aa, Homo sapiens
  Table A; Target 22677; HLA-B*18:01; DPPA2; ENSG00000163530; CTA
VEVITSAP

SEQ ID NO: 22678 - protein, 8 aa, Homo sapiens
  Table A; Target 22678; HLA-B*40:02; DPPA2; ENSG00000163530; CTA
VEVITSAP

SEQ ID NO: 22679 - protein, 8 aa, Homo sapiens
  Table A; Target 22679; HLA-B*49:01; DPPA2; ENSG00000163530; CTA
VEVITSAP

SEQ ID NO: 22680 - protein, 9 aa, Homo sapiens
  Table A; Target 22680; HLA-B*40:02; DPPA2; ENSG00000163530; CTA
VEVITSAPG

SEQ ID NO: 22681 - protein, 9 aa, Homo sapiens
  Table A; Target 22681; HLA-B*49:01; DPPA2; ENSG00000163530; CTA
VEVITSAPG

SEQ ID NO: 22682 - protein, 9 aa, Homo sapiens
  Table A; Target 22682; HLA-C*04:01; DPPA2; ENSG00000163530; CTA
VEVITSAPG

SEQ ID NO: 22683 - protein, 11 aa, Homo sapiens
  Table A; Target 22683; HLA-A*30:01; DPPA2; ENSG00000163530; CTA
VEVITSAPGAM

SEQ ID NO: 22684 - protein, 11 aa, Homo sapiens
  Table A; Target 22684; HLA-B*18:01; DPPA2; ENSG00000163530; CTA
VEVITSAPGAM

SEQ ID NO: 22685 - protein, 11 aa, Homo sapiens
  Table A; Target 22685; HLA-B*40:01; DPPA2; ENSG00000163530; CTA
VEVITSAPGAM

SEQ ID NO: 22686 - protein, 11 aa, Homo sapiens
  Table A; Target 22686; HLA-B*40:02; DPPA2; ENSG00000163530; CTA
VEVITSAPGAM

SEQ ID NO: 22687 - protein, 9 aa, Homo sapiens
  Table A; Target 22687; HLA-A*03:01; DPPA2; ENSG00000163530; CTA
VILTLVPVK

SEQ ID NO: 22688 - protein, 9 aa, Homo sapiens
  Table A; Target 22688; HLA-A*03:02; DPPA2; ENSG00000163530; CTA
VILTLVPVK

SEQ ID NO: 22689 - protein, 9 aa, Homo sapiens
  Table A; Target 22689; HLA-A*11:01; DPPA2; ENSG00000163530; CTA
VILTLVPVK

SEQ ID NO: 22690 - protein, 9 aa, Homo sapiens
  Table A; Target 22690; HLA-B*27:02; DPPA2; ENSG00000163530; CTA
VILTLVPVK

SEQ ID NO: 22691 - protein, 9 aa, Homo sapiens
  Table A; Target 22691; HLA-B*39:01; DPPA2; ENSG00000163530; CTA
VITSAPGAM

SEQ ID NO: 22692 - protein, 9 aa, Homo sapiens
  Table A; Target 22692; HLA-C*01:02; DPPA2; ENSG00000163530; CTA
VITSAPGAM

SEQ ID NO: 22693 - protein, 10 aa, Homo sapiens
  Table A; Target 22693; HLA-B*39:01; DPPA2; ENSG00000163530; CTA
VITSAPGAML

SEQ ID NO: 22694 - protein, 10 aa, Homo sapiens
  Table A; Target 22694; HLA-C*01:02; DPPA2; ENSG00000163530; CTA
VITSAPGAML

SEQ ID NO: 22695 - protein, 11 aa, Homo sapiens
  Table A; Target 22695; HLA-B*07:02; DPPA2; ENSG00000163530; CTA
VPTTHRRMISL

SEQ ID NO: 22696 - protein, 9 aa, Homo sapiens
  Table A; Target 22696; HLA-B*07:02; DPPA2; ENSG00000163530; CTA
VPVKDDANM

SEQ ID NO: 22697 - protein, 9 aa, Homo sapiens
  Table A; Target 22697; HLA-B*35:01; DPPA2; ENSG00000163530; CTA
VPVKDDANM

SEQ ID NO: 22698 - protein, 9 aa, Homo sapiens
  Table A; Target 22698; HLA-B*35:03; DPPA2; ENSG00000163530; CTA
VPVKDDANM

SEQ ID NO: 22699 - protein, 9 aa, Homo sapiens
  Table A; Target 22699; HLA-B*55:01; DPPA2; ENSG00000163530; CTA
VPVKDDANM

SEQ ID NO: 22700 - protein, 9 aa, Homo sapiens
  Table A; Target 22700; HLA-B*56:01; DPPA2; ENSG00000163530; CTA
VPVKDDANM

SEQ ID NO: 22701 - protein, 9 aa, Homo sapiens
  Table A; Target 22701; HLA-C*03:03; DPPA2; ENSG00000163530; CTA
VPVKDDANM

SEQ ID NO: 22702 - protein, 9 aa, Homo sapiens
  Table A; Target 22702; HLA-C*07:02; DPPA2; ENSG00000163530; CTA
VPVKDDANM

SEQ ID NO: 22703 - protein, 9 aa, Homo sapiens
  Table A; Target 22703; HLA-C*01:02; DPPA2; ENSG00000163530; CTA
VQPKALNSC

SEQ ID NO: 22704 - protein, 9 aa, Homo sapiens
  Table A; Target 22704; HLA-B*38:01; DPPA2; ENSG00000163530; CTA
VSSTSDVKL

SEQ ID NO: 22705 - protein, 9 aa, Homo sapiens
  Table A; Target 22705; HLA-B*40:01; DPPA2; ENSG00000163530; CTA
VSSTSDVKL

SEQ ID NO: 22706 - protein, 9 aa, Homo sapiens
  Table A; Target 22706; HLA-B*58:01; DPPA2; ENSG00000163530; CTA
VSSTSDVKL

SEQ ID NO: 22707 - protein, 9 aa, Homo sapiens
  Table A; Target 22707; HLA-C*03:04; DPPA2; ENSG00000163530; CTA
VSSTSDVKL

SEQ ID NO: 22708 - protein, 9 aa, Homo sapiens
  Table A; Target 22708; HLA-C*05:01; DPPA2; ENSG00000163530; CTA
VSSTSDVKL

SEQ ID NO: 22709 - protein, 9 aa, Homo sapiens
  Table A; Target 22709; HLA-C*07:04; DPPA2; ENSG00000163530; CTA
VSSTSDVKL

SEQ ID NO: 22710 - protein, 9 aa, Homo sapiens
  Table A; Target 22710; HLA-C*16:02; DPPA2; ENSG00000163530; CTA
VSSTSDVKL

SEQ ID NO: 22711 - protein, 11 aa, Homo sapiens
  Table A; Target 22711; HLA-A*01:01; DPPA2; ENSG00000163530; CTA
VSSTSDVKLEK

SEQ ID NO: 22712 - protein, 11 aa, Homo sapiens
  Table A; Target 22712; HLA-A*03:01; DPPA2; ENSG00000163530; CTA
VSSTSDVKLEK

SEQ ID NO: 22713 - protein, 11 aa, Homo sapiens
  Table A; Target 22713; HLA-A*03:02; DPPA2; ENSG00000163530; CTA
VSSTSDVKLEK

SEQ ID NO: 22714 - protein, 11 aa, Homo sapiens
  Table A; Target 22714; HLA-A*11:01; DPPA2; ENSG00000163530; CTA
VSSTSDVKLEK

SEQ ID NO: 22715 - protein, 9 aa, Homo sapiens
  Table A; Target 22715; HLA-A*02:03; DPPA2; ENSG00000163530; CTA
VVHGRLLSA

SEQ ID NO: 22716 - protein, 9 aa, Homo sapiens
  Table A; Target 22716; HLA-A*32:01; DPPA2; ENSG00000163530; CTA
VVHGRLLSA

SEQ ID NO: 22717 - protein, 9 aa, Homo sapiens
  Table A; Target 22717; HLA-B*08:01; DPPA2; ENSG00000163530; CTA
VVHGRLLSA

SEQ ID NO: 22718 - protein, 9 aa, Homo sapiens
  Table A; Target 22718; HLA-B*40:02; DPPA2; ENSG00000163530; CTA
VVHGRLLSA

SEQ ID NO: 22719 - protein, 9 aa, Homo sapiens
  Table A; Target 22719; HLA-B*46:01; DPPA2; ENSG00000163530; CTA
VVHGRLLSA

SEQ ID NO: 22720 - protein, 9 aa, Homo sapiens
  Table A; Target 22720; HLA-B*54:01; DPPA2; ENSG00000163530; CTA
VVHGRLLSA

SEQ ID NO: 22721 - protein, 9 aa, Homo sapiens
  Table A; Target 22721; HLA-B*55:01; DPPA2; ENSG00000163530; CTA
VVHGRLLSA

SEQ ID NO: 22722 - protein, 9 aa, Homo sapiens
  Table A; Target 22722; HLA-B*56:01; DPPA2; ENSG00000163530; CTA
VVHGRLLSA

SEQ ID NO: 22723 - protein, 8 aa, Homo sapiens
  Table A; Target 22723; HLA-B*08:01; DPPA2; ENSG00000163530; CTA
YPEQRQDM

SEQ ID NO: 22724 - protein, 9 aa, Homo sapiens
  Table A; Target 22724; HLA-B*55:01; DPPA2; ENSG00000163530; CTA
YPEQRQDMP

SEQ ID NO: 22725 - protein, 11 aa, Homo sapiens
  Table A; Target 22725; HLA-B*35:01; DPPA2; ENSG00000163530; CTA
YPEQRQDMPEM

SEQ ID NO: 22726 - protein, 11 aa, Homo sapiens
  Table A; Target 22726; HLA-B*35:03; DPPA2; ENSG00000163530; CTA
YPEQRQDMPEM

SEQ ID NO: 22727 - protein, 11 aa, Homo sapiens
  Table A; Target 22727; HLA-B*55:01; DPPA2; ENSG00000163530; CTA
YPEQRQDMPEM

SEQ ID NO: 22728 - protein, 9 aa, Homo sapiens
  Table A; Target 22728; HLA-A*32:01; DSCR4; ENSG00000184029; TAA
AASPALHST

SEQ ID NO: 22729 - protein, 9 aa, Homo sapiens
  Table A; Target 22729; HLA-B*56:01; DSCR4; ENSG00000184029; TAA
AASPALHST

SEQ ID NO: 22730 - protein, 9 aa, Homo sapiens
  Table A; Target 22730; HLA-C*16:01; DSCR4; ENSG00000184029; TAA
AASPALHST

SEQ ID NO: 22731 - protein, 9 aa, Homo sapiens
  Table A; Target 22731; HLA-C*16:02; DSCR4; ENSG00000184029; TAA
AASPALHST

SEQ ID NO: 22732 - protein, 9 aa, Homo sapiens
  Table A; Target 22732; HLA-C*16:04; DSCR4; ENSG00000184029; TAA
AASPALHST

SEQ ID NO: 22733 - protein, 9 aa, Homo sapiens
  Table A; Target 22733; HLA-A*29:02; DSCR4; ENSG00000184029; TAA
CLIWKYQLY

SEQ ID NO: 22734 - protein, 11 aa, Homo sapiens
  Table A; Target 22734; HLA-A*33:01; DSCR4; ENSG00000184029; TAA
DAASPALHSTS

SEQ ID NO: 22735 - protein, 10 aa, Homo sapiens
  Table A; Target 22735; HLA-A*68:01; DSCR4; ENSG00000184029; TAA
DPASASPLHR

SEQ ID NO: 22736 - protein, 9 aa, Homo sapiens
  Table A; Target 22736; HLA-B*35:03; DSCR4; ENSG00000184029; TAA
DSDAASPAL

SEQ ID NO: 22737 - protein, 9 aa, Homo sapiens
  Table A; Target 22737; HLA-B*39:01; DSCR4; ENSG00000184029; TAA
DSDAASPAL

SEQ ID NO: 22738 - protein, 9 aa, Homo sapiens
  Table A; Target 22738; HLA-C*05:01; DSCR4; ENSG00000184029; TAA
DSDAASPAL

SEQ ID NO: 22739 - protein, 10 aa, Homo sapiens
  Table A; Target 22739; HLA-A*01:01; DSCR4; ENSG00000184029; TAA
DSDAASPALH

SEQ ID NO: 22740 - protein, 8 aa, Homo sapiens
  Table A; Target 22740; HLA-B*18:01; DSCR4; ENSG00000184029; TAA
EEKILPKV

SEQ ID NO: 22741 - protein, 10 aa, Homo sapiens
  Table A; Target 22741; HLA-A*03:01; DSCR4; ENSG00000184029; TAA
GLASPTIITR

SEQ ID NO: 22742 - protein, 10 aa, Homo sapiens
  Table A; Target 22742; HLA-A*03:02; DSCR4; ENSG00000184029; TAA
GLASPTIITR

SEQ ID NO: 22743 - protein, 10 aa, Homo sapiens
  Table A; Target 22743; HLA-A*11:01; DSCR4; ENSG00000184029; TAA
GLASPTIITR

SEQ ID NO: 22744 - protein, 10 aa, Homo sapiens
  Table A; Target 22744; HLA-A*31:01; DSCR4; ENSG00000184029; TAA
GLASPTIITR

SEQ ID NO: 22745 - protein, 10 aa, Homo sapiens
  Table A; Target 22745; HLA-A*33:03; DSCR4; ENSG00000184029; TAA
GLASPTIITR

SEQ ID NO: 22746 - protein, 10 aa, Homo sapiens
  Table A; Target 22746; HLA-A*68:01; DSCR4; ENSG00000184029; TAA
GLASPTIITR

SEQ ID NO: 22747 - protein, 10 aa, Homo sapiens
  Table A; Target 22747; HLA-C*07:06; DSCR4; ENSG00000184029; TAA
GLASPTIITR

SEQ ID NO: 22748 - protein, 10 aa, Homo sapiens
  Table A; Target 22748; HLA-B*57:01; DSCR4; ENSG00000184029; TAA
IITREGQQFW

SEQ ID NO: 22749 - protein, 9 aa, Homo sapiens
  Table A; Target 22749; HLA-B*57:01; DSCR4; ENSG00000184029; TAA
ITREGQQFW

SEQ ID NO: 22750 - protein, 9 aa, Homo sapiens
  Table A; Target 22750; HLA-B*58:01; DSCR4; ENSG00000184029; TAA
ITREGQQFW

SEQ ID NO: 22751 - protein, 9 aa, Homo sapiens
  Table A; Target 22751; HLA-A*32:01; DSCR4; ENSG00000184029; TAA
KQISASPST

SEQ ID NO: 22752 - protein, 9 aa, Homo sapiens
  Table A; Target 22752; HLA-B*13:02; DSCR4; ENSG00000184029; TAA
KQISASPST

SEQ ID NO: 22753 - protein, 9 aa, Homo sapiens
  Table A; Target 22753; HLA-B*15:01; DSCR4; ENSG00000184029; TAA
KQISASPST

SEQ ID NO: 22754 - protein, 9 aa, Homo sapiens
  Table A; Target 22754; HLA-B*15:03; DSCR4; ENSG00000184029; TAA
KQISASPST

SEQ ID NO: 22755 - protein, 9 aa, Homo sapiens
  Table A; Target 22755; HLA-B*58:01; DSCR4; ENSG00000184029; TAA
KQISASPST

SEQ ID NO: 22756 - protein, 9 aa, Homo sapiens
  Table A; Target 22756; HLA-C*06:02; DSCR4; ENSG00000184029; TAA
KQISASPST

SEQ ID NO: 22757 - protein, 9 aa, Homo sapiens
  Table A; Target 22757; HLA-C*16:04; DSCR4; ENSG00000184029; TAA
KQISASPST

SEQ ID NO: 22758 - protein, 9 aa, Homo sapiens
  Table A; Target 22758; HLA-A*24:02; DSCR4; ENSG00000184029; TAA
KYQLYLHGL

SEQ ID NO: 22759 - protein, 9 aa, Homo sapiens
  Table A; Target 22759; HLA-A*11:01; DSCR4; ENSG00000184029; TAA
LASPTIITR

SEQ ID NO: 22760 - protein, 9 aa, Homo sapiens
  Table A; Target 22760; HLA-A*31:01; DSCR4; ENSG00000184029; TAA
LASPTIITR

SEQ ID NO: 22761 - protein, 9 aa, Homo sapiens
  Table A; Target 22761; HLA-A*33:01; DSCR4; ENSG00000184029; TAA
LASPTIITR

SEQ ID NO: 22762 - protein, 9 aa, Homo sapiens
  Table A; Target 22762; HLA-A*33:03; DSCR4; ENSG00000184029; TAA
LASPTIITR

SEQ ID NO: 22763 - protein, 9 aa, Homo sapiens
  Table A; Target 22763; HLA-A*68:01; DSCR4; ENSG00000184029; TAA
LASPTIITR

SEQ ID NO: 22764 - protein, 9 aa, Homo sapiens
  Table A; Target 22764; HLA-B*35:01; DSCR4; ENSG00000184029; TAA
LASPTIITR

SEQ ID NO: 22765 - protein, 9 aa, Homo sapiens
  Table A; Target 22765; HLA-B*51:01; DSCR4; ENSG00000184029; TAA
LASPTIITR

SEQ ID NO: 22766 - protein, 9 aa, Homo sapiens
  Table A; Target 22766; HLA-B*57:01; DSCR4; ENSG00000184029; TAA
LASPTIITR

SEQ ID NO: 22767 - protein, 9 aa, Homo sapiens
  Table A; Target 22767; HLA-C*02:02; DSCR4; ENSG00000184029; TAA
LASPTIITR

SEQ ID NO: 22768 - protein, 9 aa, Homo sapiens
  Table A; Target 22768; HLA-C*07:06; DSCR4; ENSG00000184029; TAA
LASPTIITR

SEQ ID NO: 22769 - protein, 9 aa, Homo sapiens
  Table A; Target 22769; HLA-C*12:03; DSCR4; ENSG00000184029; TAA
LASPTIITR

SEQ ID NO: 22770 - protein, 9 aa, Homo sapiens
  Table A; Target 22770; HLA-C*16:01; DSCR4; ENSG00000184029; TAA
LASPTIITR

SEQ ID NO: 22771 - protein, 9 aa, Homo sapiens
  Table A; Target 22771; HLA-C*16:02; DSCR4; ENSG00000184029; TAA
LASPTIITR

SEQ ID NO: 22772 - protein, 9 aa, Homo sapiens
  Table A; Target 22772; HLA-A*02:04; DSCR4; ENSG00000184029; TAA
LIWKYQLYL

SEQ ID NO: 22773 - protein, 9 aa, Homo sapiens
  Table A; Target 22773; HLA-A*02:07; DSCR4; ENSG00000184029; TAA
LIWKYQLYL

SEQ ID NO: 22774 - protein, 10 aa, Homo sapiens
  Table A; Target 22774; HLA-B*07:02; DSCR4; ENSG00000184029; TAA
LPASPTDSGL

SEQ ID NO: 22775 - protein, 10 aa, Homo sapiens
  Table A; Target 22775; HLA-B*35:01; DSCR4; ENSG00000184029; TAA
LPASPTDSGL

SEQ ID NO: 22776 - protein, 10 aa, Homo sapiens
  Table A; Target 22776; HLA-B*35:03; DSCR4; ENSG00000184029; TAA
LPASPTDSGL

SEQ ID NO: 22777 - protein, 10 aa, Homo sapiens
  Table A; Target 22777; HLA-C*07:02; DSCR4; ENSG00000184029; TAA
LPASPTDSGL

SEQ ID NO: 22778 - protein, 10 aa, Homo sapiens
  Table A; Target 22778; HLA-B*07:02; DSCR4; ENSG00000184029; TAA
LPDPASASPL

SEQ ID NO: 22779 - protein, 10 aa, Homo sapiens
  Table A; Target 22779; HLA-B*35:01; DSCR4; ENSG00000184029; TAA
LPDPASASPL

SEQ ID NO: 22780 - protein, 10 aa, Homo sapiens
  Table A; Target 22780; HLA-B*35:03; DSCR4; ENSG00000184029; TAA
LPDPASASPL

SEQ ID NO: 22781 - protein, 10 aa, Homo sapiens
  Table A; Target 22781; HLA-C*03:03; DSCR4; ENSG00000184029; TAA
LPDPASASPL

SEQ ID NO: 22782 - protein, 10 aa, Homo sapiens
  Table A; Target 22782; HLA-C*05:01; DSCR4; ENSG00000184029; TAA
LPDPASASPL

SEQ ID NO: 22783 - protein, 10 aa, Homo sapiens
  Table A; Target 22783; HLA-C*07:02; DSCR4; ENSG00000184029; TAA
LPDPASASPL

SEQ ID NO: 22784 - protein, 10 aa, Homo sapiens
  Table A; Target 22784; HLA-B*57:01; DSCR4; ENSG00000184029; TAA
LTRDDEPRIF

SEQ ID NO: 22785 - protein, 9 aa, Homo sapiens
  Table A; Target 22785; HLA-A*68:01; DSCR4; ENSG00000184029; TAA
PASASPLHR

SEQ ID NO: 22786 - protein, 11 aa, Homo sapiens
  Table A; Target 22786; HLA-C*07:02; DSCR4; ENSG00000184029; TAA
PLPDPASASPL

SEQ ID NO: 22787 - protein, 9 aa, Homo sapiens
  Table A; Target 22787; HLA-A*03:01; DSCR4; ENSG00000184029; TAA
QLYLHGLHK

SEQ ID NO: 22788 - protein, 10 aa, Homo sapiens
  Table A; Target 22788; HLA-A*03:01; DSCR4; ENSG00000184029; TAA
QLYLHGLHKK

SEQ ID NO: 22789 - protein, 9 aa, Homo sapiens
  Table A; Target 22789; HLA-B*49:01; DSCR4; ENSG00000184029; TAA
REEKILPKV

SEQ ID NO: 22790 - protein, 9 aa, Homo sapiens
  Table A; Target 22790; HLA-C*16:01; DSCR4; ENSG00000184029; TAA
SASPLHREE

SEQ ID NO: 22791 - protein, 8 aa, Homo sapiens
  Table A; Target 22791; HLA-A*30:01; DSCR4; ENSG00000184029; TAA
SDAASPAL

SEQ ID NO: 22792 - protein, 8 aa, Homo sapiens
  Table A; Target 22792; HLA-B*37:01; DSCR4; ENSG00000184029; TAA
SDAASPAL

SEQ ID NO: 22793 - protein, 8 aa, Homo sapiens
  Table A; Target 22793; HLA-B*40:02; DSCR4; ENSG00000184029; TAA
SDAASPAL

SEQ ID NO: 22794 - protein, 11 aa, Homo sapiens
  Table A; Target 22794; HLA-A*33:03; DSCR4; ENSG00000184029; TAA
SGLASPTIITR

SEQ ID NO: 22795 - protein, 11 aa, Homo sapiens
  Table A; Target 22795; HLA-A*68:01; DSCR4; ENSG00000184029; TAA
SGLASPTIITR

SEQ ID NO: 22796 - protein, 11 aa, Homo sapiens
  Table A; Target 22796; HLA-C*07:06; DSCR4; ENSG00000184029; TAA
SGLASPTIITR

SEQ ID NO: 22797 - protein, 9 aa, Homo sapiens
  Table A; Target 22797; HLA-B*07:02; DSCR4; ENSG00000184029; TAA
SPALHSTSP

SEQ ID NO: 22798 - protein, 9 aa, Homo sapiens
  Table A; Target 22798; HLA-B*56:01; DSCR4; ENSG00000184029; TAA
SPALHSTSP

SEQ ID NO: 22799 - protein, 9 aa, Homo sapiens
  Table A; Target 22799; HLA-C*07:02; DSCR4; ENSG00000184029; TAA
SPALHSTSP

SEQ ID NO: 22800 - protein, 10 aa, Homo sapiens
  Table A; Target 22800; HLA-B*07:02; DSCR4; ENSG00000184029; TAA
SPALHSTSPL

SEQ ID NO: 22801 - protein, 10 aa, Homo sapiens
  Table A; Target 22801; HLA-C*07:02; DSCR4; ENSG00000184029; TAA
SPALHSTSPL

SEQ ID NO: 22802 - protein, 9 aa, Homo sapiens
  Table A; Target 22802; HLA-A*02:01; DSCR4; ENSG00000184029; TAA
SPLPDPASA

SEQ ID NO: 22803 - protein, 9 aa, Homo sapiens
  Table A; Target 22803; HLA-B*07:02; DSCR4; ENSG00000184029; TAA
SPLPDPASA

SEQ ID NO: 22804 - protein, 9 aa, Homo sapiens
  Table A; Target 22804; HLA-B*35:01; DSCR4; ENSG00000184029; TAA
SPLPDPASA

SEQ ID NO: 22805 - protein, 9 aa, Homo sapiens
  Table A; Target 22805; HLA-B*35:03; DSCR4; ENSG00000184029; TAA
SPLPDPASA

SEQ ID NO: 22806 - protein, 9 aa, Homo sapiens
  Table A; Target 22806; HLA-B*54:01; DSCR4; ENSG00000184029; TAA
SPLPDPASA

SEQ ID NO: 22807 - protein, 9 aa, Homo sapiens
  Table A; Target 22807; HLA-B*55:01; DSCR4; ENSG00000184029; TAA
SPLPDPASA

SEQ ID NO: 22808 - protein, 9 aa, Homo sapiens
  Table A; Target 22808; HLA-B*56:01; DSCR4; ENSG00000184029; TAA
SPLPDPASA

SEQ ID NO: 22809 - protein, 9 aa, Homo sapiens
  Table A; Target 22809; HLA-B*56:01; DSCR4; ENSG00000184029; TAA
SPTIITREG

SEQ ID NO: 22810 - protein, 10 aa, Homo sapiens
  Table A; Target 22810; HLA-A*25:01; DSCR4; ENSG00000184029; TAA
TIITREGQQF

SEQ ID NO: 22811 - protein, 11 aa, Homo sapiens
  Table A; Target 22811; HLA-B*07:02; DSCR4; ENSG00000184029; TAA
TPDSDAASPAL

SEQ ID NO: 22812 - protein, 11 aa, Homo sapiens
  Table A; Target 22812; HLA-B*35:01; DSCR4; ENSG00000184029; TAA
TPDSDAASPAL

SEQ ID NO: 22813 - protein, 11 aa, Homo sapiens
  Table A; Target 22813; HLA-B*35:03; DSCR4; ENSG00000184029; TAA
TPDSDAASPAL

SEQ ID NO: 22814 - protein, 11 aa, Homo sapiens
  Table A; Target 22814; HLA-B*55:01; DSCR4; ENSG00000184029; TAA
TPDSDAASPAL

SEQ ID NO: 22815 - protein, 11 aa, Homo sapiens
  Table A; Target 22815; HLA-C*07:02; DSCR4; ENSG00000184029; TAA
TPDSDAASPAL

SEQ ID NO: 22816 - protein, 9 aa, Homo sapiens
  Table A; Target 22816; HLA-B*38:01; DSCR4; ENSG00000184029; TAA
TRDDEPRIF

SEQ ID NO: 22817 - protein, 8 aa, Homo sapiens
  Table A; Target 22817; HLA-A*02:04; DSCR4; ENSG00000184029; TAA
YQLYLHGL

SEQ ID NO: 22818 - protein, 8 aa, Homo sapiens
  Table A; Target 22818; HLA-B*13:02; DSCR4; ENSG00000184029; TAA
YQLYLHGL

SEQ ID NO: 22819 - protein, 8 aa, Homo sapiens
  Table A; Target 22819; HLA-A*23:01; DSCR8; ENSG00000198054; TAA
AFVKHLLL

SEQ ID NO: 22820 - protein, 8 aa, Homo sapiens
  Table A; Target 22820; HLA-A*24:02; DSCR8; ENSG00000198054; TAA
AFVKHLLL

SEQ ID NO: 22821 - protein, 9 aa, Homo sapiens
  Table A; Target 22821; HLA-A*23:01; DSCR8; ENSG00000198054; TAA
AFVKHLLLF

SEQ ID NO: 22822 - protein, 9 aa, Homo sapiens
  Table A; Target 22822; HLA-A*24:02; DSCR8; ENSG00000198054; TAA
AFVKHLLLF

SEQ ID NO: 22823 - protein, 9 aa, Homo sapiens
  Table A; Target 22823; HLA-A*29:02; DSCR8; ENSG00000198054; TAA
AFVKHLLLF

SEQ ID NO: 22824 - protein, 8 aa, Homo sapiens
  Table A; Target 22824; HLA-A*30:01; DSCR8; ENSG00000198054; TAA
AQYESIQF

SEQ ID NO: 22825 - protein, 8 aa, Homo sapiens
  Table A; Target 22825; HLA-A*30:02; DSCR8; ENSG00000198054; TAA
AQYESIQF

SEQ ID NO: 22826 - protein, 8 aa, Homo sapiens
  Table A; Target 22826; HLA-A*32:01; DSCR8; ENSG00000198054; TAA
AQYESIQF

SEQ ID NO: 22827 - protein, 8 aa, Homo sapiens
  Table A; Target 22827; HLA-B*08:01; DSCR8; ENSG00000198054; TAA
AQYESIQF

SEQ ID NO: 22828 - protein, 8 aa, Homo sapiens
  Table A; Target 22828; HLA-B*13:02; DSCR8; ENSG00000198054; TAA
AQYESIQF

SEQ ID NO: 22829 - protein, 8 aa, Homo sapiens
  Table A; Target 22829; HLA-B*15:01; DSCR8; ENSG00000198054; TAA
AQYESIQF

SEQ ID NO: 22830 - protein, 8 aa, Homo sapiens
  Table A; Target 22830; HLA-B*15:03; DSCR8; ENSG00000198054; TAA
AQYESIQF

SEQ ID NO: 22831 - protein, 8 aa, Homo sapiens
  Table A; Target 22831; HLA-B*27:02; DSCR8; ENSG00000198054; TAA
AQYESIQF

SEQ ID NO: 22832 - protein, 8 aa, Homo sapiens
  Table A; Target 22832; HLA-B*27:05; DSCR8; ENSG00000198054; TAA
AQYESIQF

SEQ ID NO: 22833 - protein, 8 aa, Homo sapiens
  Table A; Target 22833; HLA-B*37:01; DSCR8; ENSG00000198054; TAA
AQYESIQF

SEQ ID NO: 22834 - protein, 8 aa, Homo sapiens
  Table A; Target 22834; HLA-B*39:01; DSCR8; ENSG00000198054; TAA
AQYESIQF

SEQ ID NO: 22835 - protein, 8 aa, Homo sapiens
  Table A; Target 22835; HLA-B*40:02; DSCR8; ENSG00000198054; TAA
AQYESIQF

SEQ ID NO: 22836 - protein, 8 aa, Homo sapiens
  Table A; Target 22836; HLA-B*46:01; DSCR8; ENSG00000198054; TAA
AQYESIQF

SEQ ID NO: 22837 - protein, 8 aa, Homo sapiens
  Table A; Target 22837; HLA-B*58:01; DSCR8; ENSG00000198054; TAA
AQYESIQF

SEQ ID NO: 22838 - protein, 8 aa, Homo sapiens
  Table A; Target 22838; HLA-C*02:02; DSCR8; ENSG00000198054; TAA
AQYESIQF

SEQ ID NO: 22839 - protein, 8 aa, Homo sapiens
  Table A; Target 22839; HLA-C*03:03; DSCR8; ENSG00000198054; TAA
AQYESIQF

SEQ ID NO: 22840 - protein, 8 aa, Homo sapiens
  Table A; Target 22840; HLA-C*03:04; DSCR8; ENSG00000198054; TAA
AQYESIQF

SEQ ID NO: 22841 - protein, 8 aa, Homo sapiens
  Table A; Target 22841; HLA-C*04:01; DSCR8; ENSG00000198054; TAA
AQYESIQF

SEQ ID NO: 22842 - protein, 8 aa, Homo sapiens
  Table A; Target 22842; HLA-C*05:01; DSCR8; ENSG00000198054; TAA
AQYESIQF

SEQ ID NO: 22843 - protein, 8 aa, Homo sapiens
  Table A; Target 22843; HLA-C*07:04; DSCR8; ENSG00000198054; TAA
AQYESIQF

SEQ ID NO: 22844 - protein, 8 aa, Homo sapiens
  Table A; Target 22844; HLA-C*14:02; DSCR8; ENSG00000198054; TAA
AQYESIQF

SEQ ID NO: 22845 - protein, 8 aa, Homo sapiens
  Table A; Target 22845; HLA-C*16:04; DSCR8; ENSG00000198054; TAA
AQYESIQF

SEQ ID NO: 22846 - protein, 9 aa, Homo sapiens
  Table A; Target 22846; HLA-A*02:03; DSCR8; ENSG00000198054; TAA
AQYESIQFM

SEQ ID NO: 22847 - protein, 9 aa, Homo sapiens
  Table A; Target 22847; HLA-A*02:04; DSCR8; ENSG00000198054; TAA
AQYESIQFM

SEQ ID NO: 22848 - protein, 9 aa, Homo sapiens
  Table A; Target 22848; HLA-A*26:01; DSCR8; ENSG00000198054; TAA
AQYESIQFM

SEQ ID NO: 22849 - protein, 9 aa, Homo sapiens
  Table A; Target 22849; HLA-A*30:01; DSCR8; ENSG00000198054; TAA
AQYESIQFM

SEQ ID NO: 22850 - protein, 9 aa, Homo sapiens
  Table A; Target 22850; HLA-B*13:02; DSCR8; ENSG00000198054; TAA
AQYESIQFM

SEQ ID NO: 22851 - protein, 9 aa, Homo sapiens
  Table A; Target 22851; HLA-B*15:01; DSCR8; ENSG00000198054; TAA
AQYESIQFM

SEQ ID NO: 22852 - protein, 9 aa, Homo sapiens
  Table A; Target 22852; HLA-B*15:03; DSCR8; ENSG00000198054; TAA
AQYESIQFM

SEQ ID NO: 22853 - protein, 9 aa, Homo sapiens
  Table A; Target 22853; HLA-B*27:05; DSCR8; ENSG00000198054; TAA
AQYESIQFM

SEQ ID NO: 22854 - protein, 9 aa, Homo sapiens
  Table A; Target 22854; HLA-B*38:01; DSCR8; ENSG00000198054; TAA
AQYESIQFM

SEQ ID NO: 22855 - protein, 9 aa, Homo sapiens
  Table A; Target 22855; HLA-B*39:01; DSCR8; ENSG00000198054; TAA
AQYESIQFM

SEQ ID NO: 22856 - protein, 9 aa, Homo sapiens
  Table A; Target 22856; HLA-B*44:02; DSCR8; ENSG00000198054; TAA
AQYESIQFM

SEQ ID NO: 22857 - protein, 9 aa, Homo sapiens
  Table A; Target 22857; HLA-B*44:03; DSCR8; ENSG00000198054; TAA
AQYESIQFM

SEQ ID NO: 22858 - protein, 9 aa, Homo sapiens
  Table A; Target 22858; HLA-B*49:01; DSCR8; ENSG00000198054; TAA
AQYESIQFM

SEQ ID NO: 22859 - protein, 9 aa, Homo sapiens
  Table A; Target 22859; HLA-C*02:02; DSCR8; ENSG00000198054; TAA
AQYESIQFM

SEQ ID NO: 22860 - protein, 9 aa, Homo sapiens
  Table A; Target 22860; HLA-C*12:03; DSCR8; ENSG00000198054; TAA
AQYESIQFM

SEQ ID NO: 22861 - protein, 9 aa, Homo sapiens
  Table A; Target 22861; HLA-C*16:04; DSCR8; ENSG00000198054; TAA
AQYESIQFM

SEQ ID NO: 22862 - protein, 8 aa, Homo sapiens
  Table A; Target 22862; HLA-C*07:01; DSCR8; ENSG00000198054; TAA
EPGPNFVT

SEQ ID NO: 22863 - protein, 9 aa, Homo sapiens
  Table A; Target 22863; HLA-A*02:03; DSCR8; ENSG00000198054; TAA
EPGPNFVTV

SEQ ID NO: 22864 - protein, 9 aa, Homo sapiens
  Table A; Target 22864; HLA-A*25:01; DSCR8; ENSG00000198054; TAA
EPGPNFVTV

SEQ ID NO: 22865 - protein, 9 aa, Homo sapiens
  Table A; Target 22865; HLA-A*26:01; DSCR8; ENSG00000198054; TAA
EPGPNFVTV

SEQ ID NO: 22866 - protein, 9 aa, Homo sapiens
  Table A; Target 22866; HLA-A*30:01; DSCR8; ENSG00000198054; TAA
EPGPNFVTV

SEQ ID NO: 22867 - protein, 9 aa, Homo sapiens
  Table A; Target 22867; HLA-A*33:01; DSCR8; ENSG00000198054; TAA
EPGPNFVTV

SEQ ID NO: 22868 - protein, 9 aa, Homo sapiens
  Table A; Target 22868; HLA-A*33:03; DSCR8; ENSG00000198054; TAA
EPGPNFVTV

SEQ ID NO: 22869 - protein, 9 aa, Homo sapiens
  Table A; Target 22869; HLA-A*68:01; DSCR8; ENSG00000198054; TAA
EPGPNFVTV

SEQ ID NO: 22870 - protein, 9 aa, Homo sapiens
  Table A; Target 22870; HLA-A*68:02; DSCR8; ENSG00000198054; TAA
EPGPNFVTV

SEQ ID NO: 22871 - protein, 9 aa, Homo sapiens
  Table A; Target 22871; HLA-B*07:02; DSCR8; ENSG00000198054; TAA
EPGPNFVTV

SEQ ID NO: 22872 - protein, 9 aa, Homo sapiens
  Table A; Target 22872; HLA-B*08:01; DSCR8; ENSG00000198054; TAA
EPGPNFVTV

SEQ ID NO: 22873 - protein, 9 aa, Homo sapiens
  Table A; Target 22873; HLA-B*13:02; DSCR8; ENSG00000198054; TAA
EPGPNFVTV

SEQ ID NO: 22874 - protein, 9 aa, Homo sapiens
  Table A; Target 22874; HLA-B*18:01; DSCR8; ENSG00000198054; TAA
EPGPNFVTV

SEQ ID NO: 22875 - protein, 9 aa, Homo sapiens
  Table A; Target 22875; HLA-B*35:01; DSCR8; ENSG00000198054; TAA
EPGPNFVTV

SEQ ID NO: 22876 - protein, 9 aa, Homo sapiens
  Table A; Target 22876; HLA-B*35:03; DSCR8; ENSG00000198054; TAA
EPGPNFVTV

SEQ ID NO: 22877 - protein, 9 aa, Homo sapiens
  Table A; Target 22877; HLA-B*38:01; DSCR8; ENSG00000198054; TAA
EPGPNFVTV

SEQ ID NO: 22878 - protein, 9 aa, Homo sapiens
  Table A; Target 22878; HLA-B*39:01; DSCR8; ENSG00000198054; TAA
EPGPNFVTV

SEQ ID NO: 22879 - protein, 9 aa, Homo sapiens
  Table A; Target 22879; HLA-B*40:02; DSCR8; ENSG00000198054; TAA
EPGPNFVTV

SEQ ID NO: 22880 - protein, 9 aa, Homo sapiens
  Table A; Target 22880; HLA-B*49:01; DSCR8; ENSG00000198054; TAA
EPGPNFVTV

SEQ ID NO: 22881 - protein, 9 aa, Homo sapiens
  Table A; Target 22881; HLA-B*51:01; DSCR8; ENSG00000198054; TAA
EPGPNFVTV

SEQ ID NO: 22882 - protein, 9 aa, Homo sapiens
  Table A; Target 22882; HLA-B*54:01; DSCR8; ENSG00000198054; TAA
EPGPNFVTV

SEQ ID NO: 22883 - protein, 9 aa, Homo sapiens
  Table A; Target 22883; HLA-B*55:01; DSCR8; ENSG00000198054; TAA
EPGPNFVTV

SEQ ID NO: 22884 - protein, 9 aa, Homo sapiens
  Table A; Target 22884; HLA-B*56:01; DSCR8; ENSG00000198054; TAA
EPGPNFVTV

SEQ ID NO: 22885 - protein, 9 aa, Homo sapiens
  Table A; Target 22885; HLA-C*03:03; DSCR8; ENSG00000198054; TAA
EPGPNFVTV

SEQ ID NO: 22886 - protein, 9 aa, Homo sapiens
  Table A; Target 22886; HLA-C*04:01; DSCR8; ENSG00000198054; TAA
EPGPNFVTV

SEQ ID NO: 22887 - protein, 9 aa, Homo sapiens
  Table A; Target 22887; HLA-C*06:02; DSCR8; ENSG00000198054; TAA
EPGPNFVTV

SEQ ID NO: 22888 - protein, 9 aa, Homo sapiens
  Table A; Target 22888; HLA-C*07:01; DSCR8; ENSG00000198054; TAA
EPGPNFVTV

SEQ ID NO: 22889 - protein, 9 aa, Homo sapiens
  Table A; Target 22889; HLA-C*07:02; DSCR8; ENSG00000198054; TAA
EPGPNFVTV

SEQ ID NO: 22890 - protein, 9 aa, Homo sapiens
  Table A; Target 22890; HLA-C*07:06; DSCR8; ENSG00000198054; TAA
EPGPNFVTV

SEQ ID NO: 22891 - protein, 9 aa, Homo sapiens
  Table A; Target 22891; HLA-C*12:03; DSCR8; ENSG00000198054; TAA
EPGPNFVTV

SEQ ID NO: 22892 - protein, 9 aa, Homo sapiens
  Table A; Target 22892; HLA-C*16:02; DSCR8; ENSG00000198054; TAA
EPGPNFVTV

SEQ ID NO: 22893 - protein, 10 aa, Homo sapiens
  Table A; Target 22893; HLA-A*33:01; DSCR8; ENSG00000198054; TAA
EPGPNFVTVR

SEQ ID NO: 22894 - protein, 10 aa, Homo sapiens
  Table A; Target 22894; HLA-A*33:03; DSCR8; ENSG00000198054; TAA
EPGPNFVTVR

SEQ ID NO: 22895 - protein, 10 aa, Homo sapiens
  Table A; Target 22895; HLA-A*68:01; DSCR8; ENSG00000198054; TAA
EPGPNFVTVR

SEQ ID NO: 22896 - protein, 10 aa, Homo sapiens
  Table A; Target 22896; HLA-A*68:02; DSCR8; ENSG00000198054; TAA
EPGPNFVTVR

SEQ ID NO: 22897 - protein, 10 aa, Homo sapiens
  Table A; Target 22897; HLA-B*27:02; DSCR8; ENSG00000198054; TAA
EPGPNFVTVR

SEQ ID NO: 22898 - protein, 10 aa, Homo sapiens
  Table A; Target 22898; HLA-B*35:01; DSCR8; ENSG00000198054; TAA
EPGPNFVTVR

SEQ ID NO: 22899 - protein, 10 aa, Homo sapiens
  Table A; Target 22899; HLA-C*07:06; DSCR8; ENSG00000198054; TAA
EPGPNFVTVR

SEQ ID NO: 22900 - protein, 11 aa, Homo sapiens
  Table A; Target 22900; HLA-A*33:03; DSCR8; ENSG00000198054; TAA
EPGPNFVTVRK

SEQ ID NO: 22901 - protein, 11 aa, Homo sapiens
  Table A; Target 22901; HLA-A*68:01; DSCR8; ENSG00000198054; TAA
EPGPNFVTVRK

SEQ ID NO: 22902 - protein, 11 aa, Homo sapiens
  Table A; Target 22902; HLA-A*68:02; DSCR8; ENSG00000198054; TAA
EPGPNFVTVRK

SEQ ID NO: 22903 - protein, 11 aa, Homo sapiens
  Table A; Target 22903; HLA-C*07:06; DSCR8; ENSG00000198054; TAA
EPGPNFVTVRK

SEQ ID NO: 22904 - protein, 9 aa, Homo sapiens
  Table A; Target 22904; HLA-A*23:01; DSCR8; ENSG00000198054; TAA
EQLGLQTNL

SEQ ID NO: 22905 - protein, 9 aa, Homo sapiens
  Table A; Target 22905; HLA-B*13:02; DSCR8; ENSG00000198054; TAA
EQLGLQTNL

SEQ ID NO: 22906 - protein, 9 aa, Homo sapiens
  Table A; Target 22906; HLA-B*15:01; DSCR8; ENSG00000198054; TAA
EQLGLQTNL

SEQ ID NO: 22907 - protein, 9 aa, Homo sapiens
  Table A; Target 22907; HLA-B*15:03; DSCR8; ENSG00000198054; TAA
EQLGLQTNL

SEQ ID NO: 22908 - protein, 9 aa, Homo sapiens
  Table A; Target 22908; HLA-B*27:05; DSCR8; ENSG00000198054; TAA
EQLGLQTNL

SEQ ID NO: 22909 - protein, 9 aa, Homo sapiens
  Table A; Target 22909; HLA-B*38:01; DSCR8; ENSG00000198054; TAA
EQLGLQTNL

SEQ ID NO: 22910 - protein, 9 aa, Homo sapiens
  Table A; Target 22910; HLA-B*39:01; DSCR8; ENSG00000198054; TAA
EQLGLQTNL

SEQ ID NO: 22911 - protein, 9 aa, Homo sapiens
  Table A; Target 22911; HLA-C*07:04; DSCR8; ENSG00000198054; TAA
EQLGLQTNL

SEQ ID NO: 22912 - protein, 8 aa, Homo sapiens
  Table A; Target 22912; HLA-B*07:02; DSCR8; ENSG00000198054; TAA
ESSGMMKL

SEQ ID NO: 22913 - protein, 8 aa, Homo sapiens
  Table A; Target 22913; HLA-B*40:02; DSCR8; ENSG00000198054; TAA
ESSGMMKL

SEQ ID NO: 22914 - protein, 8 aa, Homo sapiens
  Table A; Target 22914; HLA-C*04:01; DSCR8; ENSG00000198054; TAA
ESSGMMKL

SEQ ID NO: 22915 - protein, 8 aa, Homo sapiens
  Table A; Target 22915; HLA-C*06:02; DSCR8; ENSG00000198054; TAA
ESSGMMKL

SEQ ID NO: 22916 - protein, 8 aa, Homo sapiens
  Table A; Target 22916; HLA-C*07:01; DSCR8; ENSG00000198054; TAA
ESSGMMKL

SEQ ID NO: 22917 - protein, 8 aa, Homo sapiens
  Table A; Target 22917; HLA-C*07:02; DSCR8; ENSG00000198054; TAA
ESSGMMKL

SEQ ID NO: 22918 - protein, 8 aa, Homo sapiens
  Table A; Target 22918; HLA-C*12:03; DSCR8; ENSG00000198054; TAA
ESSGMMKL

SEQ ID NO: 22919 - protein, 9 aa, Homo sapiens
  Table A; Target 22919; HLA-A*25:01; DSCR8; ENSG00000198054; TAA
ESSGMMKLF

SEQ ID NO: 22920 - protein, 9 aa, Homo sapiens
  Table A; Target 22920; HLA-A*26:01; DSCR8; ENSG00000198054; TAA
ESSGMMKLF

SEQ ID NO: 22921 - protein, 9 aa, Homo sapiens
  Table A; Target 22921; HLA-B*44:03; DSCR8; ENSG00000198054; TAA
ESSGMMKLF

SEQ ID NO: 22922 - protein, 9 aa, Homo sapiens
  Table A; Target 22922; HLA-C*07:01; DSCR8; ENSG00000198054; TAA
ESSGMMKLF

SEQ ID NO: 22923 - protein, 8 aa, Homo sapiens
  Table A; Target 22923; HLA-A*02:07; DSCR8; ENSG00000198054; TAA
FMPRPKVL

SEQ ID NO: 22924 - protein, 8 aa, Homo sapiens
  Table A; Target 22924; HLA-B*07:02; DSCR8; ENSG00000198054; TAA
FMPRPKVL

SEQ ID NO: 22925 - protein, 8 aa, Homo sapiens
  Table A; Target 22925; HLA-C*07:01; DSCR8; ENSG00000198054; TAA
FMPRPKVL

SEQ ID NO: 22926 - protein, 8 aa, Homo sapiens
  Table A; Target 22926; HLA-C*07:02; DSCR8; ENSG00000198054; TAA
FMPRPKVL

SEQ ID NO: 22927 - protein, 9 aa, Homo sapiens
  Table A; Target 22927; HLA-A*02:01; DSCR8; ENSG00000198054; TAA
FMPRPKVLA

SEQ ID NO: 22928 - protein, 9 aa, Homo sapiens
  Table A; Target 22928; HLA-A*02:07; DSCR8; ENSG00000198054; TAA
FMPRPKVLA

SEQ ID NO: 22929 - protein, 11 aa, Homo sapiens
  Table A; Target 22929; HLA-A*02:07; DSCR8; ENSG00000198054; TAA
FMPRPKVLAQY

SEQ ID NO: 22930 - protein, 11 aa, Homo sapiens
  Table A; Target 22930; HLA-A*29:02; DSCR8; ENSG00000198054; TAA
FMPRPKVLAQY

SEQ ID NO: 22931 - protein, 9 aa, Homo sapiens
  Table A; Target 22931; HLA-A*02:03; DSCR8; ENSG00000198054; TAA
FVKHLLLFL

SEQ ID NO: 22932 - protein, 9 aa, Homo sapiens
  Table A; Target 22932; HLA-A*02:04; DSCR8; ENSG00000198054; TAA
FVKHLLLFL

SEQ ID NO: 22933 - protein, 9 aa, Homo sapiens
  Table A; Target 22933; HLA-A*68:02; DSCR8; ENSG00000198054; TAA
FVKHLLLFL

SEQ ID NO: 22934 - protein, 9 aa, Homo sapiens
  Table A; Target 22934; HLA-A*03:01; DSCR8; ENSG00000198054; TAA
GLHSFKMAF

SEQ ID NO: 22935 - protein, 9 aa, Homo sapiens
  Table A; Target 22935; HLA-A*29:02; DSCR8; ENSG00000198054; TAA
GLHSFKMAF

SEQ ID NO: 22936 - protein, 10 aa, Homo sapiens
  Table A; Target 22936; HLA-A*02:03; DSCR8; ENSG00000198054; TAA
GLHSFKMAFV

SEQ ID NO: 22937 - protein, 9 aa, Homo sapiens
  Table A; Target 22937; HLA-A*03:01; DSCR8; ENSG00000198054; TAA
GMMKLFMPR

SEQ ID NO: 22938 - protein, 9 aa, Homo sapiens
  Table A; Target 22938; HLA-A*31:01; DSCR8; ENSG00000198054; TAA
GMMKLFMPR

SEQ ID NO: 22939 - protein, 9 aa, Homo sapiens
  Table A; Target 22939; HLA-B*39:01; DSCR8; ENSG00000198054; TAA
GNQESSGMM

SEQ ID NO: 22940 - protein, 9 aa, Homo sapiens
  Table A; Target 22940; HLA-C*04:01; DSCR8; ENSG00000198054; TAA
GNQESSGMM

SEQ ID NO: 22941 - protein, 9 aa, Homo sapiens
  Table A; Target 22941; HLA-C*14:02; DSCR8; ENSG00000198054; TAA
GNQESSGMM

SEQ ID NO: 22942 - protein, 10 aa, Homo sapiens
  Table A; Target 22942; HLA-A*03:02; DSCR8; ENSG00000198054; TAA
GNQESSGMMK

SEQ ID NO: 22943 - protein, 10 aa, Homo sapiens
  Table A; Target 22943; HLA-A*11:01; DSCR8; ENSG00000198054; TAA
GNQESSGMMK

SEQ ID NO: 22944 - protein, 10 aa, Homo sapiens
  Table A; Target 22944; HLA-B*27:02; DSCR8; ENSG00000198054; TAA
GNQESSGMMK

SEQ ID NO: 22945 - protein, 11 aa, Homo sapiens
  Table A; Target 22945; HLA-C*04:01; DSCR8; ENSG00000198054; TAA
GNQESSGMMKL

SEQ ID NO: 22946 - protein, 8 aa, Homo sapiens
  Table A; Target 22946; HLA-B*56:01; DSCR8; ENSG00000198054; TAA
GPNFVTVR

SEQ ID NO: 22947 - protein, 9 aa, Homo sapiens
  Table A; Target 22947; HLA-A*03:01; DSCR8; ENSG00000198054; TAA
GPNFVTVRK

SEQ ID NO: 22948 - protein, 9 aa, Homo sapiens
  Table A; Target 22948; HLA-A*03:02; DSCR8; ENSG00000198054; TAA
GPNFVTVRK

SEQ ID NO: 22949 - protein, 9 aa, Homo sapiens
  Table A; Target 22949; HLA-A*11:01; DSCR8; ENSG00000198054; TAA
GPNFVTVRK

SEQ ID NO: 22950 - protein, 9 aa, Homo sapiens
  Table A; Target 22950; HLA-A*31:01; DSCR8; ENSG00000198054; TAA
GPNFVTVRK

SEQ ID NO: 22951 - protein, 9 aa, Homo sapiens
  Table A; Target 22951; HLA-A*68:01; DSCR8; ENSG00000198054; TAA
GPNFVTVRK

SEQ ID NO: 22952 - protein, 9 aa, Homo sapiens
  Table A; Target 22952; HLA-B*27:02; DSCR8; ENSG00000198054; TAA
GPNFVTVRK

SEQ ID NO: 22953 - protein, 9 aa, Homo sapiens
  Table A; Target 22953; HLA-B*27:05; DSCR8; ENSG00000198054; TAA
GPNFVTVRK

SEQ ID NO: 22954 - protein, 9 aa, Homo sapiens
  Table A; Target 22954; HLA-B*56:01; DSCR8; ENSG00000198054; TAA
GPNFVTVRK

SEQ ID NO: 22955 - protein, 11 aa, Homo sapiens
  Table A; Target 22955; HLA-B*07:02; DSCR8; ENSG00000198054; TAA
GPNFVTVRKGL

SEQ ID NO: 22956 - protein, 9 aa, Homo sapiens
  Table A; Target 22956; HLA-A*30:01; DSCR8; ENSG00000198054; TAA
GSITDHCSL

SEQ ID NO: 22957 - protein, 9 aa, Homo sapiens
  Table A; Target 22957; HLA-B*27:05; DSCR8; ENSG00000198054; TAA
GSITDHCSL

SEQ ID NO: 22958 - protein, 9 aa, Homo sapiens
  Table A; Target 22958; HLA-B*40:01; DSCR8; ENSG00000198054; TAA
GSITDHCSL

SEQ ID NO: 22959 - protein, 9 aa, Homo sapiens
  Table A; Target 22959; HLA-B*40:02; DSCR8; ENSG00000198054; TAA
GSITDHCSL

SEQ ID NO: 22960 - protein, 9 aa, Homo sapiens
  Table A; Target 22960; HLA-B*58:01; DSCR8; ENSG00000198054; TAA
GSITDHCSL

SEQ ID NO: 22961 - protein, 9 aa, Homo sapiens
  Table A; Target 22961; HLA-C*01:02; DSCR8; ENSG00000198054; TAA
GSITDHCSL

SEQ ID NO: 22962 - protein, 9 aa, Homo sapiens
  Table A; Target 22962; HLA-C*03:03; DSCR8; ENSG00000198054; TAA
GSITDHCSL

SEQ ID NO: 22963 - protein, 9 aa, Homo sapiens
  Table A; Target 22963; HLA-C*03:04; DSCR8; ENSG00000198054; TAA
GSITDHCSL

SEQ ID NO: 22964 - protein, 9 aa, Homo sapiens
  Table A; Target 22964; HLA-C*06:02; DSCR8; ENSG00000198054; TAA
GSITDHCSL

SEQ ID NO: 22965 - protein, 9 aa, Homo sapiens
  Table A; Target 22965; HLA-C*14:02; DSCR8; ENSG00000198054; TAA
GSITDHCSL

SEQ ID NO: 22966 - protein, 9 aa, Homo sapiens
  Table A; Target 22966; HLA-C*16:01; DSCR8; ENSG00000198054; TAA
GSITDHCSL

SEQ ID NO: 22967 - protein, 9 aa, Homo sapiens
  Table A; Target 22967; HLA-C*16:02; DSCR8; ENSG00000198054; TAA
GSITDHCSL

SEQ ID NO: 22968 - protein, 9 aa, Homo sapiens
  Table A; Target 22968; HLA-C*16:04; DSCR8; ENSG00000198054; TAA
GSITDHCSL

SEQ ID NO: 22969 - protein, 9 aa, Homo sapiens
  Table A; Target 22969; HLA-A*31:01; DSCR8; ENSG00000198054; TAA
HLLLFLSPR

SEQ ID NO: 22970 - protein, 10 aa, Homo sapiens
  Table A; Target 22970; HLA-A*02:04; DSCR8; ENSG00000198054; TAA
HLLLFLSPRL

SEQ ID NO: 22971 - protein, 9 aa, Homo sapiens
  Table A; Target 22971; HLA-A*02:01; DSCR8; ENSG00000198054; TAA
HLPVQEILM

SEQ ID NO: 22972 - protein, 9 aa, Homo sapiens
  Table A; Target 22972; HLA-A*02:07; DSCR8; ENSG00000198054; TAA
HLPVQEILM

SEQ ID NO: 22973 - protein, 9 aa, Homo sapiens
  Table A; Target 22973; HLA-A*24:02; DSCR8; ENSG00000198054; TAA
HLPVQEILM

SEQ ID NO: 22974 - protein, 9 aa, Homo sapiens
  Table A; Target 22974; HLA-A*29:02; DSCR8; ENSG00000198054; TAA
HLPVQEILM

SEQ ID NO: 22975 - protein, 9 aa, Homo sapiens
  Table A; Target 22975; HLA-B*55:01; DSCR8; ENSG00000198054; TAA
HLPVQEILM

SEQ ID NO: 22976 - protein, 9 aa, Homo sapiens
  Table A; Target 22976; HLA-C*04:01; DSCR8; ENSG00000198054; TAA
HLPVQEILM

SEQ ID NO: 22977 - protein, 9 aa, Homo sapiens
  Table A; Target 22977; HLA-C*07:01; DSCR8; ENSG00000198054; TAA
HLPVQEILM

SEQ ID NO: 22978 - protein, 9 aa, Homo sapiens
  Table A; Target 22978; HLA-C*07:04; DSCR8; ENSG00000198054; TAA
HLPVQEILM

SEQ ID NO: 22979 - protein, 8 aa, Homo sapiens
  Table A; Target 22979; HLA-A*02:03; DSCR8; ENSG00000198054; TAA
HSFKMAFV

SEQ ID NO: 22980 - protein, 8 aa, Homo sapiens
  Table A; Target 22980; HLA-A*68:02; DSCR8; ENSG00000198054; TAA
HSFKMAFV

SEQ ID NO: 22981 - protein, 9 aa, Homo sapiens
  Table A; Target 22981; HLA-A*03:01; DSCR8; ENSG00000198054; TAA
HSFKMAFVK

SEQ ID NO: 22982 - protein, 9 aa, Homo sapiens
  Table A; Target 22982; HLA-B*57:01; DSCR8; ENSG00000198054; TAA
HSFKMAFVK

SEQ ID NO: 22983 - protein, 9 aa, Homo sapiens
  Table A; Target 22983; HLA-A*01:01; DSCR8; ENSG00000198054; TAA
ILMSQPPEQ

SEQ ID NO: 22984 - protein, 9 aa, Homo sapiens
  Table A; Target 22984; HLA-A*02:01; DSCR8; ENSG00000198054; TAA
ILMSQPPEQ

SEQ ID NO: 22985 - protein, 9 aa, Homo sapiens
  Table A; Target 22985; HLA-A*03:02; DSCR8; ENSG00000198054; TAA
ILMSQPPEQ

SEQ ID NO: 22986 - protein, 9 aa, Homo sapiens
  Table A; Target 22986; HLA-B*13:02; DSCR8; ENSG00000198054; TAA
ILMSQPPEQ

SEQ ID NO: 22987 - protein, 9 aa, Homo sapiens
  Table A; Target 22987; HLA-B*55:01; DSCR8; ENSG00000198054; TAA
ILMSQPPEQ

SEQ ID NO: 22988 - protein, 10 aa, Homo sapiens
  Table A; Target 22988; HLA-A*02:01; DSCR8; ENSG00000198054; TAA
ILMSQPPEQL

SEQ ID NO: 22989 - protein, 10 aa, Homo sapiens
  Table A; Target 22989; HLA-A*02:03; DSCR8; ENSG00000198054; TAA
ILMSQPPEQL

SEQ ID NO: 22990 - protein, 10 aa, Homo sapiens
  Table A; Target 22990; HLA-A*02:04; DSCR8; ENSG00000198054; TAA
ILMSQPPEQL

SEQ ID NO: 22991 - protein, 10 aa, Homo sapiens
  Table A; Target 22991; HLA-A*02:07; DSCR8; ENSG00000198054; TAA
ILMSQPPEQL

SEQ ID NO: 22992 - protein, 10 aa, Homo sapiens
  Table A; Target 22992; HLA-A*03:01; DSCR8; ENSG00000198054; TAA
ILMSQPPEQL

SEQ ID NO: 22993 - protein, 10 aa, Homo sapiens
  Table A; Target 22993; HLA-A*03:02; DSCR8; ENSG00000198054; TAA
ILMSQPPEQL

SEQ ID NO: 22994 - protein, 10 aa, Homo sapiens
  Table A; Target 22994; HLA-A*23:01; DSCR8; ENSG00000198054; TAA
ILMSQPPEQL

SEQ ID NO: 22995 - protein, 10 aa, Homo sapiens
  Table A; Target 22995; HLA-A*24:02; DSCR8; ENSG00000198054; TAA
ILMSQPPEQL

SEQ ID NO: 22996 - protein, 10 aa, Homo sapiens
  Table A; Target 22996; HLA-A*31:01; DSCR8; ENSG00000198054; TAA
ILMSQPPEQL

SEQ ID NO: 22997 - protein, 10 aa, Homo sapiens
  Table A; Target 22997; HLA-A*32:01; DSCR8; ENSG00000198054; TAA
ILMSQPPEQL

SEQ ID NO: 22998 - protein, 10 aa, Homo sapiens
  Table A; Target 22998; HLA-A*68:02; DSCR8; ENSG00000198054; TAA
ILMSQPPEQL

SEQ ID NO: 22999 - protein, 10 aa, Homo sapiens
  Table A; Target 22999; HLA-B*13:02; DSCR8; ENSG00000198054; TAA
ILMSQPPEQL

SEQ ID NO: 23000 - protein, 10 aa, Homo sapiens
  Table A; Target 23000; HLA-B*15:01; DSCR8; ENSG00000198054; TAA
ILMSQPPEQL

SEQ ID NO: 23001 - protein, 10 aa, Homo sapiens
  Table A; Target 23001; HLA-B*27:05; DSCR8; ENSG00000198054; TAA
ILMSQPPEQL

SEQ ID NO: 23002 - protein, 10 aa, Homo sapiens
  Table A; Target 23002; HLA-B*38:01; DSCR8; ENSG00000198054; TAA
ILMSQPPEQL

SEQ ID NO: 23003 - protein, 10 aa, Homo sapiens
  Table A; Target 23003; HLA-B*40:01; DSCR8; ENSG00000198054; TAA
ILMSQPPEQL

SEQ ID NO: 23004 - protein, 10 aa, Homo sapiens
  Table A; Target 23004; HLA-B*55:01; DSCR8; ENSG00000198054; TAA
ILMSQPPEQL

SEQ ID NO: 23005 - protein, 10 aa, Homo sapiens
  Table A; Target 23005; HLA-C*01:02; DSCR8; ENSG00000198054; TAA
ILMSQPPEQL

SEQ ID NO: 23006 - protein, 10 aa, Homo sapiens
  Table A; Target 23006; HLA-C*04:01; DSCR8; ENSG00000198054; TAA
ILMSQPPEQL

SEQ ID NO: 23007 - protein, 10 aa, Homo sapiens
  Table A; Target 23007; HLA-C*06:02; DSCR8; ENSG00000198054; TAA
ILMSQPPEQL

SEQ ID NO: 23008 - protein, 10 aa, Homo sapiens
  Table A; Target 23008; HLA-C*07:02; DSCR8; ENSG00000198054; TAA
ILMSQPPEQL

SEQ ID NO: 23009 - protein, 10 aa, Homo sapiens
  Table A; Target 23009; HLA-C*14:02; DSCR8; ENSG00000198054; TAA
ILMSQPPEQL

SEQ ID NO: 23010 - protein, 8 aa, Homo sapiens
  Table A; Target 23010; HLA-C*06:02; DSCR8; ENSG00000198054; TAA
KEPGPNFV

SEQ ID NO: 23011 - protein, 9 aa, Homo sapiens
  Table A; Target 23011; HLA-B*40:01; DSCR8; ENSG00000198054; TAA
KEPGPNFVT

SEQ ID NO: 23012 - protein, 9 aa, Homo sapiens
  Table A; Target 23012; HLA-C*06:02; DSCR8; ENSG00000198054; TAA
KEPGPNFVT

SEQ ID NO: 23013 - protein, 10 aa, Homo sapiens
  Table A; Target 23013; HLA-A*02:01; DSCR8; ENSG00000198054; TAA
KEPGPNFVTV

SEQ ID NO: 23014 - protein, 10 aa, Homo sapiens
  Table A; Target 23014; HLA-A*02:07; DSCR8; ENSG00000198054; TAA
KEPGPNFVTV

SEQ ID NO: 23015 - protein, 10 aa, Homo sapiens
  Table A; Target 23015; HLA-A*30:01; DSCR8; ENSG00000198054; TAA
KEPGPNFVTV

SEQ ID NO: 23016 - protein, 10 aa, Homo sapiens
  Table A; Target 23016; HLA-A*68:02; DSCR8; ENSG00000198054; TAA
KEPGPNFVTV

SEQ ID NO: 23017 - protein, 10 aa, Homo sapiens
  Table A; Target 23017; HLA-B*13:02; DSCR8; ENSG00000198054; TAA
KEPGPNFVTV

SEQ ID NO: 23018 - protein, 10 aa, Homo sapiens
  Table A; Target 23018; HLA-B*37:01; DSCR8; ENSG00000198054; TAA
KEPGPNFVTV

SEQ ID NO: 23019 - protein, 10 aa, Homo sapiens
  Table A; Target 23019; HLA-B*40:01; DSCR8; ENSG00000198054; TAA
KEPGPNFVTV

SEQ ID NO: 23020 - protein, 10 aa, Homo sapiens
  Table A; Target 23020; HLA-B*40:02; DSCR8; ENSG00000198054; TAA
KEPGPNFVTV

SEQ ID NO: 23021 - protein, 10 aa, Homo sapiens
  Table A; Target 23021; HLA-B*44:02; DSCR8; ENSG00000198054; TAA
KEPGPNFVTV

SEQ ID NO: 23022 - protein, 10 aa, Homo sapiens
  Table A; Target 23022; HLA-B*44:03; DSCR8; ENSG00000198054; TAA
KEPGPNFVTV

SEQ ID NO: 23023 - protein, 10 aa, Homo sapiens
  Table A; Target 23023; HLA-B*49:01; DSCR8; ENSG00000198054; TAA
KEPGPNFVTV

SEQ ID NO: 23024 - protein, 10 aa, Homo sapiens
  Table A; Target 23024; HLA-B*56:01; DSCR8; ENSG00000198054; TAA
KEPGPNFVTV

SEQ ID NO: 23025 - protein, 10 aa, Homo sapiens
  Table A; Target 23025; HLA-B*58:01; DSCR8; ENSG00000198054; TAA
KEPGPNFVTV

SEQ ID NO: 23026 - protein, 10 aa, Homo sapiens
  Table A; Target 23026; HLA-C*02:02; DSCR8; ENSG00000198054; TAA
KEPGPNFVTV

SEQ ID NO: 23027 - protein, 10 aa, Homo sapiens
  Table A; Target 23027; HLA-C*04:01; DSCR8; ENSG00000198054; TAA
KEPGPNFVTV

SEQ ID NO: 23028 - protein, 10 aa, Homo sapiens
  Table A; Target 23028; HLA-C*06:02; DSCR8; ENSG00000198054; TAA
KEPGPNFVTV

SEQ ID NO: 23029 - protein, 10 aa, Homo sapiens
  Table A; Target 23029; HLA-C*07:02; DSCR8; ENSG00000198054; TAA
KEPGPNFVTV

SEQ ID NO: 23030 - protein, 10 aa, Homo sapiens
  Table A; Target 23030; HLA-C*12:03; DSCR8; ENSG00000198054; TAA
KEPGPNFVTV

SEQ ID NO: 23031 - protein, 10 aa, Homo sapiens
  Table A; Target 23031; HLA-C*16:02; DSCR8; ENSG00000198054; TAA
KEPGPNFVTV

SEQ ID NO: 23032 - protein, 10 aa, Homo sapiens
  Table A; Target 23032; HLA-C*16:04; DSCR8; ENSG00000198054; TAA
KEPGPNFVTV

SEQ ID NO: 23033 - protein, 11 aa, Homo sapiens
  Table A; Target 23033; HLA-A*30:01; DSCR8; ENSG00000198054; TAA
KEPGPNFVTVR

SEQ ID NO: 23034 - protein, 11 aa, Homo sapiens
  Table A; Target 23034; HLA-A*31:01; DSCR8; ENSG00000198054; TAA
KEPGPNFVTVR

SEQ ID NO: 23035 - protein, 11 aa, Homo sapiens
  Table A; Target 23035; HLA-A*68:02; DSCR8; ENSG00000198054; TAA
KEPGPNFVTVR

SEQ ID NO: 23036 - protein, 11 aa, Homo sapiens
  Table A; Target 23036; HLA-B*27:05; DSCR8; ENSG00000198054; TAA
KEPGPNFVTVR

SEQ ID NO: 23037 - protein, 11 aa, Homo sapiens
  Table A; Target 23037; HLA-B*40:01; DSCR8; ENSG00000198054; TAA
KEPGPNFVTVR

SEQ ID NO: 23038 - protein, 11 aa, Homo sapiens
  Table A; Target 23038; HLA-B*40:02; DSCR8; ENSG00000198054; TAA
KEPGPNFVTVR

SEQ ID NO: 23039 - protein, 11 aa, Homo sapiens
  Table A; Target 23039; HLA-B*49:01; DSCR8; ENSG00000198054; TAA
KEPGPNFVTVR

SEQ ID NO: 23040 - protein, 11 aa, Homo sapiens
  Table A; Target 23040; HLA-C*04:01; DSCR8; ENSG00000198054; TAA
KEPGPNFVTVR

SEQ ID NO: 23041 - protein, 11 aa, Homo sapiens
  Table A; Target 23041; HLA-C*07:02; DSCR8; ENSG00000198054; TAA
KEPGPNFVTVR

SEQ ID NO: 23042 - protein, 8 aa, Homo sapiens
  Table A; Target 23042; HLA-A*03:01; DSCR8; ENSG00000198054; TAA
KLFMPRPK

SEQ ID NO: 23043 - protein, 8 aa, Homo sapiens
  Table A; Target 23043; HLA-C*06:02; DSCR8; ENSG00000198054; TAA
KLFMPRPK

SEQ ID NO: 23044 - protein, 10 aa, Homo sapiens
  Table A; Target 23044; HLA-A*02:03; DSCR8; ENSG00000198054; TAA
KLFMPRPKVL

SEQ ID NO: 23045 - protein, 10 aa, Homo sapiens
  Table A; Target 23045; HLA-A*02:04; DSCR8; ENSG00000198054; TAA
KLFMPRPKVL

SEQ ID NO: 23046 - protein, 10 aa, Homo sapiens
  Table A; Target 23046; HLA-A*03:01; DSCR8; ENSG00000198054; TAA
KLFMPRPKVL

SEQ ID NO: 23047 - protein, 9 aa, Homo sapiens
  Table A; Target 23047; HLA-A*02:04; DSCR8; ENSG00000198054; TAA
KMAFVKHLL

SEQ ID NO: 23048 - protein, 9 aa, Homo sapiens
  Table A; Target 23048; HLA-A*31:01; DSCR8; ENSG00000198054; TAA
KMAFVKHLL

SEQ ID NO: 23049 - protein, 9 aa, Homo sapiens
  Table A; Target 23049; HLA-A*02:01; DSCR8; ENSG00000198054; TAA
KVLAQYESI

SEQ ID NO: 23050 - protein, 9 aa, Homo sapiens
  Table A; Target 23050; HLA-A*02:04; DSCR8; ENSG00000198054; TAA
KVLAQYESI

SEQ ID NO: 23051 - protein, 9 aa, Homo sapiens
  Table A; Target 23051; HLA-A*02:07; DSCR8; ENSG00000198054; TAA
KVLAQYESI

SEQ ID NO: 23052 - protein, 9 aa, Homo sapiens
  Table A; Target 23052; HLA-A*24:02; DSCR8; ENSG00000198054; TAA
KVLAQYESI

SEQ ID NO: 23053 - protein, 9 aa, Homo sapiens
  Table A; Target 23053; HLA-A*32:01; DSCR8; ENSG00000198054; TAA
KVLAQYESI

SEQ ID NO: 23054 - protein, 9 aa, Homo sapiens
  Table A; Target 23054; HLA-B*13:02; DSCR8; ENSG00000198054; TAA
KVLAQYESI

SEQ ID NO: 23055 - protein, 9 aa, Homo sapiens
  Table A; Target 23055; HLA-B*40:02; DSCR8; ENSG00000198054; TAA
KVLAQYESI

SEQ ID NO: 23056 - protein, 9 aa, Homo sapiens
  Table A; Target 23056; HLA-B*58:01; DSCR8; ENSG00000198054; TAA
KVLAQYESI

SEQ ID NO: 23057 - protein, 9 aa, Homo sapiens
  Table A; Target 23057; HLA-C*01:02; DSCR8; ENSG00000198054; TAA
KVLAQYESI

SEQ ID NO: 23058 - protein, 9 aa, Homo sapiens
  Table A; Target 23058; HLA-B*55:01; DSCR8; ENSG00000198054; TAA
LAQYESIQF

SEQ ID NO: 23059 - protein, 9 aa, Homo sapiens
  Table A; Target 23059; HLA-B*58:01; DSCR8; ENSG00000198054; TAA
LAQYESIQF

SEQ ID NO: 23060 - protein, 9 aa, Homo sapiens
  Table A; Target 23060; HLA-C*03:03; DSCR8; ENSG00000198054; TAA
LAQYESIQF

SEQ ID NO: 23061 - protein, 9 aa, Homo sapiens
  Table A; Target 23061; HLA-C*03:04; DSCR8; ENSG00000198054; TAA
LAQYESIQF

SEQ ID NO: 23062 - protein, 9 aa, Homo sapiens
  Table A; Target 23062; HLA-C*04:01; DSCR8; ENSG00000198054; TAA
LAQYESIQF

SEQ ID NO: 23063 - protein, 9 aa, Homo sapiens
  Table A; Target 23063; HLA-C*05:01; DSCR8; ENSG00000198054; TAA
LAQYESIQF

SEQ ID NO: 23064 - protein, 9 aa, Homo sapiens
  Table A; Target 23064; HLA-A*23:01; DSCR8; ENSG00000198054; TAA
LFMPRPKVL

SEQ ID NO: 23065 - protein, 9 aa, Homo sapiens
  Table A; Target 23065; HLA-A*24:02; DSCR8; ENSG00000198054; TAA
LFMPRPKVL

SEQ ID NO: 23066 - protein, 9 aa, Homo sapiens
  Table A; Target 23066; HLA-B*08:01; DSCR8; ENSG00000198054; TAA
LFMPRPKVL

SEQ ID NO: 23067 - protein, 9 aa, Homo sapiens
  Table A; Target 23067; HLA-C*12:03; DSCR8; ENSG00000198054; TAA
LFMPRPKVL

SEQ ID NO: 23068 - protein, 9 aa, Homo sapiens
  Table A; Target 23068; HLA-C*04:01; DSCR8; ENSG00000198054; TAA
LGLQTNLGN

SEQ ID NO: 23069 - protein, 9 aa, Homo sapiens
  Table A; Target 23069; HLA-C*07:04; DSCR8; ENSG00000198054; TAA
LGNQESSGM

SEQ ID NO: 23070 - protein, 11 aa, Homo sapiens
  Table A; Target 23070; HLA-A*03:02; DSCR8; ENSG00000198054; TAA
LGNQESSGMMK

SEQ ID NO: 23071 - protein, 11 aa, Homo sapiens
  Table A; Target 23071; HLA-A*11:01; DSCR8; ENSG00000198054; TAA
LGNQESSGMMK

SEQ ID NO: 23072 - protein, 11 aa, Homo sapiens
  Table A; Target 23072; HLA-B*27:02; DSCR8; ENSG00000198054; TAA
LGNQESSGMMK

SEQ ID NO: 23073 - protein, 8 aa, Homo sapiens
  Table A; Target 23073; HLA-B*13:02; DSCR8; ENSG00000198054; TAA
LHLPVQEI

SEQ ID NO: 23074 - protein, 8 aa, Homo sapiens
  Table A; Target 23074; HLA-B*38:01; DSCR8; ENSG00000198054; TAA
LHLPVQEI

SEQ ID NO: 23075 - protein, 8 aa, Homo sapiens
  Table A; Target 23075; HLA-B*39:01; DSCR8; ENSG00000198054; TAA
LHLPVQEI

SEQ ID NO: 23076 - protein, 8 aa, Homo sapiens
  Table A; Target 23076; HLA-C*07:01; DSCR8; ENSG00000198054; TAA
LHLPVQEI

SEQ ID NO: 23077 - protein, 9 aa, Homo sapiens
  Table A; Target 23077; HLA-B*38:01; DSCR8; ENSG00000198054; TAA
LHLPVQEIL

SEQ ID NO: 23078 - protein, 9 aa, Homo sapiens
  Table A; Target 23078; HLA-B*39:01; DSCR8; ENSG00000198054; TAA
LHLPVQEIL

SEQ ID NO: 23079 - protein, 9 aa, Homo sapiens
  Table A; Target 23079; HLA-B*57:01; DSCR8; ENSG00000198054; TAA
LHLPVQEIL

SEQ ID NO: 23080 - protein, 9 aa, Homo sapiens
  Table A; Target 23080; HLA-C*07:01; DSCR8; ENSG00000198054; TAA
LHLPVQEIL

SEQ ID NO: 23081 - protein, 8 aa, Homo sapiens
  Table A; Target 23081; HLA-A*02:04; DSCR8; ENSG00000198054; TAA
LLFLSPRL

SEQ ID NO: 23082 - protein, 9 aa, Homo sapiens
  Table A; Target 23082; HLA-A*02:01; DSCR8; ENSG00000198054; TAA
LLLFLSPRL

SEQ ID NO: 23083 - protein, 9 aa, Homo sapiens
  Table A; Target 23083; HLA-A*02:04; DSCR8; ENSG00000198054; TAA
LLLFLSPRL

SEQ ID NO: 23084 - protein, 9 aa, Homo sapiens
  Table A; Target 23084; HLA-A*02:07; DSCR8; ENSG00000198054; TAA
LLLFLSPRL

SEQ ID NO: 23085 - protein, 9 aa, Homo sapiens
  Table A; Target 23085; HLA-A*02:01; DSCR8; ENSG00000198054; TAA
LMSQPPEQL

SEQ ID NO: 23086 - protein, 9 aa, Homo sapiens
  Table A; Target 23086; HLA-A*02:03; DSCR8; ENSG00000198054; TAA
LMSQPPEQL

SEQ ID NO: 23087 - protein, 9 aa, Homo sapiens
  Table A; Target 23087; HLA-A*02:04; DSCR8; ENSG00000198054; TAA
LMSQPPEQL

SEQ ID NO: 23088 - protein, 9 aa, Homo sapiens
  Table A; Target 23088; HLA-A*02:07; DSCR8; ENSG00000198054; TAA
LMSQPPEQL

SEQ ID NO: 23089 - protein, 9 aa, Homo sapiens
  Table A; Target 23089; HLA-A*68:02; DSCR8; ENSG00000198054; TAA
LMSQPPEQL

SEQ ID NO: 23090 - protein, 9 aa, Homo sapiens
  Table A; Target 23090; HLA-B*13:02; DSCR8; ENSG00000198054; TAA
LMSQPPEQL

SEQ ID NO: 23091 - protein, 9 aa, Homo sapiens
  Table A; Target 23091; HLA-B*27:05; DSCR8; ENSG00000198054; TAA
LMSQPPEQL

SEQ ID NO: 23092 - protein, 9 aa, Homo sapiens
  Table A; Target 23092; HLA-B*38:01; DSCR8; ENSG00000198054; TAA
LMSQPPEQL

SEQ ID NO: 23093 - protein, 9 aa, Homo sapiens
  Table A; Target 23093; HLA-B*39:01; DSCR8; ENSG00000198054; TAA
LMSQPPEQL

SEQ ID NO: 23094 - protein, 9 aa, Homo sapiens
  Table A; Target 23094; HLA-C*05:01; DSCR8; ENSG00000198054; TAA
LMSQPPEQL

SEQ ID NO: 23095 - protein, 9 aa, Homo sapiens
  Table A; Target 23095; HLA-C*06:02; DSCR8; ENSG00000198054; TAA
LMSQPPEQL

SEQ ID NO: 23096 - protein, 9 aa, Homo sapiens
  Table A; Target 23096; HLA-C*07:02; DSCR8; ENSG00000198054; TAA
LMSQPPEQL

SEQ ID NO: 23097 - protein, 9 aa, Homo sapiens
  Table A; Target 23097; HLA-C*07:04; DSCR8; ENSG00000198054; TAA
LMSQPPEQL

SEQ ID NO: 23098 - protein, 9 aa, Homo sapiens
  Table A; Target 23098; HLA-C*12:03; DSCR8; ENSG00000198054; TAA
LMSQPPEQL

SEQ ID NO: 23099 - protein, 11 aa, Homo sapiens
  Table A; Target 23099; HLA-A*02:01; DSCR8; ENSG00000198054; TAA
LMSQPPEQLGL

SEQ ID NO: 23100 - protein, 11 aa, Homo sapiens
  Table A; Target 23100; HLA-A*02:07; DSCR8; ENSG00000198054; TAA
LMSQPPEQLGL

SEQ ID NO: 23101 - protein, 11 aa, Homo sapiens
  Table A; Target 23101; HLA-C*04:01; DSCR8; ENSG00000198054; TAA
LMSQPPEQLGL

SEQ ID NO: 23102 - protein, 8 aa, Homo sapiens
  Table A; Target 23102; HLA-B*08:01; DSCR8; ENSG00000198054; TAA
LPVQEILM

SEQ ID NO: 23103 - protein, 8 aa, Homo sapiens
  Table A; Target 23103; HLA-B*35:01; DSCR8; ENSG00000198054; TAA
LPVQEILM

SEQ ID NO: 23104 - protein, 8 aa, Homo sapiens
  Table A; Target 23104; HLA-B*35:03; DSCR8; ENSG00000198054; TAA
LPVQEILM

SEQ ID NO: 23105 - protein, 8 aa, Homo sapiens
  Table A; Target 23105; HLA-B*51:01; DSCR8; ENSG00000198054; TAA
LPVQEILM

SEQ ID NO: 23106 - protein, 8 aa, Homo sapiens
  Table A; Target 23106; HLA-B*54:01; DSCR8; ENSG00000198054; TAA
LPVQEILM

SEQ ID NO: 23107 - protein, 8 aa, Homo sapiens
  Table A; Target 23107; HLA-B*55:01; DSCR8; ENSG00000198054; TAA
LPVQEILM

SEQ ID NO: 23108 - protein, 10 aa, Homo sapiens
  Table A; Target 23108; HLA-B*54:01; DSCR8; ENSG00000198054; TAA
LPVQEILMSQ

SEQ ID NO: 23109 - protein, 9 aa, Homo sapiens
  Table A; Target 23109; HLA-B*27:05; DSCR8; ENSG00000198054; TAA
LQTNLGNQE

SEQ ID NO: 23110 - protein, 10 aa, Homo sapiens
  Table A; Target 23110; HLA-B*27:05; DSCR8; ENSG00000198054; TAA
LQTNLGNQES

SEQ ID NO: 23111 - protein, 8 aa, Homo sapiens
  Table A; Target 23111; HLA-B*08:01; DSCR8; ENSG00000198054; TAA
MAFVKHLL

SEQ ID NO: 23112 - protein, 8 aa, Homo sapiens
  Table A; Target 23112; HLA-B*51:01; DSCR8; ENSG00000198054; TAA
MAFVKHLL

SEQ ID NO: 23113 - protein, 8 aa, Homo sapiens
  Table A; Target 23113; HLA-B*54:01; DSCR8; ENSG00000198054; TAA
MAFVKHLL

SEQ ID NO: 23114 - protein, 8 aa, Homo sapiens
  Table A; Target 23114; HLA-C*07:01; DSCR8; ENSG00000198054; TAA
MAFVKHLL

SEQ ID NO: 23115 - protein, 9 aa, Homo sapiens
  Table A; Target 23115; HLA-A*24:02; DSCR8; ENSG00000198054; TAA
MAFVKHLLL

SEQ ID NO: 23116 - protein, 9 aa, Homo sapiens
  Table A; Target 23116; HLA-A*68:02; DSCR8; ENSG00000198054; TAA
MAFVKHLLL

SEQ ID NO: 23117 - protein, 9 aa, Homo sapiens
  Table A; Target 23117; HLA-B*08:01; DSCR8; ENSG00000198054; TAA
MAFVKHLLL

SEQ ID NO: 23118 - protein, 9 aa, Homo sapiens
  Table A; Target 23118; HLA-B*51:01; DSCR8; ENSG00000198054; TAA
MAFVKHLLL

SEQ ID NO: 23119 - protein, 9 aa, Homo sapiens
  Table A; Target 23119; HLA-B*54:01; DSCR8; ENSG00000198054; TAA
MAFVKHLLL

SEQ ID NO: 23120 - protein, 9 aa, Homo sapiens
  Table A; Target 23120; HLA-B*57:01; DSCR8; ENSG00000198054; TAA
MAFVKHLLL

SEQ ID NO: 23121 - protein, 9 aa, Homo sapiens
  Table A; Target 23121; HLA-C*02:02; DSCR8; ENSG00000198054; TAA
MAFVKHLLL

SEQ ID NO: 23122 - protein, 8 aa, Homo sapiens
  Table A; Target 23122; HLA-B*08:01; DSCR8; ENSG00000198054; TAA
MPRPKVLA

SEQ ID NO: 23123 - protein, 8 aa, Homo sapiens
  Table A; Target 23123; HLA-B*54:01; DSCR8; ENSG00000198054; TAA
MPRPKVLA

SEQ ID NO: 23124 - protein, 8 aa, Homo sapiens
  Table A; Target 23124; HLA-B*55:01; DSCR8; ENSG00000198054; TAA
MPRPKVLA

SEQ ID NO: 23125 - protein, 8 aa, Homo sapiens
  Table A; Target 23125; HLA-B*56:01; DSCR8; ENSG00000198054; TAA
MPRPKVLA

SEQ ID NO: 23126 - protein, 8 aa, Homo sapiens
  Table A; Target 23126; HLA-C*07:02; DSCR8; ENSG00000198054; TAA
MPRPKVLA

SEQ ID NO: 23127 - protein, 9 aa, Homo sapiens
  Table A; Target 23127; HLA-B*07:02; DSCR8; ENSG00000198054; TAA
MPRPKVLAQ

SEQ ID NO: 23128 - protein, 9 aa, Homo sapiens
  Table A; Target 23128; HLA-B*08:01; DSCR8; ENSG00000198054; TAA
MPRPKVLAQ

SEQ ID NO: 23129 - protein, 9 aa, Homo sapiens
  Table A; Target 23129; HLA-B*54:01; DSCR8; ENSG00000198054; TAA
MPRPKVLAQ

SEQ ID NO: 23130 - protein, 10 aa, Homo sapiens
  Table A; Target 23130; HLA-A*33:01; DSCR8; ENSG00000198054; TAA
MPRPKVLAQY

SEQ ID NO: 23131 - protein, 10 aa, Homo sapiens
  Table A; Target 23131; HLA-B*07:02; DSCR8; ENSG00000198054; TAA
MPRPKVLAQY

SEQ ID NO: 23132 - protein, 10 aa, Homo sapiens
  Table A; Target 23132; HLA-B*35:01; DSCR8; ENSG00000198054; TAA
MPRPKVLAQY

SEQ ID NO: 23133 - protein, 10 aa, Homo sapiens
  Table A; Target 23133; HLA-B*54:01; DSCR8; ENSG00000198054; TAA
MPRPKVLAQY

SEQ ID NO: 23134 - protein, 10 aa, Homo sapiens
  Table A; Target 23134; HLA-C*04:01; DSCR8; ENSG00000198054; TAA
MPRPKVLAQY

SEQ ID NO: 23135 - protein, 10 aa, Homo sapiens
  Table A; Target 23135; HLA-C*07:02; DSCR8; ENSG00000198054; TAA
MPRPKVLAQY

SEQ ID NO: 23136 - protein, 8 aa, Homo sapiens
  Table A; Target 23136; HLA-B*58:01; DSCR8; ENSG00000198054; TAA
MSQPPEQL

SEQ ID NO: 23137 - protein, 8 aa, Homo sapiens
  Table A; Target 23137; HLA-C*04:01; DSCR8; ENSG00000198054; TAA
MSQPPEQL

SEQ ID NO: 23138 - protein, 8 aa, Homo sapiens
  Table A; Target 23138; HLA-C*05:01; DSCR8; ENSG00000198054; TAA
MSQPPEQL

SEQ ID NO: 23139 - protein, 8 aa, Homo sapiens
  Table A; Target 23139; HLA-C*06:02; DSCR8; ENSG00000198054; TAA
MSQPPEQL

SEQ ID NO: 23140 - protein, 8 aa, Homo sapiens
  Table A; Target 23140; HLA-C*16:02; DSCR8; ENSG00000198054; TAA
MSQPPEQL

SEQ ID NO: 23141 - protein, 10 aa, Homo sapiens
  Table A; Target 23141; HLA-A*01:01; DSCR8; ENSG00000198054; TAA
MSQPPEQLGL

SEQ ID NO: 23142 - protein, 10 aa, Homo sapiens
  Table A; Target 23142; HLA-B*27:05; DSCR8; ENSG00000198054; TAA
MSQPPEQLGL

SEQ ID NO: 23143 - protein, 10 aa, Homo sapiens
  Table A; Target 23143; HLA-B*39:01; DSCR8; ENSG00000198054; TAA
MSQPPEQLGL

SEQ ID NO: 23144 - protein, 10 aa, Homo sapiens
  Table A; Target 23144; HLA-B*57:01; DSCR8; ENSG00000198054; TAA
MSQPPEQLGL

SEQ ID NO: 23145 - protein, 10 aa, Homo sapiens
  Table A; Target 23145; HLA-C*03:04; DSCR8; ENSG00000198054; TAA
MSQPPEQLGL

SEQ ID NO: 23146 - protein, 10 aa, Homo sapiens
  Table A; Target 23146; HLA-C*04:01; DSCR8; ENSG00000198054; TAA
MSQPPEQLGL

SEQ ID NO: 23147 - protein, 10 aa, Homo sapiens
  Table A; Target 23147; HLA-C*06:02; DSCR8; ENSG00000198054; TAA
MSQPPEQLGL

SEQ ID NO: 23148 - protein, 10 aa, Homo sapiens
  Table A; Target 23148; HLA-C*07:01; DSCR8; ENSG00000198054; TAA
MSQPPEQLGL

SEQ ID NO: 23149 - protein, 10 aa, Homo sapiens
  Table A; Target 23149; HLA-C*07:02; DSCR8; ENSG00000198054; TAA
MSQPPEQLGL

SEQ ID NO: 23150 - protein, 10 aa, Homo sapiens
  Table A; Target 23150; HLA-C*16:02; DSCR8; ENSG00000198054; TAA
MSQPPEQLGL

SEQ ID NO: 23151 - protein, 11 aa, Homo sapiens
  Table A; Target 23151; HLA-C*04:01; DSCR8; ENSG00000198054; TAA
MSQPPEQLGLQ

SEQ ID NO: 23152 - protein, 11 aa, Homo sapiens
  Table A; Target 23152; HLA-C*07:02; DSCR8; ENSG00000198054; TAA
MSQPPEQLGLQ

SEQ ID NO: 23153 - protein, 10 aa, Homo sapiens
  Table A; Target 23153; HLA-C*07:01; DSCR8; ENSG00000198054; TAA
NLGNQESSGM

SEQ ID NO: 23154 - protein, 11 aa, Homo sapiens
  Table A; Target 23154; HLA-C*07:01; DSCR8; ENSG00000198054; TAA
NLGNQESSGMM

SEQ ID NO: 23155 - protein, 8 aa, Homo sapiens
  Table A; Target 23155; HLA-B*39:01; DSCR8; ENSG00000198054; TAA
NQESSGMM

SEQ ID NO: 23156 - protein, 8 aa, Homo sapiens
  Table A; Target 23156; HLA-C*05:01; DSCR8; ENSG00000198054; TAA
NQESSGMM

SEQ ID NO: 23157 - protein, 8 aa, Homo sapiens
  Table A; Target 23157; HLA-C*07:01; DSCR8; ENSG00000198054; TAA
NQESSGMM

SEQ ID NO: 23158 - protein, 10 aa, Homo sapiens
  Table A; Target 23158; HLA-B*27:05; DSCR8; ENSG00000198054; TAA
NQESSGMMKL

SEQ ID NO: 23159 - protein, 10 aa, Homo sapiens
  Table A; Target 23159; HLA-B*38:01; DSCR8; ENSG00000198054; TAA
NQESSGMMKL

SEQ ID NO: 23160 - protein, 10 aa, Homo sapiens
  Table A; Target 23160; HLA-B*39:01; DSCR8; ENSG00000198054; TAA
NQESSGMMKL

SEQ ID NO: 23161 - protein, 10 aa, Homo sapiens
  Table A; Target 23161; HLA-B*40:02; DSCR8; ENSG00000198054; TAA
NQESSGMMKL

SEQ ID NO: 23162 - protein, 10 aa, Homo sapiens
  Table A; Target 23162; HLA-C*04:01; DSCR8; ENSG00000198054; TAA
NQESSGMMKL

SEQ ID NO: 23163 - protein, 11 aa, Homo sapiens
  Table A; Target 23163; HLA-B*38:01; DSCR8; ENSG00000198054; TAA
NQESSGMMKLF

SEQ ID NO: 23164 - protein, 8 aa, Homo sapiens
  Table A; Target 23164; HLA-B*51:01; DSCR8; ENSG00000198054; TAA
PGPNFVTV

SEQ ID NO: 23165 - protein, 8 aa, Homo sapiens
  Table A; Target 23165; HLA-C*01:02; DSCR8; ENSG00000198054; TAA
PGPNFVTV

SEQ ID NO: 23166 - protein, 8 aa, Homo sapiens
  Table A; Target 23166; HLA-C*04:01; DSCR8; ENSG00000198054; TAA
PGPNFVTV

SEQ ID NO: 23167 - protein, 8 aa, Homo sapiens
  Table A; Target 23167; HLA-C*06:02; DSCR8; ENSG00000198054; TAA
PGPNFVTV

SEQ ID NO: 23168 - protein, 8 aa, Homo sapiens
  Table A; Target 23168; HLA-C*07:02; DSCR8; ENSG00000198054; TAA
PGPNFVTV

SEQ ID NO: 23169 - protein, 10 aa, Homo sapiens
  Table A; Target 23169; HLA-C*07:02; DSCR8; ENSG00000198054; TAA
PGPNFVTVRK

SEQ ID NO: 23170 - protein, 9 aa, Homo sapiens
  Table A; Target 23170; HLA-B*07:02; DSCR8; ENSG00000198054; TAA
PRPKVLAQY

SEQ ID NO: 23171 - protein, 9 aa, Homo sapiens
  Table A; Target 23171; HLA-C*07:01; DSCR8; ENSG00000198054; TAA
PRPKVLAQY

SEQ ID NO: 23172 - protein, 9 aa, Homo sapiens
  Table A; Target 23172; HLA-C*07:02; DSCR8; ENSG00000198054; TAA
PRPKVLAQY

SEQ ID NO: 23173 - protein, 9 aa, Homo sapiens
  Table A; Target 23173; HLA-B*40:02; DSCR8; ENSG00000198054; TAA
QEILMSQPP

SEQ ID NO: 23174 - protein, 9 aa, Homo sapiens
  Table A; Target 23174; HLA-B*49:01; DSCR8; ENSG00000198054; TAA
QEILMSQPP

SEQ ID NO: 23175 - protein, 9 aa, Homo sapiens
  Table A; Target 23175; HLA-A*30:01; DSCR8; ENSG00000198054; TAA
QESSGMMKL

SEQ ID NO: 23176 - protein, 9 aa, Homo sapiens
  Table A; Target 23176; HLA-B*07:02; DSCR8; ENSG00000198054; TAA
QESSGMMKL

SEQ ID NO: 23177 - protein, 9 aa, Homo sapiens
  Table A; Target 23177; HLA-B*13:02; DSCR8; ENSG00000198054; TAA
QESSGMMKL

SEQ ID NO: 23178 - protein, 9 aa, Homo sapiens
  Table A; Target 23178; HLA-B*18:01; DSCR8; ENSG00000198054; TAA
QESSGMMKL

SEQ ID NO: 23179 - protein, 9 aa, Homo sapiens
  Table A; Target 23179; HLA-B*27:02; DSCR8; ENSG00000198054; TAA
QESSGMMKL

SEQ ID NO: 23180 - protein, 9 aa, Homo sapiens
  Table A; Target 23180; HLA-B*27:05; DSCR8; ENSG00000198054; TAA
QESSGMMKL

SEQ ID NO: 23181 - protein, 9 aa, Homo sapiens
  Table A; Target 23181; HLA-B*37:01; DSCR8; ENSG00000198054; TAA
QESSGMMKL

SEQ ID NO: 23182 - protein, 9 aa, Homo sapiens
  Table A; Target 23182; HLA-B*38:01; DSCR8; ENSG00000198054; TAA
QESSGMMKL

SEQ ID NO: 23183 - protein, 9 aa, Homo sapiens
  Table A; Target 23183; HLA-B*40:01; DSCR8; ENSG00000198054; TAA
QESSGMMKL

SEQ ID NO: 23184 - protein, 9 aa, Homo sapiens
  Table A; Target 23184; HLA-B*40:02; DSCR8; ENSG00000198054; TAA
QESSGMMKL

SEQ ID NO: 23185 - protein, 9 aa, Homo sapiens
  Table A; Target 23185; HLA-B*44:02; DSCR8; ENSG00000198054; TAA
QESSGMMKL

SEQ ID NO: 23186 - protein, 9 aa, Homo sapiens
  Table A; Target 23186; HLA-B*44:03; DSCR8; ENSG00000198054; TAA
QESSGMMKL

SEQ ID NO: 23187 - protein, 9 aa, Homo sapiens
  Table A; Target 23187; HLA-B*49:01; DSCR8; ENSG00000198054; TAA
QESSGMMKL

SEQ ID NO: 23188 - protein, 9 aa, Homo sapiens
  Table A; Target 23188; HLA-C*02:02; DSCR8; ENSG00000198054; TAA
QESSGMMKL

SEQ ID NO: 23189 - protein, 9 aa, Homo sapiens
  Table A; Target 23189; HLA-C*06:02; DSCR8; ENSG00000198054; TAA
QESSGMMKL

SEQ ID NO: 23190 - protein, 9 aa, Homo sapiens
  Table A; Target 23190; HLA-C*16:04; DSCR8; ENSG00000198054; TAA
QESSGMMKL

SEQ ID NO: 23191 - protein, 10 aa, Homo sapiens
  Table A; Target 23191; HLA-B*44:02; DSCR8; ENSG00000198054; TAA
QESSGMMKLF

SEQ ID NO: 23192 - protein, 10 aa, Homo sapiens
  Table A; Target 23192; HLA-B*44:03; DSCR8; ENSG00000198054; TAA
QESSGMMKLF

SEQ ID NO: 23193 - protein, 10 aa, Homo sapiens
  Table A; Target 23193; HLA-C*16:04; DSCR8; ENSG00000198054; TAA
QESSGMMKLF

SEQ ID NO: 23194 - protein, 8 aa, Homo sapiens
  Table A; Target 23194; HLA-B*51:01; DSCR8; ENSG00000198054; TAA
QPPEQLGL

SEQ ID NO: 23195 - protein, 8 aa, Homo sapiens
  Table A; Target 23195; HLA-B*08:01; DSCR8; ENSG00000198054; TAA
SGMMKLFM

SEQ ID NO: 23196 - protein, 8 aa, Homo sapiens
  Table A; Target 23196; HLA-B*08:01; DSCR8; ENSG00000198054; TAA
SITDHCSL

SEQ ID NO: 23197 - protein, 8 aa, Homo sapiens
  Table A; Target 23197; HLA-C*01:02; DSCR8; ENSG00000198054; TAA
SITDHCSL

SEQ ID NO: 23198 - protein, 8 aa, Homo sapiens
  Table A; Target 23198; HLA-C*03:04; DSCR8; ENSG00000198054; TAA
SITDHCSL

SEQ ID NO: 23199 - protein, 8 aa, Homo sapiens
  Table A; Target 23199; HLA-C*16:01; DSCR8; ENSG00000198054; TAA
SITDHCSL

SEQ ID NO: 23200 - protein, 9 aa, Homo sapiens
  Table A; Target 23200; HLA-A*02:01; DSCR8; ENSG00000198054; TAA
SLHLPVQEI

SEQ ID NO: 23201 - protein, 9 aa, Homo sapiens
  Table A; Target 23201; HLA-A*02:03; DSCR8; ENSG00000198054; TAA
SLHLPVQEI

SEQ ID NO: 23202 - protein, 9 aa, Homo sapiens
  Table A; Target 23202; HLA-A*02:04; DSCR8; ENSG00000198054; TAA
SLHLPVQEI

SEQ ID NO: 23203 - protein, 9 aa, Homo sapiens
  Table A; Target 23203; HLA-A*02:07; DSCR8; ENSG00000198054; TAA
SLHLPVQEI

SEQ ID NO: 23204 - protein, 9 aa, Homo sapiens
  Table A; Target 23204; HLA-A*30:01; DSCR8; ENSG00000198054; TAA
SLHLPVQEI

SEQ ID NO: 23205 - protein, 9 aa, Homo sapiens
  Table A; Target 23205; HLA-B*13:02; DSCR8; ENSG00000198054; TAA
SLHLPVQEI

SEQ ID NO: 23206 - protein, 9 aa, Homo sapiens
  Table A; Target 23206; HLA-B*37:01; DSCR8; ENSG00000198054; TAA
SLHLPVQEI

SEQ ID NO: 23207 - protein, 9 aa, Homo sapiens
  Table A; Target 23207; HLA-B*38:01; DSCR8; ENSG00000198054; TAA
SLHLPVQEI

SEQ ID NO: 23208 - protein, 9 aa, Homo sapiens
  Table A; Target 23208; HLA-B*40:02; DSCR8; ENSG00000198054; TAA
SLHLPVQEI

SEQ ID NO: 23209 - protein, 9 aa, Homo sapiens
  Table A; Target 23209; HLA-B*46:01; DSCR8; ENSG00000198054; TAA
SLHLPVQEI

SEQ ID NO: 23210 - protein, 9 aa, Homo sapiens
  Table A; Target 23210; HLA-B*51:01; DSCR8; ENSG00000198054; TAA
SLHLPVQEI

SEQ ID NO: 23211 - protein, 9 aa, Homo sapiens
  Table A; Target 23211; HLA-B*55:01; DSCR8; ENSG00000198054; TAA
SLHLPVQEI

SEQ ID NO: 23212 - protein, 9 aa, Homo sapiens
  Table A; Target 23212; HLA-C*01:02; DSCR8; ENSG00000198054; TAA
SLHLPVQEI

SEQ ID NO: 23213 - protein, 9 aa, Homo sapiens
  Table A; Target 23213; HLA-C*06:02; DSCR8; ENSG00000198054; TAA
SLHLPVQEI

SEQ ID NO: 23214 - protein, 9 aa, Homo sapiens
  Table A; Target 23214; HLA-C*07:04; DSCR8; ENSG00000198054; TAA
SLHLPVQEI

SEQ ID NO: 23215 - protein, 10 aa, Homo sapiens
  Table A; Target 23215; HLA-B*07:02; DSCR8; ENSG00000198054; TAA
SPRLECSGSI

SEQ ID NO: 23216 - protein, 9 aa, Homo sapiens
  Table A; Target 23216; HLA-A*02:07; DSCR8; ENSG00000198054; TAA
SQPPEQLGL

SEQ ID NO: 23217 - protein, 9 aa, Homo sapiens
  Table A; Target 23217; HLA-A*30:01; DSCR8; ENSG00000198054; TAA
SQPPEQLGL

SEQ ID NO: 23218 - protein, 9 aa, Homo sapiens
  Table A; Target 23218; HLA-A*32:01; DSCR8; ENSG00000198054; TAA
SQPPEQLGL

SEQ ID NO: 23219 - protein, 9 aa, Homo sapiens
  Table A; Target 23219; HLA-B*13:02; DSCR8; ENSG00000198054; TAA
SQPPEQLGL

SEQ ID NO: 23220 - protein, 9 aa, Homo sapiens
  Table A; Target 23220; HLA-B*15:01; DSCR8; ENSG00000198054; TAA
SQPPEQLGL

SEQ ID NO: 23221 - protein, 9 aa, Homo sapiens
  Table A; Target 23221; HLA-B*15:03; DSCR8; ENSG00000198054; TAA
SQPPEQLGL

SEQ ID NO: 23222 - protein, 9 aa, Homo sapiens
  Table A; Target 23222; HLA-B*27:05; DSCR8; ENSG00000198054; TAA
SQPPEQLGL

SEQ ID NO: 23223 - protein, 9 aa, Homo sapiens
  Table A; Target 23223; HLA-B*38:01; DSCR8; ENSG00000198054; TAA
SQPPEQLGL

SEQ ID NO: 23224 - protein, 9 aa, Homo sapiens
  Table A; Target 23224; HLA-B*39:01; DSCR8; ENSG00000198054; TAA
SQPPEQLGL

SEQ ID NO: 23225 - protein, 9 aa, Homo sapiens
  Table A; Target 23225; HLA-B*58:01; DSCR8; ENSG00000198054; TAA
SQPPEQLGL

SEQ ID NO: 23226 - protein, 9 aa, Homo sapiens
  Table A; Target 23226; HLA-C*01:02; DSCR8; ENSG00000198054; TAA
SQPPEQLGL

SEQ ID NO: 23227 - protein, 9 aa, Homo sapiens
  Table A; Target 23227; HLA-C*06:02; DSCR8; ENSG00000198054; TAA
SQPPEQLGL

SEQ ID NO: 23228 - protein, 9 aa, Homo sapiens
  Table A; Target 23228; HLA-C*07:04; DSCR8; ENSG00000198054; TAA
SQPPEQLGL

SEQ ID NO: 23229 - protein, 9 aa, Homo sapiens
  Table A; Target 23229; HLA-C*16:04; DSCR8; ENSG00000198054; TAA
SQPPEQLGL

SEQ ID NO: 23230 - protein, 8 aa, Homo sapiens
  Table A; Target 23230; HLA-B*57:01; DSCR8; ENSG00000198054; TAA
SSGMMKLF

SEQ ID NO: 23231 - protein, 8 aa, Homo sapiens
  Table A; Target 23231; HLA-C*07:01; DSCR8; ENSG00000198054; TAA
SSGMMKLF

SEQ ID NO: 23232 - protein, 8 aa, Homo sapiens
  Table A; Target 23232; HLA-C*12:03; DSCR8; ENSG00000198054; TAA
SSGMMKLF

SEQ ID NO: 23233 - protein, 11 aa, Homo sapiens
  Table A; Target 23233; HLA-B*27:05; DSCR8; ENSG00000198054; TAA
TNLGNQESSGM

SEQ ID NO: 23234 - protein, 11 aa, Homo sapiens
  Table A; Target 23234; HLA-B*39:01; DSCR8; ENSG00000198054; TAA
TNLGNQESSGM

SEQ ID NO: 23235 - protein, 11 aa, Homo sapiens
  Table A; Target 23235; HLA-C*04:01; DSCR8; ENSG00000198054; TAA
TNLGNQESSGM

SEQ ID NO: 23236 - protein, 11 aa, Homo sapiens
  Table A; Target 23236; HLA-C*07:01; DSCR8; ENSG00000198054; TAA
TNLGNQESSGM

SEQ ID NO: 23237 - protein, 9 aa, Homo sapiens
  Table A; Target 23237; HLA-A*25:01; DSCR8; ENSG00000198054; TAA
TVRKGLHSF

SEQ ID NO: 23238 - protein, 9 aa, Homo sapiens
  Table A; Target 23238; HLA-A*31:01; DSCR8; ENSG00000198054; TAA
TVRKGLHSF

SEQ ID NO: 23239 - protein, 9 aa, Homo sapiens
  Table A; Target 23239; HLA-A*32:01; DSCR8; ENSG00000198054; TAA
TVRKGLHSF

SEQ ID NO: 23240 - protein, 9 aa, Homo sapiens
  Table A; Target 23240; HLA-A*33:01; DSCR8; ENSG00000198054; TAA
TVRKGLHSF

SEQ ID NO: 23241 - protein, 9 aa, Homo sapiens
  Table A; Target 23241; HLA-A*33:03; DSCR8; ENSG00000198054; TAA
TVRKGLHSF

SEQ ID NO: 23242 - protein, 9 aa, Homo sapiens
  Table A; Target 23242; HLA-B*07:02; DSCR8; ENSG00000198054; TAA
TVRKGLHSF

SEQ ID NO: 23243 - protein, 9 aa, Homo sapiens
  Table A; Target 23243; HLA-B*08:01; DSCR8; ENSG00000198054; TAA
TVRKGLHSF

SEQ ID NO: 23244 - protein, 9 aa, Homo sapiens
  Table A; Target 23244; HLA-B*46:01; DSCR8; ENSG00000198054; TAA
TVRKGLHSF

SEQ ID NO: 23245 - protein, 9 aa, Homo sapiens
  Table A; Target 23245; HLA-B*57:01; DSCR8; ENSG00000198054; TAA
TVRKGLHSF

SEQ ID NO: 23246 - protein, 8 aa, Homo sapiens
  Table A; Target 23246; HLA-B*08:01; DSCR8; ENSG00000198054; TAA
VRKGLHSF

SEQ ID NO: 23247 - protein, 10 aa, Homo sapiens
  Table A; Target 23247; HLA-B*57:01; DSCR8; ENSG00000198054; TAA
VTVRKGLHSF

SEQ ID NO: 23248 - protein, 8 aa, Homo sapiens
  Table A; Target 23248; HLA-B*13:02; DSCR8; ENSG00000198054; TAA
YESIQFMP

SEQ ID NO: 23249 - protein, 8 aa, Homo sapiens
  Table A; Target 23249; HLA-B*40:02; DSCR8; ENSG00000198054; TAA
YESIQFMP

SEQ ID NO: 23250 - protein, 8 aa, Homo sapiens
  Table A; Target 23250; HLA-B*49:01; DSCR8; ENSG00000198054; TAA
YESIQFMP

SEQ ID NO: 23251 - protein, 8 aa, Homo sapiens
  Table A; Target 23251; HLA-C*07:04; DSCR8; ENSG00000198054; TAA
YESIQFMP

SEQ ID NO: 23252 - protein, 9 aa, Homo sapiens
  Table A; Target 23252; HLA-A*24:02; EGFR-SEPT14 Fusion; EGFR-SEPT14; EGFR-SEPT14
LVIQLQDKF

SEQ ID NO: 23253 - protein, 9 aa, Homo sapiens
  Table A; Target 23253; HLA-A*29:02; EGFR-SEPT14 Fusion; EGFR-SEPT14; EGFR-SEPT14
LVIQLQDKF

SEQ ID NO: 23254 - protein, 9 aa, Homo sapiens
  Table A; Target 23254; HLA-B*57:01; EGFR-SEPT14 Fusion; EGFR-SEPT14; EGFR-SEPT14
LVIQLQDKF

SEQ ID NO: 23255 - protein, 9 aa, Homo sapiens
  Table A; Target 23255; HLA-B*58:01; EGFR-SEPT14 Fusion; EGFR-SEPT14; EGFR-SEPT14
LVIQLQDKF

SEQ ID NO: 23256 - protein, 9 aa, Homo sapiens
  Table A; Target 23256; HLA-A*02:01; EGFR-SEPT14 Fusion; EGFR-SEPT14; EGFR-SEPT14
QLQDKFEHL

SEQ ID NO: 23257 - protein, 9 aa, Homo sapiens
  Table A; Target 23257; HLA-A*02:03; EGFR-SEPT14 Fusion; EGFR-SEPT14; EGFR-SEPT14
QLQDKFEHL

SEQ ID NO: 23258 - protein, 9 aa, Homo sapiens
  Table A; Target 23258; HLA-A*02:04; EGFR-SEPT14 Fusion; EGFR-SEPT14; EGFR-SEPT14
QLQDKFEHL

SEQ ID NO: 23259 - protein, 9 aa, Homo sapiens
  Table A; Target 23259; HLA-A*02:07; EGFR-SEPT14 Fusion; EGFR-SEPT14; EGFR-SEPT14
QLQDKFEHL

SEQ ID NO: 23260 - protein, 9 aa, Homo sapiens
  Table A; Target 23260; HLA-A*24:02; EGFR-SEPT14 Fusion; EGFR-SEPT14; EGFR-SEPT14
QLQDKFEHL

SEQ ID NO: 23261 - protein, 9 aa, Homo sapiens
  Table A; Target 23261; HLA-A*31:01; EGFR-SEPT14 Fusion; EGFR-SEPT14; EGFR-SEPT14
QLQDKFEHL

SEQ ID NO: 23262 - protein, 9 aa, Homo sapiens
  Table A; Target 23262; HLA-A*68:02; EGFR-SEPT14 Fusion; EGFR-SEPT14; EGFR-SEPT14
QLQDKFEHL

SEQ ID NO: 23263 - protein, 9 aa, Homo sapiens
  Table A; Target 23263; HLA-B*08:01; EGFR-SEPT14 Fusion; EGFR-SEPT14; EGFR-SEPT14
QLQDKFEHL

SEQ ID NO: 23264 - protein, 10 aa, Homo sapiens
  Table A; Target 23264; HLA-A*03:02; EGFR-SEPT14 Fusion; EGFR-SEPT14; EGFR-SEPT14
QLQDKFEHLK

SEQ ID NO: 23265 - protein, 8 aa, Homo sapiens
  Table A; Target 23265; HLA-B*37:01; EGFR-SEPT14 Fusion; EGFR-SEPT14; EGFR-SEPT14
QRYLVIQL

SEQ ID NO: 23266 - protein, 11 aa, Homo sapiens
  Table A; Target 23266; HLA-A*24:02; EGFR-SEPT14 Fusion; EGFR-SEPT14; EGFR-SEPT14
RYLVIQLQDKF

SEQ ID NO: 23267 - protein, 9 aa, Homo sapiens
  Table A; Target 23267; HLA-C*16:02; FMR1NB; ENSG00000176988; CTA
AAMADRPQP

SEQ ID NO: 23268 - protein, 11 aa, Homo sapiens
  Table A; Target 23268; HLA-B*57:01; FMR1NB; ENSG00000176988; CTA
AAMADRPQPGW

SEQ ID NO: 23269 - protein, 11 aa, Homo sapiens
  Table A; Target 23269; HLA-B*58:01; FMR1NB; ENSG00000176988; CTA
AAMADRPQPGW

SEQ ID NO: 23270 - protein, 11 aa, Homo sapiens
  Table A; Target 23270; HLA-C*16:04; FMR1NB; ENSG00000176988; CTA
AAMADRPQPGW

SEQ ID NO: 23271 - protein, 8 aa, Homo sapiens
  Table A; Target 23271; HLA-A*32:01; FMR1NB; ENSG00000176988; CTA
ADRPQPGW

SEQ ID NO: 23272 - protein, 8 aa, Homo sapiens
  Table A; Target 23272; HLA-B*37:01; FMR1NB; ENSG00000176988; CTA
ADRPQPGW

SEQ ID NO: 23273 - protein, 8 aa, Homo sapiens
  Table A; Target 23273; HLA-B*44:02; FMR1NB; ENSG00000176988; CTA
ADRPQPGW

SEQ ID NO: 23274 - protein, 8 aa, Homo sapiens
  Table A; Target 23274; HLA-B*44:03; FMR1NB; ENSG00000176988; CTA
ADRPQPGW

SEQ ID NO: 23275 - protein, 8 aa, Homo sapiens
  Table A; Target 23275; HLA-B*57:01; FMR1NB; ENSG00000176988; CTA
ADRPQPGW

SEQ ID NO: 23276 - protein, 8 aa, Homo sapiens
  Table A; Target 23276; HLA-B*15:03; FMR1NB; ENSG00000176988; CTA
AHLELATY

SEQ ID NO: 23277 - protein, 10 aa, Homo sapiens
  Table A; Target 23277; HLA-B*38:01; FMR1NB; ENSG00000176988; CTA
AHLELATYEL

SEQ ID NO: 23278 - protein, 10 aa, Homo sapiens
  Table A; Target 23278; HLA-B*39:01; FMR1NB; ENSG00000176988; CTA
AHLELATYEL

SEQ ID NO: 23279 - protein, 9 aa, Homo sapiens
  Table A; Target 23279; HLA-A*02:04; FMR1NB; ENSG00000176988; CTA
AISLILVCL

SEQ ID NO: 23280 - protein, 10 aa, Homo sapiens
  Table A; Target 23280; HLA-A*25:01; FMR1NB; ENSG00000176988; CTA
AMADRPQPGW

SEQ ID NO: 23281 - protein, 10 aa, Homo sapiens
  Table A; Target 23281; HLA-A*32:01; FMR1NB; ENSG00000176988; CTA
AMADRPQPGW

SEQ ID NO: 23282 - protein, 10 aa, Homo sapiens
  Table A; Target 23282; HLA-B*44:02; FMR1NB; ENSG00000176988; CTA
AMADRPQPGW

SEQ ID NO: 23283 - protein, 10 aa, Homo sapiens
  Table A; Target 23283; HLA-B*57:01; FMR1NB; ENSG00000176988; CTA
AMADRPQPGW

SEQ ID NO: 23284 - protein, 10 aa, Homo sapiens
  Table A; Target 23284; HLA-B*58:01; FMR1NB; ENSG00000176988; CTA
AMADRPQPGW

SEQ ID NO: 23285 - protein, 9 aa, Homo sapiens
  Table A; Target 23285; HLA-B*07:02; FMR1NB; ENSG00000176988; CTA
AMRVAHLEL

SEQ ID NO: 23286 - protein, 8 aa, Homo sapiens
  Table A; Target 23286; HLA-B*56:01; FMR1NB; ENSG00000176988; CTA
APFRDVPK

SEQ ID NO: 23287 - protein, 10 aa, Homo sapiens
  Table A; Target 23287; HLA-B*07:02; FMR1NB; ENSG00000176988; CTA
APFRDVPKQM

SEQ ID NO: 23288 - protein, 10 aa, Homo sapiens
  Table A; Target 23288; HLA-C*07:02; FMR1NB; ENSG00000176988; CTA
APFRDVPKQM

SEQ ID NO: 23289 - protein, 11 aa, Homo sapiens
  Table A; Target 23289; HLA-C*16:04; FMR1NB; ENSG00000176988; CTA
CCFSSSGTTSF

SEQ ID NO: 23290 - protein, 10 aa, Homo sapiens
  Table A; Target 23290; HLA-A*23:01; FMR1NB; ENSG00000176988; CTA
CFSSSGTTSF

SEQ ID NO: 23291 - protein, 10 aa, Homo sapiens
  Table A; Target 23291; HLA-A*24:02; FMR1NB; ENSG00000176988; CTA
CFSSSGTTSF

SEQ ID NO: 23292 - protein, 10 aa, Homo sapiens
  Table A; Target 23292; HLA-C*01:02; FMR1NB; ENSG00000176988; CTA
CFSSSGTTSF

SEQ ID NO: 23293 - protein, 10 aa, Homo sapiens
  Table A; Target 23293; HLA-C*14:02; FMR1NB; ENSG00000176988; CTA
CFSSSGTTSF

SEQ ID NO: 23294 - protein, 9 aa, Homo sapiens
  Table A; Target 23294; HLA-A*33:01; FMR1NB; ENSG00000176988; CTA
DDLQRQDNR

SEQ ID NO: 23295 - protein, 9 aa, Homo sapiens
  Table A; Target 23295; HLA-A*33:01; FMR1NB; ENSG00000176988; CTA
DLSESECLR

SEQ ID NO: 23296 - protein, 9 aa, Homo sapiens
  Table A; Target 23296; HLA-A*33:03; FMR1NB; ENSG00000176988; CTA
DLSESECLR

SEQ ID NO: 23297 - protein, 9 aa, Homo sapiens
  Table A; Target 23297; HLA-A*68:01; FMR1NB; ENSG00000176988; CTA
DLSESECLR

SEQ ID NO: 23298 - protein, 8 aa, Homo sapiens
  Table A; Target 23298; HLA-A*33:01; FMR1NB; ENSG00000176988; CTA
DNRVVTGL

SEQ ID NO: 23299 - protein, 8 aa, Homo sapiens
  Table A; Target 23299; HLA-B*08:01; FMR1NB; ENSG00000176988; CTA
DNRVVTGL

SEQ ID NO: 23300 - protein, 8 aa, Homo sapiens
  Table A; Target 23300; HLA-B*18:01; FMR1NB; ENSG00000176988; CTA
DNRVVTGL

SEQ ID NO: 23301 - protein, 9 aa, Homo sapiens
  Table A; Target 23301; HLA-A*33:01; FMR1NB; ENSG00000176988; CTA
DNRVVTGLK

SEQ ID NO: 23302 - protein, 9 aa, Homo sapiens
  Table A; Target 23302; HLA-A*33:03; FMR1NB; ENSG00000176988; CTA
DNRVVTGLK

SEQ ID NO: 23303 - protein, 10 aa, Homo sapiens
  Table A; Target 23303; HLA-A*33:01; FMR1NB; ENSG00000176988; CTA
DNRVVTGLKK

SEQ ID NO: 23304 - protein, 11 aa, Homo sapiens
  Table A; Target 23304; HLA-A*33:01; FMR1NB; ENSG00000176988; CTA
DNRVVTGLKKQ

SEQ ID NO: 23305 - protein, 10 aa, Homo sapiens
  Table A; Target 23305; HLA-A*25:01; FMR1NB; ENSG00000176988; CTA
DSALEALLNF

SEQ ID NO: 23306 - protein, 9 aa, Homo sapiens
  Table A; Target 23306; HLA-A*25:01; FMR1NB; ENSG00000176988; CTA
DVPKQMMQM

SEQ ID NO: 23307 - protein, 9 aa, Homo sapiens
  Table A; Target 23307; HLA-A*26:01; FMR1NB; ENSG00000176988; CTA
DVPKQMMQM

SEQ ID NO: 23308 - protein, 10 aa, Homo sapiens
  Table A; Target 23308; HLA-A*25:01; FMR1NB; ENSG00000176988; CTA
DVPKQMMQMF

SEQ ID NO: 23309 - protein, 10 aa, Homo sapiens
  Table A; Target 23309; HLA-A*26:01; FMR1NB; ENSG00000176988; CTA
DVPKQMMQMF

SEQ ID NO: 23310 - protein, 9 aa, Homo sapiens
  Table A; Target 23310; HLA-A*30:01; FMR1NB; ENSG00000176988; CTA
EEDSALEAL

SEQ ID NO: 23311 - protein, 9 aa, Homo sapiens
  Table A; Target 23311; HLA-B*39:01; FMR1NB; ENSG00000176988; CTA
EEDSALEAL

SEQ ID NO: 23312 - protein, 9 aa, Homo sapiens
  Table A; Target 23312; HLA-B*40:01; FMR1NB; ENSG00000176988; CTA
EEDSALEAL

SEQ ID NO: 23313 - protein, 9 aa, Homo sapiens
  Table A; Target 23313; HLA-B*44:02; FMR1NB; ENSG00000176988; CTA
EEDSALEAL

SEQ ID NO: 23314 - protein, 9 aa, Homo sapiens
  Table A; Target 23314; HLA-B*44:03; FMR1NB; ENSG00000176988; CTA
EEDSALEAL

SEQ ID NO: 23315 - protein, 10 aa, Homo sapiens
  Table A; Target 23315; HLA-B*38:01; FMR1NB; ENSG00000176988; CTA
EEDSALEALL

SEQ ID NO: 23316 - protein, 10 aa, Homo sapiens
  Table A; Target 23316; HLA-B*40:01; FMR1NB; ENSG00000176988; CTA
EEDSALEALL

SEQ ID NO: 23317 - protein, 10 aa, Homo sapiens
  Table A; Target 23317; HLA-B*44:02; FMR1NB; ENSG00000176988; CTA
EEDSALEALL

SEQ ID NO: 23318 - protein, 10 aa, Homo sapiens
  Table A; Target 23318; HLA-B*44:03; FMR1NB; ENSG00000176988; CTA
EEDSALEALL

SEQ ID NO: 23319 - protein, 8 aa, Homo sapiens
  Table A; Target 23319; HLA-A*33:01; FMR1NB; ENSG00000176988; CTA
EMLQKAAR

SEQ ID NO: 23320 - protein, 8 aa, Homo sapiens
  Table A; Target 23320; HLA-A*33:03; FMR1NB; ENSG00000176988; CTA
EMLQKAAR

SEQ ID NO: 23321 - protein, 8 aa, Homo sapiens
  Table A; Target 23321; HLA-B*08:01; FMR1NB; ENSG00000176988; CTA
EMLQKAAR

SEQ ID NO: 23322 - protein, 9 aa, Homo sapiens
  Table A; Target 23322; HLA-A*33:01; FMR1NB; ENSG00000176988; CTA
ESLKMRVSK

SEQ ID NO: 23323 - protein, 9 aa, Homo sapiens
  Table A; Target 23323; HLA-A*33:03; FMR1NB; ENSG00000176988; CTA
ESLKMRVSK

SEQ ID NO: 23324 - protein, 11 aa, Homo sapiens
  Table A; Target 23324; HLA-A*01:01; FMR1NB; ENSG00000176988; CTA
ESNPESSHPGY

SEQ ID NO: 23325 - protein, 11 aa, Homo sapiens
  Table A; Target 23325; HLA-A*25:01; FMR1NB; ENSG00000176988; CTA
ESNPESSHPGY

SEQ ID NO: 23326 - protein, 11 aa, Homo sapiens
  Table A; Target 23326; HLA-A*26:01; FMR1NB; ENSG00000176988; CTA
ESNPESSHPGY

SEQ ID NO: 23327 - protein, 11 aa, Homo sapiens
  Table A; Target 23327; HLA-A*29:02; FMR1NB; ENSG00000176988; CTA
ESNPESSHPGY

SEQ ID NO: 23328 - protein, 11 aa, Homo sapiens
  Table A; Target 23328; HLA-A*30:02; FMR1NB; ENSG00000176988; CTA
ESNPESSHPGY

SEQ ID NO: 23329 - protein, 11 aa, Homo sapiens
  Table A; Target 23329; HLA-A*32:01; FMR1NB; ENSG00000176988; CTA
ESNPESSHPGY

SEQ ID NO: 23330 - protein, 11 aa, Homo sapiens
  Table A; Target 23330; HLA-A*33:01; FMR1NB; ENSG00000176988; CTA
ESNPESSHPGY

SEQ ID NO: 23331 - protein, 11 aa, Homo sapiens
  Table A; Target 23331; HLA-A*33:03; FMR1NB; ENSG00000176988; CTA
ESNPESSHPGY

SEQ ID NO: 23332 - protein, 11 aa, Homo sapiens
  Table A; Target 23332; HLA-B*15:01; FMR1NB; ENSG00000176988; CTA
ESNPESSHPGY

SEQ ID NO: 23333 - protein, 11 aa, Homo sapiens
  Table A; Target 23333; HLA-B*57:01; FMR1NB; ENSG00000176988; CTA
ESNPESSHPGY

SEQ ID NO: 23334 - protein, 11 aa, Homo sapiens
  Table A; Target 23334; HLA-B*58:01; FMR1NB; ENSG00000176988; CTA
ESNPESSHPGY

SEQ ID NO: 23335 - protein, 11 aa, Homo sapiens
  Table A; Target 23335; HLA-C*07:01; FMR1NB; ENSG00000176988; CTA
ESNPESSHPGY

SEQ ID NO: 23336 - protein, 11 aa, Homo sapiens
  Table A; Target 23336; HLA-C*07:06; FMR1NB; ENSG00000176988; CTA
ESNPESSHPGY

SEQ ID NO: 23337 - protein, 9 aa, Homo sapiens
  Table A; Target 23337; HLA-B*54:01; FMR1NB; ENSG00000176988; CTA
ESSHPGYEA

SEQ ID NO: 23338 - protein, 9 aa, Homo sapiens
  Table A; Target 23338; HLA-A*23:01; FMR1NB; ENSG00000176988; CTA
FFFPTTCNL

SEQ ID NO: 23339 - protein, 9 aa, Homo sapiens
  Table A; Target 23339; HLA-A*24:02; FMR1NB; ENSG00000176988; CTA
FFFPTTCNL

SEQ ID NO: 23340 - protein, 9 aa, Homo sapiens
  Table A; Target 23340; HLA-A*29:02; FMR1NB; ENSG00000176988; CTA
FFFPTTCNL

SEQ ID NO: 23341 - protein, 9 aa, Homo sapiens
  Table A; Target 23341; HLA-C*14:02; FMR1NB; ENSG00000176988; CTA
FFFPTTCNL

SEQ ID NO: 23342 - protein, 8 aa, Homo sapiens
  Table A; Target 23342; HLA-C*03:03; FMR1NB; ENSG00000176988; CTA
FGLGAISL

SEQ ID NO: 23343 - protein, 8 aa, Homo sapiens
  Table A; Target 23343; HLA-C*03:04; FMR1NB; ENSG00000176988; CTA
FGLGAISL

SEQ ID NO: 23344 - protein, 8 aa, Homo sapiens
  Table A; Target 23344; HLA-C*14:02; FMR1NB; ENSG00000176988; CTA
FGLGAISL

SEQ ID NO: 23345 - protein, 9 aa, Homo sapiens
  Table A; Target 23345; HLA-B*27:05; FMR1NB; ENSG00000176988; CTA
FRDVPKQMM

SEQ ID NO: 23346 - protein, 9 aa, Homo sapiens
  Table A; Target 23346; HLA-A*01:01; FMR1NB; ENSG00000176988; CTA
FSSSGTTSF

SEQ ID NO: 23347 - protein, 9 aa, Homo sapiens
  Table A; Target 23347; HLA-A*23:01; FMR1NB; ENSG00000176988; CTA
FSSSGTTSF

SEQ ID NO: 23348 - protein, 9 aa, Homo sapiens
  Table A; Target 23348; HLA-A*25:01; FMR1NB; ENSG00000176988; CTA
FSSSGTTSF

SEQ ID NO: 23349 - protein, 9 aa, Homo sapiens
  Table A; Target 23349; HLA-A*26:01; FMR1NB; ENSG00000176988; CTA
FSSSGTTSF

SEQ ID NO: 23350 - protein, 9 aa, Homo sapiens
  Table A; Target 23350; HLA-A*29:02; FMR1NB; ENSG00000176988; CTA
FSSSGTTSF

SEQ ID NO: 23351 - protein, 9 aa, Homo sapiens
  Table A; Target 23351; HLA-A*30:02; FMR1NB; ENSG00000176988; CTA
FSSSGTTSF

SEQ ID NO: 23352 - protein, 9 aa, Homo sapiens
  Table A; Target 23352; HLA-A*32:01; FMR1NB; ENSG00000176988; CTA
FSSSGTTSF

SEQ ID NO: 23353 - protein, 9 aa, Homo sapiens
  Table A; Target 23353; HLA-B*15:01; FMR1NB; ENSG00000176988; CTA
FSSSGTTSF

SEQ ID NO: 23354 - protein, 9 aa, Homo sapiens
  Table A; Target 23354; HLA-B*15:03; FMR1NB; ENSG00000176988; CTA
FSSSGTTSF

SEQ ID NO: 23355 - protein, 9 aa, Homo sapiens
  Table A; Target 23355; HLA-B*27:05; FMR1NB; ENSG00000176988; CTA
FSSSGTTSF

SEQ ID NO: 23356 - protein, 9 aa, Homo sapiens
  Table A; Target 23356; HLA-B*35:01; FMR1NB; ENSG00000176988; CTA
FSSSGTTSF

SEQ ID NO: 23357 - protein, 9 aa, Homo sapiens
  Table A; Target 23357; HLA-B*37:01; FMR1NB; ENSG00000176988; CTA
FSSSGTTSF

SEQ ID NO: 23358 - protein, 9 aa, Homo sapiens
  Table A; Target 23358; HLA-B*38:01; FMR1NB; ENSG00000176988; CTA
FSSSGTTSF

SEQ ID NO: 23359 - protein, 9 aa, Homo sapiens
  Table A; Target 23359; HLA-B*39:01; FMR1NB; ENSG00000176988; CTA
FSSSGTTSF

SEQ ID NO: 23360 - protein, 9 aa, Homo sapiens
  Table A; Target 23360; HLA-B*46:01; FMR1NB; ENSG00000176988; CTA
FSSSGTTSF

SEQ ID NO: 23361 - protein, 9 aa, Homo sapiens
  Table A; Target 23361; HLA-B*55:01; FMR1NB; ENSG00000176988; CTA
FSSSGTTSF

SEQ ID NO: 23362 - protein, 9 aa, Homo sapiens
  Table A; Target 23362; HLA-B*57:01; FMR1NB; ENSG00000176988; CTA
FSSSGTTSF

SEQ ID NO: 23363 - protein, 9 aa, Homo sapiens
  Table A; Target 23363; HLA-B*58:01; FMR1NB; ENSG00000176988; CTA
FSSSGTTSF

SEQ ID NO: 23364 - protein, 9 aa, Homo sapiens
  Table A; Target 23364; HLA-C*01:02; FMR1NB; ENSG00000176988; CTA
FSSSGTTSF

SEQ ID NO: 23365 - protein, 9 aa, Homo sapiens
  Table A; Target 23365; HLA-C*02:02; FMR1NB; ENSG00000176988; CTA
FSSSGTTSF

SEQ ID NO: 23366 - protein, 9 aa, Homo sapiens
  Table A; Target 23366; HLA-C*03:03; FMR1NB; ENSG00000176988; CTA
FSSSGTTSF

SEQ ID NO: 23367 - protein, 9 aa, Homo sapiens
  Table A; Target 23367; HLA-C*03:04; FMR1NB; ENSG00000176988; CTA
FSSSGTTSF

SEQ ID NO: 23368 - protein, 9 aa, Homo sapiens
  Table A; Target 23368; HLA-C*05:01; FMR1NB; ENSG00000176988; CTA
FSSSGTTSF

SEQ ID NO: 23369 - protein, 9 aa, Homo sapiens
  Table A; Target 23369; HLA-C*07:04; FMR1NB; ENSG00000176988; CTA
FSSSGTTSF

SEQ ID NO: 23370 - protein, 9 aa, Homo sapiens
  Table A; Target 23370; HLA-C*07:06; FMR1NB; ENSG00000176988; CTA
FSSSGTTSF

SEQ ID NO: 23371 - protein, 9 aa, Homo sapiens
  Table A; Target 23371; HLA-C*12:03; FMR1NB; ENSG00000176988; CTA
FSSSGTTSF

SEQ ID NO: 23372 - protein, 9 aa, Homo sapiens
  Table A; Target 23372; HLA-C*14:02; FMR1NB; ENSG00000176988; CTA
FSSSGTTSF

SEQ ID NO: 23373 - protein, 9 aa, Homo sapiens
  Table A; Target 23373; HLA-C*16:01; FMR1NB; ENSG00000176988; CTA
FSSSGTTSF

SEQ ID NO: 23374 - protein, 9 aa, Homo sapiens
  Table A; Target 23374; HLA-C*16:02; FMR1NB; ENSG00000176988; CTA
FSSSGTTSF

SEQ ID NO: 23375 - protein, 9 aa, Homo sapiens
  Table A; Target 23375; HLA-C*16:04; FMR1NB; ENSG00000176988; CTA
FSSSGTTSF

SEQ ID NO: 23376 - protein, 10 aa, Homo sapiens
  Table A; Target 23376; HLA-A*01:01; FMR1NB; ENSG00000176988; CTA
FSSSGTTSFK

SEQ ID NO: 23377 - protein, 10 aa, Homo sapiens
  Table A; Target 23377; HLA-A*03:01; FMR1NB; ENSG00000176988; CTA
FSSSGTTSFK

SEQ ID NO: 23378 - protein, 9 aa, Homo sapiens
  Table A; Target 23378; HLA-A*02:04; FMR1NB; ENSG00000176988; CTA
FVLANGHIL

SEQ ID NO: 23379 - protein, 9 aa, Homo sapiens
  Table A; Target 23379; HLA-A*23:01; FMR1NB; ENSG00000176988; CTA
FVLANGHIL

SEQ ID NO: 23380 - protein, 9 aa, Homo sapiens
  Table A; Target 23380; HLA-B*35:03; FMR1NB; ENSG00000176988; CTA
FVLANGHIL

SEQ ID NO: 23381 - protein, 9 aa, Homo sapiens
  Table A; Target 23381; HLA-C*02:02; FMR1NB; ENSG00000176988; CTA
FVLANGHIL

SEQ ID NO: 23382 - protein, 9 aa, Homo sapiens
  Table A; Target 23382; HLA-C*03:03; FMR1NB; ENSG00000176988; CTA
FVLANGHIL

SEQ ID NO: 23383 - protein, 9 aa, Homo sapiens
  Table A; Target 23383; HLA-C*03:04; FMR1NB; ENSG00000176988; CTA
FVLANGHIL

SEQ ID NO: 23384 - protein, 9 aa, Homo sapiens
  Table A; Target 23384; HLA-C*12:03; FMR1NB; ENSG00000176988; CTA
GAISLILVC

SEQ ID NO: 23385 - protein, 8 aa, Homo sapiens
  Table A; Target 23385; HLA-A*02:03; FMR1NB; ENSG00000176988; CTA
GLGAISLI

SEQ ID NO: 23386 - protein, 8 aa, Homo sapiens
  Table A; Target 23386; HLA-B*13:02; FMR1NB; ENSG00000176988; CTA
GLGAISLI

SEQ ID NO: 23387 - protein, 10 aa, Homo sapiens
  Table A; Target 23387; HLA-A*02:01; FMR1NB; ENSG00000176988; CTA
GLGAISLILV

SEQ ID NO: 23388 - protein, 10 aa, Homo sapiens
  Table A; Target 23388; HLA-A*02:03; FMR1NB; ENSG00000176988; CTA
GLGAISLILV

SEQ ID NO: 23389 - protein, 10 aa, Homo sapiens
  Table A; Target 23389; HLA-A*02:04; FMR1NB; ENSG00000176988; CTA
GLGAISLILV

SEQ ID NO: 23390 - protein, 10 aa, Homo sapiens
  Table A; Target 23390; HLA-B*27:05; FMR1NB; ENSG00000176988; CTA
GQSLEEDSAL

SEQ ID NO: 23391 - protein, 9 aa, Homo sapiens
  Table A; Target 23391; HLA-A*02:01; FMR1NB; ENSG00000176988; CTA
HLELATYEL

SEQ ID NO: 23392 - protein, 9 aa, Homo sapiens
  Table A; Target 23392; HLA-A*02:04; FMR1NB; ENSG00000176988; CTA
HLELATYEL

SEQ ID NO: 23393 - protein, 9 aa, Homo sapiens
  Table A; Target 23393; HLA-A*02:07; FMR1NB; ENSG00000176988; CTA
HLELATYEL

SEQ ID NO: 23394 - protein, 9 aa, Homo sapiens
  Table A; Target 23394; HLA-B*35:03; FMR1NB; ENSG00000176988; CTA
HLELATYEL

SEQ ID NO: 23395 - protein, 9 aa, Homo sapiens
  Table A; Target 23395; HLA-B*38:01; FMR1NB; ENSG00000176988; CTA
HLELATYEL

SEQ ID NO: 23396 - protein, 9 aa, Homo sapiens
  Table A; Target 23396; HLA-B*39:01; FMR1NB; ENSG00000176988; CTA
HLELATYEL

SEQ ID NO: 23397 - protein, 9 aa, Homo sapiens
  Table A; Target 23397; HLA-B*40:01; FMR1NB; ENSG00000176988; CTA
HLELATYEL

SEQ ID NO: 23398 - protein, 9 aa, Homo sapiens
  Table A; Target 23398; HLA-B*55:01; FMR1NB; ENSG00000176988; CTA
HLELATYEL

SEQ ID NO: 23399 - protein, 9 aa, Homo sapiens
  Table A; Target 23399; HLA-C*07:04; FMR1NB; ENSG00000176988; CTA
HLELATYEL

SEQ ID NO: 23400 - protein, 8 aa, Homo sapiens
  Table A; Target 23400; HLA-B*35:01; FMR1NB; ENSG00000176988; CTA
HPGYEAAM

SEQ ID NO: 23401 - protein, 8 aa, Homo sapiens
  Table A; Target 23401; HLA-B*35:03; FMR1NB; ENSG00000176988; CTA
HPGYEAAM

SEQ ID NO: 23402 - protein, 8 aa, Homo sapiens
  Table A; Target 23402; HLA-B*55:01; FMR1NB; ENSG00000176988; CTA
HPGYEAAM

SEQ ID NO: 23403 - protein, 9 aa, Homo sapiens
  Table A; Target 23403; HLA-B*35:03; FMR1NB; ENSG00000176988; CTA
HPGYEAAMA

SEQ ID NO: 23404 - protein, 9 aa, Homo sapiens
  Table A; Target 23404; HLA-B*54:01; FMR1NB; ENSG00000176988; CTA
HPGYEAAMA

SEQ ID NO: 23405 - protein, 9 aa, Homo sapiens
  Table A; Target 23405; HLA-B*55:01; FMR1NB; ENSG00000176988; CTA
HPGYEAAMA

SEQ ID NO: 23406 - protein, 9 aa, Homo sapiens
  Table A; Target 23406; HLA-B*56:01; FMR1NB; ENSG00000176988; CTA
HPGYEAAMA

SEQ ID NO: 23407 - protein, 9 aa, Homo sapiens
  Table A; Target 23407; HLA-C*01:02; FMR1NB; ENSG00000176988; CTA
ILPNSENAH

SEQ ID NO: 23408 - protein, 10 aa, Homo sapiens
  Table A; Target 23408; HLA-A*31:01; FMR1NB; ENSG00000176988; CTA
KSEMLQKAAR

SEQ ID NO: 23409 - protein, 8 aa, Homo sapiens
  Table A; Target 23409; HLA-B*18:01; FMR1NB; ENSG00000176988; CTA
LEALLNFF

SEQ ID NO: 23410 - protein, 8 aa, Homo sapiens
  Table A; Target 23410; HLA-B*37:01; FMR1NB; ENSG00000176988; CTA
LEALLNFF

SEQ ID NO: 23411 - protein, 9 aa, Homo sapiens
  Table A; Target 23411; HLA-B*44:02; FMR1NB; ENSG00000176988; CTA
LEALLNFFF

SEQ ID NO: 23412 - protein, 9 aa, Homo sapiens
  Table A; Target 23412; HLA-B*49:01; FMR1NB; ENSG00000176988; CTA
LEEDSALEA

SEQ ID NO: 23413 - protein, 10 aa, Homo sapiens
  Table A; Target 23413; HLA-A*30:01; FMR1NB; ENSG00000176988; CTA
LEEDSALEAL

SEQ ID NO: 23414 - protein, 10 aa, Homo sapiens
  Table A; Target 23414; HLA-B*40:01; FMR1NB; ENSG00000176988; CTA
LEEDSALEAL

SEQ ID NO: 23415 - protein, 11 aa, Homo sapiens
  Table A; Target 23415; HLA-B*40:01; FMR1NB; ENSG00000176988; CTA
LEEDSALEALL

SEQ ID NO: 23416 - protein, 8 aa, Homo sapiens
  Table A; Target 23416; HLA-A*23:01; FMR1NB; ENSG00000176988; CTA
LELATYEL

SEQ ID NO: 23417 - protein, 8 aa, Homo sapiens
  Table A; Target 23417; HLA-A*30:01; FMR1NB; ENSG00000176988; CTA
LELATYEL

SEQ ID NO: 23418 - protein, 8 aa, Homo sapiens
  Table A; Target 23418; HLA-B*18:01; FMR1NB; ENSG00000176988; CTA
LELATYEL

SEQ ID NO: 23419 - protein, 8 aa, Homo sapiens
  Table A; Target 23419; HLA-B*37:01; FMR1NB; ENSG00000176988; CTA
LELATYEL

SEQ ID NO: 23420 - protein, 8 aa, Homo sapiens
  Table A; Target 23420; HLA-B*40:01; FMR1NB; ENSG00000176988; CTA
LELATYEL

SEQ ID NO: 23421 - protein, 8 aa, Homo sapiens
  Table A; Target 23421; HLA-B*40:02; FMR1NB; ENSG00000176988; CTA
LELATYEL

SEQ ID NO: 23422 - protein, 8 aa, Homo sapiens
  Table A; Target 23422; HLA-B*49:01; FMR1NB; ENSG00000176988; CTA
LELATYEL

SEQ ID NO: 23423 - protein, 8 aa, Homo sapiens
  Table A; Target 23423; HLA-C*07:04; FMR1NB; ENSG00000176988; CTA
LELATYEL

SEQ ID NO: 23424 - protein, 8 aa, Homo sapiens
  Table A; Target 23424; HLA-C*16:04; FMR1NB; ENSG00000176988; CTA
LELATYEL

SEQ ID NO: 23425 - protein, 9 aa, Homo sapiens
  Table A; Target 23425; HLA-B*49:01; FMR1NB; ENSG00000176988; CTA
LELATYELA

SEQ ID NO: 23426 - protein, 9 aa, Homo sapiens
  Table A; Target 23426; HLA-A*29:02; FMR1NB; ENSG00000176988; CTA
LFVCYYLSY

SEQ ID NO: 23427 - protein, 9 aa, Homo sapiens
  Table A; Target 23427; HLA-A*02:04; FMR1NB; ENSG00000176988; CTA
LMLSIWILL

SEQ ID NO: 23428 - protein, 10 aa, Homo sapiens
  Table A; Target 23428; HLA-B*27:05; FMR1NB; ENSG00000176988; CTA
LQDLSESECL

SEQ ID NO: 23429 - protein, 10 aa, Homo sapiens
  Table A; Target 23429; HLA-B*38:01; FMR1NB; ENSG00000176988; CTA
LQDLSESECL

SEQ ID NO: 23430 - protein, 10 aa, Homo sapiens
  Table A; Target 23430; HLA-B*39:01; FMR1NB; ENSG00000176988; CTA
LQDLSESECL

SEQ ID NO: 23431 - protein, 9 aa, Homo sapiens
  Table A; Target 23431; HLA-A*01:01; FMR1NB; ENSG00000176988; CTA
MADRPQPGW

SEQ ID NO: 23432 - protein, 9 aa, Homo sapiens
  Table A; Target 23432; HLA-A*25:01; FMR1NB; ENSG00000176988; CTA
MADRPQPGW

SEQ ID NO: 23433 - protein, 9 aa, Homo sapiens
  Table A; Target 23433; HLA-B*35:01; FMR1NB; ENSG00000176988; CTA
MADRPQPGW

SEQ ID NO: 23434 - protein, 9 aa, Homo sapiens
  Table A; Target 23434; HLA-B*38:01; FMR1NB; ENSG00000176988; CTA
MADRPQPGW

SEQ ID NO: 23435 - protein, 9 aa, Homo sapiens
  Table A; Target 23435; HLA-B*44:03; FMR1NB; ENSG00000176988; CTA
MADRPQPGW

SEQ ID NO: 23436 - protein, 9 aa, Homo sapiens
  Table A; Target 23436; HLA-B*51:01; FMR1NB; ENSG00000176988; CTA
MADRPQPGW

SEQ ID NO: 23437 - protein, 9 aa, Homo sapiens
  Table A; Target 23437; HLA-B*57:01; FMR1NB; ENSG00000176988; CTA
MADRPQPGW

SEQ ID NO: 23438 - protein, 9 aa, Homo sapiens
  Table A; Target 23438; HLA-B*58:01; FMR1NB; ENSG00000176988; CTA
MADRPQPGW

SEQ ID NO: 23439 - protein, 9 aa, Homo sapiens
  Table A; Target 23439; HLA-C*05:01; FMR1NB; ENSG00000176988; CTA
MADRPQPGW

SEQ ID NO: 23440 - protein, 9 aa, Homo sapiens
  Table A; Target 23440; HLA-C*14:02; FMR1NB; ENSG00000176988; CTA
MFGLGAISL

SEQ ID NO: 23441 - protein, 9 aa, Homo sapiens
  Table A; Target 23441; HLA-A*02:04; FMR1NB; ENSG00000176988; CTA
MLMLSIWIL

SEQ ID NO: 23442 - protein, 9 aa, Homo sapiens
  Table A; Target 23442; HLA-A*02:04; FMR1NB; ENSG00000176988; CTA
MLSIWILLF

SEQ ID NO: 23443 - protein, 10 aa, Homo sapiens
  Table A; Target 23443; HLA-C*04:01; FMR1NB; ENSG00000176988; CTA
MMQMFGLGAI

SEQ ID NO: 23444 - protein, 9 aa, Homo sapiens
  Table A; Target 23444; HLA-B*13:02; FMR1NB; ENSG00000176988; CTA
MQMFGLGAI

SEQ ID NO: 23445 - protein, 9 aa, Homo sapiens
  Table A; Target 23445; HLA-B*39:01; FMR1NB; ENSG00000176988; CTA
MQMFGLGAI

SEQ ID NO: 23446 - protein, 9 aa, Homo sapiens
  Table A; Target 23446; HLA-A*03:01; FMR1NB; ENSG00000176988; CTA
NLRENQVAK

SEQ ID NO: 23447 - protein, 9 aa, Homo sapiens
  Table A; Target 23447; HLA-A*33:01; FMR1NB; ENSG00000176988; CTA
NLRENQVAK

SEQ ID NO: 23448 - protein, 9 aa, Homo sapiens
  Table A; Target 23448; HLA-A*01:01; FMR1NB; ENSG00000176988; CTA
NPESSHPGY

SEQ ID NO: 23449 - protein, 9 aa, Homo sapiens
  Table A; Target 23449; HLA-A*29:02; FMR1NB; ENSG00000176988; CTA
NPESSHPGY

SEQ ID NO: 23450 - protein, 9 aa, Homo sapiens
  Table A; Target 23450; HLA-A*30:02; FMR1NB; ENSG00000176988; CTA
NPESSHPGY

SEQ ID NO: 23451 - protein, 9 aa, Homo sapiens
  Table A; Target 23451; HLA-B*35:01; FMR1NB; ENSG00000176988; CTA
NPESSHPGY

SEQ ID NO: 23452 - protein, 9 aa, Homo sapiens
  Table A; Target 23452; HLA-B*39:01; FMR1NB; ENSG00000176988; CTA
NPESSHPGY

SEQ ID NO: 23453 - protein, 9 aa, Homo sapiens
  Table A; Target 23453; HLA-B*55:01; FMR1NB; ENSG00000176988; CTA
NPESSHPGY

SEQ ID NO: 23454 - protein, 9 aa, Homo sapiens
  Table A; Target 23454; HLA-C*03:03; FMR1NB; ENSG00000176988; CTA
NPESSHPGY

SEQ ID NO: 23455 - protein, 9 aa, Homo sapiens
  Table A; Target 23455; HLA-C*16:01; FMR1NB; ENSG00000176988; CTA
NPESSHPGY

SEQ ID NO: 23456 - protein, 9 aa, Homo sapiens
  Table A; Target 23456; HLA-C*16:02; FMR1NB; ENSG00000176988; CTA
NPESSHPGY

SEQ ID NO: 23457 - protein, 11 aa, Homo sapiens
  Table A; Target 23457; HLA-B*54:01; FMR1NB; ENSG00000176988; CTA
NPESSHPGYEA

SEQ ID NO: 23458 - protein, 10 aa, Homo sapiens
  Table A; Target 23458; HLA-C*05:01; FMR1NB; ENSG00000176988; CTA
NSENAHGQSL

SEQ ID NO: 23459 - protein, 9 aa, Homo sapiens
  Table A; Target 23459; HLA-A*30:01; FMR1NB; ENSG00000176988; CTA
QDLSESECL

SEQ ID NO: 23460 - protein, 9 aa, Homo sapiens
  Table A; Target 23460; HLA-B*38:01; FMR1NB; ENSG00000176988; CTA
QDLSESECL

SEQ ID NO: 23461 - protein, 9 aa, Homo sapiens
  Table A; Target 23461; HLA-B*40:01; FMR1NB; ENSG00000176988; CTA
QDLSESECL

SEQ ID NO: 23462 - protein, 9 aa, Homo sapiens
  Table A; Target 23462; HLA-B*40:02; FMR1NB; ENSG00000176988; CTA
QDLSESECL

SEQ ID NO: 23463 - protein, 10 aa, Homo sapiens
  Table A; Target 23463; HLA-B*27:02; FMR1NB; ENSG00000176988; CTA
QDLSESECLR

SEQ ID NO: 23464 - protein, 9 aa, Homo sapiens
  Table A; Target 23464; HLA-A*30:01; FMR1NB; ENSG00000176988; CTA
QDNRVVTGL

SEQ ID NO: 23465 - protein, 9 aa, Homo sapiens
  Table A; Target 23465; HLA-B*37:01; FMR1NB; ENSG00000176988; CTA
QDNRVVTGL

SEQ ID NO: 23466 - protein, 9 aa, Homo sapiens
  Table A; Target 23466; HLA-B*40:01; FMR1NB; ENSG00000176988; CTA
QDNRVVTGL

SEQ ID NO: 23467 - protein, 9 aa, Homo sapiens
  Table A; Target 23467; HLA-B*40:02; FMR1NB; ENSG00000176988; CTA
QDNRVVTGL

SEQ ID NO: 23468 - protein, 9 aa, Homo sapiens
  Table A; Target 23468; HLA-B*44:02; FMR1NB; ENSG00000176988; CTA
QDNRVVTGL

SEQ ID NO: 23469 - protein, 9 aa, Homo sapiens
  Table A; Target 23469; HLA-B*44:03; FMR1NB; ENSG00000176988; CTA
QDNRVVTGL

SEQ ID NO: 23470 - protein, 9 aa, Homo sapiens
  Table A; Target 23470; HLA-C*16:02; FMR1NB; ENSG00000176988; CTA
QDNRVVTGL

SEQ ID NO: 23471 - protein, 10 aa, Homo sapiens
  Table A; Target 23471; HLA-A*02:01; FMR1NB; ENSG00000176988; CTA
QMFGLGAISL

SEQ ID NO: 23472 - protein, 10 aa, Homo sapiens
  Table A; Target 23472; HLA-A*02:03; FMR1NB; ENSG00000176988; CTA
QMFGLGAISL

SEQ ID NO: 23473 - protein, 11 aa, Homo sapiens
  Table A; Target 23473; HLA-A*02:03; FMR1NB; ENSG00000176988; CTA
QMFGLGAISLI

SEQ ID NO: 23474 - protein, 8 aa, Homo sapiens
  Table A; Target 23474; HLA-B*07:02; FMR1NB; ENSG00000176988; CTA
QPGWRESL

SEQ ID NO: 23475 - protein, 8 aa, Homo sapiens
  Table A; Target 23475; HLA-C*06:02; FMR1NB; ENSG00000176988; CTA
QRQDNRVV

SEQ ID NO: 23476 - protein, 9 aa, Homo sapiens
  Table A; Target 23476; HLA-B*35:03; FMR1NB; ENSG00000176988; CTA
QSLEEDSAL

SEQ ID NO: 23477 - protein, 9 aa, Homo sapiens
  Table A; Target 23477; HLA-B*07:02; FMR1NB; ENSG00000176988; CTA
QVAKPCNEL

SEQ ID NO: 23478 - protein, 8 aa, Homo sapiens
  Table A; Target 23478; HLA-B*08:01; FMR1NB; ENSG00000176988; CTA
RAMRVAHL

SEQ ID NO: 23479 - protein, 8 aa, Homo sapiens
  Table A; Target 23479; HLA-B*37:01; FMR1NB; ENSG00000176988; CTA
RDVPKQMM

SEQ ID NO: 23480 - protein, 10 aa, Homo sapiens
  Table A; Target 23480; HLA-B*07:02; FMR1NB; ENSG00000176988; CTA
RPQPGWRESL

SEQ ID NO: 23481 - protein, 10 aa, Homo sapiens
  Table A; Target 23481; HLA-C*07:02; FMR1NB; ENSG00000176988; CTA
RPQPGWRESL

SEQ ID NO: 23482 - protein, 10 aa, Homo sapiens
  Table A; Target 23482; HLA-B*38:01; FMR1NB; ENSG00000176988; CTA
RQDNRVVTGL

SEQ ID NO: 23483 - protein, 10 aa, Homo sapiens
  Table A; Target 23483; HLA-A*03:01; FMR1NB; ENSG00000176988; CTA
RVAHLELATY

SEQ ID NO: 23484 - protein, 10 aa, Homo sapiens
  Table A; Target 23484; HLA-A*03:02; FMR1NB; ENSG00000176988; CTA
RVAHLELATY

SEQ ID NO: 23485 - protein, 10 aa, Homo sapiens
  Table A; Target 23485; HLA-A*25:01; FMR1NB; ENSG00000176988; CTA
RVAHLELATY

SEQ ID NO: 23486 - protein, 10 aa, Homo sapiens
  Table A; Target 23486; HLA-A*26:01; FMR1NB; ENSG00000176988; CTA
RVAHLELATY

SEQ ID NO: 23487 - protein, 10 aa, Homo sapiens
  Table A; Target 23487; HLA-A*29:02; FMR1NB; ENSG00000176988; CTA
RVAHLELATY

SEQ ID NO: 23488 - protein, 10 aa, Homo sapiens
  Table A; Target 23488; HLA-A*30:02; FMR1NB; ENSG00000176988; CTA
RVAHLELATY

SEQ ID NO: 23489 - protein, 10 aa, Homo sapiens
  Table A; Target 23489; HLA-A*32:01; FMR1NB; ENSG00000176988; CTA
RVAHLELATY

SEQ ID NO: 23490 - protein, 10 aa, Homo sapiens
  Table A; Target 23490; HLA-B*15:01; FMR1NB; ENSG00000176988; CTA
RVAHLELATY

SEQ ID NO: 23491 - protein, 10 aa, Homo sapiens
  Table A; Target 23491; HLA-B*27:02; FMR1NB; ENSG00000176988; CTA
RVAHLELATY

SEQ ID NO: 23492 - protein, 10 aa, Homo sapiens
  Table A; Target 23492; HLA-B*57:01; FMR1NB; ENSG00000176988; CTA
RVAHLELATY

SEQ ID NO: 23493 - protein, 10 aa, Homo sapiens
  Table A; Target 23493; HLA-B*58:01; FMR1NB; ENSG00000176988; CTA
RVAHLELATY

SEQ ID NO: 23494 - protein, 9 aa, Homo sapiens
  Table A; Target 23494; HLA-A*03:01; FMR1NB; ENSG00000176988; CTA
RVSKPFGML

SEQ ID NO: 23495 - protein, 10 aa, Homo sapiens
  Table A; Target 23495; HLA-A*03:01; FMR1NB; ENSG00000176988; CTA
RVSKPFGMLM

SEQ ID NO: 23496 - protein, 8 aa, Homo sapiens
  Table A; Target 23496; HLA-A*03:01; FMR1NB; ENSG00000176988; CTA
RVVTGLKK

SEQ ID NO: 23497 - protein, 10 aa, Homo sapiens
  Table A; Target 23497; HLA-A*31:01; FMR1NB; ENSG00000176988; CTA
RVVTGLKKQR

SEQ ID NO: 23498 - protein, 9 aa, Homo sapiens
  Table A; Target 23498; HLA-A*23:01; FMR1NB; ENSG00000176988; CTA
SALEALLNF

SEQ ID NO: 23499 - protein, 9 aa, Homo sapiens
  Table A; Target 23499; HLA-A*25:01; FMR1NB; ENSG00000176988; CTA
SALEALLNF

SEQ ID NO: 23500 - protein, 9 aa, Homo sapiens
  Table A; Target 23500; HLA-A*29:02; FMR1NB; ENSG00000176988; CTA
SALEALLNF

SEQ ID NO: 23501 - protein, 9 aa, Homo sapiens
  Table A; Target 23501; HLA-B*35:01; FMR1NB; ENSG00000176988; CTA
SALEALLNF

SEQ ID NO: 23502 - protein, 9 aa, Homo sapiens
  Table A; Target 23502; HLA-B*58:01; FMR1NB; ENSG00000176988; CTA
SALEALLNF

SEQ ID NO: 23503 - protein, 9 aa, Homo sapiens
  Table A; Target 23503; HLA-C*02:02; FMR1NB; ENSG00000176988; CTA
SALEALLNF

SEQ ID NO: 23504 - protein, 8 aa, Homo sapiens
  Table A; Target 23504; HLA-B*18:01; FMR1NB; ENSG00000176988; CTA
SEMLQKAA

SEQ ID NO: 23505 - protein, 9 aa, Homo sapiens
  Table A; Target 23505; HLA-B*44:02; FMR1NB; ENSG00000176988; CTA
SEMLQKAAR

SEQ ID NO: 23506 - protein, 9 aa, Homo sapiens
  Table A; Target 23506; HLA-B*44:03; FMR1NB; ENSG00000176988; CTA
SEMLQKAAR

SEQ ID NO: 23507 - protein, 9 aa, Homo sapiens
  Table A; Target 23507; HLA-A*30:01; FMR1NB; ENSG00000176988; CTA
SENAHGQSL

SEQ ID NO: 23508 - protein, 9 aa, Homo sapiens
  Table A; Target 23508; HLA-B*07:02; FMR1NB; ENSG00000176988; CTA
SENAHGQSL

SEQ ID NO: 23509 - protein, 9 aa, Homo sapiens
  Table A; Target 23509; HLA-B*18:01; FMR1NB; ENSG00000176988; CTA
SENAHGQSL

SEQ ID NO: 23510 - protein, 9 aa, Homo sapiens
  Table A; Target 23510; HLA-B*27:02; FMR1NB; ENSG00000176988; CTA
SENAHGQSL

SEQ ID NO: 23511 - protein, 9 aa, Homo sapiens
  Table A; Target 23511; HLA-B*37:01; FMR1NB; ENSG00000176988; CTA
SENAHGQSL

SEQ ID NO: 23512 - protein, 9 aa, Homo sapiens
  Table A; Target 23512; HLA-B*40:01; FMR1NB; ENSG00000176988; CTA
SENAHGQSL

SEQ ID NO: 23513 - protein, 9 aa, Homo sapiens
  Table A; Target 23513; HLA-B*40:02; FMR1NB; ENSG00000176988; CTA
SENAHGQSL

SEQ ID NO: 23514 - protein, 9 aa, Homo sapiens
  Table A; Target 23514; HLA-B*44:02; FMR1NB; ENSG00000176988; CTA
SENAHGQSL

SEQ ID NO: 23515 - protein, 9 aa, Homo sapiens
  Table A; Target 23515; HLA-B*44:03; FMR1NB; ENSG00000176988; CTA
SENAHGQSL

SEQ ID NO: 23516 - protein, 9 aa, Homo sapiens
  Table A; Target 23516; HLA-B*49:01; FMR1NB; ENSG00000176988; CTA
SENAHGQSL

SEQ ID NO: 23517 - protein, 9 aa, Homo sapiens
  Table A; Target 23517; HLA-C*02:02; FMR1NB; ENSG00000176988; CTA
SENAHGQSL

SEQ ID NO: 23518 - protein, 9 aa, Homo sapiens
  Table A; Target 23518; HLA-C*07:02; FMR1NB; ENSG00000176988; CTA
SENAHGQSL

SEQ ID NO: 23519 - protein, 9 aa, Homo sapiens
  Table A; Target 23519; HLA-C*14:02; FMR1NB; ENSG00000176988; CTA
SENAHGQSL

SEQ ID NO: 23520 - protein, 9 aa, Homo sapiens
  Table A; Target 23520; HLA-C*16:04; FMR1NB; ENSG00000176988; CTA
SENAHGQSL

SEQ ID NO: 23521 - protein, 9 aa, Homo sapiens
  Table A; Target 23521; HLA-B*54:01; FMR1NB; ENSG00000176988; CTA
SGSSYFVLA

SEQ ID NO: 23522 - protein, 9 aa, Homo sapiens
  Table A; Target 23522; HLA-B*56:01; FMR1NB; ENSG00000176988; CTA
SGSSYFVLA

SEQ ID NO: 23523 - protein, 9 aa, Homo sapiens
  Table A; Target 23523; HLA-B*39:01; FMR1NB; ENSG00000176988; CTA
SHPGYEAAM

SEQ ID NO: 23524 - protein, 9 aa, Homo sapiens
  Table A; Target 23524; HLA-C*01:02; FMR1NB; ENSG00000176988; CTA
SHPGYEAAM

SEQ ID NO: 23525 - protein, 8 aa, Homo sapiens
  Table A; Target 23525; HLA-C*05:01; FMR1NB; ENSG00000176988; CTA
SLEEDSAL

SEQ ID NO: 23526 - protein, 8 aa, Homo sapiens
  Table A; Target 23526; HLA-B*08:01; FMR1NB; ENSG00000176988; CTA
SLKMRVSK

SEQ ID NO: 23527 - protein, 10 aa, Homo sapiens
  Table A; Target 23527; HLA-A*26:01; FMR1NB; ENSG00000176988; CTA
SNPESSHPGY

SEQ ID NO: 23528 - protein, 10 aa, Homo sapiens
  Table A; Target 23528; HLA-A*29:02; FMR1NB; ENSG00000176988; CTA
SNPESSHPGY

SEQ ID NO: 23529 - protein, 10 aa, Homo sapiens
  Table A; Target 23529; HLA-A*30:02; FMR1NB; ENSG00000176988; CTA
SNPESSHPGY

SEQ ID NO: 23530 - protein, 8 aa, Homo sapiens
  Table A; Target 23530; HLA-A*03:02; FMR1NB; ENSG00000176988; CTA
SSGTTSFK

SEQ ID NO: 23531 - protein, 8 aa, Homo sapiens
  Table A; Target 23531; HLA-A*11:01; FMR1NB; ENSG00000176988; CTA
SSGTTSFK

SEQ ID NO: 23532 - protein, 10 aa, Homo sapiens
  Table A; Target 23532; HLA-B*07:02; FMR1NB; ENSG00000176988; CTA
SSGTTSFKCF

SEQ ID NO: 23533 - protein, 8 aa, Homo sapiens
  Table A; Target 23533; HLA-A*32:01; FMR1NB; ENSG00000176988; CTA
SSSGTTSF

SEQ ID NO: 23534 - protein, 8 aa, Homo sapiens
  Table A; Target 23534; HLA-B*37:01; FMR1NB; ENSG00000176988; CTA
SSSGTTSF

SEQ ID NO: 23535 - protein, 8 aa, Homo sapiens
  Table A; Target 23535; HLA-C*05:01; FMR1NB; ENSG00000176988; CTA
SSSGTTSF

SEQ ID NO: 23536 - protein, 9 aa, Homo sapiens
  Table A; Target 23536; HLA-A*03:01; FMR1NB; ENSG00000176988; CTA
SSSGTTSFK

SEQ ID NO: 23537 - protein, 9 aa, Homo sapiens
  Table A; Target 23537; HLA-A*03:02; FMR1NB; ENSG00000176988; CTA
SSSGTTSFK

SEQ ID NO: 23538 - protein, 9 aa, Homo sapiens
  Table A; Target 23538; HLA-A*11:01; FMR1NB; ENSG00000176988; CTA
SSSGTTSFK

SEQ ID NO: 23539 - protein, 11 aa, Homo sapiens
  Table A; Target 23539; HLA-A*24:02; FMR1NB; ENSG00000176988; CTA
SYFVLANGHIL

SEQ ID NO: 23540 - protein, 10 aa, Homo sapiens
  Table A; Target 23540; HLA-A*30:02; FMR1NB; ENSG00000176988; CTA
SYYLCSGSSY

SEQ ID NO: 23541 - protein, 10 aa, Homo sapiens
  Table A; Target 23541; HLA-B*15:03; FMR1NB; ENSG00000176988; CTA
SYYLCSGSSY

SEQ ID NO: 23542 - protein, 10 aa, Homo sapiens
  Table A; Target 23542; HLA-C*14:02; FMR1NB; ENSG00000176988; CTA
SYYLCSGSSY

SEQ ID NO: 23543 - protein, 11 aa, Homo sapiens
  Table A; Target 23543; HLA-A*24:02; FMR1NB; ENSG00000176988; CTA
SYYLCSGSSYF

SEQ ID NO: 23544 - protein, 9 aa, Homo sapiens
  Table A; Target 23544; HLA-C*04:01; FMR1NB; ENSG00000176988; CTA
TYELAATES

SEQ ID NO: 23545 - protein, 11 aa, Homo sapiens
  Table A; Target 23545; HLA-C*06:02; FMR1NB; ENSG00000176988; CTA
TYELAATESNP

SEQ ID NO: 23546 - protein, 9 aa, Homo sapiens
  Table A; Target 23546; HLA-A*01:01; FMR1NB; ENSG00000176988; CTA
VAHLELATY

SEQ ID NO: 23547 - protein, 9 aa, Homo sapiens
  Table A; Target 23547; HLA-A*23:01; FMR1NB; ENSG00000176988; CTA
VAHLELATY

SEQ ID NO: 23548 - protein, 9 aa, Homo sapiens
  Table A; Target 23548; HLA-A*25:01; FMR1NB; ENSG00000176988; CTA
VAHLELATY

SEQ ID NO: 23549 - protein, 9 aa, Homo sapiens
  Table A; Target 23549; HLA-A*26:01; FMR1NB; ENSG00000176988; CTA
VAHLELATY

SEQ ID NO: 23550 - protein, 9 aa, Homo sapiens
  Table A; Target 23550; HLA-A*29:02; FMR1NB; ENSG00000176988; CTA
VAHLELATY

SEQ ID NO: 23551 - protein, 9 aa, Homo sapiens
  Table A; Target 23551; HLA-A*30:02; FMR1NB; ENSG00000176988; CTA
VAHLELATY

SEQ ID NO: 23552 - protein, 9 aa, Homo sapiens
  Table A; Target 23552; HLA-A*32:01; FMR1NB; ENSG00000176988; CTA
VAHLELATY

SEQ ID NO: 23553 - protein, 9 aa, Homo sapiens
  Table A; Target 23553; HLA-B*15:01; FMR1NB; ENSG00000176988; CTA
VAHLELATY

SEQ ID NO: 23554 - protein, 9 aa, Homo sapiens
  Table A; Target 23554; HLA-B*15:03; FMR1NB; ENSG00000176988; CTA
VAHLELATY

SEQ ID NO: 23555 - protein, 9 aa, Homo sapiens
  Table A; Target 23555; HLA-B*18:01; FMR1NB; ENSG00000176988; CTA
VAHLELATY

SEQ ID NO: 23556 - protein, 9 aa, Homo sapiens
  Table A; Target 23556; HLA-B*27:02; FMR1NB; ENSG00000176988; CTA
VAHLELATY

SEQ ID NO: 23557 - protein, 9 aa, Homo sapiens
  Table A; Target 23557; HLA-B*27:05; FMR1NB; ENSG00000176988; CTA
VAHLELATY

SEQ ID NO: 23558 - protein, 9 aa, Homo sapiens
  Table A; Target 23558; HLA-B*35:01; FMR1NB; ENSG00000176988; CTA
VAHLELATY

SEQ ID NO: 23559 - protein, 9 aa, Homo sapiens
  Table A; Target 23559; HLA-B*39:01; FMR1NB; ENSG00000176988; CTA
VAHLELATY

SEQ ID NO: 23560 - protein, 9 aa, Homo sapiens
  Table A; Target 23560; HLA-B*46:01; FMR1NB; ENSG00000176988; CTA
VAHLELATY

SEQ ID NO: 23561 - protein, 9 aa, Homo sapiens
  Table A; Target 23561; HLA-B*51:01; FMR1NB; ENSG00000176988; CTA
VAHLELATY

SEQ ID NO: 23562 - protein, 9 aa, Homo sapiens
  Table A; Target 23562; HLA-B*54:01; FMR1NB; ENSG00000176988; CTA
VAHLELATY

SEQ ID NO: 23563 - protein, 9 aa, Homo sapiens
  Table A; Target 23563; HLA-B*55:01; FMR1NB; ENSG00000176988; CTA
VAHLELATY

SEQ ID NO: 23564 - protein, 9 aa, Homo sapiens
  Table A; Target 23564; HLA-B*56:01; FMR1NB; ENSG00000176988; CTA
VAHLELATY

SEQ ID NO: 23565 - protein, 9 aa, Homo sapiens
  Table A; Target 23565; HLA-B*57:01; FMR1NB; ENSG00000176988; CTA
VAHLELATY

SEQ ID NO: 23566 - protein, 9 aa, Homo sapiens
  Table A; Target 23566; HLA-B*58:01; FMR1NB; ENSG00000176988; CTA
VAHLELATY

SEQ ID NO: 23567 - protein, 9 aa, Homo sapiens
  Table A; Target 23567; HLA-C*01:02; FMR1NB; ENSG00000176988; CTA
VAHLELATY

SEQ ID NO: 23568 - protein, 9 aa, Homo sapiens
  Table A; Target 23568; HLA-C*02:02; FMR1NB; ENSG00000176988; CTA
VAHLELATY

SEQ ID NO: 23569 - protein, 9 aa, Homo sapiens
  Table A; Target 23569; HLA-C*03:03; FMR1NB; ENSG00000176988; CTA
VAHLELATY

SEQ ID NO: 23570 - protein, 9 aa, Homo sapiens
  Table A; Target 23570; HLA-C*03:04; FMR1NB; ENSG00000176988; CTA
VAHLELATY

SEQ ID NO: 23571 - protein, 9 aa, Homo sapiens
  Table A; Target 23571; HLA-C*04:01; FMR1NB; ENSG00000176988; CTA
VAHLELATY

SEQ ID NO: 23572 - protein, 9 aa, Homo sapiens
  Table A; Target 23572; HLA-C*05:01; FMR1NB; ENSG00000176988; CTA
VAHLELATY

SEQ ID NO: 23573 - protein, 9 aa, Homo sapiens
  Table A; Target 23573; HLA-C*07:01; FMR1NB; ENSG00000176988; CTA
VAHLELATY

SEQ ID NO: 23574 - protein, 9 aa, Homo sapiens
  Table A; Target 23574; HLA-C*07:04; FMR1NB; ENSG00000176988; CTA
VAHLELATY

SEQ ID NO: 23575 - protein, 9 aa, Homo sapiens
  Table A; Target 23575; HLA-C*07:06; FMR1NB; ENSG00000176988; CTA
VAHLELATY

SEQ ID NO: 23576 - protein, 9 aa, Homo sapiens
  Table A; Target 23576; HLA-C*12:03; FMR1NB; ENSG00000176988; CTA
VAHLELATY

SEQ ID NO: 23577 - protein, 9 aa, Homo sapiens
  Table A; Target 23577; HLA-C*14:02; FMR1NB; ENSG00000176988; CTA
VAHLELATY

SEQ ID NO: 23578 - protein, 9 aa, Homo sapiens
  Table A; Target 23578; HLA-C*16:01; FMR1NB; ENSG00000176988; CTA
VAHLELATY

SEQ ID NO: 23579 - protein, 9 aa, Homo sapiens
  Table A; Target 23579; HLA-C*16:02; FMR1NB; ENSG00000176988; CTA
VAHLELATY

SEQ ID NO: 23580 - protein, 9 aa, Homo sapiens
  Table A; Target 23580; HLA-C*16:04; FMR1NB; ENSG00000176988; CTA
VAHLELATY

SEQ ID NO: 23581 - protein, 8 aa, Homo sapiens
  Table A; Target 23581; HLA-B*08:01; FMR1NB; ENSG00000176988; CTA
VAKPCNEL

SEQ ID NO: 23582 - protein, 8 aa, Homo sapiens
  Table A; Target 23582; HLA-B*46:01; FMR1NB; ENSG00000176988; CTA
VAKPCNEL

SEQ ID NO: 23583 - protein, 8 aa, Homo sapiens
  Table A; Target 23583; HLA-C*16:01; FMR1NB; ENSG00000176988; CTA
VAKPCNEL

SEQ ID NO: 23584 - protein, 8 aa, Homo sapiens
  Table A; Target 23584; HLA-C*16:02; FMR1NB; ENSG00000176988; CTA
VAKPCNEL

SEQ ID NO: 23585 - protein, 8 aa, Homo sapiens
  Table A; Target 23585; HLA-B*08:01; FMR1NB; ENSG00000176988; CTA
VPKQMMQM

SEQ ID NO: 23586 - protein, 9 aa, Homo sapiens
  Table A; Target 23586; HLA-A*31:01; FMR1NB; ENSG00000176988; CTA
VSKPFGMLM

SEQ ID NO: 23587 - protein, 9 aa, Homo sapiens
  Table A; Target 23587; HLA-A*32:01; FMR1NB; ENSG00000176988; CTA
VSKPFGMLM

SEQ ID NO: 23588 - protein, 9 aa, Homo sapiens
  Table A; Target 23588; HLA-B*40:02; FMR1NB; ENSG00000176988; CTA
VSKPFGMLM

SEQ ID NO: 23589 - protein, 9 aa, Homo sapiens
  Table A; Target 23589; HLA-B*46:01; FMR1NB; ENSG00000176988; CTA
VSKPFGMLM

SEQ ID NO: 23590 - protein, 9 aa, Homo sapiens
  Table A; Target 23590; HLA-B*57:01; FMR1NB; ENSG00000176988; CTA
VSKPFGMLM

SEQ ID NO: 23591 - protein, 9 aa, Homo sapiens
  Table A; Target 23591; HLA-B*58:01; FMR1NB; ENSG00000176988; CTA
VSKPFGMLM

SEQ ID NO: 23592 - protein, 9 aa, Homo sapiens
  Table A; Target 23592; HLA-C*02:02; FMR1NB; ENSG00000176988; CTA
VSKPFGMLM

SEQ ID NO: 23593 - protein, 9 aa, Homo sapiens
  Table A; Target 23593; HLA-C*03:04; FMR1NB; ENSG00000176988; CTA
VSKPFGMLM

SEQ ID NO: 23594 - protein, 9 aa, Homo sapiens
  Table A; Target 23594; HLA-C*12:03; FMR1NB; ENSG00000176988; CTA
VSKPFGMLM

SEQ ID NO: 23595 - protein, 9 aa, Homo sapiens
  Table A; Target 23595; HLA-C*16:01; FMR1NB; ENSG00000176988; CTA
VSKPFGMLM

SEQ ID NO: 23596 - protein, 9 aa, Homo sapiens
  Table A; Target 23596; HLA-A*31:01; FMR1NB; ENSG00000176988; CTA
VVTGLKKQR

SEQ ID NO: 23597 - protein, 9 aa, Homo sapiens
  Table A; Target 23597; HLA-A*33:01; FMR1NB; ENSG00000176988; CTA
VVTGLKKQR

SEQ ID NO: 23598 - protein, 9 aa, Homo sapiens
  Table A; Target 23598; HLA-A*33:03; FMR1NB; ENSG00000176988; CTA
VVTGLKKQR

SEQ ID NO: 23599 - protein, 9 aa, Homo sapiens
  Table A; Target 23599; HLA-A*68:01; FMR1NB; ENSG00000176988; CTA
VVTGLKKQR

SEQ ID NO: 23600 - protein, 9 aa, Homo sapiens
  Table A; Target 23600; HLA-B*39:01; FMR1NB; ENSG00000176988; CTA
WRSEPADDL

SEQ ID NO: 23601 - protein, 8 aa, Homo sapiens
  Table A; Target 23601; HLA-B*18:01; FMR1NB; ENSG00000176988; CTA
YELAATES

SEQ ID NO: 23602 - protein, 9 aa, Homo sapiens
  Table A; Target 23602; HLA-B*18:01; FMR1NB; ENSG00000176988; CTA
YELAATESN

SEQ ID NO: 23603 - protein, 9 aa, Homo sapiens
  Table A; Target 23603; HLA-B*40:02; FMR1NB; ENSG00000176988; CTA
YELAATESN

SEQ ID NO: 23604 - protein, 9 aa, Homo sapiens
  Table A; Target 23604; HLA-B*49:01; FMR1NB; ENSG00000176988; CTA
YELAATESN

SEQ ID NO: 23605 - protein, 8 aa, Homo sapiens
  Table A; Target 23605; HLA-B*46:01; FMR1NB; ENSG00000176988; CTA
YLCSGSSY

SEQ ID NO: 23606 - protein, 8 aa, Homo sapiens
  Table A; Target 23606; HLA-C*07:01; FMR1NB; ENSG00000176988; CTA
YLCSGSSY

SEQ ID NO: 23607 - protein, 8 aa, Homo sapiens
  Table A; Target 23607; HLA-C*14:02; FMR1NB; ENSG00000176988; CTA
YLCSGSSY

SEQ ID NO: 23608 - protein, 9 aa, Homo sapiens
  Table A; Target 23608; HLA-C*07:01; FMR1NB; ENSG00000176988; CTA
YLCSGSSYF

SEQ ID NO: 23609 - protein, 9 aa, Homo sapiens
  Table A; Target 23609; HLA-C*07:04; FMR1NB; ENSG00000176988; CTA
YLCSGSSYF

SEQ ID NO: 23610 - protein, 9 aa, Homo sapiens
  Table A; Target 23610; HLA-A*23:01; FMR1NB; ENSG00000176988; CTA
YYLCSGSSY

SEQ ID NO: 23611 - protein, 9 aa, Homo sapiens
  Table A; Target 23611; HLA-A*29:02; FMR1NB; ENSG00000176988; CTA
YYLCSGSSY

SEQ ID NO: 23612 - protein, 9 aa, Homo sapiens
  Table A; Target 23612; HLA-A*30:02; FMR1NB; ENSG00000176988; CTA
YYLCSGSSY

SEQ ID NO: 23613 - protein, 9 aa, Homo sapiens
  Table A; Target 23613; HLA-B*15:03; FMR1NB; ENSG00000176988; CTA
YYLCSGSSY

SEQ ID NO: 23614 - protein, 9 aa, Homo sapiens
  Table A; Target 23614; HLA-B*46:01; FMR1NB; ENSG00000176988; CTA
YYLCSGSSY

SEQ ID NO: 23615 - protein, 9 aa, Homo sapiens
  Table A; Target 23615; HLA-C*01:02; FMR1NB; ENSG00000176988; CTA
YYLCSGSSY

SEQ ID NO: 23616 - protein, 9 aa, Homo sapiens
  Table A; Target 23616; HLA-C*14:02; FMR1NB; ENSG00000176988; CTA
YYLCSGSSY

SEQ ID NO: 23617 - protein, 10 aa, Homo sapiens
  Table A; Target 23617; HLA-A*23:01; FMR1NB; ENSG00000176988; CTA
YYLCSGSSYF

SEQ ID NO: 23618 - protein, 10 aa, Homo sapiens
  Table A; Target 23618; HLA-A*24:02; FMR1NB; ENSG00000176988; CTA
YYLCSGSSYF

SEQ ID NO: 23619 - protein, 11 aa, Homo sapiens
  Table A; Target 23619; HLA-B*13:02; FOXE1; ENSG00000178919; TAA
AAAAAAAAAAI

SEQ ID NO: 23620 - protein, 11 aa, Homo sapiens
  Table A; Target 23620; HLA-C*03:03; FOXE1; ENSG00000178919; TAA
AAAAAAAAAAI

SEQ ID NO: 23621 - protein, 11 aa, Homo sapiens
  Table A; Target 23621; HLA-C*03:04; FOXE1; ENSG00000178919; TAA
AAAAAAAAAAI

SEQ ID NO: 23622 - protein, 11 aa, Homo sapiens
  Table A; Target 23622; HLA-C*16:04; FOXE1; ENSG00000178919; TAA
AAAAAAAAAAI

SEQ ID NO: 23623 - protein, 10 aa, Homo sapiens
  Table A; Target 23623; HLA-B*07:02; FOXE1; ENSG00000178919; TAA
AAAAAAAAAI

SEQ ID NO: 23624 - protein, 10 aa, Homo sapiens
  Table A; Target 23624; HLA-C*03:03; FOXE1; ENSG00000178919; TAA
AAAAAAAAAI

SEQ ID NO: 23625 - protein, 10 aa, Homo sapiens
  Table A; Target 23625; HLA-C*03:04; FOXE1; ENSG00000178919; TAA
AAAAAAAAAI

SEQ ID NO: 23626 - protein, 10 aa, Homo sapiens
  Table A; Target 23626; HLA-C*16:04; FOXE1; ENSG00000178919; TAA
AAAAAAAAAI

SEQ ID NO: 23627 - protein, 11 aa, Homo sapiens
  Table A; Target 23627; HLA-A*30:02; FOXE1; ENSG00000178919; TAA
AAAAAAAAAIF

SEQ ID NO: 23628 - protein, 11 aa, Homo sapiens
  Table A; Target 23628; HLA-B*15:01; FOXE1; ENSG00000178919; TAA
AAAAAAAAAIF

SEQ ID NO: 23629 - protein, 11 aa, Homo sapiens
  Table A; Target 23629; HLA-B*15:03; FOXE1; ENSG00000178919; TAA
AAAAAAAAAIF

SEQ ID NO: 23630 - protein, 11 aa, Homo sapiens
  Table A; Target 23630; HLA-B*27:02; FOXE1; ENSG00000178919; TAA
AAAAAAAAAIF

SEQ ID NO: 23631 - protein, 11 aa, Homo sapiens
  Table A; Target 23631; HLA-B*46:01; FOXE1; ENSG00000178919; TAA
AAAAAAAAAIF

SEQ ID NO: 23632 - protein, 11 aa, Homo sapiens
  Table A; Target 23632; HLA-B*58:01; FOXE1; ENSG00000178919; TAA
AAAAAAAAAIF

SEQ ID NO: 23633 - protein, 11 aa, Homo sapiens
  Table A; Target 23633; HLA-C*02:02; FOXE1; ENSG00000178919; TAA
AAAAAAAAAIF

SEQ ID NO: 23634 - protein, 11 aa, Homo sapiens
  Table A; Target 23634; HLA-C*03:03; FOXE1; ENSG00000178919; TAA
AAAAAAAAAIF

SEQ ID NO: 23635 - protein, 11 aa, Homo sapiens
  Table A; Target 23635; HLA-C*03:04; FOXE1; ENSG00000178919; TAA
AAAAAAAAAIF

SEQ ID NO: 23636 - protein, 11 aa, Homo sapiens
  Table A; Target 23636; HLA-C*12:03; FOXE1; ENSG00000178919; TAA
AAAAAAAAAIF

SEQ ID NO: 23637 - protein, 11 aa, Homo sapiens
  Table A; Target 23637; HLA-C*16:04; FOXE1; ENSG00000178919; TAA
AAAAAAAAAIF

SEQ ID NO: 23638 - protein, 9 aa, Homo sapiens
  Table A; Target 23638; HLA-A*30:01; FOXE1; ENSG00000178919; TAA
AAAAAAAAI

SEQ ID NO: 23639 - protein, 9 aa, Homo sapiens
  Table A; Target 23639; HLA-A*32:01; FOXE1; ENSG00000178919; TAA
AAAAAAAAI

SEQ ID NO: 23640 - protein, 9 aa, Homo sapiens
  Table A; Target 23640; HLA-B*15:01; FOXE1; ENSG00000178919; TAA
AAAAAAAAI

SEQ ID NO: 23641 - protein, 9 aa, Homo sapiens
  Table A; Target 23641; HLA-B*35:03; FOXE1; ENSG00000178919; TAA
AAAAAAAAI

SEQ ID NO: 23642 - protein, 9 aa, Homo sapiens
  Table A; Target 23642; HLA-B*37:01; FOXE1; ENSG00000178919; TAA
AAAAAAAAI

SEQ ID NO: 23643 - protein, 9 aa, Homo sapiens
  Table A; Target 23643; HLA-B*40:01; FOXE1; ENSG00000178919; TAA
AAAAAAAAI

SEQ ID NO: 23644 - protein, 9 aa, Homo sapiens
  Table A; Target 23644; HLA-B*49:01; FOXE1; ENSG00000178919; TAA
AAAAAAAAI

SEQ ID NO: 23645 - protein, 9 aa, Homo sapiens
  Table A; Target 23645; HLA-C*05:01; FOXE1; ENSG00000178919; TAA
AAAAAAAAI

SEQ ID NO: 23646 - protein, 9 aa, Homo sapiens
  Table A; Target 23646; HLA-C*07:02; FOXE1; ENSG00000178919; TAA
AAAAAAAAI

SEQ ID NO: 23647 - protein, 9 aa, Homo sapiens
  Table A; Target 23647; HLA-C*07:04; FOXE1; ENSG00000178919; TAA
AAAAAAAAI

SEQ ID NO: 23648 - protein, 9 aa, Homo sapiens
  Table A; Target 23648; HLA-C*07:06; FOXE1; ENSG00000178919; TAA
AAAAAAAAI

SEQ ID NO: 23649 - protein, 9 aa, Homo sapiens
  Table A; Target 23649; HLA-C*12:03; FOXE1; ENSG00000178919; TAA
AAAAAAAAI

SEQ ID NO: 23650 - protein, 10 aa, Homo sapiens
  Table A; Target 23650; HLA-A*25:01; FOXE1; ENSG00000178919; TAA
AAAAAAAAIF

SEQ ID NO: 23651 - protein, 10 aa, Homo sapiens
  Table A; Target 23651; HLA-A*26:01; FOXE1; ENSG00000178919; TAA
AAAAAAAAIF

SEQ ID NO: 23652 - protein, 10 aa, Homo sapiens
  Table A; Target 23652; HLA-A*30:02; FOXE1; ENSG00000178919; TAA
AAAAAAAAIF

SEQ ID NO: 23653 - protein, 10 aa, Homo sapiens
  Table A; Target 23653; HLA-B*15:01; FOXE1; ENSG00000178919; TAA
AAAAAAAAIF

SEQ ID NO: 23654 - protein, 10 aa, Homo sapiens
  Table A; Target 23654; HLA-B*15:03; FOXE1; ENSG00000178919; TAA
AAAAAAAAIF

SEQ ID NO: 23655 - protein, 10 aa, Homo sapiens
  Table A; Target 23655; HLA-B*27:02; FOXE1; ENSG00000178919; TAA
AAAAAAAAIF

SEQ ID NO: 23656 - protein, 10 aa, Homo sapiens
  Table A; Target 23656; HLA-B*35:01; FOXE1; ENSG00000178919; TAA
AAAAAAAAIF

SEQ ID NO: 23657 - protein, 10 aa, Homo sapiens
  Table A; Target 23657; HLA-B*39:01; FOXE1; ENSG00000178919; TAA
AAAAAAAAIF

SEQ ID NO: 23658 - protein, 10 aa, Homo sapiens
  Table A; Target 23658; HLA-B*46:01; FOXE1; ENSG00000178919; TAA
AAAAAAAAIF

SEQ ID NO: 23659 - protein, 10 aa, Homo sapiens
  Table A; Target 23659; HLA-B*58:01; FOXE1; ENSG00000178919; TAA
AAAAAAAAIF

SEQ ID NO: 23660 - protein, 10 aa, Homo sapiens
  Table A; Target 23660; HLA-C*01:02; FOXE1; ENSG00000178919; TAA
AAAAAAAAIF

SEQ ID NO: 23661 - protein, 10 aa, Homo sapiens
  Table A; Target 23661; HLA-C*02:02; FOXE1; ENSG00000178919; TAA
AAAAAAAAIF

SEQ ID NO: 23662 - protein, 10 aa, Homo sapiens
  Table A; Target 23662; HLA-C*03:03; FOXE1; ENSG00000178919; TAA
AAAAAAAAIF

SEQ ID NO: 23663 - protein, 10 aa, Homo sapiens
  Table A; Target 23663; HLA-C*03:04; FOXE1; ENSG00000178919; TAA
AAAAAAAAIF

SEQ ID NO: 23664 - protein, 10 aa, Homo sapiens
  Table A; Target 23664; HLA-C*07:04; FOXE1; ENSG00000178919; TAA
AAAAAAAAIF

SEQ ID NO: 23665 - protein, 10 aa, Homo sapiens
  Table A; Target 23665; HLA-C*07:06; FOXE1; ENSG00000178919; TAA
AAAAAAAAIF

SEQ ID NO: 23666 - protein, 10 aa, Homo sapiens
  Table A; Target 23666; HLA-C*12:03; FOXE1; ENSG00000178919; TAA
AAAAAAAAIF

SEQ ID NO: 23667 - protein, 10 aa, Homo sapiens
  Table A; Target 23667; HLA-C*16:04; FOXE1; ENSG00000178919; TAA
AAAAAAAAIF

SEQ ID NO: 23668 - protein, 8 aa, Homo sapiens
  Table A; Target 23668; HLA-B*46:01; FOXE1; ENSG00000178919; TAA
AAAAAAAI

SEQ ID NO: 23669 - protein, 8 aa, Homo sapiens
  Table A; Target 23669; HLA-B*51:01; FOXE1; ENSG00000178919; TAA
AAAAAAAI

SEQ ID NO: 23670 - protein, 8 aa, Homo sapiens
  Table A; Target 23670; HLA-C*03:03; FOXE1; ENSG00000178919; TAA
AAAAAAAI

SEQ ID NO: 23671 - protein, 9 aa, Homo sapiens
  Table A; Target 23671; HLA-A*23:01; FOXE1; ENSG00000178919; TAA
AAAAAAAIF

SEQ ID NO: 23672 - protein, 9 aa, Homo sapiens
  Table A; Target 23672; HLA-A*24:02; FOXE1; ENSG00000178919; TAA
AAAAAAAIF

SEQ ID NO: 23673 - protein, 9 aa, Homo sapiens
  Table A; Target 23673; HLA-A*25:01; FOXE1; ENSG00000178919; TAA
AAAAAAAIF

SEQ ID NO: 23674 - protein, 9 aa, Homo sapiens
  Table A; Target 23674; HLA-A*26:01; FOXE1; ENSG00000178919; TAA
AAAAAAAIF

SEQ ID NO: 23675 - protein, 9 aa, Homo sapiens
  Table A; Target 23675; HLA-A*30:02; FOXE1; ENSG00000178919; TAA
AAAAAAAIF

SEQ ID NO: 23676 - protein, 9 aa, Homo sapiens
  Table A; Target 23676; HLA-A*32:01; FOXE1; ENSG00000178919; TAA
AAAAAAAIF

SEQ ID NO: 23677 - protein, 9 aa, Homo sapiens
  Table A; Target 23677; HLA-B*07:02; FOXE1; ENSG00000178919; TAA
AAAAAAAIF

SEQ ID NO: 23678 - protein, 9 aa, Homo sapiens
  Table A; Target 23678; HLA-B*15:01; FOXE1; ENSG00000178919; TAA
AAAAAAAIF

SEQ ID NO: 23679 - protein, 9 aa, Homo sapiens
  Table A; Target 23679; HLA-B*15:03; FOXE1; ENSG00000178919; TAA
AAAAAAAIF

SEQ ID NO: 23680 - protein, 9 aa, Homo sapiens
  Table A; Target 23680; HLA-B*27:02; FOXE1; ENSG00000178919; TAA
AAAAAAAIF

SEQ ID NO: 23681 - protein, 9 aa, Homo sapiens
  Table A; Target 23681; HLA-B*27:05; FOXE1; ENSG00000178919; TAA
AAAAAAAIF

SEQ ID NO: 23682 - protein, 9 aa, Homo sapiens
  Table A; Target 23682; HLA-B*35:01; FOXE1; ENSG00000178919; TAA
AAAAAAAIF

SEQ ID NO: 23683 - protein, 9 aa, Homo sapiens
  Table A; Target 23683; HLA-B*35:03; FOXE1; ENSG00000178919; TAA
AAAAAAAIF

SEQ ID NO: 23684 - protein, 9 aa, Homo sapiens
  Table A; Target 23684; HLA-B*37:01; FOXE1; ENSG00000178919; TAA
AAAAAAAIF

SEQ ID NO: 23685 - protein, 9 aa, Homo sapiens
  Table A; Target 23685; HLA-B*38:01; FOXE1; ENSG00000178919; TAA
AAAAAAAIF

SEQ ID NO: 23686 - protein, 9 aa, Homo sapiens
  Table A; Target 23686; HLA-B*39:01; FOXE1; ENSG00000178919; TAA
AAAAAAAIF

SEQ ID NO: 23687 - protein, 9 aa, Homo sapiens
  Table A; Target 23687; HLA-B*44:02; FOXE1; ENSG00000178919; TAA
AAAAAAAIF

SEQ ID NO: 23688 - protein, 9 aa, Homo sapiens
  Table A; Target 23688; HLA-B*44:03; FOXE1; ENSG00000178919; TAA
AAAAAAAIF

SEQ ID NO: 23689 - protein, 9 aa, Homo sapiens
  Table A; Target 23689; HLA-B*46:01; FOXE1; ENSG00000178919; TAA
AAAAAAAIF

SEQ ID NO: 23690 - protein, 9 aa, Homo sapiens
  Table A; Target 23690; HLA-B*57:01; FOXE1; ENSG00000178919; TAA
AAAAAAAIF

SEQ ID NO: 23691 - protein, 9 aa, Homo sapiens
  Table A; Target 23691; HLA-B*58:01; FOXE1; ENSG00000178919; TAA
AAAAAAAIF

SEQ ID NO: 23692 - protein, 9 aa, Homo sapiens
  Table A; Target 23692; HLA-C*01:02; FOXE1; ENSG00000178919; TAA
AAAAAAAIF

SEQ ID NO: 23693 - protein, 9 aa, Homo sapiens
  Table A; Target 23693; HLA-C*02:02; FOXE1; ENSG00000178919; TAA
AAAAAAAIF

SEQ ID NO: 23694 - protein, 9 aa, Homo sapiens
  Table A; Target 23694; HLA-C*03:03; FOXE1; ENSG00000178919; TAA
AAAAAAAIF

SEQ ID NO: 23695 - protein, 9 aa, Homo sapiens
  Table A; Target 23695; HLA-C*03:04; FOXE1; ENSG00000178919; TAA
AAAAAAAIF

SEQ ID NO: 23696 - protein, 9 aa, Homo sapiens
  Table A; Target 23696; HLA-C*04:01; FOXE1; ENSG00000178919; TAA
AAAAAAAIF

SEQ ID NO: 23697 - protein, 9 aa, Homo sapiens
  Table A; Target 23697; HLA-C*05:01; FOXE1; ENSG00000178919; TAA
AAAAAAAIF

SEQ ID NO: 23698 - protein, 9 aa, Homo sapiens
  Table A; Target 23698; HLA-C*07:04; FOXE1; ENSG00000178919; TAA
AAAAAAAIF

SEQ ID NO: 23699 - protein, 9 aa, Homo sapiens
  Table A; Target 23699; HLA-C*07:06; FOXE1; ENSG00000178919; TAA
AAAAAAAIF

SEQ ID NO: 23700 - protein, 9 aa, Homo sapiens
  Table A; Target 23700; HLA-C*12:03; FOXE1; ENSG00000178919; TAA
AAAAAAAIF

SEQ ID NO: 23701 - protein, 9 aa, Homo sapiens
  Table A; Target 23701; HLA-C*14:02; FOXE1; ENSG00000178919; TAA
AAAAAAAIF

SEQ ID NO: 23702 - protein, 9 aa, Homo sapiens
  Table A; Target 23702; HLA-C*16:01; FOXE1; ENSG00000178919; TAA
AAAAAAAIF

SEQ ID NO: 23703 - protein, 9 aa, Homo sapiens
  Table A; Target 23703; HLA-C*16:02; FOXE1; ENSG00000178919; TAA
AAAAAAAIF

SEQ ID NO: 23704 - protein, 9 aa, Homo sapiens
  Table A; Target 23704; HLA-C*16:04; FOXE1; ENSG00000178919; TAA
AAAAAAAIF

SEQ ID NO: 23705 - protein, 8 aa, Homo sapiens
  Table A; Target 23705; HLA-B*15:01; FOXE1; ENSG00000178919; TAA
AAAAAAIF

SEQ ID NO: 23706 - protein, 8 aa, Homo sapiens
  Table A; Target 23706; HLA-B*15:03; FOXE1; ENSG00000178919; TAA
AAAAAAIF

SEQ ID NO: 23707 - protein, 8 aa, Homo sapiens
  Table A; Target 23707; HLA-B*35:01; FOXE1; ENSG00000178919; TAA
AAAAAAIF

SEQ ID NO: 23708 - protein, 8 aa, Homo sapiens
  Table A; Target 23708; HLA-B*46:01; FOXE1; ENSG00000178919; TAA
AAAAAAIF

SEQ ID NO: 23709 - protein, 8 aa, Homo sapiens
  Table A; Target 23709; HLA-B*58:01; FOXE1; ENSG00000178919; TAA
AAAAAAIF

SEQ ID NO: 23710 - protein, 8 aa, Homo sapiens
  Table A; Target 23710; HLA-C*02:02; FOXE1; ENSG00000178919; TAA
AAAAAAIF

SEQ ID NO: 23711 - protein, 8 aa, Homo sapiens
  Table A; Target 23711; HLA-C*03:03; FOXE1; ENSG00000178919; TAA
AAAAAAIF

SEQ ID NO: 23712 - protein, 8 aa, Homo sapiens
  Table A; Target 23712; HLA-C*03:04; FOXE1; ENSG00000178919; TAA
AAAAAAIF

SEQ ID NO: 23713 - protein, 8 aa, Homo sapiens
  Table A; Target 23713; HLA-C*12:03; FOXE1; ENSG00000178919; TAA
AAAAAAIF

SEQ ID NO: 23714 - protein, 8 aa, Homo sapiens
  Table A; Target 23714; HLA-C*14:02; FOXE1; ENSG00000178919; TAA
AAAAAAIF

SEQ ID NO: 23715 - protein, 8 aa, Homo sapiens
  Table A; Target 23715; HLA-C*16:01; FOXE1; ENSG00000178919; TAA
AAAAAAIF

SEQ ID NO: 23716 - protein, 11 aa, Homo sapiens
  Table A; Target 23716; HLA-B*56:01; FOXE1; ENSG00000178919; TAA
AAAAAAIFPGA

SEQ ID NO: 23717 - protein, 9 aa, Homo sapiens
  Table A; Target 23717; HLA-C*02:02; FOXE1; ENSG00000178919; TAA
AAAAAIFPG

SEQ ID NO: 23718 - protein, 9 aa, Homo sapiens
  Table A; Target 23718; HLA-C*12:03; FOXE1; ENSG00000178919; TAA
AAAAAIFPG

SEQ ID NO: 23719 - protein, 10 aa, Homo sapiens
  Table A; Target 23719; HLA-B*54:01; FOXE1; ENSG00000178919; TAA
AAAAAIFPGA

SEQ ID NO: 23720 - protein, 10 aa, Homo sapiens
  Table A; Target 23720; HLA-B*56:01; FOXE1; ENSG00000178919; TAA
AAAAAIFPGA

SEQ ID NO: 23721 - protein, 9 aa, Homo sapiens
  Table A; Target 23721; HLA-A*02:01; FOXE1; ENSG00000178919; TAA
AAAAIFPGA

SEQ ID NO: 23722 - protein, 9 aa, Homo sapiens
  Table A; Target 23722; HLA-A*02:03; FOXE1; ENSG00000178919; TAA
AAAAIFPGA

SEQ ID NO: 23723 - protein, 9 aa, Homo sapiens
  Table A; Target 23723; HLA-A*26:01; FOXE1; ENSG00000178919; TAA
AAAAIFPGA

SEQ ID NO: 23724 - protein, 9 aa, Homo sapiens
  Table A; Target 23724; HLA-A*30:01; FOXE1; ENSG00000178919; TAA
AAAAIFPGA

SEQ ID NO: 23725 - protein, 9 aa, Homo sapiens
  Table A; Target 23725; HLA-A*32:01; FOXE1; ENSG00000178919; TAA
AAAAIFPGA

SEQ ID NO: 23726 - protein, 9 aa, Homo sapiens
  Table A; Target 23726; HLA-A*68:02; FOXE1; ENSG00000178919; TAA
AAAAIFPGA

SEQ ID NO: 23727 - protein, 9 aa, Homo sapiens
  Table A; Target 23727; HLA-B*13:02; FOXE1; ENSG00000178919; TAA
AAAAIFPGA

SEQ ID NO: 23728 - protein, 9 aa, Homo sapiens
  Table A; Target 23728; HLA-B*27:05; FOXE1; ENSG00000178919; TAA
AAAAIFPGA

SEQ ID NO: 23729 - protein, 9 aa, Homo sapiens
  Table A; Target 23729; HLA-B*46:01; FOXE1; ENSG00000178919; TAA
AAAAIFPGA

SEQ ID NO: 23730 - protein, 9 aa, Homo sapiens
  Table A; Target 23730; HLA-B*54:01; FOXE1; ENSG00000178919; TAA
AAAAIFPGA

SEQ ID NO: 23731 - protein, 9 aa, Homo sapiens
  Table A; Target 23731; HLA-B*55:01; FOXE1; ENSG00000178919; TAA
AAAAIFPGA

SEQ ID NO: 23732 - protein, 9 aa, Homo sapiens
  Table A; Target 23732; HLA-B*56:01; FOXE1; ENSG00000178919; TAA
AAAAIFPGA

SEQ ID NO: 23733 - protein, 9 aa, Homo sapiens
  Table A; Target 23733; HLA-B*58:01; FOXE1; ENSG00000178919; TAA
AAAAIFPGA

SEQ ID NO: 23734 - protein, 9 aa, Homo sapiens
  Table A; Target 23734; HLA-C*02:02; FOXE1; ENSG00000178919; TAA
AAAAIFPGA

SEQ ID NO: 23735 - protein, 9 aa, Homo sapiens
  Table A; Target 23735; HLA-C*03:03; FOXE1; ENSG00000178919; TAA
AAAAIFPGA

SEQ ID NO: 23736 - protein, 9 aa, Homo sapiens
  Table A; Target 23736; HLA-C*03:04; FOXE1; ENSG00000178919; TAA
AAAAIFPGA

SEQ ID NO: 23737 - protein, 9 aa, Homo sapiens
  Table A; Target 23737; HLA-C*06:02; FOXE1; ENSG00000178919; TAA
AAAAIFPGA

SEQ ID NO: 23738 - protein, 9 aa, Homo sapiens
  Table A; Target 23738; HLA-C*12:03; FOXE1; ENSG00000178919; TAA
AAAAIFPGA

SEQ ID NO: 23739 - protein, 9 aa, Homo sapiens
  Table A; Target 23739; HLA-C*16:01; FOXE1; ENSG00000178919; TAA
AAAAIFPGA

SEQ ID NO: 23740 - protein, 9 aa, Homo sapiens
  Table A; Target 23740; HLA-C*16:02; FOXE1; ENSG00000178919; TAA
AAAAIFPGA

SEQ ID NO: 23741 - protein, 9 aa, Homo sapiens
  Table A; Target 23741; HLA-C*16:04; FOXE1; ENSG00000178919; TAA
AAAAIFPGA

SEQ ID NO: 23742 - protein, 9 aa, Homo sapiens
  Table A; Target 23742; HLA-A*32:01; FOXE1; ENSG00000178919; TAA
AAAGRLAGP

SEQ ID NO: 23743 - protein, 9 aa, Homo sapiens
  Table A; Target 23743; HLA-C*06:02; FOXE1; ENSG00000178919; TAA
AAAGRLAGP

SEQ ID NO: 23744 - protein, 9 aa, Homo sapiens
  Table A; Target 23744; HLA-C*16:01; FOXE1; ENSG00000178919; TAA
AAAGRLAGP

SEQ ID NO: 23745 - protein, 9 aa, Homo sapiens
  Table A; Target 23745; HLA-C*16:02; FOXE1; ENSG00000178919; TAA
AAAGRLAGP

SEQ ID NO: 23746 - protein, 8 aa, Homo sapiens
  Table A; Target 23746; HLA-B*54:01; FOXE1; ENSG00000178919; TAA
AAAIFPGA

SEQ ID NO: 23747 - protein, 8 aa, Homo sapiens
  Table A; Target 23747; HLA-B*56:01; FOXE1; ENSG00000178919; TAA
AAAIFPGA

SEQ ID NO: 23748 - protein, 9 aa, Homo sapiens
  Table A; Target 23748; HLA-A*02:03; FOXE1; ENSG00000178919; TAA
AAAIFPGAV

SEQ ID NO: 23749 - protein, 9 aa, Homo sapiens
  Table A; Target 23749; HLA-A*68:02; FOXE1; ENSG00000178919; TAA
AAAIFPGAV

SEQ ID NO: 23750 - protein, 9 aa, Homo sapiens
  Table A; Target 23750; HLA-B*13:02; FOXE1; ENSG00000178919; TAA
AAAIFPGAV

SEQ ID NO: 23751 - protein, 9 aa, Homo sapiens
  Table A; Target 23751; HLA-B*39:01; FOXE1; ENSG00000178919; TAA
AAAIFPGAV

SEQ ID NO: 23752 - protein, 9 aa, Homo sapiens
  Table A; Target 23752; HLA-B*56:01; FOXE1; ENSG00000178919; TAA
AAAIFPGAV

SEQ ID NO: 23753 - protein, 9 aa, Homo sapiens
  Table A; Target 23753; HLA-C*02:02; FOXE1; ENSG00000178919; TAA
AAAIFPGAV

SEQ ID NO: 23754 - protein, 9 aa, Homo sapiens
  Table A; Target 23754; HLA-C*06:02; FOXE1; ENSG00000178919; TAA
AAAIFPGAV

SEQ ID NO: 23755 - protein, 9 aa, Homo sapiens
  Table A; Target 23755; HLA-C*12:03; FOXE1; ENSG00000178919; TAA
AAAIFPGAV

SEQ ID NO: 23756 - protein, 9 aa, Homo sapiens
  Table A; Target 23756; HLA-C*16:01; FOXE1; ENSG00000178919; TAA
AAAIFPGAV

SEQ ID NO: 23757 - protein, 9 aa, Homo sapiens
  Table A; Target 23757; HLA-C*16:02; FOXE1; ENSG00000178919; TAA
AAAIFPGAV

SEQ ID NO: 23758 - protein, 9 aa, Homo sapiens
  Table A; Target 23758; HLA-C*16:04; FOXE1; ENSG00000178919; TAA
AAAIFPGAV

SEQ ID NO: 23759 - protein, 11 aa, Homo sapiens
  Table A; Target 23759; HLA-B*54:01; FOXE1; ENSG00000178919; TAA
AAAIFPGAVPA

SEQ ID NO: 23760 - protein, 9 aa, Homo sapiens
  Table A; Target 23760; HLA-B*39:01; FOXE1; ENSG00000178919; TAA
AAAYAGPDG

SEQ ID NO: 23761 - protein, 11 aa, Homo sapiens
  Table A; Target 23761; HLA-A*01:01; FOXE1; ENSG00000178919; TAA
AAAYAGPDGAY

SEQ ID NO: 23762 - protein, 11 aa, Homo sapiens
  Table A; Target 23762; HLA-A*30:02; FOXE1; ENSG00000178919; TAA
AAAYAGPDGAY

SEQ ID NO: 23763 - protein, 11 aa, Homo sapiens
  Table A; Target 23763; HLA-B*15:01; FOXE1; ENSG00000178919; TAA
AAAYAGPDGAY

SEQ ID NO: 23764 - protein, 11 aa, Homo sapiens
  Table A; Target 23764; HLA-B*27:05; FOXE1; ENSG00000178919; TAA
AAAYAGPDGAY

SEQ ID NO: 23765 - protein, 11 aa, Homo sapiens
  Table A; Target 23765; HLA-B*35:01; FOXE1; ENSG00000178919; TAA
AAAYAGPDGAY

SEQ ID NO: 23766 - protein, 11 aa, Homo sapiens
  Table A; Target 23766; HLA-B*39:01; FOXE1; ENSG00000178919; TAA
AAAYAGPDGAY

SEQ ID NO: 23767 - protein, 11 aa, Homo sapiens
  Table A; Target 23767; HLA-B*46:01; FOXE1; ENSG00000178919; TAA
AAAYAGPDGAY

SEQ ID NO: 23768 - protein, 11 aa, Homo sapiens
  Table A; Target 23768; HLA-B*58:01; FOXE1; ENSG00000178919; TAA
AAAYAGPDGAY

SEQ ID NO: 23769 - protein, 11 aa, Homo sapiens
  Table A; Target 23769; HLA-C*03:03; FOXE1; ENSG00000178919; TAA
AAAYAGPDGAY

SEQ ID NO: 23770 - protein, 11 aa, Homo sapiens
  Table A; Target 23770; HLA-C*06:02; FOXE1; ENSG00000178919; TAA
AAAYAGPDGAY

SEQ ID NO: 23771 - protein, 11 aa, Homo sapiens
  Table A; Target 23771; HLA-C*16:02; FOXE1; ENSG00000178919; TAA
AAAYAGPDGAY

SEQ ID NO: 23772 - protein, 11 aa, Homo sapiens
  Table A; Target 23772; HLA-C*16:04; FOXE1; ENSG00000178919; TAA
AAAYAGPDGAY

SEQ ID NO: 23773 - protein, 10 aa, Homo sapiens
  Table A; Target 23773; HLA-A*68:01; FOXE1; ENSG00000178919; TAA
AAAYPGGIDR

SEQ ID NO: 23774 - protein, 10 aa, Homo sapiens
  Table A; Target 23774; HLA-C*07:06; FOXE1; ENSG00000178919; TAA
AAAYPGGIDR

SEQ ID NO: 23775 - protein, 11 aa, Homo sapiens
  Table A; Target 23775; HLA-C*16:01; FOXE1; ENSG00000178919; TAA
AAAYPGGIDRF

SEQ ID NO: 23776 - protein, 11 aa, Homo sapiens
  Table A; Target 23776; HLA-C*16:04; FOXE1; ENSG00000178919; TAA
AAAYPGGIDRF

SEQ ID NO: 23777 - protein, 8 aa, Homo sapiens
  Table A; Target 23777; HLA-C*12:03; FOXE1; ENSG00000178919; TAA
AAIFPGAV

SEQ ID NO: 23778 - protein, 8 aa, Homo sapiens
  Table A; Target 23778; HLA-C*16:04; FOXE1; ENSG00000178919; TAA
AAIFPGAV

SEQ ID NO: 23779 - protein, 9 aa, Homo sapiens
  Table A; Target 23779; HLA-B*15:01; FOXE1; ENSG00000178919; TAA
AAIFPGAVP

SEQ ID NO: 23780 - protein, 9 aa, Homo sapiens
  Table A; Target 23780; HLA-B*40:02; FOXE1; ENSG00000178919; TAA
AAIFPGAVP

SEQ ID NO: 23781 - protein, 9 aa, Homo sapiens
  Table A; Target 23781; HLA-B*46:01; FOXE1; ENSG00000178919; TAA
AAIFPGAVP

SEQ ID NO: 23782 - protein, 9 aa, Homo sapiens
  Table A; Target 23782; HLA-B*56:01; FOXE1; ENSG00000178919; TAA
AAIFPGAVP

SEQ ID NO: 23783 - protein, 9 aa, Homo sapiens
  Table A; Target 23783; HLA-C*03:03; FOXE1; ENSG00000178919; TAA
AAIFPGAVP

SEQ ID NO: 23784 - protein, 9 aa, Homo sapiens
  Table A; Target 23784; HLA-C*03:04; FOXE1; ENSG00000178919; TAA
AAIFPGAVP

SEQ ID NO: 23785 - protein, 10 aa, Homo sapiens
  Table A; Target 23785; HLA-B*46:01; FOXE1; ENSG00000178919; TAA
AAIFPGAVPA

SEQ ID NO: 23786 - protein, 10 aa, Homo sapiens
  Table A; Target 23786; HLA-B*54:01; FOXE1; ENSG00000178919; TAA
AAIFPGAVPA

SEQ ID NO: 23787 - protein, 10 aa, Homo sapiens
  Table A; Target 23787; HLA-B*56:01; FOXE1; ENSG00000178919; TAA
AAIFPGAVPA

SEQ ID NO: 23788 - protein, 10 aa, Homo sapiens
  Table A; Target 23788; HLA-C*01:02; FOXE1; ENSG00000178919; TAA
AAIFPGAVPA

SEQ ID NO: 23789 - protein, 10 aa, Homo sapiens
  Table A; Target 23789; HLA-C*02:02; FOXE1; ENSG00000178919; TAA
AAIFPGAVPA

SEQ ID NO: 23790 - protein, 10 aa, Homo sapiens
  Table A; Target 23790; HLA-C*03:03; FOXE1; ENSG00000178919; TAA
AAIFPGAVPA

SEQ ID NO: 23791 - protein, 10 aa, Homo sapiens
  Table A; Target 23791; HLA-C*03:04; FOXE1; ENSG00000178919; TAA
AAIFPGAVPA

SEQ ID NO: 23792 - protein, 10 aa, Homo sapiens
  Table A; Target 23792; HLA-C*07:06; FOXE1; ENSG00000178919; TAA
AAIFPGAVPA

SEQ ID NO: 23793 - protein, 10 aa, Homo sapiens
  Table A; Target 23793; HLA-C*12:03; FOXE1; ENSG00000178919; TAA
AAIFPGAVPA

SEQ ID NO: 23794 - protein, 11 aa, Homo sapiens
  Table A; Target 23794; HLA-B*54:01; FOXE1; ENSG00000178919; TAA
AAIFPGAVPAA

SEQ ID NO: 23795 - protein, 11 aa, Homo sapiens
  Table A; Target 23795; HLA-B*56:01; FOXE1; ENSG00000178919; TAA
AAIFPGAVPAA

SEQ ID NO: 23796 - protein, 8 aa, Homo sapiens
  Table A; Target 23796; HLA-B*39:01; FOXE1; ENSG00000178919; TAA
AAPPPVYY

SEQ ID NO: 23797 - protein, 8 aa, Homo sapiens
  Table A; Target 23797; HLA-C*01:02; FOXE1; ENSG00000178919; TAA
AAPPPVYY

SEQ ID NO: 23798 - protein, 8 aa, Homo sapiens
  Table A; Target 23798; HLA-C*02:02; FOXE1; ENSG00000178919; TAA
AAPPPVYY

SEQ ID NO: 23799 - protein, 8 aa, Homo sapiens
  Table A; Target 23799; HLA-C*04:01; FOXE1; ENSG00000178919; TAA
AAPPPVYY

SEQ ID NO: 23800 - protein, 8 aa, Homo sapiens
  Table A; Target 23800; HLA-C*12:03; FOXE1; ENSG00000178919; TAA
AAPPPVYY

SEQ ID NO: 23801 - protein, 8 aa, Homo sapiens
  Table A; Target 23801; HLA-C*16:01; FOXE1; ENSG00000178919; TAA
AAPPPVYY

SEQ ID NO: 23802 - protein, 8 aa, Homo sapiens
  Table A; Target 23802; HLA-C*16:02; FOXE1; ENSG00000178919; TAA
AAPPPVYY

SEQ ID NO: 23803 - protein, 9 aa, Homo sapiens
  Table A; Target 23803; HLA-A*02:07; FOXE1; ENSG00000178919; TAA
AAPPPVYYP

SEQ ID NO: 23804 - protein, 9 aa, Homo sapiens
  Table A; Target 23804; HLA-C*06:02; FOXE1; ENSG00000178919; TAA
AAPPPVYYP

SEQ ID NO: 23805 - protein, 9 aa, Homo sapiens
  Table A; Target 23805; HLA-C*12:03; FOXE1; ENSG00000178919; TAA
AAPPPVYYP

SEQ ID NO: 23806 - protein, 10 aa, Homo sapiens
  Table A; Target 23806; HLA-A*02:07; FOXE1; ENSG00000178919; TAA
AAPPPVYYPA

SEQ ID NO: 23807 - protein, 10 aa, Homo sapiens
  Table A; Target 23807; HLA-B*54:01; FOXE1; ENSG00000178919; TAA
AAPPPVYYPA

SEQ ID NO: 23808 - protein, 10 aa, Homo sapiens
  Table A; Target 23808; HLA-B*56:01; FOXE1; ENSG00000178919; TAA
AAPPPVYYPA

SEQ ID NO: 23809 - protein, 9 aa, Homo sapiens
  Table A; Target 23809; HLA-B*07:02; FOXE1; ENSG00000178919; TAA
AARPPYPGA

SEQ ID NO: 23810 - protein, 9 aa, Homo sapiens
  Table A; Target 23810; HLA-B*54:01; FOXE1; ENSG00000178919; TAA
AARPPYPGA

SEQ ID NO: 23811 - protein, 9 aa, Homo sapiens
  Table A; Target 23811; HLA-B*56:01; FOXE1; ENSG00000178919; TAA
AARPPYPGA

SEQ ID NO: 23812 - protein, 11 aa, Homo sapiens
  Table A; Target 23812; HLA-A*29:02; FOXE1; ENSG00000178919; TAA
AARPPYPGAVY

SEQ ID NO: 23813 - protein, 11 aa, Homo sapiens
  Table A; Target 23813; HLA-A*30:02; FOXE1; ENSG00000178919; TAA
AARPPYPGAVY

SEQ ID NO: 23814 - protein, 11 aa, Homo sapiens
  Table A; Target 23814; HLA-A*31:01; FOXE1; ENSG00000178919; TAA
AARPPYPGAVY

SEQ ID NO: 23815 - protein, 11 aa, Homo sapiens
  Table A; Target 23815; HLA-B*15:01; FOXE1; ENSG00000178919; TAA
AARPPYPGAVY

SEQ ID NO: 23816 - protein, 11 aa, Homo sapiens
  Table A; Target 23816; HLA-B*15:03; FOXE1; ENSG00000178919; TAA
AARPPYPGAVY

SEQ ID NO: 23817 - protein, 11 aa, Homo sapiens
  Table A; Target 23817; HLA-B*46:01; FOXE1; ENSG00000178919; TAA
AARPPYPGAVY

SEQ ID NO: 23818 - protein, 11 aa, Homo sapiens
  Table A; Target 23818; HLA-B*57:01; FOXE1; ENSG00000178919; TAA
AARPPYPGAVY

SEQ ID NO: 23819 - protein, 11 aa, Homo sapiens
  Table A; Target 23819; HLA-C*16:01; FOXE1; ENSG00000178919; TAA
AARPPYPGAVY

SEQ ID NO: 23820 - protein, 9 aa, Homo sapiens
  Table A; Target 23820; HLA-C*02:02; FOXE1; ENSG00000178919; TAA
AASPGPCRV

SEQ ID NO: 23821 - protein, 9 aa, Homo sapiens
  Table A; Target 23821; HLA-C*16:02; FOXE1; ENSG00000178919; TAA
AASPGPCRV

SEQ ID NO: 23822 - protein, 10 aa, Homo sapiens
  Table A; Target 23822; HLA-A*30:02; FOXE1; ENSG00000178919; TAA
AASPGPCRVF

SEQ ID NO: 23823 - protein, 10 aa, Homo sapiens
  Table A; Target 23823; HLA-A*32:01; FOXE1; ENSG00000178919; TAA
AASPGPCRVF

SEQ ID NO: 23824 - protein, 10 aa, Homo sapiens
  Table A; Target 23824; HLA-B*46:01; FOXE1; ENSG00000178919; TAA
AASPGPCRVF

SEQ ID NO: 23825 - protein, 10 aa, Homo sapiens
  Table A; Target 23825; HLA-B*57:01; FOXE1; ENSG00000178919; TAA
AASPGPCRVF

SEQ ID NO: 23826 - protein, 10 aa, Homo sapiens
  Table A; Target 23826; HLA-B*58:01; FOXE1; ENSG00000178919; TAA
AASPGPCRVF

SEQ ID NO: 23827 - protein, 10 aa, Homo sapiens
  Table A; Target 23827; HLA-C*02:02; FOXE1; ENSG00000178919; TAA
AASPGPCRVF

SEQ ID NO: 23828 - protein, 10 aa, Homo sapiens
  Table A; Target 23828; HLA-C*12:03; FOXE1; ENSG00000178919; TAA
AASPGPCRVF

SEQ ID NO: 23829 - protein, 10 aa, Homo sapiens
  Table A; Target 23829; HLA-C*16:01; FOXE1; ENSG00000178919; TAA
AASPGPCRVF

SEQ ID NO: 23830 - protein, 10 aa, Homo sapiens
  Table A; Target 23830; HLA-C*16:02; FOXE1; ENSG00000178919; TAA
AASPGPCRVF

SEQ ID NO: 23831 - protein, 9 aa, Homo sapiens
  Table A; Target 23831; HLA-B*56:01; FOXE1; ENSG00000178919; TAA
AAYAGPDGA

SEQ ID NO: 23832 - protein, 10 aa, Homo sapiens
  Table A; Target 23832; HLA-A*01:01; FOXE1; ENSG00000178919; TAA
AAYAGPDGAY

SEQ ID NO: 23833 - protein, 10 aa, Homo sapiens
  Table A; Target 23833; HLA-A*03:01; FOXE1; ENSG00000178919; TAA
AAYAGPDGAY

SEQ ID NO: 23834 - protein, 10 aa, Homo sapiens
  Table A; Target 23834; HLA-A*11:01; FOXE1; ENSG00000178919; TAA
AAYAGPDGAY

SEQ ID NO: 23835 - protein, 10 aa, Homo sapiens
  Table A; Target 23835; HLA-A*25:01; FOXE1; ENSG00000178919; TAA
AAYAGPDGAY

SEQ ID NO: 23836 - protein, 10 aa, Homo sapiens
  Table A; Target 23836; HLA-A*26:01; FOXE1; ENSG00000178919; TAA
AAYAGPDGAY

SEQ ID NO: 23837 - protein, 10 aa, Homo sapiens
  Table A; Target 23837; HLA-A*29:02; FOXE1; ENSG00000178919; TAA
AAYAGPDGAY

SEQ ID NO: 23838 - protein, 10 aa, Homo sapiens
  Table A; Target 23838; HLA-A*30:02; FOXE1; ENSG00000178919; TAA
AAYAGPDGAY

SEQ ID NO: 23839 - protein, 10 aa, Homo sapiens
  Table A; Target 23839; HLA-A*32:01; FOXE1; ENSG00000178919; TAA
AAYAGPDGAY

SEQ ID NO: 23840 - protein, 10 aa, Homo sapiens
  Table A; Target 23840; HLA-B*15:01; FOXE1; ENSG00000178919; TAA
AAYAGPDGAY

SEQ ID NO: 23841 - protein, 10 aa, Homo sapiens
  Table A; Target 23841; HLA-B*15:03; FOXE1; ENSG00000178919; TAA
AAYAGPDGAY

SEQ ID NO: 23842 - protein, 10 aa, Homo sapiens
  Table A; Target 23842; HLA-B*27:05; FOXE1; ENSG00000178919; TAA
AAYAGPDGAY

SEQ ID NO: 23843 - protein, 10 aa, Homo sapiens
  Table A; Target 23843; HLA-B*35:01; FOXE1; ENSG00000178919; TAA
AAYAGPDGAY

SEQ ID NO: 23844 - protein, 10 aa, Homo sapiens
  Table A; Target 23844; HLA-B*39:01; FOXE1; ENSG00000178919; TAA
AAYAGPDGAY

SEQ ID NO: 23845 - protein, 10 aa, Homo sapiens
  Table A; Target 23845; HLA-B*46:01; FOXE1; ENSG00000178919; TAA
AAYAGPDGAY

SEQ ID NO: 23846 - protein, 10 aa, Homo sapiens
  Table A; Target 23846; HLA-B*55:01; FOXE1; ENSG00000178919; TAA
AAYAGPDGAY

SEQ ID NO: 23847 - protein, 10 aa, Homo sapiens
  Table A; Target 23847; HLA-B*58:01; FOXE1; ENSG00000178919; TAA
AAYAGPDGAY

SEQ ID NO: 23848 - protein, 10 aa, Homo sapiens
  Table A; Target 23848; HLA-C*01:02; FOXE1; ENSG00000178919; TAA
AAYAGPDGAY

SEQ ID NO: 23849 - protein, 10 aa, Homo sapiens
  Table A; Target 23849; HLA-C*02:02; FOXE1; ENSG00000178919; TAA
AAYAGPDGAY

SEQ ID NO: 23850 - protein, 10 aa, Homo sapiens
  Table A; Target 23850; HLA-C*03:03; FOXE1; ENSG00000178919; TAA
AAYAGPDGAY

SEQ ID NO: 23851 - protein, 10 aa, Homo sapiens
  Table A; Target 23851; HLA-C*03:04; FOXE1; ENSG00000178919; TAA
AAYAGPDGAY

SEQ ID NO: 23852 - protein, 10 aa, Homo sapiens
  Table A; Target 23852; HLA-C*04:01; FOXE1; ENSG00000178919; TAA
AAYAGPDGAY

SEQ ID NO: 23853 - protein, 10 aa, Homo sapiens
  Table A; Target 23853; HLA-C*05:01; FOXE1; ENSG00000178919; TAA
AAYAGPDGAY

SEQ ID NO: 23854 - protein, 10 aa, Homo sapiens
  Table A; Target 23854; HLA-C*07:04; FOXE1; ENSG00000178919; TAA
AAYAGPDGAY

SEQ ID NO: 23855 - protein, 10 aa, Homo sapiens
  Table A; Target 23855; HLA-C*12:03; FOXE1; ENSG00000178919; TAA
AAYAGPDGAY

SEQ ID NO: 23856 - protein, 10 aa, Homo sapiens
  Table A; Target 23856; HLA-C*14:02; FOXE1; ENSG00000178919; TAA
AAYAGPDGAY

SEQ ID NO: 23857 - protein, 10 aa, Homo sapiens
  Table A; Target 23857; HLA-C*16:01; FOXE1; ENSG00000178919; TAA
AAYAGPDGAY

SEQ ID NO: 23858 - protein, 10 aa, Homo sapiens
  Table A; Target 23858; HLA-C*16:02; FOXE1; ENSG00000178919; TAA
AAYAGPDGAY

SEQ ID NO: 23859 - protein, 10 aa, Homo sapiens
  Table A; Target 23859; HLA-C*16:04; FOXE1; ENSG00000178919; TAA
AAYAGPDGAY

SEQ ID NO: 23860 - protein, 11 aa, Homo sapiens
  Table A; Target 23860; HLA-B*27:05; FOXE1; ENSG00000178919; TAA
AAYAGPDGAYP

SEQ ID NO: 23861 - protein, 11 aa, Homo sapiens
  Table A; Target 23861; HLA-C*06:02; FOXE1; ENSG00000178919; TAA
AAYAGPDGAYP

SEQ ID NO: 23862 - protein, 11 aa, Homo sapiens
  Table A; Target 23862; HLA-C*16:04; FOXE1; ENSG00000178919; TAA
AAYAGPDGAYP

SEQ ID NO: 23863 - protein, 9 aa, Homo sapiens
  Table A; Target 23863; HLA-A*03:01; FOXE1; ENSG00000178919; TAA
AAYPGGIDR

SEQ ID NO: 23864 - protein, 9 aa, Homo sapiens
  Table A; Target 23864; HLA-A*03:02; FOXE1; ENSG00000178919; TAA
AAYPGGIDR

SEQ ID NO: 23865 - protein, 9 aa, Homo sapiens
  Table A; Target 23865; HLA-A*11:01; FOXE1; ENSG00000178919; TAA
AAYPGGIDR

SEQ ID NO: 23866 - protein, 9 aa, Homo sapiens
  Table A; Target 23866; HLA-A*31:01; FOXE1; ENSG00000178919; TAA
AAYPGGIDR

SEQ ID NO: 23867 - protein, 9 aa, Homo sapiens
  Table A; Target 23867; HLA-A*33:01; FOXE1; ENSG00000178919; TAA
AAYPGGIDR

SEQ ID NO: 23868 - protein, 9 aa, Homo sapiens
  Table A; Target 23868; HLA-A*33:03; FOXE1; ENSG00000178919; TAA
AAYPGGIDR

SEQ ID NO: 23869 - protein, 9 aa, Homo sapiens
  Table A; Target 23869; HLA-A*68:01; FOXE1; ENSG00000178919; TAA
AAYPGGIDR

SEQ ID NO: 23870 - protein, 9 aa, Homo sapiens
  Table A; Target 23870; HLA-B*27:05; FOXE1; ENSG00000178919; TAA
AAYPGGIDR

SEQ ID NO: 23871 - protein, 9 aa, Homo sapiens
  Table A; Target 23871; HLA-B*46:01; FOXE1; ENSG00000178919; TAA
AAYPGGIDR

SEQ ID NO: 23872 - protein, 9 aa, Homo sapiens
  Table A; Target 23872; HLA-B*56:01; FOXE1; ENSG00000178919; TAA
AAYPGGIDR

SEQ ID NO: 23873 - protein, 9 aa, Homo sapiens
  Table A; Target 23873; HLA-B*57:01; FOXE1; ENSG00000178919; TAA
AAYPGGIDR

SEQ ID NO: 23874 - protein, 9 aa, Homo sapiens
  Table A; Target 23874; HLA-B*58:01; FOXE1; ENSG00000178919; TAA
AAYPGGIDR

SEQ ID NO: 23875 - protein, 9 aa, Homo sapiens
  Table A; Target 23875; HLA-C*01:02; FOXE1; ENSG00000178919; TAA
AAYPGGIDR

SEQ ID NO: 23876 - protein, 9 aa, Homo sapiens
  Table A; Target 23876; HLA-C*02:02; FOXE1; ENSG00000178919; TAA
AAYPGGIDR

SEQ ID NO: 23877 - protein, 9 aa, Homo sapiens
  Table A; Target 23877; HLA-C*03:03; FOXE1; ENSG00000178919; TAA
AAYPGGIDR

SEQ ID NO: 23878 - protein, 9 aa, Homo sapiens
  Table A; Target 23878; HLA-C*03:04; FOXE1; ENSG00000178919; TAA
AAYPGGIDR

SEQ ID NO: 23879 - protein, 9 aa, Homo sapiens
  Table A; Target 23879; HLA-C*05:01; FOXE1; ENSG00000178919; TAA
AAYPGGIDR

SEQ ID NO: 23880 - protein, 9 aa, Homo sapiens
  Table A; Target 23880; HLA-C*07:06; FOXE1; ENSG00000178919; TAA
AAYPGGIDR

SEQ ID NO: 23881 - protein, 9 aa, Homo sapiens
  Table A; Target 23881; HLA-C*12:03; FOXE1; ENSG00000178919; TAA
AAYPGGIDR

SEQ ID NO: 23882 - protein, 9 aa, Homo sapiens
  Table A; Target 23882; HLA-C*16:01; FOXE1; ENSG00000178919; TAA
AAYPGGIDR

SEQ ID NO: 23883 - protein, 9 aa, Homo sapiens
  Table A; Target 23883; HLA-C*16:02; FOXE1; ENSG00000178919; TAA
AAYPGGIDR

SEQ ID NO: 23884 - protein, 9 aa, Homo sapiens
  Table A; Target 23884; HLA-C*16:04; FOXE1; ENSG00000178919; TAA
AAYPGGIDR

SEQ ID NO: 23885 - protein, 10 aa, Homo sapiens
  Table A; Target 23885; HLA-A*02:01; FOXE1; ENSG00000178919; TAA
AAYPGGIDRF

SEQ ID NO: 23886 - protein, 10 aa, Homo sapiens
  Table A; Target 23886; HLA-A*02:03; FOXE1; ENSG00000178919; TAA
AAYPGGIDRF

SEQ ID NO: 23887 - protein, 10 aa, Homo sapiens
  Table A; Target 23887; HLA-A*02:04; FOXE1; ENSG00000178919; TAA
AAYPGGIDRF

SEQ ID NO: 23888 - protein, 10 aa, Homo sapiens
  Table A; Target 23888; HLA-A*03:01; FOXE1; ENSG00000178919; TAA
AAYPGGIDRF

SEQ ID NO: 23889 - protein, 10 aa, Homo sapiens
  Table A; Target 23889; HLA-A*03:02; FOXE1; ENSG00000178919; TAA
AAYPGGIDRF

SEQ ID NO: 23890 - protein, 10 aa, Homo sapiens
  Table A; Target 23890; HLA-A*11:01; FOXE1; ENSG00000178919; TAA
AAYPGGIDRF

SEQ ID NO: 23891 - protein, 10 aa, Homo sapiens
  Table A; Target 23891; HLA-A*23:01; FOXE1; ENSG00000178919; TAA
AAYPGGIDRF

SEQ ID NO: 23892 - protein, 10 aa, Homo sapiens
  Table A; Target 23892; HLA-A*24:02; FOXE1; ENSG00000178919; TAA
AAYPGGIDRF

SEQ ID NO: 23893 - protein, 10 aa, Homo sapiens
  Table A; Target 23893; HLA-A*25:01; FOXE1; ENSG00000178919; TAA
AAYPGGIDRF

SEQ ID NO: 23894 - protein, 10 aa, Homo sapiens
  Table A; Target 23894; HLA-A*26:01; FOXE1; ENSG00000178919; TAA
AAYPGGIDRF

SEQ ID NO: 23895 - protein, 10 aa, Homo sapiens
  Table A; Target 23895; HLA-A*29:02; FOXE1; ENSG00000178919; TAA
AAYPGGIDRF

SEQ ID NO: 23896 - protein, 10 aa, Homo sapiens
  Table A; Target 23896; HLA-A*30:02; FOXE1; ENSG00000178919; TAA
AAYPGGIDRF

SEQ ID NO: 23897 - protein, 10 aa, Homo sapiens
  Table A; Target 23897; HLA-A*31:01; FOXE1; ENSG00000178919; TAA
AAYPGGIDRF

SEQ ID NO: 23898 - protein, 10 aa, Homo sapiens
  Table A; Target 23898; HLA-A*32:01; FOXE1; ENSG00000178919; TAA
AAYPGGIDRF

SEQ ID NO: 23899 - protein, 10 aa, Homo sapiens
  Table A; Target 23899; HLA-A*68:01; FOXE1; ENSG00000178919; TAA
AAYPGGIDRF

SEQ ID NO: 23900 - protein, 10 aa, Homo sapiens
  Table A; Target 23900; HLA-A*68:02; FOXE1; ENSG00000178919; TAA
AAYPGGIDRF

SEQ ID NO: 23901 - protein, 10 aa, Homo sapiens
  Table A; Target 23901; HLA-B*13:02; FOXE1; ENSG00000178919; TAA
AAYPGGIDRF

SEQ ID NO: 23902 - protein, 10 aa, Homo sapiens
  Table A; Target 23902; HLA-B*15:01; FOXE1; ENSG00000178919; TAA
AAYPGGIDRF

SEQ ID NO: 23903 - protein, 10 aa, Homo sapiens
  Table A; Target 23903; HLA-B*15:03; FOXE1; ENSG00000178919; TAA
AAYPGGIDRF

SEQ ID NO: 23904 - protein, 10 aa, Homo sapiens
  Table A; Target 23904; HLA-B*27:02; FOXE1; ENSG00000178919; TAA
AAYPGGIDRF

SEQ ID NO: 23905 - protein, 10 aa, Homo sapiens
  Table A; Target 23905; HLA-B*27:05; FOXE1; ENSG00000178919; TAA
AAYPGGIDRF

SEQ ID NO: 23906 - protein, 10 aa, Homo sapiens
  Table A; Target 23906; HLA-B*35:01; FOXE1; ENSG00000178919; TAA
AAYPGGIDRF

SEQ ID NO: 23907 - protein, 10 aa, Homo sapiens
  Table A; Target 23907; HLA-B*38:01; FOXE1; ENSG00000178919; TAA
AAYPGGIDRF

SEQ ID NO: 23908 - protein, 10 aa, Homo sapiens
  Table A; Target 23908; HLA-B*44:02; FOXE1; ENSG00000178919; TAA
AAYPGGIDRF

SEQ ID NO: 23909 - protein, 10 aa, Homo sapiens
  Table A; Target 23909; HLA-B*44:03; FOXE1; ENSG00000178919; TAA
AAYPGGIDRF

SEQ ID NO: 23910 - protein, 10 aa, Homo sapiens
  Table A; Target 23910; HLA-B*46:01; FOXE1; ENSG00000178919; TAA
AAYPGGIDRF

SEQ ID NO: 23911 - protein, 10 aa, Homo sapiens
  Table A; Target 23911; HLA-B*55:01; FOXE1; ENSG00000178919; TAA
AAYPGGIDRF

SEQ ID NO: 23912 - protein, 10 aa, Homo sapiens
  Table A; Target 23912; HLA-B*57:01; FOXE1; ENSG00000178919; TAA
AAYPGGIDRF

SEQ ID NO: 23913 - protein, 10 aa, Homo sapiens
  Table A; Target 23913; HLA-B*58:01; FOXE1; ENSG00000178919; TAA
AAYPGGIDRF

SEQ ID NO: 23914 - protein, 10 aa, Homo sapiens
  Table A; Target 23914; HLA-C*01:02; FOXE1; ENSG00000178919; TAA
AAYPGGIDRF

SEQ ID NO: 23915 - protein, 10 aa, Homo sapiens
  Table A; Target 23915; HLA-C*02:02; FOXE1; ENSG00000178919; TAA
AAYPGGIDRF

SEQ ID NO: 23916 - protein, 10 aa, Homo sapiens
  Table A; Target 23916; HLA-C*03:03; FOXE1; ENSG00000178919; TAA
AAYPGGIDRF

SEQ ID NO: 23917 - protein, 10 aa, Homo sapiens
  Table A; Target 23917; HLA-C*03:04; FOXE1; ENSG00000178919; TAA
AAYPGGIDRF

SEQ ID NO: 23918 - protein, 10 aa, Homo sapiens
  Table A; Target 23918; HLA-C*05:01; FOXE1; ENSG00000178919; TAA
AAYPGGIDRF

SEQ ID NO: 23919 - protein, 10 aa, Homo sapiens
  Table A; Target 23919; HLA-C*07:04; FOXE1; ENSG00000178919; TAA
AAYPGGIDRF

SEQ ID NO: 23920 - protein, 10 aa, Homo sapiens
  Table A; Target 23920; HLA-C*07:06; FOXE1; ENSG00000178919; TAA
AAYPGGIDRF

SEQ ID NO: 23921 - protein, 10 aa, Homo sapiens
  Table A; Target 23921; HLA-C*12:03; FOXE1; ENSG00000178919; TAA
AAYPGGIDRF

SEQ ID NO: 23922 - protein, 10 aa, Homo sapiens
  Table A; Target 23922; HLA-C*16:01; FOXE1; ENSG00000178919; TAA
AAYPGGIDRF

SEQ ID NO: 23923 - protein, 10 aa, Homo sapiens
  Table A; Target 23923; HLA-C*16:02; FOXE1; ENSG00000178919; TAA
AAYPGGIDRF

SEQ ID NO: 23924 - protein, 10 aa, Homo sapiens
  Table A; Target 23924; HLA-C*16:04; FOXE1; ENSG00000178919; TAA
AAYPGGIDRF

SEQ ID NO: 23925 - protein, 11 aa, Homo sapiens
  Table A; Target 23925; HLA-A*02:01; FOXE1; ENSG00000178919; TAA
AAYPGGIDRFV

SEQ ID NO: 23926 - protein, 11 aa, Homo sapiens
  Table A; Target 23926; HLA-A*68:02; FOXE1; ENSG00000178919; TAA
AAYPGGIDRFV

SEQ ID NO: 23927 - protein, 11 aa, Homo sapiens
  Table A; Target 23927; HLA-C*12:03; FOXE1; ENSG00000178919; TAA
AAYPGGIDRFV

SEQ ID NO: 23928 - protein, 9 aa, Homo sapiens
  Table A; Target 23928; HLA-B*07:02; FOXE1; ENSG00000178919; TAA
ACYNPGGQL

SEQ ID NO: 23929 - protein, 9 aa, Homo sapiens
  Table A; Target 23929; HLA-B*15:03; FOXE1; ENSG00000178919; TAA
ACYNPGGQL

SEQ ID NO: 23930 - protein, 9 aa, Homo sapiens
  Table A; Target 23930; HLA-B*39:01; FOXE1; ENSG00000178919; TAA
ACYNPGGQL

SEQ ID NO: 23931 - protein, 9 aa, Homo sapiens
  Table A; Target 23931; HLA-B*40:02; FOXE1; ENSG00000178919; TAA
ACYNPGGQL

SEQ ID NO: 23932 - protein, 9 aa, Homo sapiens
  Table A; Target 23932; HLA-C*01:02; FOXE1; ENSG00000178919; TAA
ACYNPGGQL

SEQ ID NO: 23933 - protein, 9 aa, Homo sapiens
  Table A; Target 23933; HLA-C*03:03; FOXE1; ENSG00000178919; TAA
ACYNPGGQL

SEQ ID NO: 23934 - protein, 9 aa, Homo sapiens
  Table A; Target 23934; HLA-C*03:04; FOXE1; ENSG00000178919; TAA
ACYNPGGQL

SEQ ID NO: 23935 - protein, 9 aa, Homo sapiens
  Table A; Target 23935; HLA-C*05:01; FOXE1; ENSG00000178919; TAA
ACYNPGGQL

SEQ ID NO: 23936 - protein, 9 aa, Homo sapiens
  Table A; Target 23936; HLA-C*07:02; FOXE1; ENSG00000178919; TAA
ACYNPGGQL

SEQ ID NO: 23937 - protein, 9 aa, Homo sapiens
  Table A; Target 23937; HLA-C*14:02; FOXE1; ENSG00000178919; TAA
ACYNPGGQL

SEQ ID NO: 23938 - protein, 9 aa, Homo sapiens
  Table A; Target 23938; HLA-C*16:01; FOXE1; ENSG00000178919; TAA
ACYNPGGQL

SEQ ID NO: 23939 - protein, 10 aa, Homo sapiens
  Table A; Target 23939; HLA-A*30:01; FOXE1; ENSG00000178919; TAA
AEDMFESGSF

SEQ ID NO: 23940 - protein, 10 aa, Homo sapiens
  Table A; Target 23940; HLA-B*27:02; FOXE1; ENSG00000178919; TAA
AEDMFESGSF

SEQ ID NO: 23941 - protein, 10 aa, Homo sapiens
  Table A; Target 23941; HLA-B*37:01; FOXE1; ENSG00000178919; TAA
AEDMFESGSF

SEQ ID NO: 23942 - protein, 10 aa, Homo sapiens
  Table A; Target 23942; HLA-B*40:01; FOXE1; ENSG00000178919; TAA
AEDMFESGSF

SEQ ID NO: 23943 - protein, 10 aa, Homo sapiens
  Table A; Target 23943; HLA-B*44:02; FOXE1; ENSG00000178919; TAA
AEDMFESGSF

SEQ ID NO: 23944 - protein, 10 aa, Homo sapiens
  Table A; Target 23944; HLA-B*44:03; FOXE1; ENSG00000178919; TAA
AEDMFESGSF

SEQ ID NO: 23945 - protein, 10 aa, Homo sapiens
  Table A; Target 23945; HLA-B*49:01; FOXE1; ENSG00000178919; TAA
AEDMFESGSF

SEQ ID NO: 23946 - protein, 10 aa, Homo sapiens
  Table A; Target 23946; HLA-C*16:04; FOXE1; ENSG00000178919; TAA
AEDMFESGSF

SEQ ID NO: 23947 - protein, 11 aa, Homo sapiens
  Table A; Target 23947; HLA-B*40:01; FOXE1; ENSG00000178919; TAA
AEDMFESGSFL

SEQ ID NO: 23948 - protein, 11 aa, Homo sapiens
  Table A; Target 23948; HLA-B*49:01; FOXE1; ENSG00000178919; TAA
AEDMFESGSFL

SEQ ID NO: 23949 - protein, 10 aa, Homo sapiens
  Table A; Target 23949; HLA-B*27:05; FOXE1; ENSG00000178919; TAA
AESGPPPPQP

SEQ ID NO: 23950 - protein, 10 aa, Homo sapiens
  Table A; Target 23950; HLA-B*39:01; FOXE1; ENSG00000178919; TAA
AESGPPPPQP

SEQ ID NO: 23951 - protein, 11 aa, Homo sapiens
  Table A; Target 23951; HLA-B*39:01; FOXE1; ENSG00000178919; TAA
AESGPPPPQPE

SEQ ID NO: 23952 - protein, 9 aa, Homo sapiens
  Table A; Target 23952; HLA-C*14:02; FOXE1; ENSG00000178919; TAA
AFASAGAPA

SEQ ID NO: 23953 - protein, 10 aa, Homo sapiens
  Table A; Target 23953; HLA-A*01:01; FOXE1; ENSG00000178919; TAA
AGAPATTTGY

SEQ ID NO: 23954 - protein, 10 aa, Homo sapiens
  Table A; Target 23954; HLA-A*25:01; FOXE1; ENSG00000178919; TAA
AGAPATTTGY

SEQ ID NO: 23955 - protein, 10 aa, Homo sapiens
  Table A; Target 23955; HLA-A*26:01; FOXE1; ENSG00000178919; TAA
AGAPATTTGY

SEQ ID NO: 23956 - protein, 10 aa, Homo sapiens
  Table A; Target 23956; HLA-A*29:02; FOXE1; ENSG00000178919; TAA
AGAPATTTGY

SEQ ID NO: 23957 - protein, 10 aa, Homo sapiens
  Table A; Target 23957; HLA-A*30:02; FOXE1; ENSG00000178919; TAA
AGAPATTTGY

SEQ ID NO: 23958 - protein, 10 aa, Homo sapiens
  Table A; Target 23958; HLA-A*32:01; FOXE1; ENSG00000178919; TAA
AGAPATTTGY

SEQ ID NO: 23959 - protein, 10 aa, Homo sapiens
  Table A; Target 23959; HLA-B*15:01; FOXE1; ENSG00000178919; TAA
AGAPATTTGY

SEQ ID NO: 23960 - protein, 10 aa, Homo sapiens
  Table A; Target 23960; HLA-B*15:03; FOXE1; ENSG00000178919; TAA
AGAPATTTGY

SEQ ID NO: 23961 - protein, 10 aa, Homo sapiens
  Table A; Target 23961; HLA-B*27:02; FOXE1; ENSG00000178919; TAA
AGAPATTTGY

SEQ ID NO: 23962 - protein, 10 aa, Homo sapiens
  Table A; Target 23962; HLA-B*27:05; FOXE1; ENSG00000178919; TAA
AGAPATTTGY

SEQ ID NO: 23963 - protein, 10 aa, Homo sapiens
  Table A; Target 23963; HLA-B*39:01; FOXE1; ENSG00000178919; TAA
AGAPATTTGY

SEQ ID NO: 23964 - protein, 10 aa, Homo sapiens
  Table A; Target 23964; HLA-B*44:02; FOXE1; ENSG00000178919; TAA
AGAPATTTGY

SEQ ID NO: 23965 - protein, 10 aa, Homo sapiens
  Table A; Target 23965; HLA-B*44:03; FOXE1; ENSG00000178919; TAA
AGAPATTTGY

SEQ ID NO: 23966 - protein, 10 aa, Homo sapiens
  Table A; Target 23966; HLA-B*46:01; FOXE1; ENSG00000178919; TAA
AGAPATTTGY

SEQ ID NO: 23967 - protein, 10 aa, Homo sapiens
  Table A; Target 23967; HLA-B*58:01; FOXE1; ENSG00000178919; TAA
AGAPATTTGY

SEQ ID NO: 23968 - protein, 10 aa, Homo sapiens
  Table A; Target 23968; HLA-C*01:02; FOXE1; ENSG00000178919; TAA
AGAPATTTGY

SEQ ID NO: 23969 - protein, 10 aa, Homo sapiens
  Table A; Target 23969; HLA-C*02:02; FOXE1; ENSG00000178919; TAA
AGAPATTTGY

SEQ ID NO: 23970 - protein, 10 aa, Homo sapiens
  Table A; Target 23970; HLA-C*04:01; FOXE1; ENSG00000178919; TAA
AGAPATTTGY

SEQ ID NO: 23971 - protein, 10 aa, Homo sapiens
  Table A; Target 23971; HLA-C*07:01; FOXE1; ENSG00000178919; TAA
AGAPATTTGY

SEQ ID NO: 23972 - protein, 10 aa, Homo sapiens
  Table A; Target 23972; HLA-C*07:04; FOXE1; ENSG00000178919; TAA
AGAPATTTGY

SEQ ID NO: 23973 - protein, 10 aa, Homo sapiens
  Table A; Target 23973; HLA-C*12:03; FOXE1; ENSG00000178919; TAA
AGAPATTTGY

SEQ ID NO: 23974 - protein, 10 aa, Homo sapiens
  Table A; Target 23974; HLA-C*14:02; FOXE1; ENSG00000178919; TAA
AGAPATTTGY

SEQ ID NO: 23975 - protein, 10 aa, Homo sapiens
  Table A; Target 23975; HLA-C*16:01; FOXE1; ENSG00000178919; TAA
AGAPATTTGY

SEQ ID NO: 23976 - protein, 10 aa, Homo sapiens
  Table A; Target 23976; HLA-C*16:02; FOXE1; ENSG00000178919; TAA
AGAPATTTGY

SEQ ID NO: 23977 - protein, 10 aa, Homo sapiens
  Table A; Target 23977; HLA-C*16:04; FOXE1; ENSG00000178919; TAA
AGAPATTTGY

SEQ ID NO: 23978 - protein, 11 aa, Homo sapiens
  Table A; Target 23978; HLA-C*04:01; FOXE1; ENSG00000178919; TAA
AGAPATTTGYQ

SEQ ID NO: 23979 - protein, 11 aa, Homo sapiens
  Table A; Target 23979; HLA-C*06:02; FOXE1; ENSG00000178919; TAA
AGAPATTTGYQ

SEQ ID NO: 23980 - protein, 11 aa, Homo sapiens
  Table A; Target 23980; HLA-C*07:01; FOXE1; ENSG00000178919; TAA
AGAPATTTGYQ

SEQ ID NO: 23981 - protein, 11 aa, Homo sapiens
  Table A; Target 23981; HLA-C*07:02; FOXE1; ENSG00000178919; TAA
AGAPATTTGYQ

SEQ ID NO: 23982 - protein, 9 aa, Homo sapiens
  Table A; Target 23982; HLA-C*01:02; FOXE1; ENSG00000178919; TAA
AGPDGAYPQ

SEQ ID NO: 23983 - protein, 11 aa, Homo sapiens
  Table A; Target 23983; HLA-C*06:02; FOXE1; ENSG00000178919; TAA
AGRLAGPASPP

SEQ ID NO: 23984 - protein, 9 aa, Homo sapiens
  Table A; Target 23984; HLA-A*30:02; FOXE1; ENSG00000178919; TAA
AGRPGKGNY

SEQ ID NO: 23985 - protein, 10 aa, Homo sapiens
  Table A; Target 23985; HLA-B*57:01; FOXE1; ENSG00000178919; TAA
AGRPGKGNYW

SEQ ID NO: 23986 - protein, 9 aa, Homo sapiens
  Table A; Target 23986; HLA-A*32:01; FOXE1; ENSG00000178919; TAA
AGSAIFAAA

SEQ ID NO: 23987 - protein, 9 aa, Homo sapiens
  Table A; Target 23987; HLA-B*27:05; FOXE1; ENSG00000178919; TAA
AGSAIFAAA

SEQ ID NO: 23988 - protein, 9 aa, Homo sapiens
  Table A; Target 23988; HLA-B*54:01; FOXE1; ENSG00000178919; TAA
AGSAIFAAA

SEQ ID NO: 23989 - protein, 9 aa, Homo sapiens
  Table A; Target 23989; HLA-B*56:01; FOXE1; ENSG00000178919; TAA
AGSAIFAAA

SEQ ID NO: 23990 - protein, 9 aa, Homo sapiens
  Table A; Target 23990; HLA-C*01:02; FOXE1; ENSG00000178919; TAA
AGSAIFAAA

SEQ ID NO: 23991 - protein, 9 aa, Homo sapiens
  Table A; Target 23991; HLA-C*02:02; FOXE1; ENSG00000178919; TAA
AGSAIFAAA

SEQ ID NO: 23992 - protein, 9 aa, Homo sapiens
  Table A; Target 23992; HLA-C*03:03; FOXE1; ENSG00000178919; TAA
AGSAIFAAA

SEQ ID NO: 23993 - protein, 9 aa, Homo sapiens
  Table A; Target 23993; HLA-C*03:04; FOXE1; ENSG00000178919; TAA
AGSAIFAAA

SEQ ID NO: 23994 - protein, 9 aa, Homo sapiens
  Table A; Target 23994; HLA-C*16:04; FOXE1; ENSG00000178919; TAA
AGSAIFAAA

SEQ ID NO: 23995 - protein, 10 aa, Homo sapiens
  Table A; Target 23995; HLA-A*31:01; FOXE1; ENSG00000178919; TAA
AGVPGEATGR

SEQ ID NO: 23996 - protein, 10 aa, Homo sapiens
  Table A; Target 23996; HLA-A*68:01; FOXE1; ENSG00000178919; TAA
AGVPGEATGR

SEQ ID NO: 23997 - protein, 10 aa, Homo sapiens
  Table A; Target 23997; HLA-B*27:02; FOXE1; ENSG00000178919; TAA
AGVPGEATGR

SEQ ID NO: 23998 - protein, 10 aa, Homo sapiens
  Table A; Target 23998; HLA-C*07:06; FOXE1; ENSG00000178919; TAA
AGVPGEATGR

SEQ ID NO: 23999 - protein, 8 aa, Homo sapiens
  Table A; Target 23999; HLA-B*08:01; FOXE1; ENSG00000178919; TAA
AGYAPPSL

SEQ ID NO: 24000 - protein, 8 aa, Homo sapiens
  Table A; Target 24000; HLA-B*13:02; FOXE1; ENSG00000178919; TAA
AGYAPPSL

SEQ ID NO: 24001 - protein, 8 aa, Homo sapiens
  Table A; Target 24001; HLA-B*15:03; FOXE1; ENSG00000178919; TAA
AGYAPPSL

SEQ ID NO: 24002 - protein, 8 aa, Homo sapiens
  Table A; Target 24002; HLA-B*37:01; FOXE1; ENSG00000178919; TAA
AGYAPPSL

SEQ ID NO: 24003 - protein, 8 aa, Homo sapiens
  Table A; Target 24003; HLA-B*39:01; FOXE1; ENSG00000178919; TAA
AGYAPPSL

SEQ ID NO: 24004 - protein, 8 aa, Homo sapiens
  Table A; Target 24004; HLA-B*46:01; FOXE1; ENSG00000178919; TAA
AGYAPPSL

SEQ ID NO: 24005 - protein, 8 aa, Homo sapiens
  Table A; Target 24005; HLA-B*51:01; FOXE1; ENSG00000178919; TAA
AGYAPPSL

SEQ ID NO: 24006 - protein, 8 aa, Homo sapiens
  Table A; Target 24006; HLA-B*58:01; FOXE1; ENSG00000178919; TAA
AGYAPPSL

SEQ ID NO: 24007 - protein, 8 aa, Homo sapiens
  Table A; Target 24007; HLA-C*02:02; FOXE1; ENSG00000178919; TAA
AGYAPPSL

SEQ ID NO: 24008 - protein, 8 aa, Homo sapiens
  Table A; Target 24008; HLA-C*03:03; FOXE1; ENSG00000178919; TAA
AGYAPPSL

SEQ ID NO: 24009 - protein, 8 aa, Homo sapiens
  Table A; Target 24009; HLA-C*03:04; FOXE1; ENSG00000178919; TAA
AGYAPPSL

SEQ ID NO: 24010 - protein, 8 aa, Homo sapiens
  Table A; Target 24010; HLA-C*05:01; FOXE1; ENSG00000178919; TAA
AGYAPPSL

SEQ ID NO: 24011 - protein, 8 aa, Homo sapiens
  Table A; Target 24011; HLA-C*06:02; FOXE1; ENSG00000178919; TAA
AGYAPPSL

SEQ ID NO: 24012 - protein, 8 aa, Homo sapiens
  Table A; Target 24012; HLA-C*12:03; FOXE1; ENSG00000178919; TAA
AGYAPPSL

SEQ ID NO: 24013 - protein, 8 aa, Homo sapiens
  Table A; Target 24013; HLA-C*16:01; FOXE1; ENSG00000178919; TAA
AGYAPPSL

SEQ ID NO: 24014 - protein, 8 aa, Homo sapiens
  Table A; Target 24014; HLA-C*16:02; FOXE1; ENSG00000178919; TAA
AGYAPPSL

SEQ ID NO: 24015 - protein, 8 aa, Homo sapiens
  Table A; Target 24015; HLA-C*16:04; FOXE1; ENSG00000178919; TAA
AGYAPPSL

SEQ ID NO: 24016 - protein, 9 aa, Homo sapiens
  Table A; Target 24016; HLA-B*56:01; FOXE1; ENSG00000178919; TAA
AGYAPPSLA

SEQ ID NO: 24017 - protein, 9 aa, Homo sapiens
  Table A; Target 24017; HLA-C*12:03; FOXE1; ENSG00000178919; TAA
AGYAPPSLA

SEQ ID NO: 24018 - protein, 10 aa, Homo sapiens
  Table A; Target 24018; HLA-B*56:01; FOXE1; ENSG00000178919; TAA
AGYAPPSLAA

SEQ ID NO: 24019 - protein, 8 aa, Homo sapiens
  Table A; Target 24019; HLA-C*16:01; FOXE1; ENSG00000178919; TAA
AIAHAPER

SEQ ID NO: 24020 - protein, 9 aa, Homo sapiens
  Table A; Target 24020; HLA-A*03:01; FOXE1; ENSG00000178919; TAA
AIFAAAGRL

SEQ ID NO: 24021 - protein, 9 aa, Homo sapiens
  Table A; Target 24021; HLA-B*07:02; FOXE1; ENSG00000178919; TAA
AIFAAAGRL

SEQ ID NO: 24022 - protein, 9 aa, Homo sapiens
  Table A; Target 24022; HLA-B*15:03; FOXE1; ENSG00000178919; TAA
AIFAAAGRL

SEQ ID NO: 24023 - protein, 9 aa, Homo sapiens
  Table A; Target 24023; HLA-B*27:05; FOXE1; ENSG00000178919; TAA
AIFAAAGRL

SEQ ID NO: 24024 - protein, 9 aa, Homo sapiens
  Table A; Target 24024; HLA-C*01:02; FOXE1; ENSG00000178919; TAA
AIFAAAGRL

SEQ ID NO: 24025 - protein, 9 aa, Homo sapiens
  Table A; Target 24025; HLA-C*07:02; FOXE1; ENSG00000178919; TAA
AIFAAAGRL

SEQ ID NO: 24026 - protein, 10 aa, Homo sapiens
  Table A; Target 24026; HLA-B*56:01; FOXE1; ENSG00000178919; TAA
AIFAAAGRLA

SEQ ID NO: 24027 - protein, 9 aa, Homo sapiens
  Table A; Target 24027; HLA-A*02:01; FOXE1; ENSG00000178919; TAA
AIFPGAVPA

SEQ ID NO: 24028 - protein, 9 aa, Homo sapiens
  Table A; Target 24028; HLA-A*02:03; FOXE1; ENSG00000178919; TAA
AIFPGAVPA

SEQ ID NO: 24029 - protein, 9 aa, Homo sapiens
  Table A; Target 24029; HLA-A*02:04; FOXE1; ENSG00000178919; TAA
AIFPGAVPA

SEQ ID NO: 24030 - protein, 9 aa, Homo sapiens
  Table A; Target 24030; HLA-A*02:07; FOXE1; ENSG00000178919; TAA
AIFPGAVPA

SEQ ID NO: 24031 - protein, 9 aa, Homo sapiens
  Table A; Target 24031; HLA-A*03:01; FOXE1; ENSG00000178919; TAA
AIFPGAVPA

SEQ ID NO: 24032 - protein, 9 aa, Homo sapiens
  Table A; Target 24032; HLA-A*03:02; FOXE1; ENSG00000178919; TAA
AIFPGAVPA

SEQ ID NO: 24033 - protein, 9 aa, Homo sapiens
  Table A; Target 24033; HLA-A*31:01; FOXE1; ENSG00000178919; TAA
AIFPGAVPA

SEQ ID NO: 24034 - protein, 9 aa, Homo sapiens
  Table A; Target 24034; HLA-A*32:01; FOXE1; ENSG00000178919; TAA
AIFPGAVPA

SEQ ID NO: 24035 - protein, 9 aa, Homo sapiens
  Table A; Target 24035; HLA-B*13:02; FOXE1; ENSG00000178919; TAA
AIFPGAVPA

SEQ ID NO: 24036 - protein, 9 aa, Homo sapiens
  Table A; Target 24036; HLA-B*15:01; FOXE1; ENSG00000178919; TAA
AIFPGAVPA

SEQ ID NO: 24037 - protein, 9 aa, Homo sapiens
  Table A; Target 24037; HLA-B*27:05; FOXE1; ENSG00000178919; TAA
AIFPGAVPA

SEQ ID NO: 24038 - protein, 9 aa, Homo sapiens
  Table A; Target 24038; HLA-B*37:01; FOXE1; ENSG00000178919; TAA
AIFPGAVPA

SEQ ID NO: 24039 - protein, 9 aa, Homo sapiens
  Table A; Target 24039; HLA-B*40:02; FOXE1; ENSG00000178919; TAA
AIFPGAVPA

SEQ ID NO: 24040 - protein, 9 aa, Homo sapiens
  Table A; Target 24040; HLA-B*46:01; FOXE1; ENSG00000178919; TAA
AIFPGAVPA

SEQ ID NO: 24041 - protein, 9 aa, Homo sapiens
  Table A; Target 24041; HLA-B*54:01; FOXE1; ENSG00000178919; TAA
AIFPGAVPA

SEQ ID NO: 24042 - protein, 9 aa, Homo sapiens
  Table A; Target 24042; HLA-B*55:01; FOXE1; ENSG00000178919; TAA
AIFPGAVPA

SEQ ID NO: 24043 - protein, 9 aa, Homo sapiens
  Table A; Target 24043; HLA-B*56:01; FOXE1; ENSG00000178919; TAA
AIFPGAVPA

SEQ ID NO: 24044 - protein, 9 aa, Homo sapiens
  Table A; Target 24044; HLA-C*01:02; FOXE1; ENSG00000178919; TAA
AIFPGAVPA

SEQ ID NO: 24045 - protein, 9 aa, Homo sapiens
  Table A; Target 24045; HLA-C*02:02; FOXE1; ENSG00000178919; TAA
AIFPGAVPA

SEQ ID NO: 24046 - protein, 9 aa, Homo sapiens
  Table A; Target 24046; HLA-C*03:03; FOXE1; ENSG00000178919; TAA
AIFPGAVPA

SEQ ID NO: 24047 - protein, 9 aa, Homo sapiens
  Table A; Target 24047; HLA-C*03:04; FOXE1; ENSG00000178919; TAA
AIFPGAVPA

SEQ ID NO: 24048 - protein, 9 aa, Homo sapiens
  Table A; Target 24048; HLA-C*06:02; FOXE1; ENSG00000178919; TAA
AIFPGAVPA

SEQ ID NO: 24049 - protein, 9 aa, Homo sapiens
  Table A; Target 24049; HLA-C*07:04; FOXE1; ENSG00000178919; TAA
AIFPGAVPA

SEQ ID NO: 24050 - protein, 9 aa, Homo sapiens
  Table A; Target 24050; HLA-C*12:03; FOXE1; ENSG00000178919; TAA
AIFPGAVPA

SEQ ID NO: 24051 - protein, 9 aa, Homo sapiens
  Table A; Target 24051; HLA-C*14:02; FOXE1; ENSG00000178919; TAA
AIFPGAVPA

SEQ ID NO: 24052 - protein, 9 aa, Homo sapiens
  Table A; Target 24052; HLA-C*16:04; FOXE1; ENSG00000178919; TAA
AIFPGAVPA

SEQ ID NO: 24053 - protein, 10 aa, Homo sapiens
  Table A; Target 24053; HLA-A*02:01; FOXE1; ENSG00000178919; TAA
AIFPGAVPAA

SEQ ID NO: 24054 - protein, 10 aa, Homo sapiens
  Table A; Target 24054; HLA-A*02:03; FOXE1; ENSG00000178919; TAA
AIFPGAVPAA

SEQ ID NO: 24055 - protein, 10 aa, Homo sapiens
  Table A; Target 24055; HLA-A*02:04; FOXE1; ENSG00000178919; TAA
AIFPGAVPAA

SEQ ID NO: 24056 - protein, 10 aa, Homo sapiens
  Table A; Target 24056; HLA-A*02:07; FOXE1; ENSG00000178919; TAA
AIFPGAVPAA

SEQ ID NO: 24057 - protein, 10 aa, Homo sapiens
  Table A; Target 24057; HLA-A*03:01; FOXE1; ENSG00000178919; TAA
AIFPGAVPAA

SEQ ID NO: 24058 - protein, 10 aa, Homo sapiens
  Table A; Target 24058; HLA-A*03:02; FOXE1; ENSG00000178919; TAA
AIFPGAVPAA

SEQ ID NO: 24059 - protein, 10 aa, Homo sapiens
  Table A; Target 24059; HLA-A*11:01; FOXE1; ENSG00000178919; TAA
AIFPGAVPAA

SEQ ID NO: 24060 - protein, 10 aa, Homo sapiens
  Table A; Target 24060; HLA-A*25:01; FOXE1; ENSG00000178919; TAA
AIFPGAVPAA

SEQ ID NO: 24061 - protein, 10 aa, Homo sapiens
  Table A; Target 24061; HLA-A*26:01; FOXE1; ENSG00000178919; TAA
AIFPGAVPAA

SEQ ID NO: 24062 - protein, 10 aa, Homo sapiens
  Table A; Target 24062; HLA-A*32:01; FOXE1; ENSG00000178919; TAA
AIFPGAVPAA

SEQ ID NO: 24063 - protein, 10 aa, Homo sapiens
  Table A; Target 24063; HLA-A*68:02; FOXE1; ENSG00000178919; TAA
AIFPGAVPAA

SEQ ID NO: 24064 - protein, 10 aa, Homo sapiens
  Table A; Target 24064; HLA-B*13:02; FOXE1; ENSG00000178919; TAA
AIFPGAVPAA

SEQ ID NO: 24065 - protein, 10 aa, Homo sapiens
  Table A; Target 24065; HLA-B*15:01; FOXE1; ENSG00000178919; TAA
AIFPGAVPAA

SEQ ID NO: 24066 - protein, 10 aa, Homo sapiens
  Table A; Target 24066; HLA-B*46:01; FOXE1; ENSG00000178919; TAA
AIFPGAVPAA

SEQ ID NO: 24067 - protein, 10 aa, Homo sapiens
  Table A; Target 24067; HLA-B*54:01; FOXE1; ENSG00000178919; TAA
AIFPGAVPAA

SEQ ID NO: 24068 - protein, 10 aa, Homo sapiens
  Table A; Target 24068; HLA-B*55:01; FOXE1; ENSG00000178919; TAA
AIFPGAVPAA

SEQ ID NO: 24069 - protein, 10 aa, Homo sapiens
  Table A; Target 24069; HLA-B*56:01; FOXE1; ENSG00000178919; TAA
AIFPGAVPAA

SEQ ID NO: 24070 - protein, 10 aa, Homo sapiens
  Table A; Target 24070; HLA-C*01:02; FOXE1; ENSG00000178919; TAA
AIFPGAVPAA

SEQ ID NO: 24071 - protein, 10 aa, Homo sapiens
  Table A; Target 24071; HLA-C*02:02; FOXE1; ENSG00000178919; TAA
AIFPGAVPAA

SEQ ID NO: 24072 - protein, 10 aa, Homo sapiens
  Table A; Target 24072; HLA-C*06:02; FOXE1; ENSG00000178919; TAA
AIFPGAVPAA

SEQ ID NO: 24073 - protein, 11 aa, Homo sapiens
  Table A; Target 24073; HLA-A*02:03; FOXE1; ENSG00000178919; TAA
AIFPGAVPAAR

SEQ ID NO: 24074 - protein, 11 aa, Homo sapiens
  Table A; Target 24074; HLA-A*03:01; FOXE1; ENSG00000178919; TAA
AIFPGAVPAAR

SEQ ID NO: 24075 - protein, 11 aa, Homo sapiens
  Table A; Target 24075; HLA-A*03:02; FOXE1; ENSG00000178919; TAA
AIFPGAVPAAR

SEQ ID NO: 24076 - protein, 11 aa, Homo sapiens
  Table A; Target 24076; HLA-A*11:01; FOXE1; ENSG00000178919; TAA
AIFPGAVPAAR

SEQ ID NO: 24077 - protein, 11 aa, Homo sapiens
  Table A; Target 24077; HLA-A*29:02; FOXE1; ENSG00000178919; TAA
AIFPGAVPAAR

SEQ ID NO: 24078 - protein, 11 aa, Homo sapiens
  Table A; Target 24078; HLA-A*30:02; FOXE1; ENSG00000178919; TAA
AIFPGAVPAAR

SEQ ID NO: 24079 - protein, 11 aa, Homo sapiens
  Table A; Target 24079; HLA-A*31:01; FOXE1; ENSG00000178919; TAA
AIFPGAVPAAR

SEQ ID NO: 24080 - protein, 11 aa, Homo sapiens
  Table A; Target 24080; HLA-A*32:01; FOXE1; ENSG00000178919; TAA
AIFPGAVPAAR

SEQ ID NO: 24081 - protein, 11 aa, Homo sapiens
  Table A; Target 24081; HLA-A*68:01; FOXE1; ENSG00000178919; TAA
AIFPGAVPAAR

SEQ ID NO: 24082 - protein, 11 aa, Homo sapiens
  Table A; Target 24082; HLA-A*68:02; FOXE1; ENSG00000178919; TAA
AIFPGAVPAAR

SEQ ID NO: 24083 - protein, 11 aa, Homo sapiens
  Table A; Target 24083; HLA-C*02:02; FOXE1; ENSG00000178919; TAA
AIFPGAVPAAR

SEQ ID NO: 24084 - protein, 11 aa, Homo sapiens
  Table A; Target 24084; HLA-C*07:06; FOXE1; ENSG00000178919; TAA
AIFPGAVPAAR

SEQ ID NO: 24085 - protein, 9 aa, Homo sapiens
  Table A; Target 24085; HLA-A*01:01; FOXE1; ENSG00000178919; TAA
ALDPNAEDM

SEQ ID NO: 24086 - protein, 9 aa, Homo sapiens
  Table A; Target 24086; HLA-A*02:07; FOXE1; ENSG00000178919; TAA
ALDPNAEDM

SEQ ID NO: 24087 - protein, 9 aa, Homo sapiens
  Table A; Target 24087; HLA-B*39:01; FOXE1; ENSG00000178919; TAA
ALDPNAEDM

SEQ ID NO: 24088 - protein, 9 aa, Homo sapiens
  Table A; Target 24088; HLA-B*55:01; FOXE1; ENSG00000178919; TAA
ALDPNAEDM

SEQ ID NO: 24089 - protein, 9 aa, Homo sapiens
  Table A; Target 24089; HLA-C*04:01; FOXE1; ENSG00000178919; TAA
ALDPNAEDM

SEQ ID NO: 24090 - protein, 9 aa, Homo sapiens
  Table A; Target 24090; HLA-C*05:01; FOXE1; ENSG00000178919; TAA
ALDPNAEDM

SEQ ID NO: 24091 - protein, 10 aa, Homo sapiens
  Table A; Target 24091; HLA-A*02:07; FOXE1; ENSG00000178919; TAA
ALDPNAEDMF

SEQ ID NO: 24092 - protein, 10 aa, Homo sapiens
  Table A; Target 24092; HLA-B*38:01; FOXE1; ENSG00000178919; TAA
ALDPNAEDMF

SEQ ID NO: 24093 - protein, 10 aa, Homo sapiens
  Table A; Target 24093; HLA-C*04:01; FOXE1; ENSG00000178919; TAA
ALDPNAEDMF

SEQ ID NO: 24094 - protein, 10 aa, Homo sapiens
  Table A; Target 24094; HLA-C*05:01; FOXE1; ENSG00000178919; TAA
ALDPNAEDMF

SEQ ID NO: 24095 - protein, 9 aa, Homo sapiens
  Table A; Target 24095; HLA-A*03:01; FOXE1; ENSG00000178919; TAA
ALIAMAIAH

SEQ ID NO: 24096 - protein, 9 aa, Homo sapiens
  Table A; Target 24096; HLA-A*03:02; FOXE1; ENSG00000178919; TAA
ALIAMAIAH

SEQ ID NO: 24097 - protein, 9 aa, Homo sapiens
  Table A; Target 24097; HLA-A*11:01; FOXE1; ENSG00000178919; TAA
ALIAMAIAH

SEQ ID NO: 24098 - protein, 9 aa, Homo sapiens
  Table A; Target 24098; HLA-A*30:02; FOXE1; ENSG00000178919; TAA
ALIAMAIAH

SEQ ID NO: 24099 - protein, 9 aa, Homo sapiens
  Table A; Target 24099; HLA-B*15:01; FOXE1; ENSG00000178919; TAA
ALIAMAIAH

SEQ ID NO: 24100 - protein, 9 aa, Homo sapiens
  Table A; Target 24100; HLA-B*46:01; FOXE1; ENSG00000178919; TAA
ALIAMAIAH

SEQ ID NO: 24101 - protein, 9 aa, Homo sapiens
  Table A; Target 24101; HLA-C*01:02; FOXE1; ENSG00000178919; TAA
ALIAMAIAH

SEQ ID NO: 24102 - protein, 10 aa, Homo sapiens
  Table A; Target 24102; HLA-A*02:01; FOXE1; ENSG00000178919; TAA
ALIAMAIAHA

SEQ ID NO: 24103 - protein, 10 aa, Homo sapiens
  Table A; Target 24103; HLA-A*02:03; FOXE1; ENSG00000178919; TAA
ALIAMAIAHA

SEQ ID NO: 24104 - protein, 10 aa, Homo sapiens
  Table A; Target 24104; HLA-A*26:01; FOXE1; ENSG00000178919; TAA
ANPSAYAAAY

SEQ ID NO: 24105 - protein, 10 aa, Homo sapiens
  Table A; Target 24105; HLA-A*29:02; FOXE1; ENSG00000178919; TAA
ANPSAYAAAY

SEQ ID NO: 24106 - protein, 10 aa, Homo sapiens
  Table A; Target 24106; HLA-A*30:02; FOXE1; ENSG00000178919; TAA
ANPSAYAAAY

SEQ ID NO: 24107 - protein, 8 aa, Homo sapiens
  Table A; Target 24107; HLA-B*07:02; FOXE1; ENSG00000178919; TAA
APATTTGY

SEQ ID NO: 24108 - protein, 8 aa, Homo sapiens
  Table A; Target 24108; HLA-B*15:01; FOXE1; ENSG00000178919; TAA
APATTTGY

SEQ ID NO: 24109 - protein, 8 aa, Homo sapiens
  Table A; Target 24109; HLA-B*15:03; FOXE1; ENSG00000178919; TAA
APATTTGY

SEQ ID NO: 24110 - protein, 8 aa, Homo sapiens
  Table A; Target 24110; HLA-B*35:01; FOXE1; ENSG00000178919; TAA
APATTTGY

SEQ ID NO: 24111 - protein, 8 aa, Homo sapiens
  Table A; Target 24111; HLA-B*55:01; FOXE1; ENSG00000178919; TAA
APATTTGY

SEQ ID NO: 24112 - protein, 8 aa, Homo sapiens
  Table A; Target 24112; HLA-B*56:01; FOXE1; ENSG00000178919; TAA
APATTTGY

SEQ ID NO: 24113 - protein, 8 aa, Homo sapiens
  Table A; Target 24113; HLA-C*07:02; FOXE1; ENSG00000178919; TAA
APATTTGY

SEQ ID NO: 24114 - protein, 10 aa, Homo sapiens
  Table A; Target 24114; HLA-B*55:01; FOXE1; ENSG00000178919; TAA
APATTTGYQP

SEQ ID NO: 24115 - protein, 10 aa, Homo sapiens
  Table A; Target 24115; HLA-B*56:01; FOXE1; ENSG00000178919; TAA
APATTTGYQP

SEQ ID NO: 24116 - protein, 10 aa, Homo sapiens
  Table A; Target 24116; HLA-C*04:01; FOXE1; ENSG00000178919; TAA
APATTTGYQP

SEQ ID NO: 24117 - protein, 11 aa, Homo sapiens
  Table A; Target 24117; HLA-B*54:01; FOXE1; ENSG00000178919; TAA
APATTTGYQPA

SEQ ID NO: 24118 - protein, 11 aa, Homo sapiens
  Table A; Target 24118; HLA-B*55:01; FOXE1; ENSG00000178919; TAA
APATTTGYQPA

SEQ ID NO: 24119 - protein, 11 aa, Homo sapiens
  Table A; Target 24119; HLA-B*56:01; FOXE1; ENSG00000178919; TAA
APATTTGYQPA

SEQ ID NO: 24120 - protein, 8 aa, Homo sapiens
  Table A; Target 24120; HLA-B*07:02; FOXE1; ENSG00000178919; TAA
APERRLTL

SEQ ID NO: 24121 - protein, 8 aa, Homo sapiens
  Table A; Target 24121; HLA-B*08:01; FOXE1; ENSG00000178919; TAA
APERRLTL

SEQ ID NO: 24122 - protein, 8 aa, Homo sapiens
  Table A; Target 24122; HLA-C*07:02; FOXE1; ENSG00000178919; TAA
APERRLTL

SEQ ID NO: 24123 - protein, 9 aa, Homo sapiens
  Table A; Target 24123; HLA-B*54:01; FOXE1; ENSG00000178919; TAA
APPPVYYPA

SEQ ID NO: 24124 - protein, 9 aa, Homo sapiens
  Table A; Target 24124; HLA-B*55:01; FOXE1; ENSG00000178919; TAA
APPPVYYPA

SEQ ID NO: 24125 - protein, 9 aa, Homo sapiens
  Table A; Target 24125; HLA-B*56:01; FOXE1; ENSG00000178919; TAA
APPPVYYPA

SEQ ID NO: 24126 - protein, 10 aa, Homo sapiens
  Table A; Target 24126; HLA-A*02:07; FOXE1; ENSG00000178919; TAA
APPPVYYPAA

SEQ ID NO: 24127 - protein, 10 aa, Homo sapiens
  Table A; Target 24127; HLA-B*54:01; FOXE1; ENSG00000178919; TAA
APPPVYYPAA

SEQ ID NO: 24128 - protein, 10 aa, Homo sapiens
  Table A; Target 24128; HLA-B*56:01; FOXE1; ENSG00000178919; TAA
APPPVYYPAA

SEQ ID NO: 24129 - protein, 9 aa, Homo sapiens
  Table A; Target 24129; HLA-B*07:02; FOXE1; ENSG00000178919; TAA
APSGPGGSC

SEQ ID NO: 24130 - protein, 9 aa, Homo sapiens
  Table A; Target 24130; HLA-B*56:01; FOXE1; ENSG00000178919; TAA
APSGPGGSC

SEQ ID NO: 24131 - protein, 9 aa, Homo sapiens
  Table A; Target 24131; HLA-C*07:02; FOXE1; ENSG00000178919; TAA
APSGPGGSC

SEQ ID NO: 24132 - protein, 10 aa, Homo sapiens
  Table A; Target 24132; HLA-B*56:01; FOXE1; ENSG00000178919; TAA
APSGPGGSCA

SEQ ID NO: 24133 - protein, 11 aa, Homo sapiens
  Table A; Target 24133; HLA-B*07:02; FOXE1; ENSG00000178919; TAA
APSGPGGSCAF

SEQ ID NO: 24134 - protein, 11 aa, Homo sapiens
  Table A; Target 24134; HLA-B*35:01; FOXE1; ENSG00000178919; TAA
APSGPGGSCAF

SEQ ID NO: 24135 - protein, 11 aa, Homo sapiens
  Table A; Target 24135; HLA-B*35:03; FOXE1; ENSG00000178919; TAA
APSGPGGSCAF

SEQ ID NO: 24136 - protein, 11 aa, Homo sapiens
  Table A; Target 24136; HLA-B*39:01; FOXE1; ENSG00000178919; TAA
APSGPGGSCAF

SEQ ID NO: 24137 - protein, 11 aa, Homo sapiens
  Table A; Target 24137; HLA-C*07:02; FOXE1; ENSG00000178919; TAA
APSGPGGSCAF

SEQ ID NO: 24138 - protein, 9 aa, Homo sapiens
  Table A; Target 24138; HLA-A*30:02; FOXE1; ENSG00000178919; TAA
ARPANPSAY

SEQ ID NO: 24139 - protein, 9 aa, Homo sapiens
  Table A; Target 24139; HLA-A*32:01; FOXE1; ENSG00000178919; TAA
ARPANPSAY

SEQ ID NO: 24140 - protein, 9 aa, Homo sapiens
  Table A; Target 24140; HLA-B*07:02; FOXE1; ENSG00000178919; TAA
ARPANPSAY

SEQ ID NO: 24141 - protein, 9 aa, Homo sapiens
  Table A; Target 24141; HLA-B*15:01; FOXE1; ENSG00000178919; TAA
ARPANPSAY

SEQ ID NO: 24142 - protein, 9 aa, Homo sapiens
  Table A; Target 24142; HLA-B*15:03; FOXE1; ENSG00000178919; TAA
ARPANPSAY

SEQ ID NO: 24143 - protein, 9 aa, Homo sapiens
  Table A; Target 24143; HLA-B*27:02; FOXE1; ENSG00000178919; TAA
ARPANPSAY

SEQ ID NO: 24144 - protein, 9 aa, Homo sapiens
  Table A; Target 24144; HLA-B*27:05; FOXE1; ENSG00000178919; TAA
ARPANPSAY

SEQ ID NO: 24145 - protein, 9 aa, Homo sapiens
  Table A; Target 24145; HLA-B*39:01; FOXE1; ENSG00000178919; TAA
ARPANPSAY

SEQ ID NO: 24146 - protein, 9 aa, Homo sapiens
  Table A; Target 24146; HLA-B*46:01; FOXE1; ENSG00000178919; TAA
ARPANPSAY

SEQ ID NO: 24147 - protein, 9 aa, Homo sapiens
  Table A; Target 24147; HLA-C*01:02; FOXE1; ENSG00000178919; TAA
ARPANPSAY

SEQ ID NO: 24148 - protein, 9 aa, Homo sapiens
  Table A; Target 24148; HLA-C*02:02; FOXE1; ENSG00000178919; TAA
ARPANPSAY

SEQ ID NO: 24149 - protein, 9 aa, Homo sapiens
  Table A; Target 24149; HLA-C*04:01; FOXE1; ENSG00000178919; TAA
ARPANPSAY

SEQ ID NO: 24150 - protein, 9 aa, Homo sapiens
  Table A; Target 24150; HLA-C*06:02; FOXE1; ENSG00000178919; TAA
ARPANPSAY

SEQ ID NO: 24151 - protein, 9 aa, Homo sapiens
  Table A; Target 24151; HLA-C*07:01; FOXE1; ENSG00000178919; TAA
ARPANPSAY

SEQ ID NO: 24152 - protein, 9 aa, Homo sapiens
  Table A; Target 24152; HLA-C*07:02; FOXE1; ENSG00000178919; TAA
ARPANPSAY

SEQ ID NO: 24153 - protein, 9 aa, Homo sapiens
  Table A; Target 24153; HLA-C*07:04; FOXE1; ENSG00000178919; TAA
ARPANPSAY

SEQ ID NO: 24154 - protein, 9 aa, Homo sapiens
  Table A; Target 24154; HLA-C*12:03; FOXE1; ENSG00000178919; TAA
ARPANPSAY

SEQ ID NO: 24155 - protein, 9 aa, Homo sapiens
  Table A; Target 24155; HLA-C*14:02; FOXE1; ENSG00000178919; TAA
ARPANPSAY

SEQ ID NO: 24156 - protein, 9 aa, Homo sapiens
  Table A; Target 24156; HLA-C*16:01; FOXE1; ENSG00000178919; TAA
ARPANPSAY

SEQ ID NO: 24157 - protein, 9 aa, Homo sapiens
  Table A; Target 24157; HLA-C*16:02; FOXE1; ENSG00000178919; TAA
ARPANPSAY

SEQ ID NO: 24158 - protein, 9 aa, Homo sapiens
  Table A; Target 24158; HLA-C*16:04; FOXE1; ENSG00000178919; TAA
ARPANPSAY

SEQ ID NO: 24159 - protein, 11 aa, Homo sapiens
  Table A; Target 24159; HLA-B*27:05; FOXE1; ENSG00000178919; TAA
ARPANPSAYAA

SEQ ID NO: 24160 - protein, 10 aa, Homo sapiens
  Table A; Target 24160; HLA-A*30:02; FOXE1; ENSG00000178919; TAA
ARPPYPGAVY

SEQ ID NO: 24161 - protein, 10 aa, Homo sapiens
  Table A; Target 24161; HLA-B*07:02; FOXE1; ENSG00000178919; TAA
ARPPYPGAVY

SEQ ID NO: 24162 - protein, 10 aa, Homo sapiens
  Table A; Target 24162; HLA-B*15:03; FOXE1; ENSG00000178919; TAA
ARPPYPGAVY

SEQ ID NO: 24163 - protein, 10 aa, Homo sapiens
  Table A; Target 24163; HLA-B*27:05; FOXE1; ENSG00000178919; TAA
ARPPYPGAVY

SEQ ID NO: 24164 - protein, 10 aa, Homo sapiens
  Table A; Target 24164; HLA-C*06:02; FOXE1; ENSG00000178919; TAA
ARPPYPGAVY

SEQ ID NO: 24165 - protein, 10 aa, Homo sapiens
  Table A; Target 24165; HLA-C*07:01; FOXE1; ENSG00000178919; TAA
ARPPYPGAVY

SEQ ID NO: 24166 - protein, 10 aa, Homo sapiens
  Table A; Target 24166; HLA-C*07:02; FOXE1; ENSG00000178919; TAA
ARPPYPGAVY

SEQ ID NO: 24167 - protein, 10 aa, Homo sapiens
  Table A; Target 24167; HLA-C*16:04; FOXE1; ENSG00000178919; TAA
ARPPYPGAVY

SEQ ID NO: 24168 - protein, 8 aa, Homo sapiens
  Table A; Target 24168; HLA-C*06:02; FOXE1; ENSG00000178919; TAA
ASAGAYHA

SEQ ID NO: 24169 - protein, 9 aa, Homo sapiens
  Table A; Target 24169; HLA-A*03:02; FOXE1; ENSG00000178919; TAA
ASAGAYHAR

SEQ ID NO: 24170 - protein, 9 aa, Homo sapiens
  Table A; Target 24170; HLA-A*11:01; FOXE1; ENSG00000178919; TAA
ASAGAYHAR

SEQ ID NO: 24171 - protein, 9 aa, Homo sapiens
  Table A; Target 24171; HLA-A*30:02; FOXE1; ENSG00000178919; TAA
ASAGAYHAR

SEQ ID NO: 24172 - protein, 9 aa, Homo sapiens
  Table A; Target 24172; HLA-A*31:01; FOXE1; ENSG00000178919; TAA
ASAGAYHAR

SEQ ID NO: 24173 - protein, 9 aa, Homo sapiens
  Table A; Target 24173; HLA-A*32:01; FOXE1; ENSG00000178919; TAA
ASAGAYHAR

SEQ ID NO: 24174 - protein, 9 aa, Homo sapiens
  Table A; Target 24174; HLA-A*33:01; FOXE1; ENSG00000178919; TAA
ASAGAYHAR

SEQ ID NO: 24175 - protein, 9 aa, Homo sapiens
  Table A; Target 24175; HLA-A*33:03; FOXE1; ENSG00000178919; TAA
ASAGAYHAR

SEQ ID NO: 24176 - protein, 9 aa, Homo sapiens
  Table A; Target 24176; HLA-A*68:01; FOXE1; ENSG00000178919; TAA
ASAGAYHAR

SEQ ID NO: 24177 - protein, 9 aa, Homo sapiens
  Table A; Target 24177; HLA-B*57:01; FOXE1; ENSG00000178919; TAA
ASAGAYHAR

SEQ ID NO: 24178 - protein, 9 aa, Homo sapiens
  Table A; Target 24178; HLA-C*02:02; FOXE1; ENSG00000178919; TAA
ASAGAYHAR

SEQ ID NO: 24179 - protein, 9 aa, Homo sapiens
  Table A; Target 24179; HLA-C*07:06; FOXE1; ENSG00000178919; TAA
ASAGAYHAR

SEQ ID NO: 24180 - protein, 9 aa, Homo sapiens
  Table A; Target 24180; HLA-C*16:01; FOXE1; ENSG00000178919; TAA
ASAGAYHAR

SEQ ID NO: 24181 - protein, 9 aa, Homo sapiens
  Table A; Target 24181; HLA-C*16:02; FOXE1; ENSG00000178919; TAA
ASAGAYHAR

SEQ ID NO: 24182 - protein, 9 aa, Homo sapiens
  Table A; Target 24182; HLA-C*16:01; FOXE1; ENSG00000178919; TAA
ASPGPCRVF

SEQ ID NO: 24183 - protein, 10 aa, Homo sapiens
  Table A; Target 24183; HLA-C*01:02; FOXE1; ENSG00000178919; TAA
ASPPAGGSSG

SEQ ID NO: 24184 - protein, 9 aa, Homo sapiens
  Table A; Target 24184; HLA-A*03:01; FOXE1; ENSG00000178919; TAA
AVPAARPPY

SEQ ID NO: 24185 - protein, 9 aa, Homo sapiens
  Table A; Target 24185; HLA-A*26:01; FOXE1; ENSG00000178919; TAA
AVPAARPPY

SEQ ID NO: 24186 - protein, 9 aa, Homo sapiens
  Table A; Target 24186; HLA-A*29:02; FOXE1; ENSG00000178919; TAA
AVPAARPPY

SEQ ID NO: 24187 - protein, 9 aa, Homo sapiens
  Table A; Target 24187; HLA-A*30:02; FOXE1; ENSG00000178919; TAA
AVPAARPPY

SEQ ID NO: 24188 - protein, 9 aa, Homo sapiens
  Table A; Target 24188; HLA-A*32:01; FOXE1; ENSG00000178919; TAA
AVPAARPPY

SEQ ID NO: 24189 - protein, 9 aa, Homo sapiens
  Table A; Target 24189; HLA-C*01:02; FOXE1; ENSG00000178919; TAA
AVPAARPPY

SEQ ID NO: 24190 - protein, 9 aa, Homo sapiens
  Table A; Target 24190; HLA-C*07:04; FOXE1; ENSG00000178919; TAA
AVPAARPPY

SEQ ID NO: 24191 - protein, 9 aa, Homo sapiens
  Table A; Target 24191; HLA-C*16:01; FOXE1; ENSG00000178919; TAA
AVPAARPPY

SEQ ID NO: 24192 - protein, 10 aa, Homo sapiens
  Table A; Target 24192; HLA-A*03:01; FOXE1; ENSG00000178919; TAA
AVYAGYAPPS

SEQ ID NO: 24193 - protein, 10 aa, Homo sapiens
  Table A; Target 24193; HLA-A*03:02; FOXE1; ENSG00000178919; TAA
AVYAGYAPPS

SEQ ID NO: 24194 - protein, 10 aa, Homo sapiens
  Table A; Target 24194; HLA-A*11:01; FOXE1; ENSG00000178919; TAA
AVYAGYAPPS

SEQ ID NO: 24195 - protein, 11 aa, Homo sapiens
  Table A; Target 24195; HLA-A*02:01; FOXE1; ENSG00000178919; TAA
AVYAGYAPPSL

SEQ ID NO: 24196 - protein, 11 aa, Homo sapiens
  Table A; Target 24196; HLA-A*03:01; FOXE1; ENSG00000178919; TAA
AVYAGYAPPSL

SEQ ID NO: 24197 - protein, 11 aa, Homo sapiens
  Table A; Target 24197; HLA-A*03:02; FOXE1; ENSG00000178919; TAA
AVYAGYAPPSL

SEQ ID NO: 24198 - protein, 11 aa, Homo sapiens
  Table A; Target 24198; HLA-A*11:01; FOXE1; ENSG00000178919; TAA
AVYAGYAPPSL

SEQ ID NO: 24199 - protein, 11 aa, Homo sapiens
  Table A; Target 24199; HLA-C*02:02; FOXE1; ENSG00000178919; TAA
AVYAGYAPPSL

SEQ ID NO: 24200 - protein, 9 aa, Homo sapiens
  Table A; Target 24200; HLA-C*14:02; FOXE1; ENSG00000178919; TAA
AYAAAYAGP

SEQ ID NO: 24201 - protein, 9 aa, Homo sapiens
  Table A; Target 24201; HLA-A*26:01; FOXE1; ENSG00000178919; TAA
AYAGPDGAY

SEQ ID NO: 24202 - protein, 9 aa, Homo sapiens
  Table A; Target 24202; HLA-A*29:02; FOXE1; ENSG00000178919; TAA
AYAGPDGAY

SEQ ID NO: 24203 - protein, 9 aa, Homo sapiens
  Table A; Target 24203; HLA-A*30:02; FOXE1; ENSG00000178919; TAA
AYAGPDGAY

SEQ ID NO: 24204 - protein, 9 aa, Homo sapiens
  Table A; Target 24204; HLA-A*32:01; FOXE1; ENSG00000178919; TAA
AYAGPDGAY

SEQ ID NO: 24205 - protein, 9 aa, Homo sapiens
  Table A; Target 24205; HLA-B*15:01; FOXE1; ENSG00000178919; TAA
AYAGPDGAY

SEQ ID NO: 24206 - protein, 9 aa, Homo sapiens
  Table A; Target 24206; HLA-B*39:01; FOXE1; ENSG00000178919; TAA
AYAGPDGAY

SEQ ID NO: 24207 - protein, 9 aa, Homo sapiens
  Table A; Target 24207; HLA-B*46:01; FOXE1; ENSG00000178919; TAA
AYAGPDGAY

SEQ ID NO: 24208 - protein, 9 aa, Homo sapiens
  Table A; Target 24208; HLA-C*01:02; FOXE1; ENSG00000178919; TAA
AYAGPDGAY

SEQ ID NO: 24209 - protein, 9 aa, Homo sapiens
  Table A; Target 24209; HLA-C*04:01; FOXE1; ENSG00000178919; TAA
AYAGPDGAY

SEQ ID NO: 24210 - protein, 9 aa, Homo sapiens
  Table A; Target 24210; HLA-C*14:02; FOXE1; ENSG00000178919; TAA
AYAGPDGAY

SEQ ID NO: 24211 - protein, 9 aa, Homo sapiens
  Table A; Target 24211; HLA-C*16:01; FOXE1; ENSG00000178919; TAA
AYAGPDGAY

SEQ ID NO: 24212 - protein, 10 aa, Homo sapiens
  Table A; Target 24212; HLA-C*04:01; FOXE1; ENSG00000178919; TAA
AYAGPDGAYP

SEQ ID NO: 24213 - protein, 10 aa, Homo sapiens
  Table A; Target 24213; HLA-C*06:02; FOXE1; ENSG00000178919; TAA
AYAGPDGAYP

SEQ ID NO: 24214 - protein, 10 aa, Homo sapiens
  Table A; Target 24214; HLA-C*07:02; FOXE1; ENSG00000178919; TAA
AYAGPDGAYP

SEQ ID NO: 24215 - protein, 10 aa, Homo sapiens
  Table A; Target 24215; HLA-C*16:02; FOXE1; ENSG00000178919; TAA
AYAGPDGAYP

SEQ ID NO: 24216 - protein, 10 aa, Homo sapiens
  Table A; Target 24216; HLA-A*30:02; FOXE1; ENSG00000178919; TAA
AYHARHAAAY

SEQ ID NO: 24217 - protein, 9 aa, Homo sapiens
  Table A; Target 24217; HLA-C*14:02; FOXE1; ENSG00000178919; TAA
AYMHDAAAA

SEQ ID NO: 24218 - protein, 10 aa, Homo sapiens
  Table A; Target 24218; HLA-C*14:02; FOXE1; ENSG00000178919; TAA
AYMHDAAAAA

SEQ ID NO: 24219 - protein, 11 aa, Homo sapiens
  Table A; Target 24219; HLA-C*14:02; FOXE1; ENSG00000178919; TAA
AYMHDAAAAAA

SEQ ID NO: 24220 - protein, 9 aa, Homo sapiens
  Table A; Target 24220; HLA-A*23:01; FOXE1; ENSG00000178919; TAA
AYPGGIDRF

SEQ ID NO: 24221 - protein, 9 aa, Homo sapiens
  Table A; Target 24221; HLA-A*24:02; FOXE1; ENSG00000178919; TAA
AYPGGIDRF

SEQ ID NO: 24222 - protein, 9 aa, Homo sapiens
  Table A; Target 24222; HLA-A*29:02; FOXE1; ENSG00000178919; TAA
AYPGGIDRF

SEQ ID NO: 24223 - protein, 9 aa, Homo sapiens
  Table A; Target 24223; HLA-C*01:02; FOXE1; ENSG00000178919; TAA
AYPQGAGSA

SEQ ID NO: 24224 - protein, 9 aa, Homo sapiens
  Table A; Target 24224; HLA-C*14:02; FOXE1; ENSG00000178919; TAA
AYPQGAGSA

SEQ ID NO: 24225 - protein, 10 aa, Homo sapiens
  Table A; Target 24225; HLA-A*24:02; FOXE1; ENSG00000178919; TAA
AYPQGAGSAI

SEQ ID NO: 24226 - protein, 10 aa, Homo sapiens
  Table A; Target 24226; HLA-C*01:02; FOXE1; ENSG00000178919; TAA
AYPQGAGSAI

SEQ ID NO: 24227 - protein, 10 aa, Homo sapiens
  Table A; Target 24227; HLA-C*14:02; FOXE1; ENSG00000178919; TAA
AYPQGAGSAI

SEQ ID NO: 24228 - protein, 11 aa, Homo sapiens
  Table A; Target 24228; HLA-A*23:01; FOXE1; ENSG00000178919; TAA
AYPQGAGSAIF

SEQ ID NO: 24229 - protein, 11 aa, Homo sapiens
  Table A; Target 24229; HLA-A*24:02; FOXE1; ENSG00000178919; TAA
AYPQGAGSAIF

SEQ ID NO: 24230 - protein, 11 aa, Homo sapiens
  Table A; Target 24230; HLA-C*14:02; FOXE1; ENSG00000178919; TAA
AYPQGAGSAIF

SEQ ID NO: 24231 - protein, 10 aa, Homo sapiens
  Table A; Target 24231; HLA-B*56:01; FOXE1; ENSG00000178919; TAA
CAFASAGAPA

SEQ ID NO: 24232 - protein, 8 aa, Homo sapiens
  Table A; Target 24232; HLA-B*39:01; FOXE1; ENSG00000178919; TAA
CYNPGGQL

SEQ ID NO: 24233 - protein, 8 aa, Homo sapiens
  Table A; Target 24233; HLA-C*01:02; FOXE1; ENSG00000178919; TAA
CYNPGGQL

SEQ ID NO: 24234 - protein, 8 aa, Homo sapiens
  Table A; Target 24234; HLA-C*03:04; FOXE1; ENSG00000178919; TAA
CYNPGGQL

SEQ ID NO: 24235 - protein, 8 aa, Homo sapiens
  Table A; Target 24235; HLA-C*04:01; FOXE1; ENSG00000178919; TAA
CYNPGGQL

SEQ ID NO: 24236 - protein, 8 aa, Homo sapiens
  Table A; Target 24236; HLA-C*07:02; FOXE1; ENSG00000178919; TAA
CYNPGGQL

SEQ ID NO: 24237 - protein, 8 aa, Homo sapiens
  Table A; Target 24237; HLA-C*14:02; FOXE1; ENSG00000178919; TAA
CYNPGGQL

SEQ ID NO: 24238 - protein, 8 aa, Homo sapiens
  Table A; Target 24238; HLA-C*16:02; FOXE1; ENSG00000178919; TAA
CYNPGGQL

SEQ ID NO: 24239 - protein, 9 aa, Homo sapiens
  Table A; Target 24239; HLA-A*24:02; FOXE1; ENSG00000178919; TAA
CYNPGGQLG

SEQ ID NO: 24240 - protein, 9 aa, Homo sapiens
  Table A; Target 24240; HLA-C*14:02; FOXE1; ENSG00000178919; TAA
CYNPGGQLG

SEQ ID NO: 24241 - protein, 10 aa, Homo sapiens
  Table A; Target 24241; HLA-B*27:05; FOXE1; ENSG00000178919; TAA
CYNPGGQLGG

SEQ ID NO: 24242 - protein, 10 aa, Homo sapiens
  Table A; Target 24242; HLA-C*04:01; FOXE1; ENSG00000178919; TAA
CYNPGGQLGG

SEQ ID NO: 24243 - protein, 10 aa, Homo sapiens
  Table A; Target 24243; HLA-C*06:02; FOXE1; ENSG00000178919; TAA
CYNPGGQLGG

SEQ ID NO: 24244 - protein, 10 aa, Homo sapiens
  Table A; Target 24244; HLA-C*07:02; FOXE1; ENSG00000178919; TAA
CYNPGGQLGG

SEQ ID NO: 24245 - protein, 8 aa, Homo sapiens
  Table A; Target 24245; HLA-B*51:01; FOXE1; ENSG00000178919; TAA
DAAAAAAA

SEQ ID NO: 24246 - protein, 9 aa, Homo sapiens
  Table A; Target 24246; HLA-A*26:01; FOXE1; ENSG00000178919; TAA
DAAAAAAAA

SEQ ID NO: 24247 - protein, 9 aa, Homo sapiens
  Table A; Target 24247; HLA-B*35:01; FOXE1; ENSG00000178919; TAA
DAAAAAAAA

SEQ ID NO: 24248 - protein, 9 aa, Homo sapiens
  Table A; Target 24248; HLA-B*35:03; FOXE1; ENSG00000178919; TAA
DAAAAAAAA

SEQ ID NO: 24249 - protein, 9 aa, Homo sapiens
  Table A; Target 24249; HLA-B*39:01; FOXE1; ENSG00000178919; TAA
DAAAAAAAA

SEQ ID NO: 24250 - protein, 9 aa, Homo sapiens
  Table A; Target 24250; HLA-B*51:01; FOXE1; ENSG00000178919; TAA
DAAAAAAAA

SEQ ID NO: 24251 - protein, 9 aa, Homo sapiens
  Table A; Target 24251; HLA-B*54:01; FOXE1; ENSG00000178919; TAA
DAAAAAAAA

SEQ ID NO: 24252 - protein, 9 aa, Homo sapiens
  Table A; Target 24252; HLA-C*07:06; FOXE1; ENSG00000178919; TAA
DAAAAAAAA

SEQ ID NO: 24253 - protein, 10 aa, Homo sapiens
  Table A; Target 24253; HLA-B*54:01; FOXE1; ENSG00000178919; TAA
DAAAAAAAAA

SEQ ID NO: 24254 - protein, 10 aa, Homo sapiens
  Table A; Target 24254; HLA-C*07:06; FOXE1; ENSG00000178919; TAA
DAAAAAAAAA

SEQ ID NO: 24255 - protein, 11 aa, Homo sapiens
  Table A; Target 24255; HLA-A*68:01; FOXE1; ENSG00000178919; TAA
DAAAAAAAAAA

SEQ ID NO: 24256 - protein, 11 aa, Homo sapiens
  Table A; Target 24256; HLA-B*54:01; FOXE1; ENSG00000178919; TAA
DAAAAAAAAAA

SEQ ID NO: 24257 - protein, 11 aa, Homo sapiens
  Table A; Target 24257; HLA-A*33:01; FOXE1; ENSG00000178919; TAA
DFYGRTSPGQF

SEQ ID NO: 24258 - protein, 8 aa, Homo sapiens
  Table A; Target 24258; HLA-A*25:01; FOXE1; ENSG00000178919; TAA
DLSTYPAY

SEQ ID NO: 24259 - protein, 8 aa, Homo sapiens
  Table A; Target 24259; HLA-A*26:01; FOXE1; ENSG00000178919; TAA
DLSTYPAY

SEQ ID NO: 24260 - protein, 8 aa, Homo sapiens
  Table A; Target 24260; HLA-B*18:01; FOXE1; ENSG00000178919; TAA
DLSTYPAY

SEQ ID NO: 24261 - protein, 9 aa, Homo sapiens
  Table A; Target 24261; HLA-A*26:01; FOXE1; ENSG00000178919; TAA
DLSTYPAYM

SEQ ID NO: 24262 - protein, 9 aa, Homo sapiens
  Table A; Target 24262; HLA-A*33:01; FOXE1; ENSG00000178919; TAA
DLSTYPAYM

SEQ ID NO: 24263 - protein, 8 aa, Homo sapiens
  Table A; Target 24263; HLA-B*18:01; FOXE1; ENSG00000178919; TAA
DMFESGSF

SEQ ID NO: 24264 - protein, 8 aa, Homo sapiens
  Table A; Target 24264; HLA-B*35:01; FOXE1; ENSG00000178919; TAA
DMFESGSF

SEQ ID NO: 24265 - protein, 9 aa, Homo sapiens
  Table A; Target 24265; HLA-A*25:01; FOXE1; ENSG00000178919; TAA
DMFESGSFL

SEQ ID NO: 24266 - protein, 9 aa, Homo sapiens
  Table A; Target 24266; HLA-A*26:01; FOXE1; ENSG00000178919; TAA
DMFESGSFL

SEQ ID NO: 24267 - protein, 9 aa, Homo sapiens
  Table A; Target 24267; HLA-A*68:02; FOXE1; ENSG00000178919; TAA
DMFESGSFL

SEQ ID NO: 24268 - protein, 9 aa, Homo sapiens
  Table A; Target 24268; HLA-B*38:01; FOXE1; ENSG00000178919; TAA
DMFESGSFL

SEQ ID NO: 24269 - protein, 9 aa, Homo sapiens
  Table A; Target 24269; HLA-B*39:01; FOXE1; ENSG00000178919; TAA
DMFESGSFL

SEQ ID NO: 24270 - protein, 9 aa, Homo sapiens
  Table A; Target 24270; HLA-B*51:01; FOXE1; ENSG00000178919; TAA
DMFESGSFL

SEQ ID NO: 24271 - protein, 9 aa, Homo sapiens
  Table A; Target 24271; HLA-C*01:02; FOXE1; ENSG00000178919; TAA
DMFESGSFL

SEQ ID NO: 24272 - protein, 9 aa, Homo sapiens
  Table A; Target 24272; HLA-C*05:01; FOXE1; ENSG00000178919; TAA
DMFESGSFL

SEQ ID NO: 24273 - protein, 10 aa, Homo sapiens
  Table A; Target 24273; HLA-A*33:01; FOXE1; ENSG00000178919; TAA
DMFESGSFLR

SEQ ID NO: 24274 - protein, 10 aa, Homo sapiens
  Table A; Target 24274; HLA-A*33:03; FOXE1; ENSG00000178919; TAA
DMFESGSFLR

SEQ ID NO: 24275 - protein, 10 aa, Homo sapiens
  Table A; Target 24275; HLA-A*68:01; FOXE1; ENSG00000178919; TAA
DMFESGSFLR

SEQ ID NO: 24276 - protein, 10 aa, Homo sapiens
  Table A; Target 24276; HLA-A*68:02; FOXE1; ENSG00000178919; TAA
DMFESGSFLR

SEQ ID NO: 24277 - protein, 10 aa, Homo sapiens
  Table A; Target 24277; HLA-C*07:06; FOXE1; ENSG00000178919; TAA
DMFESGSFLR

SEQ ID NO: 24278 - protein, 11 aa, Homo sapiens
  Table A; Target 24278; HLA-A*33:01; FOXE1; ENSG00000178919; TAA
DMFESGSFLRR

SEQ ID NO: 24279 - protein, 11 aa, Homo sapiens
  Table A; Target 24279; HLA-A*33:03; FOXE1; ENSG00000178919; TAA
DMFESGSFLRR

SEQ ID NO: 24280 - protein, 11 aa, Homo sapiens
  Table A; Target 24280; HLA-A*68:01; FOXE1; ENSG00000178919; TAA
DMFESGSFLRR

SEQ ID NO: 24281 - protein, 8 aa, Homo sapiens
  Table A; Target 24281; HLA-B*55:01; FOXE1; ENSG00000178919; TAA
DPNAEDMF

SEQ ID NO: 24282 - protein, 10 aa, Homo sapiens
  Table A; Target 24282; HLA-A*33:03; FOXE1; ENSG00000178919; TAA
EATGRGAGGR

SEQ ID NO: 24283 - protein, 10 aa, Homo sapiens
  Table A; Target 24283; HLA-A*68:01; FOXE1; ENSG00000178919; TAA
EATGRGAGGR

SEQ ID NO: 24284 - protein, 11 aa, Homo sapiens
  Table A; Target 24284; HLA-A*33:03; FOXE1; ENSG00000178919; TAA
EATGRGAGGRR

SEQ ID NO: 24285 - protein, 9 aa, Homo sapiens
  Table A; Target 24285; HLA-B*18:01; FOXE1; ENSG00000178919; TAA
EDMFESGSF

SEQ ID NO: 24286 - protein, 9 aa, Homo sapiens
  Table A; Target 24286; HLA-B*44:02; FOXE1; ENSG00000178919; TAA
EDMFESGSF

SEQ ID NO: 24287 - protein, 9 aa, Homo sapiens
  Table A; Target 24287; HLA-B*44:03; FOXE1; ENSG00000178919; TAA
EDMFESGSF

SEQ ID NO: 24288 - protein, 9 aa, Homo sapiens
  Table A; Target 24288; HLA-B*27:05; FOXE1; ENSG00000178919; TAA
ESGPPPPQP

SEQ ID NO: 24289 - protein, 8 aa, Homo sapiens
  Table A; Target 24289; HLA-A*33:03; FOXE1; ENSG00000178919; TAA
ESGSFLRR

SEQ ID NO: 24290 - protein, 10 aa, Homo sapiens
  Table A; Target 24290; HLA-A*68:01; FOXE1; ENSG00000178919; TAA
ETAAGAGVPG

SEQ ID NO: 24291 - protein, 11 aa, Homo sapiens
  Table A; Target 24291; HLA-A*26:01; FOXE1; ENSG00000178919; TAA
ETAAGAGVPGE

SEQ ID NO: 24292 - protein, 9 aa, Homo sapiens
  Table A; Target 24292; HLA-A*33:01; FOXE1; ENSG00000178919; TAA
ETTVDFYGR

SEQ ID NO: 24293 - protein, 9 aa, Homo sapiens
  Table A; Target 24293; HLA-A*33:03; FOXE1; ENSG00000178919; TAA
ETTVDFYGR

SEQ ID NO: 24294 - protein, 9 aa, Homo sapiens
  Table A; Target 24294; HLA-A*68:01; FOXE1; ENSG00000178919; TAA
ETTVDFYGR

SEQ ID NO: 24295 - protein, 9 aa, Homo sapiens
  Table A; Target 24295; HLA-B*27:02; FOXE1; ENSG00000178919; TAA
ETTVDFYGR

SEQ ID NO: 24296 - protein, 9 aa, Homo sapiens
  Table A; Target 24296; HLA-C*07:06; FOXE1; ENSG00000178919; TAA
ETTVDFYGR

SEQ ID NO: 24297 - protein, 10 aa, Homo sapiens
  Table A; Target 24297; HLA-A*33:01; FOXE1; ENSG00000178919; TAA
EVLATVKEER

SEQ ID NO: 24298 - protein, 10 aa, Homo sapiens
  Table A; Target 24298; HLA-A*33:03; FOXE1; ENSG00000178919; TAA
EVLATVKEER

SEQ ID NO: 24299 - protein, 10 aa, Homo sapiens
  Table A; Target 24299; HLA-A*68:01; FOXE1; ENSG00000178919; TAA
EVLATVKEER

SEQ ID NO: 24300 - protein, 10 aa, Homo sapiens
  Table A; Target 24300; HLA-C*07:06; FOXE1; ENSG00000178919; TAA
EVLATVKEER

SEQ ID NO: 24301 - protein, 8 aa, Homo sapiens
  Table A; Target 24301; HLA-B*54:01; FOXE1; ENSG00000178919; TAA
FAAAGRLA

SEQ ID NO: 24302 - protein, 8 aa, Homo sapiens
  Table A; Target 24302; HLA-C*03:04; FOXE1; ENSG00000178919; TAA
FAAAGRLA

SEQ ID NO: 24303 - protein, 8 aa, Homo sapiens
  Table A; Target 24303; HLA-C*16:01; FOXE1; ENSG00000178919; TAA
FAAAGRLA

SEQ ID NO: 24304 - protein, 9 aa, Homo sapiens
  Table A; Target 24304; HLA-C*16:01; FOXE1; ENSG00000178919; TAA
FAAAGRLAG

SEQ ID NO: 24305 - protein, 10 aa, Homo sapiens
  Table A; Target 24305; HLA-B*07:02; FOXE1; ENSG00000178919; TAA
FAAAGRLAGP

SEQ ID NO: 24306 - protein, 10 aa, Homo sapiens
  Table A; Target 24306; HLA-C*06:02; FOXE1; ENSG00000178919; TAA
FAAAGRLAGP

SEQ ID NO: 24307 - protein, 10 aa, Homo sapiens
  Table A; Target 24307; HLA-C*16:02; FOXE1; ENSG00000178919; TAA
FAAAGRLAGP

SEQ ID NO: 24308 - protein, 11 aa, Homo sapiens
  Table A; Target 24308; HLA-B*54:01; FOXE1; ENSG00000178919; TAA
FAAAGRLAGPA

SEQ ID NO: 24309 - protein, 11 aa, Homo sapiens
  Table A; Target 24309; HLA-C*12:03; FOXE1; ENSG00000178919; TAA
FAAAGRLAGPA

SEQ ID NO: 24310 - protein, 8 aa, Homo sapiens
  Table A; Target 24310; HLA-C*03:04; FOXE1; ENSG00000178919; TAA
FASAGAPA

SEQ ID NO: 24311 - protein, 9 aa, Homo sapiens
  Table A; Target 24311; HLA-B*35:03; FOXE1; ENSG00000178919; TAA
FASAGAPAT

SEQ ID NO: 24312 - protein, 9 aa, Homo sapiens
  Table A; Target 24312; HLA-C*03:03; FOXE1; ENSG00000178919; TAA
FASAGAPAT

SEQ ID NO: 24313 - protein, 9 aa, Homo sapiens
  Table A; Target 24313; HLA-C*03:04; FOXE1; ENSG00000178919; TAA
FASAGAPAT

SEQ ID NO: 24314 - protein, 9 aa, Homo sapiens
  Table A; Target 24314; HLA-C*16:01; FOXE1; ENSG00000178919; TAA
FASAGAPAT

SEQ ID NO: 24315 - protein, 9 aa, Homo sapiens
  Table A; Target 24315; HLA-C*16:02; FOXE1; ENSG00000178919; TAA
FASAGAPAT

SEQ ID NO: 24316 - protein, 10 aa, Homo sapiens
  Table A; Target 24316; HLA-C*03:03; FOXE1; ENSG00000178919; TAA
FASAGAPATT

SEQ ID NO: 24317 - protein, 10 aa, Homo sapiens
  Table A; Target 24317; HLA-C*03:04; FOXE1; ENSG00000178919; TAA
FASAGAPATT

SEQ ID NO: 24318 - protein, 11 aa, Homo sapiens
  Table A; Target 24318; HLA-C*02:02; FOXE1; ENSG00000178919; TAA
FASAGAPATTT

SEQ ID NO: 24319 - protein, 9 aa, Homo sapiens
  Table A; Target 24319; HLA-A*29:02; FOXE1; ENSG00000178919; TAA
FESGSFLRR

SEQ ID NO: 24320 - protein, 9 aa, Homo sapiens
  Table A; Target 24320; HLA-B*44:02; FOXE1; ENSG00000178919; TAA
FESGSFLRR

SEQ ID NO: 24321 - protein, 8 aa, Homo sapiens
  Table A; Target 24321; HLA-B*15:03; FOXE1; ENSG00000178919; TAA
FGALGACY

SEQ ID NO: 24322 - protein, 8 aa, Homo sapiens
  Table A; Target 24322; HLA-B*46:01; FOXE1; ENSG00000178919; TAA
FGALGACY

SEQ ID NO: 24323 - protein, 8 aa, Homo sapiens
  Table A; Target 24323; HLA-C*03:03; FOXE1; ENSG00000178919; TAA
FGALGACY

SEQ ID NO: 24324 - protein, 9 aa, Homo sapiens
  Table A; Target 24324; HLA-C*03:04; FOXE1; ENSG00000178919; TAA
FGLVPERPL

SEQ ID NO: 24325 - protein, 9 aa, Homo sapiens
  Table A; Target 24325; HLA-A*01:01; FOXE1; ENSG00000178919; TAA
FITERFPFY

SEQ ID NO: 24326 - protein, 9 aa, Homo sapiens
  Table A; Target 24326; HLA-A*29:02; FOXE1; ENSG00000178919; TAA
FITERFPFY

SEQ ID NO: 24327 - protein, 9 aa, Homo sapiens
  Table A; Target 24327; HLA-B*15:03; FOXE1; ENSG00000178919; TAA
FKRSDLSTY

SEQ ID NO: 24328 - protein, 8 aa, Homo sapiens
  Table A; Target 24328; HLA-B*08:01; FOXE1; ENSG00000178919; TAA
FLKIPREA

SEQ ID NO: 24329 - protein, 8 aa, Homo sapiens
  Table A; Target 24329; HLA-B*54:01; FOXE1; ENSG00000178919; TAA
FPFYRDNP

SEQ ID NO: 24330 - protein, 9 aa, Homo sapiens
  Table A; Target 24330; HLA-B*54:01; FOXE1; ENSG00000178919; TAA
FPFYRDNPK

SEQ ID NO: 24331 - protein, 8 aa, Homo sapiens
  Table A; Target 24331; HLA-B*35:01; FOXE1; ENSG00000178919; TAA
FPGAVPAA

SEQ ID NO: 24332 - protein, 8 aa, Homo sapiens
  Table A; Target 24332; HLA-B*35:03; FOXE1; ENSG00000178919; TAA
FPGAVPAA

SEQ ID NO: 24333 - protein, 8 aa, Homo sapiens
  Table A; Target 24333; HLA-B*54:01; FOXE1; ENSG00000178919; TAA
FPGAVPAA

SEQ ID NO: 24334 - protein, 8 aa, Homo sapiens
  Table A; Target 24334; HLA-B*55:01; FOXE1; ENSG00000178919; TAA
FPGAVPAA

SEQ ID NO: 24335 - protein, 8 aa, Homo sapiens
  Table A; Target 24335; HLA-B*56:01; FOXE1; ENSG00000178919; TAA
FPGAVPAA

SEQ ID NO: 24336 - protein, 9 aa, Homo sapiens
  Table A; Target 24336; HLA-A*33:03; FOXE1; ENSG00000178919; TAA
FPGAVPAAR

SEQ ID NO: 24337 - protein, 9 aa, Homo sapiens
  Table A; Target 24337; HLA-A*68:01; FOXE1; ENSG00000178919; TAA
FPGAVPAAR

SEQ ID NO: 24338 - protein, 9 aa, Homo sapiens
  Table A; Target 24338; HLA-B*35:01; FOXE1; ENSG00000178919; TAA
FPGAVPAAR

SEQ ID NO: 24339 - protein, 9 aa, Homo sapiens
  Table A; Target 24339; HLA-B*35:03; FOXE1; ENSG00000178919; TAA
FPGAVPAAR

SEQ ID NO: 24340 - protein, 9 aa, Homo sapiens
  Table A; Target 24340; HLA-B*54:01; FOXE1; ENSG00000178919; TAA
FPGAVPAAR

SEQ ID NO: 24341 - protein, 9 aa, Homo sapiens
  Table A; Target 24341; HLA-C*07:06; FOXE1; ENSG00000178919; TAA
FPGAVPAAR

SEQ ID NO: 24342 - protein, 10 aa, Homo sapiens
  Table A; Target 24342; HLA-A*23:01; FOXE1; ENSG00000178919; TAA
FYGRTSPGQF

SEQ ID NO: 24343 - protein, 10 aa, Homo sapiens
  Table A; Target 24343; HLA-A*24:02; FOXE1; ENSG00000178919; TAA
FYGRTSPGQF

SEQ ID NO: 24344 - protein, 10 aa, Homo sapiens
  Table A; Target 24344; HLA-C*14:02; FOXE1; ENSG00000178919; TAA
FYGRTSPGQF

SEQ ID NO: 24345 - protein, 10 aa, Homo sapiens
  Table A; Target 24345; HLA-B*56:01; FOXE1; ENSG00000178919; TAA
GAGSAIFAAA

SEQ ID NO: 24346 - protein, 11 aa, Homo sapiens
  Table A; Target 24346; HLA-A*68:01; FOXE1; ENSG00000178919; TAA
GAGVPGEATGR

SEQ ID NO: 24347 - protein, 11 aa, Homo sapiens
  Table A; Target 24347; HLA-B*27:05; FOXE1; ENSG00000178919; TAA
GAGVPGEATGR

SEQ ID NO: 24348 - protein, 11 aa, Homo sapiens
  Table A; Target 24348; HLA-C*07:06; FOXE1; ENSG00000178919; TAA
GAGVPGEATGR

SEQ ID NO: 24349 - protein, 9 aa, Homo sapiens
  Table A; Target 24349; HLA-A*25:01; FOXE1; ENSG00000178919; TAA
GAPATTTGY

SEQ ID NO: 24350 - protein, 9 aa, Homo sapiens
  Table A; Target 24350; HLA-A*26:01; FOXE1; ENSG00000178919; TAA
GAPATTTGY

SEQ ID NO: 24351 - protein, 9 aa, Homo sapiens
  Table A; Target 24351; HLA-A*29:02; FOXE1; ENSG00000178919; TAA
GAPATTTGY

SEQ ID NO: 24352 - protein, 9 aa, Homo sapiens
  Table A; Target 24352; HLA-A*30:02; FOXE1; ENSG00000178919; TAA
GAPATTTGY

SEQ ID NO: 24353 - protein, 9 aa, Homo sapiens
  Table A; Target 24353; HLA-A*32:01; FOXE1; ENSG00000178919; TAA
GAPATTTGY

SEQ ID NO: 24354 - protein, 9 aa, Homo sapiens
  Table A; Target 24354; HLA-B*15:01; FOXE1; ENSG00000178919; TAA
GAPATTTGY

SEQ ID NO: 24355 - protein, 9 aa, Homo sapiens
  Table A; Target 24355; HLA-B*15:03; FOXE1; ENSG00000178919; TAA
GAPATTTGY

SEQ ID NO: 24356 - protein, 9 aa, Homo sapiens
  Table A; Target 24356; HLA-B*35:01; FOXE1; ENSG00000178919; TAA
GAPATTTGY

SEQ ID NO: 24357 - protein, 9 aa, Homo sapiens
  Table A; Target 24357; HLA-B*39:01; FOXE1; ENSG00000178919; TAA
GAPATTTGY

SEQ ID NO: 24358 - protein, 9 aa, Homo sapiens
  Table A; Target 24358; HLA-B*46:01; FOXE1; ENSG00000178919; TAA
GAPATTTGY

SEQ ID NO: 24359 - protein, 9 aa, Homo sapiens
  Table A; Target 24359; HLA-B*58:01; FOXE1; ENSG00000178919; TAA
GAPATTTGY

SEQ ID NO: 24360 - protein, 9 aa, Homo sapiens
  Table A; Target 24360; HLA-C*01:02; FOXE1; ENSG00000178919; TAA
GAPATTTGY

SEQ ID NO: 24361 - protein, 9 aa, Homo sapiens
  Table A; Target 24361; HLA-C*02:02; FOXE1; ENSG00000178919; TAA
GAPATTTGY

SEQ ID NO: 24362 - protein, 9 aa, Homo sapiens
  Table A; Target 24362; HLA-C*07:01; FOXE1; ENSG00000178919; TAA
GAPATTTGY

SEQ ID NO: 24363 - protein, 9 aa, Homo sapiens
  Table A; Target 24363; HLA-C*07:04; FOXE1; ENSG00000178919; TAA
GAPATTTGY

SEQ ID NO: 24364 - protein, 9 aa, Homo sapiens
  Table A; Target 24364; HLA-C*14:02; FOXE1; ENSG00000178919; TAA
GAPATTTGY

SEQ ID NO: 24365 - protein, 9 aa, Homo sapiens
  Table A; Target 24365; HLA-C*16:04; FOXE1; ENSG00000178919; TAA
GAPATTTGY

SEQ ID NO: 24366 - protein, 11 aa, Homo sapiens
  Table A; Target 24366; HLA-C*07:02; FOXE1; ENSG00000178919; TAA
GAPATTTGYQP

SEQ ID NO: 24367 - protein, 9 aa, Homo sapiens
  Table A; Target 24367; HLA-B*07:02; FOXE1; ENSG00000178919; TAA
GARPANPSA

SEQ ID NO: 24368 - protein, 9 aa, Homo sapiens
  Table A; Target 24368; HLA-B*54:01; FOXE1; ENSG00000178919; TAA
GARPANPSA

SEQ ID NO: 24369 - protein, 9 aa, Homo sapiens
  Table A; Target 24369; HLA-B*55:01; FOXE1; ENSG00000178919; TAA
GARPANPSA

SEQ ID NO: 24370 - protein, 9 aa, Homo sapiens
  Table A; Target 24370; HLA-B*56:01; FOXE1; ENSG00000178919; TAA
GARPANPSA

SEQ ID NO: 24371 - protein, 10 aa, Homo sapiens
  Table A; Target 24371; HLA-A*25:01; FOXE1; ENSG00000178919; TAA
GARPANPSAY

SEQ ID NO: 24372 - protein, 10 aa, Homo sapiens
  Table A; Target 24372; HLA-A*26:01; FOXE1; ENSG00000178919; TAA
GARPANPSAY

SEQ ID NO: 24373 - protein, 10 aa, Homo sapiens
  Table A; Target 24373; HLA-A*30:02; FOXE1; ENSG00000178919; TAA
GARPANPSAY

SEQ ID NO: 24374 - protein, 10 aa, Homo sapiens
  Table A; Target 24374; HLA-A*32:01; FOXE1; ENSG00000178919; TAA
GARPANPSAY

SEQ ID NO: 24375 - protein, 10 aa, Homo sapiens
  Table A; Target 24375; HLA-B*07:02; FOXE1; ENSG00000178919; TAA
GARPANPSAY

SEQ ID NO: 24376 - protein, 10 aa, Homo sapiens
  Table A; Target 24376; HLA-B*15:01; FOXE1; ENSG00000178919; TAA
GARPANPSAY

SEQ ID NO: 24377 - protein, 10 aa, Homo sapiens
  Table A; Target 24377; HLA-B*15:03; FOXE1; ENSG00000178919; TAA
GARPANPSAY

SEQ ID NO: 24378 - protein, 10 aa, Homo sapiens
  Table A; Target 24378; HLA-B*39:01; FOXE1; ENSG00000178919; TAA
GARPANPSAY

SEQ ID NO: 24379 - protein, 10 aa, Homo sapiens
  Table A; Target 24379; HLA-B*46:01; FOXE1; ENSG00000178919; TAA
GARPANPSAY

SEQ ID NO: 24380 - protein, 10 aa, Homo sapiens
  Table A; Target 24380; HLA-B*58:01; FOXE1; ENSG00000178919; TAA
GARPANPSAY

SEQ ID NO: 24381 - protein, 10 aa, Homo sapiens
  Table A; Target 24381; HLA-C*01:02; FOXE1; ENSG00000178919; TAA
GARPANPSAY

SEQ ID NO: 24382 - protein, 10 aa, Homo sapiens
  Table A; Target 24382; HLA-C*02:02; FOXE1; ENSG00000178919; TAA
GARPANPSAY

SEQ ID NO: 24383 - protein, 10 aa, Homo sapiens
  Table A; Target 24383; HLA-C*06:02; FOXE1; ENSG00000178919; TAA
GARPANPSAY

SEQ ID NO: 24384 - protein, 10 aa, Homo sapiens
  Table A; Target 24384; HLA-C*07:02; FOXE1; ENSG00000178919; TAA
GARPANPSAY

SEQ ID NO: 24385 - protein, 10 aa, Homo sapiens
  Table A; Target 24385; HLA-C*07:04; FOXE1; ENSG00000178919; TAA
GARPANPSAY

SEQ ID NO: 24386 - protein, 10 aa, Homo sapiens
  Table A; Target 24386; HLA-C*12:03; FOXE1; ENSG00000178919; TAA
GARPANPSAY

SEQ ID NO: 24387 - protein, 10 aa, Homo sapiens
  Table A; Target 24387; HLA-C*14:02; FOXE1; ENSG00000178919; TAA
GARPANPSAY

SEQ ID NO: 24388 - protein, 10 aa, Homo sapiens
  Table A; Target 24388; HLA-C*16:02; FOXE1; ENSG00000178919; TAA
GARPANPSAY

SEQ ID NO: 24389 - protein, 10 aa, Homo sapiens
  Table A; Target 24389; HLA-C*16:04; FOXE1; ENSG00000178919; TAA
GARPANPSAY

SEQ ID NO: 24390 - protein, 9 aa, Homo sapiens
  Table A; Target 24390; HLA-C*16:02; FOXE1; ENSG00000178919; TAA
GASAGAYHA

SEQ ID NO: 24391 - protein, 10 aa, Homo sapiens
  Table A; Target 24391; HLA-A*11:01; FOXE1; ENSG00000178919; TAA
GASAGAYHAR

SEQ ID NO: 24392 - protein, 10 aa, Homo sapiens
  Table A; Target 24392; HLA-A*31:01; FOXE1; ENSG00000178919; TAA
GASAGAYHAR

SEQ ID NO: 24393 - protein, 10 aa, Homo sapiens
  Table A; Target 24393; HLA-A*33:01; FOXE1; ENSG00000178919; TAA
GASAGAYHAR

SEQ ID NO: 24394 - protein, 10 aa, Homo sapiens
  Table A; Target 24394; HLA-A*33:03; FOXE1; ENSG00000178919; TAA
GASAGAYHAR

SEQ ID NO: 24395 - protein, 10 aa, Homo sapiens
  Table A; Target 24395; HLA-A*68:01; FOXE1; ENSG00000178919; TAA
GASAGAYHAR

SEQ ID NO: 24396 - protein, 10 aa, Homo sapiens
  Table A; Target 24396; HLA-C*07:06; FOXE1; ENSG00000178919; TAA
GASAGAYHAR

SEQ ID NO: 24397 - protein, 10 aa, Homo sapiens
  Table A; Target 24397; HLA-C*16:02; FOXE1; ENSG00000178919; TAA
GASAGAYHAR

SEQ ID NO: 24398 - protein, 9 aa, Homo sapiens
  Table A; Target 24398; HLA-C*03:04; FOXE1; ENSG00000178919; TAA
GAVPAARPP

SEQ ID NO: 24399 - protein, 9 aa, Homo sapiens
  Table A; Target 24399; HLA-C*16:02; FOXE1; ENSG00000178919; TAA
GAVPAARPP

SEQ ID NO: 24400 - protein, 10 aa, Homo sapiens
  Table A; Target 24400; HLA-A*30:02; FOXE1; ENSG00000178919; TAA
GAVPAARPPY

SEQ ID NO: 24401 - protein, 9 aa, Homo sapiens
  Table A; Target 24401; HLA-B*54:01; FOXE1; ENSG00000178919; TAA
GAYHARHAA

SEQ ID NO: 24402 - protein, 11 aa, Homo sapiens
  Table A; Target 24402; HLA-A*30:02; FOXE1; ENSG00000178919; TAA
GAYHARHAAAY

SEQ ID NO: 24403 - protein, 11 aa, Homo sapiens
  Table A; Target 24403; HLA-B*13:02; FOXE1; ENSG00000178919; TAA
GAYPQGAGSAI

SEQ ID NO: 24404 - protein, 11 aa, Homo sapiens
  Table A; Target 24404; HLA-B*15:01; FOXE1; ENSG00000178919; TAA
GAYPQGAGSAI

SEQ ID NO: 24405 - protein, 11 aa, Homo sapiens
  Table A; Target 24405; HLA-B*15:03; FOXE1; ENSG00000178919; TAA
GAYPQGAGSAI

SEQ ID NO: 24406 - protein, 11 aa, Homo sapiens
  Table A; Target 24406; HLA-B*46:01; FOXE1; ENSG00000178919; TAA
GAYPQGAGSAI

SEQ ID NO: 24407 - protein, 11 aa, Homo sapiens
  Table A; Target 24407; HLA-B*51:01; FOXE1; ENSG00000178919; TAA
GAYPQGAGSAI

SEQ ID NO: 24408 - protein, 11 aa, Homo sapiens
  Table A; Target 24408; HLA-B*58:01; FOXE1; ENSG00000178919; TAA
GAYPQGAGSAI

SEQ ID NO: 24409 - protein, 11 aa, Homo sapiens
  Table A; Target 24409; HLA-C*01:02; FOXE1; ENSG00000178919; TAA
GAYPQGAGSAI

SEQ ID NO: 24410 - protein, 11 aa, Homo sapiens
  Table A; Target 24410; HLA-C*02:02; FOXE1; ENSG00000178919; TAA
GAYPQGAGSAI

SEQ ID NO: 24411 - protein, 11 aa, Homo sapiens
  Table A; Target 24411; HLA-C*03:03; FOXE1; ENSG00000178919; TAA
GAYPQGAGSAI

SEQ ID NO: 24412 - protein, 11 aa, Homo sapiens
  Table A; Target 24412; HLA-C*03:04; FOXE1; ENSG00000178919; TAA
GAYPQGAGSAI

SEQ ID NO: 24413 - protein, 11 aa, Homo sapiens
  Table A; Target 24413; HLA-C*05:01; FOXE1; ENSG00000178919; TAA
GAYPQGAGSAI

SEQ ID NO: 24414 - protein, 11 aa, Homo sapiens
  Table A; Target 24414; HLA-C*14:02; FOXE1; ENSG00000178919; TAA
GAYPQGAGSAI

SEQ ID NO: 24415 - protein, 11 aa, Homo sapiens
  Table A; Target 24415; HLA-C*16:04; FOXE1; ENSG00000178919; TAA
GAYPQGAGSAI

SEQ ID NO: 24416 - protein, 10 aa, Homo sapiens
  Table A; Target 24416; HLA-C*16:02; FOXE1; ENSG00000178919; TAA
GCTGARPANP

SEQ ID NO: 24417 - protein, 9 aa, Homo sapiens
  Table A; Target 24417; HLA-A*30:01; FOXE1; ENSG00000178919; TAA
GETAAGAGV

SEQ ID NO: 24418 - protein, 9 aa, Homo sapiens
  Table A; Target 24418; HLA-B*13:02; FOXE1; ENSG00000178919; TAA
GETAAGAGV

SEQ ID NO: 24419 - protein, 9 aa, Homo sapiens
  Table A; Target 24419; HLA-B*37:01; FOXE1; ENSG00000178919; TAA
GETAAGAGV

SEQ ID NO: 24420 - protein, 9 aa, Homo sapiens
  Table A; Target 24420; HLA-B*40:01; FOXE1; ENSG00000178919; TAA
GETAAGAGV

SEQ ID NO: 24421 - protein, 9 aa, Homo sapiens
  Table A; Target 24421; HLA-B*44:03; FOXE1; ENSG00000178919; TAA
GETAAGAGV

SEQ ID NO: 24422 - protein, 9 aa, Homo sapiens
  Table A; Target 24422; HLA-B*49:01; FOXE1; ENSG00000178919; TAA
GETAAGAGV

SEQ ID NO: 24423 - protein, 10 aa, Homo sapiens
  Table A; Target 24423; HLA-B*40:02; FOXE1; ENSG00000178919; TAA
GETAAGAGVP

SEQ ID NO: 24424 - protein, 11 aa, Homo sapiens
  Table A; Target 24424; HLA-C*04:01; FOXE1; ENSG00000178919; TAA
GETAAGAGVPG

SEQ ID NO: 24425 - protein, 8 aa, Homo sapiens
  Table A; Target 24425; HLA-A*30:02; FOXE1; ENSG00000178919; TAA
GGASAGAY

SEQ ID NO: 24426 - protein, 8 aa, Homo sapiens
  Table A; Target 24426; HLA-B*15:01; FOXE1; ENSG00000178919; TAA
GGASAGAY

SEQ ID NO: 24427 - protein, 8 aa, Homo sapiens
  Table A; Target 24427; HLA-B*39:01; FOXE1; ENSG00000178919; TAA
GGASAGAY

SEQ ID NO: 24428 - protein, 9 aa, Homo sapiens
  Table A; Target 24428; HLA-B*27:05; FOXE1; ENSG00000178919; TAA
GGASAGAYH

SEQ ID NO: 24429 - protein, 11 aa, Homo sapiens
  Table A; Target 24429; HLA-A*31:01; FOXE1; ENSG00000178919; TAA
GGASAGAYHAR

SEQ ID NO: 24430 - protein, 11 aa, Homo sapiens
  Table A; Target 24430; HLA-A*33:01; FOXE1; ENSG00000178919; TAA
GGASAGAYHAR

SEQ ID NO: 24431 - protein, 11 aa, Homo sapiens
  Table A; Target 24431; HLA-A*33:03; FOXE1; ENSG00000178919; TAA
GGASAGAYHAR

SEQ ID NO: 24432 - protein, 11 aa, Homo sapiens
  Table A; Target 24432; HLA-A*68:01; FOXE1; ENSG00000178919; TAA
GGASAGAYHAR

SEQ ID NO: 24433 - protein, 11 aa, Homo sapiens
  Table A; Target 24433; HLA-C*07:06; FOXE1; ENSG00000178919; TAA
GGASAGAYHAR

SEQ ID NO: 24434 - protein, 9 aa, Homo sapiens
  Table A; Target 24434; HLA-B*08:01; FOXE1; ENSG00000178919; TAA
GGIDRFVSA

SEQ ID NO: 24435 - protein, 9 aa, Homo sapiens
  Table A; Target 24435; HLA-B*46:01; FOXE1; ENSG00000178919; TAA
GGIDRFVSA

SEQ ID NO: 24436 - protein, 9 aa, Homo sapiens
  Table A; Target 24436; HLA-B*54:01; FOXE1; ENSG00000178919; TAA
GGIDRFVSA

SEQ ID NO: 24437 - protein, 9 aa, Homo sapiens
  Table A; Target 24437; HLA-B*55:01; FOXE1; ENSG00000178919; TAA
GGIDRFVSA

SEQ ID NO: 24438 - protein, 9 aa, Homo sapiens
  Table A; Target 24438; HLA-B*56:01; FOXE1; ENSG00000178919; TAA
GGIDRFVSA

SEQ ID NO: 24439 - protein, 10 aa, Homo sapiens
  Table A; Target 24439; HLA-A*30:01; FOXE1; ENSG00000178919; TAA
GGIDRFVSAM

SEQ ID NO: 24440 - protein, 10 aa, Homo sapiens
  Table A; Target 24440; HLA-B*39:01; FOXE1; ENSG00000178919; TAA
GGIDRFVSAM

SEQ ID NO: 24441 - protein, 10 aa, Homo sapiens
  Table A; Target 24441; HLA-B*46:01; FOXE1; ENSG00000178919; TAA
GGIDRFVSAM

SEQ ID NO: 24442 - protein, 10 aa, Homo sapiens
  Table A; Target 24442; HLA-C*02:02; FOXE1; ENSG00000178919; TAA
GGIDRFVSAM

SEQ ID NO: 24443 - protein, 9 aa, Homo sapiens
  Table A; Target 24443; HLA-B*15:01; FOXE1; ENSG00000178919; TAA
GGVETTVDF

SEQ ID NO: 24444 - protein, 9 aa, Homo sapiens
  Table A; Target 24444; HLA-B*15:03; FOXE1; ENSG00000178919; TAA
GGVETTVDF

SEQ ID NO: 24445 - protein, 9 aa, Homo sapiens
  Table A; Target 24445; HLA-B*46:01; FOXE1; ENSG00000178919; TAA
GGVETTVDF

SEQ ID NO: 24446 - protein, 9 aa, Homo sapiens
  Table A; Target 24446; HLA-C*02:02; FOXE1; ENSG00000178919; TAA
GGVETTVDF

SEQ ID NO: 24447 - protein, 10 aa, Homo sapiens
  Table A; Target 24447; HLA-A*30:02; FOXE1; ENSG00000178919; TAA
GGVETTVDFY

SEQ ID NO: 24448 - protein, 10 aa, Homo sapiens
  Table A; Target 24448; HLA-B*39:01; FOXE1; ENSG00000178919; TAA
GGVETTVDFY

SEQ ID NO: 24449 - protein, 9 aa, Homo sapiens
  Table A; Target 24449; HLA-A*02:07; FOXE1; ENSG00000178919; TAA
GIDRFVSAM

SEQ ID NO: 24450 - protein, 9 aa, Homo sapiens
  Table A; Target 24450; HLA-B*15:03; FOXE1; ENSG00000178919; TAA
GIDRFVSAM

SEQ ID NO: 24451 - protein, 9 aa, Homo sapiens
  Table A; Target 24451; HLA-B*27:05; FOXE1; ENSG00000178919; TAA
GIDRFVSAM

SEQ ID NO: 24452 - protein, 9 aa, Homo sapiens
  Table A; Target 24452; HLA-B*55:01; FOXE1; ENSG00000178919; TAA
GIDRFVSAM

SEQ ID NO: 24453 - protein, 9 aa, Homo sapiens
  Table A; Target 24453; HLA-C*04:01; FOXE1; ENSG00000178919; TAA
GIDRFVSAM

SEQ ID NO: 24454 - protein, 9 aa, Homo sapiens
  Table A; Target 24454; HLA-C*05:01; FOXE1; ENSG00000178919; TAA
GIDRFVSAM

SEQ ID NO: 24455 - protein, 9 aa, Homo sapiens
  Table A; Target 24455; HLA-A*03:01; FOXE1; ENSG00000178919; TAA
GIYKFITER

SEQ ID NO: 24456 - protein, 9 aa, Homo sapiens
  Table A; Target 24456; HLA-A*11:01; FOXE1; ENSG00000178919; TAA
GIYKFITER

SEQ ID NO: 24457 - protein, 9 aa, Homo sapiens
  Table A; Target 24457; HLA-A*31:01; FOXE1; ENSG00000178919; TAA
GIYKFITER

SEQ ID NO: 24458 - protein, 10 aa, Homo sapiens
  Table A; Target 24458; HLA-A*02:03; FOXE1; ENSG00000178919; TAA
GLVPERPLSP

SEQ ID NO: 24459 - protein, 11 aa, Homo sapiens
  Table A; Target 24459; HLA-B*07:02; FOXE1; ENSG00000178919; TAA
GPAPSGPGGSC

SEQ ID NO: 24460 - protein, 11 aa, Homo sapiens
  Table A; Target 24460; HLA-B*56:01; FOXE1; ENSG00000178919; TAA
GPAPSGPGGSC

SEQ ID NO: 24461 - protein, 11 aa, Homo sapiens
  Table A; Target 24461; HLA-C*07:02; FOXE1; ENSG00000178919; TAA
GPAPSGPGGSC

SEQ ID NO: 24462 - protein, 9 aa, Homo sapiens
  Table A; Target 24462; HLA-B*56:01; FOXE1; ENSG00000178919; TAA
GPASPPAGG

SEQ ID NO: 24463 - protein, 11 aa, Homo sapiens
  Table A; Target 24463; HLA-B*39:01; FOXE1; ENSG00000178919; TAA
GPASPPAGGSS

SEQ ID NO: 24464 - protein, 9 aa, Homo sapiens
  Table A; Target 24464; HLA-B*55:01; FOXE1; ENSG00000178919; TAA
GPDGAYPQG

SEQ ID NO: 24465 - protein, 10 aa, Homo sapiens
  Table A; Target 24465; HLA-B*56:01; FOXE1; ENSG00000178919; TAA
GPDGAYPQGA

SEQ ID NO: 24466 - protein, 9 aa, Homo sapiens
  Table A; Target 24466; HLA-A*02:07; FOXE1; ENSG00000178919; TAA
GPPPPQPEV

SEQ ID NO: 24467 - protein, 9 aa, Homo sapiens
  Table A; Target 24467; HLA-B*07:02; FOXE1; ENSG00000178919; TAA
GPPPPQPEV

SEQ ID NO: 24468 - protein, 9 aa, Homo sapiens
  Table A; Target 24468; HLA-B*51:01; FOXE1; ENSG00000178919; TAA
GPPPPQPEV

SEQ ID NO: 24469 - protein, 9 aa, Homo sapiens
  Table A; Target 24469; HLA-B*54:01; FOXE1; ENSG00000178919; TAA
GPPPPQPEV

SEQ ID NO: 24470 - protein, 9 aa, Homo sapiens
  Table A; Target 24470; HLA-B*55:01; FOXE1; ENSG00000178919; TAA
GPPPPQPEV

SEQ ID NO: 24471 - protein, 9 aa, Homo sapiens
  Table A; Target 24471; HLA-B*56:01; FOXE1; ENSG00000178919; TAA
GPPPPQPEV

SEQ ID NO: 24472 - protein, 10 aa, Homo sapiens
  Table A; Target 24472; HLA-B*07:02; FOXE1; ENSG00000178919; TAA
GPPPPQPEVL

SEQ ID NO: 24473 - protein, 8 aa, Homo sapiens
  Table A; Target 24473; HLA-B*13:02; FOXE1; ENSG00000178919; TAA
GQFGALGA

SEQ ID NO: 24474 - protein, 10 aa, Homo sapiens
  Table A; Target 24474; HLA-A*26:01; FOXE1; ENSG00000178919; TAA
GQFGALGACY

SEQ ID NO: 24475 - protein, 10 aa, Homo sapiens
  Table A; Target 24475; HLA-A*29:02; FOXE1; ENSG00000178919; TAA
GQFGALGACY

SEQ ID NO: 24476 - protein, 10 aa, Homo sapiens
  Table A; Target 24476; HLA-A*30:02; FOXE1; ENSG00000178919; TAA
GQFGALGACY

SEQ ID NO: 24477 - protein, 10 aa, Homo sapiens
  Table A; Target 24477; HLA-A*32:01; FOXE1; ENSG00000178919; TAA
GQFGALGACY

SEQ ID NO: 24478 - protein, 10 aa, Homo sapiens
  Table A; Target 24478; HLA-B*15:01; FOXE1; ENSG00000178919; TAA
GQFGALGACY

SEQ ID NO: 24479 - protein, 10 aa, Homo sapiens
  Table A; Target 24479; HLA-B*15:03; FOXE1; ENSG00000178919; TAA
GQFGALGACY

SEQ ID NO: 24480 - protein, 10 aa, Homo sapiens
  Table A; Target 24480; HLA-C*07:04; FOXE1; ENSG00000178919; TAA
GQFGALGACY

SEQ ID NO: 24481 - protein, 10 aa, Homo sapiens
  Table A; Target 24481; HLA-C*16:04; FOXE1; ENSG00000178919; TAA
GQFGALGACY

SEQ ID NO: 24482 - protein, 11 aa, Homo sapiens
  Table A; Target 24482; HLA-A*26:01; FOXE1; ENSG00000178919; TAA
GQLGGASAGAY

SEQ ID NO: 24483 - protein, 11 aa, Homo sapiens
  Table A; Target 24483; HLA-A*29:02; FOXE1; ENSG00000178919; TAA
GQLGGASAGAY

SEQ ID NO: 24484 - protein, 11 aa, Homo sapiens
  Table A; Target 24484; HLA-A*30:02; FOXE1; ENSG00000178919; TAA
GQLGGASAGAY

SEQ ID NO: 24485 - protein, 11 aa, Homo sapiens
  Table A; Target 24485; HLA-A*32:01; FOXE1; ENSG00000178919; TAA
GQLGGASAGAY

SEQ ID NO: 24486 - protein, 11 aa, Homo sapiens
  Table A; Target 24486; HLA-B*13:02; FOXE1; ENSG00000178919; TAA
GQLGGASAGAY

SEQ ID NO: 24487 - protein, 11 aa, Homo sapiens
  Table A; Target 24487; HLA-B*15:01; FOXE1; ENSG00000178919; TAA
GQLGGASAGAY

SEQ ID NO: 24488 - protein, 11 aa, Homo sapiens
  Table A; Target 24488; HLA-B*15:03; FOXE1; ENSG00000178919; TAA
GQLGGASAGAY

SEQ ID NO: 24489 - protein, 11 aa, Homo sapiens
  Table A; Target 24489; HLA-B*27:02; FOXE1; ENSG00000178919; TAA
GQLGGASAGAY

SEQ ID NO: 24490 - protein, 11 aa, Homo sapiens
  Table A; Target 24490; HLA-B*27:05; FOXE1; ENSG00000178919; TAA
GQLGGASAGAY

SEQ ID NO: 24491 - protein, 11 aa, Homo sapiens
  Table A; Target 24491; HLA-B*39:01; FOXE1; ENSG00000178919; TAA
GQLGGASAGAY

SEQ ID NO: 24492 - protein, 11 aa, Homo sapiens
  Table A; Target 24492; HLA-B*44:03; FOXE1; ENSG00000178919; TAA
GQLGGASAGAY

SEQ ID NO: 24493 - protein, 11 aa, Homo sapiens
  Table A; Target 24493; HLA-B*46:01; FOXE1; ENSG00000178919; TAA
GQLGGASAGAY

SEQ ID NO: 24494 - protein, 11 aa, Homo sapiens
  Table A; Target 24494; HLA-C*01:02; FOXE1; ENSG00000178919; TAA
GQLGGASAGAY

SEQ ID NO: 24495 - protein, 11 aa, Homo sapiens
  Table A; Target 24495; HLA-C*02:02; FOXE1; ENSG00000178919; TAA
GQLGGASAGAY

SEQ ID NO: 24496 - protein, 11 aa, Homo sapiens
  Table A; Target 24496; HLA-C*04:01; FOXE1; ENSG00000178919; TAA
GQLGGASAGAY

SEQ ID NO: 24497 - protein, 11 aa, Homo sapiens
  Table A; Target 24497; HLA-C*07:04; FOXE1; ENSG00000178919; TAA
GQLGGASAGAY

SEQ ID NO: 24498 - protein, 11 aa, Homo sapiens
  Table A; Target 24498; HLA-C*12:03; FOXE1; ENSG00000178919; TAA
GQLGGASAGAY

SEQ ID NO: 24499 - protein, 11 aa, Homo sapiens
  Table A; Target 24499; HLA-C*14:02; FOXE1; ENSG00000178919; TAA
GQLGGASAGAY

SEQ ID NO: 24500 - protein, 11 aa, Homo sapiens
  Table A; Target 24500; HLA-C*16:04; FOXE1; ENSG00000178919; TAA
GQLGGASAGAY

SEQ ID NO: 24501 - protein, 9 aa, Homo sapiens
  Table A; Target 24501; HLA-B*27:05; FOXE1; ENSG00000178919; TAA
GRLAGPASP

SEQ ID NO: 24502 - protein, 10 aa, Homo sapiens
  Table A; Target 24502; HLA-B*27:02; FOXE1; ENSG00000178919; TAA
GRLAGPASPP

SEQ ID NO: 24503 - protein, 10 aa, Homo sapiens
  Table A; Target 24503; HLA-B*27:05; FOXE1; ENSG00000178919; TAA
GRLAGPASPP

SEQ ID NO: 24504 - protein, 10 aa, Homo sapiens
  Table A; Target 24504; HLA-C*06:02; FOXE1; ENSG00000178919; TAA
GRLAGPASPP

SEQ ID NO: 24505 - protein, 10 aa, Homo sapiens
  Table A; Target 24505; HLA-C*07:02; FOXE1; ENSG00000178919; TAA
GRLAGPASPP

SEQ ID NO: 24506 - protein, 11 aa, Homo sapiens
  Table A; Target 24506; HLA-B*27:05; FOXE1; ENSG00000178919; TAA
GRLAGPASPPA

SEQ ID NO: 24507 - protein, 9 aa, Homo sapiens
  Table A; Target 24507; HLA-B*27:05; FOXE1; ENSG00000178919; TAA
GRTSPGQFG

SEQ ID NO: 24508 - protein, 11 aa, Homo sapiens
  Table A; Target 24508; HLA-B*27:05; FOXE1; ENSG00000178919; TAA
GRTSPGQFGAL

SEQ ID NO: 24509 - protein, 11 aa, Homo sapiens
  Table A; Target 24509; HLA-B*39:01; FOXE1; ENSG00000178919; TAA
GRTSPGQFGAL

SEQ ID NO: 24510 - protein, 10 aa, Homo sapiens
  Table A; Target 24510; HLA-A*31:01; FOXE1; ENSG00000178919; TAA
GSAIFAAAGR

SEQ ID NO: 24511 - protein, 10 aa, Homo sapiens
  Table A; Target 24511; HLA-A*68:01; FOXE1; ENSG00000178919; TAA
GSAIFAAAGR

SEQ ID NO: 24512 - protein, 10 aa, Homo sapiens
  Table A; Target 24512; HLA-B*27:02; FOXE1; ENSG00000178919; TAA
GSAIFAAAGR

SEQ ID NO: 24513 - protein, 10 aa, Homo sapiens
  Table A; Target 24513; HLA-C*07:06; FOXE1; ENSG00000178919; TAA
GSAIFAAAGR

SEQ ID NO: 24514 - protein, 10 aa, Homo sapiens
  Table A; Target 24514; HLA-B*39:01; FOXE1; ENSG00000178919; TAA
GSSGGVETTV

SEQ ID NO: 24515 - protein, 9 aa, Homo sapiens
  Table A; Target 24515; HLA-A*01:01; FOXE1; ENSG00000178919; TAA
GVETTVDFY

SEQ ID NO: 24516 - protein, 9 aa, Homo sapiens
  Table A; Target 24516; HLA-A*29:02; FOXE1; ENSG00000178919; TAA
GVETTVDFY

SEQ ID NO: 24517 - protein, 9 aa, Homo sapiens
  Table A; Target 24517; HLA-A*30:02; FOXE1; ENSG00000178919; TAA
GVETTVDFY

SEQ ID NO: 24518 - protein, 9 aa, Homo sapiens
  Table A; Target 24518; HLA-C*07:06; FOXE1; ENSG00000178919; TAA
GVPGEATGR

SEQ ID NO: 24519 - protein, 9 aa, Homo sapiens
  Table A; Target 24519; HLA-B*56:01; FOXE1; ENSG00000178919; TAA
GYAPPSLAA

SEQ ID NO: 24520 - protein, 9 aa, Homo sapiens
  Table A; Target 24520; HLA-C*14:02; FOXE1; ENSG00000178919; TAA
GYAPPSLAA

SEQ ID NO: 24521 - protein, 9 aa, Homo sapiens
  Table A; Target 24521; HLA-C*14:02; FOXE1; ENSG00000178919; TAA
GYQPAGCTG

SEQ ID NO: 24522 - protein, 9 aa, Homo sapiens
  Table A; Target 24522; HLA-B*51:01; FOXE1; ENSG00000178919; TAA
HAAAYPGGI

SEQ ID NO: 24523 - protein, 11 aa, Homo sapiens
  Table A; Target 24523; HLA-A*68:01; FOXE1; ENSG00000178919; TAA
HAAAYPGGIDR

SEQ ID NO: 24524 - protein, 11 aa, Homo sapiens
  Table A; Target 24524; HLA-A*68:02; FOXE1; ENSG00000178919; TAA
HAAAYPGGIDR

SEQ ID NO: 24525 - protein, 11 aa, Homo sapiens
  Table A; Target 24525; HLA-C*07:06; FOXE1; ENSG00000178919; TAA
HAAAYPGGIDR

SEQ ID NO: 24526 - protein, 9 aa, Homo sapiens
  Table A; Target 24526; HLA-B*07:02; FOXE1; ENSG00000178919; TAA
HAPERRLTL

SEQ ID NO: 24527 - protein, 9 aa, Homo sapiens
  Table A; Target 24527; HLA-B*08:01; FOXE1; ENSG00000178919; TAA
HAPERRLTL

SEQ ID NO: 24528 - protein, 9 aa, Homo sapiens
  Table A; Target 24528; HLA-B*51:01; FOXE1; ENSG00000178919; TAA
HAPERRLTL

SEQ ID NO: 24529 - protein, 9 aa, Homo sapiens
  Table A; Target 24529; HLA-C*01:02; FOXE1; ENSG00000178919; TAA
HAPERRLTL

SEQ ID NO: 24530 - protein, 9 aa, Homo sapiens
  Table A; Target 24530; HLA-C*07:02; FOXE1; ENSG00000178919; TAA
HAPERRLTL

SEQ ID NO: 24531 - protein, 9 aa, Homo sapiens
  Table A; Target 24531; HLA-C*16:01; FOXE1; ENSG00000178919; TAA
HAPERRLTL

SEQ ID NO: 24532 - protein, 8 aa, Homo sapiens
  Table A; Target 24532; HLA-B*46:01; FOXE1; ENSG00000178919; TAA
HARHAAAY

SEQ ID NO: 24533 - protein, 8 aa, Homo sapiens
  Table A; Target 24533; HLA-B*37:01; FOXE1; ENSG00000178919; TAA
HDAAAAAA

SEQ ID NO: 24534 - protein, 9 aa, Homo sapiens
  Table A; Target 24534; HLA-A*30:01; FOXE1; ENSG00000178919; TAA
HDAAAAAAA

SEQ ID NO: 24535 - protein, 9 aa, Homo sapiens
  Table A; Target 24535; HLA-B*37:01; FOXE1; ENSG00000178919; TAA
HDAAAAAAA

SEQ ID NO: 24536 - protein, 9 aa, Homo sapiens
  Table A; Target 24536; HLA-B*54:01; FOXE1; ENSG00000178919; TAA
HDAAAAAAA

SEQ ID NO: 24537 - protein, 9 aa, Homo sapiens
  Table A; Target 24537; HLA-B*56:01; FOXE1; ENSG00000178919; TAA
HDAAAAAAA

SEQ ID NO: 24538 - protein, 9 aa, Homo sapiens
  Table A; Target 24538; HLA-C*06:02; FOXE1; ENSG00000178919; TAA
HDAAAAAAA

SEQ ID NO: 24539 - protein, 8 aa, Homo sapiens
  Table A; Target 24539; HLA-A*23:01; FOXE1; ENSG00000178919; TAA
IALIAMAI

SEQ ID NO: 24540 - protein, 8 aa, Homo sapiens
  Table A; Target 24540; HLA-B*08:01; FOXE1; ENSG00000178919; TAA
IALIAMAI

SEQ ID NO: 24541 - protein, 8 aa, Homo sapiens
  Table A; Target 24541; HLA-B*51:01; FOXE1; ENSG00000178919; TAA
IALIAMAI

SEQ ID NO: 24542 - protein, 8 aa, Homo sapiens
  Table A; Target 24542; HLA-C*03:04; FOXE1; ENSG00000178919; TAA
IALIAMAI

SEQ ID NO: 24543 - protein, 8 aa, Homo sapiens
  Table A; Target 24543; HLA-C*07:01; FOXE1; ENSG00000178919; TAA
IALIAMAI

SEQ ID NO: 24544 - protein, 9 aa, Homo sapiens
  Table A; Target 24544; HLA-B*54:01; FOXE1; ENSG00000178919; TAA
IALIAMAIA

SEQ ID NO: 24545 - protein, 8 aa, Homo sapiens
  Table A; Target 24545; HLA-B*54:01; FOXE1; ENSG00000178919; TAA
IAMAIAHA

SEQ ID NO: 24546 - protein, 8 aa, Homo sapiens
  Table A; Target 24546; HLA-B*56:01; FOXE1; ENSG00000178919; TAA
IAMAIAHA

SEQ ID NO: 24547 - protein, 9 aa, Homo sapiens
  Table A; Target 24547; HLA-B*54:01; FOXE1; ENSG00000178919; TAA
IAMAIAHAP

SEQ ID NO: 24548 - protein, 9 aa, Homo sapiens
  Table A; Target 24548; HLA-C*03:03; FOXE1; ENSG00000178919; TAA
IAMAIAHAP

SEQ ID NO: 24549 - protein, 9 aa, Homo sapiens
  Table A; Target 24549; HLA-C*03:04; FOXE1; ENSG00000178919; TAA
IAMAIAHAP

SEQ ID NO: 24550 - protein, 9 aa, Homo sapiens
  Table A; Target 24550; HLA-C*16:01; FOXE1; ENSG00000178919; TAA
IAMAIAHAP

SEQ ID NO: 24551 - protein, 9 aa, Homo sapiens
  Table A; Target 24551; HLA-C*16:02; FOXE1; ENSG00000178919; TAA
IAMAIAHAP

SEQ ID NO: 24552 - protein, 11 aa, Homo sapiens
  Table A; Target 24552; HLA-A*68:01; FOXE1; ENSG00000178919; TAA
IAMAIAHAPER

SEQ ID NO: 24553 - protein, 8 aa, Homo sapiens
  Table A; Target 24553; HLA-B*18:01; FOXE1; ENSG00000178919; TAA
IDRFVSAM

SEQ ID NO: 24554 - protein, 8 aa, Homo sapiens
  Table A; Target 24554; HLA-B*37:01; FOXE1; ENSG00000178919; TAA
IDRFVSAM

SEQ ID NO: 24555 - protein, 8 aa, Homo sapiens
  Table A; Target 24555; HLA-B*40:02; FOXE1; ENSG00000178919; TAA
IDRFVSAM

SEQ ID NO: 24556 - protein, 8 aa, Homo sapiens
  Table A; Target 24556; HLA-C*14:02; FOXE1; ENSG00000178919; TAA
IFAAAGRL

SEQ ID NO: 24557 - protein, 9 aa, Homo sapiens
  Table A; Target 24557; HLA-C*14:02; FOXE1; ENSG00000178919; TAA
IFAAAGRLA

SEQ ID NO: 24558 - protein, 8 aa, Homo sapiens
  Table A; Target 24558; HLA-C*14:02; FOXE1; ENSG00000178919; TAA
IFPGAVPA

SEQ ID NO: 24559 - protein, 9 aa, Homo sapiens
  Table A; Target 24559; HLA-C*14:02; FOXE1; ENSG00000178919; TAA
IFPGAVPAA

SEQ ID NO: 24560 - protein, 10 aa, Homo sapiens
  Table A; Target 24560; HLA-A*29:02; FOXE1; ENSG00000178919; TAA
IFPGAVPAAR

SEQ ID NO: 24561 - protein, 8 aa, Homo sapiens
  Table A; Target 24561; HLA-A*01:01; FOXE1; ENSG00000178919; TAA
ITERFPFY

SEQ ID NO: 24562 - protein, 8 aa, Homo sapiens
  Table A; Target 24562; HLA-A*31:01; FOXE1; ENSG00000178919; TAA
IYKFITER

SEQ ID NO: 24563 - protein, 8 aa, Homo sapiens
  Table A; Target 24563; HLA-A*33:03; FOXE1; ENSG00000178919; TAA
IYKFITER

SEQ ID NO: 24564 - protein, 9 aa, Homo sapiens
  Table A; Target 24564; HLA-A*23:01; FOXE1; ENSG00000178919; TAA
IYKFITERF

SEQ ID NO: 24565 - protein, 9 aa, Homo sapiens
  Table A; Target 24565; HLA-A*24:02; FOXE1; ENSG00000178919; TAA
IYKFITERF

SEQ ID NO: 24566 - protein, 9 aa, Homo sapiens
  Table A; Target 24566; HLA-A*29:02; FOXE1; ENSG00000178919; TAA
IYKFITERF

SEQ ID NO: 24567 - protein, 9 aa, Homo sapiens
  Table A; Target 24567; HLA-B*57:01; FOXE1; ENSG00000178919; TAA
IYKFITERF

SEQ ID NO: 24568 - protein, 9 aa, Homo sapiens
  Table A; Target 24568; HLA-B*40:01; FOXE1; ENSG00000178919; TAA
KEERGETAA

SEQ ID NO: 24569 - protein, 9 aa, Homo sapiens
  Table A; Target 24569; HLA-B*40:02; FOXE1; ENSG00000178919; TAA
KEERGETAA

SEQ ID NO: 24570 - protein, 9 aa, Homo sapiens
  Table A; Target 24570; HLA-A*24:02; FOXE1; ENSG00000178919; TAA
KFITERFPF

SEQ ID NO: 24571 - protein, 9 aa, Homo sapiens
  Table A; Target 24571; HLA-B*07:02; FOXE1; ENSG00000178919; TAA
KPPYSYIAL

SEQ ID NO: 24572 - protein, 9 aa, Homo sapiens
  Table A; Target 24572; HLA-C*01:02; FOXE1; ENSG00000178919; TAA
KPPYSYIAL

SEQ ID NO: 24573 - protein, 9 aa, Homo sapiens
  Table A; Target 24573; HLA-C*07:02; FOXE1; ENSG00000178919; TAA
KPPYSYIAL

SEQ ID NO: 24574 - protein, 8 aa, Homo sapiens
  Table A; Target 24574; HLA-A*01:01; FOXE1; ENSG00000178919; TAA
LAAPPPVY

SEQ ID NO: 24575 - protein, 8 aa, Homo sapiens
  Table A; Target 24575; HLA-B*15:03; FOXE1; ENSG00000178919; TAA
LAAPPPVY

SEQ ID NO: 24576 - protein, 8 aa, Homo sapiens
  Table A; Target 24576; HLA-B*35:01; FOXE1; ENSG00000178919; TAA
LAAPPPVY

SEQ ID NO: 24577 - protein, 8 aa, Homo sapiens
  Table A; Target 24577; HLA-B*39:01; FOXE1; ENSG00000178919; TAA
LAAPPPVY

SEQ ID NO: 24578 - protein, 8 aa, Homo sapiens
  Table A; Target 24578; HLA-B*46:01; FOXE1; ENSG00000178919; TAA
LAAPPPVY

SEQ ID NO: 24579 - protein, 8 aa, Homo sapiens
  Table A; Target 24579; HLA-B*58:01; FOXE1; ENSG00000178919; TAA
LAAPPPVY

SEQ ID NO: 24580 - protein, 8 aa, Homo sapiens
  Table A; Target 24580; HLA-C*02:02; FOXE1; ENSG00000178919; TAA
LAAPPPVY

SEQ ID NO: 24581 - protein, 8 aa, Homo sapiens
  Table A; Target 24581; HLA-C*12:03; FOXE1; ENSG00000178919; TAA
LAAPPPVY

SEQ ID NO: 24582 - protein, 8 aa, Homo sapiens
  Table A; Target 24582; HLA-C*16:01; FOXE1; ENSG00000178919; TAA
LAAPPPVY

SEQ ID NO: 24583 - protein, 9 aa, Homo sapiens
  Table A; Target 24583; HLA-A*01:01; FOXE1; ENSG00000178919; TAA
LAAPPPVYY

SEQ ID NO: 24584 - protein, 9 aa, Homo sapiens
  Table A; Target 24584; HLA-A*03:01; FOXE1; ENSG00000178919; TAA
LAAPPPVYY

SEQ ID NO: 24585 - protein, 9 aa, Homo sapiens
  Table A; Target 24585; HLA-A*03:02; FOXE1; ENSG00000178919; TAA
LAAPPPVYY

SEQ ID NO: 24586 - protein, 9 aa, Homo sapiens
  Table A; Target 24586; HLA-A*11:01; FOXE1; ENSG00000178919; TAA
LAAPPPVYY

SEQ ID NO: 24587 - protein, 9 aa, Homo sapiens
  Table A; Target 24587; HLA-A*23:01; FOXE1; ENSG00000178919; TAA
LAAPPPVYY

SEQ ID NO: 24588 - protein, 9 aa, Homo sapiens
  Table A; Target 24588; HLA-A*25:01; FOXE1; ENSG00000178919; TAA
LAAPPPVYY

SEQ ID NO: 24589 - protein, 9 aa, Homo sapiens
  Table A; Target 24589; HLA-A*26:01; FOXE1; ENSG00000178919; TAA
LAAPPPVYY

SEQ ID NO: 24590 - protein, 9 aa, Homo sapiens
  Table A; Target 24590; HLA-A*29:02; FOXE1; ENSG00000178919; TAA
LAAPPPVYY

SEQ ID NO: 24591 - protein, 9 aa, Homo sapiens
  Table A; Target 24591; HLA-A*30:02; FOXE1; ENSG00000178919; TAA
LAAPPPVYY

SEQ ID NO: 24592 - protein, 9 aa, Homo sapiens
  Table A; Target 24592; HLA-A*32:01; FOXE1; ENSG00000178919; TAA
LAAPPPVYY

SEQ ID NO: 24593 - protein, 9 aa, Homo sapiens
  Table A; Target 24593; HLA-A*68:01; FOXE1; ENSG00000178919; TAA
LAAPPPVYY

SEQ ID NO: 24594 - protein, 9 aa, Homo sapiens
  Table A; Target 24594; HLA-B*15:01; FOXE1; ENSG00000178919; TAA
LAAPPPVYY

SEQ ID NO: 24595 - protein, 9 aa, Homo sapiens
  Table A; Target 24595; HLA-B*15:03; FOXE1; ENSG00000178919; TAA
LAAPPPVYY

SEQ ID NO: 24596 - protein, 9 aa, Homo sapiens
  Table A; Target 24596; HLA-B*18:01; FOXE1; ENSG00000178919; TAA
LAAPPPVYY

SEQ ID NO: 24597 - protein, 9 aa, Homo sapiens
  Table A; Target 24597; HLA-B*27:05; FOXE1; ENSG00000178919; TAA
LAAPPPVYY

SEQ ID NO: 24598 - protein, 9 aa, Homo sapiens
  Table A; Target 24598; HLA-B*35:01; FOXE1; ENSG00000178919; TAA
LAAPPPVYY

SEQ ID NO: 24599 - protein, 9 aa, Homo sapiens
  Table A; Target 24599; HLA-B*39:01; FOXE1; ENSG00000178919; TAA
LAAPPPVYY

SEQ ID NO: 24600 - protein, 9 aa, Homo sapiens
  Table A; Target 24600; HLA-B*46:01; FOXE1; ENSG00000178919; TAA
LAAPPPVYY

SEQ ID NO: 24601 - protein, 9 aa, Homo sapiens
  Table A; Target 24601; HLA-B*51:01; FOXE1; ENSG00000178919; TAA
LAAPPPVYY

SEQ ID NO: 24602 - protein, 9 aa, Homo sapiens
  Table A; Target 24602; HLA-B*55:01; FOXE1; ENSG00000178919; TAA
LAAPPPVYY

SEQ ID NO: 24603 - protein, 9 aa, Homo sapiens
  Table A; Target 24603; HLA-B*57:01; FOXE1; ENSG00000178919; TAA
LAAPPPVYY

SEQ ID NO: 24604 - protein, 9 aa, Homo sapiens
  Table A; Target 24604; HLA-B*58:01; FOXE1; ENSG00000178919; TAA
LAAPPPVYY

SEQ ID NO: 24605 - protein, 9 aa, Homo sapiens
  Table A; Target 24605; HLA-C*01:02; FOXE1; ENSG00000178919; TAA
LAAPPPVYY

SEQ ID NO: 24606 - protein, 9 aa, Homo sapiens
  Table A; Target 24606; HLA-C*02:02; FOXE1; ENSG00000178919; TAA
LAAPPPVYY

SEQ ID NO: 24607 - protein, 9 aa, Homo sapiens
  Table A; Target 24607; HLA-C*03:03; FOXE1; ENSG00000178919; TAA
LAAPPPVYY

SEQ ID NO: 24608 - protein, 9 aa, Homo sapiens
  Table A; Target 24608; HLA-C*03:04; FOXE1; ENSG00000178919; TAA
LAAPPPVYY

SEQ ID NO: 24609 - protein, 9 aa, Homo sapiens
  Table A; Target 24609; HLA-C*05:01; FOXE1; ENSG00000178919; TAA
LAAPPPVYY

SEQ ID NO: 24610 - protein, 9 aa, Homo sapiens
  Table A; Target 24610; HLA-C*07:04; FOXE1; ENSG00000178919; TAA
LAAPPPVYY

SEQ ID NO: 24611 - protein, 9 aa, Homo sapiens
  Table A; Target 24611; HLA-C*07:06; FOXE1; ENSG00000178919; TAA
LAAPPPVYY

SEQ ID NO: 24612 - protein, 9 aa, Homo sapiens
  Table A; Target 24612; HLA-C*12:03; FOXE1; ENSG00000178919; TAA
LAAPPPVYY

SEQ ID NO: 24613 - protein, 9 aa, Homo sapiens
  Table A; Target 24613; HLA-C*16:01; FOXE1; ENSG00000178919; TAA
LAAPPPVYY

SEQ ID NO: 24614 - protein, 9 aa, Homo sapiens
  Table A; Target 24614; HLA-C*16:02; FOXE1; ENSG00000178919; TAA
LAAPPPVYY

SEQ ID NO: 24615 - protein, 9 aa, Homo sapiens
  Table A; Target 24615; HLA-C*16:04; FOXE1; ENSG00000178919; TAA
LAAPPPVYY

SEQ ID NO: 24616 - protein, 11 aa, Homo sapiens
  Table A; Target 24616; HLA-B*54:01; FOXE1; ENSG00000178919; TAA
LAAPPPVYYPA

SEQ ID NO: 24617 - protein, 8 aa, Homo sapiens
  Table A; Target 24617; HLA-B*39:01; FOXE1; ENSG00000178919; TAA
LAGPASPP

SEQ ID NO: 24618 - protein, 8 aa, Homo sapiens
  Table A; Target 24618; HLA-C*03:03; FOXE1; ENSG00000178919; TAA
LAGPASPP

SEQ ID NO: 24619 - protein, 9 aa, Homo sapiens
  Table A; Target 24619; HLA-A*02:01; FOXE1; ENSG00000178919; TAA
LAGPASPPA

SEQ ID NO: 24620 - protein, 9 aa, Homo sapiens
  Table A; Target 24620; HLA-B*27:05; FOXE1; ENSG00000178919; TAA
LAGPASPPA

SEQ ID NO: 24621 - protein, 9 aa, Homo sapiens
  Table A; Target 24621; HLA-B*35:01; FOXE1; ENSG00000178919; TAA
LAGPASPPA

SEQ ID NO: 24622 - protein, 9 aa, Homo sapiens
  Table A; Target 24622; HLA-B*35:03; FOXE1; ENSG00000178919; TAA
LAGPASPPA

SEQ ID NO: 24623 - protein, 9 aa, Homo sapiens
  Table A; Target 24623; HLA-B*39:01; FOXE1; ENSG00000178919; TAA
LAGPASPPA

SEQ ID NO: 24624 - protein, 9 aa, Homo sapiens
  Table A; Target 24624; HLA-B*46:01; FOXE1; ENSG00000178919; TAA
LAGPASPPA

SEQ ID NO: 24625 - protein, 9 aa, Homo sapiens
  Table A; Target 24625; HLA-B*54:01; FOXE1; ENSG00000178919; TAA
LAGPASPPA

SEQ ID NO: 24626 - protein, 9 aa, Homo sapiens
  Table A; Target 24626; HLA-B*55:01; FOXE1; ENSG00000178919; TAA
LAGPASPPA

SEQ ID NO: 24627 - protein, 9 aa, Homo sapiens
  Table A; Target 24627; HLA-B*56:01; FOXE1; ENSG00000178919; TAA
LAGPASPPA

SEQ ID NO: 24628 - protein, 9 aa, Homo sapiens
  Table A; Target 24628; HLA-C*02:02; FOXE1; ENSG00000178919; TAA
LAGPASPPA

SEQ ID NO: 24629 - protein, 9 aa, Homo sapiens
  Table A; Target 24629; HLA-C*03:03; FOXE1; ENSG00000178919; TAA
LAGPASPPA

SEQ ID NO: 24630 - protein, 9 aa, Homo sapiens
  Table A; Target 24630; HLA-C*03:04; FOXE1; ENSG00000178919; TAA
LAGPASPPA

SEQ ID NO: 24631 - protein, 9 aa, Homo sapiens
  Table A; Target 24631; HLA-C*04:01; FOXE1; ENSG00000178919; TAA
LAGPASPPA

SEQ ID NO: 24632 - protein, 9 aa, Homo sapiens
  Table A; Target 24632; HLA-C*06:02; FOXE1; ENSG00000178919; TAA
LAGPASPPA

SEQ ID NO: 24633 - protein, 9 aa, Homo sapiens
  Table A; Target 24633; HLA-C*07:01; FOXE1; ENSG00000178919; TAA
LAGPASPPA

SEQ ID NO: 24634 - protein, 9 aa, Homo sapiens
  Table A; Target 24634; HLA-C*07:04; FOXE1; ENSG00000178919; TAA
LAGPASPPA

SEQ ID NO: 24635 - protein, 9 aa, Homo sapiens
  Table A; Target 24635; HLA-C*12:03; FOXE1; ENSG00000178919; TAA
LAGPASPPA

SEQ ID NO: 24636 - protein, 9 aa, Homo sapiens
  Table A; Target 24636; HLA-C*16:01; FOXE1; ENSG00000178919; TAA
LAGPASPPA

SEQ ID NO: 24637 - protein, 9 aa, Homo sapiens
  Table A; Target 24637; HLA-A*30:02; FOXE1; ENSG00000178919; TAA
LGGASAGAY

SEQ ID NO: 24638 - protein, 9 aa, Homo sapiens
  Table A; Target 24638; HLA-B*15:01; FOXE1; ENSG00000178919; TAA
LGGASAGAY

SEQ ID NO: 24639 - protein, 9 aa, Homo sapiens
  Table A; Target 24639; HLA-B*46:01; FOXE1; ENSG00000178919; TAA
LGGASAGAY

SEQ ID NO: 24640 - protein, 9 aa, Homo sapiens
  Table A; Target 24640; HLA-C*07:04; FOXE1; ENSG00000178919; TAA
LGGASAGAY

SEQ ID NO: 24641 - protein, 9 aa, Homo sapiens
  Table A; Target 24641; HLA-C*14:02; FOXE1; ENSG00000178919; TAA
LGGASAGAY

SEQ ID NO: 24642 - protein, 9 aa, Homo sapiens
  Table A; Target 24642; HLA-A*02:03; FOXE1; ENSG00000178919; TAA
LIAMAIAHA

SEQ ID NO: 24643 - protein, 8 aa, Homo sapiens
  Table A; Target 24643; HLA-A*03:02; FOXE1; ENSG00000178919; TAA
LTLGGIYK

SEQ ID NO: 24644 - protein, 8 aa, Homo sapiens
  Table A; Target 24644; HLA-A*11:01; FOXE1; ENSG00000178919; TAA
LTLGGIYK

SEQ ID NO: 24645 - protein, 9 aa, Homo sapiens
  Table A; Target 24645; HLA-A*02:04; FOXE1; ENSG00000178919; TAA
LTLGGIYKF

SEQ ID NO: 24646 - protein, 9 aa, Homo sapiens
  Table A; Target 24646; HLA-A*23:01; FOXE1; ENSG00000178919; TAA
LTLGGIYKF

SEQ ID NO: 24647 - protein, 9 aa, Homo sapiens
  Table A; Target 24647; HLA-A*24:02; FOXE1; ENSG00000178919; TAA
LTLGGIYKF

SEQ ID NO: 24648 - protein, 9 aa, Homo sapiens
  Table A; Target 24648; HLA-A*29:02; FOXE1; ENSG00000178919; TAA
LTLGGIYKF

SEQ ID NO: 24649 - protein, 9 aa, Homo sapiens
  Table A; Target 24649; HLA-B*57:01; FOXE1; ENSG00000178919; TAA
LTLGGIYKF

SEQ ID NO: 24650 - protein, 9 aa, Homo sapiens
  Table A; Target 24650; HLA-A*02:07; FOXE1; ENSG00000178919; TAA
LVPERPLSP

SEQ ID NO: 24651 - protein, 11 aa, Homo sapiens
  Table A; Target 24651; HLA-A*02:07; FOXE1; ENSG00000178919; TAA
LVPERPLSPEL

SEQ ID NO: 24652 - protein, 9 aa, Homo sapiens
  Table A; Target 24652; HLA-A*26:01; FOXE1; ENSG00000178919; TAA
MAIAHAPER

SEQ ID NO: 24653 - protein, 9 aa, Homo sapiens
  Table A; Target 24653; HLA-A*33:01; FOXE1; ENSG00000178919; TAA
MAIAHAPER

SEQ ID NO: 24654 - protein, 9 aa, Homo sapiens
  Table A; Target 24654; HLA-A*33:03; FOXE1; ENSG00000178919; TAA
MAIAHAPER

SEQ ID NO: 24655 - protein, 9 aa, Homo sapiens
  Table A; Target 24655; HLA-A*68:01; FOXE1; ENSG00000178919; TAA
MAIAHAPER

SEQ ID NO: 24656 - protein, 9 aa, Homo sapiens
  Table A; Target 24656; HLA-A*68:02; FOXE1; ENSG00000178919; TAA
MAIAHAPER

SEQ ID NO: 24657 - protein, 9 aa, Homo sapiens
  Table A; Target 24657; HLA-B*27:05; FOXE1; ENSG00000178919; TAA
MAIAHAPER

SEQ ID NO: 24658 - protein, 9 aa, Homo sapiens
  Table A; Target 24658; HLA-B*35:01; FOXE1; ENSG00000178919; TAA
MAIAHAPER

SEQ ID NO: 24659 - protein, 9 aa, Homo sapiens
  Table A; Target 24659; HLA-B*35:03; FOXE1; ENSG00000178919; TAA
MAIAHAPER

SEQ ID NO: 24660 - protein, 9 aa, Homo sapiens
  Table A; Target 24660; HLA-B*46:01; FOXE1; ENSG00000178919; TAA
MAIAHAPER

SEQ ID NO: 24661 - protein, 9 aa, Homo sapiens
  Table A; Target 24661; HLA-B*51:01; FOXE1; ENSG00000178919; TAA
MAIAHAPER

SEQ ID NO: 24662 - protein, 9 aa, Homo sapiens
  Table A; Target 24662; HLA-B*54:01; FOXE1; ENSG00000178919; TAA
MAIAHAPER

SEQ ID NO: 24663 - protein, 9 aa, Homo sapiens
  Table A; Target 24663; HLA-B*57:01; FOXE1; ENSG00000178919; TAA
MAIAHAPER

SEQ ID NO: 24664 - protein, 9 aa, Homo sapiens
  Table A; Target 24664; HLA-C*02:02; FOXE1; ENSG00000178919; TAA
MAIAHAPER

SEQ ID NO: 24665 - protein, 9 aa, Homo sapiens
  Table A; Target 24665; HLA-C*03:03; FOXE1; ENSG00000178919; TAA
MAIAHAPER

SEQ ID NO: 24666 - protein, 9 aa, Homo sapiens
  Table A; Target 24666; HLA-C*03:04; FOXE1; ENSG00000178919; TAA
MAIAHAPER

SEQ ID NO: 24667 - protein, 9 aa, Homo sapiens
  Table A; Target 24667; HLA-C*07:06; FOXE1; ENSG00000178919; TAA
MAIAHAPER

SEQ ID NO: 24668 - protein, 9 aa, Homo sapiens
  Table A; Target 24668; HLA-C*12:03; FOXE1; ENSG00000178919; TAA
MAIAHAPER

SEQ ID NO: 24669 - protein, 9 aa, Homo sapiens
  Table A; Target 24669; HLA-C*16:01; FOXE1; ENSG00000178919; TAA
MAIAHAPER

SEQ ID NO: 24670 - protein, 9 aa, Homo sapiens
  Table A; Target 24670; HLA-C*16:02; FOXE1; ENSG00000178919; TAA
MAIAHAPER

SEQ ID NO: 24671 - protein, 9 aa, Homo sapiens
  Table A; Target 24671; HLA-C*16:04; FOXE1; ENSG00000178919; TAA
MAIAHAPER

SEQ ID NO: 24672 - protein, 8 aa, Homo sapiens
  Table A; Target 24672; HLA-C*04:01; FOXE1; ENSG00000178919; TAA
MFESGSFL

SEQ ID NO: 24673 - protein, 8 aa, Homo sapiens
  Table A; Target 24673; HLA-C*14:02; FOXE1; ENSG00000178919; TAA
MFESGSFL

SEQ ID NO: 24674 - protein, 9 aa, Homo sapiens
  Table A; Target 24674; HLA-A*29:02; FOXE1; ENSG00000178919; TAA
MFESGSFLR

SEQ ID NO: 24675 - protein, 9 aa, Homo sapiens
  Table A; Target 24675; HLA-A*33:03; FOXE1; ENSG00000178919; TAA
MFESGSFLR

SEQ ID NO: 24676 - protein, 9 aa, Homo sapiens
  Table A; Target 24676; HLA-B*38:01; FOXE1; ENSG00000178919; TAA
MHDAAAAAA

SEQ ID NO: 24677 - protein, 9 aa, Homo sapiens
  Table A; Target 24677; HLA-B*39:01; FOXE1; ENSG00000178919; TAA
MHDAAAAAA

SEQ ID NO: 24678 - protein, 11 aa, Homo sapiens
  Table A; Target 24678; HLA-B*54:01; FOXE1; ENSG00000178919; TAA
NPGGQLGGASA

SEQ ID NO: 24679 - protein, 11 aa, Homo sapiens
  Table A; Target 24679; HLA-B*55:01; FOXE1; ENSG00000178919; TAA
NPGGQLGGASA

SEQ ID NO: 24680 - protein, 11 aa, Homo sapiens
  Table A; Target 24680; HLA-B*56:01; FOXE1; ENSG00000178919; TAA
NPGGQLGGASA

SEQ ID NO: 24681 - protein, 9 aa, Homo sapiens
  Table A; Target 24681; HLA-B*51:01; FOXE1; ENSG00000178919; TAA
NPKKWQNSI

SEQ ID NO: 24682 - protein, 8 aa, Homo sapiens
  Table A; Target 24682; HLA-B*56:01; FOXE1; ENSG00000178919; TAA
NPSAYAAA

SEQ ID NO: 24683 - protein, 9 aa, Homo sapiens
  Table A; Target 24683; HLA-A*29:02; FOXE1; ENSG00000178919; TAA
NPSAYAAAY

SEQ ID NO: 24684 - protein, 9 aa, Homo sapiens
  Table A; Target 24684; HLA-A*30:02; FOXE1; ENSG00000178919; TAA
NPSAYAAAY

SEQ ID NO: 24685 - protein, 9 aa, Homo sapiens
  Table A; Target 24685; HLA-B*18:01; FOXE1; ENSG00000178919; TAA
NPSAYAAAY

SEQ ID NO: 24686 - protein, 9 aa, Homo sapiens
  Table A; Target 24686; HLA-B*35:01; FOXE1; ENSG00000178919; TAA
NPSAYAAAY

SEQ ID NO: 24687 - protein, 9 aa, Homo sapiens
  Table A; Target 24687; HLA-B*35:03; FOXE1; ENSG00000178919; TAA
NPSAYAAAY

SEQ ID NO: 24688 - protein, 9 aa, Homo sapiens
  Table A; Target 24688; HLA-B*55:01; FOXE1; ENSG00000178919; TAA
NPSAYAAAY

SEQ ID NO: 24689 - protein, 9 aa, Homo sapiens
  Table A; Target 24689; HLA-C*03:03; FOXE1; ENSG00000178919; TAA
NPSAYAAAY

SEQ ID NO: 24690 - protein, 9 aa, Homo sapiens
  Table A; Target 24690; HLA-C*07:04; FOXE1; ENSG00000178919; TAA
NPSAYAAAY

SEQ ID NO: 24691 - protein, 9 aa, Homo sapiens
  Table A; Target 24691; HLA-C*07:06; FOXE1; ENSG00000178919; TAA
NPSAYAAAY

SEQ ID NO: 24692 - protein, 9 aa, Homo sapiens
  Table A; Target 24692; HLA-C*14:02; FOXE1; ENSG00000178919; TAA
NPSAYAAAY

SEQ ID NO: 24693 - protein, 9 aa, Homo sapiens
  Table A; Target 24693; HLA-C*16:01; FOXE1; ENSG00000178919; TAA
NPSAYAAAY

SEQ ID NO: 24694 - protein, 9 aa, Homo sapiens
  Table A; Target 24694; HLA-C*16:02; FOXE1; ENSG00000178919; TAA
NPSAYAAAY

SEQ ID NO: 24695 - protein, 9 aa, Homo sapiens
  Table A; Target 24695; HLA-B*58:01; FOXE1; ENSG00000178919; TAA
NSIRHNLTL

SEQ ID NO: 24696 - protein, 9 aa, Homo sapiens
  Table A; Target 24696; HLA-C*03:03; FOXE1; ENSG00000178919; TAA
NSIRHNLTL

SEQ ID NO: 24697 - protein, 9 aa, Homo sapiens
  Table A; Target 24697; HLA-C*03:04; FOXE1; ENSG00000178919; TAA
NSIRHNLTL

SEQ ID NO: 24698 - protein, 9 aa, Homo sapiens
  Table A; Target 24698; HLA-A*68:01; FOXE1; ENSG00000178919; TAA
PAASPGPCR

SEQ ID NO: 24699 - protein, 9 aa, Homo sapiens
  Table A; Target 24699; HLA-B*54:01; FOXE1; ENSG00000178919; TAA
PANPSAYAA

SEQ ID NO: 24700 - protein, 9 aa, Homo sapiens
  Table A; Target 24700; HLA-B*56:01; FOXE1; ENSG00000178919; TAA
PANPSAYAA

SEQ ID NO: 24701 - protein, 11 aa, Homo sapiens
  Table A; Target 24701; HLA-A*29:02; FOXE1; ENSG00000178919; TAA
PANPSAYAAAY

SEQ ID NO: 24702 - protein, 11 aa, Homo sapiens
  Table A; Target 24702; HLA-A*30:02; FOXE1; ENSG00000178919; TAA
PANPSAYAAAY

SEQ ID NO: 24703 - protein, 8 aa, Homo sapiens
  Table A; Target 24703; HLA-C*06:02; FOXE1; ENSG00000178919; TAA
PGGIDRFV

SEQ ID NO: 24704 - protein, 8 aa, Homo sapiens
  Table A; Target 24704; HLA-B*51:01; FOXE1; ENSG00000178919; TAA
PPPPQPEV

SEQ ID NO: 24705 - protein, 8 aa, Homo sapiens
  Table A; Target 24705; HLA-B*54:01; FOXE1; ENSG00000178919; TAA
PPVYYPAA

SEQ ID NO: 24706 - protein, 8 aa, Homo sapiens
  Table A; Target 24706; HLA-B*56:01; FOXE1; ENSG00000178919; TAA
PPVYYPAA

SEQ ID NO: 24707 - protein, 8 aa, Homo sapiens
  Table A; Target 24707; HLA-B*15:03; FOXE1; ENSG00000178919; TAA
PPYPGAVY

SEQ ID NO: 24708 - protein, 8 aa, Homo sapiens
  Table A; Target 24708; HLA-B*35:01; FOXE1; ENSG00000178919; TAA
PPYPGAVY

SEQ ID NO: 24709 - protein, 8 aa, Homo sapiens
  Table A; Target 24709; HLA-C*04:01; FOXE1; ENSG00000178919; TAA
PPYPGAVY

SEQ ID NO: 24710 - protein, 8 aa, Homo sapiens
  Table A; Target 24710; HLA-C*07:01; FOXE1; ENSG00000178919; TAA
PPYPGAVY

SEQ ID NO: 24711 - protein, 9 aa, Homo sapiens
  Table A; Target 24711; HLA-B*54:01; FOXE1; ENSG00000178919; TAA
PPYPGAVYA

SEQ ID NO: 24712 - protein, 9 aa, Homo sapiens
  Table A; Target 24712; HLA-B*55:01; FOXE1; ENSG00000178919; TAA
PPYPGAVYA

SEQ ID NO: 24713 - protein, 9 aa, Homo sapiens
  Table A; Target 24713; HLA-B*56:01; FOXE1; ENSG00000178919; TAA
PPYPGAVYA

SEQ ID NO: 24714 - protein, 11 aa, Homo sapiens
  Table A; Target 24714; HLA-A*26:01; FOXE1; ENSG00000178919; TAA
PPYPGAVYAGY

SEQ ID NO: 24715 - protein, 11 aa, Homo sapiens
  Table A; Target 24715; HLA-A*30:02; FOXE1; ENSG00000178919; TAA
PPYPGAVYAGY

SEQ ID NO: 24716 - protein, 9 aa, Homo sapiens
  Table A; Target 24716; HLA-B*51:01; FOXE1; ENSG00000178919; TAA
PPYSYIALI

SEQ ID NO: 24717 - protein, 9 aa, Homo sapiens
  Table A; Target 24717; HLA-B*15:01; FOXE1; ENSG00000178919; TAA
PQGAGSAIF

SEQ ID NO: 24718 - protein, 9 aa, Homo sapiens
  Table A; Target 24718; HLA-C*07:04; FOXE1; ENSG00000178919; TAA
PQGAGSAIF

SEQ ID NO: 24719 - protein, 9 aa, Homo sapiens
  Table A; Target 24719; HLA-A*02:07; FOXE1; ENSG00000178919; TAA
PQPEVLATV

SEQ ID NO: 24720 - protein, 10 aa, Homo sapiens
  Table A; Target 24720; HLA-B*07:02; FOXE1; ENSG00000178919; TAA
PSGPGGSCAF

SEQ ID NO: 24721 - protein, 10 aa, Homo sapiens
  Table A; Target 24721; HLA-C*07:01; FOXE1; ENSG00000178919; TAA
PSGPGGSCAF

SEQ ID NO: 24722 - protein, 10 aa, Homo sapiens
  Table A; Target 24722; HLA-C*07:02; FOXE1; ENSG00000178919; TAA
PSGPGGSCAF

SEQ ID NO: 24723 - protein, 10 aa, Homo sapiens
  Table A; Target 24723; HLA-A*29:02; FOXE1; ENSG00000178919; TAA
PYPGAVYAGY

SEQ ID NO: 24724 - protein, 9 aa, Homo sapiens
  Table A; Target 24724; HLA-A*29:02; FOXE1; ENSG00000178919; TAA
QFGALGACY

SEQ ID NO: 24725 - protein, 9 aa, Homo sapiens
  Table A; Target 24725; HLA-A*30:02; FOXE1; ENSG00000178919; TAA
QFGALGACY

SEQ ID NO: 24726 - protein, 11 aa, Homo sapiens
  Table A; Target 24726; HLA-B*56:01; FOXE1; ENSG00000178919; TAA
QGAGSAIFAAA

SEQ ID NO: 24727 - protein, 10 aa, Homo sapiens
  Table A; Target 24727; HLA-A*01:01; FOXE1; ENSG00000178919; TAA
QLGGASAGAY

SEQ ID NO: 24728 - protein, 10 aa, Homo sapiens
  Table A; Target 24728; HLA-A*30:02; FOXE1; ENSG00000178919; TAA
QLGGASAGAY

SEQ ID NO: 24729 - protein, 10 aa, Homo sapiens
  Table A; Target 24729; HLA-B*15:01; FOXE1; ENSG00000178919; TAA
QLGGASAGAY

SEQ ID NO: 24730 - protein, 10 aa, Homo sapiens
  Table A; Target 24730; HLA-C*07:01; FOXE1; ENSG00000178919; TAA
QLGGASAGAY

SEQ ID NO: 24731 - protein, 10 aa, Homo sapiens
  Table A; Target 24731; HLA-C*07:04; FOXE1; ENSG00000178919; TAA
QLGGASAGAY

SEQ ID NO: 24732 - protein, 8 aa, Homo sapiens
  Table A; Target 24732; HLA-B*08:01; FOXE1; ENSG00000178919; TAA
QNSIRHNL

SEQ ID NO: 24733 - protein, 8 aa, Homo sapiens
  Table A; Target 24733; HLA-C*16:01; FOXE1; ENSG00000178919; TAA
QNSIRHNL

SEQ ID NO: 24734 - protein, 9 aa, Homo sapiens
  Table A; Target 24734; HLA-B*27:05; FOXE1; ENSG00000178919; TAA
QRGKPPYSY

SEQ ID NO: 24735 - protein, 9 aa, Homo sapiens
  Table A; Target 24735; HLA-C*16:04; FOXE1; ENSG00000178919; TAA
QRGKPPYSY

SEQ ID NO: 24736 - protein, 8 aa, Homo sapiens
  Table A; Target 24736; HLA-A*30:02; FOXE1; ENSG00000178919; TAA
RGKPPYSY

SEQ ID NO: 24737 - protein, 9 aa, Homo sapiens
  Table A; Target 24737; HLA-A*02:03; FOXE1; ENSG00000178919; TAA
RLAGPASPP

SEQ ID NO: 24738 - protein, 9 aa, Homo sapiens
  Table A; Target 24738; HLA-A*03:01; FOXE1; ENSG00000178919; TAA
RLAGPASPP

SEQ ID NO: 24739 - protein, 9 aa, Homo sapiens
  Table A; Target 24739; HLA-A*03:02; FOXE1; ENSG00000178919; TAA
RLAGPASPP

SEQ ID NO: 24740 - protein, 9 aa, Homo sapiens
  Table A; Target 24740; HLA-A*32:01; FOXE1; ENSG00000178919; TAA
RLAGPASPP

SEQ ID NO: 24741 - protein, 9 aa, Homo sapiens
  Table A; Target 24741; HLA-B*46:01; FOXE1; ENSG00000178919; TAA
RLAGPASPP

SEQ ID NO: 24742 - protein, 9 aa, Homo sapiens
  Table A; Target 24742; HLA-C*06:02; FOXE1; ENSG00000178919; TAA
RLAGPASPP

SEQ ID NO: 24743 - protein, 9 aa, Homo sapiens
  Table A; Target 24743; HLA-C*07:01; FOXE1; ENSG00000178919; TAA
RLAGPASPP

SEQ ID NO: 24744 - protein, 9 aa, Homo sapiens
  Table A; Target 24744; HLA-C*07:02; FOXE1; ENSG00000178919; TAA
RLAGPASPP

SEQ ID NO: 24745 - protein, 9 aa, Homo sapiens
  Table A; Target 24745; HLA-C*16:02; FOXE1; ENSG00000178919; TAA
RLAGPASPP

SEQ ID NO: 24746 - protein, 10 aa, Homo sapiens
  Table A; Target 24746; HLA-A*02:01; FOXE1; ENSG00000178919; TAA
RLAGPASPPA

SEQ ID NO: 24747 - protein, 10 aa, Homo sapiens
  Table A; Target 24747; HLA-A*02:03; FOXE1; ENSG00000178919; TAA
RLAGPASPPA

SEQ ID NO: 24748 - protein, 10 aa, Homo sapiens
  Table A; Target 24748; HLA-A*03:01; FOXE1; ENSG00000178919; TAA
RLAGPASPPA

SEQ ID NO: 24749 - protein, 10 aa, Homo sapiens
  Table A; Target 24749; HLA-A*03:02; FOXE1; ENSG00000178919; TAA
RLAGPASPPA

SEQ ID NO: 24750 - protein, 10 aa, Homo sapiens
  Table A; Target 24750; HLA-B*55:01; FOXE1; ENSG00000178919; TAA
RLAGPASPPA

SEQ ID NO: 24751 - protein, 10 aa, Homo sapiens
  Table A; Target 24751; HLA-B*56:01; FOXE1; ENSG00000178919; TAA
RLAGPASPPA

SEQ ID NO: 24752 - protein, 10 aa, Homo sapiens
  Table A; Target 24752; HLA-C*06:02; FOXE1; ENSG00000178919; TAA
RLAGPASPPA

SEQ ID NO: 24753 - protein, 11 aa, Homo sapiens
  Table A; Target 24753; HLA-A*03:01; FOXE1; ENSG00000178919; TAA
RLAGPASPPAG

SEQ ID NO: 24754 - protein, 11 aa, Homo sapiens
  Table A; Target 24754; HLA-A*03:02; FOXE1; ENSG00000178919; TAA
RLAGPASPPAG

SEQ ID NO: 24755 - protein, 9 aa, Homo sapiens
  Table A; Target 24755; HLA-A*03:01; FOXE1; ENSG00000178919; TAA
RLTLGGIYK

SEQ ID NO: 24756 - protein, 9 aa, Homo sapiens
  Table A; Target 24756; HLA-A*03:02; FOXE1; ENSG00000178919; TAA
RLTLGGIYK

SEQ ID NO: 24757 - protein, 8 aa, Homo sapiens
  Table A; Target 24757; HLA-B*07:02; FOXE1; ENSG00000178919; TAA
RPANPSAY

SEQ ID NO: 24758 - protein, 9 aa, Homo sapiens
  Table A; Target 24758; HLA-B*07:02; FOXE1; ENSG00000178919; TAA
RPANPSAYA

SEQ ID NO: 24759 - protein, 9 aa, Homo sapiens
  Table A; Target 24759; HLA-B*54:01; FOXE1; ENSG00000178919; TAA
RPANPSAYA

SEQ ID NO: 24760 - protein, 9 aa, Homo sapiens
  Table A; Target 24760; HLA-B*55:01; FOXE1; ENSG00000178919; TAA
RPANPSAYA

SEQ ID NO: 24761 - protein, 9 aa, Homo sapiens
  Table A; Target 24761; HLA-B*56:01; FOXE1; ENSG00000178919; TAA
RPANPSAYA

SEQ ID NO: 24762 - protein, 9 aa, Homo sapiens
  Table A; Target 24762; HLA-C*07:02; FOXE1; ENSG00000178919; TAA
RPANPSAYA

SEQ ID NO: 24763 - protein, 10 aa, Homo sapiens
  Table A; Target 24763; HLA-B*07:02; FOXE1; ENSG00000178919; TAA
RPANPSAYAA

SEQ ID NO: 24764 - protein, 10 aa, Homo sapiens
  Table A; Target 24764; HLA-B*54:01; FOXE1; ENSG00000178919; TAA
RPANPSAYAA

SEQ ID NO: 24765 - protein, 10 aa, Homo sapiens
  Table A; Target 24765; HLA-B*55:01; FOXE1; ENSG00000178919; TAA
RPANPSAYAA

SEQ ID NO: 24766 - protein, 10 aa, Homo sapiens
  Table A; Target 24766; HLA-B*56:01; FOXE1; ENSG00000178919; TAA
RPANPSAYAA

SEQ ID NO: 24767 - protein, 10 aa, Homo sapiens
  Table A; Target 24767; HLA-C*07:02; FOXE1; ENSG00000178919; TAA
RPANPSAYAA

SEQ ID NO: 24768 - protein, 11 aa, Homo sapiens
  Table A; Target 24768; HLA-B*07:02; FOXE1; ENSG00000178919; TAA
RPANPSAYAAA

SEQ ID NO: 24769 - protein, 11 aa, Homo sapiens
  Table A; Target 24769; HLA-B*54:01; FOXE1; ENSG00000178919; TAA
RPANPSAYAAA

SEQ ID NO: 24770 - protein, 11 aa, Homo sapiens
  Table A; Target 24770; HLA-B*55:01; FOXE1; ENSG00000178919; TAA
RPANPSAYAAA

SEQ ID NO: 24771 - protein, 11 aa, Homo sapiens
  Table A; Target 24771; HLA-B*56:01; FOXE1; ENSG00000178919; TAA
RPANPSAYAAA

SEQ ID NO: 24772 - protein, 10 aa, Homo sapiens
  Table A; Target 24772; HLA-B*56:01; FOXE1; ENSG00000178919; TAA
RPLSPELGPA

SEQ ID NO: 24773 - protein, 8 aa, Homo sapiens
  Table A; Target 24773; HLA-B*56:01; FOXE1; ENSG00000178919; TAA
RPPYPGAV

SEQ ID NO: 24774 - protein, 9 aa, Homo sapiens
  Table A; Target 24774; HLA-A*03:01; FOXE1; ENSG00000178919; TAA
RPPYPGAVY

SEQ ID NO: 24775 - protein, 9 aa, Homo sapiens
  Table A; Target 24775; HLA-A*26:01; FOXE1; ENSG00000178919; TAA
RPPYPGAVY

SEQ ID NO: 24776 - protein, 9 aa, Homo sapiens
  Table A; Target 24776; HLA-A*29:02; FOXE1; ENSG00000178919; TAA
RPPYPGAVY

SEQ ID NO: 24777 - protein, 9 aa, Homo sapiens
  Table A; Target 24777; HLA-A*30:02; FOXE1; ENSG00000178919; TAA
RPPYPGAVY

SEQ ID NO: 24778 - protein, 9 aa, Homo sapiens
  Table A; Target 24778; HLA-B*07:02; FOXE1; ENSG00000178919; TAA
RPPYPGAVY

SEQ ID NO: 24779 - protein, 9 aa, Homo sapiens
  Table A; Target 24779; HLA-B*15:01; FOXE1; ENSG00000178919; TAA
RPPYPGAVY

SEQ ID NO: 24780 - protein, 9 aa, Homo sapiens
  Table A; Target 24780; HLA-B*15:03; FOXE1; ENSG00000178919; TAA
RPPYPGAVY

SEQ ID NO: 24781 - protein, 9 aa, Homo sapiens
  Table A; Target 24781; HLA-B*35:01; FOXE1; ENSG00000178919; TAA
RPPYPGAVY

SEQ ID NO: 24782 - protein, 9 aa, Homo sapiens
  Table A; Target 24782; HLA-B*35:03; FOXE1; ENSG00000178919; TAA
RPPYPGAVY

SEQ ID NO: 24783 - protein, 9 aa, Homo sapiens
  Table A; Target 24783; HLA-B*46:01; FOXE1; ENSG00000178919; TAA
RPPYPGAVY

SEQ ID NO: 24784 - protein, 9 aa, Homo sapiens
  Table A; Target 24784; HLA-B*51:01; FOXE1; ENSG00000178919; TAA
RPPYPGAVY

SEQ ID NO: 24785 - protein, 9 aa, Homo sapiens
  Table A; Target 24785; HLA-B*54:01; FOXE1; ENSG00000178919; TAA
RPPYPGAVY

SEQ ID NO: 24786 - protein, 9 aa, Homo sapiens
  Table A; Target 24786; HLA-B*55:01; FOXE1; ENSG00000178919; TAA
RPPYPGAVY

SEQ ID NO: 24787 - protein, 9 aa, Homo sapiens
  Table A; Target 24787; HLA-B*56:01; FOXE1; ENSG00000178919; TAA
RPPYPGAVY

SEQ ID NO: 24788 - protein, 9 aa, Homo sapiens
  Table A; Target 24788; HLA-C*01:02; FOXE1; ENSG00000178919; TAA
RPPYPGAVY

SEQ ID NO: 24789 - protein, 9 aa, Homo sapiens
  Table A; Target 24789; HLA-C*03:03; FOXE1; ENSG00000178919; TAA
RPPYPGAVY

SEQ ID NO: 24790 - protein, 9 aa, Homo sapiens
  Table A; Target 24790; HLA-C*04:01; FOXE1; ENSG00000178919; TAA
RPPYPGAVY

SEQ ID NO: 24791 - protein, 9 aa, Homo sapiens
  Table A; Target 24791; HLA-C*07:02; FOXE1; ENSG00000178919; TAA
RPPYPGAVY

SEQ ID NO: 24792 - protein, 9 aa, Homo sapiens
  Table A; Target 24792; HLA-C*07:04; FOXE1; ENSG00000178919; TAA
RPPYPGAVY

SEQ ID NO: 24793 - protein, 9 aa, Homo sapiens
  Table A; Target 24793; HLA-C*14:02; FOXE1; ENSG00000178919; TAA
RPPYPGAVY

SEQ ID NO: 24794 - protein, 10 aa, Homo sapiens
  Table A; Target 24794; HLA-B*54:01; FOXE1; ENSG00000178919; TAA
RPPYPGAVYA

SEQ ID NO: 24795 - protein, 10 aa, Homo sapiens
  Table A; Target 24795; HLA-B*56:01; FOXE1; ENSG00000178919; TAA
RPPYPGAVYA

SEQ ID NO: 24796 - protein, 10 aa, Homo sapiens
  Table A; Target 24796; HLA-A*01:01; FOXE1; ENSG00000178919; TAA
RSDLSTYPAY

SEQ ID NO: 24797 - protein, 10 aa, Homo sapiens
  Table A; Target 24797; HLA-A*30:02; FOXE1; ENSG00000178919; TAA
RSDLSTYPAY

SEQ ID NO: 24798 - protein, 10 aa, Homo sapiens
  Table A; Target 24798; HLA-B*58:01; FOXE1; ENSG00000178919; TAA
RSDLSTYPAY

SEQ ID NO: 24799 - protein, 11 aa, Homo sapiens
  Table A; Target 24799; HLA-A*01:01; FOXE1; ENSG00000178919; TAA
RSDLSTYPAYM

SEQ ID NO: 24800 - protein, 9 aa, Homo sapiens
  Table A; Target 24800; HLA-A*03:01; FOXE1; ENSG00000178919; TAA
RVFGLVPER

SEQ ID NO: 24801 - protein, 9 aa, Homo sapiens
  Table A; Target 24801; HLA-A*03:02; FOXE1; ENSG00000178919; TAA
RVFGLVPER

SEQ ID NO: 24802 - protein, 9 aa, Homo sapiens
  Table A; Target 24802; HLA-A*11:01; FOXE1; ENSG00000178919; TAA
RVFGLVPER

SEQ ID NO: 24803 - protein, 9 aa, Homo sapiens
  Table A; Target 24803; HLA-A*31:01; FOXE1; ENSG00000178919; TAA
RVFGLVPER

SEQ ID NO: 24804 - protein, 9 aa, Homo sapiens
  Table A; Target 24804; HLA-B*57:01; FOXE1; ENSG00000178919; TAA
RVFGLVPER

SEQ ID NO: 24805 - protein, 9 aa, Homo sapiens
  Table A; Target 24805; HLA-C*07:06; FOXE1; ENSG00000178919; TAA
RVFGLVPER

SEQ ID NO: 24806 - protein, 11 aa, Homo sapiens
  Table A; Target 24806; HLA-A*01:01; FOXE1; ENSG00000178919; TAA
SAGAPATTTGY

SEQ ID NO: 24807 - protein, 11 aa, Homo sapiens
  Table A; Target 24807; HLA-A*26:01; FOXE1; ENSG00000178919; TAA
SAGAPATTTGY

SEQ ID NO: 24808 - protein, 11 aa, Homo sapiens
  Table A; Target 24808; HLA-A*29:02; FOXE1; ENSG00000178919; TAA
SAGAPATTTGY

SEQ ID NO: 24809 - protein, 11 aa, Homo sapiens
  Table A; Target 24809; HLA-A*30:02; FOXE1; ENSG00000178919; TAA
SAGAPATTTGY

SEQ ID NO: 24810 - protein, 11 aa, Homo sapiens
  Table A; Target 24810; HLA-A*32:01; FOXE1; ENSG00000178919; TAA
SAGAPATTTGY

SEQ ID NO: 24811 - protein, 11 aa, Homo sapiens
  Table A; Target 24811; HLA-B*15:01; FOXE1; ENSG00000178919; TAA
SAGAPATTTGY

SEQ ID NO: 24812 - protein, 11 aa, Homo sapiens
  Table A; Target 24812; HLA-B*15:03; FOXE1; ENSG00000178919; TAA
SAGAPATTTGY

SEQ ID NO: 24813 - protein, 11 aa, Homo sapiens
  Table A; Target 24813; HLA-B*27:02; FOXE1; ENSG00000178919; TAA
SAGAPATTTGY

SEQ ID NO: 24814 - protein, 11 aa, Homo sapiens
  Table A; Target 24814; HLA-B*35:01; FOXE1; ENSG00000178919; TAA
SAGAPATTTGY

SEQ ID NO: 24815 - protein, 11 aa, Homo sapiens
  Table A; Target 24815; HLA-B*46:01; FOXE1; ENSG00000178919; TAA
SAGAPATTTGY

SEQ ID NO: 24816 - protein, 11 aa, Homo sapiens
  Table A; Target 24816; HLA-C*02:02; FOXE1; ENSG00000178919; TAA
SAGAPATTTGY

SEQ ID NO: 24817 - protein, 11 aa, Homo sapiens
  Table A; Target 24817; HLA-C*04:01; FOXE1; ENSG00000178919; TAA
SAGAPATTTGY

SEQ ID NO: 24818 - protein, 11 aa, Homo sapiens
  Table A; Target 24818; HLA-C*07:04; FOXE1; ENSG00000178919; TAA
SAGAPATTTGY

SEQ ID NO: 24819 - protein, 11 aa, Homo sapiens
  Table A; Target 24819; HLA-C*12:03; FOXE1; ENSG00000178919; TAA
SAGAPATTTGY

SEQ ID NO: 24820 - protein, 11 aa, Homo sapiens
  Table A; Target 24820; HLA-C*16:02; FOXE1; ENSG00000178919; TAA
SAGAPATTTGY

SEQ ID NO: 24821 - protein, 11 aa, Homo sapiens
  Table A; Target 24821; HLA-C*16:04; FOXE1; ENSG00000178919; TAA
SAGAPATTTGY

SEQ ID NO: 24822 - protein, 8 aa, Homo sapiens
  Table A; Target 24822; HLA-A*31:01; FOXE1; ENSG00000178919; TAA
SAGAYHAR

SEQ ID NO: 24823 - protein, 8 aa, Homo sapiens
  Table A; Target 24823; HLA-A*33:01; FOXE1; ENSG00000178919; TAA
SAGAYHAR

SEQ ID NO: 24824 - protein, 8 aa, Homo sapiens
  Table A; Target 24824; HLA-A*33:03; FOXE1; ENSG00000178919; TAA
SAGAYHAR

SEQ ID NO: 24825 - protein, 8 aa, Homo sapiens
  Table A; Target 24825; HLA-C*07:06; FOXE1; ENSG00000178919; TAA
SAGAYHAR

SEQ ID NO: 24826 - protein, 9 aa, Homo sapiens
  Table A; Target 24826; HLA-A*11:01; FOXE1; ENSG00000178919; TAA
SAIFAAAGR

SEQ ID NO: 24827 - protein, 9 aa, Homo sapiens
  Table A; Target 24827; HLA-A*31:01; FOXE1; ENSG00000178919; TAA
SAIFAAAGR

SEQ ID NO: 24828 - protein, 9 aa, Homo sapiens
  Table A; Target 24828; HLA-A*33:01; FOXE1; ENSG00000178919; TAA
SAIFAAAGR

SEQ ID NO: 24829 - protein, 9 aa, Homo sapiens
  Table A; Target 24829; HLA-A*33:03; FOXE1; ENSG00000178919; TAA
SAIFAAAGR

SEQ ID NO: 24830 - protein, 9 aa, Homo sapiens
  Table A; Target 24830; HLA-A*68:01; FOXE1; ENSG00000178919; TAA
SAIFAAAGR

SEQ ID NO: 24831 - protein, 9 aa, Homo sapiens
  Table A; Target 24831; HLA-C*07:06; FOXE1; ENSG00000178919; TAA
SAIFAAAGR

SEQ ID NO: 24832 - protein, 9 aa, Homo sapiens
  Table A; Target 24832; HLA-A*29:02; FOXE1; ENSG00000178919; TAA
SDLSTYPAY

SEQ ID NO: 24833 - protein, 9 aa, Homo sapiens
  Table A; Target 24833; HLA-A*30:02; FOXE1; ENSG00000178919; TAA
SDLSTYPAY

SEQ ID NO: 24834 - protein, 9 aa, Homo sapiens
  Table A; Target 24834; HLA-B*18:01; FOXE1; ENSG00000178919; TAA
SDLSTYPAY

SEQ ID NO: 24835 - protein, 9 aa, Homo sapiens
  Table A; Target 24835; HLA-B*44:02; FOXE1; ENSG00000178919; TAA
SDLSTYPAY

SEQ ID NO: 24836 - protein, 9 aa, Homo sapiens
  Table A; Target 24836; HLA-B*44:03; FOXE1; ENSG00000178919; TAA
SDLSTYPAY

SEQ ID NO: 24837 - protein, 9 aa, Homo sapiens
  Table A; Target 24837; HLA-C*07:01; FOXE1; ENSG00000178919; TAA
SDLSTYPAY

SEQ ID NO: 24838 - protein, 9 aa, Homo sapiens
  Table A; Target 24838; HLA-C*01:02; FOXE1; ENSG00000178919; TAA
SGPGGSCAF

SEQ ID NO: 24839 - protein, 9 aa, Homo sapiens
  Table A; Target 24839; HLA-A*01:01; FOXE1; ENSG00000178919; TAA
SLAAPPPVY

SEQ ID NO: 24840 - protein, 9 aa, Homo sapiens
  Table A; Target 24840; HLA-A*03:01; FOXE1; ENSG00000178919; TAA
SLAAPPPVY

SEQ ID NO: 24841 - protein, 9 aa, Homo sapiens
  Table A; Target 24841; HLA-A*03:02; FOXE1; ENSG00000178919; TAA
SLAAPPPVY

SEQ ID NO: 24842 - protein, 9 aa, Homo sapiens
  Table A; Target 24842; HLA-A*25:01; FOXE1; ENSG00000178919; TAA
SLAAPPPVY

SEQ ID NO: 24843 - protein, 9 aa, Homo sapiens
  Table A; Target 24843; HLA-A*26:01; FOXE1; ENSG00000178919; TAA
SLAAPPPVY

SEQ ID NO: 24844 - protein, 9 aa, Homo sapiens
  Table A; Target 24844; HLA-A*29:02; FOXE1; ENSG00000178919; TAA
SLAAPPPVY

SEQ ID NO: 24845 - protein, 9 aa, Homo sapiens
  Table A; Target 24845; HLA-A*30:02; FOXE1; ENSG00000178919; TAA
SLAAPPPVY

SEQ ID NO: 24846 - protein, 9 aa, Homo sapiens
  Table A; Target 24846; HLA-A*32:01; FOXE1; ENSG00000178919; TAA
SLAAPPPVY

SEQ ID NO: 24847 - protein, 9 aa, Homo sapiens
  Table A; Target 24847; HLA-B*15:01; FOXE1; ENSG00000178919; TAA
SLAAPPPVY

SEQ ID NO: 24848 - protein, 9 aa, Homo sapiens
  Table A; Target 24848; HLA-B*15:03; FOXE1; ENSG00000178919; TAA
SLAAPPPVY

SEQ ID NO: 24849 - protein, 9 aa, Homo sapiens
  Table A; Target 24849; HLA-B*35:01; FOXE1; ENSG00000178919; TAA
SLAAPPPVY

SEQ ID NO: 24850 - protein, 9 aa, Homo sapiens
  Table A; Target 24850; HLA-B*39:01; FOXE1; ENSG00000178919; TAA
SLAAPPPVY

SEQ ID NO: 24851 - protein, 9 aa, Homo sapiens
  Table A; Target 24851; HLA-B*46:01; FOXE1; ENSG00000178919; TAA
SLAAPPPVY

SEQ ID NO: 24852 - protein, 9 aa, Homo sapiens
  Table A; Target 24852; HLA-C*02:02; FOXE1; ENSG00000178919; TAA
SLAAPPPVY

SEQ ID NO: 24853 - protein, 9 aa, Homo sapiens
  Table A; Target 24853; HLA-C*07:04; FOXE1; ENSG00000178919; TAA
SLAAPPPVY

SEQ ID NO: 24854 - protein, 9 aa, Homo sapiens
  Table A; Target 24854; HLA-C*16:01; FOXE1; ENSG00000178919; TAA
SLAAPPPVY

SEQ ID NO: 24855 - protein, 10 aa, Homo sapiens
  Table A; Target 24855; HLA-A*01:01; FOXE1; ENSG00000178919; TAA
SLAAPPPVYY

SEQ ID NO: 24856 - protein, 10 aa, Homo sapiens
  Table A; Target 24856; HLA-A*03:01; FOXE1; ENSG00000178919; TAA
SLAAPPPVYY

SEQ ID NO: 24857 - protein, 10 aa, Homo sapiens
  Table A; Target 24857; HLA-A*03:02; FOXE1; ENSG00000178919; TAA
SLAAPPPVYY

SEQ ID NO: 24858 - protein, 10 aa, Homo sapiens
  Table A; Target 24858; HLA-A*26:01; FOXE1; ENSG00000178919; TAA
SLAAPPPVYY

SEQ ID NO: 24859 - protein, 10 aa, Homo sapiens
  Table A; Target 24859; HLA-A*29:02; FOXE1; ENSG00000178919; TAA
SLAAPPPVYY

SEQ ID NO: 24860 - protein, 10 aa, Homo sapiens
  Table A; Target 24860; HLA-A*30:02; FOXE1; ENSG00000178919; TAA
SLAAPPPVYY

SEQ ID NO: 24861 - protein, 10 aa, Homo sapiens
  Table A; Target 24861; HLA-A*32:01; FOXE1; ENSG00000178919; TAA
SLAAPPPVYY

SEQ ID NO: 24862 - protein, 10 aa, Homo sapiens
  Table A; Target 24862; HLA-B*15:01; FOXE1; ENSG00000178919; TAA
SLAAPPPVYY

SEQ ID NO: 24863 - protein, 10 aa, Homo sapiens
  Table A; Target 24863; HLA-B*15:03; FOXE1; ENSG00000178919; TAA
SLAAPPPVYY

SEQ ID NO: 24864 - protein, 10 aa, Homo sapiens
  Table A; Target 24864; HLA-C*02:02; FOXE1; ENSG00000178919; TAA
SLAAPPPVYY

SEQ ID NO: 24865 - protein, 8 aa, Homo sapiens
  Table A; Target 24865; HLA-B*08:01; FOXE1; ENSG00000178919; TAA
SPGPCRVF

SEQ ID NO: 24866 - protein, 8 aa, Homo sapiens
  Table A; Target 24866; HLA-B*07:02; FOXE1; ENSG00000178919; TAA
SPGQFGAL

SEQ ID NO: 24867 - protein, 8 aa, Homo sapiens
  Table A; Target 24867; HLA-B*08:01; FOXE1; ENSG00000178919; TAA
SPGQFGAL

SEQ ID NO: 24868 - protein, 8 aa, Homo sapiens
  Table A; Target 24868; HLA-B*35:03; FOXE1; ENSG00000178919; TAA
SPGQFGAL

SEQ ID NO: 24869 - protein, 8 aa, Homo sapiens
  Table A; Target 24869; HLA-B*56:01; FOXE1; ENSG00000178919; TAA
SPGQFGAL

SEQ ID NO: 24870 - protein, 8 aa, Homo sapiens
  Table A; Target 24870; HLA-C*07:02; FOXE1; ENSG00000178919; TAA
SPGQFGAL

SEQ ID NO: 24871 - protein, 10 aa, Homo sapiens
  Table A; Target 24871; HLA-B*56:01; FOXE1; ENSG00000178919; TAA
SPGQFGALGA

SEQ ID NO: 24872 - protein, 8 aa, Homo sapiens
  Table A; Target 24872; HLA-C*14:02; FOXE1; ENSG00000178919; TAA
SYIALIAM

SEQ ID NO: 24873 - protein, 10 aa, Homo sapiens
  Table A; Target 24873; HLA-A*23:01; FOXE1; ENSG00000178919; TAA
SYIALIAMAI

SEQ ID NO: 24874 - protein, 10 aa, Homo sapiens
  Table A; Target 24874; HLA-A*24:02; FOXE1; ENSG00000178919; TAA
SYIALIAMAI

SEQ ID NO: 24875 - protein, 11 aa, Homo sapiens
  Table A; Target 24875; HLA-B*54:01; FOXE1; ENSG00000178919; TAA
TAAGAGVPGEA

SEQ ID NO: 24876 - protein, 9 aa, Homo sapiens
  Table A; Target 24876; HLA-C*06:02; FOXE1; ENSG00000178919; TAA
TGARPANPS

SEQ ID NO: 24877 - protein, 11 aa, Homo sapiens
  Table A; Target 24877; HLA-A*30:02; FOXE1; ENSG00000178919; TAA
TGARPANPSAY

SEQ ID NO: 24878 - protein, 11 aa, Homo sapiens
  Table A; Target 24878; HLA-C*07:01; FOXE1; ENSG00000178919; TAA
TGARPANPSAY

SEQ ID NO: 24879 - protein, 9 aa, Homo sapiens
  Table A; Target 24879; HLA-C*06:02; FOXE1; ENSG00000178919; TAA
TGYQPAGCT

SEQ ID NO: 24880 - protein, 10 aa, Homo sapiens
  Table A; Target 24880; HLA-B*27:05; FOXE1; ENSG00000178919; TAA
TGYQPAGCTG

SEQ ID NO: 24881 - protein, 10 aa, Homo sapiens
  Table A; Target 24881; HLA-C*06:02; FOXE1; ENSG00000178919; TAA
TGYQPAGCTG

SEQ ID NO: 24882 - protein, 9 aa, Homo sapiens
  Table A; Target 24882; HLA-A*02:03; FOXE1; ENSG00000178919; TAA
TLGGIYKFI

SEQ ID NO: 24883 - protein, 9 aa, Homo sapiens
  Table A; Target 24883; HLA-A*02:04; FOXE1; ENSG00000178919; TAA
TLNDCFLKI

SEQ ID NO: 24884 - protein, 9 aa, Homo sapiens
  Table A; Target 24884; HLA-A*02:07; FOXE1; ENSG00000178919; TAA
TLNDCFLKI

SEQ ID NO: 24885 - protein, 9 aa, Homo sapiens
  Table A; Target 24885; HLA-A*24:02; FOXE1; ENSG00000178919; TAA
TLNDCFLKI

SEQ ID NO: 24886 - protein, 9 aa, Homo sapiens
  Table A; Target 24886; HLA-B*13:02; FOXE1; ENSG00000178919; TAA
TLNDCFLKI

SEQ ID NO: 24887 - protein, 9 aa, Homo sapiens
  Table A; Target 24887; HLA-A*25:01; FOXE1; ENSG00000178919; TAA
TSPGQFGAL

SEQ ID NO: 24888 - protein, 9 aa, Homo sapiens
  Table A; Target 24888; HLA-C*01:02; FOXE1; ENSG00000178919; TAA
TSPGQFGAL

SEQ ID NO: 24889 - protein, 9 aa, Homo sapiens
  Table A; Target 24889; HLA-C*03:04; FOXE1; ENSG00000178919; TAA
TSPGQFGAL

SEQ ID NO: 24890 - protein, 8 aa, Homo sapiens
  Table A; Target 24890; HLA-A*33:03; FOXE1; ENSG00000178919; TAA
TTVDFYGR

SEQ ID NO: 24891 - protein, 8 aa, Homo sapiens
  Table A; Target 24891; HLA-A*68:01; FOXE1; ENSG00000178919; TAA
TTVDFYGR

SEQ ID NO: 24892 - protein, 9 aa, Homo sapiens
  Table A; Target 24892; HLA-C*07:02; FOXE1; ENSG00000178919; TAA
TYPAYMHDA

SEQ ID NO: 24893 - protein, 8 aa, Homo sapiens
  Table A; Target 24893; HLA-B*15:03; FOXE1; ENSG00000178919; TAA
VETTVDFY

SEQ ID NO: 24894 - protein, 8 aa, Homo sapiens
  Table A; Target 24894; HLA-B*18:01; FOXE1; ENSG00000178919; TAA
VETTVDFY

SEQ ID NO: 24895 - protein, 8 aa, Homo sapiens
  Table A; Target 24895; HLA-B*37:01; FOXE1; ENSG00000178919; TAA
VETTVDFY

SEQ ID NO: 24896 - protein, 8 aa, Homo sapiens
  Table A; Target 24896; HLA-B*39:01; FOXE1; ENSG00000178919; TAA
VETTVDFY

SEQ ID NO: 24897 - protein, 8 aa, Homo sapiens
  Table A; Target 24897; HLA-B*44:03; FOXE1; ENSG00000178919; TAA
VETTVDFY

SEQ ID NO: 24898 - protein, 8 aa, Homo sapiens
  Table A; Target 24898; HLA-B*49:01; FOXE1; ENSG00000178919; TAA
VETTVDFY

SEQ ID NO: 24899 - protein, 8 aa, Homo sapiens
  Table A; Target 24899; HLA-C*16:02; FOXE1; ENSG00000178919; TAA
VETTVDFY

SEQ ID NO: 24900 - protein, 8 aa, Homo sapiens
  Table A; Target 24900; HLA-C*16:04; FOXE1; ENSG00000178919; TAA
VETTVDFY

SEQ ID NO: 24901 - protein, 10 aa, Homo sapiens
  Table A; Target 24901; HLA-B*27:02; FOXE1; ENSG00000178919; TAA
VETTVDFYGR

SEQ ID NO: 24902 - protein, 8 aa, Homo sapiens
  Table A; Target 24902; HLA-C*16:01; FOXE1; ENSG00000178919; TAA
VPAARPPY

SEQ ID NO: 24903 - protein, 9 aa, Homo sapiens
  Table A; Target 24903; HLA-B*55:01; FOXE1; ENSG00000178919; TAA
VPAARPPYP

SEQ ID NO: 24904 - protein, 9 aa, Homo sapiens
  Table A; Target 24904; HLA-B*56:01; FOXE1; ENSG00000178919; TAA
VPAARPPYP

SEQ ID NO: 24905 - protein, 11 aa, Homo sapiens
  Table A; Target 24905; HLA-B*54:01; FOXE1; ENSG00000178919; TAA
VPAARPPYPGA

SEQ ID NO: 24906 - protein, 11 aa, Homo sapiens
  Table A; Target 24906; HLA-B*56:01; FOXE1; ENSG00000178919; TAA
VPAARPPYPGA

SEQ ID NO: 24907 - protein, 10 aa, Homo sapiens
  Table A; Target 24907; HLA-C*07:02; FOXE1; ENSG00000178919; TAA
VPERPLSPEL

SEQ ID NO: 24908 - protein, 10 aa, Homo sapiens
  Table A; Target 24908; HLA-B*56:01; FOXE1; ENSG00000178919; TAA
VPGEATGRGA

SEQ ID NO: 24909 - protein, 10 aa, Homo sapiens
  Table A; Target 24909; HLA-A*23:01; FOXE1; ENSG00000178919; TAA
VYAGYAPPSL

SEQ ID NO: 24910 - protein, 10 aa, Homo sapiens
  Table A; Target 24910; HLA-A*24:02; FOXE1; ENSG00000178919; TAA
VYAGYAPPSL

SEQ ID NO: 24911 - protein, 10 aa, Homo sapiens
  Table A; Target 24911; HLA-B*07:02; FOXE1; ENSG00000178919; TAA
VYAGYAPPSL

SEQ ID NO: 24912 - protein, 10 aa, Homo sapiens
  Table A; Target 24912; HLA-B*27:02; FOXE1; ENSG00000178919; TAA
VYAGYAPPSL

SEQ ID NO: 24913 - protein, 10 aa, Homo sapiens
  Table A; Target 24913; HLA-B*39:01; FOXE1; ENSG00000178919; TAA
VYAGYAPPSL

SEQ ID NO: 24914 - protein, 10 aa, Homo sapiens
  Table A; Target 24914; HLA-C*06:02; FOXE1; ENSG00000178919; TAA
VYAGYAPPSL

SEQ ID NO: 24915 - protein, 10 aa, Homo sapiens
  Table A; Target 24915; HLA-C*07:02; FOXE1; ENSG00000178919; TAA
VYAGYAPPSL

SEQ ID NO: 24916 - protein, 10 aa, Homo sapiens
  Table A; Target 24916; HLA-C*14:02; FOXE1; ENSG00000178919; TAA
VYAGYAPPSL

SEQ ID NO: 24917 - protein, 8 aa, Homo sapiens
  Table A; Target 24917; HLA-C*14:02; FOXE1; ENSG00000178919; TAA
VYYPAASP

SEQ ID NO: 24918 - protein, 8 aa, Homo sapiens
  Table A; Target 24918; HLA-A*01:01; FOXE1; ENSG00000178919; TAA
YAGPDGAY

SEQ ID NO: 24919 - protein, 8 aa, Homo sapiens
  Table A; Target 24919; HLA-A*30:02; FOXE1; ENSG00000178919; TAA
YAGPDGAY

SEQ ID NO: 24920 - protein, 8 aa, Homo sapiens
  Table A; Target 24920; HLA-B*15:01; FOXE1; ENSG00000178919; TAA
YAGPDGAY

SEQ ID NO: 24921 - protein, 8 aa, Homo sapiens
  Table A; Target 24921; HLA-B*15:03; FOXE1; ENSG00000178919; TAA
YAGPDGAY

SEQ ID NO: 24922 - protein, 8 aa, Homo sapiens
  Table A; Target 24922; HLA-B*27:05; FOXE1; ENSG00000178919; TAA
YAGPDGAY

SEQ ID NO: 24923 - protein, 8 aa, Homo sapiens
  Table A; Target 24923; HLA-B*35:01; FOXE1; ENSG00000178919; TAA
YAGPDGAY

SEQ ID NO: 24924 - protein, 8 aa, Homo sapiens
  Table A; Target 24924; HLA-B*39:01; FOXE1; ENSG00000178919; TAA
YAGPDGAY

SEQ ID NO: 24925 - protein, 8 aa, Homo sapiens
  Table A; Target 24925; HLA-B*46:01; FOXE1; ENSG00000178919; TAA
YAGPDGAY

SEQ ID NO: 24926 - protein, 8 aa, Homo sapiens
  Table A; Target 24926; HLA-B*55:01; FOXE1; ENSG00000178919; TAA
YAGPDGAY

SEQ ID NO: 24927 - protein, 8 aa, Homo sapiens
  Table A; Target 24927; HLA-B*58:01; FOXE1; ENSG00000178919; TAA
YAGPDGAY

SEQ ID NO: 24928 - protein, 8 aa, Homo sapiens
  Table A; Target 24928; HLA-C*01:02; FOXE1; ENSG00000178919; TAA
YAGPDGAY

SEQ ID NO: 24929 - protein, 8 aa, Homo sapiens
  Table A; Target 24929; HLA-C*02:02; FOXE1; ENSG00000178919; TAA
YAGPDGAY

SEQ ID NO: 24930 - protein, 8 aa, Homo sapiens
  Table A; Target 24930; HLA-C*03:03; FOXE1; ENSG00000178919; TAA
YAGPDGAY

SEQ ID NO: 24931 - protein, 8 aa, Homo sapiens
  Table A; Target 24931; HLA-C*03:04; FOXE1; ENSG00000178919; TAA
YAGPDGAY

SEQ ID NO: 24932 - protein, 8 aa, Homo sapiens
  Table A; Target 24932; HLA-C*04:01; FOXE1; ENSG00000178919; TAA
YAGPDGAY

SEQ ID NO: 24933 - protein, 8 aa, Homo sapiens
  Table A; Target 24933; HLA-C*05:01; FOXE1; ENSG00000178919; TAA
YAGPDGAY

SEQ ID NO: 24934 - protein, 8 aa, Homo sapiens
  Table A; Target 24934; HLA-C*07:01; FOXE1; ENSG00000178919; TAA
YAGPDGAY

SEQ ID NO: 24935 - protein, 8 aa, Homo sapiens
  Table A; Target 24935; HLA-C*07:04; FOXE1; ENSG00000178919; TAA
YAGPDGAY

SEQ ID NO: 24936 - protein, 8 aa, Homo sapiens
  Table A; Target 24936; HLA-C*12:03; FOXE1; ENSG00000178919; TAA
YAGPDGAY

SEQ ID NO: 24937 - protein, 8 aa, Homo sapiens
  Table A; Target 24937; HLA-C*14:02; FOXE1; ENSG00000178919; TAA
YAGPDGAY

SEQ ID NO: 24938 - protein, 8 aa, Homo sapiens
  Table A; Target 24938; HLA-C*16:01; FOXE1; ENSG00000178919; TAA
YAGPDGAY

SEQ ID NO: 24939 - protein, 8 aa, Homo sapiens
  Table A; Target 24939; HLA-C*16:02; FOXE1; ENSG00000178919; TAA
YAGPDGAY

SEQ ID NO: 24940 - protein, 8 aa, Homo sapiens
  Table A; Target 24940; HLA-C*16:04; FOXE1; ENSG00000178919; TAA
YAGPDGAY

SEQ ID NO: 24941 - protein, 9 aa, Homo sapiens
  Table A; Target 24941; HLA-B*27:05; FOXE1; ENSG00000178919; TAA
YAGPDGAYP

SEQ ID NO: 24942 - protein, 9 aa, Homo sapiens
  Table A; Target 24942; HLA-C*03:03; FOXE1; ENSG00000178919; TAA
YAGPDGAYP

SEQ ID NO: 24943 - protein, 9 aa, Homo sapiens
  Table A; Target 24943; HLA-C*04:01; FOXE1; ENSG00000178919; TAA
YAGPDGAYP

SEQ ID NO: 24944 - protein, 9 aa, Homo sapiens
  Table A; Target 24944; HLA-C*05:01; FOXE1; ENSG00000178919; TAA
YAGPDGAYP

SEQ ID NO: 24945 - protein, 9 aa, Homo sapiens
  Table A; Target 24945; HLA-C*07:01; FOXE1; ENSG00000178919; TAA
YAGPDGAYP

SEQ ID NO: 24946 - protein, 9 aa, Homo sapiens
  Table A; Target 24946; HLA-C*07:04; FOXE1; ENSG00000178919; TAA
YAGPDGAYP

SEQ ID NO: 24947 - protein, 10 aa, Homo sapiens
  Table A; Target 24947; HLA-C*07:01; FOXE1; ENSG00000178919; TAA
YAGPDGAYPQ

SEQ ID NO: 24948 - protein, 9 aa, Homo sapiens
  Table A; Target 24948; HLA-A*02:01; FOXE1; ENSG00000178919; TAA
YAGYAPPSL

SEQ ID NO: 24949 - protein, 9 aa, Homo sapiens
  Table A; Target 24949; HLA-A*30:01; FOXE1; ENSG00000178919; TAA
YAGYAPPSL

SEQ ID NO: 24950 - protein, 9 aa, Homo sapiens
  Table A; Target 24950; HLA-A*32:01; FOXE1; ENSG00000178919; TAA
YAGYAPPSL

SEQ ID NO: 24951 - protein, 9 aa, Homo sapiens
  Table A; Target 24951; HLA-A*68:02; FOXE1; ENSG00000178919; TAA
YAGYAPPSL

SEQ ID NO: 24952 - protein, 9 aa, Homo sapiens
  Table A; Target 24952; HLA-B*07:02; FOXE1; ENSG00000178919; TAA
YAGYAPPSL

SEQ ID NO: 24953 - protein, 9 aa, Homo sapiens
  Table A; Target 24953; HLA-B*13:02; FOXE1; ENSG00000178919; TAA
YAGYAPPSL

SEQ ID NO: 24954 - protein, 9 aa, Homo sapiens
  Table A; Target 24954; HLA-B*15:03; FOXE1; ENSG00000178919; TAA
YAGYAPPSL

SEQ ID NO: 24955 - protein, 9 aa, Homo sapiens
  Table A; Target 24955; HLA-B*27:02; FOXE1; ENSG00000178919; TAA
YAGYAPPSL

SEQ ID NO: 24956 - protein, 9 aa, Homo sapiens
  Table A; Target 24956; HLA-B*27:05; FOXE1; ENSG00000178919; TAA
YAGYAPPSL

SEQ ID NO: 24957 - protein, 9 aa, Homo sapiens
  Table A; Target 24957; HLA-B*35:01; FOXE1; ENSG00000178919; TAA
YAGYAPPSL

SEQ ID NO: 24958 - protein, 9 aa, Homo sapiens
  Table A; Target 24958; HLA-B*35:03; FOXE1; ENSG00000178919; TAA
YAGYAPPSL

SEQ ID NO: 24959 - protein, 9 aa, Homo sapiens
  Table A; Target 24959; HLA-B*38:01; FOXE1; ENSG00000178919; TAA
YAGYAPPSL

SEQ ID NO: 24960 - protein, 9 aa, Homo sapiens
  Table A; Target 24960; HLA-B*39:01; FOXE1; ENSG00000178919; TAA
YAGYAPPSL

SEQ ID NO: 24961 - protein, 9 aa, Homo sapiens
  Table A; Target 24961; HLA-B*40:01; FOXE1; ENSG00000178919; TAA
YAGYAPPSL

SEQ ID NO: 24962 - protein, 9 aa, Homo sapiens
  Table A; Target 24962; HLA-B*40:02; FOXE1; ENSG00000178919; TAA
YAGYAPPSL

SEQ ID NO: 24963 - protein, 9 aa, Homo sapiens
  Table A; Target 24963; HLA-B*46:01; FOXE1; ENSG00000178919; TAA
YAGYAPPSL

SEQ ID NO: 24964 - protein, 9 aa, Homo sapiens
  Table A; Target 24964; HLA-B*51:01; FOXE1; ENSG00000178919; TAA
YAGYAPPSL

SEQ ID NO: 24965 - protein, 9 aa, Homo sapiens
  Table A; Target 24965; HLA-B*54:01; FOXE1; ENSG00000178919; TAA
YAGYAPPSL

SEQ ID NO: 24966 - protein, 9 aa, Homo sapiens
  Table A; Target 24966; HLA-B*56:01; FOXE1; ENSG00000178919; TAA
YAGYAPPSL

SEQ ID NO: 24967 - protein, 9 aa, Homo sapiens
  Table A; Target 24967; HLA-B*58:01; FOXE1; ENSG00000178919; TAA
YAGYAPPSL

SEQ ID NO: 24968 - protein, 9 aa, Homo sapiens
  Table A; Target 24968; HLA-C*01:02; FOXE1; ENSG00000178919; TAA
YAGYAPPSL

SEQ ID NO: 24969 - protein, 9 aa, Homo sapiens
  Table A; Target 24969; HLA-C*02:02; FOXE1; ENSG00000178919; TAA
YAGYAPPSL

SEQ ID NO: 24970 - protein, 9 aa, Homo sapiens
  Table A; Target 24970; HLA-C*03:03; FOXE1; ENSG00000178919; TAA
YAGYAPPSL

SEQ ID NO: 24971 - protein, 9 aa, Homo sapiens
  Table A; Target 24971; HLA-C*03:04; FOXE1; ENSG00000178919; TAA
YAGYAPPSL

SEQ ID NO: 24972 - protein, 9 aa, Homo sapiens
  Table A; Target 24972; HLA-C*05:01; FOXE1; ENSG00000178919; TAA
YAGYAPPSL

SEQ ID NO: 24973 - protein, 9 aa, Homo sapiens
  Table A; Target 24973; HLA-C*06:02; FOXE1; ENSG00000178919; TAA
YAGYAPPSL

SEQ ID NO: 24974 - protein, 9 aa, Homo sapiens
  Table A; Target 24974; HLA-C*07:01; FOXE1; ENSG00000178919; TAA
YAGYAPPSL

SEQ ID NO: 24975 - protein, 9 aa, Homo sapiens
  Table A; Target 24975; HLA-C*07:02; FOXE1; ENSG00000178919; TAA
YAGYAPPSL

SEQ ID NO: 24976 - protein, 9 aa, Homo sapiens
  Table A; Target 24976; HLA-C*07:04; FOXE1; ENSG00000178919; TAA
YAGYAPPSL

SEQ ID NO: 24977 - protein, 9 aa, Homo sapiens
  Table A; Target 24977; HLA-C*12:03; FOXE1; ENSG00000178919; TAA
YAGYAPPSL

SEQ ID NO: 24978 - protein, 9 aa, Homo sapiens
  Table A; Target 24978; HLA-C*14:02; FOXE1; ENSG00000178919; TAA
YAGYAPPSL

SEQ ID NO: 24979 - protein, 9 aa, Homo sapiens
  Table A; Target 24979; HLA-C*16:01; FOXE1; ENSG00000178919; TAA
YAGYAPPSL

SEQ ID NO: 24980 - protein, 9 aa, Homo sapiens
  Table A; Target 24980; HLA-C*16:02; FOXE1; ENSG00000178919; TAA
YAGYAPPSL

SEQ ID NO: 24981 - protein, 9 aa, Homo sapiens
  Table A; Target 24981; HLA-C*16:04; FOXE1; ENSG00000178919; TAA
YAGYAPPSL

SEQ ID NO: 24982 - protein, 8 aa, Homo sapiens
  Table A; Target 24982; HLA-B*54:01; FOXE1; ENSG00000178919; TAA
YAPPSLAA

SEQ ID NO: 24983 - protein, 9 aa, Homo sapiens
  Table A; Target 24983; HLA-B*07:02; FOXE1; ENSG00000178919; TAA
YGRTSPGQF

SEQ ID NO: 24984 - protein, 9 aa, Homo sapiens
  Table A; Target 24984; HLA-B*15:03; FOXE1; ENSG00000178919; TAA
YGRTSPGQF

SEQ ID NO: 24985 - protein, 9 aa, Homo sapiens
  Table A; Target 24985; HLA-B*46:01; FOXE1; ENSG00000178919; TAA
YGRTSPGQF

SEQ ID NO: 24986 - protein, 9 aa, Homo sapiens
  Table A; Target 24986; HLA-C*04:01; FOXE1; ENSG00000178919; TAA
YGRTSPGQF

SEQ ID NO: 24987 - protein, 9 aa, Homo sapiens
  Table A; Target 24987; HLA-C*07:02; FOXE1; ENSG00000178919; TAA
YGRTSPGQF

SEQ ID NO: 24988 - protein, 9 aa, Homo sapiens
  Table A; Target 24988; HLA-C*12:03; FOXE1; ENSG00000178919; TAA
YGRTSPGQF

SEQ ID NO: 24989 - protein, 9 aa, Homo sapiens
  Table A; Target 24989; HLA-C*16:02; FOXE1; ENSG00000178919; TAA
YGRTSPGQF

SEQ ID NO: 24990 - protein, 9 aa, Homo sapiens
  Table A; Target 24990; HLA-A*01:01; FOXE1; ENSG00000178919; TAA
YHARHAAAY

SEQ ID NO: 24991 - protein, 9 aa, Homo sapiens
  Table A; Target 24991; HLA-A*29:02; FOXE1; ENSG00000178919; TAA
YHARHAAAY

SEQ ID NO: 24992 - protein, 9 aa, Homo sapiens
  Table A; Target 24992; HLA-B*15:03; FOXE1; ENSG00000178919; TAA
YHARHAAAY

SEQ ID NO: 24993 - protein, 9 aa, Homo sapiens
  Table A; Target 24993; HLA-C*02:02; FOXE1; ENSG00000178919; TAA
YHARHAAAY

SEQ ID NO: 24994 - protein, 8 aa, Homo sapiens
  Table A; Target 24994; HLA-B*54:01; FOXE1; ENSG00000178919; TAA
YIALIAMA

SEQ ID NO: 24995 - protein, 9 aa, Homo sapiens
  Table A; Target 24995; HLA-A*68:02; FOXE1; ENSG00000178919; TAA
YIALIAMAI

SEQ ID NO: 24996 - protein, 9 aa, Homo sapiens
  Table A; Target 24996; HLA-B*13:02; FOXE1; ENSG00000178919; TAA
YIALIAMAI

SEQ ID NO: 24997 - protein, 9 aa, Homo sapiens
  Table A; Target 24997; HLA-C*02:02; FOXE1; ENSG00000178919; TAA
YIALIAMAI

SEQ ID NO: 24998 - protein, 8 aa, Homo sapiens
  Table A; Target 24998; HLA-B*46:01; FOXE1; ENSG00000178919; TAA
YMHDAAAA

SEQ ID NO: 24999 - protein, 8 aa, Homo sapiens
  Table A; Target 24999; HLA-B*54:01; FOXE1; ENSG00000178919; TAA
YMHDAAAA

SEQ ID NO: 25000 - protein, 8 aa, Homo sapiens
  Table A; Target 25000; HLA-C*14:02; FOXE1; ENSG00000178919; TAA
YMHDAAAA

SEQ ID NO: 25001 - protein, 9 aa, Homo sapiens
  Table A; Target 25001; HLA-A*02:01; FOXE1; ENSG00000178919; TAA
YMHDAAAAA

SEQ ID NO: 25002 - protein, 9 aa, Homo sapiens
  Table A; Target 25002; HLA-A*02:03; FOXE1; ENSG00000178919; TAA
YMHDAAAAA

SEQ ID NO: 25003 - protein, 9 aa, Homo sapiens
  Table A; Target 25003; HLA-B*13:02; FOXE1; ENSG00000178919; TAA
YMHDAAAAA

SEQ ID NO: 25004 - protein, 9 aa, Homo sapiens
  Table A; Target 25004; HLA-B*39:01; FOXE1; ENSG00000178919; TAA
YMHDAAAAA

SEQ ID NO: 25005 - protein, 9 aa, Homo sapiens
  Table A; Target 25005; HLA-B*46:01; FOXE1; ENSG00000178919; TAA
YMHDAAAAA

SEQ ID NO: 25006 - protein, 9 aa, Homo sapiens
  Table A; Target 25006; HLA-B*54:01; FOXE1; ENSG00000178919; TAA
YMHDAAAAA

SEQ ID NO: 25007 - protein, 9 aa, Homo sapiens
  Table A; Target 25007; HLA-B*55:01; FOXE1; ENSG00000178919; TAA
YMHDAAAAA

SEQ ID NO: 25008 - protein, 9 aa, Homo sapiens
  Table A; Target 25008; HLA-C*03:03; FOXE1; ENSG00000178919; TAA
YMHDAAAAA

SEQ ID NO: 25009 - protein, 9 aa, Homo sapiens
  Table A; Target 25009; HLA-C*03:04; FOXE1; ENSG00000178919; TAA
YMHDAAAAA

SEQ ID NO: 25010 - protein, 9 aa, Homo sapiens
  Table A; Target 25010; HLA-C*14:02; FOXE1; ENSG00000178919; TAA
YMHDAAAAA

SEQ ID NO: 25011 - protein, 10 aa, Homo sapiens
  Table A; Target 25011; HLA-A*02:01; FOXE1; ENSG00000178919; TAA
YMHDAAAAAA

SEQ ID NO: 25012 - protein, 10 aa, Homo sapiens
  Table A; Target 25012; HLA-A*02:03; FOXE1; ENSG00000178919; TAA
YMHDAAAAAA

SEQ ID NO: 25013 - protein, 10 aa, Homo sapiens
  Table A; Target 25013; HLA-B*46:01; FOXE1; ENSG00000178919; TAA
YMHDAAAAAA

SEQ ID NO: 25014 - protein, 10 aa, Homo sapiens
  Table A; Target 25014; HLA-B*54:01; FOXE1; ENSG00000178919; TAA
YMHDAAAAAA

SEQ ID NO: 25015 - protein, 11 aa, Homo sapiens
  Table A; Target 25015; HLA-B*46:01; FOXE1; ENSG00000178919; TAA
YMHDAAAAAAA

SEQ ID NO: 25016 - protein, 9 aa, Homo sapiens
  Table A; Target 25016; HLA-B*54:01; FOXE1; ENSG00000178919; TAA
YPAASPGPC

SEQ ID NO: 25017 - protein, 9 aa, Homo sapiens
  Table A; Target 25017; HLA-B*56:01; FOXE1; ENSG00000178919; TAA
YPAASPGPC

SEQ ID NO: 25018 - protein, 10 aa, Homo sapiens
  Table A; Target 25018; HLA-A*68:01; FOXE1; ENSG00000178919; TAA
YPAASPGPCR

SEQ ID NO: 25019 - protein, 10 aa, Homo sapiens
  Table A; Target 25019; HLA-B*51:01; FOXE1; ENSG00000178919; TAA
YPAASPGPCR

SEQ ID NO: 25020 - protein, 10 aa, Homo sapiens
  Table A; Target 25020; HLA-B*56:01; FOXE1; ENSG00000178919; TAA
YPAASPGPCR

SEQ ID NO: 25021 - protein, 8 aa, Homo sapiens
  Table A; Target 25021; HLA-B*54:01; FOXE1; ENSG00000178919; TAA
YPAYMHDA

SEQ ID NO: 25022 - protein, 8 aa, Homo sapiens
  Table A; Target 25022; HLA-B*55:01; FOXE1; ENSG00000178919; TAA
YPAYMHDA

SEQ ID NO: 25023 - protein, 8 aa, Homo sapiens
  Table A; Target 25023; HLA-B*56:01; FOXE1; ENSG00000178919; TAA
YPAYMHDA

SEQ ID NO: 25024 - protein, 9 aa, Homo sapiens
  Table A; Target 25024; HLA-B*35:03; FOXE1; ENSG00000178919; TAA
YPAYMHDAA

SEQ ID NO: 25025 - protein, 9 aa, Homo sapiens
  Table A; Target 25025; HLA-B*54:01; FOXE1; ENSG00000178919; TAA
YPAYMHDAA

SEQ ID NO: 25026 - protein, 9 aa, Homo sapiens
  Table A; Target 25026; HLA-B*55:01; FOXE1; ENSG00000178919; TAA
YPAYMHDAA

SEQ ID NO: 25027 - protein, 9 aa, Homo sapiens
  Table A; Target 25027; HLA-B*56:01; FOXE1; ENSG00000178919; TAA
YPAYMHDAA

SEQ ID NO: 25028 - protein, 9 aa, Homo sapiens
  Table A; Target 25028; HLA-C*03:03; FOXE1; ENSG00000178919; TAA
YPAYMHDAA

SEQ ID NO: 25029 - protein, 10 aa, Homo sapiens
  Table A; Target 25029; HLA-B*35:03; FOXE1; ENSG00000178919; TAA
YPAYMHDAAA

SEQ ID NO: 25030 - protein, 10 aa, Homo sapiens
  Table A; Target 25030; HLA-B*54:01; FOXE1; ENSG00000178919; TAA
YPAYMHDAAA

SEQ ID NO: 25031 - protein, 10 aa, Homo sapiens
  Table A; Target 25031; HLA-B*55:01; FOXE1; ENSG00000178919; TAA
YPAYMHDAAA

SEQ ID NO: 25032 - protein, 10 aa, Homo sapiens
  Table A; Target 25032; HLA-B*56:01; FOXE1; ENSG00000178919; TAA
YPAYMHDAAA

SEQ ID NO: 25033 - protein, 11 aa, Homo sapiens
  Table A; Target 25033; HLA-B*54:01; FOXE1; ENSG00000178919; TAA
YPAYMHDAAAA

SEQ ID NO: 25034 - protein, 9 aa, Homo sapiens
  Table A; Target 25034; HLA-A*01:01; FOXE1; ENSG00000178919; TAA
YPGAVYAGY

SEQ ID NO: 25035 - protein, 9 aa, Homo sapiens
  Table A; Target 25035; HLA-A*25:01; FOXE1; ENSG00000178919; TAA
YPGAVYAGY

SEQ ID NO: 25036 - protein, 9 aa, Homo sapiens
  Table A; Target 25036; HLA-A*26:01; FOXE1; ENSG00000178919; TAA
YPGAVYAGY

SEQ ID NO: 25037 - protein, 9 aa, Homo sapiens
  Table A; Target 25037; HLA-A*29:02; FOXE1; ENSG00000178919; TAA
YPGAVYAGY

SEQ ID NO: 25038 - protein, 9 aa, Homo sapiens
  Table A; Target 25038; HLA-A*30:02; FOXE1; ENSG00000178919; TAA
YPGAVYAGY

SEQ ID NO: 25039 - protein, 9 aa, Homo sapiens
  Table A; Target 25039; HLA-B*35:01; FOXE1; ENSG00000178919; TAA
YPGAVYAGY

SEQ ID NO: 25040 - protein, 9 aa, Homo sapiens
  Table A; Target 25040; HLA-B*55:01; FOXE1; ENSG00000178919; TAA
YPGAVYAGY

SEQ ID NO: 25041 - protein, 8 aa, Homo sapiens
  Table A; Target 25041; HLA-B*35:01; FOXE1; ENSG00000178919; TAA
YPGGIDRF

SEQ ID NO: 25042 - protein, 8 aa, Homo sapiens
  Table A; Target 25042; HLA-B*55:01; FOXE1; ENSG00000178919; TAA
YPGGIDRF

SEQ ID NO: 25043 - protein, 8 aa, Homo sapiens
  Table A; Target 25043; HLA-C*03:03; FOXE1; ENSG00000178919; TAA
YPGGIDRF

SEQ ID NO: 25044 - protein, 8 aa, Homo sapiens
  Table A; Target 25044; HLA-C*07:01; FOXE1; ENSG00000178919; TAA
YPGGIDRF

SEQ ID NO: 25045 - protein, 9 aa, Homo sapiens
  Table A; Target 25045; HLA-A*68:02; FOXE1; ENSG00000178919; TAA
YPGGIDRFV

SEQ ID NO: 25046 - protein, 9 aa, Homo sapiens
  Table A; Target 25046; HLA-B*51:01; FOXE1; ENSG00000178919; TAA
YPGGIDRFV

SEQ ID NO: 25047 - protein, 9 aa, Homo sapiens
  Table A; Target 25047; HLA-B*54:01; FOXE1; ENSG00000178919; TAA
YPGGIDRFV

SEQ ID NO: 25048 - protein, 9 aa, Homo sapiens
  Table A; Target 25048; HLA-B*56:01; FOXE1; ENSG00000178919; TAA
YPGGIDRFV

SEQ ID NO: 25049 - protein, 11 aa, Homo sapiens
  Table A; Target 25049; HLA-B*54:01; FOXE1; ENSG00000178919; TAA
YPGGIDRFVSA

SEQ ID NO: 25050 - protein, 11 aa, Homo sapiens
  Table A; Target 25050; HLA-B*56:01; FOXE1; ENSG00000178919; TAA
YPGGIDRFVSA

SEQ ID NO: 25051 - protein, 8 aa, Homo sapiens
  Table A; Target 25051; HLA-B*56:01; FOXE1; ENSG00000178919; TAA
YPQGAGSA

SEQ ID NO: 25052 - protein, 9 aa, Homo sapiens
  Table A; Target 25052; HLA-B*07:02; FOXE1; ENSG00000178919; TAA
YPQGAGSAI

SEQ ID NO: 25053 - protein, 9 aa, Homo sapiens
  Table A; Target 25053; HLA-B*08:01; FOXE1; ENSG00000178919; TAA
YPQGAGSAI

SEQ ID NO: 25054 - protein, 9 aa, Homo sapiens
  Table A; Target 25054; HLA-B*13:02; FOXE1; ENSG00000178919; TAA
YPQGAGSAI

SEQ ID NO: 25055 - protein, 9 aa, Homo sapiens
  Table A; Target 25055; HLA-B*35:01; FOXE1; ENSG00000178919; TAA
YPQGAGSAI

SEQ ID NO: 25056 - protein, 9 aa, Homo sapiens
  Table A; Target 25056; HLA-B*35:03; FOXE1; ENSG00000178919; TAA
YPQGAGSAI

SEQ ID NO: 25057 - protein, 9 aa, Homo sapiens
  Table A; Target 25057; HLA-B*38:01; FOXE1; ENSG00000178919; TAA
YPQGAGSAI

SEQ ID NO: 25058 - protein, 9 aa, Homo sapiens
  Table A; Target 25058; HLA-B*39:01; FOXE1; ENSG00000178919; TAA
YPQGAGSAI

SEQ ID NO: 25059 - protein, 9 aa, Homo sapiens
  Table A; Target 25059; HLA-B*51:01; FOXE1; ENSG00000178919; TAA
YPQGAGSAI

SEQ ID NO: 25060 - protein, 9 aa, Homo sapiens
  Table A; Target 25060; HLA-B*54:01; FOXE1; ENSG00000178919; TAA
YPQGAGSAI

SEQ ID NO: 25061 - protein, 9 aa, Homo sapiens
  Table A; Target 25061; HLA-B*55:01; FOXE1; ENSG00000178919; TAA
YPQGAGSAI

SEQ ID NO: 25062 - protein, 9 aa, Homo sapiens
  Table A; Target 25062; HLA-B*56:01; FOXE1; ENSG00000178919; TAA
YPQGAGSAI

SEQ ID NO: 25063 - protein, 9 aa, Homo sapiens
  Table A; Target 25063; HLA-C*01:02; FOXE1; ENSG00000178919; TAA
YPQGAGSAI

SEQ ID NO: 25064 - protein, 9 aa, Homo sapiens
  Table A; Target 25064; HLA-C*03:03; FOXE1; ENSG00000178919; TAA
YPQGAGSAI

SEQ ID NO: 25065 - protein, 9 aa, Homo sapiens
  Table A; Target 25065; HLA-C*03:04; FOXE1; ENSG00000178919; TAA
YPQGAGSAI

SEQ ID NO: 25066 - protein, 9 aa, Homo sapiens
  Table A; Target 25066; HLA-C*04:01; FOXE1; ENSG00000178919; TAA
YPQGAGSAI

SEQ ID NO: 25067 - protein, 9 aa, Homo sapiens
  Table A; Target 25067; HLA-C*05:01; FOXE1; ENSG00000178919; TAA
YPQGAGSAI

SEQ ID NO: 25068 - protein, 9 aa, Homo sapiens
  Table A; Target 25068; HLA-C*07:02; FOXE1; ENSG00000178919; TAA
YPQGAGSAI

SEQ ID NO: 25069 - protein, 9 aa, Homo sapiens
  Table A; Target 25069; HLA-C*14:02; FOXE1; ENSG00000178919; TAA
YPQGAGSAI

SEQ ID NO: 25070 - protein, 10 aa, Homo sapiens
  Table A; Target 25070; HLA-A*23:01; FOXE1; ENSG00000178919; TAA
YPQGAGSAIF

SEQ ID NO: 25071 - protein, 10 aa, Homo sapiens
  Table A; Target 25071; HLA-A*24:02; FOXE1; ENSG00000178919; TAA
YPQGAGSAIF

SEQ ID NO: 25072 - protein, 10 aa, Homo sapiens
  Table A; Target 25072; HLA-B*07:02; FOXE1; ENSG00000178919; TAA
YPQGAGSAIF

SEQ ID NO: 25073 - protein, 10 aa, Homo sapiens
  Table A; Target 25073; HLA-B*35:01; FOXE1; ENSG00000178919; TAA
YPQGAGSAIF

SEQ ID NO: 25074 - protein, 10 aa, Homo sapiens
  Table A; Target 25074; HLA-B*35:03; FOXE1; ENSG00000178919; TAA
YPQGAGSAIF

SEQ ID NO: 25075 - protein, 10 aa, Homo sapiens
  Table A; Target 25075; HLA-B*38:01; FOXE1; ENSG00000178919; TAA
YPQGAGSAIF

SEQ ID NO: 25076 - protein, 10 aa, Homo sapiens
  Table A; Target 25076; HLA-B*39:01; FOXE1; ENSG00000178919; TAA
YPQGAGSAIF

SEQ ID NO: 25077 - protein, 10 aa, Homo sapiens
  Table A; Target 25077; HLA-B*54:01; FOXE1; ENSG00000178919; TAA
YPQGAGSAIF

SEQ ID NO: 25078 - protein, 10 aa, Homo sapiens
  Table A; Target 25078; HLA-B*55:01; FOXE1; ENSG00000178919; TAA
YPQGAGSAIF

SEQ ID NO: 25079 - protein, 10 aa, Homo sapiens
  Table A; Target 25079; HLA-B*56:01; FOXE1; ENSG00000178919; TAA
YPQGAGSAIF

SEQ ID NO: 25080 - protein, 10 aa, Homo sapiens
  Table A; Target 25080; HLA-C*03:03; FOXE1; ENSG00000178919; TAA
YPQGAGSAIF

SEQ ID NO: 25081 - protein, 10 aa, Homo sapiens
  Table A; Target 25081; HLA-C*04:01; FOXE1; ENSG00000178919; TAA
YPQGAGSAIF

SEQ ID NO: 25082 - protein, 10 aa, Homo sapiens
  Table A; Target 25082; HLA-C*07:02; FOXE1; ENSG00000178919; TAA
YPQGAGSAIF

SEQ ID NO: 25083 - protein, 10 aa, Homo sapiens
  Table A; Target 25083; HLA-C*07:04; FOXE1; ENSG00000178919; TAA
YPQGAGSAIF

SEQ ID NO: 25084 - protein, 11 aa, Homo sapiens
  Table A; Target 25084; HLA-B*54:01; FOXE1; ENSG00000178919; TAA
YPQGAGSAIFA

SEQ ID NO: 25085 - protein, 11 aa, Homo sapiens
  Table A; Target 25085; HLA-B*55:01; FOXE1; ENSG00000178919; TAA
YPQGAGSAIFA

SEQ ID NO: 25086 - protein, 11 aa, Homo sapiens
  Table A; Target 25086; HLA-B*56:01; FOXE1; ENSG00000178919; TAA
YPQGAGSAIFA

SEQ ID NO: 25087 - protein, 11 aa, Homo sapiens
  Table A; Target 25087; HLA-C*07:02; FOXE1; ENSG00000178919; TAA
YPQGAGSAIFA

SEQ ID NO: 25088 - protein, 9 aa, Homo sapiens
  Table A; Target 25088; HLA-B*46:01; FOXE1; ENSG00000178919; TAA
YSYIALIAM

SEQ ID NO: 25089 - protein, 9 aa, Homo sapiens
  Table A; Target 25089; HLA-B*07:02; FOXE1,PASD1; ENSG00000178919,ENSG00000166049; TAA,CTA
AAAAAAAAI

SEQ ID NO: 25090 - protein, 9 aa, Homo sapiens
  Table A; Target 25090; HLA-B*13:02; FOXE1,PASD1; ENSG00000178919,ENSG00000166049; TAA,CTA
AAAAAAAAI

SEQ ID NO: 25091 - protein, 9 aa, Homo sapiens
  Table A; Target 25091; HLA-B*15:03; FOXE1,PASD1; ENSG00000178919,ENSG00000166049; TAA,CTA
AAAAAAAAI

SEQ ID NO: 25092 - protein, 9 aa, Homo sapiens
  Table A; Target 25092; HLA-B*39:01; FOXE1,PASD1; ENSG00000178919,ENSG00000166049; TAA,CTA
AAAAAAAAI

SEQ ID NO: 25093 - protein, 9 aa, Homo sapiens
  Table A; Target 25093; HLA-B*46:01; FOXE1,PASD1; ENSG00000178919,ENSG00000166049; TAA,CTA
AAAAAAAAI

SEQ ID NO: 25094 - protein, 9 aa, Homo sapiens
  Table A; Target 25094; HLA-B*51:01; FOXE1,PASD1; ENSG00000178919,ENSG00000166049; TAA,CTA
AAAAAAAAI

SEQ ID NO: 25095 - protein, 9 aa, Homo sapiens
  Table A; Target 25095; HLA-B*58:01; FOXE1,PASD1; ENSG00000178919,ENSG00000166049; TAA,CTA
AAAAAAAAI

SEQ ID NO: 25096 - protein, 9 aa, Homo sapiens
  Table A; Target 25096; HLA-C*01:02; FOXE1,PASD1; ENSG00000178919,ENSG00000166049; TAA,CTA
AAAAAAAAI

SEQ ID NO: 25097 - protein, 9 aa, Homo sapiens
  Table A; Target 25097; HLA-C*02:02; FOXE1,PASD1; ENSG00000178919,ENSG00000166049; TAA,CTA
AAAAAAAAI

SEQ ID NO: 25098 - protein, 9 aa, Homo sapiens
  Table A; Target 25098; HLA-C*03:03; FOXE1,PASD1; ENSG00000178919,ENSG00000166049; TAA,CTA
AAAAAAAAI

SEQ ID NO: 25099 - protein, 9 aa, Homo sapiens
  Table A; Target 25099; HLA-C*03:04; FOXE1,PASD1; ENSG00000178919,ENSG00000166049; TAA,CTA
AAAAAAAAI

SEQ ID NO: 25100 - protein, 9 aa, Homo sapiens
  Table A; Target 25100; HLA-C*14:02; FOXE1,PASD1; ENSG00000178919,ENSG00000166049; TAA,CTA
AAAAAAAAI

SEQ ID NO: 25101 - protein, 9 aa, Homo sapiens
  Table A; Target 25101; HLA-C*16:01; FOXE1,PASD1; ENSG00000178919,ENSG00000166049; TAA,CTA
AAAAAAAAI

SEQ ID NO: 25102 - protein, 9 aa, Homo sapiens
  Table A; Target 25102; HLA-C*16:02; FOXE1,PASD1; ENSG00000178919,ENSG00000166049; TAA,CTA
AAAAAAAAI

SEQ ID NO: 25103 - protein, 9 aa, Homo sapiens
  Table A; Target 25103; HLA-C*16:04; FOXE1,PASD1; ENSG00000178919,ENSG00000166049; TAA,CTA
AAAAAAAAI

SEQ ID NO: 25104 - protein, 8 aa, Homo sapiens
  Table A; Target 25104; HLA-C*03:04; FOXE1,PASD1; ENSG00000178919,ENSG00000166049; TAA,CTA
AAAAAAAI

SEQ ID NO: 25105 - protein, 9 aa, Homo sapiens
  Table A; Target 25105; HLA-A*02:01; FTHL17; ENSG00000132446; CTA
AAINSHITL

SEQ ID NO: 25106 - protein, 9 aa, Homo sapiens
  Table A; Target 25106; HLA-A*02:04; FTHL17; ENSG00000132446; CTA
AAINSHITL

SEQ ID NO: 25107 - protein, 9 aa, Homo sapiens
  Table A; Target 25107; HLA-A*02:07; FTHL17; ENSG00000132446; CTA
AAINSHITL

SEQ ID NO: 25108 - protein, 9 aa, Homo sapiens
  Table A; Target 25108; HLA-A*11:01; FTHL17; ENSG00000132446; CTA
AAINSHITL

SEQ ID NO: 25109 - protein, 9 aa, Homo sapiens
  Table A; Target 25109; HLA-A*23:01; FTHL17; ENSG00000132446; CTA
AAINSHITL

SEQ ID NO: 25110 - protein, 9 aa, Homo sapiens
  Table A; Target 25110; HLA-A*24:02; FTHL17; ENSG00000132446; CTA
AAINSHITL

SEQ ID NO: 25111 - protein, 9 aa, Homo sapiens
  Table A; Target 25111; HLA-A*25:01; FTHL17; ENSG00000132446; CTA
AAINSHITL

SEQ ID NO: 25112 - protein, 9 aa, Homo sapiens
  Table A; Target 25112; HLA-A*30:01; FTHL17; ENSG00000132446; CTA
AAINSHITL

SEQ ID NO: 25113 - protein, 9 aa, Homo sapiens
  Table A; Target 25113; HLA-A*31:01; FTHL17; ENSG00000132446; CTA
AAINSHITL

SEQ ID NO: 25114 - protein, 9 aa, Homo sapiens
  Table A; Target 25114; HLA-A*32:01; FTHL17; ENSG00000132446; CTA
AAINSHITL

SEQ ID NO: 25115 - protein, 9 aa, Homo sapiens
  Table A; Target 25115; HLA-A*68:02; FTHL17; ENSG00000132446; CTA
AAINSHITL

SEQ ID NO: 25116 - protein, 9 aa, Homo sapiens
  Table A; Target 25116; HLA-B*07:02; FTHL17; ENSG00000132446; CTA
AAINSHITL

SEQ ID NO: 25117 - protein, 9 aa, Homo sapiens
  Table A; Target 25117; HLA-B*08:01; FTHL17; ENSG00000132446; CTA
AAINSHITL

SEQ ID NO: 25118 - protein, 9 aa, Homo sapiens
  Table A; Target 25118; HLA-B*13:02; FTHL17; ENSG00000132446; CTA
AAINSHITL

SEQ ID NO: 25119 - protein, 9 aa, Homo sapiens
  Table A; Target 25119; HLA-B*15:01; FTHL17; ENSG00000132446; CTA
AAINSHITL

SEQ ID NO: 25120 - protein, 9 aa, Homo sapiens
  Table A; Target 25120; HLA-B*15:03; FTHL17; ENSG00000132446; CTA
AAINSHITL

SEQ ID NO: 25121 - protein, 9 aa, Homo sapiens
  Table A; Target 25121; HLA-B*27:05; FTHL17; ENSG00000132446; CTA
AAINSHITL

SEQ ID NO: 25122 - protein, 9 aa, Homo sapiens
  Table A; Target 25122; HLA-B*35:01; FTHL17; ENSG00000132446; CTA
AAINSHITL

SEQ ID NO: 25123 - protein, 9 aa, Homo sapiens
  Table A; Target 25123; HLA-B*35:03; FTHL17; ENSG00000132446; CTA
AAINSHITL

SEQ ID NO: 25124 - protein, 9 aa, Homo sapiens
  Table A; Target 25124; HLA-B*37:01; FTHL17; ENSG00000132446; CTA
AAINSHITL

SEQ ID NO: 25125 - protein, 9 aa, Homo sapiens
  Table A; Target 25125; HLA-B*38:01; FTHL17; ENSG00000132446; CTA
AAINSHITL

SEQ ID NO: 25126 - protein, 9 aa, Homo sapiens
  Table A; Target 25126; HLA-B*39:01; FTHL17; ENSG00000132446; CTA
AAINSHITL

SEQ ID NO: 25127 - protein, 9 aa, Homo sapiens
  Table A; Target 25127; HLA-B*40:01; FTHL17; ENSG00000132446; CTA
AAINSHITL

SEQ ID NO: 25128 - protein, 9 aa, Homo sapiens
  Table A; Target 25128; HLA-B*40:02; FTHL17; ENSG00000132446; CTA
AAINSHITL

SEQ ID NO: 25129 - protein, 9 aa, Homo sapiens
  Table A; Target 25129; HLA-B*44:02; FTHL17; ENSG00000132446; CTA
AAINSHITL

SEQ ID NO: 25130 - protein, 9 aa, Homo sapiens
  Table A; Target 25130; HLA-B*44:03; FTHL17; ENSG00000132446; CTA
AAINSHITL

SEQ ID NO: 25131 - protein, 9 aa, Homo sapiens
  Table A; Target 25131; HLA-B*46:01; FTHL17; ENSG00000132446; CTA
AAINSHITL

SEQ ID NO: 25132 - protein, 9 aa, Homo sapiens
  Table A; Target 25132; HLA-B*55:01; FTHL17; ENSG00000132446; CTA
AAINSHITL

SEQ ID NO: 25133 - protein, 9 aa, Homo sapiens
  Table A; Target 25133; HLA-B*57:01; FTHL17; ENSG00000132446; CTA
AAINSHITL

SEQ ID NO: 25134 - protein, 9 aa, Homo sapiens
  Table A; Target 25134; HLA-B*58:01; FTHL17; ENSG00000132446; CTA
AAINSHITL

SEQ ID NO: 25135 - protein, 9 aa, Homo sapiens
  Table A; Target 25135; HLA-C*01:02; FTHL17; ENSG00000132446; CTA
AAINSHITL

SEQ ID NO: 25136 - protein, 9 aa, Homo sapiens
  Table A; Target 25136; HLA-C*02:02; FTHL17; ENSG00000132446; CTA
AAINSHITL

SEQ ID NO: 25137 - protein, 9 aa, Homo sapiens
  Table A; Target 25137; HLA-C*03:03; FTHL17; ENSG00000132446; CTA
AAINSHITL

SEQ ID NO: 25138 - protein, 9 aa, Homo sapiens
  Table A; Target 25138; HLA-C*05:01; FTHL17; ENSG00000132446; CTA
AAINSHITL

SEQ ID NO: 25139 - protein, 9 aa, Homo sapiens
  Table A; Target 25139; HLA-C*07:02; FTHL17; ENSG00000132446; CTA
AAINSHITL

SEQ ID NO: 25140 - protein, 9 aa, Homo sapiens
  Table A; Target 25140; HLA-C*07:04; FTHL17; ENSG00000132446; CTA
AAINSHITL

SEQ ID NO: 25141 - protein, 9 aa, Homo sapiens
  Table A; Target 25141; HLA-C*07:06; FTHL17; ENSG00000132446; CTA
AAINSHITL

SEQ ID NO: 25142 - protein, 9 aa, Homo sapiens
  Table A; Target 25142; HLA-C*12:03; FTHL17; ENSG00000132446; CTA
AAINSHITL

SEQ ID NO: 25143 - protein, 9 aa, Homo sapiens
  Table A; Target 25143; HLA-C*14:02; FTHL17; ENSG00000132446; CTA
AAINSHITL

SEQ ID NO: 25144 - protein, 9 aa, Homo sapiens
  Table A; Target 25144; HLA-C*16:01; FTHL17; ENSG00000132446; CTA
AAINSHITL

SEQ ID NO: 25145 - protein, 9 aa, Homo sapiens
  Table A; Target 25145; HLA-C*16:02; FTHL17; ENSG00000132446; CTA
AAINSHITL

SEQ ID NO: 25146 - protein, 9 aa, Homo sapiens
  Table A; Target 25146; HLA-C*16:04; FTHL17; ENSG00000132446; CTA
AAINSHITL

SEQ ID NO: 25147 - protein, 11 aa, Homo sapiens
  Table A; Target 25147; HLA-B*46:01; FTHL17; ENSG00000132446; CTA
AAINSHITLEL

SEQ ID NO: 25148 - protein, 11 aa, Homo sapiens
  Table A; Target 25148; HLA-B*58:01; FTHL17; ENSG00000132446; CTA
AAINSHITLEL

SEQ ID NO: 25149 - protein, 11 aa, Homo sapiens
  Table A; Target 25149; HLA-C*02:02; FTHL17; ENSG00000132446; CTA
AAINSHITLEL

SEQ ID NO: 25150 - protein, 11 aa, Homo sapiens
  Table A; Target 25150; HLA-C*03:03; FTHL17; ENSG00000132446; CTA
AAINSHITLEL

SEQ ID NO: 25151 - protein, 11 aa, Homo sapiens
  Table A; Target 25151; HLA-C*03:04; FTHL17; ENSG00000132446; CTA
AAINSHITLEL

SEQ ID NO: 25152 - protein, 11 aa, Homo sapiens
  Table A; Target 25152; HLA-C*16:04; FTHL17; ENSG00000132446; CTA
AAINSHITLEL

SEQ ID NO: 25153 - protein, 8 aa, Homo sapiens
  Table A; Target 25153; HLA-A*30:01; FTHL17; ENSG00000132446; CTA
AEYLFDKL

SEQ ID NO: 25154 - protein, 8 aa, Homo sapiens
  Table A; Target 25154; HLA-B*18:01; FTHL17; ENSG00000132446; CTA
AEYLFDKL

SEQ ID NO: 25155 - protein, 8 aa, Homo sapiens
  Table A; Target 25155; HLA-B*37:01; FTHL17; ENSG00000132446; CTA
AEYLFDKL

SEQ ID NO: 25156 - protein, 8 aa, Homo sapiens
  Table A; Target 25156; HLA-B*40:01; FTHL17; ENSG00000132446; CTA
AEYLFDKL

SEQ ID NO: 25157 - protein, 8 aa, Homo sapiens
  Table A; Target 25157; HLA-B*40:02; FTHL17; ENSG00000132446; CTA
AEYLFDKL

SEQ ID NO: 25158 - protein, 8 aa, Homo sapiens
  Table A; Target 25158; HLA-B*44:02; FTHL17; ENSG00000132446; CTA
AEYLFDKL

SEQ ID NO: 25159 - protein, 8 aa, Homo sapiens
  Table A; Target 25159; HLA-B*44:03; FTHL17; ENSG00000132446; CTA
AEYLFDKL

SEQ ID NO: 25160 - protein, 8 aa, Homo sapiens
  Table A; Target 25160; HLA-B*49:01; FTHL17; ENSG00000132446; CTA
AEYLFDKL

SEQ ID NO: 25161 - protein, 9 aa, Homo sapiens
  Table A; Target 25161; HLA-B*49:01; FTHL17; ENSG00000132446; CTA
AEYLFDKLT

SEQ ID NO: 25162 - protein, 10 aa, Homo sapiens
  Table A; Target 25162; HLA-A*30:01; FTHL17; ENSG00000132446; CTA
AEYLFDKLTL

SEQ ID NO: 25163 - protein, 10 aa, Homo sapiens
  Table A; Target 25163; HLA-B*18:01; FTHL17; ENSG00000132446; CTA
AEYLFDKLTL

SEQ ID NO: 25164 - protein, 10 aa, Homo sapiens
  Table A; Target 25164; HLA-B*27:02; FTHL17; ENSG00000132446; CTA
AEYLFDKLTL

SEQ ID NO: 25165 - protein, 10 aa, Homo sapiens
  Table A; Target 25165; HLA-B*37:01; FTHL17; ENSG00000132446; CTA
AEYLFDKLTL

SEQ ID NO: 25166 - protein, 10 aa, Homo sapiens
  Table A; Target 25166; HLA-B*40:01; FTHL17; ENSG00000132446; CTA
AEYLFDKLTL

SEQ ID NO: 25167 - protein, 10 aa, Homo sapiens
  Table A; Target 25167; HLA-B*40:02; FTHL17; ENSG00000132446; CTA
AEYLFDKLTL

SEQ ID NO: 25168 - protein, 10 aa, Homo sapiens
  Table A; Target 25168; HLA-B*44:02; FTHL17; ENSG00000132446; CTA
AEYLFDKLTL

SEQ ID NO: 25169 - protein, 10 aa, Homo sapiens
  Table A; Target 25169; HLA-B*44:03; FTHL17; ENSG00000132446; CTA
AEYLFDKLTL

SEQ ID NO: 25170 - protein, 10 aa, Homo sapiens
  Table A; Target 25170; HLA-B*49:01; FTHL17; ENSG00000132446; CTA
AEYLFDKLTL

SEQ ID NO: 25171 - protein, 10 aa, Homo sapiens
  Table A; Target 25171; HLA-C*12:03; FTHL17; ENSG00000132446; CTA
AEYLFDKLTL

SEQ ID NO: 25172 - protein, 10 aa, Homo sapiens
  Table A; Target 25172; HLA-C*16:04; FTHL17; ENSG00000132446; CTA
AEYLFDKLTL

SEQ ID NO: 25173 - protein, 8 aa, Homo sapiens
  Table A; Target 25173; HLA-A*32:01; FTHL17; ENSG00000132446; CTA
AINSHITL

SEQ ID NO: 25174 - protein, 8 aa, Homo sapiens
  Table A; Target 25174; HLA-B*07:02; FTHL17; ENSG00000132446; CTA
AINSHITL

SEQ ID NO: 25175 - protein, 8 aa, Homo sapiens
  Table A; Target 25175; HLA-B*08:01; FTHL17; ENSG00000132446; CTA
AINSHITL

SEQ ID NO: 25176 - protein, 8 aa, Homo sapiens
  Table A; Target 25176; HLA-B*37:01; FTHL17; ENSG00000132446; CTA
AINSHITL

SEQ ID NO: 25177 - protein, 8 aa, Homo sapiens
  Table A; Target 25177; HLA-B*58:01; FTHL17; ENSG00000132446; CTA
AINSHITL

SEQ ID NO: 25178 - protein, 8 aa, Homo sapiens
  Table A; Target 25178; HLA-C*01:02; FTHL17; ENSG00000132446; CTA
AINSHITL

SEQ ID NO: 25179 - protein, 8 aa, Homo sapiens
  Table A; Target 25179; HLA-C*03:03; FTHL17; ENSG00000132446; CTA
AINSHITL

SEQ ID NO: 25180 - protein, 8 aa, Homo sapiens
  Table A; Target 25180; HLA-C*03:04; FTHL17; ENSG00000132446; CTA
AINSHITL

SEQ ID NO: 25181 - protein, 8 aa, Homo sapiens
  Table A; Target 25181; HLA-C*05:01; FTHL17; ENSG00000132446; CTA
AINSHITL

SEQ ID NO: 25182 - protein, 8 aa, Homo sapiens
  Table A; Target 25182; HLA-C*07:02; FTHL17; ENSG00000132446; CTA
AINSHITL

SEQ ID NO: 25183 - protein, 8 aa, Homo sapiens
  Table A; Target 25183; HLA-C*12:03; FTHL17; ENSG00000132446; CTA
AINSHITL

SEQ ID NO: 25184 - protein, 8 aa, Homo sapiens
  Table A; Target 25184; HLA-C*14:02; FTHL17; ENSG00000132446; CTA
AINSHITL

SEQ ID NO: 25185 - protein, 8 aa, Homo sapiens
  Table A; Target 25185; HLA-C*16:01; FTHL17; ENSG00000132446; CTA
AINSHITL

SEQ ID NO: 25186 - protein, 8 aa, Homo sapiens
  Table A; Target 25186; HLA-C*16:04; FTHL17; ENSG00000132446; CTA
AINSHITL

SEQ ID NO: 25187 - protein, 9 aa, Homo sapiens
  Table A; Target 25187; HLA-A*03:01; FTHL17; ENSG00000132446; CTA
AINSHITLE

SEQ ID NO: 25188 - protein, 10 aa, Homo sapiens
  Table A; Target 25188; HLA-A*02:03; FTHL17; ENSG00000132446; CTA
AINSHITLEL

SEQ ID NO: 25189 - protein, 10 aa, Homo sapiens
  Table A; Target 25189; HLA-A*02:04; FTHL17; ENSG00000132446; CTA
AINSHITLEL

SEQ ID NO: 25190 - protein, 10 aa, Homo sapiens
  Table A; Target 25190; HLA-A*03:01; FTHL17; ENSG00000132446; CTA
AINSHITLEL

SEQ ID NO: 25191 - protein, 10 aa, Homo sapiens
  Table A; Target 25191; HLA-B*07:02; FTHL17; ENSG00000132446; CTA
AINSHITLEL

SEQ ID NO: 25192 - protein, 10 aa, Homo sapiens
  Table A; Target 25192; HLA-B*46:01; FTHL17; ENSG00000132446; CTA
AINSHITLEL

SEQ ID NO: 25193 - protein, 10 aa, Homo sapiens
  Table A; Target 25193; HLA-C*01:02; FTHL17; ENSG00000132446; CTA
AINSHITLEL

SEQ ID NO: 25194 - protein, 10 aa, Homo sapiens
  Table A; Target 25194; HLA-C*02:02; FTHL17; ENSG00000132446; CTA
AINSHITLEL

SEQ ID NO: 25195 - protein, 11 aa, Homo sapiens
  Table A; Target 25195; HLA-A*01:01; FTHL17; ENSG00000132446; CTA
AINSHITLELY

SEQ ID NO: 25196 - protein, 11 aa, Homo sapiens
  Table A; Target 25196; HLA-A*29:02; FTHL17; ENSG00000132446; CTA
AINSHITLELY

SEQ ID NO: 25197 - protein, 11 aa, Homo sapiens
  Table A; Target 25197; HLA-A*30:02; FTHL17; ENSG00000132446; CTA
AINSHITLELY

SEQ ID NO: 25198 - protein, 11 aa, Homo sapiens
  Table A; Target 25198; HLA-B*15:01; FTHL17; ENSG00000132446; CTA
AINSHITLELY

SEQ ID NO: 25199 - protein, 11 aa, Homo sapiens
  Table A; Target 25199; HLA-B*46:01; FTHL17; ENSG00000132446; CTA
AINSHITLELY

SEQ ID NO: 25200 - protein, 8 aa, Homo sapiens
  Table A; Target 25200; HLA-A*01:01; FTHL17; ENSG00000132446; CTA
ALENFFRY

SEQ ID NO: 25201 - protein, 9 aa, Homo sapiens
  Table A; Target 25201; HLA-A*02:07; FTHL17; ENSG00000132446; CTA
ALENFFRYF

SEQ ID NO: 25202 - protein, 10 aa, Homo sapiens
  Table A; Target 25202; HLA-A*02:01; FTHL17; ENSG00000132446; CTA
ALENFFRYFL

SEQ ID NO: 25203 - protein, 10 aa, Homo sapiens
  Table A; Target 25203; HLA-A*02:04; FTHL17; ENSG00000132446; CTA
ALENFFRYFL

SEQ ID NO: 25204 - protein, 9 aa, Homo sapiens
  Table A; Target 25204; HLA-A*03:01; FTHL17; ENSG00000132446; CTA
AQPSQVRQK

SEQ ID NO: 25205 - protein, 9 aa, Homo sapiens
  Table A; Target 25205; HLA-A*03:02; FTHL17; ENSG00000132446; CTA
AQPSQVRQK

SEQ ID NO: 25206 - protein, 9 aa, Homo sapiens
  Table A; Target 25206; HLA-A*11:01; FTHL17; ENSG00000132446; CTA
AQPSQVRQK

SEQ ID NO: 25207 - protein, 10 aa, Homo sapiens
  Table A; Target 25207; HLA-A*29:02; FTHL17; ENSG00000132446; CTA
AQPSQVRQKY

SEQ ID NO: 25208 - protein, 10 aa, Homo sapiens
  Table A; Target 25208; HLA-A*30:02; FTHL17; ENSG00000132446; CTA
AQPSQVRQKY

SEQ ID NO: 25209 - protein, 10 aa, Homo sapiens
  Table A; Target 25209; HLA-A*32:01; FTHL17; ENSG00000132446; CTA
AQPSQVRQKY

SEQ ID NO: 25210 - protein, 10 aa, Homo sapiens
  Table A; Target 25210; HLA-B*15:01; FTHL17; ENSG00000132446; CTA
AQPSQVRQKY

SEQ ID NO: 25211 - protein, 10 aa, Homo sapiens
  Table A; Target 25211; HLA-B*15:03; FTHL17; ENSG00000132446; CTA
AQPSQVRQKY

SEQ ID NO: 25212 - protein, 10 aa, Homo sapiens
  Table A; Target 25212; HLA-B*44:02; FTHL17; ENSG00000132446; CTA
AQPSQVRQKY

SEQ ID NO: 25213 - protein, 10 aa, Homo sapiens
  Table A; Target 25213; HLA-B*44:03; FTHL17; ENSG00000132446; CTA
AQPSQVRQKY

SEQ ID NO: 25214 - protein, 10 aa, Homo sapiens
  Table A; Target 25214; HLA-C*16:04; FTHL17; ENSG00000132446; CTA
AQPSQVRQKY

SEQ ID NO: 25215 - protein, 9 aa, Homo sapiens
  Table A; Target 25215; HLA-A*03:01; FTHL17; ENSG00000132446; CTA
ATAQPSQVR

SEQ ID NO: 25216 - protein, 9 aa, Homo sapiens
  Table A; Target 25216; HLA-A*03:02; FTHL17; ENSG00000132446; CTA
ATAQPSQVR

SEQ ID NO: 25217 - protein, 9 aa, Homo sapiens
  Table A; Target 25217; HLA-A*11:01; FTHL17; ENSG00000132446; CTA
ATAQPSQVR

SEQ ID NO: 25218 - protein, 9 aa, Homo sapiens
  Table A; Target 25218; HLA-A*31:01; FTHL17; ENSG00000132446; CTA
ATAQPSQVR

SEQ ID NO: 25219 - protein, 9 aa, Homo sapiens
  Table A; Target 25219; HLA-A*32:01; FTHL17; ENSG00000132446; CTA
ATAQPSQVR

SEQ ID NO: 25220 - protein, 9 aa, Homo sapiens
  Table A; Target 25220; HLA-A*33:01; FTHL17; ENSG00000132446; CTA
ATAQPSQVR

SEQ ID NO: 25221 - protein, 9 aa, Homo sapiens
  Table A; Target 25221; HLA-A*33:03; FTHL17; ENSG00000132446; CTA
ATAQPSQVR

SEQ ID NO: 25222 - protein, 9 aa, Homo sapiens
  Table A; Target 25222; HLA-A*68:01; FTHL17; ENSG00000132446; CTA
ATAQPSQVR

SEQ ID NO: 25223 - protein, 9 aa, Homo sapiens
  Table A; Target 25223; HLA-B*27:05; FTHL17; ENSG00000132446; CTA
ATAQPSQVR

SEQ ID NO: 25224 - protein, 9 aa, Homo sapiens
  Table A; Target 25224; HLA-B*57:01; FTHL17; ENSG00000132446; CTA
ATAQPSQVR

SEQ ID NO: 25225 - protein, 9 aa, Homo sapiens
  Table A; Target 25225; HLA-B*58:01; FTHL17; ENSG00000132446; CTA
ATAQPSQVR

SEQ ID NO: 25226 - protein, 9 aa, Homo sapiens
  Table A; Target 25226; HLA-C*07:06; FTHL17; ENSG00000132446; CTA
ATAQPSQVR

SEQ ID NO: 25227 - protein, 9 aa, Homo sapiens
  Table A; Target 25227; HLA-C*16:01; FTHL17; ENSG00000132446; CTA
ATAQPSQVR

SEQ ID NO: 25228 - protein, 9 aa, Homo sapiens
  Table A; Target 25228; HLA-C*16:02; FTHL17; ENSG00000132446; CTA
ATAQPSQVR

SEQ ID NO: 25229 - protein, 10 aa, Homo sapiens
  Table A; Target 25229; HLA-A*11:01; FTHL17; ENSG00000132446; CTA
ATAQPSQVRQ

SEQ ID NO: 25230 - protein, 11 aa, Homo sapiens
  Table A; Target 25230; HLA-A*03:01; FTHL17; ENSG00000132446; CTA
ATAQPSQVRQK

SEQ ID NO: 25231 - protein, 11 aa, Homo sapiens
  Table A; Target 25231; HLA-A*03:02; FTHL17; ENSG00000132446; CTA
ATAQPSQVRQK

SEQ ID NO: 25232 - protein, 11 aa, Homo sapiens
  Table A; Target 25232; HLA-A*31:01; FTHL17; ENSG00000132446; CTA
ATAQPSQVRQK

SEQ ID NO: 25233 - protein, 11 aa, Homo sapiens
  Table A; Target 25233; HLA-A*68:01; FTHL17; ENSG00000132446; CTA
ATAQPSQVRQK

SEQ ID NO: 25234 - protein, 11 aa, Homo sapiens
  Table A; Target 25234; HLA-C*06:02; FTHL17; ENSG00000132446; CTA
ATAQPSQVRQK

SEQ ID NO: 25235 - protein, 11 aa, Homo sapiens
  Table A; Target 25235; HLA-C*07:06; FTHL17; ENSG00000132446; CTA
ATAQPSQVRQK

SEQ ID NO: 25236 - protein, 11 aa, Homo sapiens
  Table A; Target 25236; HLA-C*12:03; FTHL17; ENSG00000132446; CTA
ATAQPSQVRQK

SEQ ID NO: 25237 - protein, 11 aa, Homo sapiens
  Table A; Target 25237; HLA-C*16:01; FTHL17; ENSG00000132446; CTA
ATAQPSQVRQK

SEQ ID NO: 25238 - protein, 11 aa, Homo sapiens
  Table A; Target 25238; HLA-C*16:02; FTHL17; ENSG00000132446; CTA
ATAQPSQVRQK

SEQ ID NO: 25239 - protein, 9 aa, Homo sapiens
  Table A; Target 25239; HLA-B*35:03; FTHL17; ENSG00000132446; CTA
AVEKGDPQL

SEQ ID NO: 25240 - protein, 9 aa, Homo sapiens
  Table A; Target 25240; HLA-B*38:01; FTHL17; ENSG00000132446; CTA
AVEKGDPQL

SEQ ID NO: 25241 - protein, 9 aa, Homo sapiens
  Table A; Target 25241; HLA-B*40:01; FTHL17; ENSG00000132446; CTA
AVEKGDPQL

SEQ ID NO: 25242 - protein, 9 aa, Homo sapiens
  Table A; Target 25242; HLA-B*55:01; FTHL17; ENSG00000132446; CTA
AVEKGDPQL

SEQ ID NO: 25243 - protein, 9 aa, Homo sapiens
  Table A; Target 25243; HLA-C*05:01; FTHL17; ENSG00000132446; CTA
AVEKGDPQL

SEQ ID NO: 25244 - protein, 9 aa, Homo sapiens
  Table A; Target 25244; HLA-B*13:02; FTHL17; ENSG00000132446; CTA
CDAAINSHI

SEQ ID NO: 25245 - protein, 9 aa, Homo sapiens
  Table A; Target 25245; HLA-B*38:01; FTHL17; ENSG00000132446; CTA
CDAAINSHI

SEQ ID NO: 25246 - protein, 9 aa, Homo sapiens
  Table A; Target 25246; HLA-B*40:02; FTHL17; ENSG00000132446; CTA
CDAAINSHI

SEQ ID NO: 25247 - protein, 9 aa, Homo sapiens
  Table A; Target 25247; HLA-B*49:01; FTHL17; ENSG00000132446; CTA
CDAAINSHI

SEQ ID NO: 25248 - protein, 9 aa, Homo sapiens
  Table A; Target 25248; HLA-C*06:02; FTHL17; ENSG00000132446; CTA
CDAAINSHI

SEQ ID NO: 25249 - protein, 9 aa, Homo sapiens
  Table A; Target 25249; HLA-C*07:01; FTHL17; ENSG00000132446; CTA
CDAAINSHI

SEQ ID NO: 25250 - protein, 9 aa, Homo sapiens
  Table A; Target 25250; HLA-C*16:02; FTHL17; ENSG00000132446; CTA
CDAAINSHI

SEQ ID NO: 25251 - protein, 11 aa, Homo sapiens
  Table A; Target 25251; HLA-B*40:02; FTHL17; ENSG00000132446; CTA
CDAAINSHITL

SEQ ID NO: 25252 - protein, 9 aa, Homo sapiens
  Table A; Target 25252; HLA-B*38:01; FTHL17; ENSG00000132446; CTA
CHFLESHYL

SEQ ID NO: 25253 - protein, 10 aa, Homo sapiens
  Table A; Target 25253; HLA-A*01:01; FTHL17; ENSG00000132446; CTA
CSPEAGLAEY

SEQ ID NO: 25254 - protein, 10 aa, Homo sapiens
  Table A; Target 25254; HLA-A*26:01; FTHL17; ENSG00000132446; CTA
CSPEAGLAEY

SEQ ID NO: 25255 - protein, 10 aa, Homo sapiens
  Table A; Target 25255; HLA-A*30:02; FTHL17; ENSG00000132446; CTA
CSPEAGLAEY

SEQ ID NO: 25256 - protein, 10 aa, Homo sapiens
  Table A; Target 25256; HLA-B*46:01; FTHL17; ENSG00000132446; CTA
CSPEAGLAEY

SEQ ID NO: 25257 - protein, 10 aa, Homo sapiens
  Table A; Target 25257; HLA-C*01:02; FTHL17; ENSG00000132446; CTA
CSPEAGLAEY

SEQ ID NO: 25258 - protein, 8 aa, Homo sapiens
  Table A; Target 25258; HLA-A*33:01; FTHL17; ENSG00000132446; CTA
DAAINSHI

SEQ ID NO: 25259 - protein, 8 aa, Homo sapiens
  Table A; Target 25259; HLA-C*07:01; FTHL17; ENSG00000132446; CTA
DAAINSHI

SEQ ID NO: 25260 - protein, 10 aa, Homo sapiens
  Table A; Target 25260; HLA-A*33:01; FTHL17; ENSG00000132446; CTA
DAAINSHITL

SEQ ID NO: 25261 - protein, 10 aa, Homo sapiens
  Table A; Target 25261; HLA-A*68:01; FTHL17; ENSG00000132446; CTA
DAAINSHITL

SEQ ID NO: 25262 - protein, 10 aa, Homo sapiens
  Table A; Target 25262; HLA-B*35:03; FTHL17; ENSG00000132446; CTA
DAAINSHITL

SEQ ID NO: 25263 - protein, 10 aa, Homo sapiens
  Table A; Target 25263; HLA-B*51:01; FTHL17; ENSG00000132446; CTA
DAAINSHITL

SEQ ID NO: 25264 - protein, 10 aa, Homo sapiens
  Table A; Target 25264; HLA-C*07:06; FTHL17; ENSG00000132446; CTA
DAAINSHITL

SEQ ID NO: 25265 - protein, 9 aa, Homo sapiens
  Table A; Target 25265; HLA-A*33:01; FTHL17; ENSG00000132446; CTA
DDKMEHAQK

SEQ ID NO: 25266 - protein, 8 aa, Homo sapiens
  Table A; Target 25266; HLA-B*18:01; FTHL17; ENSG00000132446; CTA
DDVALENF

SEQ ID NO: 25267 - protein, 8 aa, Homo sapiens
  Table A; Target 25267; HLA-B*37:01; FTHL17; ENSG00000132446; CTA
DDVALENF

SEQ ID NO: 25268 - protein, 9 aa, Homo sapiens
  Table A; Target 25268; HLA-B*18:01; FTHL17; ENSG00000132446; CTA
DDVALENFF

SEQ ID NO: 25269 - protein, 9 aa, Homo sapiens
  Table A; Target 25269; HLA-C*07:01; FTHL17; ENSG00000132446; CTA
DDVALENFF

SEQ ID NO: 25270 - protein, 10 aa, Homo sapiens
  Table A; Target 25270; HLA-B*27:02; FTHL17; ENSG00000132446; CTA
DDVALENFFR

SEQ ID NO: 25271 - protein, 9 aa, Homo sapiens
  Table A; Target 25271; HLA-A*03:01; FTHL17; ENSG00000132446; CTA
DLYQLAVEK

SEQ ID NO: 25272 - protein, 9 aa, Homo sapiens
  Table A; Target 25272; HLA-A*03:02; FTHL17; ENSG00000132446; CTA
DLYQLAVEK

SEQ ID NO: 25273 - protein, 9 aa, Homo sapiens
  Table A; Target 25273; HLA-A*11:01; FTHL17; ENSG00000132446; CTA
DLYQLAVEK

SEQ ID NO: 25274 - protein, 9 aa, Homo sapiens
  Table A; Target 25274; HLA-A*26:01; FTHL17; ENSG00000132446; CTA
DLYQLAVEK

SEQ ID NO: 25275 - protein, 9 aa, Homo sapiens
  Table A; Target 25275; HLA-A*33:01; FTHL17; ENSG00000132446; CTA
DLYQLAVEK

SEQ ID NO: 25276 - protein, 9 aa, Homo sapiens
  Table A; Target 25276; HLA-A*33:03; FTHL17; ENSG00000132446; CTA
DLYQLAVEK

SEQ ID NO: 25277 - protein, 9 aa, Homo sapiens
  Table A; Target 25277; HLA-A*68:01; FTHL17; ENSG00000132446; CTA
DLYQLAVEK

SEQ ID NO: 25278 - protein, 9 aa, Homo sapiens
  Table A; Target 25278; HLA-B*18:01; FTHL17; ENSG00000132446; CTA
DLYQLAVEK

SEQ ID NO: 25279 - protein, 9 aa, Homo sapiens
  Table A; Target 25279; HLA-B*27:02; FTHL17; ENSG00000132446; CTA
DLYQLAVEK

SEQ ID NO: 25280 - protein, 9 aa, Homo sapiens
  Table A; Target 25280; HLA-B*27:05; FTHL17; ENSG00000132446; CTA
DLYQLAVEK

SEQ ID NO: 25281 - protein, 9 aa, Homo sapiens
  Table A; Target 25281; HLA-B*35:01; FTHL17; ENSG00000132446; CTA
DLYQLAVEK

SEQ ID NO: 25282 - protein, 9 aa, Homo sapiens
  Table A; Target 25282; HLA-C*07:06; FTHL17; ENSG00000132446; CTA
DLYQLAVEK

SEQ ID NO: 25283 - protein, 9 aa, Homo sapiens
  Table A; Target 25283; HLA-A*33:01; FTHL17; ENSG00000132446; CTA
DVALENFFR

SEQ ID NO: 25284 - protein, 9 aa, Homo sapiens
  Table A; Target 25284; HLA-A*33:03; FTHL17; ENSG00000132446; CTA
DVALENFFR

SEQ ID NO: 25285 - protein, 9 aa, Homo sapiens
  Table A; Target 25285; HLA-A*68:01; FTHL17; ENSG00000132446; CTA
DVALENFFR

SEQ ID NO: 25286 - protein, 10 aa, Homo sapiens
  Table A; Target 25286; HLA-A*01:01; FTHL17; ENSG00000132446; CTA
DVALENFFRY

SEQ ID NO: 25287 - protein, 10 aa, Homo sapiens
  Table A; Target 25287; HLA-A*25:01; FTHL17; ENSG00000132446; CTA
DVALENFFRY

SEQ ID NO: 25288 - protein, 10 aa, Homo sapiens
  Table A; Target 25288; HLA-A*26:01; FTHL17; ENSG00000132446; CTA
DVALENFFRY

SEQ ID NO: 25289 - protein, 8 aa, Homo sapiens
  Table A; Target 25289; HLA-B*35:03; FTHL17; ENSG00000132446; CTA
EAGLAEYL

SEQ ID NO: 25290 - protein, 9 aa, Homo sapiens
  Table A; Target 25290; HLA-B*38:01; FTHL17; ENSG00000132446; CTA
EHAQKLMRL

SEQ ID NO: 25291 - protein, 9 aa, Homo sapiens
  Table A; Target 25291; HLA-A*02:03; FTHL17; ENSG00000132446; CTA
ELGGYVSNL

SEQ ID NO: 25292 - protein, 9 aa, Homo sapiens
  Table A; Target 25292; HLA-A*25:01; FTHL17; ENSG00000132446; CTA
ELGGYVSNL

SEQ ID NO: 25293 - protein, 9 aa, Homo sapiens
  Table A; Target 25293; HLA-A*26:01; FTHL17; ENSG00000132446; CTA
ELGGYVSNL

SEQ ID NO: 25294 - protein, 9 aa, Homo sapiens
  Table A; Target 25294; HLA-A*33:03; FTHL17; ENSG00000132446; CTA
ELGGYVSNL

SEQ ID NO: 25295 - protein, 9 aa, Homo sapiens
  Table A; Target 25295; HLA-A*68:02; FTHL17; ENSG00000132446; CTA
ELGGYVSNL

SEQ ID NO: 25296 - protein, 9 aa, Homo sapiens
  Table A; Target 25296; HLA-C*01:02; FTHL17; ENSG00000132446; CTA
ELGGYVSNL

SEQ ID NO: 25297 - protein, 9 aa, Homo sapiens
  Table A; Target 25297; HLA-C*07:04; FTHL17; ENSG00000132446; CTA
ELGGYVSNL

SEQ ID NO: 25298 - protein, 10 aa, Homo sapiens
  Table A; Target 25298; HLA-A*33:03; FTHL17; ENSG00000132446; CTA
ELGGYVSNLR

SEQ ID NO: 25299 - protein, 10 aa, Homo sapiens
  Table A; Target 25299; HLA-A*68:01; FTHL17; ENSG00000132446; CTA
ELGGYVSNLR

SEQ ID NO: 25300 - protein, 10 aa, Homo sapiens
  Table A; Target 25300; HLA-C*07:06; FTHL17; ENSG00000132446; CTA
ELGGYVSNLR

SEQ ID NO: 25301 - protein, 8 aa, Homo sapiens
  Table A; Target 25301; HLA-A*29:02; FTHL17; ENSG00000132446; CTA
ELYTSYLY

SEQ ID NO: 25302 - protein, 8 aa, Homo sapiens
  Table A; Target 25302; HLA-C*07:01; FTHL17; ENSG00000132446; CTA
ELYTSYLY

SEQ ID NO: 25303 - protein, 9 aa, Homo sapiens
  Table A; Target 25303; HLA-A*01:01; FTHL17; ENSG00000132446; CTA
ELYTSYLYL

SEQ ID NO: 25304 - protein, 9 aa, Homo sapiens
  Table A; Target 25304; HLA-A*02:01; FTHL17; ENSG00000132446; CTA
ELYTSYLYL

SEQ ID NO: 25305 - protein, 9 aa, Homo sapiens
  Table A; Target 25305; HLA-A*02:03; FTHL17; ENSG00000132446; CTA
ELYTSYLYL

SEQ ID NO: 25306 - protein, 9 aa, Homo sapiens
  Table A; Target 25306; HLA-A*02:04; FTHL17; ENSG00000132446; CTA
ELYTSYLYL

SEQ ID NO: 25307 - protein, 9 aa, Homo sapiens
  Table A; Target 25307; HLA-A*02:07; FTHL17; ENSG00000132446; CTA
ELYTSYLYL

SEQ ID NO: 25308 - protein, 9 aa, Homo sapiens
  Table A; Target 25308; HLA-A*03:01; FTHL17; ENSG00000132446; CTA
ELYTSYLYL

SEQ ID NO: 25309 - protein, 9 aa, Homo sapiens
  Table A; Target 25309; HLA-A*25:01; FTHL17; ENSG00000132446; CTA
ELYTSYLYL

SEQ ID NO: 25310 - protein, 9 aa, Homo sapiens
  Table A; Target 25310; HLA-A*26:01; FTHL17; ENSG00000132446; CTA
ELYTSYLYL

SEQ ID NO: 25311 - protein, 9 aa, Homo sapiens
  Table A; Target 25311; HLA-A*68:02; FTHL17; ENSG00000132446; CTA
ELYTSYLYL

SEQ ID NO: 25312 - protein, 9 aa, Homo sapiens
  Table A; Target 25312; HLA-A*25:01; FTHL17; ENSG00000132446; CTA
EQVKTIKEL

SEQ ID NO: 25313 - protein, 9 aa, Homo sapiens
  Table A; Target 25313; HLA-A*26:01; FTHL17; ENSG00000132446; CTA
EQVKTIKEL

SEQ ID NO: 25314 - protein, 9 aa, Homo sapiens
  Table A; Target 25314; HLA-B*38:01; FTHL17; ENSG00000132446; CTA
EQVKTIKEL

SEQ ID NO: 25315 - protein, 9 aa, Homo sapiens
  Table A; Target 25315; HLA-B*39:01; FTHL17; ENSG00000132446; CTA
EQVKTIKEL

SEQ ID NO: 25316 - protein, 9 aa, Homo sapiens
  Table A; Target 25316; HLA-B*40:02; FTHL17; ENSG00000132446; CTA
EQVKTIKEL

SEQ ID NO: 25317 - protein, 9 aa, Homo sapiens
  Table A; Target 25317; HLA-B*44:02; FTHL17; ENSG00000132446; CTA
EQVKTIKEL

SEQ ID NO: 25318 - protein, 9 aa, Homo sapiens
  Table A; Target 25318; HLA-B*44:03; FTHL17; ENSG00000132446; CTA
EQVKTIKEL

SEQ ID NO: 25319 - protein, 10 aa, Homo sapiens
  Table A; Target 25319; HLA-A*68:02; FTHL17; ENSG00000132446; CTA
ESAFHLEKNV

SEQ ID NO: 25320 - protein, 11 aa, Homo sapiens
  Table A; Target 25320; HLA-C*07:01; FTHL17; ENSG00000132446; CTA
ESGLVAMESAF

SEQ ID NO: 25321 - protein, 11 aa, Homo sapiens
  Table A; Target 25321; HLA-C*12:03; FTHL17; ENSG00000132446; CTA
ESGLVAMESAF

SEQ ID NO: 25322 - protein, 9 aa, Homo sapiens
  Table A; Target 25322; HLA-A*01:01; FTHL17; ENSG00000132446; CTA
ESHYLHEQV

SEQ ID NO: 25323 - protein, 9 aa, Homo sapiens
  Table A; Target 25323; HLA-A*68:02; FTHL17; ENSG00000132446; CTA
ESHYLHEQV

SEQ ID NO: 25324 - protein, 9 aa, Homo sapiens
  Table A; Target 25324; HLA-A*23:01; FTHL17; ENSG00000132446; CTA
EYLFDKLTL

SEQ ID NO: 25325 - protein, 9 aa, Homo sapiens
  Table A; Target 25325; HLA-A*24:02; FTHL17; ENSG00000132446; CTA
EYLFDKLTL

SEQ ID NO: 25326 - protein, 9 aa, Homo sapiens
  Table A; Target 25326; HLA-A*33:03; FTHL17; ENSG00000132446; CTA
EYLFDKLTL

SEQ ID NO: 25327 - protein, 9 aa, Homo sapiens
  Table A; Target 25327; HLA-C*14:02; FTHL17; ENSG00000132446; CTA
EYLFDKLTL

SEQ ID NO: 25328 - protein, 8 aa, Homo sapiens
  Table A; Target 25328; HLA-C*06:02; FTHL17; ENSG00000132446; CTA
FDKLTLGG

SEQ ID NO: 25329 - protein, 8 aa, Homo sapiens
  Table A; Target 25329; HLA-C*07:01; FTHL17; ENSG00000132446; CTA
FDKLTLGG

SEQ ID NO: 25330 - protein, 8 aa, Homo sapiens
  Table A; Target 25330; HLA-C*07:04; FTHL17; ENSG00000132446; CTA
FDKLTLGG

SEQ ID NO: 25331 - protein, 11 aa, Homo sapiens
  Table A; Target 25331; HLA-B*38:01; FTHL17; ENSG00000132446; CTA
FHLEKNVNQSL

SEQ ID NO: 25332 - protein, 10 aa, Homo sapiens
  Table A; Target 25332; HLA-A*23:01; FTHL17; ENSG00000132446; CTA
FYFNRDDVAL

SEQ ID NO: 25333 - protein, 10 aa, Homo sapiens
  Table A; Target 25333; HLA-A*24:02; FTHL17; ENSG00000132446; CTA
FYFNRDDVAL

SEQ ID NO: 25334 - protein, 10 aa, Homo sapiens
  Table A; Target 25334; HLA-C*14:02; FTHL17; ENSG00000132446; CTA
FYFNRDDVAL

SEQ ID NO: 25335 - protein, 9 aa, Homo sapiens
  Table A; Target 25335; HLA-A*03:01; FTHL17; ENSG00000132446; CTA
GGYVSNLRK

SEQ ID NO: 25336 - protein, 9 aa, Homo sapiens
  Table A; Target 25336; HLA-A*11:01; FTHL17; ENSG00000132446; CTA
GGYVSNLRK

SEQ ID NO: 25337 - protein, 9 aa, Homo sapiens
  Table A; Target 25337; HLA-A*03:01; FTHL17; ENSG00000132446; CTA
GLAEYLFDK

SEQ ID NO: 25338 - protein, 9 aa, Homo sapiens
  Table A; Target 25338; HLA-A*03:02; FTHL17; ENSG00000132446; CTA
GLAEYLFDK

SEQ ID NO: 25339 - protein, 9 aa, Homo sapiens
  Table A; Target 25339; HLA-A*11:01; FTHL17; ENSG00000132446; CTA
GLAEYLFDK

SEQ ID NO: 25340 - protein, 9 aa, Homo sapiens
  Table A; Target 25340; HLA-B*27:02; FTHL17; ENSG00000132446; CTA
GLAEYLFDK

SEQ ID NO: 25341 - protein, 10 aa, Homo sapiens
  Table A; Target 25341; HLA-A*02:01; FTHL17; ENSG00000132446; CTA
GLAEYLFDKL

SEQ ID NO: 25342 - protein, 10 aa, Homo sapiens
  Table A; Target 25342; HLA-A*02:03; FTHL17; ENSG00000132446; CTA
GLAEYLFDKL

SEQ ID NO: 25343 - protein, 10 aa, Homo sapiens
  Table A; Target 25343; HLA-A*02:04; FTHL17; ENSG00000132446; CTA
GLAEYLFDKL

SEQ ID NO: 25344 - protein, 10 aa, Homo sapiens
  Table A; Target 25344; HLA-A*02:07; FTHL17; ENSG00000132446; CTA
GLAEYLFDKL

SEQ ID NO: 25345 - protein, 10 aa, Homo sapiens
  Table A; Target 25345; HLA-A*68:02; FTHL17; ENSG00000132446; CTA
GLAEYLFDKL

SEQ ID NO: 25346 - protein, 9 aa, Homo sapiens
  Table A; Target 25346; HLA-A*26:01; FTHL17; ENSG00000132446; CTA
GLVAMESAF

SEQ ID NO: 25347 - protein, 9 aa, Homo sapiens
  Table A; Target 25347; HLA-B*15:01; FTHL17; ENSG00000132446; CTA
GLVAMESAF

SEQ ID NO: 25348 - protein, 9 aa, Homo sapiens
  Table A; Target 25348; HLA-B*15:03; FTHL17; ENSG00000132446; CTA
GLVAMESAF

SEQ ID NO: 25349 - protein, 9 aa, Homo sapiens
  Table A; Target 25349; HLA-B*46:01; FTHL17; ENSG00000132446; CTA
GLVAMESAF

SEQ ID NO: 25350 - protein, 9 aa, Homo sapiens
  Table A; Target 25350; HLA-B*55:01; FTHL17; ENSG00000132446; CTA
GLVAMESAF

SEQ ID NO: 25351 - protein, 9 aa, Homo sapiens
  Table A; Target 25351; HLA-C*02:02; FTHL17; ENSG00000132446; CTA
GLVAMESAF

SEQ ID NO: 25352 - protein, 9 aa, Homo sapiens
  Table A; Target 25352; HLA-C*07:04; FTHL17; ENSG00000132446; CTA
GLVAMESAF

SEQ ID NO: 25353 - protein, 9 aa, Homo sapiens
  Table A; Target 25353; HLA-C*14:02; FTHL17; ENSG00000132446; CTA
GLVAMESAF

SEQ ID NO: 25354 - protein, 9 aa, Homo sapiens
  Table A; Target 25354; HLA-C*16:04; FTHL17; ENSG00000132446; CTA
GLVAMESAF

SEQ ID NO: 25355 - protein, 9 aa, Homo sapiens
  Table A; Target 25355; HLA-C*04:01; FTHL17; ENSG00000132446; CTA
GWESGLVAM

SEQ ID NO: 25356 - protein, 9 aa, Homo sapiens
  Table A; Target 25356; HLA-A*23:01; FTHL17; ENSG00000132446; CTA
GYVSNLRKI

SEQ ID NO: 25357 - protein, 9 aa, Homo sapiens
  Table A; Target 25357; HLA-A*24:02; FTHL17; ENSG00000132446; CTA
GYVSNLRKI

SEQ ID NO: 25358 - protein, 8 aa, Homo sapiens
  Table A; Target 25358; HLA-B*08:01; FTHL17; ENSG00000132446; CTA
HAQKLMRL

SEQ ID NO: 25359 - protein, 10 aa, Homo sapiens
  Table A; Target 25359; HLA-A*25:01; FTHL17; ENSG00000132446; CTA
HITLELYTSY

SEQ ID NO: 25360 - protein, 10 aa, Homo sapiens
  Table A; Target 25360; HLA-A*30:02; FTHL17; ENSG00000132446; CTA
HITLELYTSY

SEQ ID NO: 25361 - protein, 10 aa, Homo sapiens
  Table A; Target 25361; HLA-B*35:01; FTHL17; ENSG00000132446; CTA
HITLELYTSY

SEQ ID NO: 25362 - protein, 10 aa, Homo sapiens
  Table A; Target 25362; HLA-A*23:01; FTHL17; ENSG00000132446; CTA
HYLHEQVKTI

SEQ ID NO: 25363 - protein, 10 aa, Homo sapiens
  Table A; Target 25363; HLA-A*24:02; FTHL17; ENSG00000132446; CTA
HYLHEQVKTI

SEQ ID NO: 25364 - protein, 11 aa, Homo sapiens
  Table A; Target 25364; HLA-A*29:02; FTHL17; ENSG00000132446; CTA
ICSPEAGLAEY

SEQ ID NO: 25365 - protein, 11 aa, Homo sapiens
  Table A; Target 25365; HLA-A*30:02; FTHL17; ENSG00000132446; CTA
ICSPEAGLAEY

SEQ ID NO: 25366 - protein, 11 aa, Homo sapiens
  Table A; Target 25366; HLA-B*15:01; FTHL17; ENSG00000132446; CTA
ICSPEAGLAEY

SEQ ID NO: 25367 - protein, 11 aa, Homo sapiens
  Table A; Target 25367; HLA-B*46:01; FTHL17; ENSG00000132446; CTA
ICSPEAGLAEY

SEQ ID NO: 25368 - protein, 9 aa, Homo sapiens
  Table A; Target 25368; HLA-A*23:01; FTHL17; ENSG00000132446; CTA
INSHITLEL

SEQ ID NO: 25369 - protein, 9 aa, Homo sapiens
  Table A; Target 25369; HLA-A*29:02; FTHL17; ENSG00000132446; CTA
INSHITLEL

SEQ ID NO: 25370 - protein, 9 aa, Homo sapiens
  Table A; Target 25370; HLA-A*68:02; FTHL17; ENSG00000132446; CTA
INSHITLEL

SEQ ID NO: 25371 - protein, 9 aa, Homo sapiens
  Table A; Target 25371; HLA-B*27:05; FTHL17; ENSG00000132446; CTA
INSHITLEL

SEQ ID NO: 25372 - protein, 9 aa, Homo sapiens
  Table A; Target 25372; HLA-C*01:02; FTHL17; ENSG00000132446; CTA
INSHITLEL

SEQ ID NO: 25373 - protein, 9 aa, Homo sapiens
  Table A; Target 25373; HLA-C*02:02; FTHL17; ENSG00000132446; CTA
INSHITLEL

SEQ ID NO: 25374 - protein, 9 aa, Homo sapiens
  Table A; Target 25374; HLA-C*03:03; FTHL17; ENSG00000132446; CTA
INSHITLEL

SEQ ID NO: 25375 - protein, 9 aa, Homo sapiens
  Table A; Target 25375; HLA-C*03:04; FTHL17; ENSG00000132446; CTA
INSHITLEL

SEQ ID NO: 25376 - protein, 9 aa, Homo sapiens
  Table A; Target 25376; HLA-C*06:02; FTHL17; ENSG00000132446; CTA
INSHITLEL

SEQ ID NO: 25377 - protein, 9 aa, Homo sapiens
  Table A; Target 25377; HLA-C*12:03; FTHL17; ENSG00000132446; CTA
INSHITLEL

SEQ ID NO: 25378 - protein, 9 aa, Homo sapiens
  Table A; Target 25378; HLA-C*16:01; FTHL17; ENSG00000132446; CTA
INSHITLEL

SEQ ID NO: 25379 - protein, 10 aa, Homo sapiens
  Table A; Target 25379; HLA-A*29:02; FTHL17; ENSG00000132446; CTA
INSHITLELY

SEQ ID NO: 25380 - protein, 9 aa, Homo sapiens
  Table A; Target 25380; HLA-A*01:01; FTHL17; ENSG00000132446; CTA
ITLELYTSY

SEQ ID NO: 25381 - protein, 9 aa, Homo sapiens
  Table A; Target 25381; HLA-A*03:01; FTHL17; ENSG00000132446; CTA
ITLELYTSY

SEQ ID NO: 25382 - protein, 9 aa, Homo sapiens
  Table A; Target 25382; HLA-A*11:01; FTHL17; ENSG00000132446; CTA
ITLELYTSY

SEQ ID NO: 25383 - protein, 9 aa, Homo sapiens
  Table A; Target 25383; HLA-A*23:01; FTHL17; ENSG00000132446; CTA
ITLELYTSY

SEQ ID NO: 25384 - protein, 9 aa, Homo sapiens
  Table A; Target 25384; HLA-A*25:01; FTHL17; ENSG00000132446; CTA
ITLELYTSY

SEQ ID NO: 25385 - protein, 9 aa, Homo sapiens
  Table A; Target 25385; HLA-A*26:01; FTHL17; ENSG00000132446; CTA
ITLELYTSY

SEQ ID NO: 25386 - protein, 9 aa, Homo sapiens
  Table A; Target 25386; HLA-A*29:02; FTHL17; ENSG00000132446; CTA
ITLELYTSY

SEQ ID NO: 25387 - protein, 9 aa, Homo sapiens
  Table A; Target 25387; HLA-A*30:02; FTHL17; ENSG00000132446; CTA
ITLELYTSY

SEQ ID NO: 25388 - protein, 9 aa, Homo sapiens
  Table A; Target 25388; HLA-A*32:01; FTHL17; ENSG00000132446; CTA
ITLELYTSY

SEQ ID NO: 25389 - protein, 9 aa, Homo sapiens
  Table A; Target 25389; HLA-A*33:01; FTHL17; ENSG00000132446; CTA
ITLELYTSY

SEQ ID NO: 25390 - protein, 9 aa, Homo sapiens
  Table A; Target 25390; HLA-A*33:03; FTHL17; ENSG00000132446; CTA
ITLELYTSY

SEQ ID NO: 25391 - protein, 9 aa, Homo sapiens
  Table A; Target 25391; HLA-B*15:01; FTHL17; ENSG00000132446; CTA
ITLELYTSY

SEQ ID NO: 25392 - protein, 9 aa, Homo sapiens
  Table A; Target 25392; HLA-B*15:03; FTHL17; ENSG00000132446; CTA
ITLELYTSY

SEQ ID NO: 25393 - protein, 9 aa, Homo sapiens
  Table A; Target 25393; HLA-B*18:01; FTHL17; ENSG00000132446; CTA
ITLELYTSY

SEQ ID NO: 25394 - protein, 9 aa, Homo sapiens
  Table A; Target 25394; HLA-B*27:02; FTHL17; ENSG00000132446; CTA
ITLELYTSY

SEQ ID NO: 25395 - protein, 9 aa, Homo sapiens
  Table A; Target 25395; HLA-B*35:01; FTHL17; ENSG00000132446; CTA
ITLELYTSY

SEQ ID NO: 25396 - protein, 9 aa, Homo sapiens
  Table A; Target 25396; HLA-B*46:01; FTHL17; ENSG00000132446; CTA
ITLELYTSY

SEQ ID NO: 25397 - protein, 9 aa, Homo sapiens
  Table A; Target 25397; HLA-B*57:01; FTHL17; ENSG00000132446; CTA
ITLELYTSY

SEQ ID NO: 25398 - protein, 9 aa, Homo sapiens
  Table A; Target 25398; HLA-B*58:01; FTHL17; ENSG00000132446; CTA
ITLELYTSY

SEQ ID NO: 25399 - protein, 9 aa, Homo sapiens
  Table A; Target 25399; HLA-C*01:02; FTHL17; ENSG00000132446; CTA
ITLELYTSY

SEQ ID NO: 25400 - protein, 9 aa, Homo sapiens
  Table A; Target 25400; HLA-C*02:02; FTHL17; ENSG00000132446; CTA
ITLELYTSY

SEQ ID NO: 25401 - protein, 9 aa, Homo sapiens
  Table A; Target 25401; HLA-C*07:04; FTHL17; ENSG00000132446; CTA
ITLELYTSY

SEQ ID NO: 25402 - protein, 9 aa, Homo sapiens
  Table A; Target 25402; HLA-C*07:06; FTHL17; ENSG00000132446; CTA
ITLELYTSY

SEQ ID NO: 25403 - protein, 9 aa, Homo sapiens
  Table A; Target 25403; HLA-C*14:02; FTHL17; ENSG00000132446; CTA
ITLELYTSY

SEQ ID NO: 25404 - protein, 9 aa, Homo sapiens
  Table A; Target 25404; HLA-C*16:01; FTHL17; ENSG00000132446; CTA
ITLELYTSY

SEQ ID NO: 25405 - protein, 9 aa, Homo sapiens
  Table A; Target 25405; HLA-C*16:04; FTHL17; ENSG00000132446; CTA
ITLELYTSY

SEQ ID NO: 25406 - protein, 11 aa, Homo sapiens
  Table A; Target 25406; HLA-A*29:02; FTHL17; ENSG00000132446; CTA
ITLELYTSYLY

SEQ ID NO: 25407 - protein, 9 aa, Homo sapiens
  Table A; Target 25407; HLA-B*40:02; FTHL17; ENSG00000132446; CTA
KELGGYVSN

SEQ ID NO: 25408 - protein, 10 aa, Homo sapiens
  Table A; Target 25408; HLA-A*30:01; FTHL17; ENSG00000132446; CTA
KELGGYVSNL

SEQ ID NO: 25409 - protein, 10 aa, Homo sapiens
  Table A; Target 25409; HLA-B*37:01; FTHL17; ENSG00000132446; CTA
KELGGYVSNL

SEQ ID NO: 25410 - protein, 10 aa, Homo sapiens
  Table A; Target 25410; HLA-B*40:02; FTHL17; ENSG00000132446; CTA
KELGGYVSNL

SEQ ID NO: 25411 - protein, 10 aa, Homo sapiens
  Table A; Target 25411; HLA-B*44:03; FTHL17; ENSG00000132446; CTA
KELGGYVSNL

SEQ ID NO: 25412 - protein, 10 aa, Homo sapiens
  Table A; Target 25412; HLA-B*49:01; FTHL17; ENSG00000132446; CTA
KELGGYVSNL

SEQ ID NO: 25413 - protein, 8 aa, Homo sapiens
  Table A; Target 25413; HLA-A*02:04; FTHL17; ENSG00000132446; CTA
KLMRLQNL

SEQ ID NO: 25414 - protein, 9 aa, Homo sapiens
  Table A; Target 25414; HLA-A*31:01; FTHL17; ENSG00000132446; CTA
KLMRLQNLR

SEQ ID NO: 25415 - protein, 11 aa, Homo sapiens
  Table A; Target 25415; HLA-A*29:02; FTHL17; ENSG00000132446; CTA
KNVNQSLLDLY

SEQ ID NO: 25416 - protein, 11 aa, Homo sapiens
  Table A; Target 25416; HLA-A*30:02; FTHL17; ENSG00000132446; CTA
KNVNQSLLDLY

SEQ ID NO: 25417 - protein, 11 aa, Homo sapiens
  Table A; Target 25417; HLA-C*07:01; FTHL17; ENSG00000132446; CTA
KNVNQSLLDLY

SEQ ID NO: 25418 - protein, 9 aa, Homo sapiens
  Table A; Target 25418; HLA-A*01:01; FTHL17; ENSG00000132446; CTA
KTIKELGGY

SEQ ID NO: 25419 - protein, 9 aa, Homo sapiens
  Table A; Target 25419; HLA-A*25:01; FTHL17; ENSG00000132446; CTA
KTIKELGGY

SEQ ID NO: 25420 - protein, 9 aa, Homo sapiens
  Table A; Target 25420; HLA-A*26:01; FTHL17; ENSG00000132446; CTA
KTIKELGGY

SEQ ID NO: 25421 - protein, 9 aa, Homo sapiens
  Table A; Target 25421; HLA-A*29:02; FTHL17; ENSG00000132446; CTA
KTIKELGGY

SEQ ID NO: 25422 - protein, 9 aa, Homo sapiens
  Table A; Target 25422; HLA-A*30:02; FTHL17; ENSG00000132446; CTA
KTIKELGGY

SEQ ID NO: 25423 - protein, 9 aa, Homo sapiens
  Table A; Target 25423; HLA-A*32:01; FTHL17; ENSG00000132446; CTA
KTIKELGGY

SEQ ID NO: 25424 - protein, 9 aa, Homo sapiens
  Table A; Target 25424; HLA-B*15:01; FTHL17; ENSG00000132446; CTA
KTIKELGGY

SEQ ID NO: 25425 - protein, 9 aa, Homo sapiens
  Table A; Target 25425; HLA-B*57:01; FTHL17; ENSG00000132446; CTA
KTIKELGGY

SEQ ID NO: 25426 - protein, 9 aa, Homo sapiens
  Table A; Target 25426; HLA-B*58:01; FTHL17; ENSG00000132446; CTA
KTIKELGGY

SEQ ID NO: 25427 - protein, 10 aa, Homo sapiens
  Table A; Target 25427; HLA-B*40:02; FTHL17; ENSG00000132446; CTA
KTIKELGGYV

SEQ ID NO: 25428 - protein, 10 aa, Homo sapiens
  Table A; Target 25428; HLA-B*35:03; FTHL17; ENSG00000132446; CTA
LAVEKGDPQL

SEQ ID NO: 25429 - protein, 10 aa, Homo sapiens
  Table A; Target 25429; HLA-C*03:03; FTHL17; ENSG00000132446; CTA
LAVEKGDPQL

SEQ ID NO: 25430 - protein, 10 aa, Homo sapiens
  Table A; Target 25430; HLA-C*03:04; FTHL17; ENSG00000132446; CTA
LAVEKGDPQL

SEQ ID NO: 25431 - protein, 10 aa, Homo sapiens
  Table A; Target 25431; HLA-B*27:02; FTHL17; ENSG00000132446; CTA
LDLYQLAVEK

SEQ ID NO: 25432 - protein, 10 aa, Homo sapiens
  Table A; Target 25432; HLA-C*07:01; FTHL17; ENSG00000132446; CTA
LDLYQLAVEK

SEQ ID NO: 25433 - protein, 9 aa, Homo sapiens
  Table A; Target 25433; HLA-A*23:01; FTHL17; ENSG00000132446; CTA
LEKNVNQSL

SEQ ID NO: 25434 - protein, 9 aa, Homo sapiens
  Table A; Target 25434; HLA-A*30:01; FTHL17; ENSG00000132446; CTA
LEKNVNQSL

SEQ ID NO: 25435 - protein, 9 aa, Homo sapiens
  Table A; Target 25435; HLA-B*07:02; FTHL17; ENSG00000132446; CTA
LEKNVNQSL

SEQ ID NO: 25436 - protein, 9 aa, Homo sapiens
  Table A; Target 25436; HLA-B*08:01; FTHL17; ENSG00000132446; CTA
LEKNVNQSL

SEQ ID NO: 25437 - protein, 9 aa, Homo sapiens
  Table A; Target 25437; HLA-B*18:01; FTHL17; ENSG00000132446; CTA
LEKNVNQSL

SEQ ID NO: 25438 - protein, 9 aa, Homo sapiens
  Table A; Target 25438; HLA-B*27:02; FTHL17; ENSG00000132446; CTA
LEKNVNQSL

SEQ ID NO: 25439 - protein, 9 aa, Homo sapiens
  Table A; Target 25439; HLA-B*37:01; FTHL17; ENSG00000132446; CTA
LEKNVNQSL

SEQ ID NO: 25440 - protein, 9 aa, Homo sapiens
  Table A; Target 25440; HLA-B*40:01; FTHL17; ENSG00000132446; CTA
LEKNVNQSL

SEQ ID NO: 25441 - protein, 9 aa, Homo sapiens
  Table A; Target 25441; HLA-B*40:02; FTHL17; ENSG00000132446; CTA
LEKNVNQSL

SEQ ID NO: 25442 - protein, 9 aa, Homo sapiens
  Table A; Target 25442; HLA-B*44:02; FTHL17; ENSG00000132446; CTA
LEKNVNQSL

SEQ ID NO: 25443 - protein, 9 aa, Homo sapiens
  Table A; Target 25443; HLA-B*44:03; FTHL17; ENSG00000132446; CTA
LEKNVNQSL

SEQ ID NO: 25444 - protein, 9 aa, Homo sapiens
  Table A; Target 25444; HLA-B*49:01; FTHL17; ENSG00000132446; CTA
LEKNVNQSL

SEQ ID NO: 25445 - protein, 9 aa, Homo sapiens
  Table A; Target 25445; HLA-C*02:02; FTHL17; ENSG00000132446; CTA
LEKNVNQSL

SEQ ID NO: 25446 - protein, 9 aa, Homo sapiens
  Table A; Target 25446; HLA-C*03:03; FTHL17; ENSG00000132446; CTA
LEKNVNQSL

SEQ ID NO: 25447 - protein, 9 aa, Homo sapiens
  Table A; Target 25447; HLA-C*03:04; FTHL17; ENSG00000132446; CTA
LEKNVNQSL

SEQ ID NO: 25448 - protein, 9 aa, Homo sapiens
  Table A; Target 25448; HLA-C*14:02; FTHL17; ENSG00000132446; CTA
LEKNVNQSL

SEQ ID NO: 25449 - protein, 9 aa, Homo sapiens
  Table A; Target 25449; HLA-C*16:04; FTHL17; ENSG00000132446; CTA
LEKNVNQSL

SEQ ID NO: 25450 - protein, 10 aa, Homo sapiens
  Table A; Target 25450; HLA-A*30:01; FTHL17; ENSG00000132446; CTA
LEKNVNQSLL

SEQ ID NO: 25451 - protein, 10 aa, Homo sapiens
  Table A; Target 25451; HLA-B*40:01; FTHL17; ENSG00000132446; CTA
LEKNVNQSLL

SEQ ID NO: 25452 - protein, 8 aa, Homo sapiens
  Table A; Target 25452; HLA-B*49:01; FTHL17; ENSG00000132446; CTA
LELYTSYL

SEQ ID NO: 25453 - protein, 9 aa, Homo sapiens
  Table A; Target 25453; HLA-A*29:02; FTHL17; ENSG00000132446; CTA
LELYTSYLY

SEQ ID NO: 25454 - protein, 10 aa, Homo sapiens
  Table A; Target 25454; HLA-A*68:02; FTHL17; ENSG00000132446; CTA
LESHYLHEQV

SEQ ID NO: 25455 - protein, 10 aa, Homo sapiens
  Table A; Target 25455; HLA-C*04:01; FTHL17; ENSG00000132446; CTA
LFDKLTLGGR

SEQ ID NO: 25456 - protein, 8 aa, Homo sapiens
  Table A; Target 25456; HLA-C*07:02; FTHL17; ENSG00000132446; CTA
LGGYVSNL

SEQ ID NO: 25457 - protein, 8 aa, Homo sapiens
  Table A; Target 25457; HLA-C*07:04; FTHL17; ENSG00000132446; CTA
LGGYVSNL

SEQ ID NO: 25458 - protein, 8 aa, Homo sapiens
  Table A; Target 25458; HLA-C*12:03; FTHL17; ENSG00000132446; CTA
LGGYVSNL

SEQ ID NO: 25459 - protein, 8 aa, Homo sapiens
  Table A; Target 25459; HLA-C*14:02; FTHL17; ENSG00000132446; CTA
LGGYVSNL

SEQ ID NO: 25460 - protein, 9 aa, Homo sapiens
  Table A; Target 25460; HLA-A*68:01; FTHL17; ENSG00000132446; CTA
LGGYVSNLR

SEQ ID NO: 25461 - protein, 8 aa, Homo sapiens
  Table A; Target 25461; HLA-B*38:01; FTHL17; ENSG00000132446; CTA
LHEQVKTI

SEQ ID NO: 25462 - protein, 9 aa, Homo sapiens
  Table A; Target 25462; HLA-A*01:01; FTHL17; ENSG00000132446; CTA
LLDLYQLAV

SEQ ID NO: 25463 - protein, 9 aa, Homo sapiens
  Table A; Target 25463; HLA-A*02:01; FTHL17; ENSG00000132446; CTA
LLDLYQLAV

SEQ ID NO: 25464 - protein, 9 aa, Homo sapiens
  Table A; Target 25464; HLA-A*02:04; FTHL17; ENSG00000132446; CTA
LLDLYQLAV

SEQ ID NO: 25465 - protein, 9 aa, Homo sapiens
  Table A; Target 25465; HLA-A*02:07; FTHL17; ENSG00000132446; CTA
LLDLYQLAV

SEQ ID NO: 25466 - protein, 9 aa, Homo sapiens
  Table A; Target 25466; HLA-B*13:02; FTHL17; ENSG00000132446; CTA
LLDLYQLAV

SEQ ID NO: 25467 - protein, 9 aa, Homo sapiens
  Table A; Target 25467; HLA-B*55:01; FTHL17; ENSG00000132446; CTA
LLDLYQLAV

SEQ ID NO: 25468 - protein, 11 aa, Homo sapiens
  Table A; Target 25468; HLA-B*27:02; FTHL17; ENSG00000132446; CTA
LLDLYQLAVEK

SEQ ID NO: 25469 - protein, 9 aa, Homo sapiens
  Table A; Target 25469; HLA-A*31:01; FTHL17; ENSG00000132446; CTA
LSMAFYFNR

SEQ ID NO: 25470 - protein, 10 aa, Homo sapiens
  Table A; Target 25470; HLA-C*06:02; FTHL17; ENSG00000132446; CTA
LTLGGRVKET

SEQ ID NO: 25471 - protein, 10 aa, Homo sapiens
  Table A; Target 25471; HLA-C*07:01; FTHL17; ENSG00000132446; CTA
LTLGGRVKET

SEQ ID NO: 25472 - protein, 8 aa, Homo sapiens
  Table A; Target 25472; HLA-B*39:01; FTHL17; ENSG00000132446; CTA
LVAMESAF

SEQ ID NO: 25473 - protein, 8 aa, Homo sapiens
  Table A; Target 25473; HLA-A*29:02; FTHL17; ENSG00000132446; CTA
LYLSMAFY

SEQ ID NO: 25474 - protein, 9 aa, Homo sapiens
  Table A; Target 25474; HLA-A*23:01; FTHL17; ENSG00000132446; CTA
LYLSMAFYF

SEQ ID NO: 25475 - protein, 9 aa, Homo sapiens
  Table A; Target 25475; HLA-A*24:02; FTHL17; ENSG00000132446; CTA
LYLSMAFYF

SEQ ID NO: 25476 - protein, 9 aa, Homo sapiens
  Table A; Target 25476; HLA-A*29:02; FTHL17; ENSG00000132446; CTA
LYLSMAFYF

SEQ ID NO: 25477 - protein, 8 aa, Homo sapiens
  Table A; Target 25477; HLA-C*14:02; FTHL17; ENSG00000132446; CTA
LYQLAVEK

SEQ ID NO: 25478 - protein, 8 aa, Homo sapiens
  Table A; Target 25478; HLA-A*24:02; FTHL17; ENSG00000132446; CTA
LYTSYLYL

SEQ ID NO: 25479 - protein, 9 aa, Homo sapiens
  Table A; Target 25479; HLA-B*51:01; FTHL17; ENSG00000132446; CTA
MATAQPSQV

SEQ ID NO: 25480 - protein, 9 aa, Homo sapiens
  Table A; Target 25480; HLA-B*54:01; FTHL17; ENSG00000132446; CTA
MATAQPSQV

SEQ ID NO: 25481 - protein, 9 aa, Homo sapiens
  Table A; Target 25481; HLA-C*03:04; FTHL17; ENSG00000132446; CTA
MATAQPSQV

SEQ ID NO: 25482 - protein, 9 aa, Homo sapiens
  Table A; Target 25482; HLA-C*12:03; FTHL17; ENSG00000132446; CTA
MATAQPSQV

SEQ ID NO: 25483 - protein, 9 aa, Homo sapiens
  Table A; Target 25483; HLA-C*16:02; FTHL17; ENSG00000132446; CTA
MATAQPSQV

SEQ ID NO: 25484 - protein, 10 aa, Homo sapiens
  Table A; Target 25484; HLA-A*33:03; FTHL17; ENSG00000132446; CTA
MATAQPSQVR

SEQ ID NO: 25485 - protein, 10 aa, Homo sapiens
  Table A; Target 25485; HLA-A*68:01; FTHL17; ENSG00000132446; CTA
MATAQPSQVR

SEQ ID NO: 25486 - protein, 10 aa, Homo sapiens
  Table A; Target 25486; HLA-C*07:06; FTHL17; ENSG00000132446; CTA
MATAQPSQVR

SEQ ID NO: 25487 - protein, 8 aa, Homo sapiens
  Table A; Target 25487; HLA-B*18:01; FTHL17; ENSG00000132446; CTA
MEHAQKLM

SEQ ID NO: 25488 - protein, 8 aa, Homo sapiens
  Table A; Target 25488; HLA-B*37:01; FTHL17; ENSG00000132446; CTA
MEHAQKLM

SEQ ID NO: 25489 - protein, 8 aa, Homo sapiens
  Table A; Target 25489; HLA-B*40:02; FTHL17; ENSG00000132446; CTA
MEHAQKLM

SEQ ID NO: 25490 - protein, 8 aa, Homo sapiens
  Table A; Target 25490; HLA-B*44:03; FTHL17; ENSG00000132446; CTA
MEHAQKLM

SEQ ID NO: 25491 - protein, 8 aa, Homo sapiens
  Table A; Target 25491; HLA-B*49:01; FTHL17; ENSG00000132446; CTA
MEHAQKLM

SEQ ID NO: 25492 - protein, 8 aa, Homo sapiens
  Table A; Target 25492; HLA-C*07:01; FTHL17; ENSG00000132446; CTA
MEHAQKLM

SEQ ID NO: 25493 - protein, 9 aa, Homo sapiens
  Table A; Target 25493; HLA-B*49:01; FTHL17; ENSG00000132446; CTA
MESAFHLEK

SEQ ID NO: 25494 - protein, 8 aa, Homo sapiens
  Table A; Target 25494; HLA-A*30:02; FTHL17; ENSG00000132446; CTA
NQSLLDLY

SEQ ID NO: 25495 - protein, 8 aa, Homo sapiens
  Table A; Target 25495; HLA-B*15:01; FTHL17; ENSG00000132446; CTA
NQSLLDLY

SEQ ID NO: 25496 - protein, 8 aa, Homo sapiens
  Table A; Target 25496; HLA-B*15:03; FTHL17; ENSG00000132446; CTA
NQSLLDLY

SEQ ID NO: 25497 - protein, 8 aa, Homo sapiens
  Table A; Target 25497; HLA-B*18:01; FTHL17; ENSG00000132446; CTA
NQSLLDLY

SEQ ID NO: 25498 - protein, 8 aa, Homo sapiens
  Table A; Target 25498; HLA-B*39:01; FTHL17; ENSG00000132446; CTA
NQSLLDLY

SEQ ID NO: 25499 - protein, 8 aa, Homo sapiens
  Table A; Target 25499; HLA-C*07:04; FTHL17; ENSG00000132446; CTA
NQSLLDLY

SEQ ID NO: 25500 - protein, 10 aa, Homo sapiens
  Table A; Target 25500; HLA-B*38:01; FTHL17; ENSG00000132446; CTA
NQSLLDLYQL

SEQ ID NO: 25501 - protein, 10 aa, Homo sapiens
  Table A; Target 25501; HLA-B*39:01; FTHL17; ENSG00000132446; CTA
NQSLLDLYQL

SEQ ID NO: 25502 - protein, 10 aa, Homo sapiens
  Table A; Target 25502; HLA-B*38:01; FTHL17; ENSG00000132446; CTA
NRDDVALENF

SEQ ID NO: 25503 - protein, 8 aa, Homo sapiens
  Table A; Target 25503; HLA-B*51:01; FTHL17; ENSG00000132446; CTA
NSHITLEL

SEQ ID NO: 25504 - protein, 8 aa, Homo sapiens
  Table A; Target 25504; HLA-C*01:02; FTHL17; ENSG00000132446; CTA
NSHITLEL

SEQ ID NO: 25505 - protein, 8 aa, Homo sapiens
  Table A; Target 25505; HLA-C*03:03; FTHL17; ENSG00000132446; CTA
NSHITLEL

SEQ ID NO: 25506 - protein, 8 aa, Homo sapiens
  Table A; Target 25506; HLA-C*03:04; FTHL17; ENSG00000132446; CTA
NSHITLEL

SEQ ID NO: 25507 - protein, 9 aa, Homo sapiens
  Table A; Target 25507; HLA-A*01:01; FTHL17; ENSG00000132446; CTA
NSHITLELY

SEQ ID NO: 25508 - protein, 9 aa, Homo sapiens
  Table A; Target 25508; HLA-A*29:02; FTHL17; ENSG00000132446; CTA
NSHITLELY

SEQ ID NO: 25509 - protein, 9 aa, Homo sapiens
  Table A; Target 25509; HLA-A*30:02; FTHL17; ENSG00000132446; CTA
NSHITLELY

SEQ ID NO: 25510 - protein, 9 aa, Homo sapiens
  Table A; Target 25510; HLA-B*46:01; FTHL17; ENSG00000132446; CTA
NSHITLELY

SEQ ID NO: 25511 - protein, 9 aa, Homo sapiens
  Table A; Target 25511; HLA-C*07:01; FTHL17; ENSG00000132446; CTA
NSHITLELY

SEQ ID NO: 25512 - protein, 9 aa, Homo sapiens
  Table A; Target 25512; HLA-C*01:02; FTHL17; ENSG00000132446; CTA
NVNQSLLDL

SEQ ID NO: 25513 - protein, 10 aa, Homo sapiens
  Table A; Target 25513; HLA-A*01:01; FTHL17; ENSG00000132446; CTA
NVNQSLLDLY

SEQ ID NO: 25514 - protein, 10 aa, Homo sapiens
  Table A; Target 25514; HLA-A*25:01; FTHL17; ENSG00000132446; CTA
NVNQSLLDLY

SEQ ID NO: 25515 - protein, 10 aa, Homo sapiens
  Table A; Target 25515; HLA-A*26:01; FTHL17; ENSG00000132446; CTA
NVNQSLLDLY

SEQ ID NO: 25516 - protein, 10 aa, Homo sapiens
  Table A; Target 25516; HLA-A*29:02; FTHL17; ENSG00000132446; CTA
NVNQSLLDLY

SEQ ID NO: 25517 - protein, 10 aa, Homo sapiens
  Table A; Target 25517; HLA-A*30:02; FTHL17; ENSG00000132446; CTA
NVNQSLLDLY

SEQ ID NO: 25518 - protein, 10 aa, Homo sapiens
  Table A; Target 25518; HLA-B*35:01; FTHL17; ENSG00000132446; CTA
NVNQSLLDLY

SEQ ID NO: 25519 - protein, 8 aa, Homo sapiens
  Table A; Target 25519; HLA-B*18:01; FTHL17; ENSG00000132446; CTA
PEAGLAEY

SEQ ID NO: 25520 - protein, 9 aa, Homo sapiens
  Table A; Target 25520; HLA-B*40:01; FTHL17; ENSG00000132446; CTA
PEAGLAEYL

SEQ ID NO: 25521 - protein, 10 aa, Homo sapiens
  Table A; Target 25521; HLA-B*35:01; FTHL17; ENSG00000132446; CTA
QGWESGLVAM

SEQ ID NO: 25522 - protein, 10 aa, Homo sapiens
  Table A; Target 25522; HLA-B*35:03; FTHL17; ENSG00000132446; CTA
QGWESGLVAM

SEQ ID NO: 25523 - protein, 9 aa, Homo sapiens
  Table A; Target 25523; HLA-A*29:02; FTHL17; ENSG00000132446; CTA
QPSQVRQKY

SEQ ID NO: 25524 - protein, 9 aa, Homo sapiens
  Table A; Target 25524; HLA-A*30:02; FTHL17; ENSG00000132446; CTA
QPSQVRQKY

SEQ ID NO: 25525 - protein, 9 aa, Homo sapiens
  Table A; Target 25525; HLA-A*32:01; FTHL17; ENSG00000132446; CTA
QPSQVRQKY

SEQ ID NO: 25526 - protein, 9 aa, Homo sapiens
  Table A; Target 25526; HLA-B*07:02; FTHL17; ENSG00000132446; CTA
QPSQVRQKY

SEQ ID NO: 25527 - protein, 9 aa, Homo sapiens
  Table A; Target 25527; HLA-B*15:01; FTHL17; ENSG00000132446; CTA
QPSQVRQKY

SEQ ID NO: 25528 - protein, 9 aa, Homo sapiens
  Table A; Target 25528; HLA-B*35:01; FTHL17; ENSG00000132446; CTA
QPSQVRQKY

SEQ ID NO: 25529 - protein, 9 aa, Homo sapiens
  Table A; Target 25529; HLA-B*44:02; FTHL17; ENSG00000132446; CTA
QPSQVRQKY

SEQ ID NO: 25530 - protein, 9 aa, Homo sapiens
  Table A; Target 25530; HLA-B*44:03; FTHL17; ENSG00000132446; CTA
QPSQVRQKY

SEQ ID NO: 25531 - protein, 9 aa, Homo sapiens
  Table A; Target 25531; HLA-B*55:01; FTHL17; ENSG00000132446; CTA
QPSQVRQKY

SEQ ID NO: 25532 - protein, 9 aa, Homo sapiens
  Table A; Target 25532; HLA-C*07:02; FTHL17; ENSG00000132446; CTA
QPSQVRQKY

SEQ ID NO: 25533 - protein, 9 aa, Homo sapiens
  Table A; Target 25533; HLA-C*16:01; FTHL17; ENSG00000132446; CTA
QPSQVRQKY

SEQ ID NO: 25534 - protein, 9 aa, Homo sapiens
  Table A; Target 25534; HLA-C*16:02; FTHL17; ENSG00000132446; CTA
QPSQVRQKY

SEQ ID NO: 25535 - protein, 9 aa, Homo sapiens
  Table A; Target 25535; HLA-C*16:04; FTHL17; ENSG00000132446; CTA
QPSQVRQKY

SEQ ID NO: 25536 - protein, 9 aa, Homo sapiens
  Table A; Target 25536; HLA-A*02:04; FTHL17; ENSG00000132446; CTA
QSLLDLYQL

SEQ ID NO: 25537 - protein, 8 aa, Homo sapiens
  Table A; Target 25537; HLA-B*08:01; FTHL17; ENSG00000132446; CTA
QVKTIKEL

SEQ ID NO: 25538 - protein, 11 aa, Homo sapiens
  Table A; Target 25538; HLA-A*25:01; FTHL17; ENSG00000132446; CTA
QVKTIKELGGY

SEQ ID NO: 25539 - protein, 11 aa, Homo sapiens
  Table A; Target 25539; HLA-A*26:01; FTHL17; ENSG00000132446; CTA
QVKTIKELGGY

SEQ ID NO: 25540 - protein, 11 aa, Homo sapiens
  Table A; Target 25540; HLA-A*30:02; FTHL17; ENSG00000132446; CTA
QVKTIKELGGY

SEQ ID NO: 25541 - protein, 9 aa, Homo sapiens
  Table A; Target 25541; HLA-B*37:01; FTHL17; ENSG00000132446; CTA
RDDVALENF

SEQ ID NO: 25542 - protein, 9 aa, Homo sapiens
  Table A; Target 25542; HLA-A*68:02; FTHL17; ENSG00000132446; CTA
SAFHLEKNV

SEQ ID NO: 25543 - protein, 9 aa, Homo sapiens
  Table A; Target 25543; HLA-B*51:01; FTHL17; ENSG00000132446; CTA
SAFHLEKNV

SEQ ID NO: 25544 - protein, 9 aa, Homo sapiens
  Table A; Target 25544; HLA-C*02:02; FTHL17; ENSG00000132446; CTA
SAFHLEKNV

SEQ ID NO: 25545 - protein, 9 aa, Homo sapiens
  Table A; Target 25545; HLA-C*12:03; FTHL17; ENSG00000132446; CTA
SAFHLEKNV

SEQ ID NO: 25546 - protein, 9 aa, Homo sapiens
  Table A; Target 25546; HLA-C*16:02; FTHL17; ENSG00000132446; CTA
SAFHLEKNV

SEQ ID NO: 25547 - protein, 9 aa, Homo sapiens
  Table A; Target 25547; HLA-C*16:04; FTHL17; ENSG00000132446; CTA
SAFHLEKNV

SEQ ID NO: 25548 - protein, 8 aa, Homo sapiens
  Table A; Target 25548; HLA-A*02:01; FTHL17; ENSG00000132446; CTA
SLLDLYQL

SEQ ID NO: 25549 - protein, 8 aa, Homo sapiens
  Table A; Target 25549; HLA-A*02:04; FTHL17; ENSG00000132446; CTA
SLLDLYQL

SEQ ID NO: 25550 - protein, 8 aa, Homo sapiens
  Table A; Target 25550; HLA-A*23:01; FTHL17; ENSG00000132446; CTA
SLLDLYQL

SEQ ID NO: 25551 - protein, 9 aa, Homo sapiens
  Table A; Target 25551; HLA-A*02:01; FTHL17; ENSG00000132446; CTA
SLLDLYQLA

SEQ ID NO: 25552 - protein, 9 aa, Homo sapiens
  Table A; Target 25552; HLA-A*02:04; FTHL17; ENSG00000132446; CTA
SLLDLYQLA

SEQ ID NO: 25553 - protein, 10 aa, Homo sapiens
  Table A; Target 25553; HLA-A*02:01; FTHL17; ENSG00000132446; CTA
SLLDLYQLAV

SEQ ID NO: 25554 - protein, 10 aa, Homo sapiens
  Table A; Target 25554; HLA-A*02:03; FTHL17; ENSG00000132446; CTA
SLLDLYQLAV

SEQ ID NO: 25555 - protein, 10 aa, Homo sapiens
  Table A; Target 25555; HLA-A*02:04; FTHL17; ENSG00000132446; CTA
SLLDLYQLAV

SEQ ID NO: 25556 - protein, 10 aa, Homo sapiens
  Table A; Target 25556; HLA-A*02:07; FTHL17; ENSG00000132446; CTA
SLLDLYQLAV

SEQ ID NO: 25557 - protein, 10 aa, Homo sapiens
  Table A; Target 25557; HLA-B*13:02; FTHL17; ENSG00000132446; CTA
SLLDLYQLAV

SEQ ID NO: 25558 - protein, 8 aa, Homo sapiens
  Table A; Target 25558; HLA-A*31:01; FTHL17; ENSG00000132446; CTA
SMAFYFNR

SEQ ID NO: 25559 - protein, 9 aa, Homo sapiens
  Table A; Target 25559; HLA-A*01:01; FTHL17; ENSG00000132446; CTA
SPEAGLAEY

SEQ ID NO: 25560 - protein, 9 aa, Homo sapiens
  Table A; Target 25560; HLA-A*30:02; FTHL17; ENSG00000132446; CTA
SPEAGLAEY

SEQ ID NO: 25561 - protein, 9 aa, Homo sapiens
  Table A; Target 25561; HLA-B*18:01; FTHL17; ENSG00000132446; CTA
SPEAGLAEY

SEQ ID NO: 25562 - protein, 9 aa, Homo sapiens
  Table A; Target 25562; HLA-B*35:03; FTHL17; ENSG00000132446; CTA
SPEAGLAEY

SEQ ID NO: 25563 - protein, 9 aa, Homo sapiens
  Table A; Target 25563; HLA-B*39:01; FTHL17; ENSG00000132446; CTA
SPEAGLAEY

SEQ ID NO: 25564 - protein, 9 aa, Homo sapiens
  Table A; Target 25564; HLA-B*55:01; FTHL17; ENSG00000132446; CTA
SPEAGLAEY

SEQ ID NO: 25565 - protein, 9 aa, Homo sapiens
  Table A; Target 25565; HLA-C*03:03; FTHL17; ENSG00000132446; CTA
SPEAGLAEY

SEQ ID NO: 25566 - protein, 9 aa, Homo sapiens
  Table A; Target 25566; HLA-C*14:02; FTHL17; ENSG00000132446; CTA
SPEAGLAEY

SEQ ID NO: 25567 - protein, 10 aa, Homo sapiens
  Table A; Target 25567; HLA-B*35:03; FTHL17; ENSG00000132446; CTA
SPEAGLAEYL

SEQ ID NO: 25568 - protein, 11 aa, Homo sapiens
  Table A; Target 25568; HLA-B*35:01; FTHL17; ENSG00000132446; CTA
SPEAGLAEYLF

SEQ ID NO: 25569 - protein, 11 aa, Homo sapiens
  Table A; Target 25569; HLA-B*55:01; FTHL17; ENSG00000132446; CTA
SPEAGLAEYLF

SEQ ID NO: 25570 - protein, 9 aa, Homo sapiens
  Table A; Target 25570; HLA-A*23:01; FTHL17; ENSG00000132446; CTA
SYLYLSMAF

SEQ ID NO: 25571 - protein, 9 aa, Homo sapiens
  Table A; Target 25571; HLA-A*24:02; FTHL17; ENSG00000132446; CTA
SYLYLSMAF

SEQ ID NO: 25572 - protein, 9 aa, Homo sapiens
  Table A; Target 25572; HLA-A*29:02; FTHL17; ENSG00000132446; CTA
SYLYLSMAF

SEQ ID NO: 25573 - protein, 10 aa, Homo sapiens
  Table A; Target 25573; HLA-A*29:02; FTHL17; ENSG00000132446; CTA
SYLYLSMAFY

SEQ ID NO: 25574 - protein, 8 aa, Homo sapiens
  Table A; Target 25574; HLA-A*33:03; FTHL17; ENSG00000132446; CTA
TAQPSQVR

SEQ ID NO: 25575 - protein, 8 aa, Homo sapiens
  Table A; Target 25575; HLA-C*07:06; FTHL17; ENSG00000132446; CTA
TAQPSQVR

SEQ ID NO: 25576 - protein, 9 aa, Homo sapiens
  Table A; Target 25576; HLA-C*16:01; FTHL17; ENSG00000132446; CTA
TAQPSQVRQ

SEQ ID NO: 25577 - protein, 9 aa, Homo sapiens
  Table A; Target 25577; HLA-C*16:02; FTHL17; ENSG00000132446; CTA
TAQPSQVRQ

SEQ ID NO: 25578 - protein, 10 aa, Homo sapiens
  Table A; Target 25578; HLA-A*03:01; FTHL17; ENSG00000132446; CTA
TAQPSQVRQK

SEQ ID NO: 25579 - protein, 10 aa, Homo sapiens
  Table A; Target 25579; HLA-A*03:02; FTHL17; ENSG00000132446; CTA
TAQPSQVRQK

SEQ ID NO: 25580 - protein, 10 aa, Homo sapiens
  Table A; Target 25580; HLA-A*11:01; FTHL17; ENSG00000132446; CTA
TAQPSQVRQK

SEQ ID NO: 25581 - protein, 10 aa, Homo sapiens
  Table A; Target 25581; HLA-A*68:01; FTHL17; ENSG00000132446; CTA
TAQPSQVRQK

SEQ ID NO: 25582 - protein, 10 aa, Homo sapiens
  Table A; Target 25582; HLA-C*06:02; FTHL17; ENSG00000132446; CTA
TAQPSQVRQK

SEQ ID NO: 25583 - protein, 10 aa, Homo sapiens
  Table A; Target 25583; HLA-C*07:06; FTHL17; ENSG00000132446; CTA
TAQPSQVRQK

SEQ ID NO: 25584 - protein, 11 aa, Homo sapiens
  Table A; Target 25584; HLA-A*29:02; FTHL17; ENSG00000132446; CTA
TAQPSQVRQKY

SEQ ID NO: 25585 - protein, 11 aa, Homo sapiens
  Table A; Target 25585; HLA-A*30:02; FTHL17; ENSG00000132446; CTA
TAQPSQVRQKY

SEQ ID NO: 25586 - protein, 11 aa, Homo sapiens
  Table A; Target 25586; HLA-A*32:01; FTHL17; ENSG00000132446; CTA
TAQPSQVRQKY

SEQ ID NO: 25587 - protein, 11 aa, Homo sapiens
  Table A; Target 25587; HLA-B*15:01; FTHL17; ENSG00000132446; CTA
TAQPSQVRQKY

SEQ ID NO: 25588 - protein, 11 aa, Homo sapiens
  Table A; Target 25588; HLA-B*35:01; FTHL17; ENSG00000132446; CTA
TAQPSQVRQKY

SEQ ID NO: 25589 - protein, 11 aa, Homo sapiens
  Table A; Target 25589; HLA-B*57:01; FTHL17; ENSG00000132446; CTA
TAQPSQVRQKY

SEQ ID NO: 25590 - protein, 11 aa, Homo sapiens
  Table A; Target 25590; HLA-B*58:01; FTHL17; ENSG00000132446; CTA
TAQPSQVRQKY

SEQ ID NO: 25591 - protein, 11 aa, Homo sapiens
  Table A; Target 25591; HLA-C*16:01; FTHL17; ENSG00000132446; CTA
TAQPSQVRQKY

SEQ ID NO: 25592 - protein, 11 aa, Homo sapiens
  Table A; Target 25592; HLA-C*16:02; FTHL17; ENSG00000132446; CTA
TAQPSQVRQKY

SEQ ID NO: 25593 - protein, 8 aa, Homo sapiens
  Table A; Target 25593; HLA-A*30:02; FTHL17; ENSG00000132446; CTA
TIKELGGY

SEQ ID NO: 25594 - protein, 8 aa, Homo sapiens
  Table A; Target 25594; HLA-B*15:01; FTHL17; ENSG00000132446; CTA
TIKELGGY

SEQ ID NO: 25595 - protein, 8 aa, Homo sapiens
  Table A; Target 25595; HLA-B*46:01; FTHL17; ENSG00000132446; CTA
TIKELGGY

SEQ ID NO: 25596 - protein, 9 aa, Homo sapiens
  Table A; Target 25596; HLA-A*02:03; FTHL17; ENSG00000132446; CTA
TIKELGGYV

SEQ ID NO: 25597 - protein, 9 aa, Homo sapiens
  Table A; Target 25597; HLA-A*26:01; FTHL17; ENSG00000132446; CTA
TIKELGGYV

SEQ ID NO: 25598 - protein, 9 aa, Homo sapiens
  Table A; Target 25598; HLA-A*68:02; FTHL17; ENSG00000132446; CTA
TIKELGGYV

SEQ ID NO: 25599 - protein, 9 aa, Homo sapiens
  Table A; Target 25599; HLA-A*02:07; FTHL17; ENSG00000132446; CTA
TLELYTSYL

SEQ ID NO: 25600 - protein, 10 aa, Homo sapiens
  Table A; Target 25600; HLA-A*01:01; FTHL17; ENSG00000132446; CTA
TLELYTSYLY

SEQ ID NO: 25601 - protein, 9 aa, Homo sapiens
  Table A; Target 25601; HLA-A*02:03; FTHL17; ENSG00000132446; CTA
TLGGRVKET

SEQ ID NO: 25602 - protein, 9 aa, Homo sapiens
  Table A; Target 25602; HLA-C*06:02; FTHL17; ENSG00000132446; CTA
TLGGRVKET

SEQ ID NO: 25603 - protein, 9 aa, Homo sapiens
  Table A; Target 25603; HLA-C*07:01; FTHL17; ENSG00000132446; CTA
TLGGRVKET

SEQ ID NO: 25604 - protein, 9 aa, Homo sapiens
  Table A; Target 25604; HLA-C*16:02; FTHL17; ENSG00000132446; CTA
TLGGRVKET

SEQ ID NO: 25605 - protein, 9 aa, Homo sapiens
  Table A; Target 25605; HLA-A*01:01; FTHL17; ENSG00000132446; CTA
VALENFFRY

SEQ ID NO: 25606 - protein, 9 aa, Homo sapiens
  Table A; Target 25606; HLA-A*02:04; FTHL17; ENSG00000132446; CTA
VALENFFRY

SEQ ID NO: 25607 - protein, 9 aa, Homo sapiens
  Table A; Target 25607; HLA-A*03:01; FTHL17; ENSG00000132446; CTA
VALENFFRY

SEQ ID NO: 25608 - protein, 9 aa, Homo sapiens
  Table A; Target 25608; HLA-A*24:02; FTHL17; ENSG00000132446; CTA
VALENFFRY

SEQ ID NO: 25609 - protein, 9 aa, Homo sapiens
  Table A; Target 25609; HLA-A*29:02; FTHL17; ENSG00000132446; CTA
VALENFFRY

SEQ ID NO: 25610 - protein, 9 aa, Homo sapiens
  Table A; Target 25610; HLA-A*30:02; FTHL17; ENSG00000132446; CTA
VALENFFRY

SEQ ID NO: 25611 - protein, 9 aa, Homo sapiens
  Table A; Target 25611; HLA-B*57:01; FTHL17; ENSG00000132446; CTA
VALENFFRY

SEQ ID NO: 25612 - protein, 9 aa, Homo sapiens
  Table A; Target 25612; HLA-C*02:02; FTHL17; ENSG00000132446; CTA
VALENFFRY

SEQ ID NO: 25613 - protein, 10 aa, Homo sapiens
  Table A; Target 25613; HLA-B*57:01; FTHL17; ENSG00000132446; CTA
VALENFFRYF

SEQ ID NO: 25614 - protein, 9 aa, Homo sapiens
  Table A; Target 25614; HLA-A*02:01; FTHL17; ENSG00000132446; CTA
VAMESAFHL

SEQ ID NO: 25615 - protein, 9 aa, Homo sapiens
  Table A; Target 25615; HLA-A*02:04; FTHL17; ENSG00000132446; CTA
VAMESAFHL

SEQ ID NO: 25616 - protein, 9 aa, Homo sapiens
  Table A; Target 25616; HLA-A*02:07; FTHL17; ENSG00000132446; CTA
VAMESAFHL

SEQ ID NO: 25617 - protein, 9 aa, Homo sapiens
  Table A; Target 25617; HLA-A*03:02; FTHL17; ENSG00000132446; CTA
VAMESAFHL

SEQ ID NO: 25618 - protein, 9 aa, Homo sapiens
  Table A; Target 25618; HLA-A*11:01; FTHL17; ENSG00000132446; CTA
VAMESAFHL

SEQ ID NO: 25619 - protein, 9 aa, Homo sapiens
  Table A; Target 25619; HLA-A*23:01; FTHL17; ENSG00000132446; CTA
VAMESAFHL

SEQ ID NO: 25620 - protein, 9 aa, Homo sapiens
  Table A; Target 25620; HLA-A*24:02; FTHL17; ENSG00000132446; CTA
VAMESAFHL

SEQ ID NO: 25621 - protein, 9 aa, Homo sapiens
  Table A; Target 25621; HLA-A*30:01; FTHL17; ENSG00000132446; CTA
VAMESAFHL

SEQ ID NO: 25622 - protein, 9 aa, Homo sapiens
  Table A; Target 25622; HLA-A*31:01; FTHL17; ENSG00000132446; CTA
VAMESAFHL

SEQ ID NO: 25623 - protein, 9 aa, Homo sapiens
  Table A; Target 25623; HLA-A*68:02; FTHL17; ENSG00000132446; CTA
VAMESAFHL

SEQ ID NO: 25624 - protein, 9 aa, Homo sapiens
  Table A; Target 25624; HLA-B*13:02; FTHL17; ENSG00000132446; CTA
VAMESAFHL

SEQ ID NO: 25625 - protein, 9 aa, Homo sapiens
  Table A; Target 25625; HLA-B*15:03; FTHL17; ENSG00000132446; CTA
VAMESAFHL

SEQ ID NO: 25626 - protein, 9 aa, Homo sapiens
  Table A; Target 25626; HLA-B*27:02; FTHL17; ENSG00000132446; CTA
VAMESAFHL

SEQ ID NO: 25627 - protein, 9 aa, Homo sapiens
  Table A; Target 25627; HLA-B*35:03; FTHL17; ENSG00000132446; CTA
VAMESAFHL

SEQ ID NO: 25628 - protein, 9 aa, Homo sapiens
  Table A; Target 25628; HLA-B*37:01; FTHL17; ENSG00000132446; CTA
VAMESAFHL

SEQ ID NO: 25629 - protein, 9 aa, Homo sapiens
  Table A; Target 25629; HLA-B*38:01; FTHL17; ENSG00000132446; CTA
VAMESAFHL

SEQ ID NO: 25630 - protein, 9 aa, Homo sapiens
  Table A; Target 25630; HLA-B*39:01; FTHL17; ENSG00000132446; CTA
VAMESAFHL

SEQ ID NO: 25631 - protein, 9 aa, Homo sapiens
  Table A; Target 25631; HLA-B*40:01; FTHL17; ENSG00000132446; CTA
VAMESAFHL

SEQ ID NO: 25632 - protein, 9 aa, Homo sapiens
  Table A; Target 25632; HLA-B*40:02; FTHL17; ENSG00000132446; CTA
VAMESAFHL

SEQ ID NO: 25633 - protein, 9 aa, Homo sapiens
  Table A; Target 25633; HLA-B*46:01; FTHL17; ENSG00000132446; CTA
VAMESAFHL

SEQ ID NO: 25634 - protein, 9 aa, Homo sapiens
  Table A; Target 25634; HLA-B*51:01; FTHL17; ENSG00000132446; CTA
VAMESAFHL

SEQ ID NO: 25635 - protein, 9 aa, Homo sapiens
  Table A; Target 25635; HLA-B*55:01; FTHL17; ENSG00000132446; CTA
VAMESAFHL

SEQ ID NO: 25636 - protein, 9 aa, Homo sapiens
  Table A; Target 25636; HLA-B*57:01; FTHL17; ENSG00000132446; CTA
VAMESAFHL

SEQ ID NO: 25637 - protein, 9 aa, Homo sapiens
  Table A; Target 25637; HLA-B*58:01; FTHL17; ENSG00000132446; CTA
VAMESAFHL

SEQ ID NO: 25638 - protein, 9 aa, Homo sapiens
  Table A; Target 25638; HLA-C*01:02; FTHL17; ENSG00000132446; CTA
VAMESAFHL

SEQ ID NO: 25639 - protein, 9 aa, Homo sapiens
  Table A; Target 25639; HLA-C*02:02; FTHL17; ENSG00000132446; CTA
VAMESAFHL

SEQ ID NO: 25640 - protein, 9 aa, Homo sapiens
  Table A; Target 25640; HLA-C*03:03; FTHL17; ENSG00000132446; CTA
VAMESAFHL

SEQ ID NO: 25641 - protein, 9 aa, Homo sapiens
  Table A; Target 25641; HLA-C*03:04; FTHL17; ENSG00000132446; CTA
VAMESAFHL

SEQ ID NO: 25642 - protein, 9 aa, Homo sapiens
  Table A; Target 25642; HLA-C*05:01; FTHL17; ENSG00000132446; CTA
VAMESAFHL

SEQ ID NO: 25643 - protein, 9 aa, Homo sapiens
  Table A; Target 25643; HLA-C*07:04; FTHL17; ENSG00000132446; CTA
VAMESAFHL

SEQ ID NO: 25644 - protein, 9 aa, Homo sapiens
  Table A; Target 25644; HLA-C*12:03; FTHL17; ENSG00000132446; CTA
VAMESAFHL

SEQ ID NO: 25645 - protein, 9 aa, Homo sapiens
  Table A; Target 25645; HLA-C*14:02; FTHL17; ENSG00000132446; CTA
VAMESAFHL

SEQ ID NO: 25646 - protein, 9 aa, Homo sapiens
  Table A; Target 25646; HLA-C*16:01; FTHL17; ENSG00000132446; CTA
VAMESAFHL

SEQ ID NO: 25647 - protein, 9 aa, Homo sapiens
  Table A; Target 25647; HLA-C*16:02; FTHL17; ENSG00000132446; CTA
VAMESAFHL

SEQ ID NO: 25648 - protein, 9 aa, Homo sapiens
  Table A; Target 25648; HLA-C*16:04; FTHL17; ENSG00000132446; CTA
VAMESAFHL

SEQ ID NO: 25649 - protein, 11 aa, Homo sapiens
  Table A; Target 25649; HLA-A*11:01; FTHL17; ENSG00000132446; CTA
VAMESAFHLEK

SEQ ID NO: 25650 - protein, 8 aa, Homo sapiens
  Table A; Target 25650; HLA-A*30:01; FTHL17; ENSG00000132446; CTA
VEKGDPQL

SEQ ID NO: 25651 - protein, 8 aa, Homo sapiens
  Table A; Target 25651; HLA-B*18:01; FTHL17; ENSG00000132446; CTA
VEKGDPQL

SEQ ID NO: 25652 - protein, 8 aa, Homo sapiens
  Table A; Target 25652; HLA-B*37:01; FTHL17; ENSG00000132446; CTA
VEKGDPQL

SEQ ID NO: 25653 - protein, 8 aa, Homo sapiens
  Table A; Target 25653; HLA-B*40:01; FTHL17; ENSG00000132446; CTA
VEKGDPQL

SEQ ID NO: 25654 - protein, 8 aa, Homo sapiens
  Table A; Target 25654; HLA-B*40:02; FTHL17; ENSG00000132446; CTA
VEKGDPQL

SEQ ID NO: 25655 - protein, 8 aa, Homo sapiens
  Table A; Target 25655; HLA-C*04:01; FTHL17; ENSG00000132446; CTA
VEKGDPQL

SEQ ID NO: 25656 - protein, 8 aa, Homo sapiens
  Table A; Target 25656; HLA-C*06:02; FTHL17; ENSG00000132446; CTA
VEKGDPQL

SEQ ID NO: 25657 - protein, 8 aa, Homo sapiens
  Table A; Target 25657; HLA-C*07:02; FTHL17; ENSG00000132446; CTA
VEKGDPQL

SEQ ID NO: 25658 - protein, 8 aa, Homo sapiens
  Table A; Target 25658; HLA-C*12:03; FTHL17; ENSG00000132446; CTA
VEKGDPQL

SEQ ID NO: 25659 - protein, 8 aa, Homo sapiens
  Table A; Target 25659; HLA-C*16:02; FTHL17; ENSG00000132446; CTA
VEKGDPQL

SEQ ID NO: 25660 - protein, 9 aa, Homo sapiens
  Table A; Target 25660; HLA-A*30:01; FTHL17; ENSG00000132446; CTA
VEKGDPQLC

SEQ ID NO: 25661 - protein, 9 aa, Homo sapiens
  Table A; Target 25661; HLA-B*40:01; FTHL17; ENSG00000132446; CTA
VEKGDPQLC

SEQ ID NO: 25662 - protein, 9 aa, Homo sapiens
  Table A; Target 25662; HLA-B*40:02; FTHL17; ENSG00000132446; CTA
VEKGDPQLC

SEQ ID NO: 25663 - protein, 9 aa, Homo sapiens
  Table A; Target 25663; HLA-B*49:01; FTHL17; ENSG00000132446; CTA
VEKGDPQLC

SEQ ID NO: 25664 - protein, 9 aa, Homo sapiens
  Table A; Target 25664; HLA-C*06:02; FTHL17; ENSG00000132446; CTA
VEKGDPQLC

SEQ ID NO: 25665 - protein, 9 aa, Homo sapiens
  Table A; Target 25665; HLA-C*12:03; FTHL17; ENSG00000132446; CTA
VEKGDPQLC

SEQ ID NO: 25666 - protein, 9 aa, Homo sapiens
  Table A; Target 25666; HLA-A*01:01; FTHL17; ENSG00000132446; CTA
VNQSLLDLY

SEQ ID NO: 25667 - protein, 9 aa, Homo sapiens
  Table A; Target 25667; HLA-A*29:02; FTHL17; ENSG00000132446; CTA
VNQSLLDLY

SEQ ID NO: 25668 - protein, 9 aa, Homo sapiens
  Table A; Target 25668; HLA-A*30:02; FTHL17; ENSG00000132446; CTA
VNQSLLDLY

SEQ ID NO: 25669 - protein, 8 aa, Homo sapiens
  Table A; Target 25669; HLA-A*30:01; FTHL17; ENSG00000132446; CTA
WESGLVAM

SEQ ID NO: 25670 - protein, 8 aa, Homo sapiens
  Table A; Target 25670; HLA-B*18:01; FTHL17; ENSG00000132446; CTA
WESGLVAM

SEQ ID NO: 25671 - protein, 8 aa, Homo sapiens
  Table A; Target 25671; HLA-B*37:01; FTHL17; ENSG00000132446; CTA
WESGLVAM

SEQ ID NO: 25672 - protein, 9 aa, Homo sapiens
  Table A; Target 25672; HLA-A*23:01; FTHL17; ENSG00000132446; CTA
YFNRDDVAL

SEQ ID NO: 25673 - protein, 9 aa, Homo sapiens
  Table A; Target 25673; HLA-A*24:02; FTHL17; ENSG00000132446; CTA
YFNRDDVAL

SEQ ID NO: 25674 - protein, 9 aa, Homo sapiens
  Table A; Target 25674; HLA-B*35:03; FTHL17; ENSG00000132446; CTA
YFNRDDVAL

SEQ ID NO: 25675 - protein, 9 aa, Homo sapiens
  Table A; Target 25675; HLA-B*38:01; FTHL17; ENSG00000132446; CTA
YFNRDDVAL

SEQ ID NO: 25676 - protein, 9 aa, Homo sapiens
  Table A; Target 25676; HLA-B*55:01; FTHL17; ENSG00000132446; CTA
YFNRDDVAL

SEQ ID NO: 25677 - protein, 9 aa, Homo sapiens
  Table A; Target 25677; HLA-C*01:02; FTHL17; ENSG00000132446; CTA
YFNRDDVAL

SEQ ID NO: 25678 - protein, 9 aa, Homo sapiens
  Table A; Target 25678; HLA-C*03:03; FTHL17; ENSG00000132446; CTA
YFNRDDVAL

SEQ ID NO: 25679 - protein, 9 aa, Homo sapiens
  Table A; Target 25679; HLA-C*14:02; FTHL17; ENSG00000132446; CTA
YFNRDDVAL

SEQ ID NO: 25680 - protein, 8 aa, Homo sapiens
  Table A; Target 25680; HLA-A*02:01; FTHL17; ENSG00000132446; CTA
YLFDKLTL

SEQ ID NO: 25681 - protein, 8 aa, Homo sapiens
  Table A; Target 25681; HLA-A*02:03; FTHL17; ENSG00000132446; CTA
YLFDKLTL

SEQ ID NO: 25682 - protein, 8 aa, Homo sapiens
  Table A; Target 25682; HLA-A*02:04; FTHL17; ENSG00000132446; CTA
YLFDKLTL

SEQ ID NO: 25683 - protein, 8 aa, Homo sapiens
  Table A; Target 25683; HLA-A*02:07; FTHL17; ENSG00000132446; CTA
YLFDKLTL

SEQ ID NO: 25684 - protein, 8 aa, Homo sapiens
  Table A; Target 25684; HLA-A*23:01; FTHL17; ENSG00000132446; CTA
YLFDKLTL

SEQ ID NO: 25685 - protein, 8 aa, Homo sapiens
  Table A; Target 25685; HLA-B*08:01; FTHL17; ENSG00000132446; CTA
YLFDKLTL

SEQ ID NO: 25686 - protein, 8 aa, Homo sapiens
  Table A; Target 25686; HLA-B*13:02; FTHL17; ENSG00000132446; CTA
YLFDKLTL

SEQ ID NO: 25687 - protein, 8 aa, Homo sapiens
  Table A; Target 25687; HLA-B*40:02; FTHL17; ENSG00000132446; CTA
YLFDKLTL

SEQ ID NO: 25688 - protein, 8 aa, Homo sapiens
  Table A; Target 25688; HLA-C*03:03; FTHL17; ENSG00000132446; CTA
YLFDKLTL

SEQ ID NO: 25689 - protein, 8 aa, Homo sapiens
  Table A; Target 25689; HLA-C*03:04; FTHL17; ENSG00000132446; CTA
YLFDKLTL

SEQ ID NO: 25690 - protein, 9 aa, Homo sapiens
  Table A; Target 25690; HLA-A*02:01; FTHL17; ENSG00000132446; CTA
YLFDKLTLG

SEQ ID NO: 25691 - protein, 9 aa, Homo sapiens
  Table A; Target 25691; HLA-A*02:03; FTHL17; ENSG00000132446; CTA
YLFDKLTLG

SEQ ID NO: 25692 - protein, 9 aa, Homo sapiens
  Table A; Target 25692; HLA-A*02:04; FTHL17; ENSG00000132446; CTA
YLFDKLTLG

SEQ ID NO: 25693 - protein, 9 aa, Homo sapiens
  Table A; Target 25693; HLA-A*02:07; FTHL17; ENSG00000132446; CTA
YLFDKLTLG

SEQ ID NO: 25694 - protein, 10 aa, Homo sapiens
  Table A; Target 25694; HLA-A*02:01; FTHL17; ENSG00000132446; CTA
YLFDKLTLGG

SEQ ID NO: 25695 - protein, 10 aa, Homo sapiens
  Table A; Target 25695; HLA-A*02:03; FTHL17; ENSG00000132446; CTA
YLFDKLTLGG

SEQ ID NO: 25696 - protein, 10 aa, Homo sapiens
  Table A; Target 25696; HLA-A*02:04; FTHL17; ENSG00000132446; CTA
YLFDKLTLGG

SEQ ID NO: 25697 - protein, 10 aa, Homo sapiens
  Table A; Target 25697; HLA-A*02:07; FTHL17; ENSG00000132446; CTA
YLFDKLTLGG

SEQ ID NO: 25698 - protein, 11 aa, Homo sapiens
  Table A; Target 25698; HLA-A*02:03; FTHL17; ENSG00000132446; CTA
YLFDKLTLGGR

SEQ ID NO: 25699 - protein, 9 aa, Homo sapiens
  Table A; Target 25699; HLA-A*02:03; FTHL17; ENSG00000132446; CTA
YLHEQVKTI

SEQ ID NO: 25700 - protein, 9 aa, Homo sapiens
  Table A; Target 25700; HLA-A*02:04; FTHL17; ENSG00000132446; CTA
YLHEQVKTI

SEQ ID NO: 25701 - protein, 9 aa, Homo sapiens
  Table A; Target 25701; HLA-A*02:07; FTHL17; ENSG00000132446; CTA
YLHEQVKTI

SEQ ID NO: 25702 - protein, 9 aa, Homo sapiens
  Table A; Target 25702; HLA-A*23:01; FTHL17; ENSG00000132446; CTA
YLHEQVKTI

SEQ ID NO: 25703 - protein, 9 aa, Homo sapiens
  Table A; Target 25703; HLA-A*24:02; FTHL17; ENSG00000132446; CTA
YLHEQVKTI

SEQ ID NO: 25704 - protein, 9 aa, Homo sapiens
  Table A; Target 25704; HLA-A*25:01; FTHL17; ENSG00000132446; CTA
YLHEQVKTI

SEQ ID NO: 25705 - protein, 9 aa, Homo sapiens
  Table A; Target 25705; HLA-A*30:01; FTHL17; ENSG00000132446; CTA
YLHEQVKTI

SEQ ID NO: 25706 - protein, 9 aa, Homo sapiens
  Table A; Target 25706; HLA-A*32:01; FTHL17; ENSG00000132446; CTA
YLHEQVKTI

SEQ ID NO: 25707 - protein, 9 aa, Homo sapiens
  Table A; Target 25707; HLA-A*68:02; FTHL17; ENSG00000132446; CTA
YLHEQVKTI

SEQ ID NO: 25708 - protein, 9 aa, Homo sapiens
  Table A; Target 25708; HLA-B*08:01; FTHL17; ENSG00000132446; CTA
YLHEQVKTI

SEQ ID NO: 25709 - protein, 9 aa, Homo sapiens
  Table A; Target 25709; HLA-B*13:02; FTHL17; ENSG00000132446; CTA
YLHEQVKTI

SEQ ID NO: 25710 - protein, 9 aa, Homo sapiens
  Table A; Target 25710; HLA-B*40:02; FTHL17; ENSG00000132446; CTA
YLHEQVKTI

SEQ ID NO: 25711 - protein, 9 aa, Homo sapiens
  Table A; Target 25711; HLA-B*46:01; FTHL17; ENSG00000132446; CTA
YLHEQVKTI

SEQ ID NO: 25712 - protein, 9 aa, Homo sapiens
  Table A; Target 25712; HLA-B*49:01; FTHL17; ENSG00000132446; CTA
YLHEQVKTI

SEQ ID NO: 25713 - protein, 9 aa, Homo sapiens
  Table A; Target 25713; HLA-B*51:01; FTHL17; ENSG00000132446; CTA
YLHEQVKTI

SEQ ID NO: 25714 - protein, 9 aa, Homo sapiens
  Table A; Target 25714; HLA-B*55:01; FTHL17; ENSG00000132446; CTA
YLHEQVKTI

SEQ ID NO: 25715 - protein, 9 aa, Homo sapiens
  Table A; Target 25715; HLA-C*02:02; FTHL17; ENSG00000132446; CTA
YLHEQVKTI

SEQ ID NO: 25716 - protein, 9 aa, Homo sapiens
  Table A; Target 25716; HLA-C*03:03; FTHL17; ENSG00000132446; CTA
YLHEQVKTI

SEQ ID NO: 25717 - protein, 9 aa, Homo sapiens
  Table A; Target 25717; HLA-C*03:04; FTHL17; ENSG00000132446; CTA
YLHEQVKTI

SEQ ID NO: 25718 - protein, 9 aa, Homo sapiens
  Table A; Target 25718; HLA-C*06:02; FTHL17; ENSG00000132446; CTA
YLHEQVKTI

SEQ ID NO: 25719 - protein, 9 aa, Homo sapiens
  Table A; Target 25719; HLA-C*07:04; FTHL17; ENSG00000132446; CTA
YLHEQVKTI

SEQ ID NO: 25720 - protein, 9 aa, Homo sapiens
  Table A; Target 25720; HLA-C*12:03; FTHL17; ENSG00000132446; CTA
YLHEQVKTI

SEQ ID NO: 25721 - protein, 9 aa, Homo sapiens
  Table A; Target 25721; HLA-C*16:02; FTHL17; ENSG00000132446; CTA
YLHEQVKTI

SEQ ID NO: 25722 - protein, 10 aa, Homo sapiens
  Table A; Target 25722; HLA-A*03:01; FTHL17; ENSG00000132446; CTA
YLHEQVKTIK

SEQ ID NO: 25723 - protein, 8 aa, Homo sapiens
  Table A; Target 25723; HLA-B*37:01; FTHL17; ENSG00000132446; CTA
YLYLSMAF

SEQ ID NO: 25724 - protein, 9 aa, Homo sapiens
  Table A; Target 25724; HLA-A*01:01; FTHL17; ENSG00000132446; CTA
YLYLSMAFY

SEQ ID NO: 25725 - protein, 9 aa, Homo sapiens
  Table A; Target 25725; HLA-A*29:02; FTHL17; ENSG00000132446; CTA
YLYLSMAFY

SEQ ID NO: 25726 - protein, 9 aa, Homo sapiens
  Table A; Target 25726; HLA-A*01:01; FTHL17; ENSG00000132446; CTA
YTSYLYLSM

SEQ ID NO: 25727 - protein, 9 aa, Homo sapiens
  Table A; Target 25727; HLA-A*29:02; FTHL17; ENSG00000132446; CTA
YTSYLYLSM

SEQ ID NO: 25728 - protein, 9 aa, Homo sapiens
  Table A; Target 25728; HLA-A*02:01; GAGE1; ENSG00000205777; CTA
AQTGILWLL

SEQ ID NO: 25729 - protein, 9 aa, Homo sapiens
  Table A; Target 25729; HLA-A*02:03; GAGE1; ENSG00000205777; CTA
AQTGILWLL

SEQ ID NO: 25730 - protein, 9 aa, Homo sapiens
  Table A; Target 25730; HLA-A*02:04; GAGE1; ENSG00000205777; CTA
AQTGILWLL

SEQ ID NO: 25731 - protein, 9 aa, Homo sapiens
  Table A; Target 25731; HLA-B*13:02; GAGE1; ENSG00000205777; CTA
AQTGILWLL

SEQ ID NO: 25732 - protein, 9 aa, Homo sapiens
  Table A; Target 25732; HLA-A*26:01; GAGE1; ENSG00000205777; CTA
EVKTPEEEM

SEQ ID NO: 25733 - protein, 10 aa, Homo sapiens
  Table A; Target 25733; HLA-A*33:03; GAGE1; ENSG00000205777; CTA
EVKTPEEEMR

SEQ ID NO: 25734 - protein, 10 aa, Homo sapiens
  Table A; Target 25734; HLA-A*68:01; GAGE1; ENSG00000205777; CTA
EVKTPEEEMR

SEQ ID NO: 25735 - protein, 10 aa, Homo sapiens
  Table A; Target 25735; HLA-C*07:06; GAGE1; ENSG00000205777; CTA
EVKTPEEEMR

SEQ ID NO: 25736 - protein, 9 aa, Homo sapiens
  Table A; Target 25736; HLA-A*23:01; GAGE1; ENSG00000205777; CTA
HYVAQTGIL

SEQ ID NO: 25737 - protein, 9 aa, Homo sapiens
  Table A; Target 25737; HLA-A*24:02; GAGE1; ENSG00000205777; CTA
HYVAQTGIL

SEQ ID NO: 25738 - protein, 9 aa, Homo sapiens
  Table A; Target 25738; HLA-C*14:02; GAGE1; ENSG00000205777; CTA
HYVAQTGIL

SEQ ID NO: 25739 - protein, 10 aa, Homo sapiens
  Table A; Target 25739; HLA-A*23:01; GAGE1; ENSG00000205777; CTA
HYVAQTGILW

SEQ ID NO: 25740 - protein, 10 aa, Homo sapiens
  Table A; Target 25740; HLA-A*24:02; GAGE1; ENSG00000205777; CTA
HYVAQTGILW

SEQ ID NO: 25741 - protein, 10 aa, Homo sapiens
  Table A; Target 25741; HLA-B*57:01; GAGE1; ENSG00000205777; CTA
HYVAQTGILW

SEQ ID NO: 25742 - protein, 9 aa, Homo sapiens
  Table A; Target 25742; HLA-A*23:01; GAGE1; ENSG00000205777; CTA
RYVQPPEMI

SEQ ID NO: 25743 - protein, 9 aa, Homo sapiens
  Table A; Target 25743; HLA-A*24:02; GAGE1; ENSG00000205777; CTA
RYVQPPEMI

SEQ ID NO: 25744 - protein, 9 aa, Homo sapiens
  Table A; Target 25744; HLA-B*13:02; GAGE1; ENSG00000205777; CTA
SHYVAQTGI

SEQ ID NO: 25745 - protein, 9 aa, Homo sapiens
  Table A; Target 25745; HLA-B*38:01; GAGE1; ENSG00000205777; CTA
SHYVAQTGI

SEQ ID NO: 25746 - protein, 9 aa, Homo sapiens
  Table A; Target 25746; HLA-B*39:01; GAGE1; ENSG00000205777; CTA
SHYVAQTGI

SEQ ID NO: 25747 - protein, 8 aa, Homo sapiens
  Table A; Target 25747; HLA-B*57:01; GAGE1; ENSG00000205777; CTA
VAQTGILW

SEQ ID NO: 25748 - protein, 8 aa, Homo sapiens
  Table A; Target 25748; HLA-B*58:01; GAGE1; ENSG00000205777; CTA
VAQTGILW

SEQ ID NO: 25749 - protein, 8 aa, Homo sapiens
  Table A; Target 25749; HLA-C*03:03; GAGE1; ENSG00000205777; CTA
YVAQTGIL

SEQ ID NO: 25750 - protein, 8 aa, Homo sapiens
  Table A; Target 25750; HLA-C*03:04; GAGE1; ENSG00000205777; CTA
YVAQTGIL

SEQ ID NO: 25751 - protein, 9 aa, Homo sapiens
  Table A; Target 25751; HLA-A*01:01; GAGE1; ENSG00000205777; CTA
YVAQTGILW

SEQ ID NO: 25752 - protein, 9 aa, Homo sapiens
  Table A; Target 25752; HLA-A*25:01; GAGE1; ENSG00000205777; CTA
YVAQTGILW

SEQ ID NO: 25753 - protein, 9 aa, Homo sapiens
  Table A; Target 25753; HLA-A*26:01; GAGE1; ENSG00000205777; CTA
YVAQTGILW

SEQ ID NO: 25754 - protein, 9 aa, Homo sapiens
  Table A; Target 25754; HLA-A*29:02; GAGE1; ENSG00000205777; CTA
YVAQTGILW

SEQ ID NO: 25755 - protein, 9 aa, Homo sapiens
  Table A; Target 25755; HLA-A*33:01; GAGE1; ENSG00000205777; CTA
YVAQTGILW

SEQ ID NO: 25756 - protein, 9 aa, Homo sapiens
  Table A; Target 25756; HLA-B*57:01; GAGE1; ENSG00000205777; CTA
YVAQTGILW

SEQ ID NO: 25757 - protein, 9 aa, Homo sapiens
  Table A; Target 25757; HLA-B*58:01; GAGE1; ENSG00000205777; CTA
YVAQTGILW

SEQ ID NO: 25758 - protein, 11 aa, Homo sapiens
  Table A; Target 25758; HLA-A*68:02; GAGE1; ENSG00000205777; CTA
YVAQTGILWLL

SEQ ID NO: 25759 - protein, 11 aa, Homo sapiens
  Table A; Target 25759; HLA-A*26:01; GAGE1; ENSG00000205777; CTA
YVQPPEMIGPM

SEQ ID NO: 25760 - protein, 9 aa, Homo sapiens
  Table A; Target 25760; HLA-A*29:02; GAGE1; ENSG00000205777; CTA
YYWPRPRRY

SEQ ID NO: 25761 - protein, 9 aa, Homo sapiens
  Table A; Target 25761; HLA-A*33:01; GAGE1,GAGE12J; ENSG00000205777,ENSG00000224659; CTA,CTA
DSQEQGHPQ

SEQ ID NO: 25762 - protein, 9 aa, Homo sapiens
  Table A; Target 25762; HLA-A*31:01; GAGE1,GAGE12J; ENSG00000205777,ENSG00000224659; CTA,CTA
STYYWPRPR

SEQ ID NO: 25763 - protein, 10 aa, Homo sapiens
  Table A; Target 25763; HLA-B*40:01; GAGE1,GAGE12J,GAGE2A; ENSG00000205777,ENSG00000224659,ENSG00000189064; CTA,CTA,CTA
CEDGPDGQEM

SEQ ID NO: 25764 - protein, 8 aa, Homo sapiens
  Table A; Target 25764; HLA-B*18:01; GAGE1,GAGE12J,GAGE2A; ENSG00000205777,ENSG00000224659,ENSG00000189064; CTA,CTA,CTA
DEVEPATP

SEQ ID NO: 25765 - protein, 9 aa, Homo sapiens
  Table A; Target 25765; HLA-B*18:01; GAGE1,GAGE12J,GAGE2A; ENSG00000205777,ENSG00000224659,ENSG00000189064; CTA,CTA,CTA
DEVEPATPE

SEQ ID NO: 25766 - protein, 8 aa, Homo sapiens
  Table A; Target 25766; HLA-C*01:02; GAGE1,GAGE12J,GAGE2A; ENSG00000205777,ENSG00000224659,ENSG00000189064; CTA,CTA,CTA
DGPDGQEM

SEQ ID NO: 25767 - protein, 8 aa, Homo sapiens
  Table A; Target 25767; HLA-B*51:01; GAGE1,GAGE12J,GAGE2A; ENSG00000205777,ENSG00000224659,ENSG00000189064; CTA,CTA,CTA
DPPNPEEV

SEQ ID NO: 25768 - protein, 9 aa, Homo sapiens
  Table A; Target 25768; HLA-A*33:03; GAGE1,GAGE12J,GAGE2A; ENSG00000205777,ENSG00000224659,ENSG00000189064; CTA,CTA,CTA
EEGEPATQR

SEQ ID NO: 25769 - protein, 9 aa, Homo sapiens
  Table A; Target 25769; HLA-C*07:06; GAGE1,GAGE12J,GAGE2A; ENSG00000205777,ENSG00000224659,ENSG00000189064; CTA,CTA,CTA
EEGEPATQR

SEQ ID NO: 25770 - protein, 10 aa, Homo sapiens
  Table A; Target 25770; HLA-A*68:01; GAGE1,GAGE12J,GAGE2A; ENSG00000205777,ENSG00000224659,ENSG00000189064; CTA,CTA,CTA
EGASAGQGPK

SEQ ID NO: 25771 - protein, 10 aa, Homo sapiens
  Table A; Target 25771; HLA-A*01:01; GAGE1,GAGE12J,GAGE2A; ENSG00000205777,ENSG00000224659,ENSG00000189064; CTA,CTA,CTA
EMDPPNPEEV

SEQ ID NO: 25772 - protein, 11 aa, Homo sapiens
  Table A; Target 25772; HLA-A*01:01; GAGE1,GAGE12J,GAGE2A; ENSG00000205777,ENSG00000224659,ENSG00000189064; CTA,CTA,CTA
EMDPPNPEEVK

SEQ ID NO: 25773 - protein, 11 aa, Homo sapiens
  Table A; Target 25773; HLA-B*49:01; GAGE1,GAGE12J,GAGE2A; ENSG00000205777,ENSG00000224659,ENSG00000189064; CTA,CTA,CTA
QEMDPPNPEEV

SEQ ID NO: 25774 - protein, 8 aa, Homo sapiens
  Table A; Target 25774; HLA-C*16:02; GAGE1,GAGE12J,GAGE2A; ENSG00000205777,ENSG00000224659,ENSG00000189064; CTA,CTA,CTA
QEQGHPQT

SEQ ID NO: 25775 - protein, 9 aa, Homo sapiens
  Table A; Target 25775; HLA-B*35:03; GAGE1,GAGE12J,GAGE2A; ENSG00000205777,ENSG00000224659,ENSG00000189064; CTA,CTA,CTA
TPEEGEPAT

SEQ ID NO: 25776 - protein, 11 aa, Homo sapiens
  Table A; Target 25776; HLA-A*68:01; GAGE1,GAGE12J,GAGE2A; ENSG00000205777,ENSG00000224659,ENSG00000189064; CTA,CTA,CTA
TPEEGEPATQR

SEQ ID NO: 25777 - protein, 11 aa, Homo sapiens
  Table A; Target 25777; HLA-C*07:06; GAGE1,GAGE12J,GAGE2A; ENSG00000205777,ENSG00000224659,ENSG00000189064; CTA,CTA,CTA
TPEEGEPATQR

SEQ ID NO: 25778 - protein, 9 aa, Homo sapiens
  Table A; Target 25778; HLA-A*33:01; GAGE12J; ENSG00000224659; CTA
EVKTPEEGK

SEQ ID NO: 25779 - protein, 9 aa, Homo sapiens
  Table A; Target 25779; HLA-A*33:03; GAGE12J; ENSG00000224659; CTA
EVKTPEEGK

SEQ ID NO: 25780 - protein, 9 aa, Homo sapiens
  Table A; Target 25780; HLA-A*68:01; GAGE12J; ENSG00000224659; CTA
EVKTPEEGK

SEQ ID NO: 25781 - protein, 10 aa, Homo sapiens
  Table A; Target 25781; HLA-A*68:01; GAGE12J; ENSG00000224659; CTA
EVKTPEEGKK

SEQ ID NO: 25782 - protein, 9 aa, Homo sapiens
  Table A; Target 25782; HLA-A*24:02; GAGE12J; ENSG00000224659; CTA
PYVQPPEMI

SEQ ID NO: 25783 - protein, 8 aa, Homo sapiens
  Table A; Target 25783; HLA-B*57:01; GAGE12J; ENSG00000224659; CTA
RGRSTYYW

SEQ ID NO: 25784 - protein, 9 aa, Homo sapiens
  Table A; Target 25784; HLA-B*07:02; GAGE12J; ENSG00000224659; CTA
RPYVQPPEM

SEQ ID NO: 25785 - protein, 9 aa, Homo sapiens
  Table A; Target 25785; HLA-B*35:01; GAGE12J; ENSG00000224659; CTA
RPYVQPPEM

SEQ ID NO: 25786 - protein, 9 aa, Homo sapiens
  Table A; Target 25786; HLA-B*35:03; GAGE12J; ENSG00000224659; CTA
RPYVQPPEM

SEQ ID NO: 25787 - protein, 9 aa, Homo sapiens
  Table A; Target 25787; HLA-B*51:01; GAGE12J; ENSG00000224659; CTA
RPYVQPPEM

SEQ ID NO: 25788 - protein, 9 aa, Homo sapiens
  Table A; Target 25788; HLA-B*54:01; GAGE12J; ENSG00000224659; CTA
RPYVQPPEM

SEQ ID NO: 25789 - protein, 9 aa, Homo sapiens
  Table A; Target 25789; HLA-B*55:01; GAGE12J; ENSG00000224659; CTA
RPYVQPPEM

SEQ ID NO: 25790 - protein, 9 aa, Homo sapiens
  Table A; Target 25790; HLA-B*56:01; GAGE12J; ENSG00000224659; CTA
RPYVQPPEM

SEQ ID NO: 25791 - protein, 9 aa, Homo sapiens
  Table A; Target 25791; HLA-C*07:02; GAGE12J; ENSG00000224659; CTA
RPYVQPPEM

SEQ ID NO: 25792 - protein, 9 aa, Homo sapiens
  Table A; Target 25792; HLA-C*14:02; GAGE12J; ENSG00000224659; CTA
RPYVQPPEM

SEQ ID NO: 25793 - protein, 9 aa, Homo sapiens
  Table A; Target 25793; HLA-A*29:02; GAGE12J; ENSG00000224659; CTA
YYWPRPRPY

SEQ ID NO: 25794 - protein, 10 aa, Homo sapiens
  Table A; Target 25794; HLA-C*05:01; GAGE12J,GAGE2A; ENSG00000224659,ENSG00000189064; CTA,CTA
CEDGPDGQEM

SEQ ID NO: 25795 - protein, 8 aa, Homo sapiens
  Table A; Target 25795; HLA-B*51:01; GAGE12J,GAGE2A; ENSG00000224659,ENSG00000189064; CTA,CTA
DGPDGQEM

SEQ ID NO: 25796 - protein, 9 aa, Homo sapiens
  Table A; Target 25796; HLA-A*68:01; GAGE12J,GAGE2A; ENSG00000224659,ENSG00000189064; CTA,CTA
EEGEPATQR

SEQ ID NO: 25797 - protein, 10 aa, Homo sapiens
  Table A; Target 25797; HLA-A*30:01; GAGE2A; ENSG00000189064; CTA
CEDGPDGQEM

SEQ ID NO: 25798 - protein, 10 aa, Homo sapiens
  Table A; Target 25798; HLA-C*07:06; GAGE2A; ENSG00000189064; CTA
EGASAGQGPK

SEQ ID NO: 25799 - protein, 9 aa, Homo sapiens
  Table A; Target 25799; HLA-A*26:01; GAGE2A; ENSG00000189064; CTA
EPPEMIGPM

SEQ ID NO: 25800 - protein, 10 aa, Homo sapiens
  Table A; Target 25800; HLA-A*68:01; GAGE2A; ENSG00000189064; CTA
EPPEMIGPMR

SEQ ID NO: 25801 - protein, 10 aa, Homo sapiens
  Table A; Target 25801; HLA-A*33:03; GAGE2A; ENSG00000189064; CTA
EVKTPEEGEK

SEQ ID NO: 25802 - protein, 10 aa, Homo sapiens
  Table A; Target 25802; HLA-A*68:01; GAGE2A; ENSG00000189064; CTA
EVKTPEEGEK

SEQ ID NO: 25803 - protein, 10 aa, Homo sapiens
  Table A; Target 25803; HLA-C*07:06; GAGE2A; ENSG00000189064; CTA
EVKTPEEGEK

SEQ ID NO: 25804 - protein, 9 aa, Homo sapiens
  Table A; Target 25804; HLA-B*15:01; GAGE2A; ENSG00000189064; CTA
GQGPKPEAH

SEQ ID NO: 25805 - protein, 9 aa, Homo sapiens
  Table A; Target 25805; HLA-A*02:07; GAGE2A; ENSG00000189064; CTA
MDPPNPEEV

SEQ ID NO: 25806 - protein, 9 aa, Homo sapiens
  Table A; Target 25806; HLA-C*16:04; GAGE2A; ENSG00000189064; CTA
RRYVEPPEM

SEQ ID NO: 25807 - protein, 8 aa, Homo sapiens
  Table A; Target 25807; HLA-C*14:02; GAGE2A; ENSG00000189064; CTA
RYVEPPEM

SEQ ID NO: 25808 - protein, 9 aa, Homo sapiens
  Table A; Target 25808; HLA-A*23:01; GAGE2A; ENSG00000189064; CTA
RYVEPPEMI

SEQ ID NO: 25809 - protein, 9 aa, Homo sapiens
  Table A; Target 25809; HLA-A*24:02; GAGE2A; ENSG00000189064; CTA
RYVEPPEMI

SEQ ID NO: 25810 - protein, 10 aa, Homo sapiens
  Table A; Target 25810; HLA-B*54:01; GAGE2A; ENSG00000189064; CTA
SAGQGPKPEA

SEQ ID NO: 25811 - protein, 9 aa, Homo sapiens
  Table A; Target 25811; HLA-B*55:01; GAGE2A; ENSG00000189064; CTA
TPEEGEPAT

SEQ ID NO: 25812 - protein, 9 aa, Homo sapiens
  Table A; Target 25812; HLA-C*03:03; GAGE2A; ENSG00000189064; CTA
TPEEGEPAT

SEQ ID NO: 25813 - protein, 10 aa, Homo sapiens
  Table A; Target 25813; HLA-B*40:01; GAGE2A; ENSG00000189064; CTA
VEPPEMIGPM

SEQ ID NO: 25814 - protein, 10 aa, Homo sapiens
  Table A; Target 25814; HLA-B*40:02; GAGE2A; ENSG00000189064; CTA
VEPPEMIGPM

SEQ ID NO: 25815 - protein, 10 aa, Homo sapiens
  Table A; Target 25815; HLA-C*04:01; GAGE2A; ENSG00000189064; CTA
VEPPEMIGPM

SEQ ID NO: 25816 - protein, 8 aa, Homo sapiens
  Table A; Target 25816; HLA-C*05:01; GAGE2A; ENSG00000189064; CTA
YVEPPEMI

SEQ ID NO: 25817 - protein, 8 aa, Homo sapiens
  Table A; Target 25817; HLA-A*31:01; GAGE2A,XAGE3; ENSG00000189064,ENSG00000171402; CTA,CTA
STYRPRPR

SEQ ID NO: 25818 - protein, 8 aa, Homo sapiens
  Table A; Target 25818; HLA-B*44:02; GLYATL3; ENSG00000203972; CTA
ADLLNRTW

SEQ ID NO: 25819 - protein, 8 aa, Homo sapiens
  Table A; Target 25819; HLA-B*44:03; GLYATL3; ENSG00000203972; CTA
ADLLNRTW

SEQ ID NO: 25820 - protein, 8 aa, Homo sapiens
  Table A; Target 25820; HLA-B*18:01; GLYATL3; ENSG00000203972; CTA
AEFLPCRF

SEQ ID NO: 25821 - protein, 8 aa, Homo sapiens
  Table A; Target 25821; HLA-B*37:01; GLYATL3; ENSG00000203972; CTA
AEFLPCRF

SEQ ID NO: 25822 - protein, 8 aa, Homo sapiens
  Table A; Target 25822; HLA-B*44:02; GLYATL3; ENSG00000203972; CTA
AEFLPCRF

SEQ ID NO: 25823 - protein, 8 aa, Homo sapiens
  Table A; Target 25823; HLA-B*44:03; GLYATL3; ENSG00000203972; CTA
AEFLPCRF

SEQ ID NO: 25824 - protein, 9 aa, Homo sapiens
  Table A; Target 25824; HLA-A*30:02; GLYATL3; ENSG00000203972; CTA
AETDNLDHY

SEQ ID NO: 25825 - protein, 9 aa, Homo sapiens
  Table A; Target 25825; HLA-B*18:01; GLYATL3; ENSG00000203972; CTA
AETDNLDHY

SEQ ID NO: 25826 - protein, 9 aa, Homo sapiens
  Table A; Target 25826; HLA-B*27:02; GLYATL3; ENSG00000203972; CTA
AETDNLDHY

SEQ ID NO: 25827 - protein, 9 aa, Homo sapiens
  Table A; Target 25827; HLA-B*40:01; GLYATL3; ENSG00000203972; CTA
AETDNLDHY

SEQ ID NO: 25828 - protein, 9 aa, Homo sapiens
  Table A; Target 25828; HLA-B*44:02; GLYATL3; ENSG00000203972; CTA
AETDNLDHY

SEQ ID NO: 25829 - protein, 9 aa, Homo sapiens
  Table A; Target 25829; HLA-B*44:03; GLYATL3; ENSG00000203972; CTA
AETDNLDHY

SEQ ID NO: 25830 - protein, 9 aa, Homo sapiens
  Table A; Target 25830; HLA-B*49:01; GLYATL3; ENSG00000203972; CTA
AETDNLDHY

SEQ ID NO: 25831 - protein, 9 aa, Homo sapiens
  Table A; Target 25831; HLA-C*16:02; GLYATL3; ENSG00000203972; CTA
AETDNLDHY

SEQ ID NO: 25832 - protein, 9 aa, Homo sapiens
  Table A; Target 25832; HLA-C*16:04; GLYATL3; ENSG00000203972; CTA
AETDNLDHY

SEQ ID NO: 25833 - protein, 8 aa, Homo sapiens
  Table A; Target 25833; HLA-C*16:01; GLYATL3; ENSG00000203972; CTA
ALTLARKL

SEQ ID NO: 25834 - protein, 10 aa, Homo sapiens
  Table A; Target 25834; HLA-A*25:01; GLYATL3; ENSG00000203972; CTA
ANADLLNRTW

SEQ ID NO: 25835 - protein, 10 aa, Homo sapiens
  Table A; Target 25835; HLA-A*32:01; GLYATL3; ENSG00000203972; CTA
ANADLLNRTW

SEQ ID NO: 25836 - protein, 10 aa, Homo sapiens
  Table A; Target 25836; HLA-B*44:02; GLYATL3; ENSG00000203972; CTA
ANADLLNRTW

SEQ ID NO: 25837 - protein, 10 aa, Homo sapiens
  Table A; Target 25837; HLA-B*44:03; GLYATL3; ENSG00000203972; CTA
ANADLLNRTW

SEQ ID NO: 25838 - protein, 10 aa, Homo sapiens
  Table A; Target 25838; HLA-B*57:01; GLYATL3; ENSG00000203972; CTA
ANADLLNRTW

SEQ ID NO: 25839 - protein, 10 aa, Homo sapiens
  Table A; Target 25839; HLA-B*58:01; GLYATL3; ENSG00000203972; CTA
ANADLLNRTW

SEQ ID NO: 25840 - protein, 10 aa, Homo sapiens
  Table A; Target 25840; HLA-C*12:03; GLYATL3; ENSG00000203972; CTA
ANADLLNRTW

SEQ ID NO: 25841 - protein, 10 aa, Homo sapiens
  Table A; Target 25841; HLA-C*16:04; GLYATL3; ENSG00000203972; CTA
ANADLLNRTW

SEQ ID NO: 25842 - protein, 9 aa, Homo sapiens
  Table A; Target 25842; HLA-B*46:01; GLYATL3; ENSG00000203972; CTA
ASISLLKSL

SEQ ID NO: 25843 - protein, 9 aa, Homo sapiens
  Table A; Target 25843; HLA-B*58:01; GLYATL3; ENSG00000203972; CTA
ASISLLKSL

SEQ ID NO: 25844 - protein, 9 aa, Homo sapiens
  Table A; Target 25844; HLA-C*03:04; GLYATL3; ENSG00000203972; CTA
ASISLLKSL

SEQ ID NO: 25845 - protein, 9 aa, Homo sapiens
  Table A; Target 25845; HLA-C*16:02; GLYATL3; ENSG00000203972; CTA
ASISLLKSL

SEQ ID NO: 25846 - protein, 9 aa, Homo sapiens
  Table A; Target 25846; HLA-A*02:01; GLYATL3; ENSG00000203972; CTA
ATFSGLPHL

SEQ ID NO: 25847 - protein, 9 aa, Homo sapiens
  Table A; Target 25847; HLA-A*02:03; GLYATL3; ENSG00000203972; CTA
ATFSGLPHL

SEQ ID NO: 25848 - protein, 9 aa, Homo sapiens
  Table A; Target 25848; HLA-A*02:04; GLYATL3; ENSG00000203972; CTA
ATFSGLPHL

SEQ ID NO: 25849 - protein, 9 aa, Homo sapiens
  Table A; Target 25849; HLA-A*02:07; GLYATL3; ENSG00000203972; CTA
ATFSGLPHL

SEQ ID NO: 25850 - protein, 9 aa, Homo sapiens
  Table A; Target 25850; HLA-A*03:01; GLYATL3; ENSG00000203972; CTA
ATFSGLPHL

SEQ ID NO: 25851 - protein, 9 aa, Homo sapiens
  Table A; Target 25851; HLA-A*03:02; GLYATL3; ENSG00000203972; CTA
ATFSGLPHL

SEQ ID NO: 25852 - protein, 9 aa, Homo sapiens
  Table A; Target 25852; HLA-A*11:01; GLYATL3; ENSG00000203972; CTA
ATFSGLPHL

SEQ ID NO: 25853 - protein, 9 aa, Homo sapiens
  Table A; Target 25853; HLA-A*23:01; GLYATL3; ENSG00000203972; CTA
ATFSGLPHL

SEQ ID NO: 25854 - protein, 9 aa, Homo sapiens
  Table A; Target 25854; HLA-A*24:02; GLYATL3; ENSG00000203972; CTA
ATFSGLPHL

SEQ ID NO: 25855 - protein, 9 aa, Homo sapiens
  Table A; Target 25855; HLA-A*25:01; GLYATL3; ENSG00000203972; CTA
ATFSGLPHL

SEQ ID NO: 25856 - protein, 9 aa, Homo sapiens
  Table A; Target 25856; HLA-A*26:01; GLYATL3; ENSG00000203972; CTA
ATFSGLPHL

SEQ ID NO: 25857 - protein, 9 aa, Homo sapiens
  Table A; Target 25857; HLA-A*31:01; GLYATL3; ENSG00000203972; CTA
ATFSGLPHL

SEQ ID NO: 25858 - protein, 9 aa, Homo sapiens
  Table A; Target 25858; HLA-A*32:01; GLYATL3; ENSG00000203972; CTA
ATFSGLPHL

SEQ ID NO: 25859 - protein, 9 aa, Homo sapiens
  Table A; Target 25859; HLA-A*68:02; GLYATL3; ENSG00000203972; CTA
ATFSGLPHL

SEQ ID NO: 25860 - protein, 9 aa, Homo sapiens
  Table A; Target 25860; HLA-B*13:02; GLYATL3; ENSG00000203972; CTA
ATFSGLPHL

SEQ ID NO: 25861 - protein, 9 aa, Homo sapiens
  Table A; Target 25861; HLA-B*40:02; GLYATL3; ENSG00000203972; CTA
ATFSGLPHL

SEQ ID NO: 25862 - protein, 9 aa, Homo sapiens
  Table A; Target 25862; HLA-B*46:01; GLYATL3; ENSG00000203972; CTA
ATFSGLPHL

SEQ ID NO: 25863 - protein, 9 aa, Homo sapiens
  Table A; Target 25863; HLA-B*57:01; GLYATL3; ENSG00000203972; CTA
ATFSGLPHL

SEQ ID NO: 25864 - protein, 9 aa, Homo sapiens
  Table A; Target 25864; HLA-B*58:01; GLYATL3; ENSG00000203972; CTA
ATFSGLPHL

SEQ ID NO: 25865 - protein, 9 aa, Homo sapiens
  Table A; Target 25865; HLA-C*01:02; GLYATL3; ENSG00000203972; CTA
ATFSGLPHL

SEQ ID NO: 25866 - protein, 9 aa, Homo sapiens
  Table A; Target 25866; HLA-C*02:02; GLYATL3; ENSG00000203972; CTA
ATFSGLPHL

SEQ ID NO: 25867 - protein, 9 aa, Homo sapiens
  Table A; Target 25867; HLA-C*03:03; GLYATL3; ENSG00000203972; CTA
ATFSGLPHL

SEQ ID NO: 25868 - protein, 9 aa, Homo sapiens
  Table A; Target 25868; HLA-C*03:04; GLYATL3; ENSG00000203972; CTA
ATFSGLPHL

SEQ ID NO: 25869 - protein, 9 aa, Homo sapiens
  Table A; Target 25869; HLA-C*07:04; GLYATL3; ENSG00000203972; CTA
ATFSGLPHL

SEQ ID NO: 25870 - protein, 9 aa, Homo sapiens
  Table A; Target 25870; HLA-C*12:03; GLYATL3; ENSG00000203972; CTA
ATFSGLPHL

SEQ ID NO: 25871 - protein, 9 aa, Homo sapiens
  Table A; Target 25871; HLA-C*16:02; GLYATL3; ENSG00000203972; CTA
ATFSGLPHL

SEQ ID NO: 25872 - protein, 9 aa, Homo sapiens
  Table A; Target 25872; HLA-C*16:04; GLYATL3; ENSG00000203972; CTA
ATFSGLPHL

SEQ ID NO: 25873 - protein, 11 aa, Homo sapiens
  Table A; Target 25873; HLA-A*03:01; GLYATL3; ENSG00000203972; CTA
AVANSKQLNIK

SEQ ID NO: 25874 - protein, 11 aa, Homo sapiens
  Table A; Target 25874; HLA-A*03:02; GLYATL3; ENSG00000203972; CTA
AVANSKQLNIK

SEQ ID NO: 25875 - protein, 11 aa, Homo sapiens
  Table A; Target 25875; HLA-A*11:01; GLYATL3; ENSG00000203972; CTA
AVANSKQLNIK

SEQ ID NO: 25876 - protein, 10 aa, Homo sapiens
  Table A; Target 25876; HLA-A*03:01; GLYATL3; ENSG00000203972; CTA
AVFYKDVRAY

SEQ ID NO: 25877 - protein, 10 aa, Homo sapiens
  Table A; Target 25877; HLA-A*25:01; GLYATL3; ENSG00000203972; CTA
AVFYKDVRAY

SEQ ID NO: 25878 - protein, 10 aa, Homo sapiens
  Table A; Target 25878; HLA-A*30:02; GLYATL3; ENSG00000203972; CTA
AVFYKDVRAY

SEQ ID NO: 25879 - protein, 11 aa, Homo sapiens
  Table A; Target 25879; HLA-A*31:01; GLYATL3; ENSG00000203972; CTA
AVFYKDVRAYR

SEQ ID NO: 25880 - protein, 9 aa, Homo sapiens
  Table A; Target 25880; HLA-A*29:02; GLYATL3; ENSG00000203972; CTA
CFPESLKVY

SEQ ID NO: 25881 - protein, 9 aa, Homo sapiens
  Table A; Target 25881; HLA-B*18:01; GLYATL3; ENSG00000203972; CTA
DDNTASISL

SEQ ID NO: 25882 - protein, 11 aa, Homo sapiens
  Table A; Target 25882; HLA-B*27:02; GLYATL3; ENSG00000203972; CTA
DDNTASISLLK

SEQ ID NO: 25883 - protein, 9 aa, Homo sapiens
  Table A; Target 25883; HLA-A*25:01; GLYATL3; ENSG00000203972; CTA
DEKGNPVSW

SEQ ID NO: 25884 - protein, 9 aa, Homo sapiens
  Table A; Target 25884; HLA-B*18:01; GLYATL3; ENSG00000203972; CTA
DEKGNPVSW

SEQ ID NO: 25885 - protein, 9 aa, Homo sapiens
  Table A; Target 25885; HLA-B*27:02; GLYATL3; ENSG00000203972; CTA
DEKGNPVSW

SEQ ID NO: 25886 - protein, 9 aa, Homo sapiens
  Table A; Target 25886; HLA-B*40:02; GLYATL3; ENSG00000203972; CTA
DEKGNPVSW

SEQ ID NO: 25887 - protein, 9 aa, Homo sapiens
  Table A; Target 25887; HLA-B*44:02; GLYATL3; ENSG00000203972; CTA
DEKGNPVSW

SEQ ID NO: 25888 - protein, 9 aa, Homo sapiens
  Table A; Target 25888; HLA-B*44:03; GLYATL3; ENSG00000203972; CTA
DEKGNPVSW

SEQ ID NO: 25889 - protein, 9 aa, Homo sapiens
  Table A; Target 25889; HLA-C*16:04; GLYATL3; ENSG00000203972; CTA
DEKGNPVSW

SEQ ID NO: 25890 - protein, 8 aa, Homo sapiens
  Table A; Target 25890; HLA-A*33:01; GLYATL3; ENSG00000203972; CTA
DFKAVITR

SEQ ID NO: 25891 - protein, 8 aa, Homo sapiens
  Table A; Target 25891; HLA-A*33:03; GLYATL3; ENSG00000203972; CTA
DFKAVITR

SEQ ID NO: 25892 - protein, 9 aa, Homo sapiens
  Table A; Target 25892; HLA-A*33:01; GLYATL3; ENSG00000203972; CTA
DFKAVITRR

SEQ ID NO: 25893 - protein, 9 aa, Homo sapiens
  Table A; Target 25893; HLA-A*33:03; GLYATL3; ENSG00000203972; CTA
DFKAVITRR

SEQ ID NO: 25894 - protein, 9 aa, Homo sapiens
  Table A; Target 25894; HLA-B*38:01; GLYATL3; ENSG00000203972; CTA
DHYTNAYAV

SEQ ID NO: 25895 - protein, 9 aa, Homo sapiens
  Table A; Target 25895; HLA-B*39:01; GLYATL3; ENSG00000203972; CTA
DHYTNAYAV

SEQ ID NO: 25896 - protein, 10 aa, Homo sapiens
  Table A; Target 25896; HLA-B*38:01; GLYATL3; ENSG00000203972; CTA
DHYTNAYAVF

SEQ ID NO: 25897 - protein, 9 aa, Homo sapiens
  Table A; Target 25897; HLA-A*33:01; GLYATL3; ENSG00000203972; CTA
DLLNRTWSR

SEQ ID NO: 25898 - protein, 9 aa, Homo sapiens
  Table A; Target 25898; HLA-A*33:03; GLYATL3; ENSG00000203972; CTA
DLLNRTWSR

SEQ ID NO: 25899 - protein, 9 aa, Homo sapiens
  Table A; Target 25899; HLA-A*33:01; GLYATL3; ENSG00000203972; CTA
DNLDHYTNA

SEQ ID NO: 25900 - protein, 10 aa, Homo sapiens
  Table A; Target 25900; HLA-A*25:01; GLYATL3; ENSG00000203972; CTA
DNLDHYTNAY

SEQ ID NO: 25901 - protein, 10 aa, Homo sapiens
  Table A; Target 25901; HLA-B*18:01; GLYATL3; ENSG00000203972; CTA
DNLDHYTNAY

SEQ ID NO: 25902 - protein, 10 aa, Homo sapiens
  Table A; Target 25902; HLA-B*27:02; GLYATL3; ENSG00000203972; CTA
DNTASISLLK

SEQ ID NO: 25903 - protein, 10 aa, Homo sapiens
  Table A; Target 25903; HLA-A*26:01; GLYATL3; ENSG00000203972; CTA
DQFATMCHGY

SEQ ID NO: 25904 - protein, 9 aa, Homo sapiens
  Table A; Target 25904; HLA-A*25:01; GLYATL3; ENSG00000203972; CTA
DQVFQIQGL

SEQ ID NO: 25905 - protein, 9 aa, Homo sapiens
  Table A; Target 25905; HLA-B*38:01; GLYATL3; ENSG00000203972; CTA
DQVFQIQGL

SEQ ID NO: 25906 - protein, 9 aa, Homo sapiens
  Table A; Target 25906; HLA-B*39:01; GLYATL3; ENSG00000203972; CTA
DQVFQIQGL

SEQ ID NO: 25907 - protein, 9 aa, Homo sapiens
  Table A; Target 25907; HLA-A*25:01; GLYATL3; ENSG00000203972; CTA
DVFNWDQVF

SEQ ID NO: 25908 - protein, 9 aa, Homo sapiens
  Table A; Target 25908; HLA-A*26:01; GLYATL3; ENSG00000203972; CTA
DVFNWDQVF

SEQ ID NO: 25909 - protein, 11 aa, Homo sapiens
  Table A; Target 25909; HLA-A*68:02; GLYATL3; ENSG00000203972; CTA
DVFNWDQVFQI

SEQ ID NO: 25910 - protein, 10 aa, Homo sapiens
  Table A; Target 25910; HLA-A*68:01; GLYATL3; ENSG00000203972; CTA
DVSKAVANSK

SEQ ID NO: 25911 - protein, 10 aa, Homo sapiens
  Table A; Target 25911; HLA-A*01:01; GLYATL3; ENSG00000203972; CTA
EAETDNLDHY

SEQ ID NO: 25912 - protein, 10 aa, Homo sapiens
  Table A; Target 25912; HLA-C*07:01; GLYATL3; ENSG00000203972; CTA
EAETDNLDHY

SEQ ID NO: 25913 - protein, 9 aa, Homo sapiens
  Table A; Target 25913; HLA-A*02:01; GLYATL3; ENSG00000203972; CTA
ELYDVSKAV

SEQ ID NO: 25914 - protein, 9 aa, Homo sapiens
  Table A; Target 25914; HLA-A*02:03; GLYATL3; ENSG00000203972; CTA
ELYDVSKAV

SEQ ID NO: 25915 - protein, 9 aa, Homo sapiens
  Table A; Target 25915; HLA-A*02:07; GLYATL3; ENSG00000203972; CTA
ELYDVSKAV

SEQ ID NO: 25916 - protein, 9 aa, Homo sapiens
  Table A; Target 25916; HLA-A*25:01; GLYATL3; ENSG00000203972; CTA
ELYDVSKAV

SEQ ID NO: 25917 - protein, 9 aa, Homo sapiens
  Table A; Target 25917; HLA-A*26:01; GLYATL3; ENSG00000203972; CTA
ELYDVSKAV

SEQ ID NO: 25918 - protein, 9 aa, Homo sapiens
  Table A; Target 25918; HLA-A*68:02; GLYATL3; ENSG00000203972; CTA
ELYDVSKAV

SEQ ID NO: 25919 - protein, 9 aa, Homo sapiens
  Table A; Target 25919; HLA-B*08:01; GLYATL3; ENSG00000203972; CTA
ELYDVSKAV

SEQ ID NO: 25920 - protein, 9 aa, Homo sapiens
  Table A; Target 25920; HLA-B*13:02; GLYATL3; ENSG00000203972; CTA
ELYDVSKAV

SEQ ID NO: 25921 - protein, 9 aa, Homo sapiens
  Table A; Target 25921; HLA-B*51:01; GLYATL3; ENSG00000203972; CTA
ELYDVSKAV

SEQ ID NO: 25922 - protein, 9 aa, Homo sapiens
  Table A; Target 25922; HLA-B*55:01; GLYATL3; ENSG00000203972; CTA
ELYDVSKAV

SEQ ID NO: 25923 - protein, 9 aa, Homo sapiens
  Table A; Target 25923; HLA-C*06:02; GLYATL3; ENSG00000203972; CTA
ELYDVSKAV

SEQ ID NO: 25924 - protein, 9 aa, Homo sapiens
  Table A; Target 25924; HLA-C*16:04; GLYATL3; ENSG00000203972; CTA
ELYDVSKAV

SEQ ID NO: 25925 - protein, 10 aa, Homo sapiens
  Table A; Target 25925; HLA-A*26:01; GLYATL3; ENSG00000203972; CTA
ELYDVSKAVA

SEQ ID NO: 25926 - protein, 11 aa, Homo sapiens
  Table A; Target 25926; HLA-A*33:01; GLYATL3; ENSG00000203972; CTA
ELYDVSKAVAN

SEQ ID NO: 25927 - protein, 11 aa, Homo sapiens
  Table A; Target 25927; HLA-C*06:02; GLYATL3; ENSG00000203972; CTA
ELYDVSKAVAN

SEQ ID NO: 25928 - protein, 8 aa, Homo sapiens
  Table A; Target 25928; HLA-A*01:01; GLYATL3; ENSG00000203972; CTA
ETDNLDHY

SEQ ID NO: 25929 - protein, 9 aa, Homo sapiens
  Table A; Target 25929; HLA-A*02:03; GLYATL3; ENSG00000203972; CTA
FLKGPSPRL

SEQ ID NO: 25930 - protein, 10 aa, Homo sapiens
  Table A; Target 25930; HLA-A*02:03; GLYATL3; ENSG00000203972; CTA
FLKGPSPRLT

SEQ ID NO: 25931 - protein, 11 aa, Homo sapiens
  Table A; Target 25931; HLA-A*29:02; GLYATL3; ENSG00000203972; CTA
FLKGPSPRLTY

SEQ ID NO: 25932 - protein, 8 aa, Homo sapiens
  Table A; Target 25932; HLA-B*35:01; GLYATL3; ENSG00000203972; CTA
FPESLKVY

SEQ ID NO: 25933 - protein, 8 aa, Homo sapiens
  Table A; Target 25933; HLA-B*55:01; GLYATL3; ENSG00000203972; CTA
FPESLKVY

SEQ ID NO: 25934 - protein, 10 aa, Homo sapiens
  Table A; Target 25934; HLA-B*54:01; GLYATL3; ENSG00000203972; CTA
FPESLKVYGA

SEQ ID NO: 25935 - protein, 8 aa, Homo sapiens
  Table A; Target 25935; HLA-B*07:02; GLYATL3; ENSG00000203972; CTA
FPSQGNVL

SEQ ID NO: 25936 - protein, 8 aa, Homo sapiens
  Table A; Target 25936; HLA-B*08:01; GLYATL3; ENSG00000203972; CTA
FPSQGNVL

SEQ ID NO: 25937 - protein, 8 aa, Homo sapiens
  Table A; Target 25937; HLA-B*35:01; GLYATL3; ENSG00000203972; CTA
FPSQGNVL

SEQ ID NO: 25938 - protein, 8 aa, Homo sapiens
  Table A; Target 25938; HLA-B*35:03; GLYATL3; ENSG00000203972; CTA
FPSQGNVL

SEQ ID NO: 25939 - protein, 8 aa, Homo sapiens
  Table A; Target 25939; HLA-B*39:01; GLYATL3; ENSG00000203972; CTA
FPSQGNVL

SEQ ID NO: 25940 - protein, 8 aa, Homo sapiens
  Table A; Target 25940; HLA-B*55:01; GLYATL3; ENSG00000203972; CTA
FPSQGNVL

SEQ ID NO: 25941 - protein, 8 aa, Homo sapiens
  Table A; Target 25941; HLA-B*56:01; GLYATL3; ENSG00000203972; CTA
FPSQGNVL

SEQ ID NO: 25942 - protein, 8 aa, Homo sapiens
  Table A; Target 25942; HLA-C*03:03; GLYATL3; ENSG00000203972; CTA
FPSQGNVL

SEQ ID NO: 25943 - protein, 8 aa, Homo sapiens
  Table A; Target 25943; HLA-C*03:04; GLYATL3; ENSG00000203972; CTA
FPSQGNVL

SEQ ID NO: 25944 - protein, 8 aa, Homo sapiens
  Table A; Target 25944; HLA-C*05:01; GLYATL3; ENSG00000203972; CTA
FPSQGNVL

SEQ ID NO: 25945 - protein, 8 aa, Homo sapiens
  Table A; Target 25945; HLA-C*07:02; GLYATL3; ENSG00000203972; CTA
FPSQGNVL

SEQ ID NO: 25946 - protein, 8 aa, Homo sapiens
  Table A; Target 25946; HLA-C*14:02; GLYATL3; ENSG00000203972; CTA
FPSQGNVL

SEQ ID NO: 25947 - protein, 8 aa, Homo sapiens
  Table A; Target 25947; HLA-C*16:01; GLYATL3; ENSG00000203972; CTA
FPSQGNVL

SEQ ID NO: 25948 - protein, 10 aa, Homo sapiens
  Table A; Target 25948; HLA-B*15:01; GLYATL3; ENSG00000203972; CTA
FQIQGLQSEL

SEQ ID NO: 25949 - protein, 10 aa, Homo sapiens
  Table A; Target 25949; HLA-B*27:05; GLYATL3; ENSG00000203972; CTA
FQIQGLQSEL

SEQ ID NO: 25950 - protein, 10 aa, Homo sapiens
  Table A; Target 25950; HLA-B*39:01; GLYATL3; ENSG00000203972; CTA
FQIQGLQSEL

SEQ ID NO: 25951 - protein, 10 aa, Homo sapiens
  Table A; Target 25951; HLA-B*46:01; GLYATL3; ENSG00000203972; CTA
FQIQGLQSEL

SEQ ID NO: 25952 - protein, 10 aa, Homo sapiens
  Table A; Target 25952; HLA-C*02:02; GLYATL3; ENSG00000203972; CTA
FQIQGLQSEL

SEQ ID NO: 25953 - protein, 10 aa, Homo sapiens
  Table A; Target 25953; HLA-C*14:02; GLYATL3; ENSG00000203972; CTA
FQIQGLQSEL

SEQ ID NO: 25954 - protein, 11 aa, Homo sapiens
  Table A; Target 25954; HLA-A*30:02; GLYATL3; ENSG00000203972; CTA
FQIQGLQSELY

SEQ ID NO: 25955 - protein, 11 aa, Homo sapiens
  Table A; Target 25955; HLA-B*15:01; GLYATL3; ENSG00000203972; CTA
FQIQGLQSELY

SEQ ID NO: 25956 - protein, 11 aa, Homo sapiens
  Table A; Target 25956; HLA-B*15:03; GLYATL3; ENSG00000203972; CTA
FQIQGLQSELY

SEQ ID NO: 25957 - protein, 9 aa, Homo sapiens
  Table A; Target 25957; HLA-A*31:01; GLYATL3; ENSG00000203972; CTA
FYKDVRAYR

SEQ ID NO: 25958 - protein, 9 aa, Homo sapiens
  Table A; Target 25958; HLA-C*01:02; GLYATL3; ENSG00000203972; CTA
GFPSQGNVL

SEQ ID NO: 25959 - protein, 9 aa, Homo sapiens
  Table A; Target 25959; HLA-C*14:02; GLYATL3; ENSG00000203972; CTA
GFPSQGNVL

SEQ ID NO: 25960 - protein, 9 aa, Homo sapiens
  Table A; Target 25960; HLA-A*30:02; GLYATL3; ENSG00000203972; CTA
GGNEQCLRY

SEQ ID NO: 25961 - protein, 9 aa, Homo sapiens
  Table A; Target 25961; HLA-A*02:01; GLYATL3; ENSG00000203972; CTA
GLQSELYDV

SEQ ID NO: 25962 - protein, 9 aa, Homo sapiens
  Table A; Target 25962; HLA-A*02:04; GLYATL3; ENSG00000203972; CTA
GLQSELYDV

SEQ ID NO: 25963 - protein, 9 aa, Homo sapiens
  Table A; Target 25963; HLA-B*13:02; GLYATL3; ENSG00000203972; CTA
GLQSELYDV

SEQ ID NO: 25964 - protein, 9 aa, Homo sapiens
  Table A; Target 25964; HLA-B*55:01; GLYATL3; ENSG00000203972; CTA
GLQSELYDV

SEQ ID NO: 25965 - protein, 11 aa, Homo sapiens
  Table A; Target 25965; HLA-A*03:02; GLYATL3; ENSG00000203972; CTA
GLQSELYDVSK

SEQ ID NO: 25966 - protein, 9 aa, Homo sapiens
  Table A; Target 25966; HLA-B*07:02; GLYATL3; ENSG00000203972; CTA
GPSPRLTYL

SEQ ID NO: 25967 - protein, 9 aa, Homo sapiens
  Table A; Target 25967; HLA-B*37:01; GLYATL3; ENSG00000203972; CTA
GPSPRLTYL

SEQ ID NO: 25968 - protein, 9 aa, Homo sapiens
  Table A; Target 25968; HLA-C*07:02; GLYATL3; ENSG00000203972; CTA
GPSPRLTYL

SEQ ID NO: 25969 - protein, 10 aa, Homo sapiens
  Table A; Target 25969; HLA-A*23:01; GLYATL3; ENSG00000203972; CTA
GYSRLVALTL

SEQ ID NO: 25970 - protein, 10 aa, Homo sapiens
  Table A; Target 25970; HLA-A*24:02; GLYATL3; ENSG00000203972; CTA
GYSRLVALTL

SEQ ID NO: 25971 - protein, 8 aa, Homo sapiens
  Table A; Target 25971; HLA-C*14:02; GLYATL3; ENSG00000203972; CTA
HFSPVSSL

SEQ ID NO: 25972 - protein, 9 aa, Homo sapiens
  Table A; Target 25972; HLA-A*31:01; GLYATL3; ENSG00000203972; CTA
HGYTLPEHR

SEQ ID NO: 25973 - protein, 9 aa, Homo sapiens
  Table A; Target 25973; HLA-A*33:01; GLYATL3; ENSG00000203972; CTA
HGYTLPEHR

SEQ ID NO: 25974 - protein, 9 aa, Homo sapiens
  Table A; Target 25974; HLA-A*33:03; GLYATL3; ENSG00000203972; CTA
HGYTLPEHR

SEQ ID NO: 25975 - protein, 9 aa, Homo sapiens
  Table A; Target 25975; HLA-A*68:01; GLYATL3; ENSG00000203972; CTA
HGYTLPEHR

SEQ ID NO: 25976 - protein, 9 aa, Homo sapiens
  Table A; Target 25976; HLA-C*07:06; GLYATL3; ENSG00000203972; CTA
HGYTLPEHR

SEQ ID NO: 25977 - protein, 10 aa, Homo sapiens
  Table A; Target 25977; HLA-A*31:01; GLYATL3; ENSG00000203972; CTA
HGYTLPEHRR

SEQ ID NO: 25978 - protein, 8 aa, Homo sapiens
  Table A; Target 25978; HLA-C*14:02; GLYATL3; ENSG00000203972; CTA
HYTNAYAV

SEQ ID NO: 25979 - protein, 9 aa, Homo sapiens
  Table A; Target 25979; HLA-A*23:01; GLYATL3; ENSG00000203972; CTA
HYTNAYAVF

SEQ ID NO: 25980 - protein, 9 aa, Homo sapiens
  Table A; Target 25980; HLA-A*24:02; GLYATL3; ENSG00000203972; CTA
HYTNAYAVF

SEQ ID NO: 25981 - protein, 9 aa, Homo sapiens
  Table A; Target 25981; HLA-A*29:02; GLYATL3; ENSG00000203972; CTA
HYTNAYAVF

SEQ ID NO: 25982 - protein, 9 aa, Homo sapiens
  Table A; Target 25982; HLA-C*14:02; GLYATL3; ENSG00000203972; CTA
HYTNAYAVF

SEQ ID NO: 25983 - protein, 10 aa, Homo sapiens
  Table A; Target 25983; HLA-A*29:02; GLYATL3; ENSG00000203972; CTA
HYTNAYAVFY

SEQ ID NO: 25984 - protein, 8 aa, Homo sapiens
  Table A; Target 25984; HLA-B*15:01; GLYATL3; ENSG00000203972; CTA
IQGLQSEL

SEQ ID NO: 25985 - protein, 9 aa, Homo sapiens
  Table A; Target 25985; HLA-A*30:02; GLYATL3; ENSG00000203972; CTA
IQGLQSELY

SEQ ID NO: 25986 - protein, 9 aa, Homo sapiens
  Table A; Target 25986; HLA-B*15:01; GLYATL3; ENSG00000203972; CTA
IQGLQSELY

SEQ ID NO: 25987 - protein, 9 aa, Homo sapiens
  Table A; Target 25987; HLA-B*15:03; GLYATL3; ENSG00000203972; CTA
IQGLQSELY

SEQ ID NO: 25988 - protein, 9 aa, Homo sapiens
  Table A; Target 25988; HLA-C*07:04; GLYATL3; ENSG00000203972; CTA
IQGLQSELY

SEQ ID NO: 25989 - protein, 8 aa, Homo sapiens
  Table A; Target 25989; HLA-A*32:01; GLYATL3; ENSG00000203972; CTA
ITDQFATM

SEQ ID NO: 25990 - protein, 8 aa, Homo sapiens
  Table A; Target 25990; HLA-B*39:01; GLYATL3; ENSG00000203972; CTA
ITDQFATM

SEQ ID NO: 25991 - protein, 8 aa, Homo sapiens
  Table A; Target 25991; HLA-C*03:04; GLYATL3; ENSG00000203972; CTA
ITDQFATM

SEQ ID NO: 25992 - protein, 8 aa, Homo sapiens
  Table A; Target 25992; HLA-C*04:01; GLYATL3; ENSG00000203972; CTA
ITDQFATM

SEQ ID NO: 25993 - protein, 8 aa, Homo sapiens
  Table A; Target 25993; HLA-C*05:01; GLYATL3; ENSG00000203972; CTA
ITDQFATM

SEQ ID NO: 25994 - protein, 9 aa, Homo sapiens
  Table A; Target 25994; HLA-B*58:01; GLYATL3; ENSG00000203972; CTA
KAVANSKQL

SEQ ID NO: 25995 - protein, 9 aa, Homo sapiens
  Table A; Target 25995; HLA-C*03:03; GLYATL3; ENSG00000203972; CTA
KAVANSKQL

SEQ ID NO: 25996 - protein, 9 aa, Homo sapiens
  Table A; Target 25996; HLA-C*03:04; GLYATL3; ENSG00000203972; CTA
KAVANSKQL

SEQ ID NO: 25997 - protein, 9 aa, Homo sapiens
  Table A; Target 25997; HLA-C*16:01; GLYATL3; ENSG00000203972; CTA
KAVANSKQL

SEQ ID NO: 25998 - protein, 9 aa, Homo sapiens
  Table A; Target 25998; HLA-C*16:02; GLYATL3; ENSG00000203972; CTA
KAVANSKQL

SEQ ID NO: 25999 - protein, 9 aa, Homo sapiens
  Table A; Target 25999; HLA-A*31:01; GLYATL3; ENSG00000203972; CTA
KGNPVSWSI

SEQ ID NO: 26000 - protein, 9 aa, Homo sapiens
  Table A; Target 26000; HLA-A*32:01; GLYATL3; ENSG00000203972; CTA
KGNPVSWSI

SEQ ID NO: 26001 - protein, 9 aa, Homo sapiens
  Table A; Target 26001; HLA-A*30:02; GLYATL3; ENSG00000203972; CTA
KGPSPRLTY

SEQ ID NO: 26002 - protein, 9 aa, Homo sapiens
  Table A; Target 26002; HLA-A*32:01; GLYATL3; ENSG00000203972; CTA
KGPSPRLTY

SEQ ID NO: 26003 - protein, 9 aa, Homo sapiens
  Table A; Target 26003; HLA-B*58:01; GLYATL3; ENSG00000203972; CTA
KGPSPRLTY

SEQ ID NO: 26004 - protein, 9 aa, Homo sapiens
  Table A; Target 26004; HLA-C*16:01; GLYATL3; ENSG00000203972; CTA
KGPSPRLTY

SEQ ID NO: 26005 - protein, 10 aa, Homo sapiens
  Table A; Target 26005; HLA-A*02:07; GLYATL3; ENSG00000203972; CTA
KGPSPRLTYL

SEQ ID NO: 26006 - protein, 9 aa, Homo sapiens
  Table A; Target 26006; HLA-B*08:01; GLYATL3; ENSG00000203972; CTA
KGYSRLVAL

SEQ ID NO: 26007 - protein, 9 aa, Homo sapiens
  Table A; Target 26007; HLA-B*37:01; GLYATL3; ENSG00000203972; CTA
KGYSRLVAL

SEQ ID NO: 26008 - protein, 9 aa, Homo sapiens
  Table A; Target 26008; HLA-C*12:03; GLYATL3; ENSG00000203972; CTA
KGYSRLVAL

SEQ ID NO: 26009 - protein, 9 aa, Homo sapiens
  Table A; Target 26009; HLA-C*16:01; GLYATL3; ENSG00000203972; CTA
KGYSRLVAL

SEQ ID NO: 26010 - protein, 10 aa, Homo sapiens
  Table A; Target 26010; HLA-A*23:01; GLYATL3; ENSG00000203972; CTA
KQLNIKLTSF

SEQ ID NO: 26011 - protein, 10 aa, Homo sapiens
  Table A; Target 26011; HLA-A*24:02; GLYATL3; ENSG00000203972; CTA
KQLNIKLTSF

SEQ ID NO: 26012 - protein, 10 aa, Homo sapiens
  Table A; Target 26012; HLA-A*30:02; GLYATL3; ENSG00000203972; CTA
KQLNIKLTSF

SEQ ID NO: 26013 - protein, 10 aa, Homo sapiens
  Table A; Target 26013; HLA-A*31:01; GLYATL3; ENSG00000203972; CTA
KQLNIKLTSF

SEQ ID NO: 26014 - protein, 10 aa, Homo sapiens
  Table A; Target 26014; HLA-A*32:01; GLYATL3; ENSG00000203972; CTA
KQLNIKLTSF

SEQ ID NO: 26015 - protein, 10 aa, Homo sapiens
  Table A; Target 26015; HLA-B*15:01; GLYATL3; ENSG00000203972; CTA
KQLNIKLTSF

SEQ ID NO: 26016 - protein, 10 aa, Homo sapiens
  Table A; Target 26016; HLA-B*15:03; GLYATL3; ENSG00000203972; CTA
KQLNIKLTSF

SEQ ID NO: 26017 - protein, 9 aa, Homo sapiens
  Table A; Target 26017; HLA-A*02:01; GLYATL3; ENSG00000203972; CTA
KVYGAVMNI

SEQ ID NO: 26018 - protein, 9 aa, Homo sapiens
  Table A; Target 26018; HLA-A*02:03; GLYATL3; ENSG00000203972; CTA
KVYGAVMNI

SEQ ID NO: 26019 - protein, 9 aa, Homo sapiens
  Table A; Target 26019; HLA-A*02:07; GLYATL3; ENSG00000203972; CTA
KVYGAVMNI

SEQ ID NO: 26020 - protein, 9 aa, Homo sapiens
  Table A; Target 26020; HLA-A*03:01; GLYATL3; ENSG00000203972; CTA
KVYGAVMNI

SEQ ID NO: 26021 - protein, 9 aa, Homo sapiens
  Table A; Target 26021; HLA-A*32:01; GLYATL3; ENSG00000203972; CTA
KVYGAVMNI

SEQ ID NO: 26022 - protein, 9 aa, Homo sapiens
  Table A; Target 26022; HLA-B*13:02; GLYATL3; ENSG00000203972; CTA
KVYGAVMNI

SEQ ID NO: 26023 - protein, 9 aa, Homo sapiens
  Table A; Target 26023; HLA-B*40:02; GLYATL3; ENSG00000203972; CTA
KVYGAVMNI

SEQ ID NO: 26024 - protein, 9 aa, Homo sapiens
  Table A; Target 26024; HLA-B*58:01; GLYATL3; ENSG00000203972; CTA
KVYGAVMNI

SEQ ID NO: 26025 - protein, 9 aa, Homo sapiens
  Table A; Target 26025; HLA-C*02:02; GLYATL3; ENSG00000203972; CTA
KVYGAVMNI

SEQ ID NO: 26026 - protein, 9 aa, Homo sapiens
  Table A; Target 26026; HLA-C*06:02; GLYATL3; ENSG00000203972; CTA
KVYGAVMNI

SEQ ID NO: 26027 - protein, 9 aa, Homo sapiens
  Table A; Target 26027; HLA-C*12:03; GLYATL3; ENSG00000203972; CTA
KVYGAVMNI

SEQ ID NO: 26028 - protein, 11 aa, Homo sapiens
  Table A; Target 26028; HLA-A*03:01; GLYATL3; ENSG00000203972; CTA
KVYGAVMNINR

SEQ ID NO: 26029 - protein, 11 aa, Homo sapiens
  Table A; Target 26029; HLA-A*31:01; GLYATL3; ENSG00000203972; CTA
KVYGAVMNINR

SEQ ID NO: 26030 - protein, 8 aa, Homo sapiens
  Table A; Target 26030; HLA-B*18:01; GLYATL3; ENSG00000203972; CTA
LDHYTNAY

SEQ ID NO: 26031 - protein, 8 aa, Homo sapiens
  Table A; Target 26031; HLA-B*37:01; GLYATL3; ENSG00000203972; CTA
LDHYTNAY

SEQ ID NO: 26032 - protein, 8 aa, Homo sapiens
  Table A; Target 26032; HLA-A*23:01; GLYATL3; ENSG00000203972; CTA
LILTPATF

SEQ ID NO: 26033 - protein, 8 aa, Homo sapiens
  Table A; Target 26033; HLA-B*39:01; GLYATL3; ENSG00000203972; CTA
LILTPATF

SEQ ID NO: 26034 - protein, 8 aa, Homo sapiens
  Table A; Target 26034; HLA-B*27:02; GLYATL3; ENSG00000203972; CTA
LPDTSFLK

SEQ ID NO: 26035 - protein, 8 aa, Homo sapiens
  Table A; Target 26035; HLA-B*13:02; GLYATL3; ENSG00000203972; CTA
LQSELYDV

SEQ ID NO: 26036 - protein, 10 aa, Homo sapiens
  Table A; Target 26036; HLA-A*11:01; GLYATL3; ENSG00000203972; CTA
LQSELYDVSK

SEQ ID NO: 26037 - protein, 10 aa, Homo sapiens
  Table A; Target 26037; HLA-B*27:02; GLYATL3; ENSG00000203972; CTA
LQSELYDVSK

SEQ ID NO: 26038 - protein, 9 aa, Homo sapiens
  Table A; Target 26038; HLA-C*03:04; GLYATL3; ENSG00000203972; CTA
LSVANADLL

SEQ ID NO: 26039 - protein, 9 aa, Homo sapiens
  Table A; Target 26039; HLA-A*02:07; GLYATL3; ENSG00000203972; CTA
LTPATFSGL

SEQ ID NO: 26040 - protein, 9 aa, Homo sapiens
  Table A; Target 26040; HLA-C*01:02; GLYATL3; ENSG00000203972; CTA
LTPATFSGL

SEQ ID NO: 26041 - protein, 9 aa, Homo sapiens
  Table A; Target 26041; HLA-A*03:01; GLYATL3; ENSG00000203972; CTA
LVALTLARK

SEQ ID NO: 26042 - protein, 8 aa, Homo sapiens
  Table A; Target 26042; HLA-C*04:01; GLYATL3; ENSG00000203972; CTA
LYDVSKAV

SEQ ID NO: 26043 - protein, 8 aa, Homo sapiens
  Table A; Target 26043; HLA-C*14:02; GLYATL3; ENSG00000203972; CTA
LYDVSKAV

SEQ ID NO: 26044 - protein, 9 aa, Homo sapiens
  Table A; Target 26044; HLA-C*14:02; GLYATL3; ENSG00000203972; CTA
LYDVSKAVA

SEQ ID NO: 26045 - protein, 9 aa, Homo sapiens
  Table A; Target 26045; HLA-B*08:01; GLYATL3; ENSG00000203972; CTA
MNINRGNPF

SEQ ID NO: 26046 - protein, 9 aa, Homo sapiens
  Table A; Target 26046; HLA-C*16:01; GLYATL3; ENSG00000203972; CTA
MNINRGNPF

SEQ ID NO: 26047 - protein, 9 aa, Homo sapiens
  Table A; Target 26047; HLA-A*25:01; GLYATL3; ENSG00000203972; CTA
NADLLNRTW

SEQ ID NO: 26048 - protein, 9 aa, Homo sapiens
  Table A; Target 26048; HLA-B*35:01; GLYATL3; ENSG00000203972; CTA
NADLLNRTW

SEQ ID NO: 26049 - protein, 9 aa, Homo sapiens
  Table A; Target 26049; HLA-B*44:02; GLYATL3; ENSG00000203972; CTA
NADLLNRTW

SEQ ID NO: 26050 - protein, 9 aa, Homo sapiens
  Table A; Target 26050; HLA-B*44:03; GLYATL3; ENSG00000203972; CTA
NADLLNRTW

SEQ ID NO: 26051 - protein, 9 aa, Homo sapiens
  Table A; Target 26051; HLA-B*51:01; GLYATL3; ENSG00000203972; CTA
NADLLNRTW

SEQ ID NO: 26052 - protein, 9 aa, Homo sapiens
  Table A; Target 26052; HLA-B*57:01; GLYATL3; ENSG00000203972; CTA
NADLLNRTW

SEQ ID NO: 26053 - protein, 9 aa, Homo sapiens
  Table A; Target 26053; HLA-B*58:01; GLYATL3; ENSG00000203972; CTA
NADLLNRTW

SEQ ID NO: 26054 - protein, 9 aa, Homo sapiens
  Table A; Target 26054; HLA-C*03:04; GLYATL3; ENSG00000203972; CTA
NADLLNRTW

SEQ ID NO: 26055 - protein, 9 aa, Homo sapiens
  Table A; Target 26055; HLA-A*02:07; GLYATL3; ENSG00000203972; CTA
NLDHYTNAY

SEQ ID NO: 26056 - protein, 9 aa, Homo sapiens
  Table A; Target 26056; HLA-A*29:02; GLYATL3; ENSG00000203972; CTA
NLDHYTNAY

SEQ ID NO: 26057 - protein, 9 aa, Homo sapiens
  Table A; Target 26057; HLA-A*30:02; GLYATL3; ENSG00000203972; CTA
NLDHYTNAY

SEQ ID NO: 26058 - protein, 9 aa, Homo sapiens
  Table A; Target 26058; HLA-A*02:01; GLYATL3; ENSG00000203972; CTA
NLISCFPSV

SEQ ID NO: 26059 - protein, 9 aa, Homo sapiens
  Table A; Target 26059; HLA-A*02:07; GLYATL3; ENSG00000203972; CTA
NLISCFPSV

SEQ ID NO: 26060 - protein, 9 aa, Homo sapiens
  Table A; Target 26060; HLA-B*55:01; GLYATL3; ENSG00000203972; CTA
NLISCFPSV

SEQ ID NO: 26061 - protein, 8 aa, Homo sapiens
  Table A; Target 26061; HLA-B*08:01; GLYATL3; ENSG00000203972; CTA
NPFQKEVV

SEQ ID NO: 26062 - protein, 8 aa, Homo sapiens
  Table A; Target 26062; HLA-B*51:01; GLYATL3; ENSG00000203972; CTA
NPFQKEVV

SEQ ID NO: 26063 - protein, 9 aa, Homo sapiens
  Table A; Target 26063; HLA-B*07:02; GLYATL3; ENSG00000203972; CTA
NPFQKEVVL

SEQ ID NO: 26064 - protein, 9 aa, Homo sapiens
  Table A; Target 26064; HLA-B*08:01; GLYATL3; ENSG00000203972; CTA
NPFQKEVVL

SEQ ID NO: 26065 - protein, 9 aa, Homo sapiens
  Table A; Target 26065; HLA-B*35:01; GLYATL3; ENSG00000203972; CTA
NPFQKEVVL

SEQ ID NO: 26066 - protein, 9 aa, Homo sapiens
  Table A; Target 26066; HLA-B*35:03; GLYATL3; ENSG00000203972; CTA
NPFQKEVVL

SEQ ID NO: 26067 - protein, 9 aa, Homo sapiens
  Table A; Target 26067; HLA-B*39:01; GLYATL3; ENSG00000203972; CTA
NPFQKEVVL

SEQ ID NO: 26068 - protein, 9 aa, Homo sapiens
  Table A; Target 26068; HLA-B*51:01; GLYATL3; ENSG00000203972; CTA
NPFQKEVVL

SEQ ID NO: 26069 - protein, 9 aa, Homo sapiens
  Table A; Target 26069; HLA-B*54:01; GLYATL3; ENSG00000203972; CTA
NPFQKEVVL

SEQ ID NO: 26070 - protein, 9 aa, Homo sapiens
  Table A; Target 26070; HLA-B*55:01; GLYATL3; ENSG00000203972; CTA
NPFQKEVVL

SEQ ID NO: 26071 - protein, 9 aa, Homo sapiens
  Table A; Target 26071; HLA-B*56:01; GLYATL3; ENSG00000203972; CTA
NPFQKEVVL

SEQ ID NO: 26072 - protein, 9 aa, Homo sapiens
  Table A; Target 26072; HLA-C*03:03; GLYATL3; ENSG00000203972; CTA
NPFQKEVVL

SEQ ID NO: 26073 - protein, 9 aa, Homo sapiens
  Table A; Target 26073; HLA-C*05:01; GLYATL3; ENSG00000203972; CTA
NPFQKEVVL

SEQ ID NO: 26074 - protein, 9 aa, Homo sapiens
  Table A; Target 26074; HLA-C*07:02; GLYATL3; ENSG00000203972; CTA
NPFQKEVVL

SEQ ID NO: 26075 - protein, 9 aa, Homo sapiens
  Table A; Target 26075; HLA-C*16:01; GLYATL3; ENSG00000203972; CTA
NPFQKEVVL

SEQ ID NO: 26076 - protein, 11 aa, Homo sapiens
  Table A; Target 26076; HLA-B*35:01; GLYATL3; ENSG00000203972; CTA
NPVSWSITDQF

SEQ ID NO: 26077 - protein, 9 aa, Homo sapiens
  Table A; Target 26077; HLA-A*01:01; GLYATL3; ENSG00000203972; CTA
NTASISLLK

SEQ ID NO: 26078 - protein, 9 aa, Homo sapiens
  Table A; Target 26078; HLA-A*03:01; GLYATL3; ENSG00000203972; CTA
NTASISLLK

SEQ ID NO: 26079 - protein, 9 aa, Homo sapiens
  Table A; Target 26079; HLA-A*03:02; GLYATL3; ENSG00000203972; CTA
NTASISLLK

SEQ ID NO: 26080 - protein, 9 aa, Homo sapiens
  Table A; Target 26080; HLA-A*11:01; GLYATL3; ENSG00000203972; CTA
NTASISLLK

SEQ ID NO: 26081 - protein, 9 aa, Homo sapiens
  Table A; Target 26081; HLA-A*26:01; GLYATL3; ENSG00000203972; CTA
NTASISLLK

SEQ ID NO: 26082 - protein, 9 aa, Homo sapiens
  Table A; Target 26082; HLA-A*29:02; GLYATL3; ENSG00000203972; CTA
NTASISLLK

SEQ ID NO: 26083 - protein, 9 aa, Homo sapiens
  Table A; Target 26083; HLA-A*33:01; GLYATL3; ENSG00000203972; CTA
NTASISLLK

SEQ ID NO: 26084 - protein, 9 aa, Homo sapiens
  Table A; Target 26084; HLA-A*33:03; GLYATL3; ENSG00000203972; CTA
NTASISLLK

SEQ ID NO: 26085 - protein, 9 aa, Homo sapiens
  Table A; Target 26085; HLA-A*68:01; GLYATL3; ENSG00000203972; CTA
NTASISLLK

SEQ ID NO: 26086 - protein, 9 aa, Homo sapiens
  Table A; Target 26086; HLA-A*68:02; GLYATL3; ENSG00000203972; CTA
NTASISLLK

SEQ ID NO: 26087 - protein, 9 aa, Homo sapiens
  Table A; Target 26087; HLA-B*27:05; GLYATL3; ENSG00000203972; CTA
NTASISLLK

SEQ ID NO: 26088 - protein, 9 aa, Homo sapiens
  Table A; Target 26088; HLA-C*07:06; GLYATL3; ENSG00000203972; CTA
NTASISLLK

SEQ ID NO: 26089 - protein, 11 aa, Homo sapiens
  Table A; Target 26089; HLA-A*68:02; GLYATL3; ENSG00000203972; CTA
NTASISLLKSL

SEQ ID NO: 26090 - protein, 10 aa, Homo sapiens
  Table A; Target 26090; HLA-A*25:01; GLYATL3; ENSG00000203972; CTA
NVLDDNTASI

SEQ ID NO: 26091 - protein, 8 aa, Homo sapiens
  Table A; Target 26091; HLA-C*07:02; GLYATL3; ENSG00000203972; CTA
PSPRLTYL

SEQ ID NO: 26092 - protein, 9 aa, Homo sapiens
  Table A; Target 26092; HLA-A*29:02; GLYATL3; ENSG00000203972; CTA
QFATMCHGY

SEQ ID NO: 26093 - protein, 9 aa, Homo sapiens
  Table A; Target 26093; HLA-A*30:02; GLYATL3; ENSG00000203972; CTA
QFATMCHGY

SEQ ID NO: 26094 - protein, 9 aa, Homo sapiens
  Table A; Target 26094; HLA-C*01:02; GLYATL3; ENSG00000203972; CTA
QIQGLQSEL

SEQ ID NO: 26095 - protein, 9 aa, Homo sapiens
  Table A; Target 26095; HLA-C*14:02; GLYATL3; ENSG00000203972; CTA
QIQGLQSEL

SEQ ID NO: 26096 - protein, 10 aa, Homo sapiens
  Table A; Target 26096; HLA-A*30:02; GLYATL3; ENSG00000203972; CTA
QIQGLQSELY

SEQ ID NO: 26097 - protein, 10 aa, Homo sapiens
  Table A; Target 26097; HLA-B*15:01; GLYATL3; ENSG00000203972; CTA
QIQGLQSELY

SEQ ID NO: 26098 - protein, 9 aa, Homo sapiens
  Table A; Target 26098; HLA-A*02:03; GLYATL3; ENSG00000203972; CTA
QLNIKLTSF

SEQ ID NO: 26099 - protein, 9 aa, Homo sapiens
  Table A; Target 26099; HLA-A*23:01; GLYATL3; ENSG00000203972; CTA
QLNIKLTSF

SEQ ID NO: 26100 - protein, 9 aa, Homo sapiens
  Table A; Target 26100; HLA-A*24:02; GLYATL3; ENSG00000203972; CTA
QLNIKLTSF

SEQ ID NO: 26101 - protein, 9 aa, Homo sapiens
  Table A; Target 26101; HLA-A*25:01; GLYATL3; ENSG00000203972; CTA
QLNIKLTSF

SEQ ID NO: 26102 - protein, 9 aa, Homo sapiens
  Table A; Target 26102; HLA-A*31:01; GLYATL3; ENSG00000203972; CTA
QLNIKLTSF

SEQ ID NO: 26103 - protein, 9 aa, Homo sapiens
  Table A; Target 26103; HLA-A*32:01; GLYATL3; ENSG00000203972; CTA
QLNIKLTSF

SEQ ID NO: 26104 - protein, 9 aa, Homo sapiens
  Table A; Target 26104; HLA-B*07:02; GLYATL3; ENSG00000203972; CTA
QLNIKLTSF

SEQ ID NO: 26105 - protein, 9 aa, Homo sapiens
  Table A; Target 26105; HLA-B*08:01; GLYATL3; ENSG00000203972; CTA
QLNIKLTSF

SEQ ID NO: 26106 - protein, 9 aa, Homo sapiens
  Table A; Target 26106; HLA-B*15:01; GLYATL3; ENSG00000203972; CTA
QLNIKLTSF

SEQ ID NO: 26107 - protein, 9 aa, Homo sapiens
  Table A; Target 26107; HLA-B*15:03; GLYATL3; ENSG00000203972; CTA
QLNIKLTSF

SEQ ID NO: 26108 - protein, 9 aa, Homo sapiens
  Table A; Target 26108; HLA-B*37:01; GLYATL3; ENSG00000203972; CTA
QLNIKLTSF

SEQ ID NO: 26109 - protein, 9 aa, Homo sapiens
  Table A; Target 26109; HLA-B*46:01; GLYATL3; ENSG00000203972; CTA
QLNIKLTSF

SEQ ID NO: 26110 - protein, 9 aa, Homo sapiens
  Table A; Target 26110; HLA-C*01:02; GLYATL3; ENSG00000203972; CTA
QLNIKLTSF

SEQ ID NO: 26111 - protein, 9 aa, Homo sapiens
  Table A; Target 26111; HLA-C*14:02; GLYATL3; ENSG00000203972; CTA
QLNIKLTSF

SEQ ID NO: 26112 - protein, 9 aa, Homo sapiens
  Table A; Target 26112; HLA-C*16:01; GLYATL3; ENSG00000203972; CTA
QLNIKLTSF

SEQ ID NO: 26113 - protein, 10 aa, Homo sapiens
  Table A; Target 26113; HLA-A*03:01; GLYATL3; ENSG00000203972; CTA
QLNIKLTSFK

SEQ ID NO: 26114 - protein, 9 aa, Homo sapiens
  Table A; Target 26114; HLA-B*27:02; GLYATL3; ENSG00000203972; CTA
QSELYDVSK

SEQ ID NO: 26115 - protein, 10 aa, Homo sapiens
  Table A; Target 26115; HLA-B*44:02; GLYATL3; ENSG00000203972; CTA
RDEKGNPVSW

SEQ ID NO: 26116 - protein, 10 aa, Homo sapiens
  Table A; Target 26116; HLA-B*44:03; GLYATL3; ENSG00000203972; CTA
RDEKGNPVSW

SEQ ID NO: 26117 - protein, 10 aa, Homo sapiens
  Table A; Target 26117; HLA-B*58:01; GLYATL3; ENSG00000203972; CTA
RDEKGNPVSW

SEQ ID NO: 26118 - protein, 11 aa, Homo sapiens
  Table A; Target 26118; HLA-A*30:02; GLYATL3; ENSG00000203972; CTA
REAETDNLDHY

SEQ ID NO: 26119 - protein, 11 aa, Homo sapiens
  Table A; Target 26119; HLA-B*44:02; GLYATL3; ENSG00000203972; CTA
REAETDNLDHY

SEQ ID NO: 26120 - protein, 11 aa, Homo sapiens
  Table A; Target 26120; HLA-B*44:03; GLYATL3; ENSG00000203972; CTA
REAETDNLDHY

SEQ ID NO: 26121 - protein, 11 aa, Homo sapiens
  Table A; Target 26121; HLA-C*16:04; GLYATL3; ENSG00000203972; CTA
REAETDNLDHY

SEQ ID NO: 26122 - protein, 10 aa, Homo sapiens
  Table A; Target 26122; HLA-B*37:01; GLYATL3; ENSG00000203972; CTA
RGFPSQGNVL

SEQ ID NO: 26123 - protein, 10 aa, Homo sapiens
  Table A; Target 26123; HLA-B*40:01; GLYATL3; ENSG00000203972; CTA
RGFPSQGNVL

SEQ ID NO: 26124 - protein, 10 aa, Homo sapiens
  Table A; Target 26124; HLA-C*03:04; GLYATL3; ENSG00000203972; CTA
RGFPSQGNVL

SEQ ID NO: 26125 - protein, 10 aa, Homo sapiens
  Table A; Target 26125; HLA-C*07:04; GLYATL3; ENSG00000203972; CTA
RGFPSQGNVL

SEQ ID NO: 26126 - protein, 9 aa, Homo sapiens
  Table A; Target 26126; HLA-C*16:02; GLYATL3; ENSG00000203972; CTA
RGNPFQKEV

SEQ ID NO: 26127 - protein, 9 aa, Homo sapiens
  Table A; Target 26127; HLA-A*23:01; GLYATL3; ENSG00000203972; CTA
RLILTPATF

SEQ ID NO: 26128 - protein, 9 aa, Homo sapiens
  Table A; Target 26128; HLA-A*24:02; GLYATL3; ENSG00000203972; CTA
RLILTPATF

SEQ ID NO: 26129 - protein, 9 aa, Homo sapiens
  Table A; Target 26129; HLA-A*32:01; GLYATL3; ENSG00000203972; CTA
RLILTPATF

SEQ ID NO: 26130 - protein, 9 aa, Homo sapiens
  Table A; Target 26130; HLA-B*15:01; GLYATL3; ENSG00000203972; CTA
RLILTPATF

SEQ ID NO: 26131 - protein, 9 aa, Homo sapiens
  Table A; Target 26131; HLA-B*15:03; GLYATL3; ENSG00000203972; CTA
RLILTPATF

SEQ ID NO: 26132 - protein, 9 aa, Homo sapiens
  Table A; Target 26132; HLA-B*46:01; GLYATL3; ENSG00000203972; CTA
RLILTPATF

SEQ ID NO: 26133 - protein, 9 aa, Homo sapiens
  Table A; Target 26133; HLA-B*57:01; GLYATL3; ENSG00000203972; CTA
RLILTPATF

SEQ ID NO: 26134 - protein, 9 aa, Homo sapiens
  Table A; Target 26134; HLA-B*58:01; GLYATL3; ENSG00000203972; CTA
RLILTPATF

SEQ ID NO: 26135 - protein, 9 aa, Homo sapiens
  Table A; Target 26135; HLA-A*03:01; GLYATL3; ENSG00000203972; CTA
RLVALTLAR

SEQ ID NO: 26136 - protein, 9 aa, Homo sapiens
  Table A; Target 26136; HLA-A*31:01; GLYATL3; ENSG00000203972; CTA
RLVALTLAR

SEQ ID NO: 26137 - protein, 10 aa, Homo sapiens
  Table A; Target 26137; HLA-A*23:01; GLYATL3; ENSG00000203972; CTA
RYIANLISCF

SEQ ID NO: 26138 - protein, 10 aa, Homo sapiens
  Table A; Target 26138; HLA-A*24:02; GLYATL3; ENSG00000203972; CTA
RYIANLISCF

SEQ ID NO: 26139 - protein, 9 aa, Homo sapiens
  Table A; Target 26139; HLA-B*13:02; GLYATL3; ENSG00000203972; CTA
SCFPESLKV

SEQ ID NO: 26140 - protein, 9 aa, Homo sapiens
  Table A; Target 26140; HLA-C*02:02; GLYATL3; ENSG00000203972; CTA
SCFPESLKV

SEQ ID NO: 26141 - protein, 10 aa, Homo sapiens
  Table A; Target 26141; HLA-A*30:02; GLYATL3; ENSG00000203972; CTA
SCFPESLKVY

SEQ ID NO: 26142 - protein, 10 aa, Homo sapiens
  Table A; Target 26142; HLA-B*15:01; GLYATL3; ENSG00000203972; CTA
SCFPESLKVY

SEQ ID NO: 26143 - protein, 10 aa, Homo sapiens
  Table A; Target 26143; HLA-B*15:03; GLYATL3; ENSG00000203972; CTA
SCFPESLKVY

SEQ ID NO: 26144 - protein, 10 aa, Homo sapiens
  Table A; Target 26144; HLA-C*02:02; GLYATL3; ENSG00000203972; CTA
SCFPESLKVY

SEQ ID NO: 26145 - protein, 10 aa, Homo sapiens
  Table A; Target 26145; HLA-C*12:03; GLYATL3; ENSG00000203972; CTA
SCFPESLKVY

SEQ ID NO: 26146 - protein, 9 aa, Homo sapiens
  Table A; Target 26146; HLA-A*31:01; GLYATL3; ENSG00000203972; CTA
SCFPSVCVR

SEQ ID NO: 26147 - protein, 9 aa, Homo sapiens
  Table A; Target 26147; HLA-A*30:01; GLYATL3; ENSG00000203972; CTA
SELYDVSKA

SEQ ID NO: 26148 - protein, 9 aa, Homo sapiens
  Table A; Target 26148; HLA-B*40:01; GLYATL3; ENSG00000203972; CTA
SELYDVSKA

SEQ ID NO: 26149 - protein, 9 aa, Homo sapiens
  Table A; Target 26149; HLA-B*40:02; GLYATL3; ENSG00000203972; CTA
SELYDVSKA

SEQ ID NO: 26150 - protein, 9 aa, Homo sapiens
  Table A; Target 26150; HLA-B*49:01; GLYATL3; ENSG00000203972; CTA
SELYDVSKA

SEQ ID NO: 26151 - protein, 10 aa, Homo sapiens
  Table A; Target 26151; HLA-A*30:01; GLYATL3; ENSG00000203972; CTA
SELYDVSKAV

SEQ ID NO: 26152 - protein, 10 aa, Homo sapiens
  Table A; Target 26152; HLA-B*49:01; GLYATL3; ENSG00000203972; CTA
SELYDVSKAV

SEQ ID NO: 26153 - protein, 8 aa, Homo sapiens
  Table A; Target 26153; HLA-B*37:01; GLYATL3; ENSG00000203972; CTA
SISLLKSL

SEQ ID NO: 26154 - protein, 9 aa, Homo sapiens
  Table A; Target 26154; HLA-A*25:01; GLYATL3; ENSG00000203972; CTA
SITDQFATM

SEQ ID NO: 26155 - protein, 9 aa, Homo sapiens
  Table A; Target 26155; HLA-A*26:01; GLYATL3; ENSG00000203972; CTA
SITDQFATM

SEQ ID NO: 26156 - protein, 9 aa, Homo sapiens
  Table A; Target 26156; HLA-A*30:01; GLYATL3; ENSG00000203972; CTA
SITDQFATM

SEQ ID NO: 26157 - protein, 9 aa, Homo sapiens
  Table A; Target 26157; HLA-A*32:01; GLYATL3; ENSG00000203972; CTA
SITDQFATM

SEQ ID NO: 26158 - protein, 9 aa, Homo sapiens
  Table A; Target 26158; HLA-A*68:01; GLYATL3; ENSG00000203972; CTA
SITDQFATM

SEQ ID NO: 26159 - protein, 9 aa, Homo sapiens
  Table A; Target 26159; HLA-A*68:02; GLYATL3; ENSG00000203972; CTA
SITDQFATM

SEQ ID NO: 26160 - protein, 9 aa, Homo sapiens
  Table A; Target 26160; HLA-B*18:01; GLYATL3; ENSG00000203972; CTA
SITDQFATM

SEQ ID NO: 26161 - protein, 9 aa, Homo sapiens
  Table A; Target 26161; HLA-B*27:05; GLYATL3; ENSG00000203972; CTA
SITDQFATM

SEQ ID NO: 26162 - protein, 9 aa, Homo sapiens
  Table A; Target 26162; HLA-B*35:01; GLYATL3; ENSG00000203972; CTA
SITDQFATM

SEQ ID NO: 26163 - protein, 9 aa, Homo sapiens
  Table A; Target 26163; HLA-B*35:03; GLYATL3; ENSG00000203972; CTA
SITDQFATM

SEQ ID NO: 26164 - protein, 9 aa, Homo sapiens
  Table A; Target 26164; HLA-B*46:01; GLYATL3; ENSG00000203972; CTA
SITDQFATM

SEQ ID NO: 26165 - protein, 9 aa, Homo sapiens
  Table A; Target 26165; HLA-B*58:01; GLYATL3; ENSG00000203972; CTA
SITDQFATM

SEQ ID NO: 26166 - protein, 9 aa, Homo sapiens
  Table A; Target 26166; HLA-C*01:02; GLYATL3; ENSG00000203972; CTA
SITDQFATM

SEQ ID NO: 26167 - protein, 9 aa, Homo sapiens
  Table A; Target 26167; HLA-C*02:02; GLYATL3; ENSG00000203972; CTA
SITDQFATM

SEQ ID NO: 26168 - protein, 9 aa, Homo sapiens
  Table A; Target 26168; HLA-C*03:03; GLYATL3; ENSG00000203972; CTA
SITDQFATM

SEQ ID NO: 26169 - protein, 9 aa, Homo sapiens
  Table A; Target 26169; HLA-C*03:04; GLYATL3; ENSG00000203972; CTA
SITDQFATM

SEQ ID NO: 26170 - protein, 9 aa, Homo sapiens
  Table A; Target 26170; HLA-C*05:01; GLYATL3; ENSG00000203972; CTA
SITDQFATM

SEQ ID NO: 26171 - protein, 9 aa, Homo sapiens
  Table A; Target 26171; HLA-C*07:06; GLYATL3; ENSG00000203972; CTA
SITDQFATM

SEQ ID NO: 26172 - protein, 9 aa, Homo sapiens
  Table A; Target 26172; HLA-C*14:02; GLYATL3; ENSG00000203972; CTA
SITDQFATM

SEQ ID NO: 26173 - protein, 9 aa, Homo sapiens
  Table A; Target 26173; HLA-C*16:01; GLYATL3; ENSG00000203972; CTA
SITDQFATM

SEQ ID NO: 26174 - protein, 9 aa, Homo sapiens
  Table A; Target 26174; HLA-C*16:02; GLYATL3; ENSG00000203972; CTA
SITDQFATM

SEQ ID NO: 26175 - protein, 9 aa, Homo sapiens
  Table A; Target 26175; HLA-B*08:01; GLYATL3; ENSG00000203972; CTA
SLKVYGAVM

SEQ ID NO: 26176 - protein, 9 aa, Homo sapiens
  Table A; Target 26176; HLA-B*46:01; GLYATL3; ENSG00000203972; CTA
SLKVYGAVM

SEQ ID NO: 26177 - protein, 9 aa, Homo sapiens
  Table A; Target 26177; HLA-A*03:01; GLYATL3; ENSG00000203972; CTA
SLPDTSFLK

SEQ ID NO: 26178 - protein, 9 aa, Homo sapiens
  Table A; Target 26178; HLA-A*03:02; GLYATL3; ENSG00000203972; CTA
SLPDTSFLK

SEQ ID NO: 26179 - protein, 9 aa, Homo sapiens
  Table A; Target 26179; HLA-A*11:01; GLYATL3; ENSG00000203972; CTA
SLPDTSFLK

SEQ ID NO: 26180 - protein, 9 aa, Homo sapiens
  Table A; Target 26180; HLA-B*07:02; GLYATL3; ENSG00000203972; CTA
SPRLTYLSV

SEQ ID NO: 26181 - protein, 9 aa, Homo sapiens
  Table A; Target 26181; HLA-B*54:01; GLYATL3; ENSG00000203972; CTA
SPRLTYLSV

SEQ ID NO: 26182 - protein, 9 aa, Homo sapiens
  Table A; Target 26182; HLA-B*56:01; GLYATL3; ENSG00000203972; CTA
SPRLTYLSV

SEQ ID NO: 26183 - protein, 9 aa, Homo sapiens
  Table A; Target 26183; HLA-C*07:02; GLYATL3; ENSG00000203972; CTA
SPRLTYLSV

SEQ ID NO: 26184 - protein, 9 aa, Homo sapiens
  Table A; Target 26184; HLA-B*56:01; GLYATL3; ENSG00000203972; CTA
SPVSSLPDT

SEQ ID NO: 26185 - protein, 11 aa, Homo sapiens
  Table A; Target 26185; HLA-B*07:02; GLYATL3; ENSG00000203972; CTA
SPVSSLPDTSF

SEQ ID NO: 26186 - protein, 11 aa, Homo sapiens
  Table A; Target 26186; HLA-B*35:01; GLYATL3; ENSG00000203972; CTA
SPVSSLPDTSF

SEQ ID NO: 26187 - protein, 11 aa, Homo sapiens
  Table A; Target 26187; HLA-B*35:03; GLYATL3; ENSG00000203972; CTA
SPVSSLPDTSF

SEQ ID NO: 26188 - protein, 11 aa, Homo sapiens
  Table A; Target 26188; HLA-B*55:01; GLYATL3; ENSG00000203972; CTA
SPVSSLPDTSF

SEQ ID NO: 26189 - protein, 11 aa, Homo sapiens
  Table A; Target 26189; HLA-B*56:01; GLYATL3; ENSG00000203972; CTA
SPVSSLPDTSF

SEQ ID NO: 26190 - protein, 11 aa, Homo sapiens
  Table A; Target 26190; HLA-C*03:03; GLYATL3; ENSG00000203972; CTA
SPVSSLPDTSF

SEQ ID NO: 26191 - protein, 11 aa, Homo sapiens
  Table A; Target 26191; HLA-C*07:02; GLYATL3; ENSG00000203972; CTA
SPVSSLPDTSF

SEQ ID NO: 26192 - protein, 9 aa, Homo sapiens
  Table A; Target 26192; HLA-B*58:01; GLYATL3; ENSG00000203972; CTA
SSLPDTSFL

SEQ ID NO: 26193 - protein, 10 aa, Homo sapiens
  Table A; Target 26193; HLA-A*11:01; GLYATL3; ENSG00000203972; CTA
SSLPDTSFLK

SEQ ID NO: 26194 - protein, 9 aa, Homo sapiens
  Table A; Target 26194; HLA-A*03:01; GLYATL3; ENSG00000203972; CTA
STKLLILEK

SEQ ID NO: 26195 - protein, 9 aa, Homo sapiens
  Table A; Target 26195; HLA-A*11:01; GLYATL3; ENSG00000203972; CTA
STKLLILEK

SEQ ID NO: 26196 - protein, 9 aa, Homo sapiens
  Table A; Target 26196; HLA-A*31:01; GLYATL3; ENSG00000203972; CTA
STKLLILEK

SEQ ID NO: 26197 - protein, 9 aa, Homo sapiens
  Table A; Target 26197; HLA-A*33:01; GLYATL3; ENSG00000203972; CTA
STKLLILEK

SEQ ID NO: 26198 - protein, 9 aa, Homo sapiens
  Table A; Target 26198; HLA-A*33:03; GLYATL3; ENSG00000203972; CTA
STKLLILEK

SEQ ID NO: 26199 - protein, 9 aa, Homo sapiens
  Table A; Target 26199; HLA-B*13:02; GLYATL3; ENSG00000203972; CTA
STKLLILEK

SEQ ID NO: 26200 - protein, 10 aa, Homo sapiens
  Table A; Target 26200; HLA-A*03:01; GLYATL3; ENSG00000203972; CTA
SVANADLLNR

SEQ ID NO: 26201 - protein, 10 aa, Homo sapiens
  Table A; Target 26201; HLA-A*03:02; GLYATL3; ENSG00000203972; CTA
SVANADLLNR

SEQ ID NO: 26202 - protein, 10 aa, Homo sapiens
  Table A; Target 26202; HLA-A*11:01; GLYATL3; ENSG00000203972; CTA
SVANADLLNR

SEQ ID NO: 26203 - protein, 10 aa, Homo sapiens
  Table A; Target 26203; HLA-A*31:01; GLYATL3; ENSG00000203972; CTA
SVANADLLNR

SEQ ID NO: 26204 - protein, 10 aa, Homo sapiens
  Table A; Target 26204; HLA-A*33:01; GLYATL3; ENSG00000203972; CTA
SVANADLLNR

SEQ ID NO: 26205 - protein, 10 aa, Homo sapiens
  Table A; Target 26205; HLA-A*33:03; GLYATL3; ENSG00000203972; CTA
SVANADLLNR

SEQ ID NO: 26206 - protein, 10 aa, Homo sapiens
  Table A; Target 26206; HLA-A*68:01; GLYATL3; ENSG00000203972; CTA
SVANADLLNR

SEQ ID NO: 26207 - protein, 10 aa, Homo sapiens
  Table A; Target 26207; HLA-B*27:02; GLYATL3; ENSG00000203972; CTA
SVANADLLNR

SEQ ID NO: 26208 - protein, 10 aa, Homo sapiens
  Table A; Target 26208; HLA-C*07:06; GLYATL3; ENSG00000203972; CTA
SVANADLLNR

SEQ ID NO: 26209 - protein, 8 aa, Homo sapiens
  Table A; Target 26209; HLA-B*27:02; GLYATL3; ENSG00000203972; CTA
TASISLLK

SEQ ID NO: 26210 - protein, 10 aa, Homo sapiens
  Table A; Target 26210; HLA-B*07:02; GLYATL3; ENSG00000203972; CTA
TASISLLKSL

SEQ ID NO: 26211 - protein, 8 aa, Homo sapiens
  Table A; Target 26211; HLA-A*23:01; GLYATL3; ENSG00000203972; CTA
TFSGLPHL

SEQ ID NO: 26212 - protein, 8 aa, Homo sapiens
  Table A; Target 26212; HLA-B*07:02; GLYATL3; ENSG00000203972; CTA
TPATFSGL

SEQ ID NO: 26213 - protein, 11 aa, Homo sapiens
  Table A; Target 26213; HLA-A*68:02; GLYATL3; ENSG00000203972; CTA
TPATFSGLPHL

SEQ ID NO: 26214 - protein, 11 aa, Homo sapiens
  Table A; Target 26214; HLA-B*07:02; GLYATL3; ENSG00000203972; CTA
TPATFSGLPHL

SEQ ID NO: 26215 - protein, 11 aa, Homo sapiens
  Table A; Target 26215; HLA-B*35:03; GLYATL3; ENSG00000203972; CTA
TPATFSGLPHL

SEQ ID NO: 26216 - protein, 11 aa, Homo sapiens
  Table A; Target 26216; HLA-C*04:01; GLYATL3; ENSG00000203972; CTA
TPATFSGLPHL

SEQ ID NO: 26217 - protein, 11 aa, Homo sapiens
  Table A; Target 26217; HLA-C*06:02; GLYATL3; ENSG00000203972; CTA
TPATFSGLPHL

SEQ ID NO: 26218 - protein, 8 aa, Homo sapiens
  Table A; Target 26218; HLA-B*57:01; GLYATL3; ENSG00000203972; CTA
TSFKAVHF

SEQ ID NO: 26219 - protein, 10 aa, Homo sapiens
  Table A; Target 26219; HLA-A*68:01; GLYATL3; ENSG00000203972; CTA
TSFLKGPSPR

SEQ ID NO: 26220 - protein, 8 aa, Homo sapiens
  Table A; Target 26220; HLA-C*14:02; GLYATL3; ENSG00000203972; CTA
TYLSVANA

SEQ ID NO: 26221 - protein, 10 aa, Homo sapiens
  Table A; Target 26221; HLA-C*14:02; GLYATL3; ENSG00000203972; CTA
TYLSVANADL

SEQ ID NO: 26222 - protein, 11 aa, Homo sapiens
  Table A; Target 26222; HLA-A*23:01; GLYATL3; ENSG00000203972; CTA
TYLSVANADLL

SEQ ID NO: 26223 - protein, 11 aa, Homo sapiens
  Table A; Target 26223; HLA-A*24:02; GLYATL3; ENSG00000203972; CTA
TYLSVANADLL

SEQ ID NO: 26224 - protein, 9 aa, Homo sapiens
  Table A; Target 26224; HLA-B*57:01; GLYATL3; ENSG00000203972; CTA
VALTLARKL

SEQ ID NO: 26225 - protein, 9 aa, Homo sapiens
  Table A; Target 26225; HLA-C*02:02; GLYATL3; ENSG00000203972; CTA
VALTLARKL

SEQ ID NO: 26226 - protein, 9 aa, Homo sapiens
  Table A; Target 26226; HLA-C*12:03; GLYATL3; ENSG00000203972; CTA
VALTLARKL

SEQ ID NO: 26227 - protein, 9 aa, Homo sapiens
  Table A; Target 26227; HLA-C*16:01; GLYATL3; ENSG00000203972; CTA
VALTLARKL

SEQ ID NO: 26228 - protein, 9 aa, Homo sapiens
  Table A; Target 26228; HLA-C*16:02; GLYATL3; ENSG00000203972; CTA
VALTLARKL

SEQ ID NO: 26229 - protein, 9 aa, Homo sapiens
  Table A; Target 26229; HLA-A*03:02; GLYATL3; ENSG00000203972; CTA
VANADLLNR

SEQ ID NO: 26230 - protein, 9 aa, Homo sapiens
  Table A; Target 26230; HLA-A*11:01; GLYATL3; ENSG00000203972; CTA
VANADLLNR

SEQ ID NO: 26231 - protein, 9 aa, Homo sapiens
  Table A; Target 26231; HLA-A*31:01; GLYATL3; ENSG00000203972; CTA
VANADLLNR

SEQ ID NO: 26232 - protein, 9 aa, Homo sapiens
  Table A; Target 26232; HLA-A*33:01; GLYATL3; ENSG00000203972; CTA
VANADLLNR

SEQ ID NO: 26233 - protein, 9 aa, Homo sapiens
  Table A; Target 26233; HLA-A*33:03; GLYATL3; ENSG00000203972; CTA
VANADLLNR

SEQ ID NO: 26234 - protein, 9 aa, Homo sapiens
  Table A; Target 26234; HLA-A*68:01; GLYATL3; ENSG00000203972; CTA
VANADLLNR

SEQ ID NO: 26235 - protein, 9 aa, Homo sapiens
  Table A; Target 26235; HLA-B*27:02; GLYATL3; ENSG00000203972; CTA
VANADLLNR

SEQ ID NO: 26236 - protein, 9 aa, Homo sapiens
  Table A; Target 26236; HLA-B*57:01; GLYATL3; ENSG00000203972; CTA
VANADLLNR

SEQ ID NO: 26237 - protein, 9 aa, Homo sapiens
  Table A; Target 26237; HLA-C*07:06; GLYATL3; ENSG00000203972; CTA
VANADLLNR

SEQ ID NO: 26238 - protein, 11 aa, Homo sapiens
  Table A; Target 26238; HLA-A*32:01; GLYATL3; ENSG00000203972; CTA
VANADLLNRTW

SEQ ID NO: 26239 - protein, 11 aa, Homo sapiens
  Table A; Target 26239; HLA-B*44:02; GLYATL3; ENSG00000203972; CTA
VANADLLNRTW

SEQ ID NO: 26240 - protein, 11 aa, Homo sapiens
  Table A; Target 26240; HLA-B*57:01; GLYATL3; ENSG00000203972; CTA
VANADLLNRTW

SEQ ID NO: 26241 - protein, 11 aa, Homo sapiens
  Table A; Target 26241; HLA-B*58:01; GLYATL3; ENSG00000203972; CTA
VANADLLNRTW

SEQ ID NO: 26242 - protein, 11 aa, Homo sapiens
  Table A; Target 26242; HLA-C*16:04; GLYATL3; ENSG00000203972; CTA
VANADLLNRTW

SEQ ID NO: 26243 - protein, 9 aa, Homo sapiens
  Table A; Target 26243; HLA-A*23:01; GLYATL3; ENSG00000203972; CTA
VANSKQLNI

SEQ ID NO: 26244 - protein, 9 aa, Homo sapiens
  Table A; Target 26244; HLA-A*24:02; GLYATL3; ENSG00000203972; CTA
VANSKQLNI

SEQ ID NO: 26245 - protein, 9 aa, Homo sapiens
  Table A; Target 26245; HLA-A*30:01; GLYATL3; ENSG00000203972; CTA
VANSKQLNI

SEQ ID NO: 26246 - protein, 9 aa, Homo sapiens
  Table A; Target 26246; HLA-A*32:01; GLYATL3; ENSG00000203972; CTA
VANSKQLNI

SEQ ID NO: 26247 - protein, 9 aa, Homo sapiens
  Table A; Target 26247; HLA-B*13:02; GLYATL3; ENSG00000203972; CTA
VANSKQLNI

SEQ ID NO: 26248 - protein, 9 aa, Homo sapiens
  Table A; Target 26248; HLA-B*51:01; GLYATL3; ENSG00000203972; CTA
VANSKQLNI

SEQ ID NO: 26249 - protein, 9 aa, Homo sapiens
  Table A; Target 26249; HLA-B*58:01; GLYATL3; ENSG00000203972; CTA
VANSKQLNI

SEQ ID NO: 26250 - protein, 9 aa, Homo sapiens
  Table A; Target 26250; HLA-C*02:02; GLYATL3; ENSG00000203972; CTA
VANSKQLNI

SEQ ID NO: 26251 - protein, 9 aa, Homo sapiens
  Table A; Target 26251; HLA-C*06:02; GLYATL3; ENSG00000203972; CTA
VANSKQLNI

SEQ ID NO: 26252 - protein, 9 aa, Homo sapiens
  Table A; Target 26252; HLA-C*12:03; GLYATL3; ENSG00000203972; CTA
VANSKQLNI

SEQ ID NO: 26253 - protein, 9 aa, Homo sapiens
  Table A; Target 26253; HLA-C*16:01; GLYATL3; ENSG00000203972; CTA
VANSKQLNI

SEQ ID NO: 26254 - protein, 9 aa, Homo sapiens
  Table A; Target 26254; HLA-C*16:02; GLYATL3; ENSG00000203972; CTA
VANSKQLNI

SEQ ID NO: 26255 - protein, 9 aa, Homo sapiens
  Table A; Target 26255; HLA-C*16:04; GLYATL3; ENSG00000203972; CTA
VANSKQLNI

SEQ ID NO: 26256 - protein, 9 aa, Homo sapiens
  Table A; Target 26256; HLA-A*29:02; GLYATL3; ENSG00000203972; CTA
VFYKDVRAY

SEQ ID NO: 26257 - protein, 9 aa, Homo sapiens
  Table A; Target 26257; HLA-A*30:02; GLYATL3; ENSG00000203972; CTA
VFYKDVRAY

SEQ ID NO: 26258 - protein, 9 aa, Homo sapiens
  Table A; Target 26258; HLA-B*15:03; GLYATL3; ENSG00000203972; CTA
VFYKDVRAY

SEQ ID NO: 26259 - protein, 10 aa, Homo sapiens
  Table A; Target 26259; HLA-A*31:01; GLYATL3; ENSG00000203972; CTA
VFYKDVRAYR

SEQ ID NO: 26260 - protein, 9 aa, Homo sapiens
  Table A; Target 26260; HLA-B*15:03; GLYATL3; ENSG00000203972; CTA
VHFSPVSSL

SEQ ID NO: 26261 - protein, 9 aa, Homo sapiens
  Table A; Target 26261; HLA-B*38:01; GLYATL3; ENSG00000203972; CTA
VHFSPVSSL

SEQ ID NO: 26262 - protein, 9 aa, Homo sapiens
  Table A; Target 26262; HLA-B*39:01; GLYATL3; ENSG00000203972; CTA
VHFSPVSSL

SEQ ID NO: 26263 - protein, 9 aa, Homo sapiens
  Table A; Target 26263; HLA-C*03:03; GLYATL3; ENSG00000203972; CTA
VHFSPVSSL

SEQ ID NO: 26264 - protein, 9 aa, Homo sapiens
  Table A; Target 26264; HLA-C*03:04; GLYATL3; ENSG00000203972; CTA
VHFSPVSSL

SEQ ID NO: 26265 - protein, 9 aa, Homo sapiens
  Table A; Target 26265; HLA-C*05:01; GLYATL3; ENSG00000203972; CTA
VHFSPVSSL

SEQ ID NO: 26266 - protein, 9 aa, Homo sapiens
  Table A; Target 26266; HLA-A*01:01; GLYATL3; ENSG00000203972; CTA
VLDDNTASI

SEQ ID NO: 26267 - protein, 9 aa, Homo sapiens
  Table A; Target 26267; HLA-A*02:01; GLYATL3; ENSG00000203972; CTA
VLDDNTASI

SEQ ID NO: 26268 - protein, 9 aa, Homo sapiens
  Table A; Target 26268; HLA-A*02:03; GLYATL3; ENSG00000203972; CTA
VLDDNTASI

SEQ ID NO: 26269 - protein, 9 aa, Homo sapiens
  Table A; Target 26269; HLA-A*02:07; GLYATL3; ENSG00000203972; CTA
VLDDNTASI

SEQ ID NO: 26270 - protein, 9 aa, Homo sapiens
  Table A; Target 26270; HLA-A*30:01; GLYATL3; ENSG00000203972; CTA
VLDDNTASI

SEQ ID NO: 26271 - protein, 9 aa, Homo sapiens
  Table A; Target 26271; HLA-A*32:01; GLYATL3; ENSG00000203972; CTA
VLDDNTASI

SEQ ID NO: 26272 - protein, 9 aa, Homo sapiens
  Table A; Target 26272; HLA-B*13:02; GLYATL3; ENSG00000203972; CTA
VLDDNTASI

SEQ ID NO: 26273 - protein, 9 aa, Homo sapiens
  Table A; Target 26273; HLA-B*38:01; GLYATL3; ENSG00000203972; CTA
VLDDNTASI

SEQ ID NO: 26274 - protein, 9 aa, Homo sapiens
  Table A; Target 26274; HLA-B*39:01; GLYATL3; ENSG00000203972; CTA
VLDDNTASI

SEQ ID NO: 26275 - protein, 9 aa, Homo sapiens
  Table A; Target 26275; HLA-B*55:01; GLYATL3; ENSG00000203972; CTA
VLDDNTASI

SEQ ID NO: 26276 - protein, 9 aa, Homo sapiens
  Table A; Target 26276; HLA-C*04:01; GLYATL3; ENSG00000203972; CTA
VLDDNTASI

SEQ ID NO: 26277 - protein, 9 aa, Homo sapiens
  Table A; Target 26277; HLA-C*05:01; GLYATL3; ENSG00000203972; CTA
VLDDNTASI

SEQ ID NO: 26278 - protein, 11 aa, Homo sapiens
  Table A; Target 26278; HLA-A*02:01; GLYATL3; ENSG00000203972; CTA
VLDDNTASISL

SEQ ID NO: 26279 - protein, 11 aa, Homo sapiens
  Table A; Target 26279; HLA-A*02:07; GLYATL3; ENSG00000203972; CTA
VLDDNTASISL

SEQ ID NO: 26280 - protein, 11 aa, Homo sapiens
  Table A; Target 26280; HLA-B*38:01; GLYATL3; ENSG00000203972; CTA
VLDDNTASISL

SEQ ID NO: 26281 - protein, 11 aa, Homo sapiens
  Table A; Target 26281; HLA-B*55:01; GLYATL3; ENSG00000203972; CTA
VLDDNTASISL

SEQ ID NO: 26282 - protein, 11 aa, Homo sapiens
  Table A; Target 26282; HLA-C*05:01; GLYATL3; ENSG00000203972; CTA
VLDDNTASISL

SEQ ID NO: 26283 - protein, 11 aa, Homo sapiens
  Table A; Target 26283; HLA-A*02:01; GLYATL3; ENSG00000203972; CTA
VLDSWPDFKAV

SEQ ID NO: 26284 - protein, 11 aa, Homo sapiens
  Table A; Target 26284; HLA-A*02:07; GLYATL3; ENSG00000203972; CTA
VLDSWPDFKAV

SEQ ID NO: 26285 - protein, 10 aa, Homo sapiens
  Table A; Target 26285; HLA-A*32:01; GLYATL3; ENSG00000203972; CTA
VMNINRGNPF

SEQ ID NO: 26286 - protein, 10 aa, Homo sapiens
  Table A; Target 26286; HLA-B*46:01; GLYATL3; ENSG00000203972; CTA
VMNINRGNPF

SEQ ID NO: 26287 - protein, 10 aa, Homo sapiens
  Table A; Target 26287; HLA-C*16:01; GLYATL3; ENSG00000203972; CTA
VMNINRGNPF

SEQ ID NO: 26288 - protein, 9 aa, Homo sapiens
  Table A; Target 26288; HLA-A*03:01; GLYATL3; ENSG00000203972; CTA
VSKAVANSK

SEQ ID NO: 26289 - protein, 9 aa, Homo sapiens
  Table A; Target 26289; HLA-A*03:02; GLYATL3; ENSG00000203972; CTA
VSKAVANSK

SEQ ID NO: 26290 - protein, 9 aa, Homo sapiens
  Table A; Target 26290; HLA-A*31:01; GLYATL3; ENSG00000203972; CTA
VSKAVANSK

SEQ ID NO: 26291 - protein, 9 aa, Homo sapiens
  Table A; Target 26291; HLA-B*46:01; GLYATL3; ENSG00000203972; CTA
VSKAVANSK

SEQ ID NO: 26292 - protein, 9 aa, Homo sapiens
  Table A; Target 26292; HLA-B*58:01; GLYATL3; ENSG00000203972; CTA
VSKAVANSK

SEQ ID NO: 26293 - protein, 9 aa, Homo sapiens
  Table A; Target 26293; HLA-A*32:01; GLYATL3; ENSG00000203972; CTA
VSSLPDTSF

SEQ ID NO: 26294 - protein, 9 aa, Homo sapiens
  Table A; Target 26294; HLA-B*15:01; GLYATL3; ENSG00000203972; CTA
VSSLPDTSF

SEQ ID NO: 26295 - protein, 9 aa, Homo sapiens
  Table A; Target 26295; HLA-B*46:01; GLYATL3; ENSG00000203972; CTA
VSSLPDTSF

SEQ ID NO: 26296 - protein, 9 aa, Homo sapiens
  Table A; Target 26296; HLA-B*58:01; GLYATL3; ENSG00000203972; CTA
VSSLPDTSF

SEQ ID NO: 26297 - protein, 9 aa, Homo sapiens
  Table A; Target 26297; HLA-C*03:03; GLYATL3; ENSG00000203972; CTA
VSSLPDTSF

SEQ ID NO: 26298 - protein, 9 aa, Homo sapiens
  Table A; Target 26298; HLA-C*03:04; GLYATL3; ENSG00000203972; CTA
VSSLPDTSF

SEQ ID NO: 26299 - protein, 9 aa, Homo sapiens
  Table A; Target 26299; HLA-C*05:01; GLYATL3; ENSG00000203972; CTA
VSSLPDTSF

SEQ ID NO: 26300 - protein, 9 aa, Homo sapiens
  Table A; Target 26300; HLA-C*16:01; GLYATL3; ENSG00000203972; CTA
VSSLPDTSF

SEQ ID NO: 26301 - protein, 11 aa, Homo sapiens
  Table A; Target 26301; HLA-A*11:01; GLYATL3; ENSG00000203972; CTA
VSSLPDTSFLK

SEQ ID NO: 26302 - protein, 8 aa, Homo sapiens
  Table A; Target 26302; HLA-A*23:01; GLYATL3; ENSG00000203972; CTA
VYGAVMNI

SEQ ID NO: 26303 - protein, 8 aa, Homo sapiens
  Table A; Target 26303; HLA-A*24:02; GLYATL3; ENSG00000203972; CTA
VYGAVMNI

SEQ ID NO: 26304 - protein, 8 aa, Homo sapiens
  Table A; Target 26304; HLA-A*32:01; GLYATL3; ENSG00000203972; CTA
VYGAVMNI

SEQ ID NO: 26305 - protein, 8 aa, Homo sapiens
  Table A; Target 26305; HLA-C*06:02; GLYATL3; ENSG00000203972; CTA
VYGAVMNI

SEQ ID NO: 26306 - protein, 8 aa, Homo sapiens
  Table A; Target 26306; HLA-C*07:01; GLYATL3; ENSG00000203972; CTA
VYGAVMNI

SEQ ID NO: 26307 - protein, 8 aa, Homo sapiens
  Table A; Target 26307; HLA-C*07:02; GLYATL3; ENSG00000203972; CTA
VYGAVMNI

SEQ ID NO: 26308 - protein, 8 aa, Homo sapiens
  Table A; Target 26308; HLA-C*14:02; GLYATL3; ENSG00000203972; CTA
VYGAVMNI

SEQ ID NO: 26309 - protein, 10 aa, Homo sapiens
  Table A; Target 26309; HLA-A*31:01; GLYATL3; ENSG00000203972; CTA
VYGAVMNINR

SEQ ID NO: 26310 - protein, 10 aa, Homo sapiens
  Table A; Target 26310; HLA-A*33:01; GLYATL3; ENSG00000203972; CTA
VYGAVMNINR

SEQ ID NO: 26311 - protein, 10 aa, Homo sapiens
  Table A; Target 26311; HLA-A*33:03; GLYATL3; ENSG00000203972; CTA
VYGAVMNINR

SEQ ID NO: 26312 - protein, 10 aa, Homo sapiens
  Table A; Target 26312; HLA-B*27:02; GLYATL3; ENSG00000203972; CTA
VYGAVMNINR

SEQ ID NO: 26313 - protein, 8 aa, Homo sapiens
  Table A; Target 26313; HLA-B*08:01; GLYATL3; ENSG00000203972; CTA
WPDFKAVI

SEQ ID NO: 26314 - protein, 9 aa, Homo sapiens
  Table A; Target 26314; HLA-C*07:01; GLYATL3; ENSG00000203972; CTA
YDVSKAVAN

SEQ ID NO: 26315 - protein, 9 aa, Homo sapiens
  Table A; Target 26315; HLA-A*33:03; GLYATL3; ENSG00000203972; CTA
YGAVMNINR

SEQ ID NO: 26316 - protein, 9 aa, Homo sapiens
  Table A; Target 26316; HLA-A*68:01; GLYATL3; ENSG00000203972; CTA
YGAVMNINR

SEQ ID NO: 26317 - protein, 9 aa, Homo sapiens
  Table A; Target 26317; HLA-B*27:02; GLYATL3; ENSG00000203972; CTA
YGAVMNINR

SEQ ID NO: 26318 - protein, 9 aa, Homo sapiens
  Table A; Target 26318; HLA-C*07:06; GLYATL3; ENSG00000203972; CTA
YGAVMNINR

SEQ ID NO: 26319 - protein, 9 aa, Homo sapiens
  Table A; Target 26319; HLA-A*25:01; GLYATL3; ENSG00000203972; CTA
YIANLISCF

SEQ ID NO: 26320 - protein, 9 aa, Homo sapiens
  Table A; Target 26320; HLA-A*26:01; GLYATL3; ENSG00000203972; CTA
YIANLISCF

SEQ ID NO: 26321 - protein, 9 aa, Homo sapiens
  Table A; Target 26321; HLA-B*15:01; GLYATL3; ENSG00000203972; CTA
YIANLISCF

SEQ ID NO: 26322 - protein, 9 aa, Homo sapiens
  Table A; Target 26322; HLA-B*46:01; GLYATL3; ENSG00000203972; CTA
YIANLISCF

SEQ ID NO: 26323 - protein, 9 aa, Homo sapiens
  Table A; Target 26323; HLA-C*02:02; GLYATL3; ENSG00000203972; CTA
YIANLISCF

SEQ ID NO: 26324 - protein, 9 aa, Homo sapiens
  Table A; Target 26324; HLA-C*07:04; GLYATL3; ENSG00000203972; CTA
YIANLISCF

SEQ ID NO: 26325 - protein, 9 aa, Homo sapiens
  Table A; Target 26325; HLA-A*01:01; GLYATL3; ENSG00000203972; CTA
YTNAYAVFY

SEQ ID NO: 26326 - protein, 9 aa, Homo sapiens
  Table A; Target 26326; HLA-A*03:01; GLYATL3; ENSG00000203972; CTA
YTNAYAVFY

SEQ ID NO: 26327 - protein, 9 aa, Homo sapiens
  Table A; Target 26327; HLA-A*11:01; GLYATL3; ENSG00000203972; CTA
YTNAYAVFY

SEQ ID NO: 26328 - protein, 9 aa, Homo sapiens
  Table A; Target 26328; HLA-A*26:01; GLYATL3; ENSG00000203972; CTA
YTNAYAVFY

SEQ ID NO: 26329 - protein, 9 aa, Homo sapiens
  Table A; Target 26329; HLA-A*29:02; GLYATL3; ENSG00000203972; CTA
YTNAYAVFY

SEQ ID NO: 26330 - protein, 9 aa, Homo sapiens
  Table A; Target 26330; HLA-A*30:02; GLYATL3; ENSG00000203972; CTA
YTNAYAVFY

SEQ ID NO: 26331 - protein, 9 aa, Homo sapiens
  Table A; Target 26331; HLA-A*32:01; GLYATL3; ENSG00000203972; CTA
YTNAYAVFY

SEQ ID NO: 26332 - protein, 9 aa, Homo sapiens
  Table A; Target 26332; HLA-A*33:01; GLYATL3; ENSG00000203972; CTA
YTNAYAVFY

SEQ ID NO: 26333 - protein, 9 aa, Homo sapiens
  Table A; Target 26333; HLA-B*35:01; GLYATL3; ENSG00000203972; CTA
YTNAYAVFY

SEQ ID NO: 26334 - protein, 9 aa, Homo sapiens
  Table A; Target 26334; HLA-B*57:01; GLYATL3; ENSG00000203972; CTA
YTNAYAVFY

SEQ ID NO: 26335 - protein, 9 aa, Homo sapiens
  Table A; Target 26335; HLA-C*02:02; GLYATL3; ENSG00000203972; CTA
YTNAYAVFY

SEQ ID NO: 26336 - protein, 9 aa, Homo sapiens
  Table A; Target 26336; HLA-C*07:01; GLYATL3; ENSG00000203972; CTA
YTNAYAVFY

SEQ ID NO: 26337 - protein, 9 aa, Homo sapiens
  Table A; Target 26337; HLA-C*07:04; GLYATL3; ENSG00000203972; CTA
YTNAYAVFY

SEQ ID NO: 26338 - protein, 9 aa, Homo sapiens
  Table A; Target 26338; HLA-C*12:03; GLYATL3; ENSG00000203972; CTA
YTNAYAVFY

SEQ ID NO: 26339 - protein, 9 aa, Homo sapiens
  Table A; Target 26339; HLA-C*16:02; GPR143; ENSG00000101850; TAA
AAEGAHPSP

SEQ ID NO: 26340 - protein, 10 aa, Homo sapiens
  Table A; Target 26340; HLA-B*40:01; GPR143; ENSG00000101850; TAA
AAEGAHPSPL

SEQ ID NO: 26341 - protein, 10 aa, Homo sapiens
  Table A; Target 26341; HLA-C*03:03; GPR143; ENSG00000101850; TAA
AAEGAHPSPL

SEQ ID NO: 26342 - protein, 10 aa, Homo sapiens
  Table A; Target 26342; HLA-C*03:04; GPR143; ENSG00000101850; TAA
AAEGAHPSPL

SEQ ID NO: 26343 - protein, 10 aa, Homo sapiens
  Table A; Target 26343; HLA-C*05:01; GPR143; ENSG00000101850; TAA
AAEGAHPSPL

SEQ ID NO: 26344 - protein, 10 aa, Homo sapiens
  Table A; Target 26344; HLA-C*07:04; GPR143; ENSG00000101850; TAA
AAEGAHPSPL

SEQ ID NO: 26345 - protein, 9 aa, Homo sapiens
  Table A; Target 26345; HLA-B*07:02; GPR143; ENSG00000101850; TAA
AAFCVGSAM

SEQ ID NO: 26346 - protein, 9 aa, Homo sapiens
  Table A; Target 26346; HLA-B*15:03; GPR143; ENSG00000101850; TAA
AAFCVGSAM

SEQ ID NO: 26347 - protein, 9 aa, Homo sapiens
  Table A; Target 26347; HLA-B*46:01; GPR143; ENSG00000101850; TAA
AAFCVGSAM

SEQ ID NO: 26348 - protein, 9 aa, Homo sapiens
  Table A; Target 26348; HLA-C*01:02; GPR143; ENSG00000101850; TAA
AAFCVGSAM

SEQ ID NO: 26349 - protein, 9 aa, Homo sapiens
  Table A; Target 26349; HLA-C*02:02; GPR143; ENSG00000101850; TAA
AAFCVGSAM

SEQ ID NO: 26350 - protein, 9 aa, Homo sapiens
  Table A; Target 26350; HLA-C*03:03; GPR143; ENSG00000101850; TAA
AAFCVGSAM

SEQ ID NO: 26351 - protein, 9 aa, Homo sapiens
  Table A; Target 26351; HLA-C*03:04; GPR143; ENSG00000101850; TAA
AAFCVGSAM

SEQ ID NO: 26352 - protein, 9 aa, Homo sapiens
  Table A; Target 26352; HLA-C*16:01; GPR143; ENSG00000101850; TAA
AAFCVGSAM

SEQ ID NO: 26353 - protein, 9 aa, Homo sapiens
  Table A; Target 26353; HLA-C*16:04; GPR143; ENSG00000101850; TAA
AAFCVGSAM

SEQ ID NO: 26354 - protein, 9 aa, Homo sapiens
  Table A; Target 26354; HLA-A*02:01; GPR143; ENSG00000101850; TAA
AAMLYYPSV

SEQ ID NO: 26355 - protein, 9 aa, Homo sapiens
  Table A; Target 26355; HLA-A*02:04; GPR143; ENSG00000101850; TAA
AAMLYYPSV

SEQ ID NO: 26356 - protein, 9 aa, Homo sapiens
  Table A; Target 26356; HLA-A*02:07; GPR143; ENSG00000101850; TAA
AAMLYYPSV

SEQ ID NO: 26357 - protein, 9 aa, Homo sapiens
  Table A; Target 26357; HLA-B*13:02; GPR143; ENSG00000101850; TAA
AAMLYYPSV

SEQ ID NO: 26358 - protein, 9 aa, Homo sapiens
  Table A; Target 26358; HLA-B*46:01; GPR143; ENSG00000101850; TAA
AAMLYYPSV

SEQ ID NO: 26359 - protein, 9 aa, Homo sapiens
  Table A; Target 26359; HLA-B*51:01; GPR143; ENSG00000101850; TAA
AAMLYYPSV

SEQ ID NO: 26360 - protein, 9 aa, Homo sapiens
  Table A; Target 26360; HLA-B*54:01; GPR143; ENSG00000101850; TAA
AAMLYYPSV

SEQ ID NO: 26361 - protein, 9 aa, Homo sapiens
  Table A; Target 26361; HLA-B*56:01; GPR143; ENSG00000101850; TAA
AAMLYYPSV

SEQ ID NO: 26362 - protein, 9 aa, Homo sapiens
  Table A; Target 26362; HLA-C*01:02; GPR143; ENSG00000101850; TAA
AAMLYYPSV

SEQ ID NO: 26363 - protein, 9 aa, Homo sapiens
  Table A; Target 26363; HLA-C*02:02; GPR143; ENSG00000101850; TAA
AAMLYYPSV

SEQ ID NO: 26364 - protein, 9 aa, Homo sapiens
  Table A; Target 26364; HLA-C*03:04; GPR143; ENSG00000101850; TAA
AAMLYYPSV

SEQ ID NO: 26365 - protein, 9 aa, Homo sapiens
  Table A; Target 26365; HLA-C*16:04; GPR143; ENSG00000101850; TAA
AAMLYYPSV

SEQ ID NO: 26366 - protein, 11 aa, Homo sapiens
  Table A; Target 26366; HLA-A*11:01; GPR143; ENSG00000101850; TAA
AAMLYYPSVSR

SEQ ID NO: 26367 - protein, 11 aa, Homo sapiens
  Table A; Target 26367; HLA-A*31:01; GPR143; ENSG00000101850; TAA
AAMLYYPSVSR

SEQ ID NO: 26368 - protein, 9 aa, Homo sapiens
  Table A; Target 26368; HLA-A*23:01; GPR143; ENSG00000101850; TAA
AATQLVLSF

SEQ ID NO: 26369 - protein, 9 aa, Homo sapiens
  Table A; Target 26369; HLA-A*24:02; GPR143; ENSG00000101850; TAA
AATQLVLSF

SEQ ID NO: 26370 - protein, 9 aa, Homo sapiens
  Table A; Target 26370; HLA-A*25:01; GPR143; ENSG00000101850; TAA
AATQLVLSF

SEQ ID NO: 26371 - protein, 9 aa, Homo sapiens
  Table A; Target 26371; HLA-A*26:01; GPR143; ENSG00000101850; TAA
AATQLVLSF

SEQ ID NO: 26372 - protein, 9 aa, Homo sapiens
  Table A; Target 26372; HLA-A*29:02; GPR143; ENSG00000101850; TAA
AATQLVLSF

SEQ ID NO: 26373 - protein, 9 aa, Homo sapiens
  Table A; Target 26373; HLA-A*30:02; GPR143; ENSG00000101850; TAA
AATQLVLSF

SEQ ID NO: 26374 - protein, 9 aa, Homo sapiens
  Table A; Target 26374; HLA-A*32:01; GPR143; ENSG00000101850; TAA
AATQLVLSF

SEQ ID NO: 26375 - protein, 9 aa, Homo sapiens
  Table A; Target 26375; HLA-B*15:01; GPR143; ENSG00000101850; TAA
AATQLVLSF

SEQ ID NO: 26376 - protein, 9 aa, Homo sapiens
  Table A; Target 26376; HLA-B*15:03; GPR143; ENSG00000101850; TAA
AATQLVLSF

SEQ ID NO: 26377 - protein, 9 aa, Homo sapiens
  Table A; Target 26377; HLA-B*27:02; GPR143; ENSG00000101850; TAA
AATQLVLSF

SEQ ID NO: 26378 - protein, 9 aa, Homo sapiens
  Table A; Target 26378; HLA-B*35:01; GPR143; ENSG00000101850; TAA
AATQLVLSF

SEQ ID NO: 26379 - protein, 9 aa, Homo sapiens
  Table A; Target 26379; HLA-B*37:01; GPR143; ENSG00000101850; TAA
AATQLVLSF

SEQ ID NO: 26380 - protein, 9 aa, Homo sapiens
  Table A; Target 26380; HLA-B*44:02; GPR143; ENSG00000101850; TAA
AATQLVLSF

SEQ ID NO: 26381 - protein, 9 aa, Homo sapiens
  Table A; Target 26381; HLA-B*44:03; GPR143; ENSG00000101850; TAA
AATQLVLSF

SEQ ID NO: 26382 - protein, 9 aa, Homo sapiens
  Table A; Target 26382; HLA-B*46:01; GPR143; ENSG00000101850; TAA
AATQLVLSF

SEQ ID NO: 26383 - protein, 9 aa, Homo sapiens
  Table A; Target 26383; HLA-B*57:01; GPR143; ENSG00000101850; TAA
AATQLVLSF

SEQ ID NO: 26384 - protein, 9 aa, Homo sapiens
  Table A; Target 26384; HLA-B*58:01; GPR143; ENSG00000101850; TAA
AATQLVLSF

SEQ ID NO: 26385 - protein, 9 aa, Homo sapiens
  Table A; Target 26385; HLA-C*02:02; GPR143; ENSG00000101850; TAA
AATQLVLSF

SEQ ID NO: 26386 - protein, 9 aa, Homo sapiens
  Table A; Target 26386; HLA-C*03:03; GPR143; ENSG00000101850; TAA
AATQLVLSF

SEQ ID NO: 26387 - protein, 9 aa, Homo sapiens
  Table A; Target 26387; HLA-C*03:04; GPR143; ENSG00000101850; TAA
AATQLVLSF

SEQ ID NO: 26388 - protein, 9 aa, Homo sapiens
  Table A; Target 26388; HLA-C*07:06; GPR143; ENSG00000101850; TAA
AATQLVLSF

SEQ ID NO: 26389 - protein, 9 aa, Homo sapiens
  Table A; Target 26389; HLA-C*12:03; GPR143; ENSG00000101850; TAA
AATQLVLSF

SEQ ID NO: 26390 - protein, 9 aa, Homo sapiens
  Table A; Target 26390; HLA-C*16:01; GPR143; ENSG00000101850; TAA
AATQLVLSF

SEQ ID NO: 26391 - protein, 9 aa, Homo sapiens
  Table A; Target 26391; HLA-C*16:02; GPR143; ENSG00000101850; TAA
AATQLVLSF

SEQ ID NO: 26392 - protein, 9 aa, Homo sapiens
  Table A; Target 26392; HLA-C*16:04; GPR143; ENSG00000101850; TAA
AATQLVLSF

SEQ ID NO: 26393 - protein, 9 aa, Homo sapiens
  Table A; Target 26393; HLA-A*30:01; GPR143; ENSG00000101850; TAA
AEGAHPSPL

SEQ ID NO: 26394 - protein, 9 aa, Homo sapiens
  Table A; Target 26394; HLA-B*07:02; GPR143; ENSG00000101850; TAA
AEGAHPSPL

SEQ ID NO: 26395 - protein, 9 aa, Homo sapiens
  Table A; Target 26395; HLA-B*27:02; GPR143; ENSG00000101850; TAA
AEGAHPSPL

SEQ ID NO: 26396 - protein, 9 aa, Homo sapiens
  Table A; Target 26396; HLA-B*37:01; GPR143; ENSG00000101850; TAA
AEGAHPSPL

SEQ ID NO: 26397 - protein, 9 aa, Homo sapiens
  Table A; Target 26397; HLA-B*40:01; GPR143; ENSG00000101850; TAA
AEGAHPSPL

SEQ ID NO: 26398 - protein, 9 aa, Homo sapiens
  Table A; Target 26398; HLA-B*40:02; GPR143; ENSG00000101850; TAA
AEGAHPSPL

SEQ ID NO: 26399 - protein, 9 aa, Homo sapiens
  Table A; Target 26399; HLA-B*44:02; GPR143; ENSG00000101850; TAA
AEGAHPSPL

SEQ ID NO: 26400 - protein, 9 aa, Homo sapiens
  Table A; Target 26400; HLA-B*44:03; GPR143; ENSG00000101850; TAA
AEGAHPSPL

SEQ ID NO: 26401 - protein, 9 aa, Homo sapiens
  Table A; Target 26401; HLA-B*49:01; GPR143; ENSG00000101850; TAA
AEGAHPSPL

SEQ ID NO: 26402 - protein, 9 aa, Homo sapiens
  Table A; Target 26402; HLA-C*02:02; GPR143; ENSG00000101850; TAA
AEGAHPSPL

SEQ ID NO: 26403 - protein, 9 aa, Homo sapiens
  Table A; Target 26403; HLA-C*07:02; GPR143; ENSG00000101850; TAA
AEGAHPSPL

SEQ ID NO: 26404 - protein, 9 aa, Homo sapiens
  Table A; Target 26404; HLA-C*07:04; GPR143; ENSG00000101850; TAA
AEGAHPSPL

SEQ ID NO: 26405 - protein, 9 aa, Homo sapiens
  Table A; Target 26405; HLA-C*12:03; GPR143; ENSG00000101850; TAA
AEGAHPSPL

SEQ ID NO: 26406 - protein, 9 aa, Homo sapiens
  Table A; Target 26406; HLA-C*16:04; GPR143; ENSG00000101850; TAA
AEGAHPSPL

SEQ ID NO: 26407 - protein, 10 aa, Homo sapiens
  Table A; Target 26407; HLA-A*30:01; GPR143; ENSG00000101850; TAA
AEGAHPSPLM

SEQ ID NO: 26408 - protein, 10 aa, Homo sapiens
  Table A; Target 26408; HLA-B*27:02; GPR143; ENSG00000101850; TAA
AEGAHPSPLM

SEQ ID NO: 26409 - protein, 10 aa, Homo sapiens
  Table A; Target 26409; HLA-B*40:01; GPR143; ENSG00000101850; TAA
AEGAHPSPLM

SEQ ID NO: 26410 - protein, 10 aa, Homo sapiens
  Table A; Target 26410; HLA-B*40:02; GPR143; ENSG00000101850; TAA
AEGAHPSPLM

SEQ ID NO: 26411 - protein, 10 aa, Homo sapiens
  Table A; Target 26411; HLA-B*44:02; GPR143; ENSG00000101850; TAA
AEGAHPSPLM

SEQ ID NO: 26412 - protein, 10 aa, Homo sapiens
  Table A; Target 26412; HLA-B*44:03; GPR143; ENSG00000101850; TAA
AEGAHPSPLM

SEQ ID NO: 26413 - protein, 10 aa, Homo sapiens
  Table A; Target 26413; HLA-B*49:01; GPR143; ENSG00000101850; TAA
AEGAHPSPLM

SEQ ID NO: 26414 - protein, 10 aa, Homo sapiens
  Table A; Target 26414; HLA-C*16:04; GPR143; ENSG00000101850; TAA
AEGAHPSPLM

SEQ ID NO: 26415 - protein, 8 aa, Homo sapiens
  Table A; Target 26415; HLA-C*14:02; GPR143; ENSG00000101850; TAA
AFCVGSAM

SEQ ID NO: 26416 - protein, 9 aa, Homo sapiens
  Table A; Target 26416; HLA-A*01:01; GPR143; ENSG00000101850; TAA
AGLSTILLY

SEQ ID NO: 26417 - protein, 9 aa, Homo sapiens
  Table A; Target 26417; HLA-A*03:01; GPR143; ENSG00000101850; TAA
AGLSTILLY

SEQ ID NO: 26418 - protein, 9 aa, Homo sapiens
  Table A; Target 26418; HLA-A*03:02; GPR143; ENSG00000101850; TAA
AGLSTILLY

SEQ ID NO: 26419 - protein, 9 aa, Homo sapiens
  Table A; Target 26419; HLA-A*11:01; GPR143; ENSG00000101850; TAA
AGLSTILLY

SEQ ID NO: 26420 - protein, 9 aa, Homo sapiens
  Table A; Target 26420; HLA-A*29:02; GPR143; ENSG00000101850; TAA
AGLSTILLY

SEQ ID NO: 26421 - protein, 9 aa, Homo sapiens
  Table A; Target 26421; HLA-A*30:02; GPR143; ENSG00000101850; TAA
AGLSTILLY

SEQ ID NO: 26422 - protein, 9 aa, Homo sapiens
  Table A; Target 26422; HLA-B*15:01; GPR143; ENSG00000101850; TAA
AGLSTILLY

SEQ ID NO: 26423 - protein, 9 aa, Homo sapiens
  Table A; Target 26423; HLA-B*15:03; GPR143; ENSG00000101850; TAA
AGLSTILLY

SEQ ID NO: 26424 - protein, 9 aa, Homo sapiens
  Table A; Target 26424; HLA-B*35:01; GPR143; ENSG00000101850; TAA
AGLSTILLY

SEQ ID NO: 26425 - protein, 9 aa, Homo sapiens
  Table A; Target 26425; HLA-B*44:02; GPR143; ENSG00000101850; TAA
AGLSTILLY

SEQ ID NO: 26426 - protein, 9 aa, Homo sapiens
  Table A; Target 26426; HLA-B*44:03; GPR143; ENSG00000101850; TAA
AGLSTILLY

SEQ ID NO: 26427 - protein, 9 aa, Homo sapiens
  Table A; Target 26427; HLA-B*46:01; GPR143; ENSG00000101850; TAA
AGLSTILLY

SEQ ID NO: 26428 - protein, 9 aa, Homo sapiens
  Table A; Target 26428; HLA-B*57:01; GPR143; ENSG00000101850; TAA
AGLSTILLY

SEQ ID NO: 26429 - protein, 9 aa, Homo sapiens
  Table A; Target 26429; HLA-B*58:01; GPR143; ENSG00000101850; TAA
AGLSTILLY

SEQ ID NO: 26430 - protein, 9 aa, Homo sapiens
  Table A; Target 26430; HLA-C*02:02; GPR143; ENSG00000101850; TAA
AGLSTILLY

SEQ ID NO: 26431 - protein, 9 aa, Homo sapiens
  Table A; Target 26431; HLA-C*07:01; GPR143; ENSG00000101850; TAA
AGLSTILLY

SEQ ID NO: 26432 - protein, 9 aa, Homo sapiens
  Table A; Target 26432; HLA-C*07:04; GPR143; ENSG00000101850; TAA
AGLSTILLY

SEQ ID NO: 26433 - protein, 9 aa, Homo sapiens
  Table A; Target 26433; HLA-C*12:03; GPR143; ENSG00000101850; TAA
AGLSTILLY

SEQ ID NO: 26434 - protein, 9 aa, Homo sapiens
  Table A; Target 26434; HLA-C*16:04; GPR143; ENSG00000101850; TAA
AGLSTILLY

SEQ ID NO: 26435 - protein, 9 aa, Homo sapiens
  Table A; Target 26435; HLA-A*26:01; GPR143; ENSG00000101850; TAA
AIPHYVTMY

SEQ ID NO: 26436 - protein, 9 aa, Homo sapiens
  Table A; Target 26436; HLA-A*29:02; GPR143; ENSG00000101850; TAA
AIPHYVTMY

SEQ ID NO: 26437 - protein, 9 aa, Homo sapiens
  Table A; Target 26437; HLA-B*15:01; GPR143; ENSG00000101850; TAA
AIPHYVTMY

SEQ ID NO: 26438 - protein, 9 aa, Homo sapiens
  Table A; Target 26438; HLA-B*46:01; GPR143; ENSG00000101850; TAA
AIPHYVTMY

SEQ ID NO: 26439 - protein, 9 aa, Homo sapiens
  Table A; Target 26439; HLA-C*07:04; GPR143; ENSG00000101850; TAA
AIPHYVTMY

SEQ ID NO: 26440 - protein, 8 aa, Homo sapiens
  Table A; Target 26440; HLA-A*02:01; GPR143; ENSG00000101850; TAA
ALGLLQLL

SEQ ID NO: 26441 - protein, 8 aa, Homo sapiens
  Table A; Target 26441; HLA-A*02:04; GPR143; ENSG00000101850; TAA
ALGLLQLL

SEQ ID NO: 26442 - protein, 8 aa, Homo sapiens
  Table A; Target 26442; HLA-C*01:02; GPR143; ENSG00000101850; TAA
ALPTHGDL

SEQ ID NO: 26443 - protein, 10 aa, Homo sapiens
  Table A; Target 26443; HLA-A*03:01; GPR143; ENSG00000101850; TAA
AMLYYPSVSR

SEQ ID NO: 26444 - protein, 10 aa, Homo sapiens
  Table A; Target 26444; HLA-A*31:01; GPR143; ENSG00000101850; TAA
AMLYYPSVSR

SEQ ID NO: 26445 - protein, 8 aa, Homo sapiens
  Table A; Target 26445; HLA-A*29:02; GPR143; ENSG00000101850; TAA
AMWIQLLY

SEQ ID NO: 26446 - protein, 8 aa, Homo sapiens
  Table A; Target 26446; HLA-A*02:03; GPR143; ENSG00000101850; TAA
ASGKVSQV

SEQ ID NO: 26447 - protein, 8 aa, Homo sapiens
  Table A; Target 26447; HLA-B*58:01; GPR143; ENSG00000101850; TAA
ASPRLGTF

SEQ ID NO: 26448 - protein, 8 aa, Homo sapiens
  Table A; Target 26448; HLA-C*01:02; GPR143; ENSG00000101850; TAA
ASPRLGTF

SEQ ID NO: 26449 - protein, 8 aa, Homo sapiens
  Table A; Target 26449; HLA-C*04:01; GPR143; ENSG00000101850; TAA
ASPRLGTF

SEQ ID NO: 26450 - protein, 8 aa, Homo sapiens
  Table A; Target 26450; HLA-B*37:01; GPR143; ENSG00000101850; TAA
ATQLVLSF

SEQ ID NO: 26451 - protein, 11 aa, Homo sapiens
  Table A; Target 26451; HLA-A*11:01; GPR143; ENSG00000101850; TAA
ATQLVLSFQPR

SEQ ID NO: 26452 - protein, 11 aa, Homo sapiens
  Table A; Target 26452; HLA-A*31:01; GPR143; ENSG00000101850; TAA
ATQLVLSFQPR

SEQ ID NO: 26453 - protein, 11 aa, Homo sapiens
  Table A; Target 26453; HLA-A*33:01; GPR143; ENSG00000101850; TAA
ATQLVLSFQPR

SEQ ID NO: 26454 - protein, 9 aa, Homo sapiens
  Table A; Target 26454; HLA-A*03:01; GPR143; ENSG00000101850; TAA
ATSPPASVR

SEQ ID NO: 26455 - protein, 9 aa, Homo sapiens
  Table A; Target 26455; HLA-A*03:02; GPR143; ENSG00000101850; TAA
ATSPPASVR

SEQ ID NO: 26456 - protein, 9 aa, Homo sapiens
  Table A; Target 26456; HLA-A*11:01; GPR143; ENSG00000101850; TAA
ATSPPASVR

SEQ ID NO: 26457 - protein, 9 aa, Homo sapiens
  Table A; Target 26457; HLA-A*30:02; GPR143; ENSG00000101850; TAA
ATSPPASVR

SEQ ID NO: 26458 - protein, 9 aa, Homo sapiens
  Table A; Target 26458; HLA-A*31:01; GPR143; ENSG00000101850; TAA
ATSPPASVR

SEQ ID NO: 26459 - protein, 9 aa, Homo sapiens
  Table A; Target 26459; HLA-A*32:01; GPR143; ENSG00000101850; TAA
ATSPPASVR

SEQ ID NO: 26460 - protein, 9 aa, Homo sapiens
  Table A; Target 26460; HLA-A*33:01; GPR143; ENSG00000101850; TAA
ATSPPASVR

SEQ ID NO: 26461 - protein, 9 aa, Homo sapiens
  Table A; Target 26461; HLA-A*33:03; GPR143; ENSG00000101850; TAA
ATSPPASVR

SEQ ID NO: 26462 - protein, 9 aa, Homo sapiens
  Table A; Target 26462; HLA-A*68:01; GPR143; ENSG00000101850; TAA
ATSPPASVR

SEQ ID NO: 26463 - protein, 9 aa, Homo sapiens
  Table A; Target 26463; HLA-B*27:05; GPR143; ENSG00000101850; TAA
ATSPPASVR

SEQ ID NO: 26464 - protein, 9 aa, Homo sapiens
  Table A; Target 26464; HLA-C*07:06; GPR143; ENSG00000101850; TAA
ATSPPASVR

SEQ ID NO: 26465 - protein, 11 aa, Homo sapiens
  Table A; Target 26465; HLA-C*16:01; GPR143; ENSG00000101850; TAA
ATSPPASVRIL

SEQ ID NO: 26466 - protein, 11 aa, Homo sapiens
  Table A; Target 26466; HLA-C*16:02; GPR143; ENSG00000101850; TAA
ATSPPASVRIL

SEQ ID NO: 26467 - protein, 9 aa, Homo sapiens
  Table A; Target 26467; HLA-A*03:01; GPR143; ENSG00000101850; TAA
AVASLLKGR

SEQ ID NO: 26468 - protein, 9 aa, Homo sapiens
  Table A; Target 26468; HLA-A*03:02; GPR143; ENSG00000101850; TAA
AVASLLKGR

SEQ ID NO: 26469 - protein, 9 aa, Homo sapiens
  Table A; Target 26469; HLA-A*11:01; GPR143; ENSG00000101850; TAA
AVASLLKGR

SEQ ID NO: 26470 - protein, 9 aa, Homo sapiens
  Table A; Target 26470; HLA-A*31:01; GPR143; ENSG00000101850; TAA
AVASLLKGR

SEQ ID NO: 26471 - protein, 9 aa, Homo sapiens
  Table A; Target 26471; HLA-A*33:01; GPR143; ENSG00000101850; TAA
AVASLLKGR

SEQ ID NO: 26472 - protein, 9 aa, Homo sapiens
  Table A; Target 26472; HLA-A*33:03; GPR143; ENSG00000101850; TAA
AVASLLKGR

SEQ ID NO: 26473 - protein, 9 aa, Homo sapiens
  Table A; Target 26473; HLA-A*68:01; GPR143; ENSG00000101850; TAA
AVASLLKGR

SEQ ID NO: 26474 - protein, 9 aa, Homo sapiens
  Table A; Target 26474; HLA-C*07:06; GPR143; ENSG00000101850; TAA
AVASLLKGR

SEQ ID NO: 26475 - protein, 8 aa, Homo sapiens
  Table A; Target 26475; HLA-A*02:07; GPR143; ENSG00000101850; TAA
AVDAYLVI

SEQ ID NO: 26476 - protein, 8 aa, Homo sapiens
  Table A; Target 26476; HLA-B*13:02; GPR143; ENSG00000101850; TAA
AVDAYLVI

SEQ ID NO: 26477 - protein, 8 aa, Homo sapiens
  Table A; Target 26477; HLA-C*05:01; GPR143; ENSG00000101850; TAA
AVDAYLVI

SEQ ID NO: 26478 - protein, 9 aa, Homo sapiens
  Table A; Target 26478; HLA-A*03:01; GPR143; ENSG00000101850; TAA
AVDAYLVIR

SEQ ID NO: 26479 - protein, 9 aa, Homo sapiens
  Table A; Target 26479; HLA-A*03:02; GPR143; ENSG00000101850; TAA
AVDAYLVIR

SEQ ID NO: 26480 - protein, 9 aa, Homo sapiens
  Table A; Target 26480; HLA-A*11:01; GPR143; ENSG00000101850; TAA
AVDAYLVIR

SEQ ID NO: 26481 - protein, 9 aa, Homo sapiens
  Table A; Target 26481; HLA-A*31:01; GPR143; ENSG00000101850; TAA
AVDAYLVIR

SEQ ID NO: 26482 - protein, 9 aa, Homo sapiens
  Table A; Target 26482; HLA-A*33:01; GPR143; ENSG00000101850; TAA
AVDAYLVIR

SEQ ID NO: 26483 - protein, 9 aa, Homo sapiens
  Table A; Target 26483; HLA-A*33:03; GPR143; ENSG00000101850; TAA
AVDAYLVIR

SEQ ID NO: 26484 - protein, 10 aa, Homo sapiens
  Table A; Target 26484; HLA-A*31:01; GPR143; ENSG00000101850; TAA
AVDAYLVIRR

SEQ ID NO: 26485 - protein, 10 aa, Homo sapiens
  Table A; Target 26485; HLA-A*68:01; GPR143; ENSG00000101850; TAA
AVDAYLVIRR

SEQ ID NO: 26486 - protein, 8 aa, Homo sapiens
  Table A; Target 26486; HLA-B*57:01; GPR143; ENSG00000101850; TAA
AVIKIRFF

SEQ ID NO: 26487 - protein, 9 aa, Homo sapiens
  Table A; Target 26487; HLA-A*03:01; GPR143; ENSG00000101850; TAA
AVIKIRFFK

SEQ ID NO: 26488 - protein, 9 aa, Homo sapiens
  Table A; Target 26488; HLA-B*49:01; GPR143; ENSG00000101850; TAA
CERGLDHAI

SEQ ID NO: 26489 - protein, 10 aa, Homo sapiens
  Table A; Target 26489; HLA-B*07:02; GPR143; ENSG00000101850; TAA
CPTRDAATQL

SEQ ID NO: 26490 - protein, 10 aa, Homo sapiens
  Table A; Target 26490; HLA-C*07:02; GPR143; ENSG00000101850; TAA
CPTRDAATQL

SEQ ID NO: 26491 - protein, 9 aa, Homo sapiens
  Table A; Target 26491; HLA-A*11:01; GPR143; ENSG00000101850; TAA
CSLGFQSPR

SEQ ID NO: 26492 - protein, 9 aa, Homo sapiens
  Table A; Target 26492; HLA-A*31:01; GPR143; ENSG00000101850; TAA
CSLGFQSPR

SEQ ID NO: 26493 - protein, 9 aa, Homo sapiens
  Table A; Target 26493; HLA-A*01:01; GPR143; ENSG00000101850; TAA
CVEGAAMLY

SEQ ID NO: 26494 - protein, 9 aa, Homo sapiens
  Table A; Target 26494; HLA-A*03:02; GPR143; ENSG00000101850; TAA
CVEGAAMLY

SEQ ID NO: 26495 - protein, 9 aa, Homo sapiens
  Table A; Target 26495; HLA-A*11:01; GPR143; ENSG00000101850; TAA
CVEGAAMLY

SEQ ID NO: 26496 - protein, 9 aa, Homo sapiens
  Table A; Target 26496; HLA-A*26:01; GPR143; ENSG00000101850; TAA
CVEGAAMLY

SEQ ID NO: 26497 - protein, 9 aa, Homo sapiens
  Table A; Target 26497; HLA-A*29:02; GPR143; ENSG00000101850; TAA
CVEGAAMLY

SEQ ID NO: 26498 - protein, 9 aa, Homo sapiens
  Table A; Target 26498; HLA-A*30:02; GPR143; ENSG00000101850; TAA
CVEGAAMLY

SEQ ID NO: 26499 - protein, 9 aa, Homo sapiens
  Table A; Target 26499; HLA-B*15:01; GPR143; ENSG00000101850; TAA
CVEGAAMLY

SEQ ID NO: 26500 - protein, 9 aa, Homo sapiens
  Table A; Target 26500; HLA-B*15:03; GPR143; ENSG00000101850; TAA
CVEGAAMLY

SEQ ID NO: 26501 - protein, 9 aa, Homo sapiens
  Table A; Target 26501; HLA-B*35:01; GPR143; ENSG00000101850; TAA
CVEGAAMLY

SEQ ID NO: 26502 - protein, 9 aa, Homo sapiens
  Table A; Target 26502; HLA-C*01:02; GPR143; ENSG00000101850; TAA
CVEGAAMLY

SEQ ID NO: 26503 - protein, 9 aa, Homo sapiens
  Table A; Target 26503; HLA-C*03:03; GPR143; ENSG00000101850; TAA
CVEGAAMLY

SEQ ID NO: 26504 - protein, 9 aa, Homo sapiens
  Table A; Target 26504; HLA-C*07:01; GPR143; ENSG00000101850; TAA
CVEGAAMLY

SEQ ID NO: 26505 - protein, 9 aa, Homo sapiens
  Table A; Target 26505; HLA-C*07:04; GPR143; ENSG00000101850; TAA
CVEGAAMLY

SEQ ID NO: 26506 - protein, 9 aa, Homo sapiens
  Table A; Target 26506; HLA-C*12:03; GPR143; ENSG00000101850; TAA
CVEGAAMLY

SEQ ID NO: 26507 - protein, 9 aa, Homo sapiens
  Table A; Target 26507; HLA-C*14:02; GPR143; ENSG00000101850; TAA
CVEGAAMLY

SEQ ID NO: 26508 - protein, 9 aa, Homo sapiens
  Table A; Target 26508; HLA-C*16:02; GPR143; ENSG00000101850; TAA
CVEGAAMLY

SEQ ID NO: 26509 - protein, 10 aa, Homo sapiens
  Table A; Target 26509; HLA-A*01:01; GPR143; ENSG00000101850; TAA
CVEGAAMLYY

SEQ ID NO: 26510 - protein, 10 aa, Homo sapiens
  Table A; Target 26510; HLA-A*29:02; GPR143; ENSG00000101850; TAA
CVEGAAMLYY

SEQ ID NO: 26511 - protein, 10 aa, Homo sapiens
  Table A; Target 26511; HLA-A*30:02; GPR143; ENSG00000101850; TAA
CVEGAAMLYY

SEQ ID NO: 26512 - protein, 9 aa, Homo sapiens
  Table A; Target 26512; HLA-A*24:02; GPR143; ENSG00000101850; TAA
CYAVDAYLV

SEQ ID NO: 26513 - protein, 8 aa, Homo sapiens
  Table A; Target 26513; HLA-B*08:01; GPR143; ENSG00000101850; TAA
DAATQLVL

SEQ ID NO: 26514 - protein, 8 aa, Homo sapiens
  Table A; Target 26514; HLA-B*27:05; GPR143; ENSG00000101850; TAA
DAATQLVL

SEQ ID NO: 26515 - protein, 8 aa, Homo sapiens
  Table A; Target 26515; HLA-B*35:01; GPR143; ENSG00000101850; TAA
DAATQLVL

SEQ ID NO: 26516 - protein, 8 aa, Homo sapiens
  Table A; Target 26516; HLA-B*35:03; GPR143; ENSG00000101850; TAA
DAATQLVL

SEQ ID NO: 26517 - protein, 8 aa, Homo sapiens
  Table A; Target 26517; HLA-B*51:01; GPR143; ENSG00000101850; TAA
DAATQLVL

SEQ ID NO: 26518 - protein, 8 aa, Homo sapiens
  Table A; Target 26518; HLA-C*03:03; GPR143; ENSG00000101850; TAA
DAATQLVL

SEQ ID NO: 26519 - protein, 8 aa, Homo sapiens
  Table A; Target 26519; HLA-C*03:04; GPR143; ENSG00000101850; TAA
DAATQLVL

SEQ ID NO: 26520 - protein, 9 aa, Homo sapiens
  Table A; Target 26520; HLA-A*33:01; GPR143; ENSG00000101850; TAA
DAATQLVLS

SEQ ID NO: 26521 - protein, 10 aa, Homo sapiens
  Table A; Target 26521; HLA-A*25:01; GPR143; ENSG00000101850; TAA
DAATQLVLSF

SEQ ID NO: 26522 - protein, 10 aa, Homo sapiens
  Table A; Target 26522; HLA-A*26:01; GPR143; ENSG00000101850; TAA
DAATQLVLSF

SEQ ID NO: 26523 - protein, 10 aa, Homo sapiens
  Table A; Target 26523; HLA-A*68:01; GPR143; ENSG00000101850; TAA
DAATQLVLSF

SEQ ID NO: 26524 - protein, 10 aa, Homo sapiens
  Table A; Target 26524; HLA-B*18:01; GPR143; ENSG00000101850; TAA
DAATQLVLSF

SEQ ID NO: 26525 - protein, 10 aa, Homo sapiens
  Table A; Target 26525; HLA-B*35:01; GPR143; ENSG00000101850; TAA
DAATQLVLSF

SEQ ID NO: 26526 - protein, 10 aa, Homo sapiens
  Table A; Target 26526; HLA-C*07:06; GPR143; ENSG00000101850; TAA
DAATQLVLSF

SEQ ID NO: 26527 - protein, 9 aa, Homo sapiens
  Table A; Target 26527; HLA-A*33:01; GPR143; ENSG00000101850; TAA
DASTIEIHT

SEQ ID NO: 26528 - protein, 9 aa, Homo sapiens
  Table A; Target 26528; HLA-A*68:01; GPR143; ENSG00000101850; TAA
DASTIEIHT

SEQ ID NO: 26529 - protein, 9 aa, Homo sapiens
  Table A; Target 26529; HLA-A*68:02; GPR143; ENSG00000101850; TAA
DASTIEIHT

SEQ ID NO: 26530 - protein, 9 aa, Homo sapiens
  Table A; Target 26530; HLA-C*12:03; GPR143; ENSG00000101850; TAA
DASTIEIHT

SEQ ID NO: 26531 - protein, 10 aa, Homo sapiens
  Table A; Target 26531; HLA-A*25:01; GPR143; ENSG00000101850; TAA
DASTIEIHTA

SEQ ID NO: 26532 - protein, 10 aa, Homo sapiens
  Table A; Target 26532; HLA-A*33:01; GPR143; ENSG00000101850; TAA
DASTIEIHTA

SEQ ID NO: 26533 - protein, 10 aa, Homo sapiens
  Table A; Target 26533; HLA-A*33:03; GPR143; ENSG00000101850; TAA
DASTIEIHTA

SEQ ID NO: 26534 - protein, 10 aa, Homo sapiens
  Table A; Target 26534; HLA-A*68:01; GPR143; ENSG00000101850; TAA
DASTIEIHTA

SEQ ID NO: 26535 - protein, 10 aa, Homo sapiens
  Table A; Target 26535; HLA-B*54:01; GPR143; ENSG00000101850; TAA
DASTIEIHTA

SEQ ID NO: 26536 - protein, 10 aa, Homo sapiens
  Table A; Target 26536; HLA-C*07:06; GPR143; ENSG00000101850; TAA
DASTIEIHTA

SEQ ID NO: 26537 - protein, 11 aa, Homo sapiens
  Table A; Target 26537; HLA-A*33:01; GPR143; ENSG00000101850; TAA
DASTIEIHTAS

SEQ ID NO: 26538 - protein, 8 aa, Homo sapiens
  Table A; Target 26538; HLA-A*33:01; GPR143; ENSG00000101850; TAA
DAYLVIRR

SEQ ID NO: 26539 - protein, 8 aa, Homo sapiens
  Table A; Target 26539; HLA-A*33:03; GPR143; ENSG00000101850; TAA
DAYLVIRR

SEQ ID NO: 26540 - protein, 8 aa, Homo sapiens
  Table A; Target 26540; HLA-A*68:01; GPR143; ENSG00000101850; TAA
DAYLVIRR

SEQ ID NO: 26541 - protein, 8 aa, Homo sapiens
  Table A; Target 26541; HLA-B*08:01; GPR143; ENSG00000101850; TAA
DAYLVIRR

SEQ ID NO: 26542 - protein, 8 aa, Homo sapiens
  Table A; Target 26542; HLA-B*51:01; GPR143; ENSG00000101850; TAA
DAYLVIRR

SEQ ID NO: 26543 - protein, 8 aa, Homo sapiens
  Table A; Target 26543; HLA-B*54:01; GPR143; ENSG00000101850; TAA
DAYLVIRR

SEQ ID NO: 26544 - protein, 8 aa, Homo sapiens
  Table A; Target 26544; HLA-C*07:06; GPR143; ENSG00000101850; TAA
DAYLVIRR

SEQ ID NO: 26545 - protein, 9 aa, Homo sapiens
  Table A; Target 26545; HLA-A*33:01; GPR143; ENSG00000101850; TAA
DAYLVIRRS

SEQ ID NO: 26546 - protein, 9 aa, Homo sapiens
  Table A; Target 26546; HLA-B*51:01; GPR143; ENSG00000101850; TAA
DAYLVIRRS

SEQ ID NO: 26547 - protein, 10 aa, Homo sapiens
  Table A; Target 26547; HLA-B*51:01; GPR143; ENSG00000101850; TAA
DAYLVIRRSA

SEQ ID NO: 26548 - protein, 10 aa, Homo sapiens
  Table A; Target 26548; HLA-B*54:01; GPR143; ENSG00000101850; TAA
DAYLVIRRSA

SEQ ID NO: 26549 - protein, 8 aa, Homo sapiens
  Table A; Target 26549; HLA-B*18:01; GPR143; ENSG00000101850; TAA
DEALSMLS

SEQ ID NO: 26550 - protein, 9 aa, Homo sapiens
  Table A; Target 26550; HLA-B*18:01; GPR143; ENSG00000101850; TAA
DEALSMLSE

SEQ ID NO: 26551 - protein, 8 aa, Homo sapiens
  Table A; Target 26551; HLA-B*38:01; GPR143; ENSG00000101850; TAA
DHAIPHYV

SEQ ID NO: 26552 - protein, 8 aa, Homo sapiens
  Table A; Target 26552; HLA-B*39:01; GPR143; ENSG00000101850; TAA
DHAIPHYV

SEQ ID NO: 26553 - protein, 10 aa, Homo sapiens
  Table A; Target 26553; HLA-B*38:01; GPR143; ENSG00000101850; TAA
DHAIPHYVTM

SEQ ID NO: 26554 - protein, 10 aa, Homo sapiens
  Table A; Target 26554; HLA-B*39:01; GPR143; ENSG00000101850; TAA
DHAIPHYVTM

SEQ ID NO: 26555 - protein, 10 aa, Homo sapiens
  Table A; Target 26555; HLA-A*26:01; GPR143; ENSG00000101850; TAA
DINGGSLKPV

SEQ ID NO: 26556 - protein, 11 aa, Homo sapiens
  Table A; Target 26556; HLA-A*33:01; GPR143; ENSG00000101850; TAA
DINGGSLKPVR

SEQ ID NO: 26557 - protein, 11 aa, Homo sapiens
  Table A; Target 26557; HLA-A*33:03; GPR143; ENSG00000101850; TAA
DINGGSLKPVR

SEQ ID NO: 26558 - protein, 11 aa, Homo sapiens
  Table A; Target 26558; HLA-A*68:01; GPR143; ENSG00000101850; TAA
DINGGSLKPVR

SEQ ID NO: 26559 - protein, 10 aa, Homo sapiens
  Table A; Target 26559; HLA-B*07:02; GPR143; ENSG00000101850; TAA
DPALPTHGDL

SEQ ID NO: 26560 - protein, 10 aa, Homo sapiens
  Table A; Target 26560; HLA-B*35:03; GPR143; ENSG00000101850; TAA
DPALPTHGDL

SEQ ID NO: 26561 - protein, 10 aa, Homo sapiens
  Table A; Target 26561; HLA-C*07:02; GPR143; ENSG00000101850; TAA
DPALPTHGDL

SEQ ID NO: 26562 - protein, 9 aa, Homo sapiens
  Table A; Target 26562; HLA-A*26:01; GPR143; ENSG00000101850; TAA
EGAHPSPLM

SEQ ID NO: 26563 - protein, 9 aa, Homo sapiens
  Table A; Target 26563; HLA-B*35:01; GPR143; ENSG00000101850; TAA
EGAHPSPLM

SEQ ID NO: 26564 - protein, 9 aa, Homo sapiens
  Table A; Target 26564; HLA-B*35:03; GPR143; ENSG00000101850; TAA
EGAHPSPLM

SEQ ID NO: 26565 - protein, 9 aa, Homo sapiens
  Table A; Target 26565; HLA-B*51:01; GPR143; ENSG00000101850; TAA
EGAHPSPLM

SEQ ID NO: 26566 - protein, 9 aa, Homo sapiens
  Table A; Target 26566; HLA-C*03:03; GPR143; ENSG00000101850; TAA
EGAHPSPLM

SEQ ID NO: 26567 - protein, 9 aa, Homo sapiens
  Table A; Target 26567; HLA-C*07:02; GPR143; ENSG00000101850; TAA
EGAHPSPLM

SEQ ID NO: 26568 - protein, 9 aa, Homo sapiens
  Table A; Target 26568; HLA-C*16:01; GPR143; ENSG00000101850; TAA
EGAHPSPLM

SEQ ID NO: 26569 - protein, 9 aa, Homo sapiens
  Table A; Target 26569; HLA-C*03:03; GPR143; ENSG00000101850; TAA
EGDPALPTH

SEQ ID NO: 26570 - protein, 10 aa, Homo sapiens
  Table A; Target 26570; HLA-B*07:02; GPR143; ENSG00000101850; TAA
EGSDASTIEI

SEQ ID NO: 26571 - protein, 11 aa, Homo sapiens
  Table A; Target 26571; HLA-A*33:03; GPR143; ENSG00000101850; TAA
EIHTASESCNK

SEQ ID NO: 26572 - protein, 11 aa, Homo sapiens
  Table A; Target 26572; HLA-A*68:01; GPR143; ENSG00000101850; TAA
EIHTASESCNK

SEQ ID NO: 26573 - protein, 9 aa, Homo sapiens
  Table A; Target 26573; HLA-A*68:02; GPR143; ENSG00000101850; TAA
EIWPAAFCV

SEQ ID NO: 26574 - protein, 11 aa, Homo sapiens
  Table A; Target 26574; HLA-A*33:01; GPR143; ENSG00000101850; TAA
ESLTTSAAEGA

SEQ ID NO: 26575 - protein, 9 aa, Homo sapiens
  Table A; Target 26575; HLA-B*54:01; GPR143; ENSG00000101850; TAA
FIMGILNPA

SEQ ID NO: 26576 - protein, 9 aa, Homo sapiens
  Table A; Target 26576; HLA-B*56:01; GPR143; ENSG00000101850; TAA
FIMGILNPA

SEQ ID NO: 26577 - protein, 8 aa, Homo sapiens
  Table A; Target 26577; HLA-A*29:02; GPR143; ENSG00000101850; TAA
FLLSLAFY

SEQ ID NO: 26578 - protein, 8 aa, Homo sapiens
  Table A; Target 26578; HLA-B*35:01; GPR143; ENSG00000101850; TAA
FPNFVDSV

SEQ ID NO: 26579 - protein, 8 aa, Homo sapiens
  Table A; Target 26579; HLA-B*35:03; GPR143; ENSG00000101850; TAA
FPNFVDSV

SEQ ID NO: 26580 - protein, 8 aa, Homo sapiens
  Table A; Target 26580; HLA-B*51:01; GPR143; ENSG00000101850; TAA
FPNFVDSV

SEQ ID NO: 26581 - protein, 8 aa, Homo sapiens
  Table A; Target 26581; HLA-B*54:01; GPR143; ENSG00000101850; TAA
FPNFVDSV

SEQ ID NO: 26582 - protein, 8 aa, Homo sapiens
  Table A; Target 26582; HLA-B*55:01; GPR143; ENSG00000101850; TAA
FPNFVDSV

SEQ ID NO: 26583 - protein, 8 aa, Homo sapiens
  Table A; Target 26583; HLA-B*56:01; GPR143; ENSG00000101850; TAA
FPNFVDSV

SEQ ID NO: 26584 - protein, 8 aa, Homo sapiens
  Table A; Target 26584; HLA-A*02:03; GPR143; ENSG00000101850; TAA
FQKTVTAV

SEQ ID NO: 26585 - protein, 8 aa, Homo sapiens
  Table A; Target 26585; HLA-A*30:01; GPR143; ENSG00000101850; TAA
FQKTVTAV

SEQ ID NO: 26586 - protein, 8 aa, Homo sapiens
  Table A; Target 26586; HLA-B*08:01; GPR143; ENSG00000101850; TAA
FQKTVTAV

SEQ ID NO: 26587 - protein, 8 aa, Homo sapiens
  Table A; Target 26587; HLA-B*13:02; GPR143; ENSG00000101850; TAA
FQKTVTAV

SEQ ID NO: 26588 - protein, 8 aa, Homo sapiens
  Table A; Target 26588; HLA-B*15:01; GPR143; ENSG00000101850; TAA
FQKTVTAV

SEQ ID NO: 26589 - protein, 8 aa, Homo sapiens
  Table A; Target 26589; HLA-B*15:03; GPR143; ENSG00000101850; TAA
FQKTVTAV

SEQ ID NO: 26590 - protein, 8 aa, Homo sapiens
  Table A; Target 26590; HLA-B*40:02; GPR143; ENSG00000101850; TAA
FQKTVTAV

SEQ ID NO: 26591 - protein, 8 aa, Homo sapiens
  Table A; Target 26591; HLA-B*46:01; GPR143; ENSG00000101850; TAA
FQKTVTAV

SEQ ID NO: 26592 - protein, 8 aa, Homo sapiens
  Table A; Target 26592; HLA-C*02:02; GPR143; ENSG00000101850; TAA
FQKTVTAV

SEQ ID NO: 26593 - protein, 8 aa, Homo sapiens
  Table A; Target 26593; HLA-C*07:04; GPR143; ENSG00000101850; TAA
FQKTVTAV

SEQ ID NO: 26594 - protein, 8 aa, Homo sapiens
  Table A; Target 26594; HLA-C*12:03; GPR143; ENSG00000101850; TAA
FQKTVTAV

SEQ ID NO: 26595 - protein, 8 aa, Homo sapiens
  Table A; Target 26595; HLA-C*14:02; GPR143; ENSG00000101850; TAA
FQKTVTAV

SEQ ID NO: 26596 - protein, 9 aa, Homo sapiens
  Table A; Target 26596; HLA-B*46:01; GPR143; ENSG00000101850; TAA
FQKTVTAVA

SEQ ID NO: 26597 - protein, 9 aa, Homo sapiens
  Table A; Target 26597; HLA-A*02:04; GPR143; ENSG00000101850; TAA
FQPRAFHAL

SEQ ID NO: 26598 - protein, 9 aa, Homo sapiens
  Table A; Target 26598; HLA-A*02:07; GPR143; ENSG00000101850; TAA
FQPRAFHAL

SEQ ID NO: 26599 - protein, 9 aa, Homo sapiens
  Table A; Target 26599; HLA-A*24:02; GPR143; ENSG00000101850; TAA
FQPRAFHAL

SEQ ID NO: 26600 - protein, 9 aa, Homo sapiens
  Table A; Target 26600; HLA-A*31:01; GPR143; ENSG00000101850; TAA
FQPRAFHAL

SEQ ID NO: 26601 - protein, 9 aa, Homo sapiens
  Table A; Target 26601; HLA-A*68:02; GPR143; ENSG00000101850; TAA
FQPRAFHAL

SEQ ID NO: 26602 - protein, 8 aa, Homo sapiens
  Table A; Target 26602; HLA-B*35:03; GPR143; ENSG00000101850; TAA
FVDSVSDM

SEQ ID NO: 26603 - protein, 8 aa, Homo sapiens
  Table A; Target 26603; HLA-B*39:01; GPR143; ENSG00000101850; TAA
FVDSVSDM

SEQ ID NO: 26604 - protein, 8 aa, Homo sapiens
  Table A; Target 26604; HLA-C*03:04; GPR143; ENSG00000101850; TAA
FVDSVSDM

SEQ ID NO: 26605 - protein, 8 aa, Homo sapiens
  Table A; Target 26605; HLA-C*04:01; GPR143; ENSG00000101850; TAA
FVDSVSDM

SEQ ID NO: 26606 - protein, 8 aa, Homo sapiens
  Table A; Target 26606; HLA-C*05:01; GPR143; ENSG00000101850; TAA
FVDSVSDM

SEQ ID NO: 26607 - protein, 8 aa, Homo sapiens
  Table A; Target 26607; HLA-C*07:04; GPR143; ENSG00000101850; TAA
FVDSVSDM

SEQ ID NO: 26608 - protein, 8 aa, Homo sapiens
  Table A; Target 26608; HLA-C*12:03; GPR143; ENSG00000101850; TAA
FVDSVSDM

SEQ ID NO: 26609 - protein, 9 aa, Homo sapiens
  Table A; Target 26609; HLA-A*24:02; GPR143; ENSG00000101850; TAA
FYGWTGCSL

SEQ ID NO: 26610 - protein, 9 aa, Homo sapiens
  Table A; Target 26610; HLA-C*14:02; GPR143; ENSG00000101850; TAA
FYGWTGCSL

SEQ ID NO: 26611 - protein, 9 aa, Homo sapiens
  Table A; Target 26611; HLA-A*23:01; GPR143; ENSG00000101850; TAA
FYLEMQTDI

SEQ ID NO: 26612 - protein, 9 aa, Homo sapiens
  Table A; Target 26612; HLA-A*24:02; GPR143; ENSG00000101850; TAA
FYLEMQTDI

SEQ ID NO: 26613 - protein, 9 aa, Homo sapiens
  Table A; Target 26613; HLA-A*29:02; GPR143; ENSG00000101850; TAA
FYLEMQTDI

SEQ ID NO: 26614 - protein, 9 aa, Homo sapiens
  Table A; Target 26614; HLA-B*35:03; GPR143; ENSG00000101850; TAA
FYLEMQTDI

SEQ ID NO: 26615 - protein, 9 aa, Homo sapiens
  Table A; Target 26615; HLA-C*04:01; GPR143; ENSG00000101850; TAA
FYLEMQTDI

SEQ ID NO: 26616 - protein, 9 aa, Homo sapiens
  Table A; Target 26616; HLA-C*07:01; GPR143; ENSG00000101850; TAA
FYLEMQTDI

SEQ ID NO: 26617 - protein, 9 aa, Homo sapiens
  Table A; Target 26617; HLA-C*14:02; GPR143; ENSG00000101850; TAA
FYLEMQTDI

SEQ ID NO: 26618 - protein, 8 aa, Homo sapiens
  Table A; Target 26618; HLA-B*15:03; GPR143; ENSG00000101850; TAA
GAHPSPLM

SEQ ID NO: 26619 - protein, 8 aa, Homo sapiens
  Table A; Target 26619; HLA-B*51:01; GPR143; ENSG00000101850; TAA
GAHPSPLM

SEQ ID NO: 26620 - protein, 8 aa, Homo sapiens
  Table A; Target 26620; HLA-B*58:01; GPR143; ENSG00000101850; TAA
GAHPSPLM

SEQ ID NO: 26621 - protein, 8 aa, Homo sapiens
  Table A; Target 26621; HLA-C*02:02; GPR143; ENSG00000101850; TAA
GAHPSPLM

SEQ ID NO: 26622 - protein, 8 aa, Homo sapiens
  Table A; Target 26622; HLA-C*03:04; GPR143; ENSG00000101850; TAA
GAHPSPLM

SEQ ID NO: 26623 - protein, 8 aa, Homo sapiens
  Table A; Target 26623; HLA-B*08:01; GPR143; ENSG00000101850; TAA
GAVIKIRF

SEQ ID NO: 26624 - protein, 9 aa, Homo sapiens
  Table A; Target 26624; HLA-B*57:01; GPR143; ENSG00000101850; TAA
GAVIKIRFF

SEQ ID NO: 26625 - protein, 9 aa, Homo sapiens
  Table A; Target 26625; HLA-A*29:02; GPR143; ENSG00000101850; TAA
GFLLSLAFY

SEQ ID NO: 26626 - protein, 9 aa, Homo sapiens
  Table A; Target 26626; HLA-A*32:01; GPR143; ENSG00000101850; TAA
GILNPAQGF

SEQ ID NO: 26627 - protein, 9 aa, Homo sapiens
  Table A; Target 26627; HLA-B*15:01; GPR143; ENSG00000101850; TAA
GILNPAQGF

SEQ ID NO: 26628 - protein, 11 aa, Homo sapiens
  Table A; Target 26628; HLA-A*02:04; GPR143; ENSG00000101850; TAA
GILNPAQGFLL

SEQ ID NO: 26629 - protein, 8 aa, Homo sapiens
  Table A; Target 26629; HLA-A*02:01; GPR143; ENSG00000101850; TAA
GLATLLCV

SEQ ID NO: 26630 - protein, 8 aa, Homo sapiens
  Table A; Target 26630; HLA-B*13:02; GPR143; ENSG00000101850; TAA
GLATLLCV

SEQ ID NO: 26631 - protein, 9 aa, Homo sapiens
  Table A; Target 26631; HLA-A*01:01; GPR143; ENSG00000101850; TAA
GLDHAIPHY

SEQ ID NO: 26632 - protein, 9 aa, Homo sapiens
  Table A; Target 26632; HLA-A*02:07; GPR143; ENSG00000101850; TAA
GLDHAIPHY

SEQ ID NO: 26633 - protein, 9 aa, Homo sapiens
  Table A; Target 26633; HLA-A*03:01; GPR143; ENSG00000101850; TAA
GLDHAIPHY

SEQ ID NO: 26634 - protein, 9 aa, Homo sapiens
  Table A; Target 26634; HLA-A*03:02; GPR143; ENSG00000101850; TAA
GLDHAIPHY

SEQ ID NO: 26635 - protein, 9 aa, Homo sapiens
  Table A; Target 26635; HLA-A*29:02; GPR143; ENSG00000101850; TAA
GLDHAIPHY

SEQ ID NO: 26636 - protein, 9 aa, Homo sapiens
  Table A; Target 26636; HLA-A*30:02; GPR143; ENSG00000101850; TAA
GLDHAIPHY

SEQ ID NO: 26637 - protein, 9 aa, Homo sapiens
  Table A; Target 26637; HLA-B*15:01; GPR143; ENSG00000101850; TAA
GLDHAIPHY

SEQ ID NO: 26638 - protein, 9 aa, Homo sapiens
  Table A; Target 26638; HLA-B*55:01; GPR143; ENSG00000101850; TAA
GLDHAIPHY

SEQ ID NO: 26639 - protein, 10 aa, Homo sapiens
  Table A; Target 26639; HLA-A*01:01; GPR143; ENSG00000101850; TAA
GLDHAIPHYV

SEQ ID NO: 26640 - protein, 10 aa, Homo sapiens
  Table A; Target 26640; HLA-A*02:01; GPR143; ENSG00000101850; TAA
GLDHAIPHYV

SEQ ID NO: 26641 - protein, 10 aa, Homo sapiens
  Table A; Target 26641; HLA-A*02:03; GPR143; ENSG00000101850; TAA
GLDHAIPHYV

SEQ ID NO: 26642 - protein, 10 aa, Homo sapiens
  Table A; Target 26642; HLA-A*02:04; GPR143; ENSG00000101850; TAA
GLDHAIPHYV

SEQ ID NO: 26643 - protein, 10 aa, Homo sapiens
  Table A; Target 26643; HLA-A*02:07; GPR143; ENSG00000101850; TAA
GLDHAIPHYV

SEQ ID NO: 26644 - protein, 10 aa, Homo sapiens
  Table A; Target 26644; HLA-B*55:01; GPR143; ENSG00000101850; TAA
GLDHAIPHYV

SEQ ID NO: 26645 - protein, 9 aa, Homo sapiens
  Table A; Target 26645; HLA-A*02:04; GPR143; ENSG00000101850; TAA
GLLQLLPGR

SEQ ID NO: 26646 - protein, 9 aa, Homo sapiens
  Table A; Target 26646; HLA-A*31:01; GPR143; ENSG00000101850; TAA
GLLQLLPGR

SEQ ID NO: 26647 - protein, 8 aa, Homo sapiens
  Table A; Target 26647; HLA-A*01:01; GPR143; ENSG00000101850; TAA
GLSTILLY

SEQ ID NO: 26648 - protein, 8 aa, Homo sapiens
  Table A; Target 26648; HLA-A*03:01; GPR143; ENSG00000101850; TAA
GLSTILLY

SEQ ID NO: 26649 - protein, 8 aa, Homo sapiens
  Table A; Target 26649; HLA-A*29:02; GPR143; ENSG00000101850; TAA
GLSTILLY

SEQ ID NO: 26650 - protein, 8 aa, Homo sapiens
  Table A; Target 26650; HLA-A*30:02; GPR143; ENSG00000101850; TAA
GLSTILLY

SEQ ID NO: 26651 - protein, 8 aa, Homo sapiens
  Table A; Target 26651; HLA-B*15:01; GPR143; ENSG00000101850; TAA
GLSTILLY

SEQ ID NO: 26652 - protein, 8 aa, Homo sapiens
  Table A; Target 26652; HLA-C*07:01; GPR143; ENSG00000101850; TAA
GLSTILLY

SEQ ID NO: 26653 - protein, 9 aa, Homo sapiens
  Table A; Target 26653; HLA-A*03:01; GPR143; ENSG00000101850; TAA
GLSTILLYH

SEQ ID NO: 26654 - protein, 9 aa, Homo sapiens
  Table A; Target 26654; HLA-A*03:02; GPR143; ENSG00000101850; TAA
GLSTILLYH

SEQ ID NO: 26655 - protein, 9 aa, Homo sapiens
  Table A; Target 26655; HLA-A*29:02; GPR143; ENSG00000101850; TAA
GLSTILLYH

SEQ ID NO: 26656 - protein, 10 aa, Homo sapiens
  Table A; Target 26656; HLA-A*02:04; GPR143; ENSG00000101850; TAA
GLSTILLYHI

SEQ ID NO: 26657 - protein, 9 aa, Homo sapiens
  Table A; Target 26657; HLA-A*32:01; GPR143; ENSG00000101850; TAA
GMVIRSTVW

SEQ ID NO: 26658 - protein, 9 aa, Homo sapiens
  Table A; Target 26658; HLA-B*15:03; GPR143; ENSG00000101850; TAA
GMVIRSTVW

SEQ ID NO: 26659 - protein, 9 aa, Homo sapiens
  Table A; Target 26659; HLA-B*44:02; GPR143; ENSG00000101850; TAA
GMVIRSTVW

SEQ ID NO: 26660 - protein, 9 aa, Homo sapiens
  Table A; Target 26660; HLA-B*44:03; GPR143; ENSG00000101850; TAA
GMVIRSTVW

SEQ ID NO: 26661 - protein, 9 aa, Homo sapiens
  Table A; Target 26661; HLA-B*57:01; GPR143; ENSG00000101850; TAA
GMVIRSTVW

SEQ ID NO: 26662 - protein, 9 aa, Homo sapiens
  Table A; Target 26662; HLA-B*58:01; GPR143; ENSG00000101850; TAA
GMVIRSTVW

SEQ ID NO: 26663 - protein, 9 aa, Homo sapiens
  Table A; Target 26663; HLA-B*56:01; GPR143; ENSG00000101850; TAA
GPGSPATSP

SEQ ID NO: 26664 - protein, 11 aa, Homo sapiens
  Table A; Target 26664; HLA-B*56:01; GPR143; ENSG00000101850; TAA
GPGSPATSPPA

SEQ ID NO: 26665 - protein, 10 aa, Homo sapiens
  Table A; Target 26665; HLA-B*13:02; GPR143; ENSG00000101850; TAA
GQTSDEALSM

SEQ ID NO: 26666 - protein, 10 aa, Homo sapiens
  Table A; Target 26666; HLA-B*39:01; GPR143; ENSG00000101850; TAA
GQTSDEALSM

SEQ ID NO: 26667 - protein, 11 aa, Homo sapiens
  Table A; Target 26667; HLA-B*13:02; GPR143; ENSG00000101850; TAA
GQTSDEALSML

SEQ ID NO: 26668 - protein, 11 aa, Homo sapiens
  Table A; Target 26668; HLA-B*27:05; GPR143; ENSG00000101850; TAA
GQTSDEALSML

SEQ ID NO: 26669 - protein, 11 aa, Homo sapiens
  Table A; Target 26669; HLA-B*39:01; GPR143; ENSG00000101850; TAA
GQTSDEALSML

SEQ ID NO: 26670 - protein, 11 aa, Homo sapiens
  Table A; Target 26670; HLA-B*27:05; GPR143; ENSG00000101850; TAA
GRQGIYTENER

SEQ ID NO: 26671 - protein, 10 aa, Homo sapiens
  Table A; Target 26671; HLA-A*01:01; GPR143; ENSG00000101850; TAA
GSAMWIQLLY

SEQ ID NO: 26672 - protein, 10 aa, Homo sapiens
  Table A; Target 26672; HLA-A*29:02; GPR143; ENSG00000101850; TAA
GSAMWIQLLY

SEQ ID NO: 26673 - protein, 9 aa, Homo sapiens
  Table A; Target 26673; HLA-A*01:01; GPR143; ENSG00000101850; TAA
GSDASTIEI

SEQ ID NO: 26674 - protein, 9 aa, Homo sapiens
  Table A; Target 26674; HLA-B*13:02; GPR143; ENSG00000101850; TAA
GSDASTIEI

SEQ ID NO: 26675 - protein, 9 aa, Homo sapiens
  Table A; Target 26675; HLA-B*38:01; GPR143; ENSG00000101850; TAA
GSDASTIEI

SEQ ID NO: 26676 - protein, 9 aa, Homo sapiens
  Table A; Target 26676; HLA-B*58:01; GPR143; ENSG00000101850; TAA
GSDASTIEI

SEQ ID NO: 26677 - protein, 9 aa, Homo sapiens
  Table A; Target 26677; HLA-C*05:01; GPR143; ENSG00000101850; TAA
GSDASTIEI

SEQ ID NO: 26678 - protein, 9 aa, Homo sapiens
  Table A; Target 26678; HLA-B*07:02; GPR143; ENSG00000101850; TAA
GSGGLRLAL

SEQ ID NO: 26679 - protein, 8 aa, Homo sapiens
  Table A; Target 26679; HLA-B*08:01; GPR143; ENSG00000101850; TAA
HAIPHYVT

SEQ ID NO: 26680 - protein, 9 aa, Homo sapiens
  Table A; Target 26680; HLA-A*23:01; GPR143; ENSG00000101850; TAA
HAIPHYVTM

SEQ ID NO: 26681 - protein, 9 aa, Homo sapiens
  Table A; Target 26681; HLA-A*25:01; GPR143; ENSG00000101850; TAA
HAIPHYVTM

SEQ ID NO: 26682 - protein, 9 aa, Homo sapiens
  Table A; Target 26682; HLA-A*26:01; GPR143; ENSG00000101850; TAA
HAIPHYVTM

SEQ ID NO: 26683 - protein, 9 aa, Homo sapiens
  Table A; Target 26683; HLA-A*30:01; GPR143; ENSG00000101850; TAA
HAIPHYVTM

SEQ ID NO: 26684 - protein, 9 aa, Homo sapiens
  Table A; Target 26684; HLA-A*32:01; GPR143; ENSG00000101850; TAA
HAIPHYVTM

SEQ ID NO: 26685 - protein, 9 aa, Homo sapiens
  Table A; Target 26685; HLA-A*68:01; GPR143; ENSG00000101850; TAA
HAIPHYVTM

SEQ ID NO: 26686 - protein, 9 aa, Homo sapiens
  Table A; Target 26686; HLA-A*68:02; GPR143; ENSG00000101850; TAA
HAIPHYVTM

SEQ ID NO: 26687 - protein, 9 aa, Homo sapiens
  Table A; Target 26687; HLA-B*07:02; GPR143; ENSG00000101850; TAA
HAIPHYVTM

SEQ ID NO: 26688 - protein, 9 aa, Homo sapiens
  Table A; Target 26688; HLA-B*08:01; GPR143; ENSG00000101850; TAA
HAIPHYVTM

SEQ ID NO: 26689 - protein, 9 aa, Homo sapiens
  Table A; Target 26689; HLA-B*15:01; GPR143; ENSG00000101850; TAA
HAIPHYVTM

SEQ ID NO: 26690 - protein, 9 aa, Homo sapiens
  Table A; Target 26690; HLA-B*15:03; GPR143; ENSG00000101850; TAA
HAIPHYVTM

SEQ ID NO: 26691 - protein, 9 aa, Homo sapiens
  Table A; Target 26691; HLA-B*18:01; GPR143; ENSG00000101850; TAA
HAIPHYVTM

SEQ ID NO: 26692 - protein, 9 aa, Homo sapiens
  Table A; Target 26692; HLA-B*35:01; GPR143; ENSG00000101850; TAA
HAIPHYVTM

SEQ ID NO: 26693 - protein, 9 aa, Homo sapiens
  Table A; Target 26693; HLA-B*35:03; GPR143; ENSG00000101850; TAA
HAIPHYVTM

SEQ ID NO: 26694 - protein, 9 aa, Homo sapiens
  Table A; Target 26694; HLA-B*38:01; GPR143; ENSG00000101850; TAA
HAIPHYVTM

SEQ ID NO: 26695 - protein, 9 aa, Homo sapiens
  Table A; Target 26695; HLA-B*39:01; GPR143; ENSG00000101850; TAA
HAIPHYVTM

SEQ ID NO: 26696 - protein, 9 aa, Homo sapiens
  Table A; Target 26696; HLA-B*40:01; GPR143; ENSG00000101850; TAA
HAIPHYVTM

SEQ ID NO: 26697 - protein, 9 aa, Homo sapiens
  Table A; Target 26697; HLA-B*46:01; GPR143; ENSG00000101850; TAA
HAIPHYVTM

SEQ ID NO: 26698 - protein, 9 aa, Homo sapiens
  Table A; Target 26698; HLA-B*51:01; GPR143; ENSG00000101850; TAA
HAIPHYVTM

SEQ ID NO: 26699 - protein, 9 aa, Homo sapiens
  Table A; Target 26699; HLA-B*54:01; GPR143; ENSG00000101850; TAA
HAIPHYVTM

SEQ ID NO: 26700 - protein, 9 aa, Homo sapiens
  Table A; Target 26700; HLA-B*55:01; GPR143; ENSG00000101850; TAA
HAIPHYVTM

SEQ ID NO: 26701 - protein, 9 aa, Homo sapiens
  Table A; Target 26701; HLA-B*57:01; GPR143; ENSG00000101850; TAA
HAIPHYVTM

SEQ ID NO: 26702 - protein, 9 aa, Homo sapiens
  Table A; Target 26702; HLA-B*58:01; GPR143; ENSG00000101850; TAA
HAIPHYVTM

SEQ ID NO: 26703 - protein, 9 aa, Homo sapiens
  Table A; Target 26703; HLA-C*01:02; GPR143; ENSG00000101850; TAA
HAIPHYVTM

SEQ ID NO: 26704 - protein, 9 aa, Homo sapiens
  Table A; Target 26704; HLA-C*02:02; GPR143; ENSG00000101850; TAA
HAIPHYVTM

SEQ ID NO: 26705 - protein, 9 aa, Homo sapiens
  Table A; Target 26705; HLA-C*03:03; GPR143; ENSG00000101850; TAA
HAIPHYVTM

SEQ ID NO: 26706 - protein, 9 aa, Homo sapiens
  Table A; Target 26706; HLA-C*03:04; GPR143; ENSG00000101850; TAA
HAIPHYVTM

SEQ ID NO: 26707 - protein, 9 aa, Homo sapiens
  Table A; Target 26707; HLA-C*05:01; GPR143; ENSG00000101850; TAA
HAIPHYVTM

SEQ ID NO: 26708 - protein, 9 aa, Homo sapiens
  Table A; Target 26708; HLA-C*07:04; GPR143; ENSG00000101850; TAA
HAIPHYVTM

SEQ ID NO: 26709 - protein, 9 aa, Homo sapiens
  Table A; Target 26709; HLA-C*07:06; GPR143; ENSG00000101850; TAA
HAIPHYVTM

SEQ ID NO: 26710 - protein, 9 aa, Homo sapiens
  Table A; Target 26710; HLA-C*12:03; GPR143; ENSG00000101850; TAA
HAIPHYVTM

SEQ ID NO: 26711 - protein, 9 aa, Homo sapiens
  Table A; Target 26711; HLA-C*16:01; GPR143; ENSG00000101850; TAA
HAIPHYVTM

SEQ ID NO: 26712 - protein, 9 aa, Homo sapiens
  Table A; Target 26712; HLA-C*16:02; GPR143; ENSG00000101850; TAA
HAIPHYVTM

SEQ ID NO: 26713 - protein, 9 aa, Homo sapiens
  Table A; Target 26713; HLA-C*16:04; GPR143; ENSG00000101850; TAA
HAIPHYVTM

SEQ ID NO: 26714 - protein, 10 aa, Homo sapiens
  Table A; Target 26714; HLA-B*35:01; GPR143; ENSG00000101850; TAA
HAIPHYVTMY

SEQ ID NO: 26715 - protein, 10 aa, Homo sapiens
  Table A; Target 26715; HLA-C*02:02; GPR143; ENSG00000101850; TAA
HAIPHYVTMY

SEQ ID NO: 26716 - protein, 11 aa, Homo sapiens
  Table A; Target 26716; HLA-A*33:01; GPR143; ENSG00000101850; TAA
HALCLGSGGLR

SEQ ID NO: 26717 - protein, 9 aa, Homo sapiens
  Table A; Target 26717; HLA-A*30:01; GPR143; ENSG00000101850; TAA
HENPASGKV

SEQ ID NO: 26718 - protein, 9 aa, Homo sapiens
  Table A; Target 26718; HLA-B*18:01; GPR143; ENSG00000101850; TAA
HENPASGKV

SEQ ID NO: 26719 - protein, 9 aa, Homo sapiens
  Table A; Target 26719; HLA-B*37:01; GPR143; ENSG00000101850; TAA
HENPASGKV

SEQ ID NO: 26720 - protein, 9 aa, Homo sapiens
  Table A; Target 26720; HLA-B*40:01; GPR143; ENSG00000101850; TAA
HENPASGKV

SEQ ID NO: 26721 - protein, 9 aa, Homo sapiens
  Table A; Target 26721; HLA-B*40:02; GPR143; ENSG00000101850; TAA
HENPASGKV

SEQ ID NO: 26722 - protein, 9 aa, Homo sapiens
  Table A; Target 26722; HLA-B*44:02; GPR143; ENSG00000101850; TAA
HENPASGKV

SEQ ID NO: 26723 - protein, 9 aa, Homo sapiens
  Table A; Target 26723; HLA-B*44:03; GPR143; ENSG00000101850; TAA
HENPASGKV

SEQ ID NO: 26724 - protein, 9 aa, Homo sapiens
  Table A; Target 26724; HLA-B*49:01; GPR143; ENSG00000101850; TAA
HENPASGKV

SEQ ID NO: 26725 - protein, 9 aa, Homo sapiens
  Table A; Target 26725; HLA-B*51:01; GPR143; ENSG00000101850; TAA
HENPASGKV

SEQ ID NO: 26726 - protein, 9 aa, Homo sapiens
  Table A; Target 26726; HLA-C*02:02; GPR143; ENSG00000101850; TAA
HENPASGKV

SEQ ID NO: 26727 - protein, 9 aa, Homo sapiens
  Table A; Target 26727; HLA-C*06:02; GPR143; ENSG00000101850; TAA
HENPASGKV

SEQ ID NO: 26728 - protein, 9 aa, Homo sapiens
  Table A; Target 26728; HLA-C*16:04; GPR143; ENSG00000101850; TAA
HENPASGKV

SEQ ID NO: 26729 - protein, 10 aa, Homo sapiens
  Table A; Target 26729; HLA-A*02:04; GPR143; ENSG00000101850; TAA
HIMAWGLATL

SEQ ID NO: 26730 - protein, 9 aa, Homo sapiens
  Table A; Target 26730; HLA-A*03:01; GPR143; ENSG00000101850; TAA
HTASESCNK

SEQ ID NO: 26731 - protein, 9 aa, Homo sapiens
  Table A; Target 26731; HLA-A*03:02; GPR143; ENSG00000101850; TAA
HTASESCNK

SEQ ID NO: 26732 - protein, 9 aa, Homo sapiens
  Table A; Target 26732; HLA-A*11:01; GPR143; ENSG00000101850; TAA
HTASESCNK

SEQ ID NO: 26733 - protein, 9 aa, Homo sapiens
  Table A; Target 26733; HLA-A*33:03; GPR143; ENSG00000101850; TAA
HTASESCNK

SEQ ID NO: 26734 - protein, 9 aa, Homo sapiens
  Table A; Target 26734; HLA-A*68:01; GPR143; ENSG00000101850; TAA
HTASESCNK

SEQ ID NO: 26735 - protein, 9 aa, Homo sapiens
  Table A; Target 26735; HLA-C*07:06; GPR143; ENSG00000101850; TAA
HTASESCNK

SEQ ID NO: 26736 - protein, 9 aa, Homo sapiens
  Table A; Target 26736; HLA-A*01:01; GPR143; ENSG00000101850; TAA
HTEIWPAAF

SEQ ID NO: 26737 - protein, 9 aa, Homo sapiens
  Table A; Target 26737; HLA-B*57:01; GPR143; ENSG00000101850; TAA
HTEIWPAAF

SEQ ID NO: 26738 - protein, 9 aa, Homo sapiens
  Table A; Target 26738; HLA-B*49:01; GPR143; ENSG00000101850; TAA
IEIHTASES

SEQ ID NO: 26739 - protein, 10 aa, Homo sapiens
  Table A; Target 26739; HLA-A*30:01; GPR143; ENSG00000101850; TAA
IEIHTASESC

SEQ ID NO: 26740 - protein, 10 aa, Homo sapiens
  Table A; Target 26740; HLA-B*40:02; GPR143; ENSG00000101850; TAA
IEIHTASESC

SEQ ID NO: 26741 - protein, 10 aa, Homo sapiens
  Table A; Target 26741; HLA-B*49:01; GPR143; ENSG00000101850; TAA
IEIHTASESC

SEQ ID NO: 26742 - protein, 8 aa, Homo sapiens
  Table A; Target 26742; HLA-A*23:01; GPR143; ENSG00000101850; TAA
IINESLLF

SEQ ID NO: 26743 - protein, 9 aa, Homo sapiens
  Table A; Target 26743; HLA-A*01:01; GPR143; ENSG00000101850; TAA
IINESLLFY

SEQ ID NO: 26744 - protein, 9 aa, Homo sapiens
  Table A; Target 26744; HLA-A*03:01; GPR143; ENSG00000101850; TAA
IINESLLFY

SEQ ID NO: 26745 - protein, 9 aa, Homo sapiens
  Table A; Target 26745; HLA-A*29:02; GPR143; ENSG00000101850; TAA
IINESLLFY

SEQ ID NO: 26746 - protein, 9 aa, Homo sapiens
  Table A; Target 26746; HLA-A*30:02; GPR143; ENSG00000101850; TAA
IINESLLFY

SEQ ID NO: 26747 - protein, 9 aa, Homo sapiens
  Table A; Target 26747; HLA-B*15:01; GPR143; ENSG00000101850; TAA
IINESLLFY

SEQ ID NO: 26748 - protein, 9 aa, Homo sapiens
  Table A; Target 26748; HLA-B*15:03; GPR143; ENSG00000101850; TAA
IINESLLFY

SEQ ID NO: 26749 - protein, 9 aa, Homo sapiens
  Table A; Target 26749; HLA-B*46:01; GPR143; ENSG00000101850; TAA
IINESLLFY

SEQ ID NO: 26750 - protein, 9 aa, Homo sapiens
  Table A; Target 26750; HLA-C*02:02; GPR143; ENSG00000101850; TAA
IINESLLFY

SEQ ID NO: 26751 - protein, 9 aa, Homo sapiens
  Table A; Target 26751; HLA-C*07:04; GPR143; ENSG00000101850; TAA
IINESLLFY

SEQ ID NO: 26752 - protein, 10 aa, Homo sapiens
  Table A; Target 26752; HLA-A*02:04; GPR143; ENSG00000101850; TAA
IINESLLFYL

SEQ ID NO: 26753 - protein, 10 aa, Homo sapiens
  Table A; Target 26753; HLA-A*02:07; GPR143; ENSG00000101850; TAA
IINESLLFYL

SEQ ID NO: 26754 - protein, 8 aa, Homo sapiens
  Table A; Target 26754; HLA-B*08:01; GPR143; ENSG00000101850; TAA
ILFQKTVT

SEQ ID NO: 26755 - protein, 9 aa, Homo sapiens
  Table A; Target 26755; HLA-A*02:01; GPR143; ENSG00000101850; TAA
ILFQKTVTA

SEQ ID NO: 26756 - protein, 9 aa, Homo sapiens
  Table A; Target 26756; HLA-A*02:03; GPR143; ENSG00000101850; TAA
ILFQKTVTA

SEQ ID NO: 26757 - protein, 9 aa, Homo sapiens
  Table A; Target 26757; HLA-A*02:04; GPR143; ENSG00000101850; TAA
ILFQKTVTA

SEQ ID NO: 26758 - protein, 9 aa, Homo sapiens
  Table A; Target 26758; HLA-A*02:07; GPR143; ENSG00000101850; TAA
ILFQKTVTA

SEQ ID NO: 26759 - protein, 9 aa, Homo sapiens
  Table A; Target 26759; HLA-A*32:01; GPR143; ENSG00000101850; TAA
ILFQKTVTA

SEQ ID NO: 26760 - protein, 9 aa, Homo sapiens
  Table A; Target 26760; HLA-B*08:01; GPR143; ENSG00000101850; TAA
ILFQKTVTA

SEQ ID NO: 26761 - protein, 9 aa, Homo sapiens
  Table A; Target 26761; HLA-B*13:02; GPR143; ENSG00000101850; TAA
ILFQKTVTA

SEQ ID NO: 26762 - protein, 9 aa, Homo sapiens
  Table A; Target 26762; HLA-B*15:01; GPR143; ENSG00000101850; TAA
ILFQKTVTA

SEQ ID NO: 26763 - protein, 9 aa, Homo sapiens
  Table A; Target 26763; HLA-B*46:01; GPR143; ENSG00000101850; TAA
ILFQKTVTA

SEQ ID NO: 26764 - protein, 9 aa, Homo sapiens
  Table A; Target 26764; HLA-B*54:01; GPR143; ENSG00000101850; TAA
ILFQKTVTA

SEQ ID NO: 26765 - protein, 9 aa, Homo sapiens
  Table A; Target 26765; HLA-B*55:01; GPR143; ENSG00000101850; TAA
ILFQKTVTA

SEQ ID NO: 26766 - protein, 9 aa, Homo sapiens
  Table A; Target 26766; HLA-B*56:01; GPR143; ENSG00000101850; TAA
ILFQKTVTA

SEQ ID NO: 26767 - protein, 9 aa, Homo sapiens
  Table A; Target 26767; HLA-C*02:02; GPR143; ENSG00000101850; TAA
ILFQKTVTA

SEQ ID NO: 26768 - protein, 9 aa, Homo sapiens
  Table A; Target 26768; HLA-C*14:02; GPR143; ENSG00000101850; TAA
ILFQKTVTA

SEQ ID NO: 26769 - protein, 10 aa, Homo sapiens
  Table A; Target 26769; HLA-A*02:01; GPR143; ENSG00000101850; TAA
ILFQKTVTAV

SEQ ID NO: 26770 - protein, 10 aa, Homo sapiens
  Table A; Target 26770; HLA-A*02:03; GPR143; ENSG00000101850; TAA
ILFQKTVTAV

SEQ ID NO: 26771 - protein, 10 aa, Homo sapiens
  Table A; Target 26771; HLA-A*02:04; GPR143; ENSG00000101850; TAA
ILFQKTVTAV

SEQ ID NO: 26772 - protein, 10 aa, Homo sapiens
  Table A; Target 26772; HLA-A*02:07; GPR143; ENSG00000101850; TAA
ILFQKTVTAV

SEQ ID NO: 26773 - protein, 10 aa, Homo sapiens
  Table A; Target 26773; HLA-A*68:02; GPR143; ENSG00000101850; TAA
ILFQKTVTAV

SEQ ID NO: 26774 - protein, 10 aa, Homo sapiens
  Table A; Target 26774; HLA-B*13:02; GPR143; ENSG00000101850; TAA
ILFQKTVTAV

SEQ ID NO: 26775 - protein, 10 aa, Homo sapiens
  Table A; Target 26775; HLA-B*55:01; GPR143; ENSG00000101850; TAA
ILFQKTVTAV

SEQ ID NO: 26776 - protein, 11 aa, Homo sapiens
  Table A; Target 26776; HLA-A*02:03; GPR143; ENSG00000101850; TAA
ILFQKTVTAVA

SEQ ID NO: 26777 - protein, 9 aa, Homo sapiens
  Table A; Target 26777; HLA-B*57:01; GPR143; ENSG00000101850; TAA
ILLYHIMAW

SEQ ID NO: 26778 - protein, 8 aa, Homo sapiens
  Table A; Target 26778; HLA-A*23:01; GPR143; ENSG00000101850; TAA
ILNPAQGF

SEQ ID NO: 26779 - protein, 8 aa, Homo sapiens
  Table A; Target 26779; HLA-A*32:01; GPR143; ENSG00000101850; TAA
ILNPAQGF

SEQ ID NO: 26780 - protein, 8 aa, Homo sapiens
  Table A; Target 26780; HLA-B*15:01; GPR143; ENSG00000101850; TAA
ILNPAQGF

SEQ ID NO: 26781 - protein, 8 aa, Homo sapiens
  Table A; Target 26781; HLA-B*37:01; GPR143; ENSG00000101850; TAA
ILNPAQGF

SEQ ID NO: 26782 - protein, 8 aa, Homo sapiens
  Table A; Target 26782; HLA-B*46:01; GPR143; ENSG00000101850; TAA
ILNPAQGF

SEQ ID NO: 26783 - protein, 8 aa, Homo sapiens
  Table A; Target 26783; HLA-C*14:02; GPR143; ENSG00000101850; TAA
ILNPAQGF

SEQ ID NO: 26784 - protein, 9 aa, Homo sapiens
  Table A; Target 26784; HLA-A*02:03; GPR143; ENSG00000101850; TAA
ILNPAQGFL

SEQ ID NO: 26785 - protein, 9 aa, Homo sapiens
  Table A; Target 26785; HLA-A*02:04; GPR143; ENSG00000101850; TAA
ILNPAQGFL

SEQ ID NO: 26786 - protein, 9 aa, Homo sapiens
  Table A; Target 26786; HLA-A*03:01; GPR143; ENSG00000101850; TAA
ILNPAQGFL

SEQ ID NO: 26787 - protein, 9 aa, Homo sapiens
  Table A; Target 26787; HLA-A*32:01; GPR143; ENSG00000101850; TAA
ILNPAQGFL

SEQ ID NO: 26788 - protein, 9 aa, Homo sapiens
  Table A; Target 26788; HLA-B*15:01; GPR143; ENSG00000101850; TAA
ILNPAQGFL

SEQ ID NO: 26789 - protein, 10 aa, Homo sapiens
  Table A; Target 26789; HLA-A*02:01; GPR143; ENSG00000101850; TAA
ILNPAQGFLL

SEQ ID NO: 26790 - protein, 10 aa, Homo sapiens
  Table A; Target 26790; HLA-A*02:03; GPR143; ENSG00000101850; TAA
ILNPAQGFLL

SEQ ID NO: 26791 - protein, 10 aa, Homo sapiens
  Table A; Target 26791; HLA-A*02:04; GPR143; ENSG00000101850; TAA
ILNPAQGFLL

SEQ ID NO: 26792 - protein, 10 aa, Homo sapiens
  Table A; Target 26792; HLA-A*02:07; GPR143; ENSG00000101850; TAA
ILNPAQGFLL

SEQ ID NO: 26793 - protein, 10 aa, Homo sapiens
  Table A; Target 26793; HLA-A*03:01; GPR143; ENSG00000101850; TAA
ILNPAQGFLL

SEQ ID NO: 26794 - protein, 10 aa, Homo sapiens
  Table A; Target 26794; HLA-A*03:02; GPR143; ENSG00000101850; TAA
ILNPAQGFLL

SEQ ID NO: 26795 - protein, 10 aa, Homo sapiens
  Table A; Target 26795; HLA-A*23:01; GPR143; ENSG00000101850; TAA
ILNPAQGFLL

SEQ ID NO: 26796 - protein, 10 aa, Homo sapiens
  Table A; Target 26796; HLA-A*24:02; GPR143; ENSG00000101850; TAA
ILNPAQGFLL

SEQ ID NO: 26797 - protein, 10 aa, Homo sapiens
  Table A; Target 26797; HLA-A*29:02; GPR143; ENSG00000101850; TAA
ILNPAQGFLL

SEQ ID NO: 26798 - protein, 10 aa, Homo sapiens
  Table A; Target 26798; HLA-A*31:01; GPR143; ENSG00000101850; TAA
ILNPAQGFLL

SEQ ID NO: 26799 - protein, 10 aa, Homo sapiens
  Table A; Target 26799; HLA-A*32:01; GPR143; ENSG00000101850; TAA
ILNPAQGFLL

SEQ ID NO: 26800 - protein, 10 aa, Homo sapiens
  Table A; Target 26800; HLA-B*58:01; GPR143; ENSG00000101850; TAA
ILNPAQGFLL

SEQ ID NO: 26801 - protein, 10 aa, Homo sapiens
  Table A; Target 26801; HLA-C*01:02; GPR143; ENSG00000101850; TAA
ILNPAQGFLL

SEQ ID NO: 26802 - protein, 10 aa, Homo sapiens
  Table A; Target 26802; HLA-C*02:02; GPR143; ENSG00000101850; TAA
ILNPAQGFLL

SEQ ID NO: 26803 - protein, 10 aa, Homo sapiens
  Table A; Target 26803; HLA-C*06:02; GPR143; ENSG00000101850; TAA
ILNPAQGFLL

SEQ ID NO: 26804 - protein, 10 aa, Homo sapiens
  Table A; Target 26804; HLA-C*14:02; GPR143; ENSG00000101850; TAA
ILNPAQGFLL

SEQ ID NO: 26805 - protein, 9 aa, Homo sapiens
  Table A; Target 26805; HLA-A*02:01; GPR143; ENSG00000101850; TAA
IMAWGLATL

SEQ ID NO: 26806 - protein, 9 aa, Homo sapiens
  Table A; Target 26806; HLA-A*02:03; GPR143; ENSG00000101850; TAA
IMAWGLATL

SEQ ID NO: 26807 - protein, 9 aa, Homo sapiens
  Table A; Target 26807; HLA-A*02:04; GPR143; ENSG00000101850; TAA
IMAWGLATL

SEQ ID NO: 26808 - protein, 9 aa, Homo sapiens
  Table A; Target 26808; HLA-B*46:01; GPR143; ENSG00000101850; TAA
IMAWGLATL

SEQ ID NO: 26809 - protein, 9 aa, Homo sapiens
  Table A; Target 26809; HLA-C*04:01; GPR143; ENSG00000101850; TAA
INGGSLKPV

SEQ ID NO: 26810 - protein, 8 aa, Homo sapiens
  Table A; Target 26810; HLA-B*18:01; GPR143; ENSG00000101850; TAA
IPHYVTMY

SEQ ID NO: 26811 - protein, 8 aa, Homo sapiens
  Table A; Target 26811; HLA-B*35:01; GPR143; ENSG00000101850; TAA
IPHYVTMY

SEQ ID NO: 26812 - protein, 8 aa, Homo sapiens
  Table A; Target 26812; HLA-B*55:01; GPR143; ENSG00000101850; TAA
IPHYVTMY

SEQ ID NO: 26813 - protein, 9 aa, Homo sapiens
  Table A; Target 26813; HLA-B*51:01; GPR143; ENSG00000101850; TAA
IPHYVTMYL

SEQ ID NO: 26814 - protein, 10 aa, Homo sapiens
  Table A; Target 26814; HLA-A*30:01; GPR143; ENSG00000101850; TAA
IQWESLTTSA

SEQ ID NO: 26815 - protein, 9 aa, Homo sapiens
  Table A; Target 26815; HLA-A*24:02; GPR143; ENSG00000101850; TAA
IYTENERRM

SEQ ID NO: 26816 - protein, 9 aa, Homo sapiens
  Table A; Target 26816; HLA-C*16:01; GPR143; ENSG00000101850; TAA
IYTENERRM

SEQ ID NO: 26817 - protein, 9 aa, Homo sapiens
  Table A; Target 26817; HLA-C*16:02; GPR143; ENSG00000101850; TAA
IYTENERRM

SEQ ID NO: 26818 - protein, 9 aa, Homo sapiens
  Table A; Target 26818; HLA-A*23:01; GPR143; ENSG00000101850; TAA
KTVTAVASL

SEQ ID NO: 26819 - protein, 9 aa, Homo sapiens
  Table A; Target 26819; HLA-A*24:02; GPR143; ENSG00000101850; TAA
KTVTAVASL

SEQ ID NO: 26820 - protein, 9 aa, Homo sapiens
  Table A; Target 26820; HLA-A*25:01; GPR143; ENSG00000101850; TAA
KTVTAVASL

SEQ ID NO: 26821 - protein, 9 aa, Homo sapiens
  Table A; Target 26821; HLA-A*26:01; GPR143; ENSG00000101850; TAA
KTVTAVASL

SEQ ID NO: 26822 - protein, 9 aa, Homo sapiens
  Table A; Target 26822; HLA-A*31:01; GPR143; ENSG00000101850; TAA
KTVTAVASL

SEQ ID NO: 26823 - protein, 9 aa, Homo sapiens
  Table A; Target 26823; HLA-A*32:01; GPR143; ENSG00000101850; TAA
KTVTAVASL

SEQ ID NO: 26824 - protein, 9 aa, Homo sapiens
  Table A; Target 26824; HLA-B*15:01; GPR143; ENSG00000101850; TAA
KTVTAVASL

SEQ ID NO: 26825 - protein, 9 aa, Homo sapiens
  Table A; Target 26825; HLA-B*40:01; GPR143; ENSG00000101850; TAA
KTVTAVASL

SEQ ID NO: 26826 - protein, 9 aa, Homo sapiens
  Table A; Target 26826; HLA-B*40:02; GPR143; ENSG00000101850; TAA
KTVTAVASL

SEQ ID NO: 26827 - protein, 9 aa, Homo sapiens
  Table A; Target 26827; HLA-B*46:01; GPR143; ENSG00000101850; TAA
KTVTAVASL

SEQ ID NO: 26828 - protein, 9 aa, Homo sapiens
  Table A; Target 26828; HLA-B*57:01; GPR143; ENSG00000101850; TAA
KTVTAVASL

SEQ ID NO: 26829 - protein, 9 aa, Homo sapiens
  Table A; Target 26829; HLA-B*58:01; GPR143; ENSG00000101850; TAA
KTVTAVASL

SEQ ID NO: 26830 - protein, 9 aa, Homo sapiens
  Table A; Target 26830; HLA-C*01:02; GPR143; ENSG00000101850; TAA
KTVTAVASL

SEQ ID NO: 26831 - protein, 9 aa, Homo sapiens
  Table A; Target 26831; HLA-C*02:02; GPR143; ENSG00000101850; TAA
KTVTAVASL

SEQ ID NO: 26832 - protein, 9 aa, Homo sapiens
  Table A; Target 26832; HLA-C*03:03; GPR143; ENSG00000101850; TAA
KTVTAVASL

SEQ ID NO: 26833 - protein, 9 aa, Homo sapiens
  Table A; Target 26833; HLA-C*03:04; GPR143; ENSG00000101850; TAA
KTVTAVASL

SEQ ID NO: 26834 - protein, 9 aa, Homo sapiens
  Table A; Target 26834; HLA-C*06:02; GPR143; ENSG00000101850; TAA
KTVTAVASL

SEQ ID NO: 26835 - protein, 9 aa, Homo sapiens
  Table A; Target 26835; HLA-C*12:03; GPR143; ENSG00000101850; TAA
KTVTAVASL

SEQ ID NO: 26836 - protein, 9 aa, Homo sapiens
  Table A; Target 26836; HLA-C*16:01; GPR143; ENSG00000101850; TAA
KTVTAVASL

SEQ ID NO: 26837 - protein, 9 aa, Homo sapiens
  Table A; Target 26837; HLA-C*16:02; GPR143; ENSG00000101850; TAA
KTVTAVASL

SEQ ID NO: 26838 - protein, 9 aa, Homo sapiens
  Table A; Target 26838; HLA-C*16:04; GPR143; ENSG00000101850; TAA
KTVTAVASL

SEQ ID NO: 26839 - protein, 10 aa, Homo sapiens
  Table A; Target 26839; HLA-B*40:02; GPR143; ENSG00000101850; TAA
KTVTAVASLL

SEQ ID NO: 26840 - protein, 10 aa, Homo sapiens
  Table A; Target 26840; HLA-B*57:01; GPR143; ENSG00000101850; TAA
KTVTAVASLL

SEQ ID NO: 26841 - protein, 10 aa, Homo sapiens
  Table A; Target 26841; HLA-B*58:01; GPR143; ENSG00000101850; TAA
KTVTAVASLL

SEQ ID NO: 26842 - protein, 10 aa, Homo sapiens
  Table A; Target 26842; HLA-C*06:02; GPR143; ENSG00000101850; TAA
KTVTAVASLL

SEQ ID NO: 26843 - protein, 10 aa, Homo sapiens
  Table A; Target 26843; HLA-C*07:02; GPR143; ENSG00000101850; TAA
KTVTAVASLL

SEQ ID NO: 26844 - protein, 11 aa, Homo sapiens
  Table A; Target 26844; HLA-A*01:01; GPR143; ENSG00000101850; TAA
KTVTAVASLLK

SEQ ID NO: 26845 - protein, 11 aa, Homo sapiens
  Table A; Target 26845; HLA-A*03:01; GPR143; ENSG00000101850; TAA
KTVTAVASLLK

SEQ ID NO: 26846 - protein, 11 aa, Homo sapiens
  Table A; Target 26846; HLA-A*03:02; GPR143; ENSG00000101850; TAA
KTVTAVASLLK

SEQ ID NO: 26847 - protein, 11 aa, Homo sapiens
  Table A; Target 26847; HLA-A*11:01; GPR143; ENSG00000101850; TAA
KTVTAVASLLK

SEQ ID NO: 26848 - protein, 11 aa, Homo sapiens
  Table A; Target 26848; HLA-B*27:02; GPR143; ENSG00000101850; TAA
KTVTAVASLLK

SEQ ID NO: 26849 - protein, 11 aa, Homo sapiens
  Table A; Target 26849; HLA-B*57:01; GPR143; ENSG00000101850; TAA
KTVTAVASLLK

SEQ ID NO: 26850 - protein, 11 aa, Homo sapiens
  Table A; Target 26850; HLA-B*58:01; GPR143; ENSG00000101850; TAA
KTVTAVASLLK

SEQ ID NO: 26851 - protein, 11 aa, Homo sapiens
  Table A; Target 26851; HLA-C*06:02; GPR143; ENSG00000101850; TAA
KTVTAVASLLK

SEQ ID NO: 26852 - protein, 9 aa, Homo sapiens
  Table A; Target 26852; HLA-B*58:01; GPR143; ENSG00000101850; TAA
KVSQVGGQT

SEQ ID NO: 26853 - protein, 9 aa, Homo sapiens
  Table A; Target 26853; HLA-C*06:02; GPR143; ENSG00000101850; TAA
KVSQVGGQT

SEQ ID NO: 26854 - protein, 9 aa, Homo sapiens
  Table A; Target 26854; HLA-A*02:04; GPR143; ENSG00000101850; TAA
LALGLLQLL

SEQ ID NO: 26855 - protein, 8 aa, Homo sapiens
  Table A; Target 26855; HLA-B*46:01; GPR143; ENSG00000101850; TAA
LCVEGAAM

SEQ ID NO: 26856 - protein, 8 aa, Homo sapiens
  Table A; Target 26856; HLA-C*03:03; GPR143; ENSG00000101850; TAA
LCVEGAAM

SEQ ID NO: 26857 - protein, 8 aa, Homo sapiens
  Table A; Target 26857; HLA-C*03:04; GPR143; ENSG00000101850; TAA
LCVEGAAM

SEQ ID NO: 26858 - protein, 9 aa, Homo sapiens
  Table A; Target 26858; HLA-C*03:03; GPR143; ENSG00000101850; TAA
LCVEGAAML

SEQ ID NO: 26859 - protein, 9 aa, Homo sapiens
  Table A; Target 26859; HLA-C*03:04; GPR143; ENSG00000101850; TAA
LCVEGAAML

SEQ ID NO: 26860 - protein, 10 aa, Homo sapiens
  Table A; Target 26860; HLA-A*01:01; GPR143; ENSG00000101850; TAA
LCVEGAAMLY

SEQ ID NO: 26861 - protein, 10 aa, Homo sapiens
  Table A; Target 26861; HLA-A*29:02; GPR143; ENSG00000101850; TAA
LCVEGAAMLY

SEQ ID NO: 26862 - protein, 10 aa, Homo sapiens
  Table A; Target 26862; HLA-B*46:01; GPR143; ENSG00000101850; TAA
LCVEGAAMLY

SEQ ID NO: 26863 - protein, 10 aa, Homo sapiens
  Table A; Target 26863; HLA-C*07:01; GPR143; ENSG00000101850; TAA
LCVEGAAMLY

SEQ ID NO: 26864 - protein, 8 aa, Homo sapiens
  Table A; Target 26864; HLA-B*18:01; GPR143; ENSG00000101850; TAA
LDHAIPHY

SEQ ID NO: 26865 - protein, 8 aa, Homo sapiens
  Table A; Target 26865; HLA-B*37:01; GPR143; ENSG00000101850; TAA
LDHAIPHY

SEQ ID NO: 26866 - protein, 8 aa, Homo sapiens
  Table A; Target 26866; HLA-C*07:01; GPR143; ENSG00000101850; TAA
LDHAIPHY

SEQ ID NO: 26867 - protein, 9 aa, Homo sapiens
  Table A; Target 26867; HLA-A*68:02; GPR143; ENSG00000101850; TAA
LDHAIPHYV

SEQ ID NO: 26868 - protein, 9 aa, Homo sapiens
  Table A; Target 26868; HLA-B*55:01; GPR143; ENSG00000101850; TAA
LFQKTVTAV

SEQ ID NO: 26869 - protein, 9 aa, Homo sapiens
  Table A; Target 26869; HLA-C*04:01; GPR143; ENSG00000101850; TAA
LFQKTVTAV

SEQ ID NO: 26870 - protein, 9 aa, Homo sapiens
  Table A; Target 26870; HLA-C*14:02; GPR143; ENSG00000101850; TAA
LFQKTVTAV

SEQ ID NO: 26871 - protein, 9 aa, Homo sapiens
  Table A; Target 26871; HLA-B*51:01; GPR143; ENSG00000101850; TAA
LGMVIRSTV

SEQ ID NO: 26872 - protein, 8 aa, Homo sapiens
  Table A; Target 26872; HLA-C*03:04; GPR143; ENSG00000101850; TAA
LGSGGLRL

SEQ ID NO: 26873 - protein, 9 aa, Homo sapiens
  Table A; Target 26873; HLA-C*03:03; GPR143; ENSG00000101850; TAA
LLCVEGAAM

SEQ ID NO: 26874 - protein, 11 aa, Homo sapiens
  Table A; Target 26874; HLA-A*01:01; GPR143; ENSG00000101850; TAA
LLCVEGAAMLY

SEQ ID NO: 26875 - protein, 10 aa, Homo sapiens
  Table A; Target 26875; HLA-A*02:04; GPR143; ENSG00000101850; TAA
LLYHIMAWGL

SEQ ID NO: 26876 - protein, 9 aa, Homo sapiens
  Table A; Target 26876; HLA-A*24:02; GPR143; ENSG00000101850; TAA
LNPAQGFLL

SEQ ID NO: 26877 - protein, 8 aa, Homo sapiens
  Table A; Target 26877; HLA-B*51:01; GPR143; ENSG00000101850; TAA
LPLLLVLV

SEQ ID NO: 26878 - protein, 8 aa, Homo sapiens
  Table A; Target 26878; HLA-B*54:01; GPR143; ENSG00000101850; TAA
LPLLLVLV

SEQ ID NO: 26879 - protein, 8 aa, Homo sapiens
  Table A; Target 26879; HLA-B*56:01; GPR143; ENSG00000101850; TAA
LPLLLVLV

SEQ ID NO: 26880 - protein, 9 aa, Homo sapiens
  Table A; Target 26880; HLA-B*51:01; GPR143; ENSG00000101850; TAA
LPLLLVLVA

SEQ ID NO: 26881 - protein, 9 aa, Homo sapiens
  Table A; Target 26881; HLA-B*54:01; GPR143; ENSG00000101850; TAA
LPLLLVLVA

SEQ ID NO: 26882 - protein, 9 aa, Homo sapiens
  Table A; Target 26882; HLA-B*55:01; GPR143; ENSG00000101850; TAA
LPLLLVLVA

SEQ ID NO: 26883 - protein, 9 aa, Homo sapiens
  Table A; Target 26883; HLA-B*56:01; GPR143; ENSG00000101850; TAA
LPLLLVLVA

SEQ ID NO: 26884 - protein, 9 aa, Homo sapiens
  Table A; Target 26884; HLA-C*06:02; GPR143; ENSG00000101850; TAA
LRAAAACDL

SEQ ID NO: 26885 - protein, 9 aa, Homo sapiens
  Table A; Target 26885; HLA-C*07:02; GPR143; ENSG00000101850; TAA
LRAAAACDL

SEQ ID NO: 26886 - protein, 8 aa, Homo sapiens
  Table A; Target 26886; HLA-B*57:01; GPR143; ENSG00000101850; TAA
LSFQPRAF

SEQ ID NO: 26887 - protein, 8 aa, Homo sapiens
  Table A; Target 26887; HLA-C*16:01; GPR143; ENSG00000101850; TAA
LSFQPRAF

SEQ ID NO: 26888 - protein, 8 aa, Homo sapiens
  Table A; Target 26888; HLA-B*57:01; GPR143; ENSG00000101850; TAA
LSLAFYGW

SEQ ID NO: 26889 - protein, 9 aa, Homo sapiens
  Table A; Target 26889; HLA-B*27:05; GPR143; ENSG00000101850; TAA
LSNIINESL

SEQ ID NO: 26890 - protein, 9 aa, Homo sapiens
  Table A; Target 26890; HLA-B*46:01; GPR143; ENSG00000101850; TAA
LSNIINESL

SEQ ID NO: 26891 - protein, 9 aa, Homo sapiens
  Table A; Target 26891; HLA-B*57:01; GPR143; ENSG00000101850; TAA
LSNIINESL

SEQ ID NO: 26892 - protein, 9 aa, Homo sapiens
  Table A; Target 26892; HLA-B*58:01; GPR143; ENSG00000101850; TAA
LSNIINESL

SEQ ID NO: 26893 - protein, 9 aa, Homo sapiens
  Table A; Target 26893; HLA-C*01:02; GPR143; ENSG00000101850; TAA
LSNIINESL

SEQ ID NO: 26894 - protein, 9 aa, Homo sapiens
  Table A; Target 26894; HLA-C*02:02; GPR143; ENSG00000101850; TAA
LSNIINESL

SEQ ID NO: 26895 - protein, 9 aa, Homo sapiens
  Table A; Target 26895; HLA-C*03:03; GPR143; ENSG00000101850; TAA
LSNIINESL

SEQ ID NO: 26896 - protein, 9 aa, Homo sapiens
  Table A; Target 26896; HLA-C*03:04; GPR143; ENSG00000101850; TAA
LSNIINESL

SEQ ID NO: 26897 - protein, 9 aa, Homo sapiens
  Table A; Target 26897; HLA-C*14:02; GPR143; ENSG00000101850; TAA
LSNIINESL

SEQ ID NO: 26898 - protein, 8 aa, Homo sapiens
  Table A; Target 26898; HLA-A*23:01; GPR143; ENSG00000101850; TAA
LVANPILF

SEQ ID NO: 26899 - protein, 8 aa, Homo sapiens
  Table A; Target 26899; HLA-B*57:01; GPR143; ENSG00000101850; TAA
LVANPILF

SEQ ID NO: 26900 - protein, 10 aa, Homo sapiens
  Table A; Target 26900; HLA-A*03:01; GPR143; ENSG00000101850; TAA
LVANPILFQK

SEQ ID NO: 26901 - protein, 10 aa, Homo sapiens
  Table A; Target 26901; HLA-A*03:02; GPR143; ENSG00000101850; TAA
LVANPILFQK

SEQ ID NO: 26902 - protein, 10 aa, Homo sapiens
  Table A; Target 26902; HLA-A*11:01; GPR143; ENSG00000101850; TAA
LVANPILFQK

SEQ ID NO: 26903 - protein, 10 aa, Homo sapiens
  Table A; Target 26903; HLA-A*68:01; GPR143; ENSG00000101850; TAA
LVANPILFQK

SEQ ID NO: 26904 - protein, 10 aa, Homo sapiens
  Table A; Target 26904; HLA-A*68:02; GPR143; ENSG00000101850; TAA
LVANPILFQK

SEQ ID NO: 26905 - protein, 10 aa, Homo sapiens
  Table A; Target 26905; HLA-B*27:02; GPR143; ENSG00000101850; TAA
LVANPILFQK

SEQ ID NO: 26906 - protein, 10 aa, Homo sapiens
  Table A; Target 26906; HLA-C*07:06; GPR143; ENSG00000101850; TAA
LVANPILFQK

SEQ ID NO: 26907 - protein, 9 aa, Homo sapiens
  Table A; Target 26907; HLA-B*08:01; GPR143; ENSG00000101850; TAA
LVIRRSAGL

SEQ ID NO: 26908 - protein, 8 aa, Homo sapiens
  Table A; Target 26908; HLA-A*31:01; GPR143; ENSG00000101850; TAA
LVLSFQPR

SEQ ID NO: 26909 - protein, 9 aa, Homo sapiens
  Table A; Target 26909; HLA-B*54:01; GPR143; ENSG00000101850; TAA
LVLSFQPRA

SEQ ID NO: 26910 - protein, 10 aa, Homo sapiens
  Table A; Target 26910; HLA-B*57:01; GPR143; ENSG00000101850; TAA
LVLSFQPRAF

SEQ ID NO: 26911 - protein, 10 aa, Homo sapiens
  Table A; Target 26911; HLA-B*57:01; GPR143; ENSG00000101850; TAA
LVLVANPILF

SEQ ID NO: 26912 - protein, 8 aa, Homo sapiens
  Table A; Target 26912; HLA-A*31:01; GPR143; ENSG00000101850; TAA
LYYPSVSR

SEQ ID NO: 26913 - protein, 8 aa, Homo sapiens
  Table A; Target 26913; HLA-A*33:01; GPR143; ENSG00000101850; TAA
LYYPSVSR

SEQ ID NO: 26914 - protein, 8 aa, Homo sapiens
  Table A; Target 26914; HLA-A*33:03; GPR143; ENSG00000101850; TAA
LYYPSVSR

SEQ ID NO: 26915 - protein, 11 aa, Homo sapiens
  Table A; Target 26915; HLA-A*31:01; GPR143; ENSG00000101850; TAA
LYYPSVSRCER

SEQ ID NO: 26916 - protein, 9 aa, Homo sapiens
  Table A; Target 26916; HLA-A*23:01; GPR143; ENSG00000101850; TAA
MASPRLGTF

SEQ ID NO: 26917 - protein, 9 aa, Homo sapiens
  Table A; Target 26917; HLA-A*25:01; GPR143; ENSG00000101850; TAA
MASPRLGTF

SEQ ID NO: 26918 - protein, 9 aa, Homo sapiens
  Table A; Target 26918; HLA-A*30:02; GPR143; ENSG00000101850; TAA
MASPRLGTF

SEQ ID NO: 26919 - protein, 9 aa, Homo sapiens
  Table A; Target 26919; HLA-A*32:01; GPR143; ENSG00000101850; TAA
MASPRLGTF

SEQ ID NO: 26920 - protein, 9 aa, Homo sapiens
  Table A; Target 26920; HLA-B*07:02; GPR143; ENSG00000101850; TAA
MASPRLGTF

SEQ ID NO: 26921 - protein, 9 aa, Homo sapiens
  Table A; Target 26921; HLA-B*08:01; GPR143; ENSG00000101850; TAA
MASPRLGTF

SEQ ID NO: 26922 - protein, 9 aa, Homo sapiens
  Table A; Target 26922; HLA-B*35:01; GPR143; ENSG00000101850; TAA
MASPRLGTF

SEQ ID NO: 26923 - protein, 9 aa, Homo sapiens
  Table A; Target 26923; HLA-B*37:01; GPR143; ENSG00000101850; TAA
MASPRLGTF

SEQ ID NO: 26924 - protein, 9 aa, Homo sapiens
  Table A; Target 26924; HLA-B*46:01; GPR143; ENSG00000101850; TAA
MASPRLGTF

SEQ ID NO: 26925 - protein, 9 aa, Homo sapiens
  Table A; Target 26925; HLA-B*57:01; GPR143; ENSG00000101850; TAA
MASPRLGTF

SEQ ID NO: 26926 - protein, 9 aa, Homo sapiens
  Table A; Target 26926; HLA-B*58:01; GPR143; ENSG00000101850; TAA
MASPRLGTF

SEQ ID NO: 26927 - protein, 9 aa, Homo sapiens
  Table A; Target 26927; HLA-C*02:02; GPR143; ENSG00000101850; TAA
MASPRLGTF

SEQ ID NO: 26928 - protein, 9 aa, Homo sapiens
  Table A; Target 26928; HLA-C*03:04; GPR143; ENSG00000101850; TAA
MASPRLGTF

SEQ ID NO: 26929 - protein, 9 aa, Homo sapiens
  Table A; Target 26929; HLA-C*12:03; GPR143; ENSG00000101850; TAA
MASPRLGTF

SEQ ID NO: 26930 - protein, 9 aa, Homo sapiens
  Table A; Target 26930; HLA-C*16:01; GPR143; ENSG00000101850; TAA
MASPRLGTF

SEQ ID NO: 26931 - protein, 9 aa, Homo sapiens
  Table A; Target 26931; HLA-C*16:02; GPR143; ENSG00000101850; TAA
MASPRLGTF

SEQ ID NO: 26932 - protein, 9 aa, Homo sapiens
  Table A; Target 26932; HLA-C*16:04; GPR143; ENSG00000101850; TAA
MASPRLGTF

SEQ ID NO: 26933 - protein, 8 aa, Homo sapiens
  Table A; Target 26933; HLA-B*51:01; GPR143; ENSG00000101850; TAA
MAWGLATL

SEQ ID NO: 26934 - protein, 9 aa, Homo sapiens
  Table A; Target 26934; HLA-A*02:07; GPR143; ENSG00000101850; TAA
MAWGLATLL

SEQ ID NO: 26935 - protein, 9 aa, Homo sapiens
  Table A; Target 26935; HLA-A*23:01; GPR143; ENSG00000101850; TAA
MAWGLATLL

SEQ ID NO: 26936 - protein, 9 aa, Homo sapiens
  Table A; Target 26936; HLA-A*68:02; GPR143; ENSG00000101850; TAA
MAWGLATLL

SEQ ID NO: 26937 - protein, 9 aa, Homo sapiens
  Table A; Target 26937; HLA-B*35:01; GPR143; ENSG00000101850; TAA
MAWGLATLL

SEQ ID NO: 26938 - protein, 9 aa, Homo sapiens
  Table A; Target 26938; HLA-B*35:03; GPR143; ENSG00000101850; TAA
MAWGLATLL

SEQ ID NO: 26939 - protein, 9 aa, Homo sapiens
  Table A; Target 26939; HLA-B*51:01; GPR143; ENSG00000101850; TAA
MAWGLATLL

SEQ ID NO: 26940 - protein, 9 aa, Homo sapiens
  Table A; Target 26940; HLA-B*54:01; GPR143; ENSG00000101850; TAA
MAWGLATLL

SEQ ID NO: 26941 - protein, 9 aa, Homo sapiens
  Table A; Target 26941; HLA-C*02:02; GPR143; ENSG00000101850; TAA
MAWGLATLL

SEQ ID NO: 26942 - protein, 9 aa, Homo sapiens
  Table A; Target 26942; HLA-C*07:01; GPR143; ENSG00000101850; TAA
MAWGLATLL

SEQ ID NO: 26943 - protein, 9 aa, Homo sapiens
  Table A; Target 26943; HLA-C*07:04; GPR143; ENSG00000101850; TAA
MAWGLATLL

SEQ ID NO: 26944 - protein, 9 aa, Homo sapiens
  Table A; Target 26944; HLA-C*12:03; GPR143; ENSG00000101850; TAA
MAWGLATLL

SEQ ID NO: 26945 - protein, 11 aa, Homo sapiens
  Table A; Target 26945; HLA-B*38:01; GPR143; ENSG00000101850; TAA
MLSEGSDASTI

SEQ ID NO: 26946 - protein, 9 aa, Homo sapiens
  Table A; Target 26946; HLA-A*03:01; GPR143; ENSG00000101850; TAA
MLYYPSVSR

SEQ ID NO: 26947 - protein, 9 aa, Homo sapiens
  Table A; Target 26947; HLA-A*03:02; GPR143; ENSG00000101850; TAA
MLYYPSVSR

SEQ ID NO: 26948 - protein, 9 aa, Homo sapiens
  Table A; Target 26948; HLA-A*11:01; GPR143; ENSG00000101850; TAA
MLYYPSVSR

SEQ ID NO: 26949 - protein, 9 aa, Homo sapiens
  Table A; Target 26949; HLA-A*31:01; GPR143; ENSG00000101850; TAA
MLYYPSVSR

SEQ ID NO: 26950 - protein, 9 aa, Homo sapiens
  Table A; Target 26950; HLA-A*33:01; GPR143; ENSG00000101850; TAA
MLYYPSVSR

SEQ ID NO: 26951 - protein, 9 aa, Homo sapiens
  Table A; Target 26951; HLA-A*33:03; GPR143; ENSG00000101850; TAA
MLYYPSVSR

SEQ ID NO: 26952 - protein, 9 aa, Homo sapiens
  Table A; Target 26952; HLA-A*68:01; GPR143; ENSG00000101850; TAA
MLYYPSVSR

SEQ ID NO: 26953 - protein, 9 aa, Homo sapiens
  Table A; Target 26953; HLA-B*35:01; GPR143; ENSG00000101850; TAA
MLYYPSVSR

SEQ ID NO: 26954 - protein, 9 aa, Homo sapiens
  Table A; Target 26954; HLA-B*54:01; GPR143; ENSG00000101850; TAA
MLYYPSVSR

SEQ ID NO: 26955 - protein, 9 aa, Homo sapiens
  Table A; Target 26955; HLA-C*07:06; GPR143; ENSG00000101850; TAA
MLYYPSVSR

SEQ ID NO: 26956 - protein, 9 aa, Homo sapiens
  Table A; Target 26956; HLA-B*35:01; GPR143; ENSG00000101850; TAA
MPHENPASG

SEQ ID NO: 26957 - protein, 9 aa, Homo sapiens
  Table A; Target 26957; HLA-B*35:03; GPR143; ENSG00000101850; TAA
MPHENPASG

SEQ ID NO: 26958 - protein, 9 aa, Homo sapiens
  Table A; Target 26958; HLA-B*54:01; GPR143; ENSG00000101850; TAA
MPHENPASG

SEQ ID NO: 26959 - protein, 9 aa, Homo sapiens
  Table A; Target 26959; HLA-B*55:01; GPR143; ENSG00000101850; TAA
MPHENPASG

SEQ ID NO: 26960 - protein, 9 aa, Homo sapiens
  Table A; Target 26960; HLA-B*56:01; GPR143; ENSG00000101850; TAA
MPHENPASG

SEQ ID NO: 26961 - protein, 10 aa, Homo sapiens
  Table A; Target 26961; HLA-C*07:06; GPR143; ENSG00000101850; TAA
MPHENPASGK

SEQ ID NO: 26962 - protein, 11 aa, Homo sapiens
  Table A; Target 26962; HLA-B*35:01; GPR143; ENSG00000101850; TAA
MPHENPASGKV

SEQ ID NO: 26963 - protein, 11 aa, Homo sapiens
  Table A; Target 26963; HLA-B*35:03; GPR143; ENSG00000101850; TAA
MPHENPASGKV

SEQ ID NO: 26964 - protein, 11 aa, Homo sapiens
  Table A; Target 26964; HLA-B*51:01; GPR143; ENSG00000101850; TAA
MPHENPASGKV

SEQ ID NO: 26965 - protein, 11 aa, Homo sapiens
  Table A; Target 26965; HLA-B*54:01; GPR143; ENSG00000101850; TAA
MPHENPASGKV

SEQ ID NO: 26966 - protein, 11 aa, Homo sapiens
  Table A; Target 26966; HLA-B*56:01; GPR143; ENSG00000101850; TAA
MPHENPASGKV

SEQ ID NO: 26967 - protein, 10 aa, Homo sapiens
  Table A; Target 26967; HLA-A*25:01; GPR143; ENSG00000101850; TAA
MQTDINGGSL

SEQ ID NO: 26968 - protein, 10 aa, Homo sapiens
  Table A; Target 26968; HLA-A*30:01; GPR143; ENSG00000101850; TAA
MQTDINGGSL

SEQ ID NO: 26969 - protein, 10 aa, Homo sapiens
  Table A; Target 26969; HLA-B*15:03; GPR143; ENSG00000101850; TAA
MQTDINGGSL

SEQ ID NO: 26970 - protein, 10 aa, Homo sapiens
  Table A; Target 26970; HLA-B*27:05; GPR143; ENSG00000101850; TAA
MQTDINGGSL

SEQ ID NO: 26971 - protein, 10 aa, Homo sapiens
  Table A; Target 26971; HLA-B*38:01; GPR143; ENSG00000101850; TAA
MQTDINGGSL

SEQ ID NO: 26972 - protein, 10 aa, Homo sapiens
  Table A; Target 26972; HLA-B*39:01; GPR143; ENSG00000101850; TAA
MQTDINGGSL

SEQ ID NO: 26973 - protein, 10 aa, Homo sapiens
  Table A; Target 26973; HLA-B*40:01; GPR143; ENSG00000101850; TAA
MQTDINGGSL

SEQ ID NO: 26974 - protein, 10 aa, Homo sapiens
  Table A; Target 26974; HLA-B*40:02; GPR143; ENSG00000101850; TAA
MQTDINGGSL

SEQ ID NO: 26975 - protein, 10 aa, Homo sapiens
  Table A; Target 26975; HLA-C*03:03; GPR143; ENSG00000101850; TAA
MQTDINGGSL

SEQ ID NO: 26976 - protein, 10 aa, Homo sapiens
  Table A; Target 26976; HLA-C*03:04; GPR143; ENSG00000101850; TAA
MQTDINGGSL

SEQ ID NO: 26977 - protein, 10 aa, Homo sapiens
  Table A; Target 26977; HLA-C*07:04; GPR143; ENSG00000101850; TAA
MQTDINGGSL

SEQ ID NO: 26978 - protein, 11 aa, Homo sapiens
  Table A; Target 26978; HLA-B*38:01; GPR143; ENSG00000101850; TAA
MQTDINGGSLK

SEQ ID NO: 26979 - protein, 8 aa, Homo sapiens
  Table A; Target 26979; HLA-A*25:01; GPR143; ENSG00000101850; TAA
MVIRSTVW

SEQ ID NO: 26980 - protein, 8 aa, Homo sapiens
  Table A; Target 26980; HLA-B*57:01; GPR143; ENSG00000101850; TAA
MVIRSTVW

SEQ ID NO: 26981 - protein, 8 aa, Homo sapiens
  Table A; Target 26981; HLA-B*58:01; GPR143; ENSG00000101850; TAA
MVIRSTVW

SEQ ID NO: 26982 - protein, 9 aa, Homo sapiens
  Table A; Target 26982; HLA-A*23:01; GPR143; ENSG00000101850; TAA
MYLPLLLVL

SEQ ID NO: 26983 - protein, 9 aa, Homo sapiens
  Table A; Target 26983; HLA-A*24:02; GPR143; ENSG00000101850; TAA
MYLPLLLVL

SEQ ID NO: 26984 - protein, 9 aa, Homo sapiens
  Table A; Target 26984; HLA-A*29:02; GPR143; ENSG00000101850; TAA
MYLPLLLVL

SEQ ID NO: 26985 - protein, 9 aa, Homo sapiens
  Table A; Target 26985; HLA-B*18:01; GPR143; ENSG00000101850; TAA
NEGDPALPT

SEQ ID NO: 26986 - protein, 8 aa, Homo sapiens
  Table A; Target 26986; HLA-B*18:01; GPR143; ENSG00000101850; TAA
NESLLFYL

SEQ ID NO: 26987 - protein, 8 aa, Homo sapiens
  Table A; Target 26987; HLA-B*37:01; GPR143; ENSG00000101850; TAA
NESLLFYL

SEQ ID NO: 26988 - protein, 9 aa, Homo sapiens
  Table A; Target 26988; HLA-C*01:02; GPR143; ENSG00000101850; TAA
NFVDSVSDM

SEQ ID NO: 26989 - protein, 9 aa, Homo sapiens
  Table A; Target 26989; HLA-C*14:02; GPR143; ENSG00000101850; TAA
NFVDSVSDM

SEQ ID NO: 26990 - protein, 9 aa, Homo sapiens
  Table A; Target 26990; HLA-B*54:01; GPR143; ENSG00000101850; TAA
NHTEIWPAA

SEQ ID NO: 26991 - protein, 9 aa, Homo sapiens
  Table A; Target 26991; HLA-A*23:01; GPR143; ENSG00000101850; TAA
NIINESLLF

SEQ ID NO: 26992 - protein, 9 aa, Homo sapiens
  Table A; Target 26992; HLA-A*24:02; GPR143; ENSG00000101850; TAA
NIINESLLF

SEQ ID NO: 26993 - protein, 9 aa, Homo sapiens
  Table A; Target 26993; HLA-A*25:01; GPR143; ENSG00000101850; TAA
NIINESLLF

SEQ ID NO: 26994 - protein, 9 aa, Homo sapiens
  Table A; Target 26994; HLA-A*26:01; GPR143; ENSG00000101850; TAA
NIINESLLF

SEQ ID NO: 26995 - protein, 9 aa, Homo sapiens
  Table A; Target 26995; HLA-A*29:02; GPR143; ENSG00000101850; TAA
NIINESLLF

SEQ ID NO: 26996 - protein, 9 aa, Homo sapiens
  Table A; Target 26996; HLA-B*35:01; GPR143; ENSG00000101850; TAA
NIINESLLF

SEQ ID NO: 26997 - protein, 9 aa, Homo sapiens
  Table A; Target 26997; HLA-B*38:01; GPR143; ENSG00000101850; TAA
NIINESLLF

SEQ ID NO: 26998 - protein, 10 aa, Homo sapiens
  Table A; Target 26998; HLA-A*01:01; GPR143; ENSG00000101850; TAA
NIINESLLFY

SEQ ID NO: 26999 - protein, 10 aa, Homo sapiens
  Table A; Target 26999; HLA-A*25:01; GPR143; ENSG00000101850; TAA
NIINESLLFY

SEQ ID NO: 27000 - protein, 10 aa, Homo sapiens
  Table A; Target 27000; HLA-A*26:01; GPR143; ENSG00000101850; TAA
NIINESLLFY

SEQ ID NO: 27001 - protein, 10 aa, Homo sapiens
  Table A; Target 27001; HLA-A*29:02; GPR143; ENSG00000101850; TAA
NIINESLLFY

SEQ ID NO: 27002 - protein, 11 aa, Homo sapiens
  Table A; Target 27002; HLA-A*02:01; GPR143; ENSG00000101850; TAA
NIINESLLFYL

SEQ ID NO: 27003 - protein, 11 aa, Homo sapiens
  Table A; Target 27003; HLA-A*02:04; GPR143; ENSG00000101850; TAA
NIINESLLFYL

SEQ ID NO: 27004 - protein, 11 aa, Homo sapiens
  Table A; Target 27004; HLA-A*02:07; GPR143; ENSG00000101850; TAA
NIINESLLFYL

SEQ ID NO: 27005 - protein, 11 aa, Homo sapiens
  Table A; Target 27005; HLA-A*68:02; GPR143; ENSG00000101850; TAA
NIINESLLFYL

SEQ ID NO: 27006 - protein, 9 aa, Homo sapiens
  Table A; Target 27006; HLA-B*15:03; GPR143; ENSG00000101850; TAA
NKNEGDPAL

SEQ ID NO: 27007 - protein, 9 aa, Homo sapiens
  Table A; Target 27007; HLA-B*35:03; GPR143; ENSG00000101850; TAA
NKNEGDPAL

SEQ ID NO: 27008 - protein, 9 aa, Homo sapiens
  Table A; Target 27008; HLA-B*38:01; GPR143; ENSG00000101850; TAA
NKNEGDPAL

SEQ ID NO: 27009 - protein, 9 aa, Homo sapiens
  Table A; Target 27009; HLA-B*39:01; GPR143; ENSG00000101850; TAA
NKNEGDPAL

SEQ ID NO: 27010 - protein, 8 aa, Homo sapiens
  Table A; Target 27010; HLA-B*07:02; GPR143; ENSG00000101850; TAA
NPAQGFLL

SEQ ID NO: 27011 - protein, 8 aa, Homo sapiens
  Table A; Target 27011; HLA-B*08:01; GPR143; ENSG00000101850; TAA
NPAQGFLL

SEQ ID NO: 27012 - protein, 8 aa, Homo sapiens
  Table A; Target 27012; HLA-B*35:01; GPR143; ENSG00000101850; TAA
NPAQGFLL

SEQ ID NO: 27013 - protein, 8 aa, Homo sapiens
  Table A; Target 27013; HLA-B*35:03; GPR143; ENSG00000101850; TAA
NPAQGFLL

SEQ ID NO: 27014 - protein, 8 aa, Homo sapiens
  Table A; Target 27014; HLA-C*04:01; GPR143; ENSG00000101850; TAA
NPAQGFLL

SEQ ID NO: 27015 - protein, 8 aa, Homo sapiens
  Table A; Target 27015; HLA-C*07:02; GPR143; ENSG00000101850; TAA
NPAQGFLL

SEQ ID NO: 27016 - protein, 10 aa, Homo sapiens
  Table A; Target 27016; HLA-B*07:02; GPR143; ENSG00000101850; TAA
NPAQGFLLSL

SEQ ID NO: 27017 - protein, 10 aa, Homo sapiens
  Table A; Target 27017; HLA-B*35:01; GPR143; ENSG00000101850; TAA
NPAQGFLLSL

SEQ ID NO: 27018 - protein, 10 aa, Homo sapiens
  Table A; Target 27018; HLA-B*35:03; GPR143; ENSG00000101850; TAA
NPAQGFLLSL

SEQ ID NO: 27019 - protein, 10 aa, Homo sapiens
  Table A; Target 27019; HLA-B*56:01; GPR143; ENSG00000101850; TAA
NPAQGFLLSL

SEQ ID NO: 27020 - protein, 10 aa, Homo sapiens
  Table A; Target 27020; HLA-C*07:02; GPR143; ENSG00000101850; TAA
NPAQGFLLSL

SEQ ID NO: 27021 - protein, 9 aa, Homo sapiens
  Table A; Target 27021; HLA-B*07:02; GPR143; ENSG00000101850; TAA
NPASGKVSQ

SEQ ID NO: 27022 - protein, 10 aa, Homo sapiens
  Table A; Target 27022; HLA-B*07:02; GPR143; ENSG00000101850; TAA
NPASGKVSQV

SEQ ID NO: 27023 - protein, 10 aa, Homo sapiens
  Table A; Target 27023; HLA-B*56:01; GPR143; ENSG00000101850; TAA
NPASGKVSQV

SEQ ID NO: 27024 - protein, 10 aa, Homo sapiens
  Table A; Target 27024; HLA-C*07:02; GPR143; ENSG00000101850; TAA
NPASGKVSQV

SEQ ID NO: 27025 - protein, 9 aa, Homo sapiens
  Table A; Target 27025; HLA-B*07:02; GPR143; ENSG00000101850; TAA
NPILFQKTV

SEQ ID NO: 27026 - protein, 9 aa, Homo sapiens
  Table A; Target 27026; HLA-B*08:01; GPR143; ENSG00000101850; TAA
NPILFQKTV

SEQ ID NO: 27027 - protein, 9 aa, Homo sapiens
  Table A; Target 27027; HLA-B*51:01; GPR143; ENSG00000101850; TAA
NPILFQKTV

SEQ ID NO: 27028 - protein, 9 aa, Homo sapiens
  Table A; Target 27028; HLA-B*54:01; GPR143; ENSG00000101850; TAA
NPILFQKTV

SEQ ID NO: 27029 - protein, 9 aa, Homo sapiens
  Table A; Target 27029; HLA-B*55:01; GPR143; ENSG00000101850; TAA
NPILFQKTV

SEQ ID NO: 27030 - protein, 9 aa, Homo sapiens
  Table A; Target 27030; HLA-B*56:01; GPR143; ENSG00000101850; TAA
NPILFQKTV

SEQ ID NO: 27031 - protein, 9 aa, Homo sapiens
  Table A; Target 27031; HLA-C*07:02; GPR143; ENSG00000101850; TAA
NPILFQKTV

SEQ ID NO: 27032 - protein, 11 aa, Homo sapiens
  Table A; Target 27032; HLA-B*54:01; GPR143; ENSG00000101850; TAA
NPILFQKTVTA

SEQ ID NO: 27033 - protein, 11 aa, Homo sapiens
  Table A; Target 27033; HLA-B*56:01; GPR143; ENSG00000101850; TAA
NPILFQKTVTA

SEQ ID NO: 27034 - protein, 9 aa, Homo sapiens
  Table A; Target 27034; HLA-C*07:02; GPR143; ENSG00000101850; TAA
PAQGFLLSL

SEQ ID NO: 27035 - protein, 9 aa, Homo sapiens
  Table A; Target 27035; HLA-C*12:03; GPR143; ENSG00000101850; TAA
PASGKVSQV

SEQ ID NO: 27036 - protein, 9 aa, Homo sapiens
  Table A; Target 27036; HLA-C*16:02; GPR143; ENSG00000101850; TAA
PASGKVSQV

SEQ ID NO: 27037 - protein, 10 aa, Homo sapiens
  Table A; Target 27037; HLA-C*07:02; GPR143; ENSG00000101850; TAA
PASGKVSQVG

SEQ ID NO: 27038 - protein, 9 aa, Homo sapiens
  Table A; Target 27038; HLA-C*04:01; GPR143; ENSG00000101850; TAA
PGSPATSPP

SEQ ID NO: 27039 - protein, 9 aa, Homo sapiens
  Table A; Target 27039; HLA-B*35:01; GPR143; ENSG00000101850; TAA
QGFLLSLAF

SEQ ID NO: 27040 - protein, 9 aa, Homo sapiens
  Table A; Target 27040; HLA-A*68:01; GPR143; ENSG00000101850; TAA
QGIYTENER

SEQ ID NO: 27041 - protein, 9 aa, Homo sapiens
  Table A; Target 27041; HLA-C*07:06; GPR143; ENSG00000101850; TAA
QGIYTENER

SEQ ID NO: 27042 - protein, 9 aa, Homo sapiens
  Table A; Target 27042; HLA-A*31:01; GPR143; ENSG00000101850; TAA
QLVLSFQPR

SEQ ID NO: 27043 - protein, 8 aa, Homo sapiens
  Table A; Target 27043; HLA-B*07:02; GPR143; ENSG00000101850; TAA
QPRAFHAL

SEQ ID NO: 27044 - protein, 8 aa, Homo sapiens
  Table A; Target 27044; HLA-B*08:01; GPR143; ENSG00000101850; TAA
QPRAFHAL

SEQ ID NO: 27045 - protein, 8 aa, Homo sapiens
  Table A; Target 27045; HLA-B*56:01; GPR143; ENSG00000101850; TAA
QPRAFHAL

SEQ ID NO: 27046 - protein, 8 aa, Homo sapiens
  Table A; Target 27046; HLA-C*07:02; GPR143; ENSG00000101850; TAA
QPRAFHAL

SEQ ID NO: 27047 - protein, 10 aa, Homo sapiens
  Table A; Target 27047; HLA-B*07:02; GPR143; ENSG00000101850; TAA
QPRAFHALCL

SEQ ID NO: 27048 - protein, 9 aa, Homo sapiens
  Table A; Target 27048; HLA-A*01:01; GPR143; ENSG00000101850; TAA
QTDINGGSL

SEQ ID NO: 27049 - protein, 9 aa, Homo sapiens
  Table A; Target 27049; HLA-C*05:01; GPR143; ENSG00000101850; TAA
QTDINGGSL

SEQ ID NO: 27050 - protein, 10 aa, Homo sapiens
  Table A; Target 27050; HLA-A*01:01; GPR143; ENSG00000101850; TAA
QTDINGGSLK

SEQ ID NO: 27051 - protein, 10 aa, Homo sapiens
  Table A; Target 27051; HLA-A*03:01; GPR143; ENSG00000101850; TAA
QTDINGGSLK

SEQ ID NO: 27052 - protein, 10 aa, Homo sapiens
  Table A; Target 27052; HLA-A*03:02; GPR143; ENSG00000101850; TAA
QTDINGGSLK

SEQ ID NO: 27053 - protein, 10 aa, Homo sapiens
  Table A; Target 27053; HLA-A*11:01; GPR143; ENSG00000101850; TAA
QTDINGGSLK

SEQ ID NO: 27054 - protein, 10 aa, Homo sapiens
  Table A; Target 27054; HLA-A*68:01; GPR143; ENSG00000101850; TAA
QTDINGGSLK

SEQ ID NO: 27055 - protein, 11 aa, Homo sapiens
  Table A; Target 27055; HLA-A*01:01; GPR143; ENSG00000101850; TAA
QTDINGGSLKP

SEQ ID NO: 27056 - protein, 9 aa, Homo sapiens
  Table A; Target 27056; HLA-A*01:01; GPR143; ENSG00000101850; TAA
QTSDEALSM

SEQ ID NO: 27057 - protein, 9 aa, Homo sapiens
  Table A; Target 27057; HLA-A*26:01; GPR143; ENSG00000101850; TAA
QTSDEALSM

SEQ ID NO: 27058 - protein, 9 aa, Homo sapiens
  Table A; Target 27058; HLA-C*03:03; GPR143; ENSG00000101850; TAA
QTSDEALSM

SEQ ID NO: 27059 - protein, 9 aa, Homo sapiens
  Table A; Target 27059; HLA-C*03:04; GPR143; ENSG00000101850; TAA
QTSDEALSM

SEQ ID NO: 27060 - protein, 9 aa, Homo sapiens
  Table A; Target 27060; HLA-C*07:06; GPR143; ENSG00000101850; TAA
QTSDEALSM

SEQ ID NO: 27061 - protein, 10 aa, Homo sapiens
  Table A; Target 27061; HLA-A*25:01; GPR143; ENSG00000101850; TAA
QTSDEALSML

SEQ ID NO: 27062 - protein, 10 aa, Homo sapiens
  Table A; Target 27062; HLA-A*68:01; GPR143; ENSG00000101850; TAA
QTSDEALSML

SEQ ID NO: 27063 - protein, 10 aa, Homo sapiens
  Table A; Target 27063; HLA-B*39:01; GPR143; ENSG00000101850; TAA
QTSDEALSML

SEQ ID NO: 27064 - protein, 8 aa, Homo sapiens
  Table A; Target 27064; HLA-B*37:01; GPR143; ENSG00000101850; TAA
RDAATQLV

SEQ ID NO: 27065 - protein, 9 aa, Homo sapiens
  Table A; Target 27065; HLA-B*40:01; GPR143; ENSG00000101850; TAA
RDAATQLVL

SEQ ID NO: 27066 - protein, 10 aa, Homo sapiens
  Table A; Target 27066; HLA-A*30:02; GPR143; ENSG00000101850; TAA
RGLDHAIPHY

SEQ ID NO: 27067 - protein, 10 aa, Homo sapiens
  Table A; Target 27067; HLA-B*57:01; GPR143; ENSG00000101850; TAA
RGLDHAIPHY

SEQ ID NO: 27068 - protein, 9 aa, Homo sapiens
  Table A; Target 27068; HLA-A*02:04; GPR143; ENSG00000101850; TAA
RLALGLLQL

SEQ ID NO: 27069 - protein, 10 aa, Homo sapiens
  Table A; Target 27069; HLA-A*02:04; GPR143; ENSG00000101850; TAA
RLALGLLQLL

SEQ ID NO: 27070 - protein, 9 aa, Homo sapiens
  Table A; Target 27070; HLA-A*31:01; GPR143; ENSG00000101850; TAA
RMGAVIKIR

SEQ ID NO: 27071 - protein, 9 aa, Homo sapiens
  Table A; Target 27071; HLA-B*07:02; GPR143; ENSG00000101850; TAA
RPAGPGSPA

SEQ ID NO: 27072 - protein, 9 aa, Homo sapiens
  Table A; Target 27072; HLA-B*54:01; GPR143; ENSG00000101850; TAA
RPAGPGSPA

SEQ ID NO: 27073 - protein, 9 aa, Homo sapiens
  Table A; Target 27073; HLA-B*55:01; GPR143; ENSG00000101850; TAA
RPAGPGSPA

SEQ ID NO: 27074 - protein, 9 aa, Homo sapiens
  Table A; Target 27074; HLA-B*56:01; GPR143; ENSG00000101850; TAA
RPAGPGSPA

SEQ ID NO: 27075 - protein, 9 aa, Homo sapiens
  Table A; Target 27075; HLA-C*07:02; GPR143; ENSG00000101850; TAA
RPAGPGSPA

SEQ ID NO: 27076 - protein, 10 aa, Homo sapiens
  Table A; Target 27076; HLA-B*07:02; GPR143; ENSG00000101850; TAA
RPAGPGSPAT

SEQ ID NO: 27077 - protein, 10 aa, Homo sapiens
  Table A; Target 27077; HLA-B*56:01; GPR143; ENSG00000101850; TAA
RPAGPGSPAT

SEQ ID NO: 27078 - protein, 9 aa, Homo sapiens
  Table A; Target 27078; HLA-B*27:05; GPR143; ENSG00000101850; TAA
RRMGAVIKI

SEQ ID NO: 27079 - protein, 9 aa, Homo sapiens
  Table A; Target 27079; HLA-C*06:02; GPR143; ENSG00000101850; TAA
RRMGAVIKI

SEQ ID NO: 27080 - protein, 9 aa, Homo sapiens
  Table A; Target 27080; HLA-B*58:01; GPR143; ENSG00000101850; TAA
RSAGLSTIL

SEQ ID NO: 27081 - protein, 11 aa, Homo sapiens
  Table A; Target 27081; HLA-A*01:01; GPR143; ENSG00000101850; TAA
RSAGLSTILLY

SEQ ID NO: 27082 - protein, 11 aa, Homo sapiens
  Table A; Target 27082; HLA-A*29:02; GPR143; ENSG00000101850; TAA
RSAGLSTILLY

SEQ ID NO: 27083 - protein, 11 aa, Homo sapiens
  Table A; Target 27083; HLA-A*30:02; GPR143; ENSG00000101850; TAA
RSAGLSTILLY

SEQ ID NO: 27084 - protein, 11 aa, Homo sapiens
  Table A; Target 27084; HLA-B*57:01; GPR143; ENSG00000101850; TAA
RSAGLSTILLY

SEQ ID NO: 27085 - protein, 8 aa, Homo sapiens
  Table A; Target 27085; HLA-A*32:01; GPR143; ENSG00000101850; TAA
RTAAKTTW

SEQ ID NO: 27086 - protein, 8 aa, Homo sapiens
  Table A; Target 27086; HLA-B*57:01; GPR143; ENSG00000101850; TAA
RTAAKTTW

SEQ ID NO: 27087 - protein, 8 aa, Homo sapiens
  Table A; Target 27087; HLA-B*58:01; GPR143; ENSG00000101850; TAA
RTAAKTTW

SEQ ID NO: 27088 - protein, 9 aa, Homo sapiens
  Table A; Target 27088; HLA-C*07:06; GPR143; ENSG00000101850; TAA
SAAEGAHPS

SEQ ID NO: 27089 - protein, 11 aa, Homo sapiens
  Table A; Target 27089; HLA-C*03:03; GPR143; ENSG00000101850; TAA
SAAEGAHPSPL

SEQ ID NO: 27090 - protein, 8 aa, Homo sapiens
  Table A; Target 27090; HLA-B*35:03; GPR143; ENSG00000101850; TAA
SAGLSTIL

SEQ ID NO: 27091 - protein, 10 aa, Homo sapiens
  Table A; Target 27091; HLA-A*01:01; GPR143; ENSG00000101850; TAA
SAGLSTILLY

SEQ ID NO: 27092 - protein, 10 aa, Homo sapiens
  Table A; Target 27092; HLA-A*29:02; GPR143; ENSG00000101850; TAA
SAGLSTILLY

SEQ ID NO: 27093 - protein, 10 aa, Homo sapiens
  Table A; Target 27093; HLA-A*30:02; GPR143; ENSG00000101850; TAA
SAGLSTILLY

SEQ ID NO: 27094 - protein, 9 aa, Homo sapiens
  Table A; Target 27094; HLA-A*01:01; GPR143; ENSG00000101850; TAA
SAMWIQLLY

SEQ ID NO: 27095 - protein, 9 aa, Homo sapiens
  Table A; Target 27095; HLA-A*03:01; GPR143; ENSG00000101850; TAA
SAMWIQLLY

SEQ ID NO: 27096 - protein, 9 aa, Homo sapiens
  Table A; Target 27096; HLA-A*26:01; GPR143; ENSG00000101850; TAA
SAMWIQLLY

SEQ ID NO: 27097 - protein, 9 aa, Homo sapiens
  Table A; Target 27097; HLA-A*29:02; GPR143; ENSG00000101850; TAA
SAMWIQLLY

SEQ ID NO: 27098 - protein, 9 aa, Homo sapiens
  Table A; Target 27098; HLA-B*35:01; GPR143; ENSG00000101850; TAA
SAMWIQLLY

SEQ ID NO: 27099 - protein, 9 aa, Homo sapiens
  Table A; Target 27099; HLA-B*57:01; GPR143; ENSG00000101850; TAA
SAMWIQLLY

SEQ ID NO: 27100 - protein, 9 aa, Homo sapiens
  Table A; Target 27100; HLA-C*02:02; GPR143; ENSG00000101850; TAA
SAMWIQLLY

SEQ ID NO: 27101 - protein, 8 aa, Homo sapiens
  Table A; Target 27101; HLA-B*37:01; GPR143; ENSG00000101850; TAA
SDASTIEI

SEQ ID NO: 27102 - protein, 8 aa, Homo sapiens
  Table A; Target 27102; HLA-B*37:01; GPR143; ENSG00000101850; TAA
SDMNHTEI

SEQ ID NO: 27103 - protein, 9 aa, Homo sapiens
  Table A; Target 27103; HLA-B*37:01; GPR143; ENSG00000101850; TAA
SDMNHTEIW

SEQ ID NO: 27104 - protein, 9 aa, Homo sapiens
  Table A; Target 27104; HLA-B*44:02; GPR143; ENSG00000101850; TAA
SDMNHTEIW

SEQ ID NO: 27105 - protein, 9 aa, Homo sapiens
  Table A; Target 27105; HLA-B*44:03; GPR143; ENSG00000101850; TAA
SDMNHTEIW

SEQ ID NO: 27106 - protein, 9 aa, Homo sapiens
  Table A; Target 27106; HLA-A*30:01; GPR143; ENSG00000101850; TAA
SEGSDASTI

SEQ ID NO: 27107 - protein, 9 aa, Homo sapiens
  Table A; Target 27107; HLA-B*40:01; GPR143; ENSG00000101850; TAA
SEGSDASTI

SEQ ID NO: 27108 - protein, 9 aa, Homo sapiens
  Table A; Target 27108; HLA-B*44:02; GPR143; ENSG00000101850; TAA
SEGSDASTI

SEQ ID NO: 27109 - protein, 9 aa, Homo sapiens
  Table A; Target 27109; HLA-B*44:03; GPR143; ENSG00000101850; TAA
SEGSDASTI

SEQ ID NO: 27110 - protein, 9 aa, Homo sapiens
  Table A; Target 27110; HLA-B*49:01; GPR143; ENSG00000101850; TAA
SEGSDASTI

SEQ ID NO: 27111 - protein, 11 aa, Homo sapiens
  Table A; Target 27111; HLA-B*40:01; GPR143; ENSG00000101850; TAA
SEGSDASTIEI

SEQ ID NO: 27112 - protein, 11 aa, Homo sapiens
  Table A; Target 27112; HLA-B*49:01; GPR143; ENSG00000101850; TAA
SEGSDASTIEI

SEQ ID NO: 27113 - protein, 10 aa, Homo sapiens
  Table A; Target 27113; HLA-A*24:02; GPR143; ENSG00000101850; TAA
SFQPRAFHAL

SEQ ID NO: 27114 - protein, 8 aa, Homo sapiens
  Table A; Target 27114; HLA-B*07:02; GPR143; ENSG00000101850; TAA
SGGLRLAL

SEQ ID NO: 27115 - protein, 8 aa, Homo sapiens
  Table A; Target 27115; HLA-B*08:01; GPR143; ENSG00000101850; TAA
SGGLRLAL

SEQ ID NO: 27116 - protein, 8 aa, Homo sapiens
  Table A; Target 27116; HLA-C*01:02; GPR143; ENSG00000101850; TAA
SGGLRLAL

SEQ ID NO: 27117 - protein, 8 aa, Homo sapiens
  Table A; Target 27117; HLA-C*06:02; GPR143; ENSG00000101850; TAA
SGGLRLAL

SEQ ID NO: 27118 - protein, 8 aa, Homo sapiens
  Table A; Target 27118; HLA-C*07:01; GPR143; ENSG00000101850; TAA
SGGLRLAL

SEQ ID NO: 27119 - protein, 8 aa, Homo sapiens
  Table A; Target 27119; HLA-C*07:02; GPR143; ENSG00000101850; TAA
SGGLRLAL

SEQ ID NO: 27120 - protein, 8 aa, Homo sapiens
  Table A; Target 27120; HLA-C*16:01; GPR143; ENSG00000101850; TAA
SGGLRLAL

SEQ ID NO: 27121 - protein, 9 aa, Homo sapiens
  Table A; Target 27121; HLA-A*03:02; GPR143; ENSG00000101850; TAA
SLGFQSPRK

SEQ ID NO: 27122 - protein, 9 aa, Homo sapiens
  Table A; Target 27122; HLA-A*11:01; GPR143; ENSG00000101850; TAA
SLGFQSPRK

SEQ ID NO: 27123 - protein, 8 aa, Homo sapiens
  Table A; Target 27123; HLA-A*02:03; GPR143; ENSG00000101850; TAA
SLKPVRTA

SEQ ID NO: 27124 - protein, 9 aa, Homo sapiens
  Table A; Target 27124; HLA-A*02:03; GPR143; ENSG00000101850; TAA
SLKPVRTAA

SEQ ID NO: 27125 - protein, 9 aa, Homo sapiens
  Table A; Target 27125; HLA-A*32:01; GPR143; ENSG00000101850; TAA
SLKPVRTAA

SEQ ID NO: 27126 - protein, 9 aa, Homo sapiens
  Table A; Target 27126; HLA-B*07:02; GPR143; ENSG00000101850; TAA
SLKPVRTAA

SEQ ID NO: 27127 - protein, 9 aa, Homo sapiens
  Table A; Target 27127; HLA-B*08:01; GPR143; ENSG00000101850; TAA
SLKPVRTAA

SEQ ID NO: 27128 - protein, 9 aa, Homo sapiens
  Table A; Target 27128; HLA-B*46:01; GPR143; ENSG00000101850; TAA
SLKPVRTAA

SEQ ID NO: 27129 - protein, 10 aa, Homo sapiens
  Table A; Target 27129; HLA-A*03:01; GPR143; ENSG00000101850; TAA
SLKPVRTAAK

SEQ ID NO: 27130 - protein, 10 aa, Homo sapiens
  Table A; Target 27130; HLA-A*03:01; GPR143; ENSG00000101850; TAA
SLLKGRQGIY

SEQ ID NO: 27131 - protein, 10 aa, Homo sapiens
  Table A; Target 27131; HLA-A*30:02; GPR143; ENSG00000101850; TAA
SLLKGRQGIY

SEQ ID NO: 27132 - protein, 8 aa, Homo sapiens
  Table A; Target 27132; HLA-B*55:01; GPR143; ENSG00000101850; TAA
SPATSPPA

SEQ ID NO: 27133 - protein, 8 aa, Homo sapiens
  Table A; Target 27133; HLA-B*56:01; GPR143; ENSG00000101850; TAA
SPATSPPA

SEQ ID NO: 27134 - protein, 10 aa, Homo sapiens
  Table A; Target 27134; HLA-B*07:02; GPR143; ENSG00000101850; TAA
SPATSPPASV

SEQ ID NO: 27135 - protein, 10 aa, Homo sapiens
  Table A; Target 27135; HLA-B*56:01; GPR143; ENSG00000101850; TAA
SPATSPPASV

SEQ ID NO: 27136 - protein, 10 aa, Homo sapiens
  Table A; Target 27136; HLA-C*07:02; GPR143; ENSG00000101850; TAA
SPATSPPASV

SEQ ID NO: 27137 - protein, 11 aa, Homo sapiens
  Table A; Target 27137; HLA-A*68:01; GPR143; ENSG00000101850; TAA
SPATSPPASVR

SEQ ID NO: 27138 - protein, 11 aa, Homo sapiens
  Table A; Target 27138; HLA-C*07:06; GPR143; ENSG00000101850; TAA
SPATSPPASVR

SEQ ID NO: 27139 - protein, 10 aa, Homo sapiens
  Table A; Target 27139; HLA-B*54:01; GPR143; ENSG00000101850; TAA
SPLMPHENPA

SEQ ID NO: 27140 - protein, 10 aa, Homo sapiens
  Table A; Target 27140; HLA-B*55:01; GPR143; ENSG00000101850; TAA
SPLMPHENPA

SEQ ID NO: 27141 - protein, 10 aa, Homo sapiens
  Table A; Target 27141; HLA-B*56:01; GPR143; ENSG00000101850; TAA
SPLMPHENPA

SEQ ID NO: 27142 - protein, 8 aa, Homo sapiens
  Table A; Target 27142; HLA-B*51:01; GPR143; ENSG00000101850; TAA
SPPASVRI

SEQ ID NO: 27143 - protein, 9 aa, Homo sapiens
  Table A; Target 27143; HLA-B*07:02; GPR143; ENSG00000101850; TAA
SPPASVRIL

SEQ ID NO: 27144 - protein, 9 aa, Homo sapiens
  Table A; Target 27144; HLA-C*01:02; GPR143; ENSG00000101850; TAA
SPPASVRIL

SEQ ID NO: 27145 - protein, 9 aa, Homo sapiens
  Table A; Target 27145; HLA-C*07:02; GPR143; ENSG00000101850; TAA
SPPASVRIL

SEQ ID NO: 27146 - protein, 11 aa, Homo sapiens
  Table A; Target 27146; HLA-B*54:01; GPR143; ENSG00000101850; TAA
SPPASVRILRA

SEQ ID NO: 27147 - protein, 11 aa, Homo sapiens
  Table A; Target 27147; HLA-B*07:02; GPR143; ENSG00000101850; TAA
SPRKEIQWESL

SEQ ID NO: 27148 - protein, 8 aa, Homo sapiens
  Table A; Target 27148; HLA-B*56:01; GPR143; ENSG00000101850; TAA
SPRLGTFC

SEQ ID NO: 27149 - protein, 9 aa, Homo sapiens
  Table A; Target 27149; HLA-C*07:02; GPR143; ENSG00000101850; TAA
SPRLGTFCC

SEQ ID NO: 27150 - protein, 11 aa, Homo sapiens
  Table A; Target 27150; HLA-B*39:01; GPR143; ENSG00000101850; TAA
SQVGGQTSDEA

SEQ ID NO: 27151 - protein, 8 aa, Homo sapiens
  Table A; Target 27151; HLA-A*02:03; GPR143; ENSG00000101850; TAA
STIEIHTA

SEQ ID NO: 27152 - protein, 9 aa, Homo sapiens
  Table A; Target 27152; HLA-B*57:01; GPR143; ENSG00000101850; TAA
STILLYHIM

SEQ ID NO: 27153 - protein, 11 aa, Homo sapiens
  Table A; Target 27153; HLA-B*57:01; GPR143; ENSG00000101850; TAA
STILLYHIMAW

SEQ ID NO: 27154 - protein, 11 aa, Homo sapiens
  Table A; Target 27154; HLA-A*25:01; GPR143; ENSG00000101850; TAA
SVSDMNHTEIW

SEQ ID NO: 27155 - protein, 8 aa, Homo sapiens
  Table A; Target 27155; HLA-A*11:01; GPR143; ENSG00000101850; TAA
TAVASLLK

SEQ ID NO: 27156 - protein, 8 aa, Homo sapiens
  Table A; Target 27156; HLA-B*27:02; GPR143; ENSG00000101850; TAA
TAVASLLK

SEQ ID NO: 27157 - protein, 8 aa, Homo sapiens
  Table A; Target 27157; HLA-B*51:01; GPR143; ENSG00000101850; TAA
TAVASLLK

SEQ ID NO: 27158 - protein, 9 aa, Homo sapiens
  Table A; Target 27158; HLA-C*06:02; GPR143; ENSG00000101850; TAA
TAVASLLKG

SEQ ID NO: 27159 - protein, 9 aa, Homo sapiens
  Table A; Target 27159; HLA-C*07:01; GPR143; ENSG00000101850; TAA
TAVASLLKG

SEQ ID NO: 27160 - protein, 10 aa, Homo sapiens
  Table A; Target 27160; HLA-A*33:01; GPR143; ENSG00000101850; TAA
TAVASLLKGR

SEQ ID NO: 27161 - protein, 10 aa, Homo sapiens
  Table A; Target 27161; HLA-A*33:03; GPR143; ENSG00000101850; TAA
TAVASLLKGR

SEQ ID NO: 27162 - protein, 10 aa, Homo sapiens
  Table A; Target 27162; HLA-A*68:01; GPR143; ENSG00000101850; TAA
TAVASLLKGR

SEQ ID NO: 27163 - protein, 10 aa, Homo sapiens
  Table A; Target 27163; HLA-C*07:06; GPR143; ENSG00000101850; TAA
TAVASLLKGR

SEQ ID NO: 27164 - protein, 8 aa, Homo sapiens
  Table A; Target 27164; HLA-A*30:01; GPR143; ENSG00000101850; TAA
TDINGGSL

SEQ ID NO: 27165 - protein, 8 aa, Homo sapiens
  Table A; Target 27165; HLA-B*39:01; GPR143; ENSG00000101850; TAA
TDINGGSL

SEQ ID NO: 27166 - protein, 8 aa, Homo sapiens
  Table A; Target 27166; HLA-B*40:02; GPR143; ENSG00000101850; TAA
TDINGGSL

SEQ ID NO: 27167 - protein, 8 aa, Homo sapiens
  Table A; Target 27167; HLA-C*03:04; GPR143; ENSG00000101850; TAA
TDINGGSL

SEQ ID NO: 27168 - protein, 8 aa, Homo sapiens
  Table A; Target 27168; HLA-C*04:01; GPR143; ENSG00000101850; TAA
TDINGGSL

SEQ ID NO: 27169 - protein, 9 aa, Homo sapiens
  Table A; Target 27169; HLA-A*03:02; GPR143; ENSG00000101850; TAA
TDINGGSLK

SEQ ID NO: 27170 - protein, 9 aa, Homo sapiens
  Table A; Target 27170; HLA-A*11:01; GPR143; ENSG00000101850; TAA
TDINGGSLK

SEQ ID NO: 27171 - protein, 9 aa, Homo sapiens
  Table A; Target 27171; HLA-C*04:01; GPR143; ENSG00000101850; TAA
TDINGGSLK

SEQ ID NO: 27172 - protein, 10 aa, Homo sapiens
  Table A; Target 27172; HLA-C*04:01; GPR143; ENSG00000101850; TAA
TDINGGSLKP

SEQ ID NO: 27173 - protein, 10 aa, Homo sapiens
  Table A; Target 27173; HLA-C*06:02; GPR143; ENSG00000101850; TAA
TDINGGSLKP

SEQ ID NO: 27174 - protein, 10 aa, Homo sapiens
  Table A; Target 27174; HLA-C*07:01; GPR143; ENSG00000101850; TAA
TDINGGSLKP

SEQ ID NO: 27175 - protein, 10 aa, Homo sapiens
  Table A; Target 27175; HLA-C*07:04; GPR143; ENSG00000101850; TAA
TDINGGSLKP

SEQ ID NO: 27176 - protein, 10 aa, Homo sapiens
  Table A; Target 27176; HLA-C*16:02; GPR143; ENSG00000101850; TAA
TDINGGSLKP

SEQ ID NO: 27177 - protein, 11 aa, Homo sapiens
  Table A; Target 27177; HLA-A*68:02; GPR143; ENSG00000101850; TAA
TDINGGSLKPV

SEQ ID NO: 27178 - protein, 11 aa, Homo sapiens
  Table A; Target 27178; HLA-B*07:02; GPR143; ENSG00000101850; TAA
TDINGGSLKPV

SEQ ID NO: 27179 - protein, 11 aa, Homo sapiens
  Table A; Target 27179; HLA-C*04:01; GPR143; ENSG00000101850; TAA
TDINGGSLKPV

SEQ ID NO: 27180 - protein, 11 aa, Homo sapiens
  Table A; Target 27180; HLA-C*06:02; GPR143; ENSG00000101850; TAA
TDINGGSLKPV

SEQ ID NO: 27181 - protein, 11 aa, Homo sapiens
  Table A; Target 27181; HLA-C*07:01; GPR143; ENSG00000101850; TAA
TDINGGSLKPV

SEQ ID NO: 27182 - protein, 11 aa, Homo sapiens
  Table A; Target 27182; HLA-C*16:02; GPR143; ENSG00000101850; TAA
TDINGGSLKPV

SEQ ID NO: 27183 - protein, 8 aa, Homo sapiens
  Table A; Target 27183; HLA-B*18:01; GPR143; ENSG00000101850; TAA
TEIWPAAF

SEQ ID NO: 27184 - protein, 8 aa, Homo sapiens
  Table A; Target 27184; HLA-B*37:01; GPR143; ENSG00000101850; TAA
TEIWPAAF

SEQ ID NO: 27185 - protein, 8 aa, Homo sapiens
  Table A; Target 27185; HLA-B*44:02; GPR143; ENSG00000101850; TAA
TEIWPAAF

SEQ ID NO: 27186 - protein, 9 aa, Homo sapiens
  Table A; Target 27186; HLA-B*49:01; GPR143; ENSG00000101850; TAA
TEIWPAAFC

SEQ ID NO: 27187 - protein, 9 aa, Homo sapiens
  Table A; Target 27187; HLA-B*37:01; GPR143; ENSG00000101850; TAA
TENERRMGA

SEQ ID NO: 27188 - protein, 9 aa, Homo sapiens
  Table A; Target 27188; HLA-A*02:01; GPR143; ENSG00000101850; TAA
TMYLPLLLV

SEQ ID NO: 27189 - protein, 9 aa, Homo sapiens
  Table A; Target 27189; HLA-A*02:03; GPR143; ENSG00000101850; TAA
TMYLPLLLV

SEQ ID NO: 27190 - protein, 9 aa, Homo sapiens
  Table A; Target 27190; HLA-A*02:07; GPR143; ENSG00000101850; TAA
TMYLPLLLV

SEQ ID NO: 27191 - protein, 9 aa, Homo sapiens
  Table A; Target 27191; HLA-B*13:02; GPR143; ENSG00000101850; TAA
TMYLPLLLV

SEQ ID NO: 27192 - protein, 9 aa, Homo sapiens
  Table A; Target 27192; HLA-B*51:01; GPR143; ENSG00000101850; TAA
TMYLPLLLV

SEQ ID NO: 27193 - protein, 10 aa, Homo sapiens
  Table A; Target 27193; HLA-A*31:01; GPR143; ENSG00000101850; TAA
TQLVLSFQPR

SEQ ID NO: 27194 - protein, 9 aa, Homo sapiens
  Table A; Target 27194; HLA-B*38:01; GPR143; ENSG00000101850; TAA
TRDAATQLV

SEQ ID NO: 27195 - protein, 10 aa, Homo sapiens
  Table A; Target 27195; HLA-B*27:05; GPR143; ENSG00000101850; TAA
TRDAATQLVL

SEQ ID NO: 27196 - protein, 10 aa, Homo sapiens
  Table A; Target 27196; HLA-B*38:01; GPR143; ENSG00000101850; TAA
TRDAATQLVL

SEQ ID NO: 27197 - protein, 8 aa, Homo sapiens
  Table A; Target 27197; HLA-C*03:03; GPR143; ENSG00000101850; TAA
TSDEALSM

SEQ ID NO: 27198 - protein, 8 aa, Homo sapiens
  Table A; Target 27198; HLA-C*03:04; GPR143; ENSG00000101850; TAA
TSDEALSM

SEQ ID NO: 27199 - protein, 8 aa, Homo sapiens
  Table A; Target 27199; HLA-C*05:01; GPR143; ENSG00000101850; TAA
TSDEALSM

SEQ ID NO: 27200 - protein, 9 aa, Homo sapiens
  Table A; Target 27200; HLA-A*01:01; GPR143; ENSG00000101850; TAA
TSDEALSML

SEQ ID NO: 27201 - protein, 9 aa, Homo sapiens
  Table A; Target 27201; HLA-A*02:07; GPR143; ENSG00000101850; TAA
TSDEALSML

SEQ ID NO: 27202 - protein, 9 aa, Homo sapiens
  Table A; Target 27202; HLA-B*38:01; GPR143; ENSG00000101850; TAA
TSDEALSML

SEQ ID NO: 27203 - protein, 9 aa, Homo sapiens
  Table A; Target 27203; HLA-B*39:01; GPR143; ENSG00000101850; TAA
TSDEALSML

SEQ ID NO: 27204 - protein, 9 aa, Homo sapiens
  Table A; Target 27204; HLA-C*04:01; GPR143; ENSG00000101850; TAA
TSDEALSML

SEQ ID NO: 27205 - protein, 9 aa, Homo sapiens
  Table A; Target 27205; HLA-C*05:01; GPR143; ENSG00000101850; TAA
TSDEALSML

SEQ ID NO: 27206 - protein, 10 aa, Homo sapiens
  Table A; Target 27206; HLA-C*01:02; GPR143; ENSG00000101850; TAA
TSPPASVRIL

SEQ ID NO: 27207 - protein, 10 aa, Homo sapiens
  Table A; Target 27207; HLA-C*07:02; GPR143; ENSG00000101850; TAA
TSPPASVRIL

SEQ ID NO: 27208 - protein, 11 aa, Homo sapiens
  Table A; Target 27208; HLA-A*31:01; GPR143; ENSG00000101850; TAA
TSPPASVRILR

SEQ ID NO: 27209 - protein, 8 aa, Homo sapiens
  Table A; Target 27209; HLA-A*32:01; GPR143; ENSG00000101850; TAA
TVTAVASL

SEQ ID NO: 27210 - protein, 9 aa, Homo sapiens
  Table A; Target 27210; HLA-A*02:01; GPR143; ENSG00000101850; TAA
TVTAVASLL

SEQ ID NO: 27211 - protein, 9 aa, Homo sapiens
  Table A; Target 27211; HLA-A*02:03; GPR143; ENSG00000101850; TAA
TVTAVASLL

SEQ ID NO: 27212 - protein, 9 aa, Homo sapiens
  Table A; Target 27212; HLA-A*02:07; GPR143; ENSG00000101850; TAA
TVTAVASLL

SEQ ID NO: 27213 - protein, 9 aa, Homo sapiens
  Table A; Target 27213; HLA-A*03:02; GPR143; ENSG00000101850; TAA
TVTAVASLL

SEQ ID NO: 27214 - protein, 9 aa, Homo sapiens
  Table A; Target 27214; HLA-A*23:01; GPR143; ENSG00000101850; TAA
TVTAVASLL

SEQ ID NO: 27215 - protein, 9 aa, Homo sapiens
  Table A; Target 27215; HLA-A*24:02; GPR143; ENSG00000101850; TAA
TVTAVASLL

SEQ ID NO: 27216 - protein, 9 aa, Homo sapiens
  Table A; Target 27216; HLA-A*25:01; GPR143; ENSG00000101850; TAA
TVTAVASLL

SEQ ID NO: 27217 - protein, 9 aa, Homo sapiens
  Table A; Target 27217; HLA-A*26:01; GPR143; ENSG00000101850; TAA
TVTAVASLL

SEQ ID NO: 27218 - protein, 9 aa, Homo sapiens
  Table A; Target 27218; HLA-A*29:02; GPR143; ENSG00000101850; TAA
TVTAVASLL

SEQ ID NO: 27219 - protein, 9 aa, Homo sapiens
  Table A; Target 27219; HLA-A*30:01; GPR143; ENSG00000101850; TAA
TVTAVASLL

SEQ ID NO: 27220 - protein, 9 aa, Homo sapiens
  Table A; Target 27220; HLA-A*31:01; GPR143; ENSG00000101850; TAA
TVTAVASLL

SEQ ID NO: 27221 - protein, 9 aa, Homo sapiens
  Table A; Target 27221; HLA-A*32:01; GPR143; ENSG00000101850; TAA
TVTAVASLL

SEQ ID NO: 27222 - protein, 9 aa, Homo sapiens
  Table A; Target 27222; HLA-A*33:03; GPR143; ENSG00000101850; TAA
TVTAVASLL

SEQ ID NO: 27223 - protein, 9 aa, Homo sapiens
  Table A; Target 27223; HLA-A*68:01; GPR143; ENSG00000101850; TAA
TVTAVASLL

SEQ ID NO: 27224 - protein, 9 aa, Homo sapiens
  Table A; Target 27224; HLA-A*68:02; GPR143; ENSG00000101850; TAA
TVTAVASLL

SEQ ID NO: 27225 - protein, 9 aa, Homo sapiens
  Table A; Target 27225; HLA-B*07:02; GPR143; ENSG00000101850; TAA
TVTAVASLL

SEQ ID NO: 27226 - protein, 9 aa, Homo sapiens
  Table A; Target 27226; HLA-B*13:02; GPR143; ENSG00000101850; TAA
TVTAVASLL

SEQ ID NO: 27227 - protein, 9 aa, Homo sapiens
  Table A; Target 27227; HLA-B*15:01; GPR143; ENSG00000101850; TAA
TVTAVASLL

SEQ ID NO: 27228 - protein, 9 aa, Homo sapiens
  Table A; Target 27228; HLA-B*27:02; GPR143; ENSG00000101850; TAA
TVTAVASLL

SEQ ID NO: 27229 - protein, 9 aa, Homo sapiens
  Table A; Target 27229; HLA-B*27:05; GPR143; ENSG00000101850; TAA
TVTAVASLL

SEQ ID NO: 27230 - protein, 9 aa, Homo sapiens
  Table A; Target 27230; HLA-B*35:01; GPR143; ENSG00000101850; TAA
TVTAVASLL

SEQ ID NO: 27231 - protein, 9 aa, Homo sapiens
  Table A; Target 27231; HLA-B*35:03; GPR143; ENSG00000101850; TAA
TVTAVASLL

SEQ ID NO: 27232 - protein, 9 aa, Homo sapiens
  Table A; Target 27232; HLA-B*38:01; GPR143; ENSG00000101850; TAA
TVTAVASLL

SEQ ID NO: 27233 - protein, 9 aa, Homo sapiens
  Table A; Target 27233; HLA-B*39:01; GPR143; ENSG00000101850; TAA
TVTAVASLL

SEQ ID NO: 27234 - protein, 9 aa, Homo sapiens
  Table A; Target 27234; HLA-B*40:01; GPR143; ENSG00000101850; TAA
TVTAVASLL

SEQ ID NO: 27235 - protein, 9 aa, Homo sapiens
  Table A; Target 27235; HLA-B*40:02; GPR143; ENSG00000101850; TAA
TVTAVASLL

SEQ ID NO: 27236 - protein, 9 aa, Homo sapiens
  Table A; Target 27236; HLA-B*51:01; GPR143; ENSG00000101850; TAA
TVTAVASLL

SEQ ID NO: 27237 - protein, 9 aa, Homo sapiens
  Table A; Target 27237; HLA-B*55:01; GPR143; ENSG00000101850; TAA
TVTAVASLL

SEQ ID NO: 27238 - protein, 9 aa, Homo sapiens
  Table A; Target 27238; HLA-B*57:01; GPR143; ENSG00000101850; TAA
TVTAVASLL

SEQ ID NO: 27239 - protein, 9 aa, Homo sapiens
  Table A; Target 27239; HLA-B*58:01; GPR143; ENSG00000101850; TAA
TVTAVASLL

SEQ ID NO: 27240 - protein, 9 aa, Homo sapiens
  Table A; Target 27240; HLA-C*01:02; GPR143; ENSG00000101850; TAA
TVTAVASLL

SEQ ID NO: 27241 - protein, 9 aa, Homo sapiens
  Table A; Target 27241; HLA-C*02:02; GPR143; ENSG00000101850; TAA
TVTAVASLL

SEQ ID NO: 27242 - protein, 9 aa, Homo sapiens
  Table A; Target 27242; HLA-C*03:03; GPR143; ENSG00000101850; TAA
TVTAVASLL

SEQ ID NO: 27243 - protein, 9 aa, Homo sapiens
  Table A; Target 27243; HLA-C*03:04; GPR143; ENSG00000101850; TAA
TVTAVASLL

SEQ ID NO: 27244 - protein, 9 aa, Homo sapiens
  Table A; Target 27244; HLA-C*04:01; GPR143; ENSG00000101850; TAA
TVTAVASLL

SEQ ID NO: 27245 - protein, 9 aa, Homo sapiens
  Table A; Target 27245; HLA-C*05:01; GPR143; ENSG00000101850; TAA
TVTAVASLL

SEQ ID NO: 27246 - protein, 9 aa, Homo sapiens
  Table A; Target 27246; HLA-C*06:02; GPR143; ENSG00000101850; TAA
TVTAVASLL

SEQ ID NO: 27247 - protein, 9 aa, Homo sapiens
  Table A; Target 27247; HLA-C*07:01; GPR143; ENSG00000101850; TAA
TVTAVASLL

SEQ ID NO: 27248 - protein, 9 aa, Homo sapiens
  Table A; Target 27248; HLA-C*07:02; GPR143; ENSG00000101850; TAA
TVTAVASLL

SEQ ID NO: 27249 - protein, 9 aa, Homo sapiens
  Table A; Target 27249; HLA-C*07:04; GPR143; ENSG00000101850; TAA
TVTAVASLL

SEQ ID NO: 27250 - protein, 9 aa, Homo sapiens
  Table A; Target 27250; HLA-C*07:06; GPR143; ENSG00000101850; TAA
TVTAVASLL

SEQ ID NO: 27251 - protein, 9 aa, Homo sapiens
  Table A; Target 27251; HLA-C*12:03; GPR143; ENSG00000101850; TAA
TVTAVASLL

SEQ ID NO: 27252 - protein, 9 aa, Homo sapiens
  Table A; Target 27252; HLA-C*14:02; GPR143; ENSG00000101850; TAA
TVTAVASLL

SEQ ID NO: 27253 - protein, 9 aa, Homo sapiens
  Table A; Target 27253; HLA-C*16:01; GPR143; ENSG00000101850; TAA
TVTAVASLL

SEQ ID NO: 27254 - protein, 9 aa, Homo sapiens
  Table A; Target 27254; HLA-C*16:02; GPR143; ENSG00000101850; TAA
TVTAVASLL

SEQ ID NO: 27255 - protein, 9 aa, Homo sapiens
  Table A; Target 27255; HLA-C*16:04; GPR143; ENSG00000101850; TAA
TVTAVASLL

SEQ ID NO: 27256 - protein, 10 aa, Homo sapiens
  Table A; Target 27256; HLA-A*03:01; GPR143; ENSG00000101850; TAA
TVTAVASLLK

SEQ ID NO: 27257 - protein, 10 aa, Homo sapiens
  Table A; Target 27257; HLA-A*03:02; GPR143; ENSG00000101850; TAA
TVTAVASLLK

SEQ ID NO: 27258 - protein, 10 aa, Homo sapiens
  Table A; Target 27258; HLA-A*11:01; GPR143; ENSG00000101850; TAA
TVTAVASLLK

SEQ ID NO: 27259 - protein, 10 aa, Homo sapiens
  Table A; Target 27259; HLA-A*68:01; GPR143; ENSG00000101850; TAA
TVTAVASLLK

SEQ ID NO: 27260 - protein, 10 aa, Homo sapiens
  Table A; Target 27260; HLA-B*27:02; GPR143; ENSG00000101850; TAA
TVTAVASLLK

SEQ ID NO: 27261 - protein, 10 aa, Homo sapiens
  Table A; Target 27261; HLA-C*04:01; GPR143; ENSG00000101850; TAA
TVTAVASLLK

SEQ ID NO: 27262 - protein, 10 aa, Homo sapiens
  Table A; Target 27262; HLA-C*06:02; GPR143; ENSG00000101850; TAA
TVTAVASLLK

SEQ ID NO: 27263 - protein, 10 aa, Homo sapiens
  Table A; Target 27263; HLA-C*07:06; GPR143; ENSG00000101850; TAA
TVTAVASLLK

SEQ ID NO: 27264 - protein, 11 aa, Homo sapiens
  Table A; Target 27264; HLA-C*04:01; GPR143; ENSG00000101850; TAA
TVTAVASLLKG

SEQ ID NO: 27265 - protein, 11 aa, Homo sapiens
  Table A; Target 27265; HLA-C*06:02; GPR143; ENSG00000101850; TAA
TVTAVASLLKG

SEQ ID NO: 27266 - protein, 9 aa, Homo sapiens
  Table A; Target 27266; HLA-A*02:04; GPR143; ENSG00000101850; TAA
TVWLGFPNF

SEQ ID NO: 27267 - protein, 9 aa, Homo sapiens
  Table A; Target 27267; HLA-A*02:07; GPR143; ENSG00000101850; TAA
TVWLGFPNF

SEQ ID NO: 27268 - protein, 9 aa, Homo sapiens
  Table A; Target 27268; HLA-B*57:01; GPR143; ENSG00000101850; TAA
TVWLGFPNF

SEQ ID NO: 27269 - protein, 8 aa, Homo sapiens
  Table A; Target 27269; HLA-C*12:03; GPR143; ENSG00000101850; TAA
VANPILFQ

SEQ ID NO: 27270 - protein, 9 aa, Homo sapiens
  Table A; Target 27270; HLA-A*01:01; GPR143; ENSG00000101850; TAA
VANPILFQK

SEQ ID NO: 27271 - protein, 9 aa, Homo sapiens
  Table A; Target 27271; HLA-A*03:01; GPR143; ENSG00000101850; TAA
VANPILFQK

SEQ ID NO: 27272 - protein, 9 aa, Homo sapiens
  Table A; Target 27272; HLA-A*03:02; GPR143; ENSG00000101850; TAA
VANPILFQK

SEQ ID NO: 27273 - protein, 9 aa, Homo sapiens
  Table A; Target 27273; HLA-A*11:01; GPR143; ENSG00000101850; TAA
VANPILFQK

SEQ ID NO: 27274 - protein, 9 aa, Homo sapiens
  Table A; Target 27274; HLA-A*29:02; GPR143; ENSG00000101850; TAA
VANPILFQK

SEQ ID NO: 27275 - protein, 9 aa, Homo sapiens
  Table A; Target 27275; HLA-A*31:01; GPR143; ENSG00000101850; TAA
VANPILFQK

SEQ ID NO: 27276 - protein, 9 aa, Homo sapiens
  Table A; Target 27276; HLA-A*33:01; GPR143; ENSG00000101850; TAA
VANPILFQK

SEQ ID NO: 27277 - protein, 9 aa, Homo sapiens
  Table A; Target 27277; HLA-A*33:03; GPR143; ENSG00000101850; TAA
VANPILFQK

SEQ ID NO: 27278 - protein, 9 aa, Homo sapiens
  Table A; Target 27278; HLA-A*68:01; GPR143; ENSG00000101850; TAA
VANPILFQK

SEQ ID NO: 27279 - protein, 9 aa, Homo sapiens
  Table A; Target 27279; HLA-A*68:02; GPR143; ENSG00000101850; TAA
VANPILFQK

SEQ ID NO: 27280 - protein, 9 aa, Homo sapiens
  Table A; Target 27280; HLA-B*13:02; GPR143; ENSG00000101850; TAA
VANPILFQK

SEQ ID NO: 27281 - protein, 9 aa, Homo sapiens
  Table A; Target 27281; HLA-B*27:02; GPR143; ENSG00000101850; TAA
VANPILFQK

SEQ ID NO: 27282 - protein, 9 aa, Homo sapiens
  Table A; Target 27282; HLA-B*27:05; GPR143; ENSG00000101850; TAA
VANPILFQK

SEQ ID NO: 27283 - protein, 9 aa, Homo sapiens
  Table A; Target 27283; HLA-B*57:01; GPR143; ENSG00000101850; TAA
VANPILFQK

SEQ ID NO: 27284 - protein, 9 aa, Homo sapiens
  Table A; Target 27284; HLA-B*58:01; GPR143; ENSG00000101850; TAA
VANPILFQK

SEQ ID NO: 27285 - protein, 9 aa, Homo sapiens
  Table A; Target 27285; HLA-C*02:02; GPR143; ENSG00000101850; TAA
VANPILFQK

SEQ ID NO: 27286 - protein, 9 aa, Homo sapiens
  Table A; Target 27286; HLA-C*06:02; GPR143; ENSG00000101850; TAA
VANPILFQK

SEQ ID NO: 27287 - protein, 9 aa, Homo sapiens
  Table A; Target 27287; HLA-C*07:06; GPR143; ENSG00000101850; TAA
VANPILFQK

SEQ ID NO: 27288 - protein, 9 aa, Homo sapiens
  Table A; Target 27288; HLA-C*12:03; GPR143; ENSG00000101850; TAA
VANPILFQK

SEQ ID NO: 27289 - protein, 9 aa, Homo sapiens
  Table A; Target 27289; HLA-C*16:02; GPR143; ENSG00000101850; TAA
VANPILFQK

SEQ ID NO: 27290 - protein, 9 aa, Homo sapiens
  Table A; Target 27290; HLA-A*31:01; GPR143; ENSG00000101850; TAA
VDAYLVIRR

SEQ ID NO: 27291 - protein, 9 aa, Homo sapiens
  Table A; Target 27291; HLA-A*33:01; GPR143; ENSG00000101850; TAA
VDAYLVIRR

SEQ ID NO: 27292 - protein, 9 aa, Homo sapiens
  Table A; Target 27292; HLA-A*68:01; GPR143; ENSG00000101850; TAA
VDAYLVIRR

SEQ ID NO: 27293 - protein, 9 aa, Homo sapiens
  Table A; Target 27293; HLA-A*68:02; GPR143; ENSG00000101850; TAA
VDAYLVIRR

SEQ ID NO: 27294 - protein, 9 aa, Homo sapiens
  Table A; Target 27294; HLA-B*27:02; GPR143; ENSG00000101850; TAA
VDAYLVIRR

SEQ ID NO: 27295 - protein, 8 aa, Homo sapiens
  Table A; Target 27295; HLA-B*18:01; GPR143; ENSG00000101850; TAA
VEGAAMLY

SEQ ID NO: 27296 - protein, 8 aa, Homo sapiens
  Table A; Target 27296; HLA-B*27:02; GPR143; ENSG00000101850; TAA
VEGAAMLY

SEQ ID NO: 27297 - protein, 8 aa, Homo sapiens
  Table A; Target 27297; HLA-B*37:01; GPR143; ENSG00000101850; TAA
VEGAAMLY

SEQ ID NO: 27298 - protein, 8 aa, Homo sapiens
  Table A; Target 27298; HLA-B*44:02; GPR143; ENSG00000101850; TAA
VEGAAMLY

SEQ ID NO: 27299 - protein, 8 aa, Homo sapiens
  Table A; Target 27299; HLA-B*44:03; GPR143; ENSG00000101850; TAA
VEGAAMLY

SEQ ID NO: 27300 - protein, 8 aa, Homo sapiens
  Table A; Target 27300; HLA-B*49:01; GPR143; ENSG00000101850; TAA
VEGAAMLY

SEQ ID NO: 27301 - protein, 8 aa, Homo sapiens
  Table A; Target 27301; HLA-C*07:01; GPR143; ENSG00000101850; TAA
VEGAAMLY

SEQ ID NO: 27302 - protein, 8 aa, Homo sapiens
  Table A; Target 27302; HLA-C*07:04; GPR143; ENSG00000101850; TAA
VEGAAMLY

SEQ ID NO: 27303 - protein, 8 aa, Homo sapiens
  Table A; Target 27303; HLA-C*12:03; GPR143; ENSG00000101850; TAA
VEGAAMLY

SEQ ID NO: 27304 - protein, 8 aa, Homo sapiens
  Table A; Target 27304; HLA-C*16:04; GPR143; ENSG00000101850; TAA
VEGAAMLY

SEQ ID NO: 27305 - protein, 9 aa, Homo sapiens
  Table A; Target 27305; HLA-B*18:01; GPR143; ENSG00000101850; TAA
VEGAAMLYY

SEQ ID NO: 27306 - protein, 9 aa, Homo sapiens
  Table A; Target 27306; HLA-B*27:02; GPR143; ENSG00000101850; TAA
VEGAAMLYY

SEQ ID NO: 27307 - protein, 9 aa, Homo sapiens
  Table A; Target 27307; HLA-B*44:02; GPR143; ENSG00000101850; TAA
VEGAAMLYY

SEQ ID NO: 27308 - protein, 9 aa, Homo sapiens
  Table A; Target 27308; HLA-B*44:03; GPR143; ENSG00000101850; TAA
VEGAAMLYY

SEQ ID NO: 27309 - protein, 9 aa, Homo sapiens
  Table A; Target 27309; HLA-A*03:01; GPR143; ENSG00000101850; TAA
VLSFQPRAF

SEQ ID NO: 27310 - protein, 9 aa, Homo sapiens
  Table A; Target 27310; HLA-A*32:01; GPR143; ENSG00000101850; TAA
VLSFQPRAF

SEQ ID NO: 27311 - protein, 9 aa, Homo sapiens
  Table A; Target 27311; HLA-C*16:01; GPR143; ENSG00000101850; TAA
VLSFQPRAF

SEQ ID NO: 27312 - protein, 9 aa, Homo sapiens
  Table A; Target 27312; HLA-A*02:01; GPR143; ENSG00000101850; TAA
VLVANPILF

SEQ ID NO: 27313 - protein, 9 aa, Homo sapiens
  Table A; Target 27313; HLA-A*02:07; GPR143; ENSG00000101850; TAA
VLVANPILF

SEQ ID NO: 27314 - protein, 9 aa, Homo sapiens
  Table A; Target 27314; HLA-A*23:01; GPR143; ENSG00000101850; TAA
VLVANPILF

SEQ ID NO: 27315 - protein, 9 aa, Homo sapiens
  Table A; Target 27315; HLA-A*24:02; GPR143; ENSG00000101850; TAA
VLVANPILF

SEQ ID NO: 27316 - protein, 9 aa, Homo sapiens
  Table A; Target 27316; HLA-A*29:02; GPR143; ENSG00000101850; TAA
VLVANPILF

SEQ ID NO: 27317 - protein, 9 aa, Homo sapiens
  Table A; Target 27317; HLA-A*32:01; GPR143; ENSG00000101850; TAA
VLVANPILF

SEQ ID NO: 27318 - protein, 9 aa, Homo sapiens
  Table A; Target 27318; HLA-B*15:01; GPR143; ENSG00000101850; TAA
VLVANPILF

SEQ ID NO: 27319 - protein, 9 aa, Homo sapiens
  Table A; Target 27319; HLA-B*15:03; GPR143; ENSG00000101850; TAA
VLVANPILF

SEQ ID NO: 27320 - protein, 9 aa, Homo sapiens
  Table A; Target 27320; HLA-B*46:01; GPR143; ENSG00000101850; TAA
VLVANPILF

SEQ ID NO: 27321 - protein, 9 aa, Homo sapiens
  Table A; Target 27321; HLA-B*57:01; GPR143; ENSG00000101850; TAA
VLVANPILF

SEQ ID NO: 27322 - protein, 9 aa, Homo sapiens
  Table A; Target 27322; HLA-C*02:02; GPR143; ENSG00000101850; TAA
VLVANPILF

SEQ ID NO: 27323 - protein, 9 aa, Homo sapiens
  Table A; Target 27323; HLA-C*07:01; GPR143; ENSG00000101850; TAA
VLVANPILF

SEQ ID NO: 27324 - protein, 9 aa, Homo sapiens
  Table A; Target 27324; HLA-C*07:04; GPR143; ENSG00000101850; TAA
VLVANPILF

SEQ ID NO: 27325 - protein, 9 aa, Homo sapiens
  Table A; Target 27325; HLA-C*12:03; GPR143; ENSG00000101850; TAA
VLVANPILF

SEQ ID NO: 27326 - protein, 11 aa, Homo sapiens
  Table A; Target 27326; HLA-A*03:01; GPR143; ENSG00000101850; TAA
VLVANPILFQK

SEQ ID NO: 27327 - protein, 11 aa, Homo sapiens
  Table A; Target 27327; HLA-A*03:02; GPR143; ENSG00000101850; TAA
VLVANPILFQK

SEQ ID NO: 27328 - protein, 9 aa, Homo sapiens
  Table A; Target 27328; HLA-A*32:01; GPR143; ENSG00000101850; TAA
VRTAAKTTW

SEQ ID NO: 27329 - protein, 9 aa, Homo sapiens
  Table A; Target 27329; HLA-B*27:02; GPR143; ENSG00000101850; TAA
VRTAAKTTW

SEQ ID NO: 27330 - protein, 9 aa, Homo sapiens
  Table A; Target 27330; HLA-B*27:05; GPR143; ENSG00000101850; TAA
VRTAAKTTW

SEQ ID NO: 27331 - protein, 9 aa, Homo sapiens
  Table A; Target 27331; HLA-C*16:04; GPR143; ENSG00000101850; TAA
VRTAAKTTW

SEQ ID NO: 27332 - protein, 9 aa, Homo sapiens
  Table A; Target 27332; HLA-A*01:01; GPR143; ENSG00000101850; TAA
VSDMNHTEI

SEQ ID NO: 27333 - protein, 9 aa, Homo sapiens
  Table A; Target 27333; HLA-C*05:01; GPR143; ENSG00000101850; TAA
VSDMNHTEI

SEQ ID NO: 27334 - protein, 10 aa, Homo sapiens
  Table A; Target 27334; HLA-A*01:01; GPR143; ENSG00000101850; TAA
VSDMNHTEIW

SEQ ID NO: 27335 - protein, 10 aa, Homo sapiens
  Table A; Target 27335; HLA-B*57:01; GPR143; ENSG00000101850; TAA
VSDMNHTEIW

SEQ ID NO: 27336 - protein, 10 aa, Homo sapiens
  Table A; Target 27336; HLA-B*58:01; GPR143; ENSG00000101850; TAA
VSDMNHTEIW

SEQ ID NO: 27337 - protein, 8 aa, Homo sapiens
  Table A; Target 27337; HLA-B*46:01; GPR143; ENSG00000101850; TAA
VTAVASLL

SEQ ID NO: 27338 - protein, 8 aa, Homo sapiens
  Table A; Target 27338; HLA-C*01:02; GPR143; ENSG00000101850; TAA
VTAVASLL

SEQ ID NO: 27339 - protein, 8 aa, Homo sapiens
  Table A; Target 27339; HLA-C*03:03; GPR143; ENSG00000101850; TAA
VTAVASLL

SEQ ID NO: 27340 - protein, 8 aa, Homo sapiens
  Table A; Target 27340; HLA-C*03:04; GPR143; ENSG00000101850; TAA
VTAVASLL

SEQ ID NO: 27341 - protein, 8 aa, Homo sapiens
  Table A; Target 27341; HLA-C*04:01; GPR143; ENSG00000101850; TAA
VTAVASLL

SEQ ID NO: 27342 - protein, 8 aa, Homo sapiens
  Table A; Target 27342; HLA-C*05:01; GPR143; ENSG00000101850; TAA
VTAVASLL

SEQ ID NO: 27343 - protein, 8 aa, Homo sapiens
  Table A; Target 27343; HLA-C*06:02; GPR143; ENSG00000101850; TAA
VTAVASLL

SEQ ID NO: 27344 - protein, 8 aa, Homo sapiens
  Table A; Target 27344; HLA-C*07:02; GPR143; ENSG00000101850; TAA
VTAVASLL

SEQ ID NO: 27345 - protein, 8 aa, Homo sapiens
  Table A; Target 27345; HLA-C*12:03; GPR143; ENSG00000101850; TAA
VTAVASLL

SEQ ID NO: 27346 - protein, 8 aa, Homo sapiens
  Table A; Target 27346; HLA-C*14:02; GPR143; ENSG00000101850; TAA
VTAVASLL

SEQ ID NO: 27347 - protein, 9 aa, Homo sapiens
  Table A; Target 27347; HLA-A*01:01; GPR143; ENSG00000101850; TAA
VTAVASLLK

SEQ ID NO: 27348 - protein, 9 aa, Homo sapiens
  Table A; Target 27348; HLA-A*03:01; GPR143; ENSG00000101850; TAA
VTAVASLLK

SEQ ID NO: 27349 - protein, 9 aa, Homo sapiens
  Table A; Target 27349; HLA-A*03:02; GPR143; ENSG00000101850; TAA
VTAVASLLK

SEQ ID NO: 27350 - protein, 9 aa, Homo sapiens
  Table A; Target 27350; HLA-A*11:01; GPR143; ENSG00000101850; TAA
VTAVASLLK

SEQ ID NO: 27351 - protein, 9 aa, Homo sapiens
  Table A; Target 27351; HLA-A*68:01; GPR143; ENSG00000101850; TAA
VTAVASLLK

SEQ ID NO: 27352 - protein, 9 aa, Homo sapiens
  Table A; Target 27352; HLA-B*27:02; GPR143; ENSG00000101850; TAA
VTAVASLLK

SEQ ID NO: 27353 - protein, 9 aa, Homo sapiens
  Table A; Target 27353; HLA-C*07:06; GPR143; ENSG00000101850; TAA
VTAVASLLK

SEQ ID NO: 27354 - protein, 10 aa, Homo sapiens
  Table A; Target 27354; HLA-C*06:02; GPR143; ENSG00000101850; TAA
VTAVASLLKG

SEQ ID NO: 27355 - protein, 11 aa, Homo sapiens
  Table A; Target 27355; HLA-A*31:01; GPR143; ENSG00000101850; TAA
VTAVASLLKGR

SEQ ID NO: 27356 - protein, 11 aa, Homo sapiens
  Table A; Target 27356; HLA-A*33:01; GPR143; ENSG00000101850; TAA
VTAVASLLKGR

SEQ ID NO: 27357 - protein, 11 aa, Homo sapiens
  Table A; Target 27357; HLA-A*33:03; GPR143; ENSG00000101850; TAA
VTAVASLLKGR

SEQ ID NO: 27358 - protein, 11 aa, Homo sapiens
  Table A; Target 27358; HLA-A*68:01; GPR143; ENSG00000101850; TAA
VTAVASLLKGR

SEQ ID NO: 27359 - protein, 11 aa, Homo sapiens
  Table A; Target 27359; HLA-C*06:02; GPR143; ENSG00000101850; TAA
VTAVASLLKGR

SEQ ID NO: 27360 - protein, 9 aa, Homo sapiens
  Table A; Target 27360; HLA-A*01:01; GPR143; ENSG00000101850; TAA
VTMYLPLLL

SEQ ID NO: 27361 - protein, 9 aa, Homo sapiens
  Table A; Target 27361; HLA-A*23:01; GPR143; ENSG00000101850; TAA
VTMYLPLLL

SEQ ID NO: 27362 - protein, 9 aa, Homo sapiens
  Table A; Target 27362; HLA-A*24:02; GPR143; ENSG00000101850; TAA
VTMYLPLLL

SEQ ID NO: 27363 - protein, 9 aa, Homo sapiens
  Table A; Target 27363; HLA-A*29:02; GPR143; ENSG00000101850; TAA
VTMYLPLLL

SEQ ID NO: 27364 - protein, 8 aa, Homo sapiens
  Table A; Target 27364; HLA-A*24:02; GPR143; ENSG00000101850; TAA
VWLGFPNF

SEQ ID NO: 27365 - protein, 8 aa, Homo sapiens
  Table A; Target 27365; HLA-B*18:01; GPR143; ENSG00000101850; TAA
WESLTTSA

SEQ ID NO: 27366 - protein, 8 aa, Homo sapiens
  Table A; Target 27366; HLA-B*49:01; GPR143; ENSG00000101850; TAA
WESLTTSA

SEQ ID NO: 27367 - protein, 9 aa, Homo sapiens
  Table A; Target 27367; HLA-B*49:01; GPR143; ENSG00000101850; TAA
WESLTTSAA

SEQ ID NO: 27368 - protein, 8 aa, Homo sapiens
  Table A; Target 27368; HLA-A*23:01; GPR143; ENSG00000101850; TAA
YAVDAYLV

SEQ ID NO: 27369 - protein, 8 aa, Homo sapiens
  Table A; Target 27369; HLA-A*68:02; GPR143; ENSG00000101850; TAA
YAVDAYLV

SEQ ID NO: 27370 - protein, 8 aa, Homo sapiens
  Table A; Target 27370; HLA-B*13:02; GPR143; ENSG00000101850; TAA
YAVDAYLV

SEQ ID NO: 27371 - protein, 8 aa, Homo sapiens
  Table A; Target 27371; HLA-B*39:01; GPR143; ENSG00000101850; TAA
YAVDAYLV

SEQ ID NO: 27372 - protein, 8 aa, Homo sapiens
  Table A; Target 27372; HLA-B*49:01; GPR143; ENSG00000101850; TAA
YAVDAYLV

SEQ ID NO: 27373 - protein, 8 aa, Homo sapiens
  Table A; Target 27373; HLA-B*51:01; GPR143; ENSG00000101850; TAA
YAVDAYLV

SEQ ID NO: 27374 - protein, 8 aa, Homo sapiens
  Table A; Target 27374; HLA-B*54:01; GPR143; ENSG00000101850; TAA
YAVDAYLV

SEQ ID NO: 27375 - protein, 8 aa, Homo sapiens
  Table A; Target 27375; HLA-C*02:02; GPR143; ENSG00000101850; TAA
YAVDAYLV

SEQ ID NO: 27376 - protein, 8 aa, Homo sapiens
  Table A; Target 27376; HLA-C*12:03; GPR143; ENSG00000101850; TAA
YAVDAYLV

SEQ ID NO: 27377 - protein, 8 aa, Homo sapiens
  Table A; Target 27377; HLA-C*16:04; GPR143; ENSG00000101850; TAA
YAVDAYLV

SEQ ID NO: 27378 - protein, 9 aa, Homo sapiens
  Table A; Target 27378; HLA-A*02:07; GPR143; ENSG00000101850; TAA
YAVDAYLVI

SEQ ID NO: 27379 - protein, 9 aa, Homo sapiens
  Table A; Target 27379; HLA-A*23:01; GPR143; ENSG00000101850; TAA
YAVDAYLVI

SEQ ID NO: 27380 - protein, 9 aa, Homo sapiens
  Table A; Target 27380; HLA-A*24:02; GPR143; ENSG00000101850; TAA
YAVDAYLVI

SEQ ID NO: 27381 - protein, 9 aa, Homo sapiens
  Table A; Target 27381; HLA-A*25:01; GPR143; ENSG00000101850; TAA
YAVDAYLVI

SEQ ID NO: 27382 - protein, 9 aa, Homo sapiens
  Table A; Target 27382; HLA-A*26:01; GPR143; ENSG00000101850; TAA
YAVDAYLVI

SEQ ID NO: 27383 - protein, 9 aa, Homo sapiens
  Table A; Target 27383; HLA-A*68:02; GPR143; ENSG00000101850; TAA
YAVDAYLVI

SEQ ID NO: 27384 - protein, 9 aa, Homo sapiens
  Table A; Target 27384; HLA-B*13:02; GPR143; ENSG00000101850; TAA
YAVDAYLVI

SEQ ID NO: 27385 - protein, 9 aa, Homo sapiens
  Table A; Target 27385; HLA-B*35:01; GPR143; ENSG00000101850; TAA
YAVDAYLVI

SEQ ID NO: 27386 - protein, 9 aa, Homo sapiens
  Table A; Target 27386; HLA-B*35:03; GPR143; ENSG00000101850; TAA
YAVDAYLVI

SEQ ID NO: 27387 - protein, 9 aa, Homo sapiens
  Table A; Target 27387; HLA-B*38:01; GPR143; ENSG00000101850; TAA
YAVDAYLVI

SEQ ID NO: 27388 - protein, 9 aa, Homo sapiens
  Table A; Target 27388; HLA-B*39:01; GPR143; ENSG00000101850; TAA
YAVDAYLVI

SEQ ID NO: 27389 - protein, 9 aa, Homo sapiens
  Table A; Target 27389; HLA-B*46:01; GPR143; ENSG00000101850; TAA
YAVDAYLVI

SEQ ID NO: 27390 - protein, 9 aa, Homo sapiens
  Table A; Target 27390; HLA-B*49:01; GPR143; ENSG00000101850; TAA
YAVDAYLVI

SEQ ID NO: 27391 - protein, 9 aa, Homo sapiens
  Table A; Target 27391; HLA-B*51:01; GPR143; ENSG00000101850; TAA
YAVDAYLVI

SEQ ID NO: 27392 - protein, 9 aa, Homo sapiens
  Table A; Target 27392; HLA-B*54:01; GPR143; ENSG00000101850; TAA
YAVDAYLVI

SEQ ID NO: 27393 - protein, 9 aa, Homo sapiens
  Table A; Target 27393; HLA-B*56:01; GPR143; ENSG00000101850; TAA
YAVDAYLVI

SEQ ID NO: 27394 - protein, 9 aa, Homo sapiens
  Table A; Target 27394; HLA-B*57:01; GPR143; ENSG00000101850; TAA
YAVDAYLVI

SEQ ID NO: 27395 - protein, 9 aa, Homo sapiens
  Table A; Target 27395; HLA-B*58:01; GPR143; ENSG00000101850; TAA
YAVDAYLVI

SEQ ID NO: 27396 - protein, 9 aa, Homo sapiens
  Table A; Target 27396; HLA-C*02:02; GPR143; ENSG00000101850; TAA
YAVDAYLVI

SEQ ID NO: 27397 - protein, 9 aa, Homo sapiens
  Table A; Target 27397; HLA-C*03:03; GPR143; ENSG00000101850; TAA
YAVDAYLVI

SEQ ID NO: 27398 - protein, 9 aa, Homo sapiens
  Table A; Target 27398; HLA-C*03:04; GPR143; ENSG00000101850; TAA
YAVDAYLVI

SEQ ID NO: 27399 - protein, 9 aa, Homo sapiens
  Table A; Target 27399; HLA-C*12:03; GPR143; ENSG00000101850; TAA
YAVDAYLVI

SEQ ID NO: 27400 - protein, 9 aa, Homo sapiens
  Table A; Target 27400; HLA-C*16:04; GPR143; ENSG00000101850; TAA
YAVDAYLVI

SEQ ID NO: 27401 - protein, 10 aa, Homo sapiens
  Table A; Target 27401; HLA-A*68:01; GPR143; ENSG00000101850; TAA
YAVDAYLVIR

SEQ ID NO: 27402 - protein, 10 aa, Homo sapiens
  Table A; Target 27402; HLA-A*68:02; GPR143; ENSG00000101850; TAA
YAVDAYLVIR

SEQ ID NO: 27403 - protein, 10 aa, Homo sapiens
  Table A; Target 27403; HLA-B*27:02; GPR143; ENSG00000101850; TAA
YAVDAYLVIR

SEQ ID NO: 27404 - protein, 10 aa, Homo sapiens
  Table A; Target 27404; HLA-C*07:06; GPR143; ENSG00000101850; TAA
YAVDAYLVIR

SEQ ID NO: 27405 - protein, 11 aa, Homo sapiens
  Table A; Target 27405; HLA-A*68:01; GPR143; ENSG00000101850; TAA
YAVDAYLVIRR

SEQ ID NO: 27406 - protein, 11 aa, Homo sapiens
  Table A; Target 27406; HLA-A*68:02; GPR143; ENSG00000101850; TAA
YAVDAYLVIRR

SEQ ID NO: 27407 - protein, 8 aa, Homo sapiens
  Table A; Target 27407; HLA-B*08:01; GPR143; ENSG00000101850; TAA
YGWTGCSL

SEQ ID NO: 27408 - protein, 8 aa, Homo sapiens
  Table A; Target 27408; HLA-B*40:02; GPR143; ENSG00000101850; TAA
YGWTGCSL

SEQ ID NO: 27409 - protein, 8 aa, Homo sapiens
  Table A; Target 27409; HLA-C*03:03; GPR143; ENSG00000101850; TAA
YGWTGCSL

SEQ ID NO: 27410 - protein, 8 aa, Homo sapiens
  Table A; Target 27410; HLA-C*03:04; GPR143; ENSG00000101850; TAA
YGWTGCSL

SEQ ID NO: 27411 - protein, 8 aa, Homo sapiens
  Table A; Target 27411; HLA-A*02:07; GPR143; ENSG00000101850; TAA
YLPLLLVL

SEQ ID NO: 27412 - protein, 9 aa, Homo sapiens
  Table A; Target 27412; HLA-A*02:01; GPR143; ENSG00000101850; TAA
YLPLLLVLV

SEQ ID NO: 27413 - protein, 9 aa, Homo sapiens
  Table A; Target 27413; HLA-A*02:03; GPR143; ENSG00000101850; TAA
YLPLLLVLV

SEQ ID NO: 27414 - protein, 9 aa, Homo sapiens
  Table A; Target 27414; HLA-A*02:04; GPR143; ENSG00000101850; TAA
YLPLLLVLV

SEQ ID NO: 27415 - protein, 9 aa, Homo sapiens
  Table A; Target 27415; HLA-A*02:07; GPR143; ENSG00000101850; TAA
YLPLLLVLV

SEQ ID NO: 27416 - protein, 9 aa, Homo sapiens
  Table A; Target 27416; HLA-A*24:02; GPR143; ENSG00000101850; TAA
YLPLLLVLV

SEQ ID NO: 27417 - protein, 9 aa, Homo sapiens
  Table A; Target 27417; HLA-A*68:02; GPR143; ENSG00000101850; TAA
YLPLLLVLV

SEQ ID NO: 27418 - protein, 9 aa, Homo sapiens
  Table A; Target 27418; HLA-A*02:04; GPR143; ENSG00000101850; TAA
YVTMYLPLL

SEQ ID NO: 27419 - protein, 9 aa, Homo sapiens
  Table A; Target 27419; HLA-A*02:07; GPRC6A; ENSG00000173612; CTA
AAPTVEVNV

SEQ ID NO: 27420 - protein, 9 aa, Homo sapiens
  Table A; Target 27420; HLA-B*51:01; GPRC6A; ENSG00000173612; CTA
AAPTVEVNV

SEQ ID NO: 27421 - protein, 9 aa, Homo sapiens
  Table A; Target 27421; HLA-C*01:02; GPRC6A; ENSG00000173612; CTA
AAPTVEVNV

SEQ ID NO: 27422 - protein, 9 aa, Homo sapiens
  Table A; Target 27422; HLA-C*05:01; GPRC6A; ENSG00000173612; CTA
AAPTVEVNV

SEQ ID NO: 27423 - protein, 11 aa, Homo sapiens
  Table A; Target 27423; HLA-C*01:02; GPRC6A; ENSG00000173612; CTA
AAPTVEVNVSL

SEQ ID NO: 27424 - protein, 9 aa, Homo sapiens
  Table A; Target 27424; HLA-C*16:01; GPRC6A; ENSG00000173612; CTA
AATLRFLSK

SEQ ID NO: 27425 - protein, 9 aa, Homo sapiens
  Table A; Target 27425; HLA-C*03:03; GPRC6A; ENSG00000173612; CTA
AATSPGHII

SEQ ID NO: 27426 - protein, 9 aa, Homo sapiens
  Table A; Target 27426; HLA-C*03:04; GPRC6A; ENSG00000173612; CTA
AATSPGHII

SEQ ID NO: 27427 - protein, 9 aa, Homo sapiens
  Table A; Target 27427; HLA-C*16:01; GPRC6A; ENSG00000173612; CTA
AATSPGHII

SEQ ID NO: 27428 - protein, 9 aa, Homo sapiens
  Table A; Target 27428; HLA-C*16:02; GPRC6A; ENSG00000173612; CTA
AATSPGHII

SEQ ID NO: 27429 - protein, 8 aa, Homo sapiens
  Table A; Target 27429; HLA-B*49:01; GPRC6A; ENSG00000173612; CTA
AEANNVCI

SEQ ID NO: 27430 - protein, 10 aa, Homo sapiens
  Table A; Target 27430; HLA-A*30:01; GPRC6A; ENSG00000173612; CTA
AEANNVCIAF

SEQ ID NO: 27431 - protein, 10 aa, Homo sapiens
  Table A; Target 27431; HLA-B*27:02; GPRC6A; ENSG00000173612; CTA
AEANNVCIAF

SEQ ID NO: 27432 - protein, 10 aa, Homo sapiens
  Table A; Target 27432; HLA-B*40:01; GPRC6A; ENSG00000173612; CTA
AEANNVCIAF

SEQ ID NO: 27433 - protein, 10 aa, Homo sapiens
  Table A; Target 27433; HLA-B*44:02; GPRC6A; ENSG00000173612; CTA
AEANNVCIAF

SEQ ID NO: 27434 - protein, 10 aa, Homo sapiens
  Table A; Target 27434; HLA-B*44:03; GPRC6A; ENSG00000173612; CTA
AEANNVCIAF

SEQ ID NO: 27435 - protein, 10 aa, Homo sapiens
  Table A; Target 27435; HLA-C*16:04; GPRC6A; ENSG00000173612; CTA
AEANNVCIAF

SEQ ID NO: 27436 - protein, 8 aa, Homo sapiens
  Table A; Target 27436; HLA-B*37:01; GPRC6A; ENSG00000173612; CTA
AEILSDKI

SEQ ID NO: 27437 - protein, 8 aa, Homo sapiens
  Table A; Target 27437; HLA-B*44:02; GPRC6A; ENSG00000173612; CTA
AEILSDKI

SEQ ID NO: 27438 - protein, 8 aa, Homo sapiens
  Table A; Target 27438; HLA-B*44:03; GPRC6A; ENSG00000173612; CTA
AEILSDKI

SEQ ID NO: 27439 - protein, 8 aa, Homo sapiens
  Table A; Target 27439; HLA-B*49:01; GPRC6A; ENSG00000173612; CTA
AEILSDKI

SEQ ID NO: 27440 - protein, 10 aa, Homo sapiens
  Table A; Target 27440; HLA-B*44:02; GPRC6A; ENSG00000173612; CTA
AEILSDKIRF

SEQ ID NO: 27441 - protein, 10 aa, Homo sapiens
  Table A; Target 27441; HLA-B*44:03; GPRC6A; ENSG00000173612; CTA
AEILSDKIRF

SEQ ID NO: 27442 - protein, 9 aa, Homo sapiens
  Table A; Target 27442; HLA-A*02:07; GPRC6A; ENSG00000173612; CTA
AEPGLIHSI

SEQ ID NO: 27443 - protein, 9 aa, Homo sapiens
  Table A; Target 27443; HLA-A*30:01; GPRC6A; ENSG00000173612; CTA
AEPGLIHSI

SEQ ID NO: 27444 - protein, 9 aa, Homo sapiens
  Table A; Target 27444; HLA-B*13:02; GPRC6A; ENSG00000173612; CTA
AEPGLIHSI

SEQ ID NO: 27445 - protein, 9 aa, Homo sapiens
  Table A; Target 27445; HLA-B*27:02; GPRC6A; ENSG00000173612; CTA
AEPGLIHSI

SEQ ID NO: 27446 - protein, 9 aa, Homo sapiens
  Table A; Target 27446; HLA-B*37:01; GPRC6A; ENSG00000173612; CTA
AEPGLIHSI

SEQ ID NO: 27447 - protein, 9 aa, Homo sapiens
  Table A; Target 27447; HLA-B*40:01; GPRC6A; ENSG00000173612; CTA
AEPGLIHSI

SEQ ID NO: 27448 - protein, 9 aa, Homo sapiens
  Table A; Target 27448; HLA-B*40:02; GPRC6A; ENSG00000173612; CTA
AEPGLIHSI

SEQ ID NO: 27449 - protein, 9 aa, Homo sapiens
  Table A; Target 27449; HLA-B*44:02; GPRC6A; ENSG00000173612; CTA
AEPGLIHSI

SEQ ID NO: 27450 - protein, 9 aa, Homo sapiens
  Table A; Target 27450; HLA-B*44:03; GPRC6A; ENSG00000173612; CTA
AEPGLIHSI

SEQ ID NO: 27451 - protein, 9 aa, Homo sapiens
  Table A; Target 27451; HLA-B*49:01; GPRC6A; ENSG00000173612; CTA
AEPGLIHSI

SEQ ID NO: 27452 - protein, 9 aa, Homo sapiens
  Table A; Target 27452; HLA-C*16:04; GPRC6A; ENSG00000173612; CTA
AEPGLIHSI

SEQ ID NO: 27453 - protein, 11 aa, Homo sapiens
  Table A; Target 27453; HLA-A*30:01; GPRC6A; ENSG00000173612; CTA
AEPGLIHSIQL

SEQ ID NO: 27454 - protein, 11 aa, Homo sapiens
  Table A; Target 27454; HLA-B*40:01; GPRC6A; ENSG00000173612; CTA
AEPGLIHSIQL

SEQ ID NO: 27455 - protein, 11 aa, Homo sapiens
  Table A; Target 27455; HLA-B*44:02; GPRC6A; ENSG00000173612; CTA
AEPGLIHSIQL

SEQ ID NO: 27456 - protein, 11 aa, Homo sapiens
  Table A; Target 27456; HLA-B*44:03; GPRC6A; ENSG00000173612; CTA
AEPGLIHSIQL

SEQ ID NO: 27457 - protein, 9 aa, Homo sapiens
  Table A; Target 27457; HLA-A*30:01; GPRC6A; ENSG00000173612; CTA
AEYDLQNDV

SEQ ID NO: 27458 - protein, 9 aa, Homo sapiens
  Table A; Target 27458; HLA-B*40:01; GPRC6A; ENSG00000173612; CTA
AEYDLQNDV

SEQ ID NO: 27459 - protein, 9 aa, Homo sapiens
  Table A; Target 27459; HLA-B*49:01; GPRC6A; ENSG00000173612; CTA
AEYDLQNDV

SEQ ID NO: 27460 - protein, 9 aa, Homo sapiens
  Table A; Target 27460; HLA-C*16:04; GPRC6A; ENSG00000173612; CTA
AEYDLQNDV

SEQ ID NO: 27461 - protein, 10 aa, Homo sapiens
  Table A; Target 27461; HLA-A*30:01; GPRC6A; ENSG00000173612; CTA
AEYDLQNDVF

SEQ ID NO: 27462 - protein, 10 aa, Homo sapiens
  Table A; Target 27462; HLA-B*18:01; GPRC6A; ENSG00000173612; CTA
AEYDLQNDVF

SEQ ID NO: 27463 - protein, 10 aa, Homo sapiens
  Table A; Target 27463; HLA-B*27:02; GPRC6A; ENSG00000173612; CTA
AEYDLQNDVF

SEQ ID NO: 27464 - protein, 10 aa, Homo sapiens
  Table A; Target 27464; HLA-B*37:01; GPRC6A; ENSG00000173612; CTA
AEYDLQNDVF

SEQ ID NO: 27465 - protein, 10 aa, Homo sapiens
  Table A; Target 27465; HLA-B*40:01; GPRC6A; ENSG00000173612; CTA
AEYDLQNDVF

SEQ ID NO: 27466 - protein, 10 aa, Homo sapiens
  Table A; Target 27466; HLA-B*40:02; GPRC6A; ENSG00000173612; CTA
AEYDLQNDVF

SEQ ID NO: 27467 - protein, 10 aa, Homo sapiens
  Table A; Target 27467; HLA-B*44:02; GPRC6A; ENSG00000173612; CTA
AEYDLQNDVF

SEQ ID NO: 27468 - protein, 10 aa, Homo sapiens
  Table A; Target 27468; HLA-B*44:03; GPRC6A; ENSG00000173612; CTA
AEYDLQNDVF

SEQ ID NO: 27469 - protein, 10 aa, Homo sapiens
  Table A; Target 27469; HLA-B*49:01; GPRC6A; ENSG00000173612; CTA
AEYDLQNDVF

SEQ ID NO: 27470 - protein, 10 aa, Homo sapiens
  Table A; Target 27470; HLA-C*02:02; GPRC6A; ENSG00000173612; CTA
AEYDLQNDVF

SEQ ID NO: 27471 - protein, 10 aa, Homo sapiens
  Table A; Target 27471; HLA-C*16:04; GPRC6A; ENSG00000173612; CTA
AEYDLQNDVF

SEQ ID NO: 27472 - protein, 11 aa, Homo sapiens
  Table A; Target 27472; HLA-B*49:01; GPRC6A; ENSG00000173612; CTA
AEYDLQNDVFI

SEQ ID NO: 27473 - protein, 9 aa, Homo sapiens
  Table A; Target 27473; HLA-A*23:01; GPRC6A; ENSG00000173612; CTA
AFKEVLPAF

SEQ ID NO: 27474 - protein, 9 aa, Homo sapiens
  Table A; Target 27474; HLA-A*24:02; GPRC6A; ENSG00000173612; CTA
AFKEVLPAF

SEQ ID NO: 27475 - protein, 9 aa, Homo sapiens
  Table A; Target 27475; HLA-A*30:02; GPRC6A; ENSG00000173612; CTA
AFKEVLPAF

SEQ ID NO: 27476 - protein, 9 aa, Homo sapiens
  Table A; Target 27476; HLA-B*46:01; GPRC6A; ENSG00000173612; CTA
AFKEVLPAF

SEQ ID NO: 27477 - protein, 9 aa, Homo sapiens
  Table A; Target 27477; HLA-A*29:02; GPRC6A; ENSG00000173612; CTA
AFKGKYENY

SEQ ID NO: 27478 - protein, 9 aa, Homo sapiens
  Table A; Target 27478; HLA-A*30:02; GPRC6A; ENSG00000173612; CTA
AFKGKYENY

SEQ ID NO: 27479 - protein, 9 aa, Homo sapiens
  Table A; Target 27479; HLA-A*29:02; GPRC6A; ENSG00000173612; CTA
AFLKMIYSY

SEQ ID NO: 27480 - protein, 9 aa, Homo sapiens
  Table A; Target 27480; HLA-A*30:02; GPRC6A; ENSG00000173612; CTA
AFLKMIYSY

SEQ ID NO: 27481 - protein, 9 aa, Homo sapiens
  Table A; Target 27481; HLA-A*02:04; GPRC6A; ENSG00000173612; CTA
AILLLILSL

SEQ ID NO: 27482 - protein, 9 aa, Homo sapiens
  Table A; Target 27482; HLA-A*31:01; GPRC6A; ENSG00000173612; CTA
AIRDLCQAR

SEQ ID NO: 27483 - protein, 9 aa, Homo sapiens
  Table A; Target 27483; HLA-A*02:01; GPRC6A; ENSG00000173612; CTA
ALNTFIIQA

SEQ ID NO: 27484 - protein, 9 aa, Homo sapiens
  Table A; Target 27484; HLA-A*02:03; GPRC6A; ENSG00000173612; CTA
ALNTFIIQA

SEQ ID NO: 27485 - protein, 9 aa, Homo sapiens
  Table A; Target 27485; HLA-A*02:04; GPRC6A; ENSG00000173612; CTA
ALNTFIIQA

SEQ ID NO: 27486 - protein, 9 aa, Homo sapiens
  Table A; Target 27486; HLA-B*55:01; GPRC6A; ENSG00000173612; CTA
ALNTFIIQA

SEQ ID NO: 27487 - protein, 9 aa, Homo sapiens
  Table A; Target 27487; HLA-B*56:01; GPRC6A; ENSG00000173612; CTA
ALNTFIIQA

SEQ ID NO: 27488 - protein, 10 aa, Homo sapiens
  Table A; Target 27488; HLA-C*01:02; GPRC6A; ENSG00000173612; CTA
ALSPASLDSM

SEQ ID NO: 27489 - protein, 9 aa, Homo sapiens
  Table A; Target 27489; HLA-A*02:03; GPRC6A; ENSG00000173612; CTA
AMAATLRFL

SEQ ID NO: 27490 - protein, 8 aa, Homo sapiens
  Table A; Target 27490; HLA-A*03:01; GPRC6A; ENSG00000173612; CTA
AMAHLIQK

SEQ ID NO: 27491 - protein, 9 aa, Homo sapiens
  Table A; Target 27491; HLA-A*30:02; GPRC6A; ENSG00000173612; CTA
AMHLSACAY

SEQ ID NO: 27492 - protein, 9 aa, Homo sapiens
  Table A; Target 27492; HLA-B*15:01; GPRC6A; ENSG00000173612; CTA
AMHLSACAY

SEQ ID NO: 27493 - protein, 9 aa, Homo sapiens
  Table A; Target 27493; HLA-B*15:03; GPRC6A; ENSG00000173612; CTA
AMHLSACAY

SEQ ID NO: 27494 - protein, 9 aa, Homo sapiens
  Table A; Target 27494; HLA-B*46:01; GPRC6A; ENSG00000173612; CTA
AMHLSACAY

SEQ ID NO: 27495 - protein, 8 aa, Homo sapiens
  Table A; Target 27495; HLA-B*46:01; GPRC6A; ENSG00000173612; CTA
AMIHSIEM

SEQ ID NO: 27496 - protein, 9 aa, Homo sapiens
  Table A; Target 27496; HLA-A*02:01; GPRC6A; ENSG00000173612; CTA
AMIHSIEMI

SEQ ID NO: 27497 - protein, 9 aa, Homo sapiens
  Table A; Target 27497; HLA-A*02:03; GPRC6A; ENSG00000173612; CTA
AMIHSIEMI

SEQ ID NO: 27498 - protein, 9 aa, Homo sapiens
  Table A; Target 27498; HLA-A*02:04; GPRC6A; ENSG00000173612; CTA
AMIHSIEMI

SEQ ID NO: 27499 - protein, 9 aa, Homo sapiens
  Table A; Target 27499; HLA-A*02:07; GPRC6A; ENSG00000173612; CTA
AMIHSIEMI

SEQ ID NO: 27500 - protein, 9 aa, Homo sapiens
  Table A; Target 27500; HLA-B*13:02; GPRC6A; ENSG00000173612; CTA
AMIHSIEMI

SEQ ID NO: 27501 - protein, 9 aa, Homo sapiens
  Table A; Target 27501; HLA-C*16:01; GPRC6A; ENSG00000173612; CTA
ANKAIERNF

SEQ ID NO: 27502 - protein, 10 aa, Homo sapiens
  Table A; Target 27502; HLA-B*07:02; GPRC6A; ENSG00000173612; CTA
APTVEVNVSL

SEQ ID NO: 27503 - protein, 10 aa, Homo sapiens
  Table A; Target 27503; HLA-B*35:03; GPRC6A; ENSG00000173612; CTA
APTVEVNVSL

SEQ ID NO: 27504 - protein, 10 aa, Homo sapiens
  Table A; Target 27504; HLA-B*56:01; GPRC6A; ENSG00000173612; CTA
APTVEVNVSL

SEQ ID NO: 27505 - protein, 10 aa, Homo sapiens
  Table A; Target 27505; HLA-C*07:02; GPRC6A; ENSG00000173612; CTA
APTVEVNVSL

SEQ ID NO: 27506 - protein, 8 aa, Homo sapiens
  Table A; Target 27506; HLA-B*56:01; GPRC6A; ENSG00000173612; CTA
APVRSTMC

SEQ ID NO: 27507 - protein, 9 aa, Homo sapiens
  Table A; Target 27507; HLA-B*07:02; GPRC6A; ENSG00000173612; CTA
APVRSTMCF

SEQ ID NO: 27508 - protein, 9 aa, Homo sapiens
  Table A; Target 27508; HLA-C*07:02; GPRC6A; ENSG00000173612; CTA
APVRSTMCF

SEQ ID NO: 27509 - protein, 8 aa, Homo sapiens
  Table A; Target 27509; HLA-B*13:02; GPRC6A; ENSG00000173612; CTA
AQVNVIVV

SEQ ID NO: 27510 - protein, 9 aa, Homo sapiens
  Table A; Target 27510; HLA-A*23:01; GPRC6A; ENSG00000173612; CTA
AQVNVIVVF

SEQ ID NO: 27511 - protein, 9 aa, Homo sapiens
  Table A; Target 27511; HLA-A*25:01; GPRC6A; ENSG00000173612; CTA
AQVNVIVVF

SEQ ID NO: 27512 - protein, 9 aa, Homo sapiens
  Table A; Target 27512; HLA-A*26:01; GPRC6A; ENSG00000173612; CTA
AQVNVIVVF

SEQ ID NO: 27513 - protein, 9 aa, Homo sapiens
  Table A; Target 27513; HLA-A*30:01; GPRC6A; ENSG00000173612; CTA
AQVNVIVVF

SEQ ID NO: 27514 - protein, 9 aa, Homo sapiens
  Table A; Target 27514; HLA-A*32:01; GPRC6A; ENSG00000173612; CTA
AQVNVIVVF

SEQ ID NO: 27515 - protein, 9 aa, Homo sapiens
  Table A; Target 27515; HLA-B*13:02; GPRC6A; ENSG00000173612; CTA
AQVNVIVVF

SEQ ID NO: 27516 - protein, 9 aa, Homo sapiens
  Table A; Target 27516; HLA-B*15:01; GPRC6A; ENSG00000173612; CTA
AQVNVIVVF

SEQ ID NO: 27517 - protein, 9 aa, Homo sapiens
  Table A; Target 27517; HLA-B*15:03; GPRC6A; ENSG00000173612; CTA
AQVNVIVVF

SEQ ID NO: 27518 - protein, 9 aa, Homo sapiens
  Table A; Target 27518; HLA-B*27:02; GPRC6A; ENSG00000173612; CTA
AQVNVIVVF

SEQ ID NO: 27519 - protein, 9 aa, Homo sapiens
  Table A; Target 27519; HLA-B*38:01; GPRC6A; ENSG00000173612; CTA
AQVNVIVVF

SEQ ID NO: 27520 - protein, 9 aa, Homo sapiens
  Table A; Target 27520; HLA-B*39:01; GPRC6A; ENSG00000173612; CTA
AQVNVIVVF

SEQ ID NO: 27521 - protein, 9 aa, Homo sapiens
  Table A; Target 27521; HLA-B*44:02; GPRC6A; ENSG00000173612; CTA
AQVNVIVVF

SEQ ID NO: 27522 - protein, 9 aa, Homo sapiens
  Table A; Target 27522; HLA-B*44:03; GPRC6A; ENSG00000173612; CTA
AQVNVIVVF

SEQ ID NO: 27523 - protein, 9 aa, Homo sapiens
  Table A; Target 27523; HLA-B*58:01; GPRC6A; ENSG00000173612; CTA
AQVNVIVVF

SEQ ID NO: 27524 - protein, 9 aa, Homo sapiens
  Table A; Target 27524; HLA-C*02:02; GPRC6A; ENSG00000173612; CTA
AQVNVIVVF

SEQ ID NO: 27525 - protein, 9 aa, Homo sapiens
  Table A; Target 27525; HLA-C*07:04; GPRC6A; ENSG00000173612; CTA
AQVNVIVVF

SEQ ID NO: 27526 - protein, 9 aa, Homo sapiens
  Table A; Target 27526; HLA-C*12:03; GPRC6A; ENSG00000173612; CTA
AQVNVIVVF

SEQ ID NO: 27527 - protein, 9 aa, Homo sapiens
  Table A; Target 27527; HLA-C*16:04; GPRC6A; ENSG00000173612; CTA
AQVNVIVVF

SEQ ID NO: 27528 - protein, 11 aa, Homo sapiens
  Table A; Target 27528; HLA-A*03:01; GPRC6A; ENSG00000173612; CTA
ATKITTIPNVK

SEQ ID NO: 27529 - protein, 11 aa, Homo sapiens
  Table A; Target 27529; HLA-A*03:02; GPRC6A; ENSG00000173612; CTA
ATKITTIPNVK

SEQ ID NO: 27530 - protein, 11 aa, Homo sapiens
  Table A; Target 27530; HLA-A*11:01; GPRC6A; ENSG00000173612; CTA
ATKITTIPNVK

SEQ ID NO: 27531 - protein, 11 aa, Homo sapiens
  Table A; Target 27531; HLA-A*31:01; GPRC6A; ENSG00000173612; CTA
ATKITTIPNVK

SEQ ID NO: 27532 - protein, 9 aa, Homo sapiens
  Table A; Target 27532; HLA-B*57:01; GPRC6A; ENSG00000173612; CTA
ATLRFLSKF

SEQ ID NO: 27533 - protein, 8 aa, Homo sapiens
  Table A; Target 27533; HLA-C*03:04; GPRC6A; ENSG00000173612; CTA
ATSVSKTL

SEQ ID NO: 27534 - protein, 8 aa, Homo sapiens
  Table A; Target 27534; HLA-C*16:01; GPRC6A; ENSG00000173612; CTA
ATSVSKTL

SEQ ID NO: 27535 - protein, 10 aa, Homo sapiens
  Table A; Target 27535; HLA-C*07:06; GPRC6A; ENSG00000173612; CTA
ATSVSKTLPR

SEQ ID NO: 27536 - protein, 11 aa, Homo sapiens
  Table A; Target 27536; HLA-A*11:01; GPRC6A; ENSG00000173612; CTA
ATSVSKTLPRK

SEQ ID NO: 27537 - protein, 9 aa, Homo sapiens
  Table A; Target 27537; HLA-B*13:02; GPRC6A; ENSG00000173612; CTA
AVFALGYAI

SEQ ID NO: 27538 - protein, 10 aa, Homo sapiens
  Table A; Target 27538; HLA-A*25:01; GPRC6A; ENSG00000173612; CTA
AVIGSGYSEI

SEQ ID NO: 27539 - protein, 10 aa, Homo sapiens
  Table A; Target 27539; HLA-A*26:01; GPRC6A; ENSG00000173612; CTA
AVIGSGYSEI

SEQ ID NO: 27540 - protein, 10 aa, Homo sapiens
  Table A; Target 27540; HLA-B*46:01; GPRC6A; ENSG00000173612; CTA
AVIGSGYSEI

SEQ ID NO: 27541 - protein, 9 aa, Homo sapiens
  Table A; Target 27541; HLA-B*08:01; GPRC6A; ENSG00000173612; CTA
CAYVKDTDL

SEQ ID NO: 27542 - protein, 9 aa, Homo sapiens
  Table A; Target 27542; HLA-C*03:03; GPRC6A; ENSG00000173612; CTA
CAYVKDTDL

SEQ ID NO: 27543 - protein, 9 aa, Homo sapiens
  Table A; Target 27543; HLA-C*03:04; GPRC6A; ENSG00000173612; CTA
CAYVKDTDL

SEQ ID NO: 27544 - protein, 9 aa, Homo sapiens
  Table A; Target 27544; HLA-A*30:01; GPRC6A; ENSG00000173612; CTA
CEEGSILAF

SEQ ID NO: 27545 - protein, 9 aa, Homo sapiens
  Table A; Target 27545; HLA-B*18:01; GPRC6A; ENSG00000173612; CTA
CEEGSILAF

SEQ ID NO: 27546 - protein, 9 aa, Homo sapiens
  Table A; Target 27546; HLA-B*27:02; GPRC6A; ENSG00000173612; CTA
CEEGSILAF

SEQ ID NO: 27547 - protein, 9 aa, Homo sapiens
  Table A; Target 27547; HLA-B*40:01; GPRC6A; ENSG00000173612; CTA
CEEGSILAF

SEQ ID NO: 27548 - protein, 9 aa, Homo sapiens
  Table A; Target 27548; HLA-B*44:02; GPRC6A; ENSG00000173612; CTA
CEEGSILAF

SEQ ID NO: 27549 - protein, 9 aa, Homo sapiens
  Table A; Target 27549; HLA-B*44:03; GPRC6A; ENSG00000173612; CTA
CEEGSILAF

SEQ ID NO: 27550 - protein, 9 aa, Homo sapiens
  Table A; Target 27550; HLA-B*49:01; GPRC6A; ENSG00000173612; CTA
CEEGSILAF

SEQ ID NO: 27551 - protein, 9 aa, Homo sapiens
  Table A; Target 27551; HLA-A*30:02; GPRC6A; ENSG00000173612; CTA
CQNCPENHY

SEQ ID NO: 27552 - protein, 10 aa, Homo sapiens
  Table A; Target 27552; HLA-B*27:02; GPRC6A; ENSG00000173612; CTA
CRENATSVSK

SEQ ID NO: 27553 - protein, 10 aa, Homo sapiens
  Table A; Target 27553; HLA-B*27:05; GPRC6A; ENSG00000173612; CTA
CRENATSVSK

SEQ ID NO: 27554 - protein, 10 aa, Homo sapiens
  Table A; Target 27554; HLA-A*25:01; GPRC6A; ENSG00000173612; CTA
DAHGDLNTGY

SEQ ID NO: 27555 - protein, 10 aa, Homo sapiens
  Table A; Target 27555; HLA-A*26:01; GPRC6A; ENSG00000173612; CTA
DAHGDLNTGY

SEQ ID NO: 27556 - protein, 8 aa, Homo sapiens
  Table A; Target 27556; HLA-B*37:01; GPRC6A; ENSG00000173612; CTA
DDYGRLAL

SEQ ID NO: 27557 - protein, 9 aa, Homo sapiens
  Table A; Target 27557; HLA-A*26:01; GPRC6A; ENSG00000173612; CTA
DLFNKAIEM

SEQ ID NO: 27558 - protein, 9 aa, Homo sapiens
  Table A; Target 27558; HLA-A*33:01; GPRC6A; ENSG00000173612; CTA
DLFNKAIEM

SEQ ID NO: 27559 - protein, 9 aa, Homo sapiens
  Table A; Target 27559; HLA-B*08:01; GPRC6A; ENSG00000173612; CTA
DLFNKAIEM

SEQ ID NO: 27560 - protein, 9 aa, Homo sapiens
  Table A; Target 27560; HLA-B*18:01; GPRC6A; ENSG00000173612; CTA
DLFNKAIEM

SEQ ID NO: 27561 - protein, 9 aa, Homo sapiens
  Table A; Target 27561; HLA-C*07:04; GPRC6A; ENSG00000173612; CTA
DLFNKAIEM

SEQ ID NO: 27562 - protein, 10 aa, Homo sapiens
  Table A; Target 27562; HLA-A*33:01; GPRC6A; ENSG00000173612; CTA
DNTIEVRINR

SEQ ID NO: 27563 - protein, 10 aa, Homo sapiens
  Table A; Target 27563; HLA-A*33:03; GPRC6A; ENSG00000173612; CTA
DNTIEVRINR

SEQ ID NO: 27564 - protein, 9 aa, Homo sapiens
  Table A; Target 27564; HLA-B*51:01; GPRC6A; ENSG00000173612; CTA
DNWSTATKI

SEQ ID NO: 27565 - protein, 8 aa, Homo sapiens
  Table A; Target 27565; HLA-B*08:01; GPRC6A; ENSG00000173612; CTA
DPKLQKFL

SEQ ID NO: 27566 - protein, 9 aa, Homo sapiens
  Table A; Target 27566; HLA-A*01:01; GPRC6A; ENSG00000173612; CTA
DSHKLLHEY

SEQ ID NO: 27567 - protein, 9 aa, Homo sapiens
  Table A; Target 27567; HLA-A*30:02; GPRC6A; ENSG00000173612; CTA
DSHKLLHEY

SEQ ID NO: 27568 - protein, 9 aa, Homo sapiens
  Table A; Target 27568; HLA-A*33:01; GPRC6A; ENSG00000173612; CTA
DSHKLLHEY

SEQ ID NO: 27569 - protein, 9 aa, Homo sapiens
  Table A; Target 27569; HLA-B*18:01; GPRC6A; ENSG00000173612; CTA
DSHKLLHEY

SEQ ID NO: 27570 - protein, 9 aa, Homo sapiens
  Table A; Target 27570; HLA-B*51:01; GPRC6A; ENSG00000173612; CTA
DSLAILLLI

SEQ ID NO: 27571 - protein, 9 aa, Homo sapiens
  Table A; Target 27571; HLA-A*26:01; GPRC6A; ENSG00000173612; CTA
DSMSGNVTM

SEQ ID NO: 27572 - protein, 9 aa, Homo sapiens
  Table A; Target 27572; HLA-A*33:01; GPRC6A; ENSG00000173612; CTA
DSMSGNVTM

SEQ ID NO: 27573 - protein, 9 aa, Homo sapiens
  Table A; Target 27573; HLA-B*35:01; GPRC6A; ENSG00000173612; CTA
DSMSGNVTM

SEQ ID NO: 27574 - protein, 9 aa, Homo sapiens
  Table A; Target 27574; HLA-B*35:03; GPRC6A; ENSG00000173612; CTA
DSMSGNVTM

SEQ ID NO: 27575 - protein, 9 aa, Homo sapiens
  Table A; Target 27575; HLA-C*03:03; GPRC6A; ENSG00000173612; CTA
DSMSGNVTM

SEQ ID NO: 27576 - protein, 9 aa, Homo sapiens
  Table A; Target 27576; HLA-C*07:06; GPRC6A; ENSG00000173612; CTA
DSMSGNVTM

SEQ ID NO: 27577 - protein, 8 aa, Homo sapiens
  Table A; Target 27577; HLA-B*51:01; GPRC6A; ENSG00000173612; CTA
DSPRRPQI

SEQ ID NO: 27578 - protein, 10 aa, Homo sapiens
  Table A; Target 27578; HLA-A*26:01; GPRC6A; ENSG00000173612; CTA
DTCTEVTVAM

SEQ ID NO: 27579 - protein, 8 aa, Homo sapiens
  Table A; Target 27579; HLA-C*05:01; GPRC6A; ENSG00000173612; CTA
DTDLSQCI

SEQ ID NO: 27580 - protein, 9 aa, Homo sapiens
  Table A; Target 27580; HLA-A*01:01; GPRC6A; ENSG00000173612; CTA
DTDLSQCIF

SEQ ID NO: 27581 - protein, 11 aa, Homo sapiens
  Table A; Target 27581; HLA-A*68:01; GPRC6A; ENSG00000173612; CTA
DVFIIPDQETK

SEQ ID NO: 27582 - protein, 11 aa, Homo sapiens
  Table A; Target 27582; HLA-A*68:02; GPRC6A; ENSG00000173612; CTA
DVFIIPDQETK

SEQ ID NO: 27583 - protein, 10 aa, Homo sapiens
  Table A; Target 27583; HLA-A*33:01; GPRC6A; ENSG00000173612; CTA
DYAEPGLIHS

SEQ ID NO: 27584 - protein, 11 aa, Homo sapiens
  Table A; Target 27584; HLA-A*23:01; GPRC6A; ENSG00000173612; CTA
DYAEPGLIHSI

SEQ ID NO: 27585 - protein, 11 aa, Homo sapiens
  Table A; Target 27585; HLA-A*24:02; GPRC6A; ENSG00000173612; CTA
DYAEPGLIHSI

SEQ ID NO: 27586 - protein, 11 aa, Homo sapiens
  Table A; Target 27586; HLA-A*33:01; GPRC6A; ENSG00000173612; CTA
DYAEPGLIHSI

SEQ ID NO: 27587 - protein, 11 aa, Homo sapiens
  Table A; Target 27587; HLA-A*33:03; GPRC6A; ENSG00000173612; CTA
DYAEPGLIHSI

SEQ ID NO: 27588 - protein, 11 aa, Homo sapiens
  Table A; Target 27588; HLA-B*38:01; GPRC6A; ENSG00000173612; CTA
DYAEPGLIHSI

SEQ ID NO: 27589 - protein, 10 aa, Homo sapiens
  Table A; Target 27589; HLA-A*24:02; GPRC6A; ENSG00000173612; CTA
DYGRLALNTF

SEQ ID NO: 27590 - protein, 9 aa, Homo sapiens
  Table A; Target 27590; HLA-A*23:01; GPRC6A; ENSG00000173612; CTA
EANNVCIAF

SEQ ID NO: 27591 - protein, 9 aa, Homo sapiens
  Table A; Target 27591; HLA-A*25:01; GPRC6A; ENSG00000173612; CTA
EANNVCIAF

SEQ ID NO: 27592 - protein, 9 aa, Homo sapiens
  Table A; Target 27592; HLA-A*26:01; GPRC6A; ENSG00000173612; CTA
EANNVCIAF

SEQ ID NO: 27593 - protein, 9 aa, Homo sapiens
  Table A; Target 27593; HLA-A*32:01; GPRC6A; ENSG00000173612; CTA
EANNVCIAF

SEQ ID NO: 27594 - protein, 9 aa, Homo sapiens
  Table A; Target 27594; HLA-A*33:01; GPRC6A; ENSG00000173612; CTA
EANNVCIAF

SEQ ID NO: 27595 - protein, 9 aa, Homo sapiens
  Table A; Target 27595; HLA-A*33:03; GPRC6A; ENSG00000173612; CTA
EANNVCIAF

SEQ ID NO: 27596 - protein, 9 aa, Homo sapiens
  Table A; Target 27596; HLA-A*68:01; GPRC6A; ENSG00000173612; CTA
EANNVCIAF

SEQ ID NO: 27597 - protein, 9 aa, Homo sapiens
  Table A; Target 27597; HLA-A*68:02; GPRC6A; ENSG00000173612; CTA
EANNVCIAF

SEQ ID NO: 27598 - protein, 9 aa, Homo sapiens
  Table A; Target 27598; HLA-B*18:01; GPRC6A; ENSG00000173612; CTA
EANNVCIAF

SEQ ID NO: 27599 - protein, 9 aa, Homo sapiens
  Table A; Target 27599; HLA-B*27:02; GPRC6A; ENSG00000173612; CTA
EANNVCIAF

SEQ ID NO: 27600 - protein, 9 aa, Homo sapiens
  Table A; Target 27600; HLA-B*35:01; GPRC6A; ENSG00000173612; CTA
EANNVCIAF

SEQ ID NO: 27601 - protein, 9 aa, Homo sapiens
  Table A; Target 27601; HLA-B*35:03; GPRC6A; ENSG00000173612; CTA
EANNVCIAF

SEQ ID NO: 27602 - protein, 9 aa, Homo sapiens
  Table A; Target 27602; HLA-B*44:03; GPRC6A; ENSG00000173612; CTA
EANNVCIAF

SEQ ID NO: 27603 - protein, 9 aa, Homo sapiens
  Table A; Target 27603; HLA-B*57:01; GPRC6A; ENSG00000173612; CTA
EANNVCIAF

SEQ ID NO: 27604 - protein, 9 aa, Homo sapiens
  Table A; Target 27604; HLA-B*58:01; GPRC6A; ENSG00000173612; CTA
EANNVCIAF

SEQ ID NO: 27605 - protein, 9 aa, Homo sapiens
  Table A; Target 27605; HLA-C*03:03; GPRC6A; ENSG00000173612; CTA
EANNVCIAF

SEQ ID NO: 27606 - protein, 9 aa, Homo sapiens
  Table A; Target 27606; HLA-C*03:04; GPRC6A; ENSG00000173612; CTA
EANNVCIAF

SEQ ID NO: 27607 - protein, 9 aa, Homo sapiens
  Table A; Target 27607; HLA-C*07:06; GPRC6A; ENSG00000173612; CTA
EANNVCIAF

SEQ ID NO: 27608 - protein, 9 aa, Homo sapiens
  Table A; Target 27608; HLA-C*12:03; GPRC6A; ENSG00000173612; CTA
EANNVCIAF

SEQ ID NO: 27609 - protein, 9 aa, Homo sapiens
  Table A; Target 27609; HLA-C*16:01; GPRC6A; ENSG00000173612; CTA
EANNVCIAF

SEQ ID NO: 27610 - protein, 9 aa, Homo sapiens
  Table A; Target 27610; HLA-C*16:04; GPRC6A; ENSG00000173612; CTA
EANNVCIAF

SEQ ID NO: 27611 - protein, 10 aa, Homo sapiens
  Table A; Target 27611; HLA-A*25:01; GPRC6A; ENSG00000173612; CTA
EAQVNVIVVF

SEQ ID NO: 27612 - protein, 10 aa, Homo sapiens
  Table A; Target 27612; HLA-A*25:01; GPRC6A; ENSG00000173612; CTA
ECVGFEISVF

SEQ ID NO: 27613 - protein, 10 aa, Homo sapiens
  Table A; Target 27613; HLA-A*26:01; GPRC6A; ENSG00000173612; CTA
ECVGFEISVF

SEQ ID NO: 27614 - protein, 9 aa, Homo sapiens
  Table A; Target 27614; HLA-B*37:01; GPRC6A; ENSG00000173612; CTA
EDSPRRPQI

SEQ ID NO: 27615 - protein, 8 aa, Homo sapiens
  Table A; Target 27615; HLA-B*18:01; GPRC6A; ENSG00000173612; CTA
EEGSILAF

SEQ ID NO: 27616 - protein, 8 aa, Homo sapiens
  Table A; Target 27616; HLA-B*37:01; GPRC6A; ENSG00000173612; CTA
EEGSILAF

SEQ ID NO: 27617 - protein, 8 aa, Homo sapiens
  Table A; Target 27617; HLA-B*44:02; GPRC6A; ENSG00000173612; CTA
EEGSILAF

SEQ ID NO: 27618 - protein, 8 aa, Homo sapiens
  Table A; Target 27618; HLA-B*44:03; GPRC6A; ENSG00000173612; CTA
EEGSILAF

SEQ ID NO: 27619 - protein, 10 aa, Homo sapiens
  Table A; Target 27619; HLA-A*25:01; GPRC6A; ENSG00000173612; CTA
EIIVILISNY

SEQ ID NO: 27620 - protein, 10 aa, Homo sapiens
  Table A; Target 27620; HLA-A*26:01; GPRC6A; ENSG00000173612; CTA
EIIVILISNY

SEQ ID NO: 27621 - protein, 8 aa, Homo sapiens
  Table A; Target 27621; HLA-B*08:01; GPRC6A; ENSG00000173612; CTA
EINGHMTV

SEQ ID NO: 27622 - protein, 9 aa, Homo sapiens
  Table A; Target 27622; HLA-A*25:01; GPRC6A; ENSG00000173612; CTA
EINGHMTVT

SEQ ID NO: 27623 - protein, 9 aa, Homo sapiens
  Table A; Target 27623; HLA-A*26:01; GPRC6A; ENSG00000173612; CTA
EINGHMTVT

SEQ ID NO: 27624 - protein, 10 aa, Homo sapiens
  Table A; Target 27624; HLA-A*03:02; GPRC6A; ENSG00000173612; CTA
EINGHMTVTK

SEQ ID NO: 27625 - protein, 10 aa, Homo sapiens
  Table A; Target 27625; HLA-A*25:01; GPRC6A; ENSG00000173612; CTA
EINGHMTVTK

SEQ ID NO: 27626 - protein, 10 aa, Homo sapiens
  Table A; Target 27626; HLA-A*33:01; GPRC6A; ENSG00000173612; CTA
EINGHMTVTK

SEQ ID NO: 27627 - protein, 10 aa, Homo sapiens
  Table A; Target 27627; HLA-A*33:03; GPRC6A; ENSG00000173612; CTA
EINGHMTVTK

SEQ ID NO: 27628 - protein, 10 aa, Homo sapiens
  Table A; Target 27628; HLA-A*68:01; GPRC6A; ENSG00000173612; CTA
EINGHMTVTK

SEQ ID NO: 27629 - protein, 10 aa, Homo sapiens
  Table A; Target 27629; HLA-C*07:06; GPRC6A; ENSG00000173612; CTA
EINGHMTVTK

SEQ ID NO: 27630 - protein, 11 aa, Homo sapiens
  Table A; Target 27630; HLA-A*25:01; GPRC6A; ENSG00000173612; CTA
EINGHMTVTKM

SEQ ID NO: 27631 - protein, 11 aa, Homo sapiens
  Table A; Target 27631; HLA-A*26:01; GPRC6A; ENSG00000173612; CTA
EINGHMTVTKM

SEQ ID NO: 27632 - protein, 8 aa, Homo sapiens
  Table A; Target 27632; HLA-B*08:01; GPRC6A; ENSG00000173612; CTA
EINTKSAF

SEQ ID NO: 27633 - protein, 9 aa, Homo sapiens
  Table A; Target 27633; HLA-A*25:01; GPRC6A; ENSG00000173612; CTA
EINTKSAFL

SEQ ID NO: 27634 - protein, 9 aa, Homo sapiens
  Table A; Target 27634; HLA-A*26:01; GPRC6A; ENSG00000173612; CTA
EINTKSAFL

SEQ ID NO: 27635 - protein, 9 aa, Homo sapiens
  Table A; Target 27635; HLA-B*08:01; GPRC6A; ENSG00000173612; CTA
EINTKSAFL

SEQ ID NO: 27636 - protein, 10 aa, Homo sapiens
  Table A; Target 27636; HLA-A*03:02; GPRC6A; ENSG00000173612; CTA
EINTKSAFLK

SEQ ID NO: 27637 - protein, 10 aa, Homo sapiens
  Table A; Target 27637; HLA-A*33:01; GPRC6A; ENSG00000173612; CTA
EINTKSAFLK

SEQ ID NO: 27638 - protein, 10 aa, Homo sapiens
  Table A; Target 27638; HLA-A*33:03; GPRC6A; ENSG00000173612; CTA
EINTKSAFLK

SEQ ID NO: 27639 - protein, 10 aa, Homo sapiens
  Table A; Target 27639; HLA-A*68:01; GPRC6A; ENSG00000173612; CTA
EINTKSAFLK

SEQ ID NO: 27640 - protein, 9 aa, Homo sapiens
  Table A; Target 27640; HLA-A*25:01; GPRC6A; ENSG00000173612; CTA
EISVFLQTL

SEQ ID NO: 27641 - protein, 9 aa, Homo sapiens
  Table A; Target 27641; HLA-A*26:01; GPRC6A; ENSG00000173612; CTA
EISVFLQTL

SEQ ID NO: 27642 - protein, 9 aa, Homo sapiens
  Table A; Target 27642; HLA-A*68:02; GPRC6A; ENSG00000173612; CTA
EISVFLQTL

SEQ ID NO: 27643 - protein, 9 aa, Homo sapiens
  Table A; Target 27643; HLA-B*44:02; GPRC6A; ENSG00000173612; CTA
EISVFLQTL

SEQ ID NO: 27644 - protein, 8 aa, Homo sapiens
  Table A; Target 27644; HLA-A*33:03; GPRC6A; ENSG00000173612; CTA
EITMAVSR

SEQ ID NO: 27645 - protein, 8 aa, Homo sapiens
  Table A; Target 27645; HLA-A*68:01; GPRC6A; ENSG00000173612; CTA
EITMAVSR

SEQ ID NO: 27646 - protein, 9 aa, Homo sapiens
  Table A; Target 27646; HLA-A*26:01; GPRC6A; ENSG00000173612; CTA
EITMAVSRM

SEQ ID NO: 27647 - protein, 9 aa, Homo sapiens
  Table A; Target 27647; HLA-A*25:01; GPRC6A; ENSG00000173612; CTA
EIYDTCTEV

SEQ ID NO: 27648 - protein, 9 aa, Homo sapiens
  Table A; Target 27648; HLA-A*26:01; GPRC6A; ENSG00000173612; CTA
EIYDTCTEV

SEQ ID NO: 27649 - protein, 9 aa, Homo sapiens
  Table A; Target 27649; HLA-A*68:02; GPRC6A; ENSG00000173612; CTA
EIYDTCTEV

SEQ ID NO: 27650 - protein, 9 aa, Homo sapiens
  Table A; Target 27650; HLA-B*13:02; GPRC6A; ENSG00000173612; CTA
EIYDTCTEV

SEQ ID NO: 27651 - protein, 11 aa, Homo sapiens
  Table A; Target 27651; HLA-A*23:01; GPRC6A; ENSG00000173612; CTA
ELLGVLKNVTF

SEQ ID NO: 27652 - protein, 9 aa, Homo sapiens
  Table A; Target 27652; HLA-A*23:01; GPRC6A; ENSG00000173612; CTA
EMINNSTLL

SEQ ID NO: 27653 - protein, 9 aa, Homo sapiens
  Table A; Target 27653; HLA-A*26:01; GPRC6A; ENSG00000173612; CTA
EMINNSTLL

SEQ ID NO: 27654 - protein, 11 aa, Homo sapiens
  Table A; Target 27654; HLA-A*25:01; GPRC6A; ENSG00000173612; CTA
ENYNEAKFITF

SEQ ID NO: 27655 - protein, 11 aa, Homo sapiens
  Table A; Target 27655; HLA-A*26:01; GPRC6A; ENSG00000173612; CTA
ENYNEAKFITF

SEQ ID NO: 27656 - protein, 11 aa, Homo sapiens
  Table A; Target 27656; HLA-A*33:01; GPRC6A; ENSG00000173612; CTA
ENYNEAKFITF

SEQ ID NO: 27657 - protein, 11 aa, Homo sapiens
  Table A; Target 27657; HLA-A*33:03; GPRC6A; ENSG00000173612; CTA
ENYNEAKFITF

SEQ ID NO: 27658 - protein, 8 aa, Homo sapiens
  Table A; Target 27658; HLA-B*08:01; GPRC6A; ENSG00000173612; CTA
EPGLIHSI

SEQ ID NO: 27659 - protein, 8 aa, Homo sapiens
  Table A; Target 27659; HLA-B*51:01; GPRC6A; ENSG00000173612; CTA
EPGLIHSI

SEQ ID NO: 27660 - protein, 10 aa, Homo sapiens
  Table A; Target 27660; HLA-A*33:01; GPRC6A; ENSG00000173612; CTA
EPQDFTCKTR

SEQ ID NO: 27661 - protein, 10 aa, Homo sapiens
  Table A; Target 27661; HLA-A*33:03; GPRC6A; ENSG00000173612; CTA
EPQDFTCKTR

SEQ ID NO: 27662 - protein, 9 aa, Homo sapiens
  Table A; Target 27662; HLA-A*25:01; GPRC6A; ENSG00000173612; CTA
ETKNEFRNL

SEQ ID NO: 27663 - protein, 9 aa, Homo sapiens
  Table A; Target 27663; HLA-A*33:03; GPRC6A; ENSG00000173612; CTA
ETKNEFRNL

SEQ ID NO: 27664 - protein, 9 aa, Homo sapiens
  Table A; Target 27664; HLA-A*25:01; GPRC6A; ENSG00000173612; CTA
ETVEFKCDY

SEQ ID NO: 27665 - protein, 9 aa, Homo sapiens
  Table A; Target 27665; HLA-A*26:01; GPRC6A; ENSG00000173612; CTA
ETVEFKCDY

SEQ ID NO: 27666 - protein, 9 aa, Homo sapiens
  Table A; Target 27666; HLA-A*26:01; GPRC6A; ENSG00000173612; CTA
EVNVSLPRV

SEQ ID NO: 27667 - protein, 8 aa, Homo sapiens
  Table A; Target 27667; HLA-B*08:01; GPRC6A; ENSG00000173612; CTA
EVRINRTL

SEQ ID NO: 27668 - protein, 9 aa, Homo sapiens
  Table A; Target 27668; HLA-A*25:01; GPRC6A; ENSG00000173612; CTA
EVTVAMAAT

SEQ ID NO: 27669 - protein, 9 aa, Homo sapiens
  Table A; Target 27669; HLA-A*26:01; GPRC6A; ENSG00000173612; CTA
EVTVAMAAT

SEQ ID NO: 27670 - protein, 10 aa, Homo sapiens
  Table A; Target 27670; HLA-A*25:01; GPRC6A; ENSG00000173612; CTA
EVTVAMAATL

SEQ ID NO: 27671 - protein, 10 aa, Homo sapiens
  Table A; Target 27671; HLA-A*26:01; GPRC6A; ENSG00000173612; CTA
EVTVAMAATL

SEQ ID NO: 27672 - protein, 10 aa, Homo sapiens
  Table A; Target 27672; HLA-A*68:01; GPRC6A; ENSG00000173612; CTA
EVTVAMAATL

SEQ ID NO: 27673 - protein, 11 aa, Homo sapiens
  Table A; Target 27673; HLA-A*33:03; GPRC6A; ENSG00000173612; CTA
EVTVAMAATLR

SEQ ID NO: 27674 - protein, 11 aa, Homo sapiens
  Table A; Target 27674; HLA-A*68:01; GPRC6A; ENSG00000173612; CTA
EVTVAMAATLR

SEQ ID NO: 27675 - protein, 9 aa, Homo sapiens
  Table A; Target 27675; HLA-A*24:02; GPRC6A; ENSG00000173612; CTA
EYDLQNDVF

SEQ ID NO: 27676 - protein, 9 aa, Homo sapiens
  Table A; Target 27676; HLA-B*35:03; GPRC6A; ENSG00000173612; CTA
EYDLQNDVF

SEQ ID NO: 27677 - protein, 9 aa, Homo sapiens
  Table A; Target 27677; HLA-C*04:01; GPRC6A; ENSG00000173612; CTA
EYDLQNDVF

SEQ ID NO: 27678 - protein, 9 aa, Homo sapiens
  Table A; Target 27678; HLA-A*23:01; GPRC6A; ENSG00000173612; CTA
EYLNWNDSL

SEQ ID NO: 27679 - protein, 9 aa, Homo sapiens
  Table A; Target 27679; HLA-A*24:02; GPRC6A; ENSG00000173612; CTA
EYLNWNDSL

SEQ ID NO: 27680 - protein, 9 aa, Homo sapiens
  Table A; Target 27680; HLA-C*14:02; GPRC6A; ENSG00000173612; CTA
EYLNWNDSL

SEQ ID NO: 27681 - protein, 8 aa, Homo sapiens
  Table A; Target 27681; HLA-B*35:03; GPRC6A; ENSG00000173612; CTA
FAAPTVEV

SEQ ID NO: 27682 - protein, 8 aa, Homo sapiens
  Table A; Target 27682; HLA-B*39:01; GPRC6A; ENSG00000173612; CTA
FAAPTVEV

SEQ ID NO: 27683 - protein, 8 aa, Homo sapiens
  Table A; Target 27683; HLA-B*46:01; GPRC6A; ENSG00000173612; CTA
FAAPTVEV

SEQ ID NO: 27684 - protein, 8 aa, Homo sapiens
  Table A; Target 27684; HLA-B*51:01; GPRC6A; ENSG00000173612; CTA
FAAPTVEV

SEQ ID NO: 27685 - protein, 8 aa, Homo sapiens
  Table A; Target 27685; HLA-B*54:01; GPRC6A; ENSG00000173612; CTA
FAAPTVEV

SEQ ID NO: 27686 - protein, 8 aa, Homo sapiens
  Table A; Target 27686; HLA-B*56:01; GPRC6A; ENSG00000173612; CTA
FAAPTVEV

SEQ ID NO: 27687 - protein, 8 aa, Homo sapiens
  Table A; Target 27687; HLA-C*02:02; GPRC6A; ENSG00000173612; CTA
FAAPTVEV

SEQ ID NO: 27688 - protein, 8 aa, Homo sapiens
  Table A; Target 27688; HLA-C*03:03; GPRC6A; ENSG00000173612; CTA
FAAPTVEV

SEQ ID NO: 27689 - protein, 8 aa, Homo sapiens
  Table A; Target 27689; HLA-C*03:04; GPRC6A; ENSG00000173612; CTA
FAAPTVEV

SEQ ID NO: 27690 - protein, 8 aa, Homo sapiens
  Table A; Target 27690; HLA-C*05:01; GPRC6A; ENSG00000173612; CTA
FAAPTVEV

SEQ ID NO: 27691 - protein, 8 aa, Homo sapiens
  Table A; Target 27691; HLA-C*12:03; GPRC6A; ENSG00000173612; CTA
FAAPTVEV

SEQ ID NO: 27692 - protein, 8 aa, Homo sapiens
  Table A; Target 27692; HLA-C*16:02; GPRC6A; ENSG00000173612; CTA
FAAPTVEV

SEQ ID NO: 27693 - protein, 8 aa, Homo sapiens
  Table A; Target 27693; HLA-C*16:04; GPRC6A; ENSG00000173612; CTA
FAAPTVEV

SEQ ID NO: 27694 - protein, 9 aa, Homo sapiens
  Table A; Target 27694; HLA-C*12:03; GPRC6A; ENSG00000173612; CTA
FAAPTVEVN

SEQ ID NO: 27695 - protein, 10 aa, Homo sapiens
  Table A; Target 27695; HLA-A*68:02; GPRC6A; ENSG00000173612; CTA
FAAPTVEVNV

SEQ ID NO: 27696 - protein, 10 aa, Homo sapiens
  Table A; Target 27696; HLA-C*02:02; GPRC6A; ENSG00000173612; CTA
FAAPTVEVNV

SEQ ID NO: 27697 - protein, 10 aa, Homo sapiens
  Table A; Target 27697; HLA-A*29:02; GPRC6A; ENSG00000173612; CTA
FAFKGKYENY

SEQ ID NO: 27698 - protein, 10 aa, Homo sapiens
  Table A; Target 27698; HLA-B*35:01; GPRC6A; ENSG00000173612; CTA
FAFKGKYENY

SEQ ID NO: 27699 - protein, 10 aa, Homo sapiens
  Table A; Target 27699; HLA-C*02:02; GPRC6A; ENSG00000173612; CTA
FAFKGKYENY

SEQ ID NO: 27700 - protein, 9 aa, Homo sapiens
  Table A; Target 27700; HLA-B*49:01; GPRC6A; ENSG00000173612; CTA
FEISVFLQT

SEQ ID NO: 27701 - protein, 10 aa, Homo sapiens
  Table A; Target 27701; HLA-A*30:01; GPRC6A; ENSG00000173612; CTA
FEISVFLQTL

SEQ ID NO: 27702 - protein, 10 aa, Homo sapiens
  Table A; Target 27702; HLA-B*40:01; GPRC6A; ENSG00000173612; CTA
FEISVFLQTL

SEQ ID NO: 27703 - protein, 10 aa, Homo sapiens
  Table A; Target 27703; HLA-B*40:02; GPRC6A; ENSG00000173612; CTA
FEISVFLQTL

SEQ ID NO: 27704 - protein, 10 aa, Homo sapiens
  Table A; Target 27704; HLA-B*44:02; GPRC6A; ENSG00000173612; CTA
FEISVFLQTL

SEQ ID NO: 27705 - protein, 10 aa, Homo sapiens
  Table A; Target 27705; HLA-B*49:01; GPRC6A; ENSG00000173612; CTA
FEISVFLQTL

SEQ ID NO: 27706 - protein, 8 aa, Homo sapiens
  Table A; Target 27706; HLA-A*30:01; GPRC6A; ENSG00000173612; CTA
FEKEVEYL

SEQ ID NO: 27707 - protein, 8 aa, Homo sapiens
  Table A; Target 27707; HLA-B*18:01; GPRC6A; ENSG00000173612; CTA
FEKEVEYL

SEQ ID NO: 27708 - protein, 8 aa, Homo sapiens
  Table A; Target 27708; HLA-B*37:01; GPRC6A; ENSG00000173612; CTA
FEKEVEYL

SEQ ID NO: 27709 - protein, 10 aa, Homo sapiens
  Table A; Target 27709; HLA-B*44:02; GPRC6A; ENSG00000173612; CTA
FEKEVEYLNW

SEQ ID NO: 27710 - protein, 9 aa, Homo sapiens
  Table A; Target 27710; HLA-A*23:01; GPRC6A; ENSG00000173612; CTA
FFIGEPQDF

SEQ ID NO: 27711 - protein, 9 aa, Homo sapiens
  Table A; Target 27711; HLA-A*24:02; GPRC6A; ENSG00000173612; CTA
FFIGEPQDF

SEQ ID NO: 27712 - protein, 9 aa, Homo sapiens
  Table A; Target 27712; HLA-A*29:02; GPRC6A; ENSG00000173612; CTA
FFIGEPQDF

SEQ ID NO: 27713 - protein, 9 aa, Homo sapiens
  Table A; Target 27713; HLA-C*14:02; GPRC6A; ENSG00000173612; CTA
FFIGEPQDF

SEQ ID NO: 27714 - protein, 9 aa, Homo sapiens
  Table A; Target 27714; HLA-A*29:02; GPRC6A; ENSG00000173612; CTA
FIFAFKGKY

SEQ ID NO: 27715 - protein, 9 aa, Homo sapiens
  Table A; Target 27715; HLA-A*30:02; GPRC6A; ENSG00000173612; CTA
FIFAFKGKY

SEQ ID NO: 27716 - protein, 8 aa, Homo sapiens
  Table A; Target 27716; HLA-C*05:01; GPRC6A; ENSG00000173612; CTA
FIGEPQDF

SEQ ID NO: 27717 - protein, 9 aa, Homo sapiens
  Table A; Target 27717; HLA-B*58:01; GPRC6A; ENSG00000173612; CTA
FIIPDQETK

SEQ ID NO: 27718 - protein, 10 aa, Homo sapiens
  Table A; Target 27718; HLA-A*02:03; GPRC6A; ENSG00000173612; CTA
FIIQAEANNV

SEQ ID NO: 27719 - protein, 9 aa, Homo sapiens
  Table A; Target 27719; HLA-A*02:07; GPRC6A; ENSG00000173612; CTA
FIPIYATTF

SEQ ID NO: 27720 - protein, 9 aa, Homo sapiens
  Table A; Target 27720; HLA-A*24:02; GPRC6A; ENSG00000173612; CTA
FIPIYATTF

SEQ ID NO: 27721 - protein, 9 aa, Homo sapiens
  Table A; Target 27721; HLA-B*46:01; GPRC6A; ENSG00000173612; CTA
FIPIYATTF

SEQ ID NO: 27722 - protein, 9 aa, Homo sapiens
  Table A; Target 27722; HLA-C*01:02; GPRC6A; ENSG00000173612; CTA
FIPIYATTF

SEQ ID NO: 27723 - protein, 9 aa, Homo sapiens
  Table A; Target 27723; HLA-C*02:02; GPRC6A; ENSG00000173612; CTA
FIPIYATTF

SEQ ID NO: 27724 - protein, 9 aa, Homo sapiens
  Table A; Target 27724; HLA-A*32:01; GPRC6A; ENSG00000173612; CTA
FLNFASTSF

SEQ ID NO: 27725 - protein, 9 aa, Homo sapiens
  Table A; Target 27725; HLA-B*15:01; GPRC6A; ENSG00000173612; CTA
FLNFASTSF

SEQ ID NO: 27726 - protein, 9 aa, Homo sapiens
  Table A; Target 27726; HLA-B*15:03; GPRC6A; ENSG00000173612; CTA
FLNFASTSF

SEQ ID NO: 27727 - protein, 9 aa, Homo sapiens
  Table A; Target 27727; HLA-B*46:01; GPRC6A; ENSG00000173612; CTA
FLNFASTSF

SEQ ID NO: 27728 - protein, 9 aa, Homo sapiens
  Table A; Target 27728; HLA-C*01:02; GPRC6A; ENSG00000173612; CTA
FLNFASTSF

SEQ ID NO: 27729 - protein, 9 aa, Homo sapiens
  Table A; Target 27729; HLA-C*02:02; GPRC6A; ENSG00000173612; CTA
FLNFASTSF

SEQ ID NO: 27730 - protein, 9 aa, Homo sapiens
  Table A; Target 27730; HLA-C*07:04; GPRC6A; ENSG00000173612; CTA
FLNFASTSF

SEQ ID NO: 27731 - protein, 9 aa, Homo sapiens
  Table A; Target 27731; HLA-C*14:02; GPRC6A; ENSG00000173612; CTA
FLNFASTSF

SEQ ID NO: 27732 - protein, 8 aa, Homo sapiens
  Table A; Target 27732; HLA-A*02:04; GPRC6A; ENSG00000173612; CTA
FLQNLHLL

SEQ ID NO: 27733 - protein, 9 aa, Homo sapiens
  Table A; Target 27733; HLA-B*46:01; GPRC6A; ENSG00000173612; CTA
FLRTVPSDF

SEQ ID NO: 27734 - protein, 9 aa, Homo sapiens
  Table A; Target 27734; HLA-A*02:01; GPRC6A; ENSG00000173612; CTA
FLSDNTIEV

SEQ ID NO: 27735 - protein, 9 aa, Homo sapiens
  Table A; Target 27735; HLA-A*02:03; GPRC6A; ENSG00000173612; CTA
FLSDNTIEV

SEQ ID NO: 27736 - protein, 9 aa, Homo sapiens
  Table A; Target 27736; HLA-A*02:04; GPRC6A; ENSG00000173612; CTA
FLSDNTIEV

SEQ ID NO: 27737 - protein, 9 aa, Homo sapiens
  Table A; Target 27737; HLA-A*02:07; GPRC6A; ENSG00000173612; CTA
FLSDNTIEV

SEQ ID NO: 27738 - protein, 9 aa, Homo sapiens
  Table A; Target 27738; HLA-A*68:02; GPRC6A; ENSG00000173612; CTA
FLSDNTIEV

SEQ ID NO: 27739 - protein, 9 aa, Homo sapiens
  Table A; Target 27739; HLA-B*13:02; GPRC6A; ENSG00000173612; CTA
FLSDNTIEV

SEQ ID NO: 27740 - protein, 9 aa, Homo sapiens
  Table A; Target 27740; HLA-B*46:01; GPRC6A; ENSG00000173612; CTA
FLSDNTIEV

SEQ ID NO: 27741 - protein, 9 aa, Homo sapiens
  Table A; Target 27741; HLA-B*55:01; GPRC6A; ENSG00000173612; CTA
FLSDNTIEV

SEQ ID NO: 27742 - protein, 9 aa, Homo sapiens
  Table A; Target 27742; HLA-C*02:02; GPRC6A; ENSG00000173612; CTA
FLSDNTIEV

SEQ ID NO: 27743 - protein, 11 aa, Homo sapiens
  Table A; Target 27743; HLA-A*02:01; GPRC6A; ENSG00000173612; CTA
FLSDNTIEVRI

SEQ ID NO: 27744 - protein, 11 aa, Homo sapiens
  Table A; Target 27744; HLA-A*02:04; GPRC6A; ENSG00000173612; CTA
FLSDNTIEVRI

SEQ ID NO: 27745 - protein, 10 aa, Homo sapiens
  Table A; Target 27745; HLA-A*02:01; GPRC6A; ENSG00000173612; CTA
FLWDYAEPGL

SEQ ID NO: 27746 - protein, 10 aa, Homo sapiens
  Table A; Target 27746; HLA-A*02:04; GPRC6A; ENSG00000173612; CTA
FLWDYAEPGL

SEQ ID NO: 27747 - protein, 10 aa, Homo sapiens
  Table A; Target 27747; HLA-A*02:07; GPRC6A; ENSG00000173612; CTA
FLWDYAEPGL

SEQ ID NO: 27748 - protein, 10 aa, Homo sapiens
  Table A; Target 27748; HLA-A*29:02; GPRC6A; ENSG00000173612; CTA
FNHSQRTLAY

SEQ ID NO: 27749 - protein, 8 aa, Homo sapiens
  Table A; Target 27749; HLA-B*51:01; GPRC6A; ENSG00000173612; CTA
FPSFLRTV

SEQ ID NO: 27750 - protein, 9 aa, Homo sapiens
  Table A; Target 27750; HLA-A*02:07; GPRC6A; ENSG00000173612; CTA
FQPWELLGV

SEQ ID NO: 27751 - protein, 9 aa, Homo sapiens
  Table A; Target 27751; HLA-A*03:01; GPRC6A; ENSG00000173612; CTA
FSFDPKLQK

SEQ ID NO: 27752 - protein, 9 aa, Homo sapiens
  Table A; Target 27752; HLA-A*11:01; GPRC6A; ENSG00000173612; CTA
FSFDPKLQK

SEQ ID NO: 27753 - protein, 10 aa, Homo sapiens
  Table A; Target 27753; HLA-A*25:01; GPRC6A; ENSG00000173612; CTA
FSFDPKLQKF

SEQ ID NO: 27754 - protein, 10 aa, Homo sapiens
  Table A; Target 27754; HLA-A*29:02; GPRC6A; ENSG00000173612; CTA
FSFDPKLQKF

SEQ ID NO: 27755 - protein, 10 aa, Homo sapiens
  Table A; Target 27755; HLA-A*68:02; GPRC6A; ENSG00000173612; CTA
FSFDPKLQKF

SEQ ID NO: 27756 - protein, 10 aa, Homo sapiens
  Table A; Target 27756; HLA-B*57:01; GPRC6A; ENSG00000173612; CTA
FSFDPKLQKF

SEQ ID NO: 27757 - protein, 10 aa, Homo sapiens
  Table A; Target 27757; HLA-C*02:02; GPRC6A; ENSG00000173612; CTA
FSFDPKLQKF

SEQ ID NO: 27758 - protein, 8 aa, Homo sapiens
  Table A; Target 27758; HLA-C*05:01; GPRC6A; ENSG00000173612; CTA
FTDGWNSF

SEQ ID NO: 27759 - protein, 9 aa, Homo sapiens
  Table A; Target 27759; HLA-A*11:01; GPRC6A; ENSG00000173612; CTA
GGLFAIHEK

SEQ ID NO: 27760 - protein, 8 aa, Homo sapiens
  Table A; Target 27760; HLA-B*37:01; GPRC6A; ENSG00000173612; CTA
GHMTVTKM

SEQ ID NO: 27761 - protein, 9 aa, Homo sapiens
  Table A; Target 27761; HLA-B*15:01; GPRC6A; ENSG00000173612; CTA
GIITTDDDY

SEQ ID NO: 27762 - protein, 8 aa, Homo sapiens
  Table A; Target 27762; HLA-B*15:03; GPRC6A; ENSG00000173612; CTA
GKVVGFAF

SEQ ID NO: 27763 - protein, 9 aa, Homo sapiens
  Table A; Target 27763; HLA-B*15:03; GPRC6A; ENSG00000173612; CTA
GKYVPAVEI

SEQ ID NO: 27764 - protein, 9 aa, Homo sapiens
  Table A; Target 27764; HLA-A*25:01; GPRC6A; ENSG00000173612; CTA
GNISSFHSF

SEQ ID NO: 27765 - protein, 9 aa, Homo sapiens
  Table A; Target 27765; HLA-A*24:02; GPRC6A; ENSG00000173612; CTA
GYIAILAFI

SEQ ID NO: 27766 - protein, 9 aa, Homo sapiens
  Table A; Target 27766; HLA-A*23:01; GPRC6A; ENSG00000173612; CTA
GYSEITMAV

SEQ ID NO: 27767 - protein, 9 aa, Homo sapiens
  Table A; Target 27767; HLA-A*24:02; GPRC6A; ENSG00000173612; CTA
GYSEITMAV

SEQ ID NO: 27768 - protein, 9 aa, Homo sapiens
  Table A; Target 27768; HLA-A*29:02; GPRC6A; ENSG00000173612; CTA
GYSEITMAV

SEQ ID NO: 27769 - protein, 9 aa, Homo sapiens
  Table A; Target 27769; HLA-B*13:02; GPRC6A; ENSG00000173612; CTA
GYSEITMAV

SEQ ID NO: 27770 - protein, 9 aa, Homo sapiens
  Table A; Target 27770; HLA-B*27:05; GPRC6A; ENSG00000173612; CTA
GYSEITMAV

SEQ ID NO: 27771 - protein, 9 aa, Homo sapiens
  Table A; Target 27771; HLA-B*49:01; GPRC6A; ENSG00000173612; CTA
GYSEITMAV

SEQ ID NO: 27772 - protein, 9 aa, Homo sapiens
  Table A; Target 27772; HLA-C*02:02; GPRC6A; ENSG00000173612; CTA
GYSEITMAV

SEQ ID NO: 27773 - protein, 9 aa, Homo sapiens
  Table A; Target 27773; HLA-C*14:02; GPRC6A; ENSG00000173612; CTA
GYSEITMAV

SEQ ID NO: 27774 - protein, 11 aa, Homo sapiens
  Table A; Target 27774; HLA-A*31:01; GPRC6A; ENSG00000173612; CTA
GYSEITMAVSR

SEQ ID NO: 27775 - protein, 11 aa, Homo sapiens
  Table A; Target 27775; HLA-A*33:03; GPRC6A; ENSG00000173612; CTA
GYSEITMAVSR

SEQ ID NO: 27776 - protein, 9 aa, Homo sapiens
  Table A; Target 27776; HLA-A*30:01; GPRC6A; ENSG00000173612; CTA
HEYAMHLSA

SEQ ID NO: 27777 - protein, 9 aa, Homo sapiens
  Table A; Target 27777; HLA-B*18:01; GPRC6A; ENSG00000173612; CTA
HEYAMHLSA

SEQ ID NO: 27778 - protein, 9 aa, Homo sapiens
  Table A; Target 27778; HLA-B*37:01; GPRC6A; ENSG00000173612; CTA
HEYAMHLSA

SEQ ID NO: 27779 - protein, 9 aa, Homo sapiens
  Table A; Target 27779; HLA-B*40:02; GPRC6A; ENSG00000173612; CTA
HEYAMHLSA

SEQ ID NO: 27780 - protein, 9 aa, Homo sapiens
  Table A; Target 27780; HLA-B*49:01; GPRC6A; ENSG00000173612; CTA
HEYAMHLSA

SEQ ID NO: 27781 - protein, 9 aa, Homo sapiens
  Table A; Target 27781; HLA-B*54:01; GPRC6A; ENSG00000173612; CTA
HEYAMHLSA

SEQ ID NO: 27782 - protein, 8 aa, Homo sapiens
  Table A; Target 27782; HLA-C*04:01; GPRC6A; ENSG00000173612; CTA
HFDAHGDL

SEQ ID NO: 27783 - protein, 10 aa, Homo sapiens
  Table A; Target 27783; HLA-A*23:01; GPRC6A; ENSG00000173612; CTA
HFLNFASTSF

SEQ ID NO: 27784 - protein, 10 aa, Homo sapiens
  Table A; Target 27784; HLA-A*24:02; GPRC6A; ENSG00000173612; CTA
HFLNFASTSF

SEQ ID NO: 27785 - protein, 10 aa, Homo sapiens
  Table A; Target 27785; HLA-C*14:02; GPRC6A; ENSG00000173612; CTA
HFLNFASTSF

SEQ ID NO: 27786 - protein, 9 aa, Homo sapiens
  Table A; Target 27786; HLA-A*03:02; GPRC6A; ENSG00000173612; CTA
HLSACAYVK

SEQ ID NO: 27787 - protein, 8 aa, Homo sapiens
  Table A; Target 27787; HLA-B*58:01; GPRC6A; ENSG00000173612; CTA
HSQRTLAY

SEQ ID NO: 27788 - protein, 9 aa, Homo sapiens
  Table A; Target 27788; HLA-A*03:02; GPRC6A; ENSG00000173612; CTA
HSQRTLAYK

SEQ ID NO: 27789 - protein, 9 aa, Homo sapiens
  Table A; Target 27789; HLA-A*33:01; GPRC6A; ENSG00000173612; CTA
HSQRTLAYK

SEQ ID NO: 27790 - protein, 8 aa, Homo sapiens
  Table A; Target 27790; HLA-C*03:03; GPRC6A; ENSG00000173612; CTA
HSVSSIAL

SEQ ID NO: 27791 - protein, 8 aa, Homo sapiens
  Table A; Target 27791; HLA-C*03:04; GPRC6A; ENSG00000173612; CTA
HSVSSIAL

SEQ ID NO: 27792 - protein, 8 aa, Homo sapiens
  Table A; Target 27792; HLA-C*16:01; GPRC6A; ENSG00000173612; CTA
HSVSSIAL

SEQ ID NO: 27793 - protein, 9 aa, Homo sapiens
  Table A; Target 27793; HLA-A*68:02; GPRC6A; ENSG00000173612; CTA
HVFDLFNKA

SEQ ID NO: 27794 - protein, 9 aa, Homo sapiens
  Table A; Target 27794; HLA-B*54:01; GPRC6A; ENSG00000173612; CTA
HVFDLFNKA

SEQ ID NO: 27795 - protein, 10 aa, Homo sapiens
  Table A; Target 27795; HLA-A*68:02; GPRC6A; ENSG00000173612; CTA
HVFDLFNKAI

SEQ ID NO: 27796 - protein, 9 aa, Homo sapiens
  Table A; Target 27796; HLA-A*24:02; GPRC6A; ENSG00000173612; CTA
HWAPVRSTM

SEQ ID NO: 27797 - protein, 9 aa, Homo sapiens
  Table A; Target 27797; HLA-B*54:01; GPRC6A; ENSG00000173612; CTA
IAFKEVLPA

SEQ ID NO: 27798 - protein, 10 aa, Homo sapiens
  Table A; Target 27798; HLA-B*57:01; GPRC6A; ENSG00000173612; CTA
IAFKEVLPAF

SEQ ID NO: 27799 - protein, 8 aa, Homo sapiens
  Table A; Target 27799; HLA-C*03:03; GPRC6A; ENSG00000173612; CTA
IALSPASL

SEQ ID NO: 27800 - protein, 8 aa, Homo sapiens
  Table A; Target 27800; HLA-C*03:04; GPRC6A; ENSG00000173612; CTA
IALSPASL

SEQ ID NO: 27801 - protein, 8 aa, Homo sapiens
  Table A; Target 27801; HLA-C*05:01; GPRC6A; ENSG00000173612; CTA
IALSPASL

SEQ ID NO: 27802 - protein, 9 aa, Homo sapiens
  Table A; Target 27802; HLA-A*30:01; GPRC6A; ENSG00000173612; CTA
IEMINNSTL

SEQ ID NO: 27803 - protein, 9 aa, Homo sapiens
  Table A; Target 27803; HLA-B*18:01; GPRC6A; ENSG00000173612; CTA
IEMINNSTL

SEQ ID NO: 27804 - protein, 9 aa, Homo sapiens
  Table A; Target 27804; HLA-B*37:01; GPRC6A; ENSG00000173612; CTA
IEMINNSTL

SEQ ID NO: 27805 - protein, 9 aa, Homo sapiens
  Table A; Target 27805; HLA-B*40:01; GPRC6A; ENSG00000173612; CTA
IEMINNSTL

SEQ ID NO: 27806 - protein, 9 aa, Homo sapiens
  Table A; Target 27806; HLA-B*40:02; GPRC6A; ENSG00000173612; CTA
IEMINNSTL

SEQ ID NO: 27807 - protein, 9 aa, Homo sapiens
  Table A; Target 27807; HLA-B*44:02; GPRC6A; ENSG00000173612; CTA
IEMINNSTL

SEQ ID NO: 27808 - protein, 9 aa, Homo sapiens
  Table A; Target 27808; HLA-B*44:03; GPRC6A; ENSG00000173612; CTA
IEMINNSTL

SEQ ID NO: 27809 - protein, 9 aa, Homo sapiens
  Table A; Target 27809; HLA-B*49:01; GPRC6A; ENSG00000173612; CTA
IEMINNSTL

SEQ ID NO: 27810 - protein, 10 aa, Homo sapiens
  Table A; Target 27810; HLA-A*30:01; GPRC6A; ENSG00000173612; CTA
IEMINNSTLL

SEQ ID NO: 27811 - protein, 10 aa, Homo sapiens
  Table A; Target 27811; HLA-B*40:01; GPRC6A; ENSG00000173612; CTA
IEMINNSTLL

SEQ ID NO: 27812 - protein, 10 aa, Homo sapiens
  Table A; Target 27812; HLA-B*49:01; GPRC6A; ENSG00000173612; CTA
IEMINNSTLL

SEQ ID NO: 27813 - protein, 8 aa, Homo sapiens
  Table A; Target 27813; HLA-A*30:01; GPRC6A; ENSG00000173612; CTA
IEMNINKM

SEQ ID NO: 27814 - protein, 8 aa, Homo sapiens
  Table A; Target 27814; HLA-B*18:01; GPRC6A; ENSG00000173612; CTA
IEMNINKM

SEQ ID NO: 27815 - protein, 8 aa, Homo sapiens
  Table A; Target 27815; HLA-B*37:01; GPRC6A; ENSG00000173612; CTA
IEMNINKM

SEQ ID NO: 27816 - protein, 8 aa, Homo sapiens
  Table A; Target 27816; HLA-B*44:02; GPRC6A; ENSG00000173612; CTA
IEMNINKM

SEQ ID NO: 27817 - protein, 8 aa, Homo sapiens
  Table A; Target 27817; HLA-B*49:01; GPRC6A; ENSG00000173612; CTA
IEMNINKM

SEQ ID NO: 27818 - protein, 9 aa, Homo sapiens
  Table A; Target 27818; HLA-B*44:02; GPRC6A; ENSG00000173612; CTA
IEMNINKMW

SEQ ID NO: 27819 - protein, 9 aa, Homo sapiens
  Table A; Target 27819; HLA-B*44:03; GPRC6A; ENSG00000173612; CTA
IEMNINKMW

SEQ ID NO: 27820 - protein, 9 aa, Homo sapiens
  Table A; Target 27820; HLA-C*16:04; GPRC6A; ENSG00000173612; CTA
IEMNINKMW

SEQ ID NO: 27821 - protein, 9 aa, Homo sapiens
  Table A; Target 27821; HLA-A*23:01; GPRC6A; ENSG00000173612; CTA
IFAAPTVEV

SEQ ID NO: 27822 - protein, 9 aa, Homo sapiens
  Table A; Target 27822; HLA-B*46:01; GPRC6A; ENSG00000173612; CTA
IFAAPTVEV

SEQ ID NO: 27823 - protein, 9 aa, Homo sapiens
  Table A; Target 27823; HLA-C*01:02; GPRC6A; ENSG00000173612; CTA
IFAAPTVEV

SEQ ID NO: 27824 - protein, 9 aa, Homo sapiens
  Table A; Target 27824; HLA-C*02:02; GPRC6A; ENSG00000173612; CTA
IFAAPTVEV

SEQ ID NO: 27825 - protein, 9 aa, Homo sapiens
  Table A; Target 27825; HLA-C*03:04; GPRC6A; ENSG00000173612; CTA
IFAAPTVEV

SEQ ID NO: 27826 - protein, 9 aa, Homo sapiens
  Table A; Target 27826; HLA-C*14:02; GPRC6A; ENSG00000173612; CTA
IFAAPTVEV

SEQ ID NO: 27827 - protein, 11 aa, Homo sapiens
  Table A; Target 27827; HLA-A*23:01; GPRC6A; ENSG00000173612; CTA
IFAAPTVEVNV

SEQ ID NO: 27828 - protein, 9 aa, Homo sapiens
  Table A; Target 27828; HLA-C*14:02; GPRC6A; ENSG00000173612; CTA
IFNHSQRTL

SEQ ID NO: 27829 - protein, 11 aa, Homo sapiens
  Table A; Target 27829; HLA-A*29:02; GPRC6A; ENSG00000173612; CTA
IFNHSQRTLAY

SEQ ID NO: 27830 - protein, 10 aa, Homo sapiens
  Table A; Target 27830; HLA-A*23:01; GPRC6A; ENSG00000173612; CTA
IFVLVVGIIF

SEQ ID NO: 27831 - protein, 9 aa, Homo sapiens
  Table A; Target 27831; HLA-B*46:01; GPRC6A; ENSG00000173612; CTA
IGKVVGFAF

SEQ ID NO: 27832 - protein, 10 aa, Homo sapiens
  Table A; Target 27832; HLA-B*39:01; GPRC6A; ENSG00000173612; CTA
IGSGYSEITM

SEQ ID NO: 27833 - protein, 9 aa, Homo sapiens
  Table A; Target 27833; HLA-B*38:01; GPRC6A; ENSG00000173612; CTA
IHSIQLAVF

SEQ ID NO: 27834 - protein, 10 aa, Homo sapiens
  Table A; Target 27834; HLA-A*03:02; GPRC6A; ENSG00000173612; CTA
IICKQEINTK

SEQ ID NO: 27835 - protein, 9 aa, Homo sapiens
  Table A; Target 27835; HLA-A*02:04; GPRC6A; ENSG00000173612; CTA
IIIGGLFAI

SEQ ID NO: 27836 - protein, 9 aa, Homo sapiens
  Table A; Target 27836; HLA-A*02:01; GPRC6A; ENSG00000173612; CTA
IILEAQVNV

SEQ ID NO: 27837 - protein, 9 aa, Homo sapiens
  Table A; Target 27837; HLA-A*02:04; GPRC6A; ENSG00000173612; CTA
IILEAQVNV

SEQ ID NO: 27838 - protein, 9 aa, Homo sapiens
  Table A; Target 27838; HLA-A*02:07; GPRC6A; ENSG00000173612; CTA
IILEAQVNV

SEQ ID NO: 27839 - protein, 9 aa, Homo sapiens
  Table A; Target 27839; HLA-C*05:01; GPRC6A; ENSG00000173612; CTA
IILEAQVNV

SEQ ID NO: 27840 - protein, 11 aa, Homo sapiens
  Table A; Target 27840; HLA-A*02:07; GPRC6A; ENSG00000173612; CTA
IILEAQVNVIV

SEQ ID NO: 27841 - protein, 11 aa, Homo sapiens
  Table A; Target 27841; HLA-A*24:02; GPRC6A; ENSG00000173612; CTA
IIPDQETKNEF

SEQ ID NO: 27842 - protein, 11 aa, Homo sapiens
  Table A; Target 27842; HLA-A*32:01; GPRC6A; ENSG00000173612; CTA
IIPDQETKNEF

SEQ ID NO: 27843 - protein, 11 aa, Homo sapiens
  Table A; Target 27843; HLA-B*15:01; GPRC6A; ENSG00000173612; CTA
IIPDQETKNEF

SEQ ID NO: 27844 - protein, 9 aa, Homo sapiens
  Table A; Target 27844; HLA-A*26:01; GPRC6A; ENSG00000173612; CTA
IIVILISNY

SEQ ID NO: 27845 - protein, 9 aa, Homo sapiens
  Table A; Target 27845; HLA-A*30:02; GPRC6A; ENSG00000173612; CTA
IIVILISNY

SEQ ID NO: 27846 - protein, 9 aa, Homo sapiens
  Table A; Target 27846; HLA-B*15:01; GPRC6A; ENSG00000173612; CTA
IIVILISNY

SEQ ID NO: 27847 - protein, 10 aa, Homo sapiens
  Table A; Target 27847; HLA-A*29:02; GPRC6A; ENSG00000173612; CTA
ILAFGTMLGY

SEQ ID NO: 27848 - protein, 9 aa, Homo sapiens
  Table A; Target 27848; HLA-C*16:02; GPRC6A; ENSG00000173612; CTA
ILEAQVNVI

SEQ ID NO: 27849 - protein, 10 aa, Homo sapiens
  Table A; Target 27849; HLA-A*29:02; GPRC6A; ENSG00000173612; CTA
ILISNYGILY

SEQ ID NO: 27850 - protein, 9 aa, Homo sapiens
  Table A; Target 27850; HLA-A*02:04; GPRC6A; ENSG00000173612; CTA
ILLLILSLL

SEQ ID NO: 27851 - protein, 9 aa, Homo sapiens
  Table A; Target 27851; HLA-A*03:01; GPRC6A; ENSG00000173612; CTA
ILYCTFIPK

SEQ ID NO: 27852 - protein, 10 aa, Homo sapiens
  Table A; Target 27852; HLA-B*07:02; GPRC6A; ENSG00000173612; CTA
IPDQETKNEF

SEQ ID NO: 27853 - protein, 10 aa, Homo sapiens
  Table A; Target 27853; HLA-B*35:03; GPRC6A; ENSG00000173612; CTA
IPDQETKNEF

SEQ ID NO: 27854 - protein, 10 aa, Homo sapiens
  Table A; Target 27854; HLA-B*38:01; GPRC6A; ENSG00000173612; CTA
IPDQETKNEF

SEQ ID NO: 27855 - protein, 10 aa, Homo sapiens
  Table A; Target 27855; HLA-B*55:01; GPRC6A; ENSG00000173612; CTA
IPDQETKNEF

SEQ ID NO: 27856 - protein, 10 aa, Homo sapiens
  Table A; Target 27856; HLA-C*03:03; GPRC6A; ENSG00000173612; CTA
IPDQETKNEF

SEQ ID NO: 27857 - protein, 10 aa, Homo sapiens
  Table A; Target 27857; HLA-C*05:01; GPRC6A; ENSG00000173612; CTA
IPDQETKNEF

SEQ ID NO: 27858 - protein, 8 aa, Homo sapiens
  Table A; Target 27858; HLA-A*23:01; GPRC6A; ENSG00000173612; CTA
IPIYATTF

SEQ ID NO: 27859 - protein, 8 aa, Homo sapiens
  Table A; Target 27859; HLA-B*08:01; GPRC6A; ENSG00000173612; CTA
IPIYATTF

SEQ ID NO: 27860 - protein, 8 aa, Homo sapiens
  Table A; Target 27860; HLA-B*18:01; GPRC6A; ENSG00000173612; CTA
IPIYATTF

SEQ ID NO: 27861 - protein, 8 aa, Homo sapiens
  Table A; Target 27861; HLA-B*35:01; GPRC6A; ENSG00000173612; CTA
IPIYATTF

SEQ ID NO: 27862 - protein, 8 aa, Homo sapiens
  Table A; Target 27862; HLA-B*35:03; GPRC6A; ENSG00000173612; CTA
IPIYATTF

SEQ ID NO: 27863 - protein, 8 aa, Homo sapiens
  Table A; Target 27863; HLA-B*51:01; GPRC6A; ENSG00000173612; CTA
IPIYATTF

SEQ ID NO: 27864 - protein, 8 aa, Homo sapiens
  Table A; Target 27864; HLA-C*14:02; GPRC6A; ENSG00000173612; CTA
IPIYATTF

SEQ ID NO: 27865 - protein, 8 aa, Homo sapiens
  Table A; Target 27865; HLA-B*13:02; GPRC6A; ENSG00000173612; CTA
IQAEANNV

SEQ ID NO: 27866 - protein, 10 aa, Homo sapiens
  Table A; Target 27866; HLA-A*30:01; GPRC6A; ENSG00000173612; CTA
IQAEANNVCI

SEQ ID NO: 27867 - protein, 10 aa, Homo sapiens
  Table A; Target 27867; HLA-B*13:02; GPRC6A; ENSG00000173612; CTA
IQAEANNVCI

SEQ ID NO: 27868 - protein, 10 aa, Homo sapiens
  Table A; Target 27868; HLA-B*38:01; GPRC6A; ENSG00000173612; CTA
IQAEANNVCI

SEQ ID NO: 27869 - protein, 8 aa, Homo sapiens
  Table A; Target 27869; HLA-B*37:01; GPRC6A; ENSG00000173612; CTA
IQLAVFAL

SEQ ID NO: 27870 - protein, 10 aa, Homo sapiens
  Table A; Target 27870; HLA-A*29:02; GPRC6A; ENSG00000173612; CTA
IQLAVFALGY

SEQ ID NO: 27871 - protein, 8 aa, Homo sapiens
  Table A; Target 27871; HLA-B*15:01; GPRC6A; ENSG00000173612; CTA
IQVVICTL

SEQ ID NO: 27872 - protein, 8 aa, Homo sapiens
  Table A; Target 27872; HLA-A*01:01; GPRC6A; ENSG00000173612; CTA
ISNYGILY

SEQ ID NO: 27873 - protein, 8 aa, Homo sapiens
  Table A; Target 27873; HLA-A*30:02; GPRC6A; ENSG00000173612; CTA
ISNYGILY

SEQ ID NO: 27874 - protein, 9 aa, Homo sapiens
  Table A; Target 27874; HLA-B*57:01; GPRC6A; ENSG00000173612; CTA
ITFGMLIYF

SEQ ID NO: 27875 - protein, 11 aa, Homo sapiens
  Table A; Target 27875; HLA-B*57:01; GPRC6A; ENSG00000173612; CTA
ITFIPIYATTF

SEQ ID NO: 27876 - protein, 9 aa, Homo sapiens
  Table A; Target 27876; HLA-C*03:03; GPRC6A; ENSG00000173612; CTA
ITMAVSRML

SEQ ID NO: 27877 - protein, 9 aa, Homo sapiens
  Table A; Target 27877; HLA-C*03:04; GPRC6A; ENSG00000173612; CTA
ITMAVSRML

SEQ ID NO: 27878 - protein, 9 aa, Homo sapiens
  Table A; Target 27878; HLA-C*16:01; GPRC6A; ENSG00000173612; CTA
ITMAVSRML

SEQ ID NO: 27879 - protein, 8 aa, Homo sapiens
  Table A; Target 27879; HLA-A*03:02; GPRC6A; ENSG00000173612; CTA
ITTIPNVK

SEQ ID NO: 27880 - protein, 9 aa, Homo sapiens
  Table A; Target 27880; HLA-A*03:01; GPRC6A; ENSG00000173612; CTA
ITTIPNVKK

SEQ ID NO: 27881 - protein, 9 aa, Homo sapiens
  Table A; Target 27881; HLA-A*03:02; GPRC6A; ENSG00000173612; CTA
ITTIPNVKK

SEQ ID NO: 27882 - protein, 9 aa, Homo sapiens
  Table A; Target 27882; HLA-A*11:01; GPRC6A; ENSG00000173612; CTA
ITTIPNVKK

SEQ ID NO: 27883 - protein, 10 aa, Homo sapiens
  Table A; Target 27883; HLA-C*16:02; GPRC6A; ENSG00000173612; CTA
ITTIPNVKKI

SEQ ID NO: 27884 - protein, 8 aa, Homo sapiens
  Table A; Target 27884; HLA-B*15:01; GPRC6A; ENSG00000173612; CTA
IVILISNY

SEQ ID NO: 27885 - protein, 8 aa, Homo sapiens
  Table A; Target 27885; HLA-B*18:01; GPRC6A; ENSG00000173612; CTA
IVILISNY

SEQ ID NO: 27886 - protein, 9 aa, Homo sapiens
  Table A; Target 27886; HLA-A*23:01; GPRC6A; ENSG00000173612; CTA
IYATTFGKY

SEQ ID NO: 27887 - protein, 9 aa, Homo sapiens
  Table A; Target 27887; HLA-A*24:02; GPRC6A; ENSG00000173612; CTA
IYATTFGKY

SEQ ID NO: 27888 - protein, 9 aa, Homo sapiens
  Table A; Target 27888; HLA-A*29:02; GPRC6A; ENSG00000173612; CTA
IYATTFGKY

SEQ ID NO: 27889 - protein, 9 aa, Homo sapiens
  Table A; Target 27889; HLA-A*30:02; GPRC6A; ENSG00000173612; CTA
IYATTFGKY

SEQ ID NO: 27890 - protein, 9 aa, Homo sapiens
  Table A; Target 27890; HLA-C*14:02; GPRC6A; ENSG00000173612; CTA
IYATTFGKY

SEQ ID NO: 27891 - protein, 8 aa, Homo sapiens
  Table A; Target 27891; HLA-C*04:01; GPRC6A; ENSG00000173612; CTA
IYDTCTEV

SEQ ID NO: 27892 - protein, 10 aa, Homo sapiens
  Table A; Target 27892; HLA-B*35:03; GPRC6A; ENSG00000173612; CTA
IYDTCTEVTV

SEQ ID NO: 27893 - protein, 10 aa, Homo sapiens
  Table A; Target 27893; HLA-C*04:01; GPRC6A; ENSG00000173612; CTA
IYDTCTEVTV

SEQ ID NO: 27894 - protein, 9 aa, Homo sapiens
  Table A; Target 27894; HLA-A*24:02; GPRC6A; ENSG00000173612; CTA
IYFIAWITF

SEQ ID NO: 27895 - protein, 9 aa, Homo sapiens
  Table A; Target 27895; HLA-A*24:02; GPRC6A; ENSG00000173612; CTA
IYSYSSHSV

SEQ ID NO: 27896 - protein, 9 aa, Homo sapiens
  Table A; Target 27896; HLA-C*04:01; GPRC6A; ENSG00000173612; CTA
IYSYSSHSV

SEQ ID NO: 27897 - protein, 9 aa, Homo sapiens
  Table A; Target 27897; HLA-C*14:02; GPRC6A; ENSG00000173612; CTA
IYSYSSHSV

SEQ ID NO: 27898 - protein, 9 aa, Homo sapiens
  Table A; Target 27898; HLA-C*16:02; GPRC6A; ENSG00000173612; CTA
IYSYSSHSV

SEQ ID NO: 27899 - protein, 9 aa, Homo sapiens
  Table A; Target 27899; HLA-A*03:01; GPRC6A; ENSG00000173612; CTA
KAIEMNINK

SEQ ID NO: 27900 - protein, 9 aa, Homo sapiens
  Table A; Target 27900; HLA-A*03:02; GPRC6A; ENSG00000173612; CTA
KAIEMNINK

SEQ ID NO: 27901 - protein, 9 aa, Homo sapiens
  Table A; Target 27901; HLA-A*11:01; GPRC6A; ENSG00000173612; CTA
KAIEMNINK

SEQ ID NO: 27902 - protein, 9 aa, Homo sapiens
  Table A; Target 27902; HLA-B*27:05; GPRC6A; ENSG00000173612; CTA
KAIEMNINK

SEQ ID NO: 27903 - protein, 9 aa, Homo sapiens
  Table A; Target 27903; HLA-B*58:01; GPRC6A; ENSG00000173612; CTA
KAIEMNINK

SEQ ID NO: 27904 - protein, 9 aa, Homo sapiens
  Table A; Target 27904; HLA-C*07:06; GPRC6A; ENSG00000173612; CTA
KAIEMNINK

SEQ ID NO: 27905 - protein, 10 aa, Homo sapiens
  Table A; Target 27905; HLA-B*58:01; GPRC6A; ENSG00000173612; CTA
KAIEMNINKM

SEQ ID NO: 27906 - protein, 10 aa, Homo sapiens
  Table A; Target 27906; HLA-C*16:02; GPRC6A; ENSG00000173612; CTA
KAIEMNINKM

SEQ ID NO: 27907 - protein, 9 aa, Homo sapiens
  Table A; Target 27907; HLA-A*24:02; GPRC6A; ENSG00000173612; CTA
KAIERNFVM

SEQ ID NO: 27908 - protein, 9 aa, Homo sapiens
  Table A; Target 27908; HLA-A*32:01; GPRC6A; ENSG00000173612; CTA
KAIERNFVM

SEQ ID NO: 27909 - protein, 9 aa, Homo sapiens
  Table A; Target 27909; HLA-B*08:01; GPRC6A; ENSG00000173612; CTA
KAIERNFVM

SEQ ID NO: 27910 - protein, 9 aa, Homo sapiens
  Table A; Target 27910; HLA-B*37:01; GPRC6A; ENSG00000173612; CTA
KAIERNFVM

SEQ ID NO: 27911 - protein, 9 aa, Homo sapiens
  Table A; Target 27911; HLA-B*46:01; GPRC6A; ENSG00000173612; CTA
KAIERNFVM

SEQ ID NO: 27912 - protein, 9 aa, Homo sapiens
  Table A; Target 27912; HLA-B*57:01; GPRC6A; ENSG00000173612; CTA
KAIERNFVM

SEQ ID NO: 27913 - protein, 9 aa, Homo sapiens
  Table A; Target 27913; HLA-B*58:01; GPRC6A; ENSG00000173612; CTA
KAIERNFVM

SEQ ID NO: 27914 - protein, 9 aa, Homo sapiens
  Table A; Target 27914; HLA-C*02:02; GPRC6A; ENSG00000173612; CTA
KAIERNFVM

SEQ ID NO: 27915 - protein, 9 aa, Homo sapiens
  Table A; Target 27915; HLA-C*03:03; GPRC6A; ENSG00000173612; CTA
KAIERNFVM

SEQ ID NO: 27916 - protein, 9 aa, Homo sapiens
  Table A; Target 27916; HLA-C*03:04; GPRC6A; ENSG00000173612; CTA
KAIERNFVM

SEQ ID NO: 27917 - protein, 9 aa, Homo sapiens
  Table A; Target 27917; HLA-C*12:03; GPRC6A; ENSG00000173612; CTA
KAIERNFVM

SEQ ID NO: 27918 - protein, 9 aa, Homo sapiens
  Table A; Target 27918; HLA-C*16:01; GPRC6A; ENSG00000173612; CTA
KAIERNFVM

SEQ ID NO: 27919 - protein, 9 aa, Homo sapiens
  Table A; Target 27919; HLA-C*16:02; GPRC6A; ENSG00000173612; CTA
KAIERNFVM

SEQ ID NO: 27920 - protein, 10 aa, Homo sapiens
  Table A; Target 27920; HLA-A*31:01; GPRC6A; ENSG00000173612; CTA
KAIERNFVMR

SEQ ID NO: 27921 - protein, 9 aa, Homo sapiens
  Table A; Target 27921; HLA-A*03:01; GPRC6A; ENSG00000173612; CTA
KAMAHLIQK

SEQ ID NO: 27922 - protein, 9 aa, Homo sapiens
  Table A; Target 27922; HLA-A*03:02; GPRC6A; ENSG00000173612; CTA
KAMAHLIQK

SEQ ID NO: 27923 - protein, 9 aa, Homo sapiens
  Table A; Target 27923; HLA-A*11:01; GPRC6A; ENSG00000173612; CTA
KAMAHLIQK

SEQ ID NO: 27924 - protein, 9 aa, Homo sapiens
  Table A; Target 27924; HLA-A*31:01; GPRC6A; ENSG00000173612; CTA
KAMAHLIQK

SEQ ID NO: 27925 - protein, 10 aa, Homo sapiens
  Table A; Target 27925; HLA-B*57:01; GPRC6A; ENSG00000173612; CTA
KANKAIERNF

SEQ ID NO: 27926 - protein, 8 aa, Homo sapiens
  Table A; Target 27926; HLA-A*30:02; GPRC6A; ENSG00000173612; CTA
KAVIGSGY

SEQ ID NO: 27927 - protein, 8 aa, Homo sapiens
  Table A; Target 27927; HLA-B*15:01; GPRC6A; ENSG00000173612; CTA
KAVIGSGY

SEQ ID NO: 27928 - protein, 8 aa, Homo sapiens
  Table A; Target 27928; HLA-B*15:03; GPRC6A; ENSG00000173612; CTA
KAVIGSGY

SEQ ID NO: 27929 - protein, 8 aa, Homo sapiens
  Table A; Target 27929; HLA-B*39:01; GPRC6A; ENSG00000173612; CTA
KAVIGSGY

SEQ ID NO: 27930 - protein, 8 aa, Homo sapiens
  Table A; Target 27930; HLA-B*46:01; GPRC6A; ENSG00000173612; CTA
KAVIGSGY

SEQ ID NO: 27931 - protein, 8 aa, Homo sapiens
  Table A; Target 27931; HLA-B*58:01; GPRC6A; ENSG00000173612; CTA
KAVIGSGY

SEQ ID NO: 27932 - protein, 8 aa, Homo sapiens
  Table A; Target 27932; HLA-C*16:01; GPRC6A; ENSG00000173612; CTA
KAVIGSGY

SEQ ID NO: 27933 - protein, 8 aa, Homo sapiens
  Table A; Target 27933; HLA-B*37:01; GPRC6A; ENSG00000173612; CTA
KDLQAQAF

SEQ ID NO: 27934 - protein, 9 aa, Homo sapiens
  Table A; Target 27934; HLA-A*30:01; GPRC6A; ENSG00000173612; CTA
KEINGHMTV

SEQ ID NO: 27935 - protein, 9 aa, Homo sapiens
  Table A; Target 27935; HLA-B*37:01; GPRC6A; ENSG00000173612; CTA
KEINGHMTV

SEQ ID NO: 27936 - protein, 9 aa, Homo sapiens
  Table A; Target 27936; HLA-B*40:01; GPRC6A; ENSG00000173612; CTA
KEINGHMTV

SEQ ID NO: 27937 - protein, 9 aa, Homo sapiens
  Table A; Target 27937; HLA-B*40:02; GPRC6A; ENSG00000173612; CTA
KEINGHMTV

SEQ ID NO: 27938 - protein, 9 aa, Homo sapiens
  Table A; Target 27938; HLA-B*44:03; GPRC6A; ENSG00000173612; CTA
KEINGHMTV

SEQ ID NO: 27939 - protein, 9 aa, Homo sapiens
  Table A; Target 27939; HLA-B*49:01; GPRC6A; ENSG00000173612; CTA
KEINGHMTV

SEQ ID NO: 27940 - protein, 10 aa, Homo sapiens
  Table A; Target 27940; HLA-B*40:01; GPRC6A; ENSG00000173612; CTA
KEINGHMTVT

SEQ ID NO: 27941 - protein, 10 aa, Homo sapiens
  Table A; Target 27941; HLA-B*40:02; GPRC6A; ENSG00000173612; CTA
KEINGHMTVT

SEQ ID NO: 27942 - protein, 10 aa, Homo sapiens
  Table A; Target 27942; HLA-B*49:01; GPRC6A; ENSG00000173612; CTA
KEINGHMTVT

SEQ ID NO: 27943 - protein, 8 aa, Homo sapiens
  Table A; Target 27943; HLA-B*44:02; GPRC6A; ENSG00000173612; CTA
KEVEYLNW

SEQ ID NO: 27944 - protein, 8 aa, Homo sapiens
  Table A; Target 27944; HLA-B*37:01; GPRC6A; ENSG00000173612; CTA
KEVLPAFL

SEQ ID NO: 27945 - protein, 10 aa, Homo sapiens
  Table A; Target 27945; HLA-A*29:02; GPRC6A; ENSG00000173612; CTA
KFITFGMLIY

SEQ ID NO: 27946 - protein, 8 aa, Homo sapiens
  Table A; Target 27946; HLA-A*32:01; GPRC6A; ENSG00000173612; CTA
KIGKVVGF

SEQ ID NO: 27947 - protein, 8 aa, Homo sapiens
  Table A; Target 27947; HLA-B*37:01; GPRC6A; ENSG00000173612; CTA
KIGKVVGF

SEQ ID NO: 27948 - protein, 9 aa, Homo sapiens
  Table A; Target 27948; HLA-A*03:01; GPRC6A; ENSG00000173612; CTA
KITTIPNVK

SEQ ID NO: 27949 - protein, 9 aa, Homo sapiens
  Table A; Target 27949; HLA-A*03:02; GPRC6A; ENSG00000173612; CTA
KITTIPNVK

SEQ ID NO: 27950 - protein, 9 aa, Homo sapiens
  Table A; Target 27950; HLA-A*11:01; GPRC6A; ENSG00000173612; CTA
KITTIPNVK

SEQ ID NO: 27951 - protein, 10 aa, Homo sapiens
  Table A; Target 27951; HLA-A*03:01; GPRC6A; ENSG00000173612; CTA
KITTIPNVKK

SEQ ID NO: 27952 - protein, 10 aa, Homo sapiens
  Table A; Target 27952; HLA-A*03:02; GPRC6A; ENSG00000173612; CTA
KITTIPNVKK

SEQ ID NO: 27953 - protein, 10 aa, Homo sapiens
  Table A; Target 27953; HLA-A*11:01; GPRC6A; ENSG00000173612; CTA
KITTIPNVKK

SEQ ID NO: 27954 - protein, 9 aa, Homo sapiens
  Table A; Target 27954; HLA-B*15:03; GPRC6A; ENSG00000173612; CTA
KKIGKVVGF

SEQ ID NO: 27955 - protein, 9 aa, Homo sapiens
  Table A; Target 27955; HLA-B*57:01; GPRC6A; ENSG00000173612; CTA
KNVTFTDGW

SEQ ID NO: 27956 - protein, 9 aa, Homo sapiens
  Table A; Target 27956; HLA-B*58:01; GPRC6A; ENSG00000173612; CTA
KNVTFTDGW

SEQ ID NO: 27957 - protein, 10 aa, Homo sapiens
  Table A; Target 27957; HLA-A*30:02; GPRC6A; ENSG00000173612; CTA
KSKDLQAQAF

SEQ ID NO: 27958 - protein, 10 aa, Homo sapiens
  Table A; Target 27958; HLA-A*32:01; GPRC6A; ENSG00000173612; CTA
KSKDLQAQAF

SEQ ID NO: 27959 - protein, 10 aa, Homo sapiens
  Table A; Target 27959; HLA-B*15:01; GPRC6A; ENSG00000173612; CTA
KSKDLQAQAF

SEQ ID NO: 27960 - protein, 10 aa, Homo sapiens
  Table A; Target 27960; HLA-B*15:03; GPRC6A; ENSG00000173612; CTA
KSKDLQAQAF

SEQ ID NO: 27961 - protein, 10 aa, Homo sapiens
  Table A; Target 27961; HLA-B*46:01; GPRC6A; ENSG00000173612; CTA
KSKDLQAQAF

SEQ ID NO: 27962 - protein, 10 aa, Homo sapiens
  Table A; Target 27962; HLA-B*57:01; GPRC6A; ENSG00000173612; CTA
KSKDLQAQAF

SEQ ID NO: 27963 - protein, 10 aa, Homo sapiens
  Table A; Target 27963; HLA-B*58:01; GPRC6A; ENSG00000173612; CTA
KSKDLQAQAF

SEQ ID NO: 27964 - protein, 10 aa, Homo sapiens
  Table A; Target 27964; HLA-C*01:02; GPRC6A; ENSG00000173612; CTA
KSKDLQAQAF

SEQ ID NO: 27965 - protein, 9 aa, Homo sapiens
  Table A; Target 27965; HLA-B*57:01; GPRC6A; ENSG00000173612; CTA
KSLKILLAF

SEQ ID NO: 27966 - protein, 9 aa, Homo sapiens
  Table A; Target 27966; HLA-A*31:01; GPRC6A; ENSG00000173612; CTA
KVVGFAFRR

SEQ ID NO: 27967 - protein, 10 aa, Homo sapiens
  Table A; Target 27967; HLA-A*23:01; GPRC6A; ENSG00000173612; CTA
KYENYNEAKF

SEQ ID NO: 27968 - protein, 10 aa, Homo sapiens
  Table A; Target 27968; HLA-A*24:02; GPRC6A; ENSG00000173612; CTA
KYENYNEAKF

SEQ ID NO: 27969 - protein, 8 aa, Homo sapiens
  Table A; Target 27969; HLA-A*23:01; GPRC6A; ENSG00000173612; CTA
KYVPAVEI

SEQ ID NO: 27970 - protein, 9 aa, Homo sapiens
  Table A; Target 27970; HLA-A*23:01; GPRC6A; ENSG00000173612; CTA
KYVPAVEII

SEQ ID NO: 27971 - protein, 9 aa, Homo sapiens
  Table A; Target 27971; HLA-A*24:02; GPRC6A; ENSG00000173612; CTA
KYVPAVEII

SEQ ID NO: 27972 - protein, 11 aa, Homo sapiens
  Table A; Target 27972; HLA-A*24:02; GPRC6A; ENSG00000173612; CTA
KYVPAVEIIVI

SEQ ID NO: 27973 - protein, 9 aa, Homo sapiens
  Table A; Target 27973; HLA-A*29:02; GPRC6A; ENSG00000173612; CTA
LAFGTMLGY

SEQ ID NO: 27974 - protein, 9 aa, Homo sapiens
  Table A; Target 27974; HLA-B*15:03; GPRC6A; ENSG00000173612; CTA
LAFGTMLGY

SEQ ID NO: 27975 - protein, 9 aa, Homo sapiens
  Table A; Target 27975; HLA-B*46:01; GPRC6A; ENSG00000173612; CTA
LAFGTMLGY

SEQ ID NO: 27976 - protein, 9 aa, Homo sapiens
  Table A; Target 27976; HLA-C*02:02; GPRC6A; ENSG00000173612; CTA
LAFGTMLGY

SEQ ID NO: 27977 - protein, 9 aa, Homo sapiens
  Table A; Target 27977; HLA-A*02:04; GPRC6A; ENSG00000173612; CTA
LAFSFDPKL

SEQ ID NO: 27978 - protein, 9 aa, Homo sapiens
  Table A; Target 27978; HLA-B*35:03; GPRC6A; ENSG00000173612; CTA
LAFSFDPKL

SEQ ID NO: 27979 - protein, 9 aa, Homo sapiens
  Table A; Target 27979; HLA-C*02:02; GPRC6A; ENSG00000173612; CTA
LAFSFDPKL

SEQ ID NO: 27980 - protein, 9 aa, Homo sapiens
  Table A; Target 27980; HLA-B*08:01; GPRC6A; ENSG00000173612; CTA
LAMIHSIEM

SEQ ID NO: 27981 - protein, 9 aa, Homo sapiens
  Table A; Target 27981; HLA-B*35:01; GPRC6A; ENSG00000173612; CTA
LAMIHSIEM

SEQ ID NO: 27982 - protein, 9 aa, Homo sapiens
  Table A; Target 27982; HLA-B*35:03; GPRC6A; ENSG00000173612; CTA
LAMIHSIEM

SEQ ID NO: 27983 - protein, 9 aa, Homo sapiens
  Table A; Target 27983; HLA-B*46:01; GPRC6A; ENSG00000173612; CTA
LAMIHSIEM

SEQ ID NO: 27984 - protein, 9 aa, Homo sapiens
  Table A; Target 27984; HLA-C*02:02; GPRC6A; ENSG00000173612; CTA
LAMIHSIEM

SEQ ID NO: 27985 - protein, 9 aa, Homo sapiens
  Table A; Target 27985; HLA-C*03:03; GPRC6A; ENSG00000173612; CTA
LAMIHSIEM

SEQ ID NO: 27986 - protein, 9 aa, Homo sapiens
  Table A; Target 27986; HLA-C*03:04; GPRC6A; ENSG00000173612; CTA
LAMIHSIEM

SEQ ID NO: 27987 - protein, 9 aa, Homo sapiens
  Table A; Target 27987; HLA-C*16:01; GPRC6A; ENSG00000173612; CTA
LAMIHSIEM

SEQ ID NO: 27988 - protein, 9 aa, Homo sapiens
  Table A; Target 27988; HLA-B*51:01; GPRC6A; ENSG00000173612; CTA
LAYKANKAI

SEQ ID NO: 27989 - protein, 8 aa, Homo sapiens
  Table A; Target 27989; HLA-B*18:01; GPRC6A; ENSG00000173612; CTA
LEAQVNVI

SEQ ID NO: 27990 - protein, 8 aa, Homo sapiens
  Table A; Target 27990; HLA-B*49:01; GPRC6A; ENSG00000173612; CTA
LEAQVNVI

SEQ ID NO: 27991 - protein, 9 aa, Homo sapiens
  Table A; Target 27991; HLA-B*49:01; GPRC6A; ENSG00000173612; CTA
LEAQVNVIV

SEQ ID NO: 27992 - protein, 10 aa, Homo sapiens
  Table A; Target 27992; HLA-B*49:01; GPRC6A; ENSG00000173612; CTA
LEAQVNVIVV

SEQ ID NO: 27993 - protein, 11 aa, Homo sapiens
  Table A; Target 27993; HLA-A*30:01; GPRC6A; ENSG00000173612; CTA
LEAQVNVIVVF

SEQ ID NO: 27994 - protein, 11 aa, Homo sapiens
  Table A; Target 27994; HLA-B*44:02; GPRC6A; ENSG00000173612; CTA
LEAQVNVIVVF

SEQ ID NO: 27995 - protein, 11 aa, Homo sapiens
  Table A; Target 27995; HLA-B*44:03; GPRC6A; ENSG00000173612; CTA
LEAQVNVIVVF

SEQ ID NO: 27996 - protein, 9 aa, Homo sapiens
  Table A; Target 27996; HLA-B*40:01; GPRC6A; ENSG00000173612; CTA
LECEEGSIL

SEQ ID NO: 27997 - protein, 11 aa, Homo sapiens
  Table A; Target 27997; HLA-B*18:01; GPRC6A; ENSG00000173612; CTA
LECEEGSILAF

SEQ ID NO: 27998 - protein, 8 aa, Homo sapiens
  Table A; Target 27998; HLA-C*14:02; GPRC6A; ENSG00000173612; CTA
LFNKAIEM

SEQ ID NO: 27999 - protein, 8 aa, Homo sapiens
  Table A; Target 27999; HLA-B*51:01; GPRC6A; ENSG00000173612; CTA
LIFAAPTV

SEQ ID NO: 28000 - protein, 10 aa, Homo sapiens
  Table A; Target 28000; HLA-A*68:02; GPRC6A; ENSG00000173612; CTA
LIFAAPTVEV

SEQ ID NO: 28001 - protein, 9 aa, Homo sapiens
  Table A; Target 28001; HLA-A*01:01; GPRC6A; ENSG00000173612; CTA
LISNYGILY

SEQ ID NO: 28002 - protein, 9 aa, Homo sapiens
  Table A; Target 28002; HLA-A*29:02; GPRC6A; ENSG00000173612; CTA
LISNYGILY

SEQ ID NO: 28003 - protein, 9 aa, Homo sapiens
  Table A; Target 28003; HLA-C*02:02; GPRC6A; ENSG00000173612; CTA
LISNYGILY

SEQ ID NO: 28004 - protein, 8 aa, Homo sapiens
  Table A; Target 28004; HLA-A*02:04; GPRC6A; ENSG00000173612; CTA
LLGIIFVL

SEQ ID NO: 28005 - protein, 9 aa, Homo sapiens
  Table A; Target 28005; HLA-A*02:04; GPRC6A; ENSG00000173612; CTA
LLGIIFVLV

SEQ ID NO: 28006 - protein, 9 aa, Homo sapiens
  Table A; Target 28006; HLA-A*02:07; GPRC6A; ENSG00000173612; CTA
LLGIIFVLV

SEQ ID NO: 28007 - protein, 9 aa, Homo sapiens
  Table A; Target 28007; HLA-A*68:02; GPRC6A; ENSG00000173612; CTA
LLGIIFVLV

SEQ ID NO: 28008 - protein, 9 aa, Homo sapiens
  Table A; Target 28008; HLA-A*02:01; GPRC6A; ENSG00000173612; CTA
LLHEYAMHL

SEQ ID NO: 28009 - protein, 9 aa, Homo sapiens
  Table A; Target 28009; HLA-A*02:03; GPRC6A; ENSG00000173612; CTA
LLHEYAMHL

SEQ ID NO: 28010 - protein, 9 aa, Homo sapiens
  Table A; Target 28010; HLA-A*02:04; GPRC6A; ENSG00000173612; CTA
LLHEYAMHL

SEQ ID NO: 28011 - protein, 9 aa, Homo sapiens
  Table A; Target 28011; HLA-A*02:07; GPRC6A; ENSG00000173612; CTA
LLHEYAMHL

SEQ ID NO: 28012 - protein, 9 aa, Homo sapiens
  Table A; Target 28012; HLA-A*01:01; GPRC6A; ENSG00000173612; CTA
LLPGVKLGY

SEQ ID NO: 28013 - protein, 9 aa, Homo sapiens
  Table A; Target 28013; HLA-A*29:02; GPRC6A; ENSG00000173612; CTA
LLPGVKLGY

SEQ ID NO: 28014 - protein, 11 aa, Homo sapiens
  Table A; Target 28014; HLA-A*02:07; GPRC6A; ENSG00000173612; CTA
LLPGVKLGYEI

SEQ ID NO: 28015 - protein, 9 aa, Homo sapiens
  Table A; Target 28015; HLA-A*02:07; GPRC6A; ENSG00000173612; CTA
LLPSDSHKL

SEQ ID NO: 28016 - protein, 9 aa, Homo sapiens
  Table A; Target 28016; HLA-A*24:02; GPRC6A; ENSG00000173612; CTA
LLPSDSHKL

SEQ ID NO: 28017 - protein, 8 aa, Homo sapiens
  Table A; Target 28017; HLA-B*46:01; GPRC6A; ENSG00000173612; CTA
LNFASTSF

SEQ ID NO: 28018 - protein, 10 aa, Homo sapiens
  Table A; Target 28018; HLA-B*35:03; GPRC6A; ENSG00000173612; CTA
LPAFLSDNTI

SEQ ID NO: 28019 - protein, 10 aa, Homo sapiens
  Table A; Target 28019; HLA-B*51:01; GPRC6A; ENSG00000173612; CTA
LPAFLSDNTI

SEQ ID NO: 28020 - protein, 8 aa, Homo sapiens
  Table A; Target 28020; HLA-B*35:01; GPRC6A; ENSG00000173612; CTA
LPGVKLGY

SEQ ID NO: 28021 - protein, 9 aa, Homo sapiens
  Table A; Target 28021; HLA-B*07:02; GPRC6A; ENSG00000173612; CTA
LPRKRMSSI

SEQ ID NO: 28022 - protein, 9 aa, Homo sapiens
  Table A; Target 28022; HLA-B*08:01; GPRC6A; ENSG00000173612; CTA
LPRKRMSSI

SEQ ID NO: 28023 - protein, 9 aa, Homo sapiens
  Table A; Target 28023; HLA-B*51:01; GPRC6A; ENSG00000173612; CTA
LPRKRMSSI

SEQ ID NO: 28024 - protein, 9 aa, Homo sapiens
  Table A; Target 28024; HLA-B*07:02; GPRC6A; ENSG00000173612; CTA
LPRVIILEC

SEQ ID NO: 28025 - protein, 9 aa, Homo sapiens
  Table A; Target 28025; HLA-B*51:01; GPRC6A; ENSG00000173612; CTA
LPRVIILEC

SEQ ID NO: 28026 - protein, 9 aa, Homo sapiens
  Table A; Target 28026; HLA-B*54:01; GPRC6A; ENSG00000173612; CTA
LPRVIILEC

SEQ ID NO: 28027 - protein, 9 aa, Homo sapiens
  Table A; Target 28027; HLA-B*56:01; GPRC6A; ENSG00000173612; CTA
LPRVIILEC

SEQ ID NO: 28028 - protein, 8 aa, Homo sapiens
  Table A; Target 28028; HLA-B*35:03; GPRC6A; ENSG00000173612; CTA
LPSDSHKL

SEQ ID NO: 28029 - protein, 9 aa, Homo sapiens
  Table A; Target 28029; HLA-B*07:02; GPRC6A; ENSG00000173612; CTA
LPSDSHKLL

SEQ ID NO: 28030 - protein, 9 aa, Homo sapiens
  Table A; Target 28030; HLA-B*35:03; GPRC6A; ENSG00000173612; CTA
LPSDSHKLL

SEQ ID NO: 28031 - protein, 9 aa, Homo sapiens
  Table A; Target 28031; HLA-B*51:01; GPRC6A; ENSG00000173612; CTA
LPSDSHKLL

SEQ ID NO: 28032 - protein, 9 aa, Homo sapiens
  Table A; Target 28032; HLA-C*07:02; GPRC6A; ENSG00000173612; CTA
LPSDSHKLL

SEQ ID NO: 28033 - protein, 9 aa, Homo sapiens
  Table A; Target 28033; HLA-A*24:02; GPRC6A; ENSG00000173612; CTA
LQAQAFAHI

SEQ ID NO: 28034 - protein, 9 aa, Homo sapiens
  Table A; Target 28034; HLA-B*13:02; GPRC6A; ENSG00000173612; CTA
LQAQAFAHI

SEQ ID NO: 28035 - protein, 9 aa, Homo sapiens
  Table A; Target 28035; HLA-B*38:01; GPRC6A; ENSG00000173612; CTA
LQAQAFAHI

SEQ ID NO: 28036 - protein, 9 aa, Homo sapiens
  Table A; Target 28036; HLA-A*30:02; GPRC6A; ENSG00000173612; CTA
LQLMPQVGY

SEQ ID NO: 28037 - protein, 9 aa, Homo sapiens
  Table A; Target 28037; HLA-B*15:01; GPRC6A; ENSG00000173612; CTA
LQLMPQVGY

SEQ ID NO: 28038 - protein, 9 aa, Homo sapiens
  Table A; Target 28038; HLA-B*15:03; GPRC6A; ENSG00000173612; CTA
LQLMPQVGY

SEQ ID NO: 28039 - protein, 9 aa, Homo sapiens
  Table A; Target 28039; HLA-C*07:04; GPRC6A; ENSG00000173612; CTA
LQLMPQVGY

SEQ ID NO: 28040 - protein, 8 aa, Homo sapiens
  Table A; Target 28040; HLA-A*01:01; GPRC6A; ENSG00000173612; CTA
LSDNTIEV

SEQ ID NO: 28041 - protein, 8 aa, Homo sapiens
  Table A; Target 28041; HLA-C*05:01; GPRC6A; ENSG00000173612; CTA
LSDNTIEV

SEQ ID NO: 28042 - protein, 9 aa, Homo sapiens
  Table A; Target 28042; HLA-B*46:01; GPRC6A; ENSG00000173612; CTA
LSPASLDSM

SEQ ID NO: 28043 - protein, 9 aa, Homo sapiens
  Table A; Target 28043; HLA-C*01:02; GPRC6A; ENSG00000173612; CTA
LSPASLDSM

SEQ ID NO: 28044 - protein, 9 aa, Homo sapiens
  Table A; Target 28044; HLA-A*31:01; GPRC6A; ENSG00000173612; CTA
LVVGIIFTR

SEQ ID NO: 28045 - protein, 9 aa, Homo sapiens
  Table A; Target 28045; HLA-A*33:03; GPRC6A; ENSG00000173612; CTA
LVVGIIFTR

SEQ ID NO: 28046 - protein, 9 aa, Homo sapiens
  Table A; Target 28046; HLA-A*68:01; GPRC6A; ENSG00000173612; CTA
LVVGIIFTR

SEQ ID NO: 28047 - protein, 9 aa, Homo sapiens
  Table A; Target 28047; HLA-A*68:02; GPRC6A; ENSG00000173612; CTA
LVVGIIFTR

SEQ ID NO: 28048 - protein, 9 aa, Homo sapiens
  Table A; Target 28048; HLA-C*07:06; GPRC6A; ENSG00000173612; CTA
LVVGIIFTR

SEQ ID NO: 28049 - protein, 9 aa, Homo sapiens
  Table A; Target 28049; HLA-A*24:02; GPRC6A; ENSG00000173612; CTA
LYRPILIIF

SEQ ID NO: 28050 - protein, 9 aa, Homo sapiens
  Table A; Target 28050; HLA-B*57:01; GPRC6A; ENSG00000173612; CTA
LYRPILIIF

SEQ ID NO: 28051 - protein, 8 aa, Homo sapiens
  Table A; Target 28051; HLA-B*51:01; GPRC6A; ENSG00000173612; CTA
MAFLIILI

SEQ ID NO: 28052 - protein, 9 aa, Homo sapiens
  Table A; Target 28052; HLA-B*08:01; GPRC6A; ENSG00000173612; CTA
MAVSRMLNL

SEQ ID NO: 28053 - protein, 9 aa, Homo sapiens
  Table A; Target 28053; HLA-C*02:02; GPRC6A; ENSG00000173612; CTA
MAVSRMLNL

SEQ ID NO: 28054 - protein, 9 aa, Homo sapiens
  Table A; Target 28054; HLA-C*03:03; GPRC6A; ENSG00000173612; CTA
MAVSRMLNL

SEQ ID NO: 28055 - protein, 9 aa, Homo sapiens
  Table A; Target 28055; HLA-C*03:04; GPRC6A; ENSG00000173612; CTA
MAVSRMLNL

SEQ ID NO: 28056 - protein, 9 aa, Homo sapiens
  Table A; Target 28056; HLA-B*15:01; GPRC6A; ENSG00000173612; CTA
MCFEKEVEY

SEQ ID NO: 28057 - protein, 9 aa, Homo sapiens
  Table A; Target 28057; HLA-B*15:03; GPRC6A; ENSG00000173612; CTA
MCFEKEVEY

SEQ ID NO: 28058 - protein, 9 aa, Homo sapiens
  Table A; Target 28058; HLA-B*35:01; GPRC6A; ENSG00000173612; CTA
MCFEKEVEY

SEQ ID NO: 28059 - protein, 9 aa, Homo sapiens
  Table A; Target 28059; HLA-B*46:01; GPRC6A; ENSG00000173612; CTA
MCFEKEVEY

SEQ ID NO: 28060 - protein, 9 aa, Homo sapiens
  Table A; Target 28060; HLA-C*16:01; GPRC6A; ENSG00000173612; CTA
MCFEKEVEY

SEQ ID NO: 28061 - protein, 8 aa, Homo sapiens
  Table A; Target 28061; HLA-A*23:01; GPRC6A; ENSG00000173612; CTA
MFGVSFTL

SEQ ID NO: 28062 - protein, 8 aa, Homo sapiens
  Table A; Target 28062; HLA-B*35:01; GPRC6A; ENSG00000173612; CTA
MFGVSFTL

SEQ ID NO: 28063 - protein, 8 aa, Homo sapiens
  Table A; Target 28063; HLA-B*35:03; GPRC6A; ENSG00000173612; CTA
MFGVSFTL

SEQ ID NO: 28064 - protein, 8 aa, Homo sapiens
  Table A; Target 28064; HLA-C*14:02; GPRC6A; ENSG00000173612; CTA
MFGVSFTL

SEQ ID NO: 28065 - protein, 8 aa, Homo sapiens
  Table A; Target 28065; HLA-A*23:01; GPRC6A; ENSG00000173612; CTA
MINNSTLL

SEQ ID NO: 28066 - protein, 9 aa, Homo sapiens
  Table A; Target 28066; HLA-B*35:01; GPRC6A; ENSG00000173612; CTA
MPQVGYEST

SEQ ID NO: 28067 - protein, 9 aa, Homo sapiens
  Table A; Target 28067; HLA-B*35:03; GPRC6A; ENSG00000173612; CTA
MPQVGYEST

SEQ ID NO: 28068 - protein, 9 aa, Homo sapiens
  Table A; Target 28068; HLA-B*54:01; GPRC6A; ENSG00000173612; CTA
MPQVGYEST

SEQ ID NO: 28069 - protein, 9 aa, Homo sapiens
  Table A; Target 28069; HLA-B*55:01; GPRC6A; ENSG00000173612; CTA
MPQVGYEST

SEQ ID NO: 28070 - protein, 9 aa, Homo sapiens
  Table A; Target 28070; HLA-B*56:01; GPRC6A; ENSG00000173612; CTA
MPQVGYEST

SEQ ID NO: 28071 - protein, 10 aa, Homo sapiens
  Table A; Target 28071; HLA-B*35:01; GPRC6A; ENSG00000173612; CTA
MPQVGYESTA

SEQ ID NO: 28072 - protein, 10 aa, Homo sapiens
  Table A; Target 28072; HLA-B*35:03; GPRC6A; ENSG00000173612; CTA
MPQVGYESTA

SEQ ID NO: 28073 - protein, 10 aa, Homo sapiens
  Table A; Target 28073; HLA-B*54:01; GPRC6A; ENSG00000173612; CTA
MPQVGYESTA

SEQ ID NO: 28074 - protein, 10 aa, Homo sapiens
  Table A; Target 28074; HLA-B*55:01; GPRC6A; ENSG00000173612; CTA
MPQVGYESTA

SEQ ID NO: 28075 - protein, 10 aa, Homo sapiens
  Table A; Target 28075; HLA-B*56:01; GPRC6A; ENSG00000173612; CTA
MPQVGYESTA

SEQ ID NO: 28076 - protein, 8 aa, Homo sapiens
  Table A; Target 28076; HLA-B*07:02; GPRC6A; ENSG00000173612; CTA
MPRVKAVI

SEQ ID NO: 28077 - protein, 8 aa, Homo sapiens
  Table A; Target 28077; HLA-B*08:01; GPRC6A; ENSG00000173612; CTA
MPRVKAVI

SEQ ID NO: 28078 - protein, 8 aa, Homo sapiens
  Table A; Target 28078; HLA-B*51:01; GPRC6A; ENSG00000173612; CTA
MPRVKAVI

SEQ ID NO: 28079 - protein, 8 aa, Homo sapiens
  Table A; Target 28079; HLA-C*07:02; GPRC6A; ENSG00000173612; CTA
MPRVKAVI

SEQ ID NO: 28080 - protein, 9 aa, Homo sapiens
  Table A; Target 28080; HLA-A*03:01; GPRC6A; ENSG00000173612; CTA
MTNPSSSGK

SEQ ID NO: 28081 - protein, 9 aa, Homo sapiens
  Table A; Target 28081; HLA-A*03:02; GPRC6A; ENSG00000173612; CTA
MTNPSSSGK

SEQ ID NO: 28082 - protein, 9 aa, Homo sapiens
  Table A; Target 28082; HLA-A*11:01; GPRC6A; ENSG00000173612; CTA
MTNPSSSGK

SEQ ID NO: 28083 - protein, 9 aa, Homo sapiens
  Table A; Target 28083; HLA-A*01:01; GPRC6A; ENSG00000173612; CTA
MTVTKMAEY

SEQ ID NO: 28084 - protein, 9 aa, Homo sapiens
  Table A; Target 28084; HLA-A*25:01; GPRC6A; ENSG00000173612; CTA
MTVTKMAEY

SEQ ID NO: 28085 - protein, 9 aa, Homo sapiens
  Table A; Target 28085; HLA-A*26:01; GPRC6A; ENSG00000173612; CTA
MTVTKMAEY

SEQ ID NO: 28086 - protein, 9 aa, Homo sapiens
  Table A; Target 28086; HLA-A*29:02; GPRC6A; ENSG00000173612; CTA
MTVTKMAEY

SEQ ID NO: 28087 - protein, 9 aa, Homo sapiens
  Table A; Target 28087; HLA-A*30:02; GPRC6A; ENSG00000173612; CTA
MTVTKMAEY

SEQ ID NO: 28088 - protein, 9 aa, Homo sapiens
  Table A; Target 28088; HLA-A*32:01; GPRC6A; ENSG00000173612; CTA
MTVTKMAEY

SEQ ID NO: 28089 - protein, 9 aa, Homo sapiens
  Table A; Target 28089; HLA-B*46:01; GPRC6A; ENSG00000173612; CTA
MTVTKMAEY

SEQ ID NO: 28090 - protein, 9 aa, Homo sapiens
  Table A; Target 28090; HLA-B*58:01; GPRC6A; ENSG00000173612; CTA
MTVTKMAEY

SEQ ID NO: 28091 - protein, 9 aa, Homo sapiens
  Table A; Target 28091; HLA-C*02:02; GPRC6A; ENSG00000173612; CTA
MTVTKMAEY

SEQ ID NO: 28092 - protein, 8 aa, Homo sapiens
  Table A; Target 28092; HLA-C*16:02; GPRC6A; ENSG00000173612; CTA
NATSVSKT

SEQ ID NO: 28093 - protein, 9 aa, Homo sapiens
  Table A; Target 28093; HLA-A*23:01; GPRC6A; ENSG00000173612; CTA
NATSVSKTL

SEQ ID NO: 28094 - protein, 9 aa, Homo sapiens
  Table A; Target 28094; HLA-A*30:01; GPRC6A; ENSG00000173612; CTA
NATSVSKTL

SEQ ID NO: 28095 - protein, 9 aa, Homo sapiens
  Table A; Target 28095; HLA-B*07:02; GPRC6A; ENSG00000173612; CTA
NATSVSKTL

SEQ ID NO: 28096 - protein, 9 aa, Homo sapiens
  Table A; Target 28096; HLA-B*35:01; GPRC6A; ENSG00000173612; CTA
NATSVSKTL

SEQ ID NO: 28097 - protein, 9 aa, Homo sapiens
  Table A; Target 28097; HLA-B*35:03; GPRC6A; ENSG00000173612; CTA
NATSVSKTL

SEQ ID NO: 28098 - protein, 9 aa, Homo sapiens
  Table A; Target 28098; HLA-B*39:01; GPRC6A; ENSG00000173612; CTA
NATSVSKTL

SEQ ID NO: 28099 - protein, 9 aa, Homo sapiens
  Table A; Target 28099; HLA-B*40:01; GPRC6A; ENSG00000173612; CTA
NATSVSKTL

SEQ ID NO: 28100 - protein, 9 aa, Homo sapiens
  Table A; Target 28100; HLA-B*58:01; GPRC6A; ENSG00000173612; CTA
NATSVSKTL

SEQ ID NO: 28101 - protein, 9 aa, Homo sapiens
  Table A; Target 28101; HLA-C*01:02; GPRC6A; ENSG00000173612; CTA
NATSVSKTL

SEQ ID NO: 28102 - protein, 9 aa, Homo sapiens
  Table A; Target 28102; HLA-C*02:02; GPRC6A; ENSG00000173612; CTA
NATSVSKTL

SEQ ID NO: 28103 - protein, 9 aa, Homo sapiens
  Table A; Target 28103; HLA-C*03:03; GPRC6A; ENSG00000173612; CTA
NATSVSKTL

SEQ ID NO: 28104 - protein, 9 aa, Homo sapiens
  Table A; Target 28104; HLA-C*03:04; GPRC6A; ENSG00000173612; CTA
NATSVSKTL

SEQ ID NO: 28105 - protein, 9 aa, Homo sapiens
  Table A; Target 28105; HLA-C*05:01; GPRC6A; ENSG00000173612; CTA
NATSVSKTL

SEQ ID NO: 28106 - protein, 9 aa, Homo sapiens
  Table A; Target 28106; HLA-C*07:06; GPRC6A; ENSG00000173612; CTA
NATSVSKTL

SEQ ID NO: 28107 - protein, 9 aa, Homo sapiens
  Table A; Target 28107; HLA-C*12:03; GPRC6A; ENSG00000173612; CTA
NATSVSKTL

SEQ ID NO: 28108 - protein, 9 aa, Homo sapiens
  Table A; Target 28108; HLA-C*14:02; GPRC6A; ENSG00000173612; CTA
NATSVSKTL

SEQ ID NO: 28109 - protein, 9 aa, Homo sapiens
  Table A; Target 28109; HLA-C*16:01; GPRC6A; ENSG00000173612; CTA
NATSVSKTL

SEQ ID NO: 28110 - protein, 9 aa, Homo sapiens
  Table A; Target 28110; HLA-C*16:02; GPRC6A; ENSG00000173612; CTA
NATSVSKTL

SEQ ID NO: 28111 - protein, 9 aa, Homo sapiens
  Table A; Target 28111; HLA-C*16:04; GPRC6A; ENSG00000173612; CTA
NATSVSKTL

SEQ ID NO: 28112 - protein, 11 aa, Homo sapiens
  Table A; Target 28112; HLA-A*33:01; GPRC6A; ENSG00000173612; CTA
NATSVSKTLPR

SEQ ID NO: 28113 - protein, 11 aa, Homo sapiens
  Table A; Target 28113; HLA-A*33:03; GPRC6A; ENSG00000173612; CTA
NATSVSKTLPR

SEQ ID NO: 28114 - protein, 11 aa, Homo sapiens
  Table A; Target 28114; HLA-A*68:01; GPRC6A; ENSG00000173612; CTA
NATSVSKTLPR

SEQ ID NO: 28115 - protein, 8 aa, Homo sapiens
  Table A; Target 28115; HLA-B*18:01; GPRC6A; ENSG00000173612; CTA
NDSLAILL

SEQ ID NO: 28116 - protein, 8 aa, Homo sapiens
  Table A; Target 28116; HLA-B*37:01; GPRC6A; ENSG00000173612; CTA
NDSLAILL

SEQ ID NO: 28117 - protein, 8 aa, Homo sapiens
  Table A; Target 28117; HLA-A*30:01; GPRC6A; ENSG00000173612; CTA
NEAKFITF

SEQ ID NO: 28118 - protein, 8 aa, Homo sapiens
  Table A; Target 28118; HLA-B*18:01; GPRC6A; ENSG00000173612; CTA
NEAKFITF

SEQ ID NO: 28119 - protein, 8 aa, Homo sapiens
  Table A; Target 28119; HLA-B*37:01; GPRC6A; ENSG00000173612; CTA
NEAKFITF

SEQ ID NO: 28120 - protein, 8 aa, Homo sapiens
  Table A; Target 28120; HLA-B*44:02; GPRC6A; ENSG00000173612; CTA
NEAKFITF

SEQ ID NO: 28121 - protein, 8 aa, Homo sapiens
  Table A; Target 28121; HLA-B*44:03; GPRC6A; ENSG00000173612; CTA
NEAKFITF

SEQ ID NO: 28122 - protein, 8 aa, Homo sapiens
  Table A; Target 28122; HLA-B*49:01; GPRC6A; ENSG00000173612; CTA
NEAKFITF

SEQ ID NO: 28123 - protein, 9 aa, Homo sapiens
  Table A; Target 28123; HLA-B*44:02; GPRC6A; ENSG00000173612; CTA
NEFRNLKQI

SEQ ID NO: 28124 - protein, 9 aa, Homo sapiens
  Table A; Target 28124; HLA-B*44:03; GPRC6A; ENSG00000173612; CTA
NEFRNLKQI

SEQ ID NO: 28125 - protein, 9 aa, Homo sapiens
  Table A; Target 28125; HLA-B*49:01; GPRC6A; ENSG00000173612; CTA
NEFRNLKQI

SEQ ID NO: 28126 - protein, 8 aa, Homo sapiens
  Table A; Target 28126; HLA-C*14:02; GPRC6A; ENSG00000173612; CTA
NFASTSFF

SEQ ID NO: 28127 - protein, 9 aa, Homo sapiens
  Table A; Target 28127; HLA-C*16:01; GPRC6A; ENSG00000173612; CTA
NHSQRTLAY

SEQ ID NO: 28128 - protein, 9 aa, Homo sapiens
  Table A; Target 28128; HLA-B*39:01; GPRC6A; ENSG00000173612; CTA
NHYTNQTDM

SEQ ID NO: 28129 - protein, 9 aa, Homo sapiens
  Table A; Target 28129; HLA-A*68:02; GPRC6A; ENSG00000173612; CTA
NISSFHSFL

SEQ ID NO: 28130 - protein, 8 aa, Homo sapiens
  Table A; Target 28130; HLA-A*03:02; GPRC6A; ENSG00000173612; CTA
NLNTPVVK

SEQ ID NO: 28131 - protein, 10 aa, Homo sapiens
  Table A; Target 28131; HLA-A*30:02; GPRC6A; ENSG00000173612; CTA
NLQLMPQVGY

SEQ ID NO: 28132 - protein, 10 aa, Homo sapiens
  Table A; Target 28132; HLA-B*35:03; GPRC6A; ENSG00000173612; CTA
NPNAFQPWEL

SEQ ID NO: 28133 - protein, 9 aa, Homo sapiens
  Table A; Target 28133; HLA-B*07:02; GPRC6A; ENSG00000173612; CTA
NPSSSGKSA

SEQ ID NO: 28134 - protein, 9 aa, Homo sapiens
  Table A; Target 28134; HLA-B*55:01; GPRC6A; ENSG00000173612; CTA
NPSSSGKSA

SEQ ID NO: 28135 - protein, 9 aa, Homo sapiens
  Table A; Target 28135; HLA-B*56:01; GPRC6A; ENSG00000173612; CTA
NPSSSGKSA

SEQ ID NO: 28136 - protein, 11 aa, Homo sapiens
  Table A; Target 28136; HLA-A*25:01; GPRC6A; ENSG00000173612; CTA
NPSSSGKSATW

SEQ ID NO: 28137 - protein, 11 aa, Homo sapiens
  Table A; Target 28137; HLA-B*07:02; GPRC6A; ENSG00000173612; CTA
NPSSSGKSATW

SEQ ID NO: 28138 - protein, 11 aa, Homo sapiens
  Table A; Target 28138; HLA-B*35:01; GPRC6A; ENSG00000173612; CTA
NPSSSGKSATW

SEQ ID NO: 28139 - protein, 11 aa, Homo sapiens
  Table A; Target 28139; HLA-C*07:02; GPRC6A; ENSG00000173612; CTA
NPSSSGKSATW

SEQ ID NO: 28140 - protein, 9 aa, Homo sapiens
  Table A; Target 28140; HLA-B*27:05; GPRC6A; ENSG00000173612; CTA
NQTDMPHCL

SEQ ID NO: 28141 - protein, 9 aa, Homo sapiens
  Table A; Target 28141; HLA-B*38:01; GPRC6A; ENSG00000173612; CTA
NQTDMPHCL

SEQ ID NO: 28142 - protein, 9 aa, Homo sapiens
  Table A; Target 28142; HLA-B*39:01; GPRC6A; ENSG00000173612; CTA
NQTDMPHCL

SEQ ID NO: 28143 - protein, 9 aa, Homo sapiens
  Table A; Target 28143; HLA-A*68:02; GPRC6A; ENSG00000173612; CTA
NTFIIQAEA

SEQ ID NO: 28144 - protein, 9 aa, Homo sapiens
  Table A; Target 28144; HLA-B*54:01; GPRC6A; ENSG00000173612; CTA
NTFIIQAEA

SEQ ID NO: 28145 - protein, 9 aa, Homo sapiens
  Table A; Target 28145; HLA-A*11:01; GPRC6A; ENSG00000173612; CTA
NTIEVRINR

SEQ ID NO: 28146 - protein, 9 aa, Homo sapiens
  Table A; Target 28146; HLA-A*31:01; GPRC6A; ENSG00000173612; CTA
NTIEVRINR

SEQ ID NO: 28147 - protein, 9 aa, Homo sapiens
  Table A; Target 28147; HLA-A*33:01; GPRC6A; ENSG00000173612; CTA
NTIEVRINR

SEQ ID NO: 28148 - protein, 9 aa, Homo sapiens
  Table A; Target 28148; HLA-A*33:03; GPRC6A; ENSG00000173612; CTA
NTIEVRINR

SEQ ID NO: 28149 - protein, 9 aa, Homo sapiens
  Table A; Target 28149; HLA-A*68:01; GPRC6A; ENSG00000173612; CTA
NTIEVRINR

SEQ ID NO: 28150 - protein, 9 aa, Homo sapiens
  Table A; Target 28150; HLA-A*68:02; GPRC6A; ENSG00000173612; CTA
NTIEVRINR

SEQ ID NO: 28151 - protein, 9 aa, Homo sapiens
  Table A; Target 28151; HLA-B*57:01; GPRC6A; ENSG00000173612; CTA
NTIEVRINR

SEQ ID NO: 28152 - protein, 9 aa, Homo sapiens
  Table A; Target 28152; HLA-C*07:06; GPRC6A; ENSG00000173612; CTA
NTIEVRINR

SEQ ID NO: 28153 - protein, 9 aa, Homo sapiens
  Table A; Target 28153; HLA-A*24:02; GPRC6A; ENSG00000173612; CTA
NYGILYCTF

SEQ ID NO: 28154 - protein, 10 aa, Homo sapiens
  Table A; Target 28154; HLA-A*23:01; GPRC6A; ENSG00000173612; CTA
NYNEAKFITF

SEQ ID NO: 28155 - protein, 10 aa, Homo sapiens
  Table A; Target 28155; HLA-A*24:02; GPRC6A; ENSG00000173612; CTA
NYNEAKFITF

SEQ ID NO: 28156 - protein, 10 aa, Homo sapiens
  Table A; Target 28156; HLA-A*33:01; GPRC6A; ENSG00000173612; CTA
NYNEAKFITF

SEQ ID NO: 28157 - protein, 10 aa, Homo sapiens
  Table A; Target 28157; HLA-A*33:03; GPRC6A; ENSG00000173612; CTA
NYNEAKFITF

SEQ ID NO: 28158 - protein, 10 aa, Homo sapiens
  Table A; Target 28158; HLA-C*14:02; GPRC6A; ENSG00000173612; CTA
NYNEAKFITF

SEQ ID NO: 28159 - protein, 10 aa, Homo sapiens
  Table A; Target 28159; HLA-B*58:01; GPRC6A; ENSG00000173612; CTA
PSSSGKSATW

SEQ ID NO: 28160 - protein, 11 aa, Homo sapiens
  Table A; Target 28160; HLA-A*68:01; GPRC6A; ENSG00000173612; CTA
PTVEVNVSLPR

SEQ ID NO: 28161 - protein, 8 aa, Homo sapiens
  Table A; Target 28161; HLA-B*51:01; GPRC6A; ENSG00000173612; CTA
QAQAFAHI

SEQ ID NO: 28162 - protein, 9 aa, Homo sapiens
  Table A; Target 28162; HLA-C*12:03; GPRC6A; ENSG00000173612; CTA
QAQAFAHIC

SEQ ID NO: 28163 - protein, 10 aa, Homo sapiens
  Table A; Target 28163; HLA-A*33:03; GPRC6A; ENSG00000173612; CTA
QAQAFAHICR

SEQ ID NO: 28164 - protein, 9 aa, Homo sapiens
  Table A; Target 28164; HLA-A*25:01; GPRC6A; ENSG00000173612; CTA
QEINTKSAF

SEQ ID NO: 28165 - protein, 9 aa, Homo sapiens
  Table A; Target 28165; HLA-A*30:01; GPRC6A; ENSG00000173612; CTA
QEINTKSAF

SEQ ID NO: 28166 - protein, 9 aa, Homo sapiens
  Table A; Target 28166; HLA-A*32:01; GPRC6A; ENSG00000173612; CTA
QEINTKSAF

SEQ ID NO: 28167 - protein, 9 aa, Homo sapiens
  Table A; Target 28167; HLA-B*15:01; GPRC6A; ENSG00000173612; CTA
QEINTKSAF

SEQ ID NO: 28168 - protein, 9 aa, Homo sapiens
  Table A; Target 28168; HLA-B*15:03; GPRC6A; ENSG00000173612; CTA
QEINTKSAF

SEQ ID NO: 28169 - protein, 9 aa, Homo sapiens
  Table A; Target 28169; HLA-B*18:01; GPRC6A; ENSG00000173612; CTA
QEINTKSAF

SEQ ID NO: 28170 - protein, 9 aa, Homo sapiens
  Table A; Target 28170; HLA-B*27:02; GPRC6A; ENSG00000173612; CTA
QEINTKSAF

SEQ ID NO: 28171 - protein, 9 aa, Homo sapiens
  Table A; Target 28171; HLA-B*37:01; GPRC6A; ENSG00000173612; CTA
QEINTKSAF

SEQ ID NO: 28172 - protein, 9 aa, Homo sapiens
  Table A; Target 28172; HLA-B*40:01; GPRC6A; ENSG00000173612; CTA
QEINTKSAF

SEQ ID NO: 28173 - protein, 9 aa, Homo sapiens
  Table A; Target 28173; HLA-B*44:02; GPRC6A; ENSG00000173612; CTA
QEINTKSAF

SEQ ID NO: 28174 - protein, 9 aa, Homo sapiens
  Table A; Target 28174; HLA-B*44:03; GPRC6A; ENSG00000173612; CTA
QEINTKSAF

SEQ ID NO: 28175 - protein, 9 aa, Homo sapiens
  Table A; Target 28175; HLA-B*49:01; GPRC6A; ENSG00000173612; CTA
QEINTKSAF

SEQ ID NO: 28176 - protein, 9 aa, Homo sapiens
  Table A; Target 28176; HLA-C*16:04; GPRC6A; ENSG00000173612; CTA
QEINTKSAF

SEQ ID NO: 28177 - protein, 10 aa, Homo sapiens
  Table A; Target 28177; HLA-B*40:01; GPRC6A; ENSG00000173612; CTA
QEINTKSAFL

SEQ ID NO: 28178 - protein, 10 aa, Homo sapiens
  Table A; Target 28178; HLA-B*44:02; GPRC6A; ENSG00000173612; CTA
QEINTKSAFL

SEQ ID NO: 28179 - protein, 10 aa, Homo sapiens
  Table A; Target 28179; HLA-B*44:03; GPRC6A; ENSG00000173612; CTA
QEINTKSAFL

SEQ ID NO: 28180 - protein, 10 aa, Homo sapiens
  Table A; Target 28180; HLA-B*49:01; GPRC6A; ENSG00000173612; CTA
QEINTKSAFL

SEQ ID NO: 28181 - protein, 9 aa, Homo sapiens
  Table A; Target 28181; HLA-A*01:01; GPRC6A; ENSG00000173612; CTA
QLAVFALGY

SEQ ID NO: 28182 - protein, 9 aa, Homo sapiens
  Table A; Target 28182; HLA-A*03:01; GPRC6A; ENSG00000173612; CTA
QLAVFALGY

SEQ ID NO: 28183 - protein, 9 aa, Homo sapiens
  Table A; Target 28183; HLA-A*26:01; GPRC6A; ENSG00000173612; CTA
QLAVFALGY

SEQ ID NO: 28184 - protein, 9 aa, Homo sapiens
  Table A; Target 28184; HLA-A*29:02; GPRC6A; ENSG00000173612; CTA
QLAVFALGY

SEQ ID NO: 28185 - protein, 9 aa, Homo sapiens
  Table A; Target 28185; HLA-A*30:02; GPRC6A; ENSG00000173612; CTA
QLAVFALGY

SEQ ID NO: 28186 - protein, 9 aa, Homo sapiens
  Table A; Target 28186; HLA-B*15:01; GPRC6A; ENSG00000173612; CTA
QLAVFALGY

SEQ ID NO: 28187 - protein, 9 aa, Homo sapiens
  Table A; Target 28187; HLA-B*15:03; GPRC6A; ENSG00000173612; CTA
QLAVFALGY

SEQ ID NO: 28188 - protein, 8 aa, Homo sapiens
  Table A; Target 28188; HLA-A*30:02; GPRC6A; ENSG00000173612; CTA
QLMPQVGY

SEQ ID NO: 28189 - protein, 8 aa, Homo sapiens
  Table A; Target 28189; HLA-B*15:01; GPRC6A; ENSG00000173612; CTA
QLMPQVGY

SEQ ID NO: 28190 - protein, 8 aa, Homo sapiens
  Table A; Target 28190; HLA-B*15:03; GPRC6A; ENSG00000173612; CTA
QLMPQVGY

SEQ ID NO: 28191 - protein, 9 aa, Homo sapiens
  Table A; Target 28191; HLA-A*01:01; GPRC6A; ENSG00000173612; CTA
QTDMPHCLL

SEQ ID NO: 28192 - protein, 9 aa, Homo sapiens
  Table A; Target 28192; HLA-B*13:02; GPRC6A; ENSG00000173612; CTA
QTLAMIHSI

SEQ ID NO: 28193 - protein, 8 aa, Homo sapiens
  Table A; Target 28193; HLA-A*32:01; GPRC6A; ENSG00000173612; CTA
QVNVIVVF

SEQ ID NO: 28194 - protein, 8 aa, Homo sapiens
  Table A; Target 28194; HLA-B*15:01; GPRC6A; ENSG00000173612; CTA
QVNVIVVF

SEQ ID NO: 28195 - protein, 8 aa, Homo sapiens
  Table A; Target 28195; HLA-B*37:01; GPRC6A; ENSG00000173612; CTA
QVNVIVVF

SEQ ID NO: 28196 - protein, 9 aa, Homo sapiens
  Table A; Target 28196; HLA-A*02:04; GPRC6A; ENSG00000173612; CTA
QVNVIVVFL

SEQ ID NO: 28197 - protein, 9 aa, Homo sapiens
  Table A; Target 28197; HLA-A*02:07; GPRC6A; ENSG00000173612; CTA
QVNVIVVFL

SEQ ID NO: 28198 - protein, 9 aa, Homo sapiens
  Table A; Target 28198; HLA-A*68:02; GPRC6A; ENSG00000173612; CTA
QVNVIVVFL

SEQ ID NO: 28199 - protein, 9 aa, Homo sapiens
  Table A; Target 28199; HLA-B*37:01; GPRC6A; ENSG00000173612; CTA
RDCQNPNAF

SEQ ID NO: 28200 - protein, 9 aa, Homo sapiens
  Table A; Target 28200; HLA-A*03:02; GPRC6A; ENSG00000173612; CTA
RENATSVSK

SEQ ID NO: 28201 - protein, 11 aa, Homo sapiens
  Table A; Target 28201; HLA-A*30:01; GPRC6A; ENSG00000173612; CTA
RENATSVSKTL

SEQ ID NO: 28202 - protein, 11 aa, Homo sapiens
  Table A; Target 28202; HLA-B*40:01; GPRC6A; ENSG00000173612; CTA
RENATSVSKTL

SEQ ID NO: 28203 - protein, 11 aa, Homo sapiens
  Table A; Target 28203; HLA-B*44:02; GPRC6A; ENSG00000173612; CTA
RENATSVSKTL

SEQ ID NO: 28204 - protein, 11 aa, Homo sapiens
  Table A; Target 28204; HLA-B*44:03; GPRC6A; ENSG00000173612; CTA
RENATSVSKTL

SEQ ID NO: 28205 - protein, 9 aa, Homo sapiens
  Table A; Target 28205; HLA-A*03:02; GPRC6A; ENSG00000173612; CTA
RNLNTPVVK

SEQ ID NO: 28206 - protein, 9 aa, Homo sapiens
  Table A; Target 28206; HLA-A*11:01; GPRC6A; ENSG00000173612; CTA
RNLNTPVVK

SEQ ID NO: 28207 - protein, 9 aa, Homo sapiens
  Table A; Target 28207; HLA-B*54:01; GPRC6A; ENSG00000173612; CTA
RPILIIFTC

SEQ ID NO: 28208 - protein, 9 aa, Homo sapiens
  Table A; Target 28208; HLA-B*56:01; GPRC6A; ENSG00000173612; CTA
RPILIIFTC

SEQ ID NO: 28209 - protein, 9 aa, Homo sapiens
  Table A; Target 28209; HLA-A*24:02; GPRC6A; ENSG00000173612; CTA
RQFHVFDLF

SEQ ID NO: 28210 - protein, 9 aa, Homo sapiens
  Table A; Target 28210; HLA-B*57:01; GPRC6A; ENSG00000173612; CTA
RQFHVFDLF

SEQ ID NO: 28211 - protein, 9 aa, Homo sapiens
  Table A; Target 28211; HLA-B*15:01; GPRC6A; ENSG00000173612; CTA
RQTMFGVSF

SEQ ID NO: 28212 - protein, 9 aa, Homo sapiens
  Table A; Target 28212; HLA-B*15:03; GPRC6A; ENSG00000173612; CTA
RQTMFGVSF

SEQ ID NO: 28213 - protein, 9 aa, Homo sapiens
  Table A; Target 28213; HLA-B*37:01; GPRC6A; ENSG00000173612; CTA
RQTMFGVSF

SEQ ID NO: 28214 - protein, 9 aa, Homo sapiens
  Table A; Target 28214; HLA-A*03:01; GPRC6A; ENSG00000173612; CTA
RTLAYKANK

SEQ ID NO: 28215 - protein, 9 aa, Homo sapiens
  Table A; Target 28215; HLA-A*03:02; GPRC6A; ENSG00000173612; CTA
RTLAYKANK

SEQ ID NO: 28216 - protein, 9 aa, Homo sapiens
  Table A; Target 28216; HLA-A*11:01; GPRC6A; ENSG00000173612; CTA
RTLAYKANK

SEQ ID NO: 28217 - protein, 10 aa, Homo sapiens
  Table A; Target 28217; HLA-B*57:01; GPRC6A; ENSG00000173612; CTA
RTVPSDFHQI

SEQ ID NO: 28218 - protein, 10 aa, Homo sapiens
  Table A; Target 28218; HLA-B*58:01; GPRC6A; ENSG00000173612; CTA
RTVPSDFHQI

SEQ ID NO: 28219 - protein, 11 aa, Homo sapiens
  Table A; Target 28219; HLA-A*03:01; GPRC6A; ENSG00000173612; CTA
RTVPSDFHQIK

SEQ ID NO: 28220 - protein, 11 aa, Homo sapiens
  Table A; Target 28220; HLA-A*11:01; GPRC6A; ENSG00000173612; CTA
RTVPSDFHQIK

SEQ ID NO: 28221 - protein, 11 aa, Homo sapiens
  Table A; Target 28221; HLA-A*31:01; GPRC6A; ENSG00000173612; CTA
RTVPSDFHQIK

SEQ ID NO: 28222 - protein, 11 aa, Homo sapiens
  Table A; Target 28222; HLA-B*57:01; GPRC6A; ENSG00000173612; CTA
RTVPSDFHQIK

SEQ ID NO: 28223 - protein, 10 aa, Homo sapiens
  Table A; Target 28223; HLA-A*26:01; GPRC6A; ENSG00000173612; CTA
RVKAVIGSGY

SEQ ID NO: 28224 - protein, 10 aa, Homo sapiens
  Table A; Target 28224; HLA-A*30:02; GPRC6A; ENSG00000173612; CTA
RVKAVIGSGY

SEQ ID NO: 28225 - protein, 10 aa, Homo sapiens
  Table A; Target 28225; HLA-A*32:01; GPRC6A; ENSG00000173612; CTA
RVKAVIGSGY

SEQ ID NO: 28226 - protein, 10 aa, Homo sapiens
  Table A; Target 28226; HLA-B*15:01; GPRC6A; ENSG00000173612; CTA
RVKAVIGSGY

SEQ ID NO: 28227 - protein, 10 aa, Homo sapiens
  Table A; Target 28227; HLA-B*15:03; GPRC6A; ENSG00000173612; CTA
RVKAVIGSGY

SEQ ID NO: 28228 - protein, 10 aa, Homo sapiens
  Table A; Target 28228; HLA-B*46:01; GPRC6A; ENSG00000173612; CTA
RVKAVIGSGY

SEQ ID NO: 28229 - protein, 10 aa, Homo sapiens
  Table A; Target 28229; HLA-C*02:02; GPRC6A; ENSG00000173612; CTA
RVKAVIGSGY

SEQ ID NO: 28230 - protein, 8 aa, Homo sapiens
  Table A; Target 28230; HLA-B*08:01; GPRC6A; ENSG00000173612; CTA
SAFLKMIY

SEQ ID NO: 28231 - protein, 10 aa, Homo sapiens
  Table A; Target 28231; HLA-A*29:02; GPRC6A; ENSG00000173612; CTA
SAFLKMIYSY

SEQ ID NO: 28232 - protein, 9 aa, Homo sapiens
  Table A; Target 28232; HLA-B*37:01; GPRC6A; ENSG00000173612; CTA
SDFHQIKAM

SEQ ID NO: 28233 - protein, 9 aa, Homo sapiens
  Table A; Target 28233; HLA-B*37:01; GPRC6A; ENSG00000173612; CTA
SDKIRFPSF

SEQ ID NO: 28234 - protein, 9 aa, Homo sapiens
  Table A; Target 28234; HLA-B*38:01; GPRC6A; ENSG00000173612; CTA
SDNTIEVRI

SEQ ID NO: 28235 - protein, 9 aa, Homo sapiens
  Table A; Target 28235; HLA-B*44:02; GPRC6A; ENSG00000173612; CTA
SDNTIEVRI

SEQ ID NO: 28236 - protein, 9 aa, Homo sapiens
  Table A; Target 28236; HLA-B*44:03; GPRC6A; ENSG00000173612; CTA
SDNTIEVRI

SEQ ID NO: 28237 - protein, 11 aa, Homo sapiens
  Table A; Target 28237; HLA-A*31:01; GPRC6A; ENSG00000173612; CTA
SDNTIEVRINR

SEQ ID NO: 28238 - protein, 10 aa, Homo sapiens
  Table A; Target 28238; HLA-B*44:02; GPRC6A; ENSG00000173612; CTA
SEDSPRRPQI

SEQ ID NO: 28239 - protein, 10 aa, Homo sapiens
  Table A; Target 28239; HLA-B*44:03; GPRC6A; ENSG00000173612; CTA
SEDSPRRPQI

SEQ ID NO: 28240 - protein, 10 aa, Homo sapiens
  Table A; Target 28240; HLA-B*49:01; GPRC6A; ENSG00000173612; CTA
SEDSPRRPQI

SEQ ID NO: 28241 - protein, 9 aa, Homo sapiens
  Table A; Target 28241; HLA-B*40:01; GPRC6A; ENSG00000173612; CTA
SEITMAVSR

SEQ ID NO: 28242 - protein, 9 aa, Homo sapiens
  Table A; Target 28242; HLA-B*44:03; GPRC6A; ENSG00000173612; CTA
SEITMAVSR

SEQ ID NO: 28243 - protein, 9 aa, Homo sapiens
  Table A; Target 28243; HLA-B*49:01; GPRC6A; ENSG00000173612; CTA
SEITMAVSR

SEQ ID NO: 28244 - protein, 9 aa, Homo sapiens
  Table A; Target 28244; HLA-C*07:06; GPRC6A; ENSG00000173612; CTA
SEITMAVSR

SEQ ID NO: 28245 - protein, 10 aa, Homo sapiens
  Table A; Target 28245; HLA-A*30:01; GPRC6A; ENSG00000173612; CTA
SEITMAVSRM

SEQ ID NO: 28246 - protein, 10 aa, Homo sapiens
  Table A; Target 28246; HLA-B*40:01; GPRC6A; ENSG00000173612; CTA
SEITMAVSRM

SEQ ID NO: 28247 - protein, 10 aa, Homo sapiens
  Table A; Target 28247; HLA-B*44:03; GPRC6A; ENSG00000173612; CTA
SEITMAVSRM

SEQ ID NO: 28248 - protein, 10 aa, Homo sapiens
  Table A; Target 28248; HLA-B*49:01; GPRC6A; ENSG00000173612; CTA
SEITMAVSRM

SEQ ID NO: 28249 - protein, 9 aa, Homo sapiens
  Table A; Target 28249; HLA-A*23:01; GPRC6A; ENSG00000173612; CTA
SFDPKLQKF

SEQ ID NO: 28250 - protein, 9 aa, Homo sapiens
  Table A; Target 28250; HLA-A*24:02; GPRC6A; ENSG00000173612; CTA
SFDPKLQKF

SEQ ID NO: 28251 - protein, 9 aa, Homo sapiens
  Table A; Target 28251; HLA-A*29:02; GPRC6A; ENSG00000173612; CTA
SFDPKLQKF

SEQ ID NO: 28252 - protein, 9 aa, Homo sapiens
  Table A; Target 28252; HLA-A*32:01; GPRC6A; ENSG00000173612; CTA
SFDPKLQKF

SEQ ID NO: 28253 - protein, 9 aa, Homo sapiens
  Table A; Target 28253; HLA-B*35:01; GPRC6A; ENSG00000173612; CTA
SFDPKLQKF

SEQ ID NO: 28254 - protein, 9 aa, Homo sapiens
  Table A; Target 28254; HLA-C*04:01; GPRC6A; ENSG00000173612; CTA
SFDPKLQKF

SEQ ID NO: 28255 - protein, 10 aa, Homo sapiens
  Table A; Target 28255; HLA-A*23:01; GPRC6A; ENSG00000173612; CTA
SFFIGEPQDF

SEQ ID NO: 28256 - protein, 10 aa, Homo sapiens
  Table A; Target 28256; HLA-A*29:02; GPRC6A; ENSG00000173612; CTA
SFFIGEPQDF

SEQ ID NO: 28257 - protein, 9 aa, Homo sapiens
  Table A; Target 28257; HLA-A*23:01; GPRC6A; ENSG00000173612; CTA
SFLQNLHLL

SEQ ID NO: 28258 - protein, 9 aa, Homo sapiens
  Table A; Target 28258; HLA-A*24:02; GPRC6A; ENSG00000173612; CTA
SFLQNLHLL

SEQ ID NO: 28259 - protein, 8 aa, Homo sapiens
  Table A; Target 28259; HLA-C*16:01; GPRC6A; ENSG00000173612; CTA
SGGLRVCY

SEQ ID NO: 28260 - protein, 9 aa, Homo sapiens
  Table A; Target 28260; HLA-B*27:05; GPRC6A; ENSG00000173612; CTA
SHSVSSIAL

SEQ ID NO: 28261 - protein, 9 aa, Homo sapiens
  Table A; Target 28261; HLA-B*38:01; GPRC6A; ENSG00000173612; CTA
SHSVSSIAL

SEQ ID NO: 28262 - protein, 9 aa, Homo sapiens
  Table A; Target 28262; HLA-B*39:01; GPRC6A; ENSG00000173612; CTA
SHSVSSIAL

SEQ ID NO: 28263 - protein, 9 aa, Homo sapiens
  Table A; Target 28263; HLA-B*07:02; GPRC6A; ENSG00000173612; CTA
SIALSPASL

SEQ ID NO: 28264 - protein, 9 aa, Homo sapiens
  Table A; Target 28264; HLA-B*08:01; GPRC6A; ENSG00000173612; CTA
SIALSPASL

SEQ ID NO: 28265 - protein, 9 aa, Homo sapiens
  Table A; Target 28265; HLA-C*01:02; GPRC6A; ENSG00000173612; CTA
SIALSPASL

SEQ ID NO: 28266 - protein, 9 aa, Homo sapiens
  Table A; Target 28266; HLA-C*07:02; GPRC6A; ENSG00000173612; CTA
SIALSPASL

SEQ ID NO: 28267 - protein, 11 aa, Homo sapiens
  Table A; Target 28267; HLA-A*29:02; GPRC6A; ENSG00000173612; CTA
SILAFGTMLGY

SEQ ID NO: 28268 - protein, 9 aa, Homo sapiens
  Table A; Target 28268; HLA-A*02:04; GPRC6A; ENSG00000173612; CTA
SIQLAVFAL

SEQ ID NO: 28269 - protein, 9 aa, Homo sapiens
  Table A; Target 28269; HLA-B*15:03; GPRC6A; ENSG00000173612; CTA
SKDLQAQAF

SEQ ID NO: 28270 - protein, 9 aa, Homo sapiens
  Table A; Target 28270; HLA-A*02:04; GPRC6A; ENSG00000173612; CTA
SLAILLLIL

SEQ ID NO: 28271 - protein, 9 aa, Homo sapiens
  Table A; Target 28271; HLA-C*05:01; GPRC6A; ENSG00000173612; CTA
SLDSMSGNV

SEQ ID NO: 28272 - protein, 11 aa, Homo sapiens
  Table A; Target 28272; HLA-A*02:01; GPRC6A; ENSG00000173612; CTA
SLDSMSGNVTM

SEQ ID NO: 28273 - protein, 11 aa, Homo sapiens
  Table A; Target 28273; HLA-A*02:07; GPRC6A; ENSG00000173612; CTA
SLDSMSGNVTM

SEQ ID NO: 28274 - protein, 11 aa, Homo sapiens
  Table A; Target 28274; HLA-B*38:01; GPRC6A; ENSG00000173612; CTA
SLDSMSGNVTM

SEQ ID NO: 28275 - protein, 11 aa, Homo sapiens
  Table A; Target 28275; HLA-B*55:01; GPRC6A; ENSG00000173612; CTA
SLDSMSGNVTM

SEQ ID NO: 28276 - protein, 11 aa, Homo sapiens
  Table A; Target 28276; HLA-C*05:01; GPRC6A; ENSG00000173612; CTA
SLDSMSGNVTM

SEQ ID NO: 28277 - protein, 8 aa, Homo sapiens
  Table A; Target 28277; HLA-A*02:04; GPRC6A; ENSG00000173612; CTA
SLLGIIFV

SEQ ID NO: 28278 - protein, 9 aa, Homo sapiens
  Table A; Target 28278; HLA-A*02:01; GPRC6A; ENSG00000173612; CTA
SLLGIIFVL

SEQ ID NO: 28279 - protein, 9 aa, Homo sapiens
  Table A; Target 28279; HLA-A*02:04; GPRC6A; ENSG00000173612; CTA
SLLGIIFVL

SEQ ID NO: 28280 - protein, 9 aa, Homo sapiens
  Table A; Target 28280; HLA-A*02:07; GPRC6A; ENSG00000173612; CTA
SLLGIIFVL

SEQ ID NO: 28281 - protein, 10 aa, Homo sapiens
  Table A; Target 28281; HLA-A*02:04; GPRC6A; ENSG00000173612; CTA
SLLGIIFVLV

SEQ ID NO: 28282 - protein, 8 aa, Homo sapiens
  Table A; Target 28282; HLA-B*07:02; GPRC6A; ENSG00000173612; CTA
SPASLDSM

SEQ ID NO: 28283 - protein, 8 aa, Homo sapiens
  Table A; Target 28283; HLA-B*35:01; GPRC6A; ENSG00000173612; CTA
SPASLDSM

SEQ ID NO: 28284 - protein, 8 aa, Homo sapiens
  Table A; Target 28284; HLA-B*35:03; GPRC6A; ENSG00000173612; CTA
SPASLDSM

SEQ ID NO: 28285 - protein, 8 aa, Homo sapiens
  Table A; Target 28285; HLA-B*56:01; GPRC6A; ENSG00000173612; CTA
SPASLDSM

SEQ ID NO: 28286 - protein, 8 aa, Homo sapiens
  Table A; Target 28286; HLA-C*07:02; GPRC6A; ENSG00000173612; CTA
SPASLDSM

SEQ ID NO: 28287 - protein, 10 aa, Homo sapiens
  Table A; Target 28287; HLA-B*56:01; GPRC6A; ENSG00000173612; CTA
SPASLDSMSG

SEQ ID NO: 28288 - protein, 9 aa, Homo sapiens
  Table A; Target 28288; HLA-A*30:02; GPRC6A; ENSG00000173612; CTA
SSGGLRVCY

SEQ ID NO: 28289 - protein, 8 aa, Homo sapiens
  Table A; Target 28289; HLA-A*32:01; GPRC6A; ENSG00000173612; CTA
SSGKSATW

SEQ ID NO: 28290 - protein, 8 aa, Homo sapiens
  Table A; Target 28290; HLA-B*57:01; GPRC6A; ENSG00000173612; CTA
SSGKSATW

SEQ ID NO: 28291 - protein, 8 aa, Homo sapiens
  Table A; Target 28291; HLA-B*58:01; GPRC6A; ENSG00000173612; CTA
SSGKSATW

SEQ ID NO: 28292 - protein, 9 aa, Homo sapiens
  Table A; Target 28292; HLA-A*25:01; GPRC6A; ENSG00000173612; CTA
SSSGKSATW

SEQ ID NO: 28293 - protein, 9 aa, Homo sapiens
  Table A; Target 28293; HLA-A*32:01; GPRC6A; ENSG00000173612; CTA
SSSGKSATW

SEQ ID NO: 28294 - protein, 9 aa, Homo sapiens
  Table A; Target 28294; HLA-B*57:01; GPRC6A; ENSG00000173612; CTA
SSSGKSATW

SEQ ID NO: 28295 - protein, 9 aa, Homo sapiens
  Table A; Target 28295; HLA-B*58:01; GPRC6A; ENSG00000173612; CTA
SSSGKSATW

SEQ ID NO: 28296 - protein, 9 aa, Homo sapiens
  Table A; Target 28296; HLA-C*16:01; GPRC6A; ENSG00000173612; CTA
SSSGKSATW

SEQ ID NO: 28297 - protein, 9 aa, Homo sapiens
  Table A; Target 28297; HLA-A*03:01; GPRC6A; ENSG00000173612; CTA
STAEILSDK

SEQ ID NO: 28298 - protein, 9 aa, Homo sapiens
  Table A; Target 28298; HLA-A*03:02; GPRC6A; ENSG00000173612; CTA
STAEILSDK

SEQ ID NO: 28299 - protein, 9 aa, Homo sapiens
  Table A; Target 28299; HLA-A*11:01; GPRC6A; ENSG00000173612; CTA
STAEILSDK

SEQ ID NO: 28300 - protein, 9 aa, Homo sapiens
  Table A; Target 28300; HLA-A*68:01; GPRC6A; ENSG00000173612; CTA
STAEILSDK

SEQ ID NO: 28301 - protein, 9 aa, Homo sapiens
  Table A; Target 28301; HLA-C*07:06; GPRC6A; ENSG00000173612; CTA
STAEILSDK

SEQ ID NO: 28302 - protein, 10 aa, Homo sapiens
  Table A; Target 28302; HLA-A*68:02; GPRC6A; ENSG00000173612; CTA
STAEILSDKI

SEQ ID NO: 28303 - protein, 9 aa, Homo sapiens
  Table A; Target 28303; HLA-A*02:03; GPRC6A; ENSG00000173612; CTA
STATKITTI

SEQ ID NO: 28304 - protein, 9 aa, Homo sapiens
  Table A; Target 28304; HLA-A*25:01; GPRC6A; ENSG00000173612; CTA
STATKITTI

SEQ ID NO: 28305 - protein, 9 aa, Homo sapiens
  Table A; Target 28305; HLA-A*68:02; GPRC6A; ENSG00000173612; CTA
STATKITTI

SEQ ID NO: 28306 - protein, 9 aa, Homo sapiens
  Table A; Target 28306; HLA-B*13:02; GPRC6A; ENSG00000173612; CTA
STATKITTI

SEQ ID NO: 28307 - protein, 11 aa, Homo sapiens
  Table A; Target 28307; HLA-A*01:01; GPRC6A; ENSG00000173612; CTA
STLLPGVKLGY

SEQ ID NO: 28308 - protein, 11 aa, Homo sapiens
  Table A; Target 28308; HLA-A*29:02; GPRC6A; ENSG00000173612; CTA
STLLPGVKLGY

SEQ ID NO: 28309 - protein, 11 aa, Homo sapiens
  Table A; Target 28309; HLA-A*30:02; GPRC6A; ENSG00000173612; CTA
STLLPGVKLGY

SEQ ID NO: 28310 - protein, 9 aa, Homo sapiens
  Table A; Target 28310; HLA-A*03:01; GPRC6A; ENSG00000173612; CTA
SVSKTLPRK

SEQ ID NO: 28311 - protein, 9 aa, Homo sapiens
  Table A; Target 28311; HLA-A*03:02; GPRC6A; ENSG00000173612; CTA
SVSKTLPRK

SEQ ID NO: 28312 - protein, 9 aa, Homo sapiens
  Table A; Target 28312; HLA-A*11:01; GPRC6A; ENSG00000173612; CTA
SVSKTLPRK

SEQ ID NO: 28313 - protein, 10 aa, Homo sapiens
  Table A; Target 28313; HLA-B*56:01; GPRC6A; ENSG00000173612; CTA
SVSSIALSPA

SEQ ID NO: 28314 - protein, 9 aa, Homo sapiens
  Table A; Target 28314; HLA-A*24:02; GPRC6A; ENSG00000173612; CTA
SYMPRVKAV

SEQ ID NO: 28315 - protein, 9 aa, Homo sapiens
  Table A; Target 28315; HLA-B*37:01; GPRC6A; ENSG00000173612; CTA
SYMPRVKAV

SEQ ID NO: 28316 - protein, 9 aa, Homo sapiens
  Table A; Target 28316; HLA-C*16:02; GPRC6A; ENSG00000173612; CTA
SYMPRVKAV

SEQ ID NO: 28317 - protein, 10 aa, Homo sapiens
  Table A; Target 28317; HLA-A*23:01; GPRC6A; ENSG00000173612; CTA
SYMPRVKAVI

SEQ ID NO: 28318 - protein, 10 aa, Homo sapiens
  Table A; Target 28318; HLA-A*24:02; GPRC6A; ENSG00000173612; CTA
SYMPRVKAVI

SEQ ID NO: 28319 - protein, 8 aa, Homo sapiens
  Table A; Target 28319; HLA-B*51:01; GPRC6A; ENSG00000173612; CTA
TATKITTI

SEQ ID NO: 28320 - protein, 8 aa, Homo sapiens
  Table A; Target 28320; HLA-B*58:01; GPRC6A; ENSG00000173612; CTA
TATKITTI

SEQ ID NO: 28321 - protein, 8 aa, Homo sapiens
  Table A; Target 28321; HLA-C*16:02; GPRC6A; ENSG00000173612; CTA
TATKITTI

SEQ ID NO: 28322 - protein, 8 aa, Homo sapiens
  Table A; Target 28322; HLA-B*08:01; GPRC6A; ENSG00000173612; CTA
TCKTRQTM

SEQ ID NO: 28323 - protein, 9 aa, Homo sapiens
  Table A; Target 28323; HLA-B*08:01; GPRC6A; ENSG00000173612; CTA
TCKTRQTMF

SEQ ID NO: 28324 - protein, 9 aa, Homo sapiens
  Table A; Target 28324; HLA-A*30:01; GPRC6A; ENSG00000173612; CTA
TCTEVTVAM

SEQ ID NO: 28325 - protein, 9 aa, Homo sapiens
  Table A; Target 28325; HLA-B*18:01; GPRC6A; ENSG00000173612; CTA
TCTEVTVAM

SEQ ID NO: 28326 - protein, 9 aa, Homo sapiens
  Table A; Target 28326; HLA-B*35:01; GPRC6A; ENSG00000173612; CTA
TCTEVTVAM

SEQ ID NO: 28327 - protein, 9 aa, Homo sapiens
  Table A; Target 28327; HLA-B*35:03; GPRC6A; ENSG00000173612; CTA
TCTEVTVAM

SEQ ID NO: 28328 - protein, 9 aa, Homo sapiens
  Table A; Target 28328; HLA-B*39:01; GPRC6A; ENSG00000173612; CTA
TCTEVTVAM

SEQ ID NO: 28329 - protein, 9 aa, Homo sapiens
  Table A; Target 28329; HLA-B*40:01; GPRC6A; ENSG00000173612; CTA
TCTEVTVAM

SEQ ID NO: 28330 - protein, 9 aa, Homo sapiens
  Table A; Target 28330; HLA-B*46:01; GPRC6A; ENSG00000173612; CTA
TCTEVTVAM

SEQ ID NO: 28331 - protein, 9 aa, Homo sapiens
  Table A; Target 28331; HLA-B*55:01; GPRC6A; ENSG00000173612; CTA
TCTEVTVAM

SEQ ID NO: 28332 - protein, 9 aa, Homo sapiens
  Table A; Target 28332; HLA-C*01:02; GPRC6A; ENSG00000173612; CTA
TCTEVTVAM

SEQ ID NO: 28333 - protein, 9 aa, Homo sapiens
  Table A; Target 28333; HLA-C*02:02; GPRC6A; ENSG00000173612; CTA
TCTEVTVAM

SEQ ID NO: 28334 - protein, 9 aa, Homo sapiens
  Table A; Target 28334; HLA-C*03:03; GPRC6A; ENSG00000173612; CTA
TCTEVTVAM

SEQ ID NO: 28335 - protein, 9 aa, Homo sapiens
  Table A; Target 28335; HLA-C*03:04; GPRC6A; ENSG00000173612; CTA
TCTEVTVAM

SEQ ID NO: 28336 - protein, 9 aa, Homo sapiens
  Table A; Target 28336; HLA-C*04:01; GPRC6A; ENSG00000173612; CTA
TCTEVTVAM

SEQ ID NO: 28337 - protein, 9 aa, Homo sapiens
  Table A; Target 28337; HLA-C*05:01; GPRC6A; ENSG00000173612; CTA
TCTEVTVAM

SEQ ID NO: 28338 - protein, 9 aa, Homo sapiens
  Table A; Target 28338; HLA-C*07:06; GPRC6A; ENSG00000173612; CTA
TCTEVTVAM

SEQ ID NO: 28339 - protein, 9 aa, Homo sapiens
  Table A; Target 28339; HLA-C*12:03; GPRC6A; ENSG00000173612; CTA
TCTEVTVAM

SEQ ID NO: 28340 - protein, 9 aa, Homo sapiens
  Table A; Target 28340; HLA-C*14:02; GPRC6A; ENSG00000173612; CTA
TCTEVTVAM

SEQ ID NO: 28341 - protein, 9 aa, Homo sapiens
  Table A; Target 28341; HLA-C*16:01; GPRC6A; ENSG00000173612; CTA
TCTEVTVAM

SEQ ID NO: 28342 - protein, 9 aa, Homo sapiens
  Table A; Target 28342; HLA-C*16:02; GPRC6A; ENSG00000173612; CTA
TCTEVTVAM

SEQ ID NO: 28343 - protein, 9 aa, Homo sapiens
  Table A; Target 28343; HLA-C*16:04; GPRC6A; ENSG00000173612; CTA
TCTEVTVAM

SEQ ID NO: 28344 - protein, 9 aa, Homo sapiens
  Table A; Target 28344; HLA-B*38:01; GPRC6A; ENSG00000173612; CTA
TCTGIQVVI

SEQ ID NO: 28345 - protein, 9 aa, Homo sapiens
  Table A; Target 28345; HLA-B*39:01; GPRC6A; ENSG00000173612; CTA
TCTGIQVVI

SEQ ID NO: 28346 - protein, 8 aa, Homo sapiens
  Table A; Target 28346; HLA-C*05:01; GPRC6A; ENSG00000173612; CTA
TDDDYGRL

SEQ ID NO: 28347 - protein, 8 aa, Homo sapiens
  Table A; Target 28347; HLA-B*37:01; GPRC6A; ENSG00000173612; CTA
TDMPHCLL

SEQ ID NO: 28348 - protein, 8 aa, Homo sapiens
  Table A; Target 28348; HLA-A*30:01; GPRC6A; ENSG00000173612; CTA
TEVTVAMA

SEQ ID NO: 28349 - protein, 8 aa, Homo sapiens
  Table A; Target 28349; HLA-B*18:01; GPRC6A; ENSG00000173612; CTA
TEVTVAMA

SEQ ID NO: 28350 - protein, 8 aa, Homo sapiens
  Table A; Target 28350; HLA-B*49:01; GPRC6A; ENSG00000173612; CTA
TEVTVAMA

SEQ ID NO: 28351 - protein, 9 aa, Homo sapiens
  Table A; Target 28351; HLA-A*30:01; GPRC6A; ENSG00000173612; CTA
TEVTVAMAA

SEQ ID NO: 28352 - protein, 9 aa, Homo sapiens
  Table A; Target 28352; HLA-B*18:01; GPRC6A; ENSG00000173612; CTA
TEVTVAMAA

SEQ ID NO: 28353 - protein, 9 aa, Homo sapiens
  Table A; Target 28353; HLA-B*40:02; GPRC6A; ENSG00000173612; CTA
TEVTVAMAA

SEQ ID NO: 28354 - protein, 9 aa, Homo sapiens
  Table A; Target 28354; HLA-B*49:01; GPRC6A; ENSG00000173612; CTA
TEVTVAMAA

SEQ ID NO: 28355 - protein, 11 aa, Homo sapiens
  Table A; Target 28355; HLA-A*30:01; GPRC6A; ENSG00000173612; CTA
TEVTVAMAATL

SEQ ID NO: 28356 - protein, 11 aa, Homo sapiens
  Table A; Target 28356; HLA-B*40:01; GPRC6A; ENSG00000173612; CTA
TEVTVAMAATL

SEQ ID NO: 28357 - protein, 10 aa, Homo sapiens
  Table A; Target 28357; HLA-A*23:01; GPRC6A; ENSG00000173612; CTA
TFIPIYATTF

SEQ ID NO: 28358 - protein, 10 aa, Homo sapiens
  Table A; Target 28358; HLA-A*24:02; GPRC6A; ENSG00000173612; CTA
TFIPIYATTF

SEQ ID NO: 28359 - protein, 10 aa, Homo sapiens
  Table A; Target 28359; HLA-A*29:02; GPRC6A; ENSG00000173612; CTA
TFIPIYATTF

SEQ ID NO: 28360 - protein, 10 aa, Homo sapiens
  Table A; Target 28360; HLA-C*14:02; GPRC6A; ENSG00000173612; CTA
TFIPIYATTF

SEQ ID NO: 28361 - protein, 9 aa, Homo sapiens
  Table A; Target 28361; HLA-A*23:01; GPRC6A; ENSG00000173612; CTA
TFIPKCYVI

SEQ ID NO: 28362 - protein, 9 aa, Homo sapiens
  Table A; Target 28362; HLA-A*23:01; GPRC6A; ENSG00000173612; CTA
TFTDGWNSF

SEQ ID NO: 28363 - protein, 9 aa, Homo sapiens
  Table A; Target 28363; HLA-A*24:02; GPRC6A; ENSG00000173612; CTA
TFTDGWNSF

SEQ ID NO: 28364 - protein, 9 aa, Homo sapiens
  Table A; Target 28364; HLA-C*14:02; GPRC6A; ENSG00000173612; CTA
TFTDGWNSF

SEQ ID NO: 28365 - protein, 9 aa, Homo sapiens
  Table A; Target 28365; HLA-A*02:03; GPRC6A; ENSG00000173612; CTA
TLKKIILEA

SEQ ID NO: 28366 - protein, 9 aa, Homo sapiens
  Table A; Target 28366; HLA-B*08:01; GPRC6A; ENSG00000173612; CTA
TLKKIILEA

SEQ ID NO: 28367 - protein, 10 aa, Homo sapiens
  Table A; Target 28367; HLA-A*03:01; GPRC6A; ENSG00000173612; CTA
TLLPGVKLGY

SEQ ID NO: 28368 - protein, 10 aa, Homo sapiens
  Table A; Target 28368; HLA-A*29:02; GPRC6A; ENSG00000173612; CTA
TLLPGVKLGY

SEQ ID NO: 28369 - protein, 10 aa, Homo sapiens
  Table A; Target 28369; HLA-A*30:02; GPRC6A; ENSG00000173612; CTA
TLLPGVKLGY

SEQ ID NO: 28370 - protein, 10 aa, Homo sapiens
  Table A; Target 28370; HLA-A*32:01; GPRC6A; ENSG00000173612; CTA
TLLPGVKLGY

SEQ ID NO: 28371 - protein, 10 aa, Homo sapiens
  Table A; Target 28371; HLA-B*15:01; GPRC6A; ENSG00000173612; CTA
TLLPGVKLGY

SEQ ID NO: 28372 - protein, 9 aa, Homo sapiens
  Table A; Target 28372; HLA-A*02:01; GPRC6A; ENSG00000173612; CTA
TMFGVSFTL

SEQ ID NO: 28373 - protein, 9 aa, Homo sapiens
  Table A; Target 28373; HLA-A*02:03; GPRC6A; ENSG00000173612; CTA
TMFGVSFTL

SEQ ID NO: 28374 - protein, 9 aa, Homo sapiens
  Table A; Target 28374; HLA-A*02:04; GPRC6A; ENSG00000173612; CTA
TMFGVSFTL

SEQ ID NO: 28375 - protein, 9 aa, Homo sapiens
  Table A; Target 28375; HLA-A*02:07; GPRC6A; ENSG00000173612; CTA
TMFGVSFTL

SEQ ID NO: 28376 - protein, 9 aa, Homo sapiens
  Table A; Target 28376; HLA-A*23:01; GPRC6A; ENSG00000173612; CTA
TMFGVSFTL

SEQ ID NO: 28377 - protein, 9 aa, Homo sapiens
  Table A; Target 28377; HLA-B*13:02; GPRC6A; ENSG00000173612; CTA
TMFGVSFTL

SEQ ID NO: 28378 - protein, 9 aa, Homo sapiens
  Table A; Target 28378; HLA-B*35:03; GPRC6A; ENSG00000173612; CTA
TMFGVSFTL

SEQ ID NO: 28379 - protein, 9 aa, Homo sapiens
  Table A; Target 28379; HLA-C*02:02; GPRC6A; ENSG00000173612; CTA
TMFGVSFTL

SEQ ID NO: 28380 - protein, 9 aa, Homo sapiens
  Table A; Target 28380; HLA-A*02:01; GPRC6A; ENSG00000173612; CTA
TMLGYIAIL

SEQ ID NO: 28381 - protein, 9 aa, Homo sapiens
  Table A; Target 28381; HLA-A*02:04; GPRC6A; ENSG00000173612; CTA
TMLGYIAIL

SEQ ID NO: 28382 - protein, 8 aa, Homo sapiens
  Table A; Target 28382; HLA-B*56:01; GPRC6A; ENSG00000173612; CTA
TPDDFVAA

SEQ ID NO: 28383 - protein, 10 aa, Homo sapiens
  Table A; Target 28383; HLA-B*07:02; GPRC6A; ENSG00000173612; CTA
TPVVKSSGGL

SEQ ID NO: 28384 - protein, 10 aa, Homo sapiens
  Table A; Target 28384; HLA-B*27:05; GPRC6A; ENSG00000173612; CTA
TRNLNTPVVK

SEQ ID NO: 28385 - protein, 9 aa, Homo sapiens
  Table A; Target 28385; HLA-A*31:01; GPRC6A; ENSG00000173612; CTA
TSVSKTLPR

SEQ ID NO: 28386 - protein, 9 aa, Homo sapiens
  Table A; Target 28386; HLA-A*33:01; GPRC6A; ENSG00000173612; CTA
TSVSKTLPR

SEQ ID NO: 28387 - protein, 9 aa, Homo sapiens
  Table A; Target 28387; HLA-A*33:03; GPRC6A; ENSG00000173612; CTA
TSVSKTLPR

SEQ ID NO: 28388 - protein, 9 aa, Homo sapiens
  Table A; Target 28388; HLA-A*68:01; GPRC6A; ENSG00000173612; CTA
TSVSKTLPR

SEQ ID NO: 28389 - protein, 9 aa, Homo sapiens
  Table A; Target 28389; HLA-C*07:06; GPRC6A; ENSG00000173612; CTA
TSVSKTLPR

SEQ ID NO: 28390 - protein, 9 aa, Homo sapiens
  Table A; Target 28390; HLA-C*05:01; GPRC6A; ENSG00000173612; CTA
TTDDDYGRL

SEQ ID NO: 28391 - protein, 11 aa, Homo sapiens
  Table A; Target 28391; HLA-B*38:01; GPRC6A; ENSG00000173612; CTA
TTDDDYGRLAL

SEQ ID NO: 28392 - protein, 11 aa, Homo sapiens
  Table A; Target 28392; HLA-C*05:01; GPRC6A; ENSG00000173612; CTA
TTDDDYGRLAL

SEQ ID NO: 28393 - protein, 9 aa, Homo sapiens
  Table A; Target 28393; HLA-B*54:01; GPRC6A; ENSG00000173612; CTA
TTFGKYVPA

SEQ ID NO: 28394 - protein, 10 aa, Homo sapiens
  Table A; Target 28394; HLA-A*02:03; GPRC6A; ENSG00000173612; CTA
TTFGKYVPAV

SEQ ID NO: 28395 - protein, 10 aa, Homo sapiens
  Table A; Target 28395; HLA-A*68:02; GPRC6A; ENSG00000173612; CTA
TTFGKYVPAV

SEQ ID NO: 28396 - protein, 8 aa, Homo sapiens
  Table A; Target 28396; HLA-A*11:01; GPRC6A; ENSG00000173612; CTA
TTIPNVKK

SEQ ID NO: 28397 - protein, 9 aa, Homo sapiens
  Table A; Target 28397; HLA-A*02:03; GPRC6A; ENSG00000173612; CTA
TTIPNVKKI

SEQ ID NO: 28398 - protein, 9 aa, Homo sapiens
  Table A; Target 28398; HLA-A*25:01; GPRC6A; ENSG00000173612; CTA
TTIPNVKKI

SEQ ID NO: 28399 - protein, 9 aa, Homo sapiens
  Table A; Target 28399; HLA-A*68:02; GPRC6A; ENSG00000173612; CTA
TTIPNVKKI

SEQ ID NO: 28400 - protein, 9 aa, Homo sapiens
  Table A; Target 28400; HLA-C*16:02; GPRC6A; ENSG00000173612; CTA
TTIPNVKKI

SEQ ID NO: 28401 - protein, 11 aa, Homo sapiens
  Table A; Target 28401; HLA-A*11:01; GPRC6A; ENSG00000173612; CTA
TTIPNVKKIGK

SEQ ID NO: 28402 - protein, 8 aa, Homo sapiens
  Table A; Target 28402; HLA-B*35:03; GPRC6A; ENSG00000173612; CTA
TVAMAATL

SEQ ID NO: 28403 - protein, 8 aa, Homo sapiens
  Table A; Target 28403; HLA-C*03:03; GPRC6A; ENSG00000173612; CTA
TVAMAATL

SEQ ID NO: 28404 - protein, 8 aa, Homo sapiens
  Table A; Target 28404; HLA-C*03:04; GPRC6A; ENSG00000173612; CTA
TVAMAATL

SEQ ID NO: 28405 - protein, 9 aa, Homo sapiens
  Table A; Target 28405; HLA-A*33:03; GPRC6A; ENSG00000173612; CTA
TVAMAATLR

SEQ ID NO: 28406 - protein, 9 aa, Homo sapiens
  Table A; Target 28406; HLA-A*68:01; GPRC6A; ENSG00000173612; CTA
TVAMAATLR

SEQ ID NO: 28407 - protein, 9 aa, Homo sapiens
  Table A; Target 28407; HLA-C*07:06; GPRC6A; ENSG00000173612; CTA
TVAMAATLR

SEQ ID NO: 28408 - protein, 10 aa, Homo sapiens
  Table A; Target 28408; HLA-A*25:01; GPRC6A; ENSG00000173612; CTA
TVAMAATLRF

SEQ ID NO: 28409 - protein, 10 aa, Homo sapiens
  Table A; Target 28409; HLA-C*07:06; GPRC6A; ENSG00000173612; CTA
TVEVNVSLPR

SEQ ID NO: 28410 - protein, 9 aa, Homo sapiens
  Table A; Target 28410; HLA-A*02:07; GPRC6A; ENSG00000173612; CTA
TVPSDFHQI

SEQ ID NO: 28411 - protein, 9 aa, Homo sapiens
  Table A; Target 28411; HLA-A*24:02; GPRC6A; ENSG00000173612; CTA
TVPSDFHQI

SEQ ID NO: 28412 - protein, 9 aa, Homo sapiens
  Table A; Target 28412; HLA-A*25:01; GPRC6A; ENSG00000173612; CTA
TVPSDFHQI

SEQ ID NO: 28413 - protein, 9 aa, Homo sapiens
  Table A; Target 28413; HLA-A*26:01; GPRC6A; ENSG00000173612; CTA
TVPSDFHQI

SEQ ID NO: 28414 - protein, 9 aa, Homo sapiens
  Table A; Target 28414; HLA-A*68:02; GPRC6A; ENSG00000173612; CTA
TVPSDFHQI

SEQ ID NO: 28415 - protein, 8 aa, Homo sapiens
  Table A; Target 28415; HLA-A*26:01; GPRC6A; ENSG00000173612; CTA
TVTKMAEY

SEQ ID NO: 28416 - protein, 8 aa, Homo sapiens
  Table A; Target 28416; HLA-A*30:02; GPRC6A; ENSG00000173612; CTA
TVTKMAEY

SEQ ID NO: 28417 - protein, 8 aa, Homo sapiens
  Table A; Target 28417; HLA-B*15:01; GPRC6A; ENSG00000173612; CTA
TVTKMAEY

SEQ ID NO: 28418 - protein, 8 aa, Homo sapiens
  Table A; Target 28418; HLA-B*15:03; GPRC6A; ENSG00000173612; CTA
TVTKMAEY

SEQ ID NO: 28419 - protein, 8 aa, Homo sapiens
  Table A; Target 28419; HLA-B*18:01; GPRC6A; ENSG00000173612; CTA
TVTKMAEY

SEQ ID NO: 28420 - protein, 8 aa, Homo sapiens
  Table A; Target 28420; HLA-B*46:01; GPRC6A; ENSG00000173612; CTA
TVTKMAEY

SEQ ID NO: 28421 - protein, 10 aa, Homo sapiens
  Table A; Target 28421; HLA-C*03:04; GPRC6A; ENSG00000173612; CTA
VAATSPGHII

SEQ ID NO: 28422 - protein, 8 aa, Homo sapiens
  Table A; Target 28422; HLA-C*07:06; GPRC6A; ENSG00000173612; CTA
VAMAATLR

SEQ ID NO: 28423 - protein, 9 aa, Homo sapiens
  Table A; Target 28423; HLA-A*23:01; GPRC6A; ENSG00000173612; CTA
VAMAATLRF

SEQ ID NO: 28424 - protein, 9 aa, Homo sapiens
  Table A; Target 28424; HLA-A*24:02; GPRC6A; ENSG00000173612; CTA
VAMAATLRF

SEQ ID NO: 28425 - protein, 9 aa, Homo sapiens
  Table A; Target 28425; HLA-B*46:01; GPRC6A; ENSG00000173612; CTA
VAMAATLRF

SEQ ID NO: 28426 - protein, 9 aa, Homo sapiens
  Table A; Target 28426; HLA-B*58:01; GPRC6A; ENSG00000173612; CTA
VAMAATLRF

SEQ ID NO: 28427 - protein, 9 aa, Homo sapiens
  Table A; Target 28427; HLA-C*02:02; GPRC6A; ENSG00000173612; CTA
VAMAATLRF

SEQ ID NO: 28428 - protein, 10 aa, Homo sapiens
  Table A; Target 28428; HLA-B*18:01; GPRC6A; ENSG00000173612; CTA
VEFKCDYSSY

SEQ ID NO: 28429 - protein, 8 aa, Homo sapiens
  Table A; Target 28429; HLA-B*18:01; GPRC6A; ENSG00000173612; CTA
VEIIVILI

SEQ ID NO: 28430 - protein, 8 aa, Homo sapiens
  Table A; Target 28430; HLA-B*49:01; GPRC6A; ENSG00000173612; CTA
VEIIVILI

SEQ ID NO: 28431 - protein, 8 aa, Homo sapiens
  Table A; Target 28431; HLA-B*49:01; GPRC6A; ENSG00000173612; CTA
VEVNVSLP

SEQ ID NO: 28432 - protein, 10 aa, Homo sapiens
  Table A; Target 28432; HLA-B*49:01; GPRC6A; ENSG00000173612; CTA
VEVNVSLPRV

SEQ ID NO: 28433 - protein, 11 aa, Homo sapiens
  Table A; Target 28433; HLA-B*49:01; GPRC6A; ENSG00000173612; CTA
VEVNVSLPRVI

SEQ ID NO: 28434 - protein, 10 aa, Homo sapiens
  Table A; Target 28434; HLA-B*40:01; GPRC6A; ENSG00000173612; CTA
VEYLNWNDSL

SEQ ID NO: 28435 - protein, 10 aa, Homo sapiens
  Table A; Target 28435; HLA-B*49:01; GPRC6A; ENSG00000173612; CTA
VEYLNWNDSL

SEQ ID NO: 28436 - protein, 8 aa, Homo sapiens
  Table A; Target 28436; HLA-A*23:01; GPRC6A; ENSG00000173612; CTA
VFALGYAI

SEQ ID NO: 28437 - protein, 8 aa, Homo sapiens
  Table A; Target 28437; HLA-C*14:02; GPRC6A; ENSG00000173612; CTA
VFALGYAI

SEQ ID NO: 28438 - protein, 10 aa, Homo sapiens
  Table A; Target 28438; HLA-B*27:02; GPRC6A; ENSG00000173612; CTA
VFIIPDQETK

SEQ ID NO: 28439 - protein, 8 aa, Homo sapiens
  Table A; Target 28439; HLA-C*14:02; GPRC6A; ENSG00000173612; CTA
VFLQTLAM

SEQ ID NO: 28440 - protein, 9 aa, Homo sapiens
  Table A; Target 28440; HLA-A*23:01; GPRC6A; ENSG00000173612; CTA
VFLQTLAMI

SEQ ID NO: 28441 - protein, 9 aa, Homo sapiens
  Table A; Target 28441; HLA-A*23:01; GPRC6A; ENSG00000173612; CTA
VFLRQFHVF

SEQ ID NO: 28442 - protein, 9 aa, Homo sapiens
  Table A; Target 28442; HLA-A*24:02; GPRC6A; ENSG00000173612; CTA
VFLRQFHVF

SEQ ID NO: 28443 - protein, 8 aa, Homo sapiens
  Table A; Target 28443; HLA-B*18:01; GPRC6A; ENSG00000173612; CTA
VGFEISVF

SEQ ID NO: 28444 - protein, 8 aa, Homo sapiens
  Table A; Target 28444; HLA-B*46:01; GPRC6A; ENSG00000173612; CTA
VGFEISVF

SEQ ID NO: 28445 - protein, 8 aa, Homo sapiens
  Table A; Target 28445; HLA-C*12:03; GPRC6A; ENSG00000173612; CTA
VGFEISVF

SEQ ID NO: 28446 - protein, 9 aa, Homo sapiens
  Table A; Target 28446; HLA-B*46:01; GPRC6A; ENSG00000173612; CTA
VGYESTAEI

SEQ ID NO: 28447 - protein, 9 aa, Homo sapiens
  Table A; Target 28447; HLA-B*49:01; GPRC6A; ENSG00000173612; CTA
VGYESTAEI

SEQ ID NO: 28448 - protein, 9 aa, Homo sapiens
  Table A; Target 28448; HLA-B*51:01; GPRC6A; ENSG00000173612; CTA
VGYESTAEI

SEQ ID NO: 28449 - protein, 9 aa, Homo sapiens
  Table A; Target 28449; HLA-C*03:03; GPRC6A; ENSG00000173612; CTA
VGYESTAEI

SEQ ID NO: 28450 - protein, 9 aa, Homo sapiens
  Table A; Target 28450; HLA-C*03:04; GPRC6A; ENSG00000173612; CTA
VGYESTAEI

SEQ ID NO: 28451 - protein, 9 aa, Homo sapiens
  Table A; Target 28451; HLA-C*14:02; GPRC6A; ENSG00000173612; CTA
VGYESTAEI

SEQ ID NO: 28452 - protein, 9 aa, Homo sapiens
  Table A; Target 28452; HLA-C*01:02; GPRC6A; ENSG00000173612; CTA
VIGSGYSEI

SEQ ID NO: 28453 - protein, 9 aa, Homo sapiens
  Table A; Target 28453; HLA-B*15:01; GPRC6A; ENSG00000173612; CTA
VKAVIGSGY

SEQ ID NO: 28454 - protein, 9 aa, Homo sapiens
  Table A; Target 28454; HLA-B*15:03; GPRC6A; ENSG00000173612; CTA
VKAVIGSGY

SEQ ID NO: 28455 - protein, 9 aa, Homo sapiens
  Table A; Target 28455; HLA-B*35:01; GPRC6A; ENSG00000173612; CTA
VPAVEIIVI

SEQ ID NO: 28456 - protein, 9 aa, Homo sapiens
  Table A; Target 28456; HLA-B*35:03; GPRC6A; ENSG00000173612; CTA
VPAVEIIVI

SEQ ID NO: 28457 - protein, 9 aa, Homo sapiens
  Table A; Target 28457; HLA-B*51:01; GPRC6A; ENSG00000173612; CTA
VPAVEIIVI

SEQ ID NO: 28458 - protein, 9 aa, Homo sapiens
  Table A; Target 28458; HLA-B*56:01; GPRC6A; ENSG00000173612; CTA
VPAVEIIVI

SEQ ID NO: 28459 - protein, 8 aa, Homo sapiens
  Table A; Target 28459; HLA-B*51:01; GPRC6A; ENSG00000173612; CTA
VPSDFHQI

SEQ ID NO: 28460 - protein, 10 aa, Homo sapiens
  Table A; Target 28460; HLA-B*54:01; GPRC6A; ENSG00000173612; CTA
VPSDFHQIKA

SEQ ID NO: 28461 - protein, 10 aa, Homo sapiens
  Table A; Target 28461; HLA-B*55:01; GPRC6A; ENSG00000173612; CTA
VPSDFHQIKA

SEQ ID NO: 28462 - protein, 10 aa, Homo sapiens
  Table A; Target 28462; HLA-B*56:01; GPRC6A; ENSG00000173612; CTA
VPSDFHQIKA

SEQ ID NO: 28463 - protein, 9 aa, Homo sapiens
  Table A; Target 28463; HLA-A*02:04; GPRC6A; ENSG00000173612; CTA
VSLPRVIIL

SEQ ID NO: 28464 - protein, 9 aa, Homo sapiens
  Table A; Target 28464; HLA-C*12:03; GPRC6A; ENSG00000173612; CTA
VSLPRVIIL

SEQ ID NO: 28465 - protein, 9 aa, Homo sapiens
  Table A; Target 28465; HLA-C*16:01; GPRC6A; ENSG00000173612; CTA
VSLPRVIIL

SEQ ID NO: 28466 - protein, 10 aa, Homo sapiens
  Table A; Target 28466; HLA-B*57:01; GPRC6A; ENSG00000173612; CTA
VTFTDGWNSF

SEQ ID NO: 28467 - protein, 11 aa, Homo sapiens
  Table A; Target 28467; HLA-A*03:01; GPRC6A; ENSG00000173612; CTA
VTMTNPSSSGK

SEQ ID NO: 28468 - protein, 11 aa, Homo sapiens
  Table A; Target 28468; HLA-A*03:02; GPRC6A; ENSG00000173612; CTA
VTMTNPSSSGK

SEQ ID NO: 28469 - protein, 11 aa, Homo sapiens
  Table A; Target 28469; HLA-A*11:01; GPRC6A; ENSG00000173612; CTA
VTMTNPSSSGK

SEQ ID NO: 28470 - protein, 11 aa, Homo sapiens
  Table A; Target 28470; HLA-B*27:02; GPRC6A; ENSG00000173612; CTA
VTMTNPSSSGK

SEQ ID NO: 28471 - protein, 9 aa, Homo sapiens
  Table A; Target 28471; HLA-A*23:01; GPRC6A; ENSG00000173612; CTA
VTVAMAATL

SEQ ID NO: 28472 - protein, 9 aa, Homo sapiens
  Table A; Target 28472; HLA-B*40:01; GPRC6A; ENSG00000173612; CTA
VTVAMAATL

SEQ ID NO: 28473 - protein, 9 aa, Homo sapiens
  Table A; Target 28473; HLA-B*46:01; GPRC6A; ENSG00000173612; CTA
VTVAMAATL

SEQ ID NO: 28474 - protein, 9 aa, Homo sapiens
  Table A; Target 28474; HLA-B*58:01; GPRC6A; ENSG00000173612; CTA
VTVAMAATL

SEQ ID NO: 28475 - protein, 9 aa, Homo sapiens
  Table A; Target 28475; HLA-C*02:02; GPRC6A; ENSG00000173612; CTA
VTVAMAATL

SEQ ID NO: 28476 - protein, 9 aa, Homo sapiens
  Table A; Target 28476; HLA-C*03:03; GPRC6A; ENSG00000173612; CTA
VTVAMAATL

SEQ ID NO: 28477 - protein, 9 aa, Homo sapiens
  Table A; Target 28477; HLA-C*03:04; GPRC6A; ENSG00000173612; CTA
VTVAMAATL

SEQ ID NO: 28478 - protein, 8 aa, Homo sapiens
  Table A; Target 28478; HLA-A*31:01; GPRC6A; ENSG00000173612; CTA
VVGIIFTR

SEQ ID NO: 28479 - protein, 9 aa, Homo sapiens
  Table A; Target 28479; HLA-A*31:01; GPRC6A; ENSG00000173612; CTA
VVKSSGGLR

SEQ ID NO: 28480 - protein, 9 aa, Homo sapiens
  Table A; Target 28480; HLA-A*33:01; GPRC6A; ENSG00000173612; CTA
VVKSSGGLR

SEQ ID NO: 28481 - protein, 9 aa, Homo sapiens
  Table A; Target 28481; HLA-A*33:03; GPRC6A; ENSG00000173612; CTA
VVKSSGGLR

SEQ ID NO: 28482 - protein, 8 aa, Homo sapiens
  Table A; Target 28482; HLA-B*08:01; GPRC6A; ENSG00000173612; CTA
WAPVRSTM

SEQ ID NO: 28483 - protein, 10 aa, Homo sapiens
  Table A; Target 28483; HLA-A*01:01; GPRC6A; ENSG00000173612; CTA
YAEPGLIHSI

SEQ ID NO: 28484 - protein, 10 aa, Homo sapiens
  Table A; Target 28484; HLA-A*25:01; GPRC6A; ENSG00000173612; CTA
YAEPGLIHSI

SEQ ID NO: 28485 - protein, 10 aa, Homo sapiens
  Table A; Target 28485; HLA-B*35:03; GPRC6A; ENSG00000173612; CTA
YAEPGLIHSI

SEQ ID NO: 28486 - protein, 10 aa, Homo sapiens
  Table A; Target 28486; HLA-B*38:01; GPRC6A; ENSG00000173612; CTA
YAEPGLIHSI

SEQ ID NO: 28487 - protein, 10 aa, Homo sapiens
  Table A; Target 28487; HLA-B*49:01; GPRC6A; ENSG00000173612; CTA
YAEPGLIHSI

SEQ ID NO: 28488 - protein, 10 aa, Homo sapiens
  Table A; Target 28488; HLA-B*51:01; GPRC6A; ENSG00000173612; CTA
YAEPGLIHSI

SEQ ID NO: 28489 - protein, 10 aa, Homo sapiens
  Table A; Target 28489; HLA-B*54:01; GPRC6A; ENSG00000173612; CTA
YAEPGLIHSI

SEQ ID NO: 28490 - protein, 10 aa, Homo sapiens
  Table A; Target 28490; HLA-B*58:01; GPRC6A; ENSG00000173612; CTA
YAEPGLIHSI

SEQ ID NO: 28491 - protein, 10 aa, Homo sapiens
  Table A; Target 28491; HLA-C*02:02; GPRC6A; ENSG00000173612; CTA
YAEPGLIHSI

SEQ ID NO: 28492 - protein, 10 aa, Homo sapiens
  Table A; Target 28492; HLA-C*05:01; GPRC6A; ENSG00000173612; CTA
YAEPGLIHSI

SEQ ID NO: 28493 - protein, 10 aa, Homo sapiens
  Table A; Target 28493; HLA-C*12:03; GPRC6A; ENSG00000173612; CTA
YAEPGLIHSI

SEQ ID NO: 28494 - protein, 10 aa, Homo sapiens
  Table A; Target 28494; HLA-C*16:02; GPRC6A; ENSG00000173612; CTA
YAEPGLIHSI

SEQ ID NO: 28495 - protein, 10 aa, Homo sapiens
  Table A; Target 28495; HLA-C*16:04; GPRC6A; ENSG00000173612; CTA
YAEPGLIHSI

SEQ ID NO: 28496 - protein, 9 aa, Homo sapiens
  Table A; Target 28496; HLA-B*54:01; GPRC6A; ENSG00000173612; CTA
YAIRDLCQA

SEQ ID NO: 28497 - protein, 9 aa, Homo sapiens
  Table A; Target 28497; HLA-B*54:01; GPRC6A; ENSG00000173612; CTA
YAMHLSACA

SEQ ID NO: 28498 - protein, 9 aa, Homo sapiens
  Table A; Target 28498; HLA-C*02:02; GPRC6A; ENSG00000173612; CTA
YATTFGKYV

SEQ ID NO: 28499 - protein, 9 aa, Homo sapiens
  Table A; Target 28499; HLA-C*16:02; GPRC6A; ENSG00000173612; CTA
YATTFGKYV

SEQ ID NO: 28500 - protein, 9 aa, Homo sapiens
  Table A; Target 28500; HLA-C*16:02; GPRC6A; ENSG00000173612; CTA
YDTCTEVTV

SEQ ID NO: 28501 - protein, 10 aa, Homo sapiens
  Table A; Target 28501; HLA-B*49:01; GPRC6A; ENSG00000173612; CTA
YEIYDTCTEV

SEQ ID NO: 28502 - protein, 9 aa, Homo sapiens
  Table A; Target 28502; HLA-A*30:01; GPRC6A; ENSG00000173612; CTA
YENYNEAKF

SEQ ID NO: 28503 - protein, 9 aa, Homo sapiens
  Table A; Target 28503; HLA-B*18:01; GPRC6A; ENSG00000173612; CTA
YENYNEAKF

SEQ ID NO: 28504 - protein, 9 aa, Homo sapiens
  Table A; Target 28504; HLA-B*37:01; GPRC6A; ENSG00000173612; CTA
YENYNEAKF

SEQ ID NO: 28505 - protein, 9 aa, Homo sapiens
  Table A; Target 28505; HLA-B*40:01; GPRC6A; ENSG00000173612; CTA
YENYNEAKF

SEQ ID NO: 28506 - protein, 9 aa, Homo sapiens
  Table A; Target 28506; HLA-B*44:02; GPRC6A; ENSG00000173612; CTA
YENYNEAKF

SEQ ID NO: 28507 - protein, 9 aa, Homo sapiens
  Table A; Target 28507; HLA-B*44:03; GPRC6A; ENSG00000173612; CTA
YENYNEAKF

SEQ ID NO: 28508 - protein, 9 aa, Homo sapiens
  Table A; Target 28508; HLA-B*49:01; GPRC6A; ENSG00000173612; CTA
YENYNEAKF

SEQ ID NO: 28509 - protein, 9 aa, Homo sapiens
  Table A; Target 28509; HLA-C*16:04; GPRC6A; ENSG00000173612; CTA
YENYNEAKF

SEQ ID NO: 28510 - protein, 8 aa, Homo sapiens
  Table A; Target 28510; HLA-A*30:01; GPRC6A; ENSG00000173612; CTA
YESTAEIL

SEQ ID NO: 28511 - protein, 8 aa, Homo sapiens
  Table A; Target 28511; HLA-B*18:01; GPRC6A; ENSG00000173612; CTA
YESTAEIL

SEQ ID NO: 28512 - protein, 8 aa, Homo sapiens
  Table A; Target 28512; HLA-B*37:01; GPRC6A; ENSG00000173612; CTA
YESTAEIL

SEQ ID NO: 28513 - protein, 8 aa, Homo sapiens
  Table A; Target 28513; HLA-B*40:01; GPRC6A; ENSG00000173612; CTA
YESTAEIL

SEQ ID NO: 28514 - protein, 8 aa, Homo sapiens
  Table A; Target 28514; HLA-B*49:01; GPRC6A; ENSG00000173612; CTA
YESTAEIL

SEQ ID NO: 28515 - protein, 11 aa, Homo sapiens
  Table A; Target 28515; HLA-B*27:02; GPRC6A; ENSG00000173612; CTA
YESTAEILSDK

SEQ ID NO: 28516 - protein, 9 aa, Homo sapiens
  Table A; Target 28516; HLA-B*46:01; GPRC6A; ENSG00000173612; CTA
YGRLALNTF

SEQ ID NO: 28517 - protein, 9 aa, Homo sapiens
  Table A; Target 28517; HLA-A*02:07; GPRC6A; ENSG00000173612; CTA
YMPRVKAVI

SEQ ID NO: 28518 - protein, 9 aa, Homo sapiens
  Table A; Target 28518; HLA-A*24:02; GPRC6A; ENSG00000173612; CTA
YMPRVKAVI

SEQ ID NO: 28519 - protein, 9 aa, Homo sapiens
  Table A; Target 28519; HLA-A*25:01; GPRC6A; ENSG00000173612; CTA
YSSHSVSSI

SEQ ID NO: 28520 - protein, 9 aa, Homo sapiens
  Table A; Target 28520; HLA-B*58:01; GPRC6A; ENSG00000173612; CTA
YSSHSVSSI

SEQ ID NO: 28521 - protein, 9 aa, Homo sapiens
  Table A; Target 28521; HLA-C*03:03; GPRC6A; ENSG00000173612; CTA
YSSHSVSSI

SEQ ID NO: 28522 - protein, 9 aa, Homo sapiens
  Table A; Target 28522; HLA-C*03:04; GPRC6A; ENSG00000173612; CTA
YSSHSVSSI

SEQ ID NO: 28523 - protein, 9 aa, Homo sapiens
  Table A; Target 28523; HLA-C*16:02; GPRC6A; ENSG00000173612; CTA
YSSHSVSSI

SEQ ID NO: 28524 - protein, 8 aa, Homo sapiens
  Table A; Target 28524; HLA-B*13:02; GPRC6A; ENSG00000173612; CTA
YSSYMPRV

SEQ ID NO: 28525 - protein, 8 aa, Homo sapiens
  Table A; Target 28525; HLA-B*08:01; GPRC6A; ENSG00000173612; CTA
YSYSSHSV

SEQ ID NO: 28526 - protein, 8 aa, Homo sapiens
  Table A; Target 28526; HLA-B*13:02; GPRC6A; ENSG00000173612; CTA
YSYSSHSV

SEQ ID NO: 28527 - protein, 8 aa, Homo sapiens
  Table A; Target 28527; HLA-B*51:01; GPRC6A; ENSG00000173612; CTA
YSYSSHSV

SEQ ID NO: 28528 - protein, 8 aa, Homo sapiens
  Table A; Target 28528; HLA-B*54:01; GPRC6A; ENSG00000173612; CTA
YSYSSHSV

SEQ ID NO: 28529 - protein, 8 aa, Homo sapiens
  Table A; Target 28529; HLA-C*03:03; GPRC6A; ENSG00000173612; CTA
YSYSSHSV

SEQ ID NO: 28530 - protein, 8 aa, Homo sapiens
  Table A; Target 28530; HLA-C*03:04; GPRC6A; ENSG00000173612; CTA
YSYSSHSV

SEQ ID NO: 28531 - protein, 8 aa, Homo sapiens
  Table A; Target 28531; HLA-C*16:02; GPRC6A; ENSG00000173612; CTA
YSYSSHSV

SEQ ID NO: 28532 - protein, 8 aa, Homo sapiens
  Table A; Target 28532; HLA-C*16:04; GPRC6A; ENSG00000173612; CTA
YSYSSHSV

SEQ ID NO: 28533 - protein, 9 aa, Homo sapiens
  Table A; Target 28533; HLA-B*13:02; GPRC6A; ENSG00000173612; CTA
YVIICKQEI

SEQ ID NO: 28534 - protein, 9 aa, Homo sapiens
  Table A; Target 28534; HLA-A*26:01; GPRC6A; ENSG00000173612; CTA
YVKDTDLSQ

SEQ ID NO: 28535 - protein, 9 aa, Homo sapiens
  Table A; Target 28535; HLA-A*02:07; GPRC6A; ENSG00000173612; CTA
YVPAVEIIV

SEQ ID NO: 28536 - protein, 9 aa, Homo sapiens
  Table A; Target 28536; HLA-C*01:02; GSG1L2; ENSG00000214978; CTA
AAPCPAEQA

SEQ ID NO: 28537 - protein, 10 aa, Homo sapiens
  Table A; Target 28537; HLA-C*01:02; GSG1L2; ENSG00000214978; CTA
AAPCPAEQAF

SEQ ID NO: 28538 - protein, 9 aa, Homo sapiens
  Table A; Target 28538; HLA-A*03:01; GSG1L2; ENSG00000214978; CTA
AARLEFTEK

SEQ ID NO: 28539 - protein, 9 aa, Homo sapiens
  Table A; Target 28539; HLA-A*03:02; GSG1L2; ENSG00000214978; CTA
AARLEFTEK

SEQ ID NO: 28540 - protein, 9 aa, Homo sapiens
  Table A; Target 28540; HLA-A*11:01; GSG1L2; ENSG00000214978; CTA
AARLEFTEK

SEQ ID NO: 28541 - protein, 9 aa, Homo sapiens
  Table A; Target 28541; HLA-A*31:01; GSG1L2; ENSG00000214978; CTA
AARLEFTEK

SEQ ID NO: 28542 - protein, 9 aa, Homo sapiens
  Table A; Target 28542; HLA-A*33:01; GSG1L2; ENSG00000214978; CTA
AARLEFTEK

SEQ ID NO: 28543 - protein, 9 aa, Homo sapiens
  Table A; Target 28543; HLA-B*46:01; GSG1L2; ENSG00000214978; CTA
AARLEFTEK

SEQ ID NO: 28544 - protein, 9 aa, Homo sapiens
  Table A; Target 28544; HLA-B*56:01; GSG1L2; ENSG00000214978; CTA
AARLEFTEK

SEQ ID NO: 28545 - protein, 9 aa, Homo sapiens
  Table A; Target 28545; HLA-B*57:01; GSG1L2; ENSG00000214978; CTA
AARLEFTEK

SEQ ID NO: 28546 - protein, 9 aa, Homo sapiens
  Table A; Target 28546; HLA-C*07:06; GSG1L2; ENSG00000214978; CTA
AARLEFTEK

SEQ ID NO: 28547 - protein, 8 aa, Homo sapiens
  Table A; Target 28547; HLA-B*44:02; GSG1L2; ENSG00000214978; CTA
AEEQGVLW

SEQ ID NO: 28548 - protein, 8 aa, Homo sapiens
  Table A; Target 28548; HLA-B*44:03; GSG1L2; ENSG00000214978; CTA
AEEQGVLW

SEQ ID NO: 28549 - protein, 9 aa, Homo sapiens
  Table A; Target 28549; HLA-B*40:01; GSG1L2; ENSG00000214978; CTA
AEEQGVLWL

SEQ ID NO: 28550 - protein, 9 aa, Homo sapiens
  Table A; Target 28550; HLA-B*44:02; GSG1L2; ENSG00000214978; CTA
AEEQGVLWL

SEQ ID NO: 28551 - protein, 9 aa, Homo sapiens
  Table A; Target 28551; HLA-B*44:03; GSG1L2; ENSG00000214978; CTA
AEEQGVLWL

SEQ ID NO: 28552 - protein, 9 aa, Homo sapiens
  Table A; Target 28552; HLA-B*49:01; GSG1L2; ENSG00000214978; CTA
AEEQGVLWL

SEQ ID NO: 28553 - protein, 8 aa, Homo sapiens
  Table A; Target 28553; HLA-B*37:01; GSG1L2; ENSG00000214978; CTA
AEQAFRNV

SEQ ID NO: 28554 - protein, 8 aa, Homo sapiens
  Table A; Target 28554; HLA-B*49:01; GSG1L2; ENSG00000214978; CTA
AEQAFRNV

SEQ ID NO: 28555 - protein, 10 aa, Homo sapiens
  Table A; Target 28555; HLA-B*40:02; GSG1L2; ENSG00000214978; CTA
AEQAFRNVSG

SEQ ID NO: 28556 - protein, 9 aa, Homo sapiens
  Table A; Target 28556; HLA-C*01:02; GSG1L2; ENSG00000214978; CTA
AGLLGMVAH

SEQ ID NO: 28557 - protein, 9 aa, Homo sapiens
  Table A; Target 28557; HLA-A*02:04; GSG1L2; ENSG00000214978; CTA
AIFMVLAGL

SEQ ID NO: 28558 - protein, 11 aa, Homo sapiens
  Table A; Target 28558; HLA-A*31:01; GSG1L2; ENSG00000214978; CTA
AILLGSRVSCR

SEQ ID NO: 28559 - protein, 9 aa, Homo sapiens
  Table A; Target 28559; HLA-A*02:01; GSG1L2; ENSG00000214978; CTA
ALLLLPVCL

SEQ ID NO: 28560 - protein, 9 aa, Homo sapiens
  Table A; Target 28560; HLA-A*02:04; GSG1L2; ENSG00000214978; CTA
ALLLLPVCL

SEQ ID NO: 28561 - protein, 9 aa, Homo sapiens
  Table A; Target 28561; HLA-A*02:01; GSG1L2; ENSG00000214978; CTA
ALTFSLTAV

SEQ ID NO: 28562 - protein, 9 aa, Homo sapiens
  Table A; Target 28562; HLA-A*02:03; GSG1L2; ENSG00000214978; CTA
ALTFSLTAV

SEQ ID NO: 28563 - protein, 9 aa, Homo sapiens
  Table A; Target 28563; HLA-A*02:04; GSG1L2; ENSG00000214978; CTA
ALTFSLTAV

SEQ ID NO: 28564 - protein, 9 aa, Homo sapiens
  Table A; Target 28564; HLA-A*02:07; GSG1L2; ENSG00000214978; CTA
ALTFSLTAV

SEQ ID NO: 28565 - protein, 9 aa, Homo sapiens
  Table A; Target 28565; HLA-B*13:02; GSG1L2; ENSG00000214978; CTA
ALTFSLTAV

SEQ ID NO: 28566 - protein, 9 aa, Homo sapiens
  Table A; Target 28566; HLA-B*55:01; GSG1L2; ENSG00000214978; CTA
ALTFSLTAV

SEQ ID NO: 28567 - protein, 8 aa, Homo sapiens
  Table A; Target 28567; HLA-A*02:01; GSG1L2; ENSG00000214978; CTA
ALVAIFMV

SEQ ID NO: 28568 - protein, 8 aa, Homo sapiens
  Table A; Target 28568; HLA-A*02:04; GSG1L2; ENSG00000214978; CTA
ALVAIFMV

SEQ ID NO: 28569 - protein, 8 aa, Homo sapiens
  Table A; Target 28569; HLA-B*13:02; GSG1L2; ENSG00000214978; CTA
ALVAIFMV

SEQ ID NO: 28570 - protein, 9 aa, Homo sapiens
  Table A; Target 28570; HLA-A*02:01; GSG1L2; ENSG00000214978; CTA
ALVAIFMVL

SEQ ID NO: 28571 - protein, 9 aa, Homo sapiens
  Table A; Target 28571; HLA-A*02:03; GSG1L2; ENSG00000214978; CTA
ALVAIFMVL

SEQ ID NO: 28572 - protein, 9 aa, Homo sapiens
  Table A; Target 28572; HLA-A*02:04; GSG1L2; ENSG00000214978; CTA
ALVAIFMVL

SEQ ID NO: 28573 - protein, 9 aa, Homo sapiens
  Table A; Target 28573; HLA-A*02:07; GSG1L2; ENSG00000214978; CTA
ALVAIFMVL

SEQ ID NO: 28574 - protein, 9 aa, Homo sapiens
  Table A; Target 28574; HLA-A*03:01; GSG1L2; ENSG00000214978; CTA
ALVAIFMVL

SEQ ID NO: 28575 - protein, 9 aa, Homo sapiens
  Table A; Target 28575; HLA-A*23:01; GSG1L2; ENSG00000214978; CTA
ALVAIFMVL

SEQ ID NO: 28576 - protein, 9 aa, Homo sapiens
  Table A; Target 28576; HLA-A*24:02; GSG1L2; ENSG00000214978; CTA
ALVAIFMVL

SEQ ID NO: 28577 - protein, 9 aa, Homo sapiens
  Table A; Target 28577; HLA-C*02:02; GSG1L2; ENSG00000214978; CTA
ALVAIFMVL

SEQ ID NO: 28578 - protein, 8 aa, Homo sapiens
  Table A; Target 28578; HLA-B*56:01; GSG1L2; ENSG00000214978; CTA
AMSRFTAA

SEQ ID NO: 28579 - protein, 9 aa, Homo sapiens
  Table A; Target 28579; HLA-A*31:01; GSG1L2; ENSG00000214978; CTA
AMSRFTAAR

SEQ ID NO: 28580 - protein, 8 aa, Homo sapiens
  Table A; Target 28580; HLA-B*56:01; GSG1L2; ENSG00000214978; CTA
APCPAEQA

SEQ ID NO: 28581 - protein, 9 aa, Homo sapiens
  Table A; Target 28581; HLA-A*30:02; GSG1L2; ENSG00000214978; CTA
APCPAEQAF

SEQ ID NO: 28582 - protein, 9 aa, Homo sapiens
  Table A; Target 28582; HLA-A*32:01; GSG1L2; ENSG00000214978; CTA
APCPAEQAF

SEQ ID NO: 28583 - protein, 9 aa, Homo sapiens
  Table A; Target 28583; HLA-B*07:02; GSG1L2; ENSG00000214978; CTA
APCPAEQAF

SEQ ID NO: 28584 - protein, 9 aa, Homo sapiens
  Table A; Target 28584; HLA-B*08:01; GSG1L2; ENSG00000214978; CTA
APCPAEQAF

SEQ ID NO: 28585 - protein, 9 aa, Homo sapiens
  Table A; Target 28585; HLA-B*15:01; GSG1L2; ENSG00000214978; CTA
APCPAEQAF

SEQ ID NO: 28586 - protein, 9 aa, Homo sapiens
  Table A; Target 28586; HLA-B*15:03; GSG1L2; ENSG00000214978; CTA
APCPAEQAF

SEQ ID NO: 28587 - protein, 9 aa, Homo sapiens
  Table A; Target 28587; HLA-B*35:01; GSG1L2; ENSG00000214978; CTA
APCPAEQAF

SEQ ID NO: 28588 - protein, 9 aa, Homo sapiens
  Table A; Target 28588; HLA-B*35:03; GSG1L2; ENSG00000214978; CTA
APCPAEQAF

SEQ ID NO: 28589 - protein, 9 aa, Homo sapiens
  Table A; Target 28589; HLA-B*37:01; GSG1L2; ENSG00000214978; CTA
APCPAEQAF

SEQ ID NO: 28590 - protein, 9 aa, Homo sapiens
  Table A; Target 28590; HLA-B*38:01; GSG1L2; ENSG00000214978; CTA
APCPAEQAF

SEQ ID NO: 28591 - protein, 9 aa, Homo sapiens
  Table A; Target 28591; HLA-B*55:01; GSG1L2; ENSG00000214978; CTA
APCPAEQAF

SEQ ID NO: 28592 - protein, 9 aa, Homo sapiens
  Table A; Target 28592; HLA-B*56:01; GSG1L2; ENSG00000214978; CTA
APCPAEQAF

SEQ ID NO: 28593 - protein, 9 aa, Homo sapiens
  Table A; Target 28593; HLA-C*01:02; GSG1L2; ENSG00000214978; CTA
APCPAEQAF

SEQ ID NO: 28594 - protein, 9 aa, Homo sapiens
  Table A; Target 28594; HLA-C*03:03; GSG1L2; ENSG00000214978; CTA
APCPAEQAF

SEQ ID NO: 28595 - protein, 9 aa, Homo sapiens
  Table A; Target 28595; HLA-C*04:01; GSG1L2; ENSG00000214978; CTA
APCPAEQAF

SEQ ID NO: 28596 - protein, 9 aa, Homo sapiens
  Table A; Target 28596; HLA-C*07:01; GSG1L2; ENSG00000214978; CTA
APCPAEQAF

SEQ ID NO: 28597 - protein, 9 aa, Homo sapiens
  Table A; Target 28597; HLA-C*07:02; GSG1L2; ENSG00000214978; CTA
APCPAEQAF

SEQ ID NO: 28598 - protein, 9 aa, Homo sapiens
  Table A; Target 28598; HLA-C*07:04; GSG1L2; ENSG00000214978; CTA
APCPAEQAF

SEQ ID NO: 28599 - protein, 9 aa, Homo sapiens
  Table A; Target 28599; HLA-C*12:03; GSG1L2; ENSG00000214978; CTA
APCPAEQAF

SEQ ID NO: 28600 - protein, 9 aa, Homo sapiens
  Table A; Target 28600; HLA-C*14:02; GSG1L2; ENSG00000214978; CTA
APCPAEQAF

SEQ ID NO: 28601 - protein, 9 aa, Homo sapiens
  Table A; Target 28601; HLA-C*16:01; GSG1L2; ENSG00000214978; CTA
APCPAEQAF

SEQ ID NO: 28602 - protein, 9 aa, Homo sapiens
  Table A; Target 28602; HLA-C*16:02; GSG1L2; ENSG00000214978; CTA
APCPAEQAF

SEQ ID NO: 28603 - protein, 9 aa, Homo sapiens
  Table A; Target 28603; HLA-A*32:01; GSG1L2; ENSG00000214978; CTA
AQNGSRHSQ

SEQ ID NO: 28604 - protein, 8 aa, Homo sapiens
  Table A; Target 28604; HLA-B*27:05; GSG1L2; ENSG00000214978; CTA
ARLEFTEK

SEQ ID NO: 28605 - protein, 8 aa, Homo sapiens
  Table A; Target 28605; HLA-A*02:04; GSG1L2; ENSG00000214978; CTA
AVLYIWEL

SEQ ID NO: 28606 - protein, 9 aa, Homo sapiens
  Table A; Target 28606; HLA-A*03:01; GSG1L2; ENSG00000214978; CTA
AVSVSAMSR

SEQ ID NO: 28607 - protein, 9 aa, Homo sapiens
  Table A; Target 28607; HLA-A*03:02; GSG1L2; ENSG00000214978; CTA
AVSVSAMSR

SEQ ID NO: 28608 - protein, 9 aa, Homo sapiens
  Table A; Target 28608; HLA-A*11:01; GSG1L2; ENSG00000214978; CTA
AVSVSAMSR

SEQ ID NO: 28609 - protein, 9 aa, Homo sapiens
  Table A; Target 28609; HLA-A*31:01; GSG1L2; ENSG00000214978; CTA
AVSVSAMSR

SEQ ID NO: 28610 - protein, 9 aa, Homo sapiens
  Table A; Target 28610; HLA-A*33:03; GSG1L2; ENSG00000214978; CTA
AVSVSAMSR

SEQ ID NO: 28611 - protein, 9 aa, Homo sapiens
  Table A; Target 28611; HLA-A*68:01; GSG1L2; ENSG00000214978; CTA
AVSVSAMSR

SEQ ID NO: 28612 - protein, 9 aa, Homo sapiens
  Table A; Target 28612; HLA-C*07:06; GSG1L2; ENSG00000214978; CTA
AVSVSAMSR

SEQ ID NO: 28613 - protein, 10 aa, Homo sapiens
  Table A; Target 28613; HLA-A*25:01; GSG1L2; ENSG00000214978; CTA
AVSVSAMSRF

SEQ ID NO: 28614 - protein, 10 aa, Homo sapiens
  Table A; Target 28614; HLA-A*26:01; GSG1L2; ENSG00000214978; CTA
AVSVSAMSRF

SEQ ID NO: 28615 - protein, 9 aa, Homo sapiens
  Table A; Target 28615; HLA-A*02:03; GSG1L2; ENSG00000214978; CTA
CLAVSVSAM

SEQ ID NO: 28616 - protein, 9 aa, Homo sapiens
  Table A; Target 28616; HLA-B*15:01; GSG1L2; ENSG00000214978; CTA
CLAVSVSAM

SEQ ID NO: 28617 - protein, 9 aa, Homo sapiens
  Table A; Target 28617; HLA-B*27:05; GSG1L2; ENSG00000214978; CTA
CLAVSVSAM

SEQ ID NO: 28618 - protein, 9 aa, Homo sapiens
  Table A; Target 28618; HLA-B*46:01; GSG1L2; ENSG00000214978; CTA
CLAVSVSAM

SEQ ID NO: 28619 - protein, 9 aa, Homo sapiens
  Table A; Target 28619; HLA-C*01:02; GSG1L2; ENSG00000214978; CTA
CLAVSVSAM

SEQ ID NO: 28620 - protein, 9 aa, Homo sapiens
  Table A; Target 28620; HLA-C*04:01; GSG1L2; ENSG00000214978; CTA
CLAVSVSAM

SEQ ID NO: 28621 - protein, 9 aa, Homo sapiens
  Table A; Target 28621; HLA-C*07:04; GSG1L2; ENSG00000214978; CTA
CLAVSVSAM

SEQ ID NO: 28622 - protein, 9 aa, Homo sapiens
  Table A; Target 28622; HLA-C*14:02; GSG1L2; ENSG00000214978; CTA
CLAVSVSAM

SEQ ID NO: 28623 - protein, 9 aa, Homo sapiens
  Table A; Target 28623; HLA-A*02:01; GSG1L2; ENSG00000214978; CTA
CLAWGSFAL

SEQ ID NO: 28624 - protein, 9 aa, Homo sapiens
  Table A; Target 28624; HLA-A*02:04; GSG1L2; ENSG00000214978; CTA
CLAWGSFAL

SEQ ID NO: 28625 - protein, 10 aa, Homo sapiens
  Table A; Target 28625; HLA-B*51:01; GSG1L2; ENSG00000214978; CTA
CPAEQAFRNV

SEQ ID NO: 28626 - protein, 10 aa, Homo sapiens
  Table A; Target 28626; HLA-B*56:01; GSG1L2; ENSG00000214978; CTA
CPAEQAFRNV

SEQ ID NO: 28627 - protein, 8 aa, Homo sapiens
  Table A; Target 28627; HLA-A*33:01; GSG1L2; ENSG00000214978; CTA
DALVAIFM

SEQ ID NO: 28628 - protein, 8 aa, Homo sapiens
  Table A; Target 28628; HLA-B*08:01; GSG1L2; ENSG00000214978; CTA
DALVAIFM

SEQ ID NO: 28629 - protein, 8 aa, Homo sapiens
  Table A; Target 28629; HLA-B*18:01; GSG1L2; ENSG00000214978; CTA
DALVAIFM

SEQ ID NO: 28630 - protein, 8 aa, Homo sapiens
  Table A; Target 28630; HLA-B*35:01; GSG1L2; ENSG00000214978; CTA
DALVAIFM

SEQ ID NO: 28631 - protein, 8 aa, Homo sapiens
  Table A; Target 28631; HLA-B*35:03; GSG1L2; ENSG00000214978; CTA
DALVAIFM

SEQ ID NO: 28632 - protein, 8 aa, Homo sapiens
  Table A; Target 28632; HLA-B*51:01; GSG1L2; ENSG00000214978; CTA
DALVAIFM

SEQ ID NO: 28633 - protein, 9 aa, Homo sapiens
  Table A; Target 28633; HLA-B*51:01; GSG1L2; ENSG00000214978; CTA
DALVAIFMV

SEQ ID NO: 28634 - protein, 9 aa, Homo sapiens
  Table A; Target 28634; HLA-B*54:01; GSG1L2; ENSG00000214978; CTA
DIVLILTSA

SEQ ID NO: 28635 - protein, 9 aa, Homo sapiens
  Table A; Target 28635; HLA-B*56:01; GSG1L2; ENSG00000214978; CTA
DIVLILTSA

SEQ ID NO: 28636 - protein, 8 aa, Homo sapiens
  Table A; Target 28636; HLA-B*35:03; GSG1L2; ENSG00000214978; CTA
DNNSQAVL

SEQ ID NO: 28637 - protein, 9 aa, Homo sapiens
  Table A; Target 28637; HLA-A*26:01; GSG1L2; ENSG00000214978; CTA
DNNSQAVLY

SEQ ID NO: 28638 - protein, 9 aa, Homo sapiens
  Table A; Target 28638; HLA-A*33:01; GSG1L2; ENSG00000214978; CTA
DNNSQAVLY

SEQ ID NO: 28639 - protein, 9 aa, Homo sapiens
  Table A; Target 28639; HLA-A*33:03; GSG1L2; ENSG00000214978; CTA
DNNSQAVLY

SEQ ID NO: 28640 - protein, 9 aa, Homo sapiens
  Table A; Target 28640; HLA-B*18:01; GSG1L2; ENSG00000214978; CTA
DNNSQAVLY

SEQ ID NO: 28641 - protein, 9 aa, Homo sapiens
  Table A; Target 28641; HLA-B*35:01; GSG1L2; ENSG00000214978; CTA
DNNSQAVLY

SEQ ID NO: 28642 - protein, 9 aa, Homo sapiens
  Table A; Target 28642; HLA-B*07:02; GSG1L2; ENSG00000214978; CTA
DRAKQQQAL

SEQ ID NO: 28643 - protein, 9 aa, Homo sapiens
  Table A; Target 28643; HLA-B*08:01; GSG1L2; ENSG00000214978; CTA
DRAKQQQAL

SEQ ID NO: 28644 - protein, 9 aa, Homo sapiens
  Table A; Target 28644; HLA-B*27:05; GSG1L2; ENSG00000214978; CTA
DRAKQQQAL

SEQ ID NO: 28645 - protein, 9 aa, Homo sapiens
  Table A; Target 28645; HLA-B*38:01; GSG1L2; ENSG00000214978; CTA
DRAKQQQAL

SEQ ID NO: 28646 - protein, 9 aa, Homo sapiens
  Table A; Target 28646; HLA-B*39:01; GSG1L2; ENSG00000214978; CTA
DRAKQQQAL

SEQ ID NO: 28647 - protein, 9 aa, Homo sapiens
  Table A; Target 28647; HLA-C*06:02; GSG1L2; ENSG00000214978; CTA
DRAKQQQAL

SEQ ID NO: 28648 - protein, 9 aa, Homo sapiens
  Table A; Target 28648; HLA-C*07:02; GSG1L2; ENSG00000214978; CTA
DRAKQQQAL

SEQ ID NO: 28649 - protein, 8 aa, Homo sapiens
  Table A; Target 28649; HLA-B*44:02; GSG1L2; ENSG00000214978; CTA
EDWKPQTW

SEQ ID NO: 28650 - protein, 10 aa, Homo sapiens
  Table A; Target 28650; HLA-A*33:01; GSG1L2; ENSG00000214978; CTA
ELGDDKFIQR

SEQ ID NO: 28651 - protein, 10 aa, Homo sapiens
  Table A; Target 28651; HLA-A*33:03; GSG1L2; ENSG00000214978; CTA
ELGDDKFIQR

SEQ ID NO: 28652 - protein, 10 aa, Homo sapiens
  Table A; Target 28652; HLA-A*68:01; GSG1L2; ENSG00000214978; CTA
ELGDDKFIQR

SEQ ID NO: 28653 - protein, 10 aa, Homo sapiens
  Table A; Target 28653; HLA-C*07:06; GSG1L2; ENSG00000214978; CTA
ELGDDKFIQR

SEQ ID NO: 28654 - protein, 11 aa, Homo sapiens
  Table A; Target 28654; HLA-A*33:01; GSG1L2; ENSG00000214978; CTA
ESLNGEDEKCR

SEQ ID NO: 28655 - protein, 11 aa, Homo sapiens
  Table A; Target 28655; HLA-A*33:03; GSG1L2; ENSG00000214978; CTA
ESLNGEDEKCR

SEQ ID NO: 28656 - protein, 9 aa, Homo sapiens
  Table A; Target 28656; HLA-A*02:04; GSG1L2; ENSG00000214978; CTA
EVLDIVLIL

SEQ ID NO: 28657 - protein, 9 aa, Homo sapiens
  Table A; Target 28657; HLA-A*23:01; GSG1L2; ENSG00000214978; CTA
EVLDIVLIL

SEQ ID NO: 28658 - protein, 9 aa, Homo sapiens
  Table A; Target 28658; HLA-A*25:01; GSG1L2; ENSG00000214978; CTA
EVLDIVLIL

SEQ ID NO: 28659 - protein, 9 aa, Homo sapiens
  Table A; Target 28659; HLA-A*26:01; GSG1L2; ENSG00000214978; CTA
EVLDIVLIL

SEQ ID NO: 28660 - protein, 9 aa, Homo sapiens
  Table A; Target 28660; HLA-A*29:02; GSG1L2; ENSG00000214978; CTA
EVLDIVLIL

SEQ ID NO: 28661 - protein, 9 aa, Homo sapiens
  Table A; Target 28661; HLA-A*33:03; GSG1L2; ENSG00000214978; CTA
EVLDIVLIL

SEQ ID NO: 28662 - protein, 9 aa, Homo sapiens
  Table A; Target 28662; HLA-A*68:02; GSG1L2; ENSG00000214978; CTA
EVLDIVLIL

SEQ ID NO: 28663 - protein, 9 aa, Homo sapiens
  Table A; Target 28663; HLA-B*35:03; GSG1L2; ENSG00000214978; CTA
EVLDIVLIL

SEQ ID NO: 28664 - protein, 10 aa, Homo sapiens
  Table A; Target 28664; HLA-A*68:02; GSG1L2; ENSG00000214978; CTA
EVLDIVLILT

SEQ ID NO: 28665 - protein, 9 aa, Homo sapiens
  Table A; Target 28665; HLA-A*02:01; GSG1L2; ENSG00000214978; CTA
FALCLAVSV

SEQ ID NO: 28666 - protein, 9 aa, Homo sapiens
  Table A; Target 28666; HLA-B*51:01; GSG1L2; ENSG00000214978; CTA
FALCLAVSV

SEQ ID NO: 28667 - protein, 9 aa, Homo sapiens
  Table A; Target 28667; HLA-B*54:01; GSG1L2; ENSG00000214978; CTA
FALCLAVSV

SEQ ID NO: 28668 - protein, 9 aa, Homo sapiens
  Table A; Target 28668; HLA-C*02:02; GSG1L2; ENSG00000214978; CTA
FALCLAVSV

SEQ ID NO: 28669 - protein, 9 aa, Homo sapiens
  Table A; Target 28669; HLA-C*12:03; GSG1L2; ENSG00000214978; CTA
FALCLAVSV

SEQ ID NO: 28670 - protein, 9 aa, Homo sapiens
  Table A; Target 28670; HLA-C*16:04; GSG1L2; ENSG00000214978; CTA
FALCLAVSV

SEQ ID NO: 28671 - protein, 11 aa, Homo sapiens
  Table A; Target 28671; HLA-B*57:01; GSG1L2; ENSG00000214978; CTA
FSLTAVVSSHW

SEQ ID NO: 28672 - protein, 11 aa, Homo sapiens
  Table A; Target 28672; HLA-B*58:01; GSG1L2; ENSG00000214978; CTA
FSLTAVVSSHW

SEQ ID NO: 28673 - protein, 8 aa, Homo sapiens
  Table A; Target 28673; HLA-A*23:01; GSG1L2; ENSG00000214978; CTA
FTAARLEF

SEQ ID NO: 28674 - protein, 8 aa, Homo sapiens
  Table A; Target 28674; HLA-A*32:01; GSG1L2; ENSG00000214978; CTA
FTAARLEF

SEQ ID NO: 28675 - protein, 8 aa, Homo sapiens
  Table A; Target 28675; HLA-B*08:01; GSG1L2; ENSG00000214978; CTA
FTAARLEF

SEQ ID NO: 28676 - protein, 8 aa, Homo sapiens
  Table A; Target 28676; HLA-B*46:01; GSG1L2; ENSG00000214978; CTA
FTAARLEF

SEQ ID NO: 28677 - protein, 8 aa, Homo sapiens
  Table A; Target 28677; HLA-C*02:02; GSG1L2; ENSG00000214978; CTA
FTAARLEF

SEQ ID NO: 28678 - protein, 8 aa, Homo sapiens
  Table A; Target 28678; HLA-C*03:04; GSG1L2; ENSG00000214978; CTA
FTAARLEF

SEQ ID NO: 28679 - protein, 8 aa, Homo sapiens
  Table A; Target 28679; HLA-C*16:01; GSG1L2; ENSG00000214978; CTA
FTAARLEF

SEQ ID NO: 28680 - protein, 9 aa, Homo sapiens
  Table A; Target 28680; HLA-A*01:01; GSG1L2; ENSG00000214978; CTA
FTEKQQAQN

SEQ ID NO: 28681 - protein, 11 aa, Homo sapiens
  Table A; Target 28681; HLA-B*15:01; GSG1L2; ENSG00000214978; CTA
GAAPCPAEQAF

SEQ ID NO: 28682 - protein, 8 aa, Homo sapiens
  Table A; Target 28682; HLA-A*11:01; GSG1L2; ENSG00000214978; CTA
GDDKFIQR

SEQ ID NO: 28683 - protein, 8 aa, Homo sapiens
  Table A; Target 28683; HLA-A*31:01; GSG1L2; ENSG00000214978; CTA
GDDKFIQR

SEQ ID NO: 28684 - protein, 10 aa, Homo sapiens
  Table A; Target 28684; HLA-B*44:02; GSG1L2; ENSG00000214978; CTA
GDDKFIQRGF

SEQ ID NO: 28685 - protein, 10 aa, Homo sapiens
  Table A; Target 28685; HLA-B*44:03; GSG1L2; ENSG00000214978; CTA
GDDKFIQRGF

SEQ ID NO: 28686 - protein, 9 aa, Homo sapiens
  Table A; Target 28686; HLA-B*18:01; GSG1L2; ENSG00000214978; CTA
GEDEKCRSF

SEQ ID NO: 28687 - protein, 9 aa, Homo sapiens
  Table A; Target 28687; HLA-B*37:01; GSG1L2; ENSG00000214978; CTA
GEDEKCRSF

SEQ ID NO: 28688 - protein, 9 aa, Homo sapiens
  Table A; Target 28688; HLA-B*44:02; GSG1L2; ENSG00000214978; CTA
GEDEKCRSF

SEQ ID NO: 28689 - protein, 9 aa, Homo sapiens
  Table A; Target 28689; HLA-B*44:03; GSG1L2; ENSG00000214978; CTA
GEDEKCRSF

SEQ ID NO: 28690 - protein, 8 aa, Homo sapiens
  Table A; Target 28690; HLA-A*30:01; GSG1L2; ENSG00000214978; CTA
GEVLDIVL

SEQ ID NO: 28691 - protein, 8 aa, Homo sapiens
  Table A; Target 28691; HLA-B*40:01; GSG1L2; ENSG00000214978; CTA
GEVLDIVL

SEQ ID NO: 28692 - protein, 9 aa, Homo sapiens
  Table A; Target 28692; HLA-A*30:01; GSG1L2; ENSG00000214978; CTA
GEVLDIVLI

SEQ ID NO: 28693 - protein, 9 aa, Homo sapiens
  Table A; Target 28693; HLA-B*40:01; GSG1L2; ENSG00000214978; CTA
GEVLDIVLI

SEQ ID NO: 28694 - protein, 9 aa, Homo sapiens
  Table A; Target 28694; HLA-B*44:02; GSG1L2; ENSG00000214978; CTA
GEVLDIVLI

SEQ ID NO: 28695 - protein, 9 aa, Homo sapiens
  Table A; Target 28695; HLA-B*44:03; GSG1L2; ENSG00000214978; CTA
GEVLDIVLI

SEQ ID NO: 28696 - protein, 9 aa, Homo sapiens
  Table A; Target 28696; HLA-B*49:01; GSG1L2; ENSG00000214978; CTA
GEVLDIVLI

SEQ ID NO: 28697 - protein, 10 aa, Homo sapiens
  Table A; Target 28697; HLA-B*40:01; GSG1L2; ENSG00000214978; CTA
GEVLDIVLIL

SEQ ID NO: 28698 - protein, 9 aa, Homo sapiens
  Table A; Target 28698; HLA-A*02:01; GSG1L2; ENSG00000214978; CTA
GLLGMVAHM

SEQ ID NO: 28699 - protein, 9 aa, Homo sapiens
  Table A; Target 28699; HLA-A*02:04; GSG1L2; ENSG00000214978; CTA
GLLGMVAHM

SEQ ID NO: 28700 - protein, 9 aa, Homo sapiens
  Table A; Target 28700; HLA-A*29:02; GSG1L2; ENSG00000214978; CTA
GLLGMVAHM

SEQ ID NO: 28701 - protein, 9 aa, Homo sapiens
  Table A; Target 28701; HLA-B*55:01; GSG1L2; ENSG00000214978; CTA
GLLGMVAHM

SEQ ID NO: 28702 - protein, 8 aa, Homo sapiens
  Table A; Target 28702; HLA-C*07:01; GSG1L2; ENSG00000214978; CTA
GMVAHMMY

SEQ ID NO: 28703 - protein, 9 aa, Homo sapiens
  Table A; Target 28703; HLA-B*27:05; GSG1L2; ENSG00000214978; CTA
GRMDNNSQA

SEQ ID NO: 28704 - protein, 10 aa, Homo sapiens
  Table A; Target 28704; HLA-B*27:02; GSG1L2; ENSG00000214978; CTA
GRMDNNSQAV

SEQ ID NO: 28705 - protein, 10 aa, Homo sapiens
  Table A; Target 28705; HLA-B*27:05; GSG1L2; ENSG00000214978; CTA
GRMDNNSQAV

SEQ ID NO: 28706 - protein, 11 aa, Homo sapiens
  Table A; Target 28706; HLA-B*27:02; GSG1L2; ENSG00000214978; CTA
GRMDNNSQAVL

SEQ ID NO: 28707 - protein, 11 aa, Homo sapiens
  Table A; Target 28707; HLA-B*27:05; GSG1L2; ENSG00000214978; CTA
GRMDNNSQAVL

SEQ ID NO: 28708 - protein, 11 aa, Homo sapiens
  Table A; Target 28708; HLA-C*16:04; GSG1L2; ENSG00000214978; CTA
GRMDNNSQAVL

SEQ ID NO: 28709 - protein, 9 aa, Homo sapiens
  Table A; Target 28709; HLA-B*13:02; GSG1L2; ENSG00000214978; CTA
GSFALCLAV

SEQ ID NO: 28710 - protein, 9 aa, Homo sapiens
  Table A; Target 28710; HLA-B*57:01; GSG1L2; ENSG00000214978; CTA
GSRHSQHSF

SEQ ID NO: 28711 - protein, 9 aa, Homo sapiens
  Table A; Target 28711; HLA-A*03:02; GSG1L2; ENSG00000214978; CTA
HLPPGAPGK

SEQ ID NO: 28712 - protein, 10 aa, Homo sapiens
  Table A; Target 28712; HLA-A*02:03; GSG1L2; ENSG00000214978; CTA
HLPPGAPGKV

SEQ ID NO: 28713 - protein, 10 aa, Homo sapiens
  Table A; Target 28713; HLA-A*02:07; GSG1L2; ENSG00000214978; CTA
HLPPGAPGKV

SEQ ID NO: 28714 - protein, 10 aa, Homo sapiens
  Table A; Target 28714; HLA-A*68:02; GSG1L2; ENSG00000214978; CTA
HLPPGAPGKV

SEQ ID NO: 28715 - protein, 8 aa, Homo sapiens
  Table A; Target 28715; HLA-B*54:01; GSG1L2; ENSG00000214978; CTA
HSFLEPEA

SEQ ID NO: 28716 - protein, 9 aa, Homo sapiens
  Table A; Target 28716; HLA-A*23:01; GSG1L2; ENSG00000214978; CTA
IFMVLAGLL

SEQ ID NO: 28717 - protein, 9 aa, Homo sapiens
  Table A; Target 28717; HLA-A*24:02; GSG1L2; ENSG00000214978; CTA
IFMVLAGLL

SEQ ID NO: 28718 - protein, 8 aa, Homo sapiens
  Table A; Target 28718; HLA-A*23:01; GSG1L2; ENSG00000214978; CTA
IFQITVNL

SEQ ID NO: 28719 - protein, 8 aa, Homo sapiens
  Table A; Target 28719; HLA-C*14:02; GSG1L2; ENSG00000214978; CTA
IFQITVNL

SEQ ID NO: 28720 - protein, 8 aa, Homo sapiens
  Table A; Target 28720; HLA-B*51:01; GSG1L2; ENSG00000214978; CTA
IGGEVLDI

SEQ ID NO: 28721 - protein, 8 aa, Homo sapiens
  Table A; Target 28721; HLA-A*23:01; GSG1L2; ENSG00000214978; CTA
ILTSAILL

SEQ ID NO: 28722 - protein, 10 aa, Homo sapiens
  Table A; Target 28722; HLA-B*57:01; GSG1L2; ENSG00000214978; CTA
ITVNLGPEDW

SEQ ID NO: 28723 - protein, 10 aa, Homo sapiens
  Table A; Target 28723; HLA-B*58:01; GSG1L2; ENSG00000214978; CTA
ITVNLGPEDW

SEQ ID NO: 28724 - protein, 8 aa, Homo sapiens
  Table A; Target 28724; HLA-B*54:01; GSG1L2; ENSG00000214978; CTA
IVLILTSA

SEQ ID NO: 28725 - protein, 9 aa, Homo sapiens
  Table A; Target 28725; HLA-A*23:01; GSG1L2; ENSG00000214978; CTA
IVLILTSAI

SEQ ID NO: 28726 - protein, 9 aa, Homo sapiens
  Table A; Target 28726; HLA-C*01:02; GSG1L2; ENSG00000214978; CTA
IVLILTSAI

SEQ ID NO: 28727 - protein, 9 aa, Homo sapiens
  Table A; Target 28727; HLA-A*02:04; GSG1L2; ENSG00000214978; CTA
KQQQALLLL

SEQ ID NO: 28728 - protein, 9 aa, Homo sapiens
  Table A; Target 28728; HLA-B*13:02; GSG1L2; ENSG00000214978; CTA
KQQQALLLL

SEQ ID NO: 28729 - protein, 9 aa, Homo sapiens
  Table A; Target 28729; HLA-B*54:01; GSG1L2; ENSG00000214978; CTA
LAGLLGMVA

SEQ ID NO: 28730 - protein, 9 aa, Homo sapiens
  Table A; Target 28730; HLA-B*54:01; GSG1L2; ENSG00000214978; CTA
LALTFSLTA

SEQ ID NO: 28731 - protein, 8 aa, Homo sapiens
  Table A; Target 28731; HLA-A*30:01; GSG1L2; ENSG00000214978; CTA
LAVSVSAM

SEQ ID NO: 28732 - protein, 8 aa, Homo sapiens
  Table A; Target 28732; HLA-B*08:01; GSG1L2; ENSG00000214978; CTA
LAVSVSAM

SEQ ID NO: 28733 - protein, 8 aa, Homo sapiens
  Table A; Target 28733; HLA-B*15:01; GSG1L2; ENSG00000214978; CTA
LAVSVSAM

SEQ ID NO: 28734 - protein, 8 aa, Homo sapiens
  Table A; Target 28734; HLA-B*15:03; GSG1L2; ENSG00000214978; CTA
LAVSVSAM

SEQ ID NO: 28735 - protein, 8 aa, Homo sapiens
  Table A; Target 28735; HLA-B*18:01; GSG1L2; ENSG00000214978; CTA
LAVSVSAM

SEQ ID NO: 28736 - protein, 8 aa, Homo sapiens
  Table A; Target 28736; HLA-B*35:01; GSG1L2; ENSG00000214978; CTA
LAVSVSAM

SEQ ID NO: 28737 - protein, 8 aa, Homo sapiens
  Table A; Target 28737; HLA-B*35:03; GSG1L2; ENSG00000214978; CTA
LAVSVSAM

SEQ ID NO: 28738 - protein, 8 aa, Homo sapiens
  Table A; Target 28738; HLA-B*39:01; GSG1L2; ENSG00000214978; CTA
LAVSVSAM

SEQ ID NO: 28739 - protein, 8 aa, Homo sapiens
  Table A; Target 28739; HLA-B*40:02; GSG1L2; ENSG00000214978; CTA
LAVSVSAM

SEQ ID NO: 28740 - protein, 8 aa, Homo sapiens
  Table A; Target 28740; HLA-B*46:01; GSG1L2; ENSG00000214978; CTA
LAVSVSAM

SEQ ID NO: 28741 - protein, 8 aa, Homo sapiens
  Table A; Target 28741; HLA-B*51:01; GSG1L2; ENSG00000214978; CTA
LAVSVSAM

SEQ ID NO: 28742 - protein, 8 aa, Homo sapiens
  Table A; Target 28742; HLA-B*54:01; GSG1L2; ENSG00000214978; CTA
LAVSVSAM

SEQ ID NO: 28743 - protein, 8 aa, Homo sapiens
  Table A; Target 28743; HLA-B*58:01; GSG1L2; ENSG00000214978; CTA
LAVSVSAM

SEQ ID NO: 28744 - protein, 8 aa, Homo sapiens
  Table A; Target 28744; HLA-C*01:02; GSG1L2; ENSG00000214978; CTA
LAVSVSAM

SEQ ID NO: 28745 - protein, 8 aa, Homo sapiens
  Table A; Target 28745; HLA-C*02:02; GSG1L2; ENSG00000214978; CTA
LAVSVSAM

SEQ ID NO: 28746 - protein, 8 aa, Homo sapiens
  Table A; Target 28746; HLA-C*03:03; GSG1L2; ENSG00000214978; CTA
LAVSVSAM

SEQ ID NO: 28747 - protein, 8 aa, Homo sapiens
  Table A; Target 28747; HLA-C*03:04; GSG1L2; ENSG00000214978; CTA
LAVSVSAM

SEQ ID NO: 28748 - protein, 8 aa, Homo sapiens
  Table A; Target 28748; HLA-C*05:01; GSG1L2; ENSG00000214978; CTA
LAVSVSAM

SEQ ID NO: 28749 - protein, 8 aa, Homo sapiens
  Table A; Target 28749; HLA-C*07:01; GSG1L2; ENSG00000214978; CTA
LAVSVSAM

SEQ ID NO: 28750 - protein, 8 aa, Homo sapiens
  Table A; Target 28750; HLA-C*07:04; GSG1L2; ENSG00000214978; CTA
LAVSVSAM

SEQ ID NO: 28751 - protein, 8 aa, Homo sapiens
  Table A; Target 28751; HLA-C*12:03; GSG1L2; ENSG00000214978; CTA
LAVSVSAM

SEQ ID NO: 28752 - protein, 8 aa, Homo sapiens
  Table A; Target 28752; HLA-C*14:02; GSG1L2; ENSG00000214978; CTA
LAVSVSAM

SEQ ID NO: 28753 - protein, 8 aa, Homo sapiens
  Table A; Target 28753; HLA-C*16:01; GSG1L2; ENSG00000214978; CTA
LAVSVSAM

SEQ ID NO: 28754 - protein, 8 aa, Homo sapiens
  Table A; Target 28754; HLA-C*16:02; GSG1L2; ENSG00000214978; CTA
LAVSVSAM

SEQ ID NO: 28755 - protein, 8 aa, Homo sapiens
  Table A; Target 28755; HLA-C*16:04; GSG1L2; ENSG00000214978; CTA
LAVSVSAM

SEQ ID NO: 28756 - protein, 10 aa, Homo sapiens
  Table A; Target 28756; HLA-A*68:01; GSG1L2; ENSG00000214978; CTA
LAVSVSAMSR

SEQ ID NO: 28757 - protein, 10 aa, Homo sapiens
  Table A; Target 28757; HLA-B*27:02; GSG1L2; ENSG00000214978; CTA
LAVSVSAMSR

SEQ ID NO: 28758 - protein, 10 aa, Homo sapiens
  Table A; Target 28758; HLA-C*07:06; GSG1L2; ENSG00000214978; CTA
LAVSVSAMSR

SEQ ID NO: 28759 - protein, 11 aa, Homo sapiens
  Table A; Target 28759; HLA-C*02:02; GSG1L2; ENSG00000214978; CTA
LAVSVSAMSRF

SEQ ID NO: 28760 - protein, 8 aa, Homo sapiens
  Table A; Target 28760; HLA-C*03:04; GSG1L2; ENSG00000214978; CTA
LAWGSFAL

SEQ ID NO: 28761 - protein, 9 aa, Homo sapiens
  Table A; Target 28761; HLA-B*54:01; GSG1L2; ENSG00000214978; CTA
LCLAVSVSA

SEQ ID NO: 28762 - protein, 10 aa, Homo sapiens
  Table A; Target 28762; HLA-C*04:01; GSG1L2; ENSG00000214978; CTA
LCLAVSVSAM

SEQ ID NO: 28763 - protein, 9 aa, Homo sapiens
  Table A; Target 28763; HLA-A*30:01; GSG1L2; ENSG00000214978; CTA
LEFTEKQQA

SEQ ID NO: 28764 - protein, 9 aa, Homo sapiens
  Table A; Target 28764; HLA-B*18:01; GSG1L2; ENSG00000214978; CTA
LEFTEKQQA

SEQ ID NO: 28765 - protein, 9 aa, Homo sapiens
  Table A; Target 28765; HLA-B*40:01; GSG1L2; ENSG00000214978; CTA
LEFTEKQQA

SEQ ID NO: 28766 - protein, 9 aa, Homo sapiens
  Table A; Target 28766; HLA-B*40:02; GSG1L2; ENSG00000214978; CTA
LEFTEKQQA

SEQ ID NO: 28767 - protein, 9 aa, Homo sapiens
  Table A; Target 28767; HLA-B*44:02; GSG1L2; ENSG00000214978; CTA
LEFTEKQQA

SEQ ID NO: 28768 - protein, 9 aa, Homo sapiens
  Table A; Target 28768; HLA-B*44:03; GSG1L2; ENSG00000214978; CTA
LEFTEKQQA

SEQ ID NO: 28769 - protein, 9 aa, Homo sapiens
  Table A; Target 28769; HLA-B*49:01; GSG1L2; ENSG00000214978; CTA
LEFTEKQQA

SEQ ID NO: 28770 - protein, 9 aa, Homo sapiens
  Table A; Target 28770; HLA-B*49:01; GSG1L2; ENSG00000214978; CTA
LEPEASESI

SEQ ID NO: 28771 - protein, 10 aa, Homo sapiens
  Table A; Target 28771; HLA-B*44:02; GSG1L2; ENSG00000214978; CTA
LEPEASESIW

SEQ ID NO: 28772 - protein, 10 aa, Homo sapiens
  Table A; Target 28772; HLA-B*44:03; GSG1L2; ENSG00000214978; CTA
LEPEASESIW

SEQ ID NO: 28773 - protein, 10 aa, Homo sapiens
  Table A; Target 28773; HLA-B*57:01; GSG1L2; ENSG00000214978; CTA
LEPEASESIW

SEQ ID NO: 28774 - protein, 10 aa, Homo sapiens
  Table A; Target 28774; HLA-C*16:04; GSG1L2; ENSG00000214978; CTA
LEPEASESIW

SEQ ID NO: 28775 - protein, 9 aa, Homo sapiens
  Table A; Target 28775; HLA-A*11:01; GSG1L2; ENSG00000214978; CTA
LGDDKFIQR

SEQ ID NO: 28776 - protein, 9 aa, Homo sapiens
  Table A; Target 28776; HLA-A*31:01; GSG1L2; ENSG00000214978; CTA
LGDDKFIQR

SEQ ID NO: 28777 - protein, 8 aa, Homo sapiens
  Table A; Target 28777; HLA-B*08:01; GSG1L2; ENSG00000214978; CTA
LGMVAHMM

SEQ ID NO: 28778 - protein, 8 aa, Homo sapiens
  Table A; Target 28778; HLA-C*07:01; GSG1L2; ENSG00000214978; CTA
LLGMVAHM

SEQ ID NO: 28779 - protein, 8 aa, Homo sapiens
  Table A; Target 28779; HLA-C*07:04; GSG1L2; ENSG00000214978; CTA
LLGMVAHM

SEQ ID NO: 28780 - protein, 9 aa, Homo sapiens
  Table A; Target 28780; HLA-A*02:01; GSG1L2; ENSG00000214978; CTA
LLLPVCLAL

SEQ ID NO: 28781 - protein, 9 aa, Homo sapiens
  Table A; Target 28781; HLA-A*02:04; GSG1L2; ENSG00000214978; CTA
LLLPVCLAL

SEQ ID NO: 28782 - protein, 9 aa, Homo sapiens
  Table A; Target 28782; HLA-B*51:01; GSG1L2; ENSG00000214978; CTA
LPPGAPGKV

SEQ ID NO: 28783 - protein, 11 aa, Homo sapiens
  Table A; Target 28783; HLA-B*07:02; GSG1L2; ENSG00000214978; CTA
LPPGAPGKVSI

SEQ ID NO: 28784 - protein, 11 aa, Homo sapiens
  Table A; Target 28784; HLA-B*51:01; GSG1L2; ENSG00000214978; CTA
LPPGAPGKVSI

SEQ ID NO: 28785 - protein, 11 aa, Homo sapiens
  Table A; Target 28785; HLA-B*54:01; GSG1L2; ENSG00000214978; CTA
LPPGAPGKVSI

SEQ ID NO: 28786 - protein, 11 aa, Homo sapiens
  Table A; Target 28786; HLA-B*56:01; GSG1L2; ENSG00000214978; CTA
LPPGAPGKVSI

SEQ ID NO: 28787 - protein, 11 aa, Homo sapiens
  Table A; Target 28787; HLA-C*07:02; GSG1L2; ENSG00000214978; CTA
LPPGAPGKVSI

SEQ ID NO: 28788 - protein, 9 aa, Homo sapiens
  Table A; Target 28788; HLA-B*35:01; GSG1L2; ENSG00000214978; CTA
LPVCLALTF

SEQ ID NO: 28789 - protein, 9 aa, Homo sapiens
  Table A; Target 28789; HLA-B*35:03; GSG1L2; ENSG00000214978; CTA
LPVCLALTF

SEQ ID NO: 28790 - protein, 9 aa, Homo sapiens
  Table A; Target 28790; HLA-B*51:01; GSG1L2; ENSG00000214978; CTA
LPVCLALTF

SEQ ID NO: 28791 - protein, 8 aa, Homo sapiens
  Table A; Target 28791; HLA-C*03:03; GSG1L2; ENSG00000214978; CTA
LSIGGEVL

SEQ ID NO: 28792 - protein, 8 aa, Homo sapiens
  Table A; Target 28792; HLA-C*03:04; GSG1L2; ENSG00000214978; CTA
LSIGGEVL

SEQ ID NO: 28793 - protein, 8 aa, Homo sapiens
  Table A; Target 28793; HLA-C*05:01; GSG1L2; ENSG00000214978; CTA
LSIGGEVL

SEQ ID NO: 28794 - protein, 9 aa, Homo sapiens
  Table A; Target 28794; HLA-A*24:02; GSG1L2; ENSG00000214978; CTA
LTAVVSSHW

SEQ ID NO: 28795 - protein, 9 aa, Homo sapiens
  Table A; Target 28795; HLA-A*25:01; GSG1L2; ENSG00000214978; CTA
LTAVVSSHW

SEQ ID NO: 28796 - protein, 9 aa, Homo sapiens
  Table A; Target 28796; HLA-A*26:01; GSG1L2; ENSG00000214978; CTA
LTAVVSSHW

SEQ ID NO: 28797 - protein, 9 aa, Homo sapiens
  Table A; Target 28797; HLA-A*32:01; GSG1L2; ENSG00000214978; CTA
LTAVVSSHW

SEQ ID NO: 28798 - protein, 9 aa, Homo sapiens
  Table A; Target 28798; HLA-B*44:02; GSG1L2; ENSG00000214978; CTA
LTAVVSSHW

SEQ ID NO: 28799 - protein, 9 aa, Homo sapiens
  Table A; Target 28799; HLA-B*44:03; GSG1L2; ENSG00000214978; CTA
LTAVVSSHW

SEQ ID NO: 28800 - protein, 9 aa, Homo sapiens
  Table A; Target 28800; HLA-B*57:01; GSG1L2; ENSG00000214978; CTA
LTAVVSSHW

SEQ ID NO: 28801 - protein, 9 aa, Homo sapiens
  Table A; Target 28801; HLA-B*58:01; GSG1L2; ENSG00000214978; CTA
LTAVVSSHW

SEQ ID NO: 28802 - protein, 9 aa, Homo sapiens
  Table A; Target 28802; HLA-C*16:04; GSG1L2; ENSG00000214978; CTA
LTAVVSSHW

SEQ ID NO: 28803 - protein, 8 aa, Homo sapiens
  Table A; Target 28803; HLA-A*68:02; GSG1L2; ENSG00000214978; CTA
LTFSLTAV

SEQ ID NO: 28804 - protein, 9 aa, Homo sapiens
  Table A; Target 28804; HLA-A*68:02; GSG1L2; ENSG00000214978; CTA
LTFSLTAVV

SEQ ID NO: 28805 - protein, 9 aa, Homo sapiens
  Table A; Target 28805; HLA-C*02:02; GSG1L2; ENSG00000214978; CTA
LTFSLTAVV

SEQ ID NO: 28806 - protein, 11 aa, Homo sapiens
  Table A; Target 28806; HLA-A*68:02; GSG1L2; ENSG00000214978; CTA
LTSAILLGSRV

SEQ ID NO: 28807 - protein, 8 aa, Homo sapiens
  Table A; Target 28807; HLA-B*37:01; GSG1L2; ENSG00000214978; CTA
MDNNSQAV

SEQ ID NO: 28808 - protein, 9 aa, Homo sapiens
  Table A; Target 28808; HLA-A*30:01; GSG1L2; ENSG00000214978; CTA
MDNNSQAVL

SEQ ID NO: 28809 - protein, 9 aa, Homo sapiens
  Table A; Target 28809; HLA-B*37:01; GSG1L2; ENSG00000214978; CTA
MDNNSQAVL

SEQ ID NO: 28810 - protein, 9 aa, Homo sapiens
  Table A; Target 28810; HLA-B*40:01; GSG1L2; ENSG00000214978; CTA
MDNNSQAVL

SEQ ID NO: 28811 - protein, 9 aa, Homo sapiens
  Table A; Target 28811; HLA-C*07:04; GSG1L2; ENSG00000214978; CTA
MDNNSQAVL

SEQ ID NO: 28812 - protein, 10 aa, Homo sapiens
  Table A; Target 28812; HLA-A*29:02; GSG1L2; ENSG00000214978; CTA
MDNNSQAVLY

SEQ ID NO: 28813 - protein, 10 aa, Homo sapiens
  Table A; Target 28813; HLA-A*33:01; GSG1L2; ENSG00000214978; CTA
MDNNSQAVLY

SEQ ID NO: 28814 - protein, 10 aa, Homo sapiens
  Table A; Target 28814; HLA-B*35:01; GSG1L2; ENSG00000214978; CTA
MDNNSQAVLY

SEQ ID NO: 28815 - protein, 10 aa, Homo sapiens
  Table A; Target 28815; HLA-B*44:03; GSG1L2; ENSG00000214978; CTA
MDNNSQAVLY

SEQ ID NO: 28816 - protein, 10 aa, Homo sapiens
  Table A; Target 28816; HLA-C*07:01; GSG1L2; ENSG00000214978; CTA
MDNNSQAVLY

SEQ ID NO: 28817 - protein, 10 aa, Homo sapiens
  Table A; Target 28817; HLA-C*07:04; GSG1L2; ENSG00000214978; CTA
MDNNSQAVLY

SEQ ID NO: 28818 - protein, 9 aa, Homo sapiens
  Table A; Target 28818; HLA-A*02:01; GSG1L2; ENSG00000214978; CTA
MMYTTIFQI

SEQ ID NO: 28819 - protein, 9 aa, Homo sapiens
  Table A; Target 28819; HLA-A*02:03; GSG1L2; ENSG00000214978; CTA
MMYTTIFQI

SEQ ID NO: 28820 - protein, 9 aa, Homo sapiens
  Table A; Target 28820; HLA-A*02:04; GSG1L2; ENSG00000214978; CTA
MMYTTIFQI

SEQ ID NO: 28821 - protein, 9 aa, Homo sapiens
  Table A; Target 28821; HLA-A*02:07; GSG1L2; ENSG00000214978; CTA
MMYTTIFQI

SEQ ID NO: 28822 - protein, 9 aa, Homo sapiens
  Table A; Target 28822; HLA-B*13:02; GSG1L2; ENSG00000214978; CTA
MMYTTIFQI

SEQ ID NO: 28823 - protein, 9 aa, Homo sapiens
  Table A; Target 28823; HLA-B*51:01; GSG1L2; ENSG00000214978; CTA
MMYTTIFQI

SEQ ID NO: 28824 - protein, 9 aa, Homo sapiens
  Table A; Target 28824; HLA-A*26:01; GSG1L2; ENSG00000214978; CTA
MVLAGLLGM

SEQ ID NO: 28825 - protein, 9 aa, Homo sapiens
  Table A; Target 28825; HLA-A*29:02; GSG1L2; ENSG00000214978; CTA
MVLAGLLGM

SEQ ID NO: 28826 - protein, 9 aa, Homo sapiens
  Table A; Target 28826; HLA-B*35:01; GSG1L2; ENSG00000214978; CTA
MVLAGLLGM

SEQ ID NO: 28827 - protein, 11 aa, Homo sapiens
  Table A; Target 28827; HLA-B*54:01; GSG1L2; ENSG00000214978; CTA
MVLAGLLGMVA

SEQ ID NO: 28828 - protein, 11 aa, Homo sapiens
  Table A; Target 28828; HLA-B*56:01; GSG1L2; ENSG00000214978; CTA
MVLAGLLGMVA

SEQ ID NO: 28829 - protein, 8 aa, Homo sapiens
  Table A; Target 28829; HLA-A*23:01; GSG1L2; ENSG00000214978; CTA
MYTTIFQI

SEQ ID NO: 28830 - protein, 8 aa, Homo sapiens
  Table A; Target 28830; HLA-A*24:02; GSG1L2; ENSG00000214978; CTA
MYTTIFQI

SEQ ID NO: 28831 - protein, 8 aa, Homo sapiens
  Table A; Target 28831; HLA-B*07:02; GSG1L2; ENSG00000214978; CTA
MYTTIFQI

SEQ ID NO: 28832 - protein, 8 aa, Homo sapiens
  Table A; Target 28832; HLA-C*14:02; GSG1L2; ENSG00000214978; CTA
MYTTIFQI

SEQ ID NO: 28833 - protein, 9 aa, Homo sapiens
  Table A; Target 28833; HLA-A*24:02; GSG1L2; ENSG00000214978; CTA
MYTTIFQIT

SEQ ID NO: 28834 - protein, 8 aa, Homo sapiens
  Table A; Target 28834; HLA-B*18:01; GSG1L2; ENSG00000214978; CTA
NNSQAVLY

SEQ ID NO: 28835 - protein, 9 aa, Homo sapiens
  Table A; Target 28835; HLA-B*57:01; GSG1L2; ENSG00000214978; CTA
NSQAVLYIW

SEQ ID NO: 28836 - protein, 9 aa, Homo sapiens
  Table A; Target 28836; HLA-B*44:02; GSG1L2; ENSG00000214978; CTA
PEDWKPQTW

SEQ ID NO: 28837 - protein, 8 aa, Homo sapiens
  Table A; Target 28837; HLA-C*07:01; GSG1L2; ENSG00000214978; CTA
PVCLALTF

SEQ ID NO: 28838 - protein, 9 aa, Homo sapiens
  Table A; Target 28838; HLA-B*54:01; GSG1L2; ENSG00000214978; CTA
QALLLLPVC

SEQ ID NO: 28839 - protein, 9 aa, Homo sapiens
  Table A; Target 28839; HLA-B*35:03; GSG1L2; ENSG00000214978; CTA
QAVLYIWEL

SEQ ID NO: 28840 - protein, 9 aa, Homo sapiens
  Table A; Target 28840; HLA-B*39:01; GSG1L2; ENSG00000214978; CTA
QHSFLEPEA

SEQ ID NO: 28841 - protein, 9 aa, Homo sapiens
  Table A; Target 28841; HLA-B*13:02; GSG1L2; ENSG00000214978; CTA
QQALLLLPV

SEQ ID NO: 28842 - protein, 9 aa, Homo sapiens
  Table A; Target 28842; HLA-A*01:01; GSG1L2; ENSG00000214978; CTA
QTWDYGWSY

SEQ ID NO: 28843 - protein, 9 aa, Homo sapiens
  Table A; Target 28843; HLA-A*29:02; GSG1L2; ENSG00000214978; CTA
QTWDYGWSY

SEQ ID NO: 28844 - protein, 8 aa, Homo sapiens
  Table A; Target 28844; HLA-B*08:01; GSG1L2; ENSG00000214978; CTA
RAKQQQAL

SEQ ID NO: 28845 - protein, 9 aa, Homo sapiens
  Table A; Target 28845; HLA-A*23:01; GSG1L2; ENSG00000214978; CTA
RFTAARLEF

SEQ ID NO: 28846 - protein, 9 aa, Homo sapiens
  Table A; Target 28846; HLA-A*24:02; GSG1L2; ENSG00000214978; CTA
RFTAARLEF

SEQ ID NO: 28847 - protein, 8 aa, Homo sapiens
  Table A; Target 28847; HLA-B*57:01; GSG1L2; ENSG00000214978; CTA
RGFHVGLW

SEQ ID NO: 28848 - protein, 9 aa, Homo sapiens
  Table A; Target 28848; HLA-A*02:01; GSG1L2; ENSG00000214978; CTA
RMDNNSQAV

SEQ ID NO: 28849 - protein, 9 aa, Homo sapiens
  Table A; Target 28849; HLA-B*55:01; GSG1L2; ENSG00000214978; CTA
RMDNNSQAV

SEQ ID NO: 28850 - protein, 10 aa, Homo sapiens
  Table A; Target 28850; HLA-B*07:02; GSG1L2; ENSG00000214978; CTA
RMDNNSQAVL

SEQ ID NO: 28851 - protein, 10 aa, Homo sapiens
  Table A; Target 28851; HLA-B*40:01; GSG1L2; ENSG00000214978; CTA
RMDNNSQAVL

SEQ ID NO: 28852 - protein, 10 aa, Homo sapiens
  Table A; Target 28852; HLA-C*05:01; GSG1L2; ENSG00000214978; CTA
RMDNNSQAVL

SEQ ID NO: 28853 - protein, 11 aa, Homo sapiens
  Table A; Target 28853; HLA-A*01:01; GSG1L2; ENSG00000214978; CTA
RMDNNSQAVLY

SEQ ID NO: 28854 - protein, 11 aa, Homo sapiens
  Table A; Target 28854; HLA-A*29:02; GSG1L2; ENSG00000214978; CTA
RMDNNSQAVLY

SEQ ID NO: 28855 - protein, 11 aa, Homo sapiens
  Table A; Target 28855; HLA-A*30:02; GSG1L2; ENSG00000214978; CTA
RMDNNSQAVLY

SEQ ID NO: 28856 - protein, 9 aa, Homo sapiens
  Table A; Target 28856; HLA-A*02:07; GSG1L2; ENSG00000214978; CTA
RVDALVAIF

SEQ ID NO: 28857 - protein, 9 aa, Homo sapiens
  Table A; Target 28857; HLA-B*57:01; GSG1L2; ENSG00000214978; CTA
RVDALVAIF

SEQ ID NO: 28858 - protein, 9 aa, Homo sapiens
  Table A; Target 28858; HLA-B*58:01; GSG1L2; ENSG00000214978; CTA
RVDALVAIF

SEQ ID NO: 28859 - protein, 10 aa, Homo sapiens
  Table A; Target 28859; HLA-A*02:07; GSG1L2; ENSG00000214978; CTA
RVDALVAIFM

SEQ ID NO: 28860 - protein, 11 aa, Homo sapiens
  Table A; Target 28860; HLA-A*02:07; GSG1L2; ENSG00000214978; CTA
RVDALVAIFMV

SEQ ID NO: 28861 - protein, 9 aa, Homo sapiens
  Table A; Target 28861; HLA-A*68:02; GSG1L2; ENSG00000214978; CTA
SAILLGSRV

SEQ ID NO: 28862 - protein, 9 aa, Homo sapiens
  Table A; Target 28862; HLA-B*51:01; GSG1L2; ENSG00000214978; CTA
SAILLGSRV

SEQ ID NO: 28863 - protein, 9 aa, Homo sapiens
  Table A; Target 28863; HLA-B*54:01; GSG1L2; ENSG00000214978; CTA
SAILLGSRV

SEQ ID NO: 28864 - protein, 9 aa, Homo sapiens
  Table A; Target 28864; HLA-C*02:02; GSG1L2; ENSG00000214978; CTA
SAILLGSRV

SEQ ID NO: 28865 - protein, 9 aa, Homo sapiens
  Table A; Target 28865; HLA-C*05:01; GSG1L2; ENSG00000214978; CTA
SAILLGSRV

SEQ ID NO: 28866 - protein, 9 aa, Homo sapiens
  Table A; Target 28866; HLA-C*12:03; GSG1L2; ENSG00000214978; CTA
SAILLGSRV

SEQ ID NO: 28867 - protein, 9 aa, Homo sapiens
  Table A; Target 28867; HLA-C*16:02; GSG1L2; ENSG00000214978; CTA
SAILLGSRV

SEQ ID NO: 28868 - protein, 9 aa, Homo sapiens
  Table A; Target 28868; HLA-C*16:04; GSG1L2; ENSG00000214978; CTA
SAILLGSRV

SEQ ID NO: 28869 - protein, 8 aa, Homo sapiens
  Table A; Target 28869; HLA-A*32:01; GSG1L2; ENSG00000214978; CTA
SAMSRFTA

SEQ ID NO: 28870 - protein, 8 aa, Homo sapiens
  Table A; Target 28870; HLA-B*08:01; GSG1L2; ENSG00000214978; CTA
SAMSRFTA

SEQ ID NO: 28871 - protein, 8 aa, Homo sapiens
  Table A; Target 28871; HLA-B*54:01; GSG1L2; ENSG00000214978; CTA
SAMSRFTA

SEQ ID NO: 28872 - protein, 8 aa, Homo sapiens
  Table A; Target 28872; HLA-B*56:01; GSG1L2; ENSG00000214978; CTA
SAMSRFTA

SEQ ID NO: 28873 - protein, 8 aa, Homo sapiens
  Table A; Target 28873; HLA-C*16:01; GSG1L2; ENSG00000214978; CTA
SAMSRFTA

SEQ ID NO: 28874 - protein, 9 aa, Homo sapiens
  Table A; Target 28874; HLA-A*02:01; GSG1L2; ENSG00000214978; CTA
SAMSRFTAA

SEQ ID NO: 28875 - protein, 9 aa, Homo sapiens
  Table A; Target 28875; HLA-A*02:03; GSG1L2; ENSG00000214978; CTA
SAMSRFTAA

SEQ ID NO: 28876 - protein, 9 aa, Homo sapiens
  Table A; Target 28876; HLA-A*25:01; GSG1L2; ENSG00000214978; CTA
SAMSRFTAA

SEQ ID NO: 28877 - protein, 9 aa, Homo sapiens
  Table A; Target 28877; HLA-A*30:01; GSG1L2; ENSG00000214978; CTA
SAMSRFTAA

SEQ ID NO: 28878 - protein, 9 aa, Homo sapiens
  Table A; Target 28878; HLA-A*32:01; GSG1L2; ENSG00000214978; CTA
SAMSRFTAA

SEQ ID NO: 28879 - protein, 9 aa, Homo sapiens
  Table A; Target 28879; HLA-B*07:02; GSG1L2; ENSG00000214978; CTA
SAMSRFTAA

SEQ ID NO: 28880 - protein, 9 aa, Homo sapiens
  Table A; Target 28880; HLA-B*08:01; GSG1L2; ENSG00000214978; CTA
SAMSRFTAA

SEQ ID NO: 28881 - protein, 9 aa, Homo sapiens
  Table A; Target 28881; HLA-B*37:01; GSG1L2; ENSG00000214978; CTA
SAMSRFTAA

SEQ ID NO: 28882 - protein, 9 aa, Homo sapiens
  Table A; Target 28882; HLA-B*40:02; GSG1L2; ENSG00000214978; CTA
SAMSRFTAA

SEQ ID NO: 28883 - protein, 9 aa, Homo sapiens
  Table A; Target 28883; HLA-B*46:01; GSG1L2; ENSG00000214978; CTA
SAMSRFTAA

SEQ ID NO: 28884 - protein, 9 aa, Homo sapiens
  Table A; Target 28884; HLA-B*54:01; GSG1L2; ENSG00000214978; CTA
SAMSRFTAA

SEQ ID NO: 28885 - protein, 9 aa, Homo sapiens
  Table A; Target 28885; HLA-B*55:01; GSG1L2; ENSG00000214978; CTA
SAMSRFTAA

SEQ ID NO: 28886 - protein, 9 aa, Homo sapiens
  Table A; Target 28886; HLA-B*56:01; GSG1L2; ENSG00000214978; CTA
SAMSRFTAA

SEQ ID NO: 28887 - protein, 9 aa, Homo sapiens
  Table A; Target 28887; HLA-C*01:02; GSG1L2; ENSG00000214978; CTA
SAMSRFTAA

SEQ ID NO: 28888 - protein, 9 aa, Homo sapiens
  Table A; Target 28888; HLA-C*02:02; GSG1L2; ENSG00000214978; CTA
SAMSRFTAA

SEQ ID NO: 28889 - protein, 9 aa, Homo sapiens
  Table A; Target 28889; HLA-C*03:03; GSG1L2; ENSG00000214978; CTA
SAMSRFTAA

SEQ ID NO: 28890 - protein, 9 aa, Homo sapiens
  Table A; Target 28890; HLA-C*03:04; GSG1L2; ENSG00000214978; CTA
SAMSRFTAA

SEQ ID NO: 28891 - protein, 9 aa, Homo sapiens
  Table A; Target 28891; HLA-C*07:02; GSG1L2; ENSG00000214978; CTA
SAMSRFTAA

SEQ ID NO: 28892 - protein, 9 aa, Homo sapiens
  Table A; Target 28892; HLA-C*12:03; GSG1L2; ENSG00000214978; CTA
SAMSRFTAA

SEQ ID NO: 28893 - protein, 9 aa, Homo sapiens
  Table A; Target 28893; HLA-C*14:02; GSG1L2; ENSG00000214978; CTA
SAMSRFTAA

SEQ ID NO: 28894 - protein, 9 aa, Homo sapiens
  Table A; Target 28894; HLA-C*16:01; GSG1L2; ENSG00000214978; CTA
SAMSRFTAA

SEQ ID NO: 28895 - protein, 9 aa, Homo sapiens
  Table A; Target 28895; HLA-C*16:02; GSG1L2; ENSG00000214978; CTA
SAMSRFTAA

SEQ ID NO: 28896 - protein, 9 aa, Homo sapiens
  Table A; Target 28896; HLA-C*16:04; GSG1L2; ENSG00000214978; CTA
SAMSRFTAA

SEQ ID NO: 28897 - protein, 10 aa, Homo sapiens
  Table A; Target 28897; HLA-A*31:01; GSG1L2; ENSG00000214978; CTA
SAMSRFTAAR

SEQ ID NO: 28898 - protein, 10 aa, Homo sapiens
  Table A; Target 28898; HLA-A*33:01; GSG1L2; ENSG00000214978; CTA
SAMSRFTAAR

SEQ ID NO: 28899 - protein, 10 aa, Homo sapiens
  Table A; Target 28899; HLA-A*33:03; GSG1L2; ENSG00000214978; CTA
SAMSRFTAAR

SEQ ID NO: 28900 - protein, 9 aa, Homo sapiens
  Table A; Target 28900; HLA-B*37:01; GSG1L2; ENSG00000214978; CTA
SESIWKTGA

SEQ ID NO: 28901 - protein, 9 aa, Homo sapiens
  Table A; Target 28901; HLA-A*03:01; GSG1L2; ENSG00000214978; CTA
SLTAVVSSH

SEQ ID NO: 28902 - protein, 9 aa, Homo sapiens
  Table A; Target 28902; HLA-A*03:02; GSG1L2; ENSG00000214978; CTA
SLTAVVSSH

SEQ ID NO: 28903 - protein, 9 aa, Homo sapiens
  Table A; Target 28903; HLA-A*30:02; GSG1L2; ENSG00000214978; CTA
SLTAVVSSH

SEQ ID NO: 28904 - protein, 9 aa, Homo sapiens
  Table A; Target 28904; HLA-A*32:01; GSG1L2; ENSG00000214978; CTA
SLTAVVSSH

SEQ ID NO: 28905 - protein, 9 aa, Homo sapiens
  Table A; Target 28905; HLA-B*15:01; GSG1L2; ENSG00000214978; CTA
SLTAVVSSH

SEQ ID NO: 28906 - protein, 9 aa, Homo sapiens
  Table A; Target 28906; HLA-B*46:01; GSG1L2; ENSG00000214978; CTA
SLTAVVSSH

SEQ ID NO: 28907 - protein, 9 aa, Homo sapiens
  Table A; Target 28907; HLA-C*16:02; GSG1L2; ENSG00000214978; CTA
SLTAVVSSH

SEQ ID NO: 28908 - protein, 10 aa, Homo sapiens
  Table A; Target 28908; HLA-A*23:01; GSG1L2; ENSG00000214978; CTA
SLTAVVSSHW

SEQ ID NO: 28909 - protein, 10 aa, Homo sapiens
  Table A; Target 28909; HLA-A*24:02; GSG1L2; ENSG00000214978; CTA
SLTAVVSSHW

SEQ ID NO: 28910 - protein, 10 aa, Homo sapiens
  Table A; Target 28910; HLA-A*25:01; GSG1L2; ENSG00000214978; CTA
SLTAVVSSHW

SEQ ID NO: 28911 - protein, 10 aa, Homo sapiens
  Table A; Target 28911; HLA-A*32:01; GSG1L2; ENSG00000214978; CTA
SLTAVVSSHW

SEQ ID NO: 28912 - protein, 10 aa, Homo sapiens
  Table A; Target 28912; HLA-B*27:02; GSG1L2; ENSG00000214978; CTA
SLTAVVSSHW

SEQ ID NO: 28913 - protein, 10 aa, Homo sapiens
  Table A; Target 28913; HLA-B*44:02; GSG1L2; ENSG00000214978; CTA
SLTAVVSSHW

SEQ ID NO: 28914 - protein, 10 aa, Homo sapiens
  Table A; Target 28914; HLA-B*44:03; GSG1L2; ENSG00000214978; CTA
SLTAVVSSHW

SEQ ID NO: 28915 - protein, 10 aa, Homo sapiens
  Table A; Target 28915; HLA-B*57:01; GSG1L2; ENSG00000214978; CTA
SLTAVVSSHW

SEQ ID NO: 28916 - protein, 10 aa, Homo sapiens
  Table A; Target 28916; HLA-B*58:01; GSG1L2; ENSG00000214978; CTA
SLTAVVSSHW

SEQ ID NO: 28917 - protein, 10 aa, Homo sapiens
  Table A; Target 28917; HLA-A*02:04; GSG1L2; ENSG00000214978; CTA
SQAVLYIWEL

SEQ ID NO: 28918 - protein, 8 aa, Homo sapiens
  Table A; Target 28918; HLA-A*32:01; GSG1L2; ENSG00000214978; CTA
SVSAMSRF

SEQ ID NO: 28919 - protein, 8 aa, Homo sapiens
  Table A; Target 28919; HLA-B*37:01; GSG1L2; ENSG00000214978; CTA
SVSAMSRF

SEQ ID NO: 28920 - protein, 8 aa, Homo sapiens
  Table A; Target 28920; HLA-C*05:01; GSG1L2; ENSG00000214978; CTA
SVSAMSRF

SEQ ID NO: 28921 - protein, 10 aa, Homo sapiens
  Table A; Target 28921; HLA-A*03:01; GSG1L2; ENSG00000214978; CTA
TAARLEFTEK

SEQ ID NO: 28922 - protein, 10 aa, Homo sapiens
  Table A; Target 28922; HLA-A*03:02; GSG1L2; ENSG00000214978; CTA
TAARLEFTEK

SEQ ID NO: 28923 - protein, 10 aa, Homo sapiens
  Table A; Target 28923; HLA-A*11:01; GSG1L2; ENSG00000214978; CTA
TAARLEFTEK

SEQ ID NO: 28924 - protein, 10 aa, Homo sapiens
  Table A; Target 28924; HLA-A*68:01; GSG1L2; ENSG00000214978; CTA
TAARLEFTEK

SEQ ID NO: 28925 - protein, 10 aa, Homo sapiens
  Table A; Target 28925; HLA-B*27:02; GSG1L2; ENSG00000214978; CTA
TAARLEFTEK

SEQ ID NO: 28926 - protein, 10 aa, Homo sapiens
  Table A; Target 28926; HLA-C*07:06; GSG1L2; ENSG00000214978; CTA
TAARLEFTEK

SEQ ID NO: 28927 - protein, 8 aa, Homo sapiens
  Table A; Target 28927; HLA-A*25:01; GSG1L2; ENSG00000214978; CTA
TAVVSSHW

SEQ ID NO: 28928 - protein, 8 aa, Homo sapiens
  Table A; Target 28928; HLA-A*32:01; GSG1L2; ENSG00000214978; CTA
TAVVSSHW

SEQ ID NO: 28929 - protein, 8 aa, Homo sapiens
  Table A; Target 28929; HLA-B*51:01; GSG1L2; ENSG00000214978; CTA
TAVVSSHW

SEQ ID NO: 28930 - protein, 8 aa, Homo sapiens
  Table A; Target 28930; HLA-B*57:01; GSG1L2; ENSG00000214978; CTA
TAVVSSHW

SEQ ID NO: 28931 - protein, 8 aa, Homo sapiens
  Table A; Target 28931; HLA-B*58:01; GSG1L2; ENSG00000214978; CTA
TAVVSSHW

SEQ ID NO: 28932 - protein, 8 aa, Homo sapiens
  Table A; Target 28932; HLA-C*07:01; GSG1L2; ENSG00000214978; CTA
TAVVSSHW

SEQ ID NO: 28933 - protein, 8 aa, Homo sapiens
  Table A; Target 28933; HLA-C*12:03; GSG1L2; ENSG00000214978; CTA
TAVVSSHW

SEQ ID NO: 28934 - protein, 8 aa, Homo sapiens
  Table A; Target 28934; HLA-C*16:04; GSG1L2; ENSG00000214978; CTA
TAVVSSHW

SEQ ID NO: 28935 - protein, 11 aa, Homo sapiens
  Table A; Target 28935; HLA-A*33:03; GSG1L2; ENSG00000214978; CTA
TEKQQAQNGSR

SEQ ID NO: 28936 - protein, 9 aa, Homo sapiens
  Table A; Target 28936; HLA-A*02:01; GSG1L2; ENSG00000214978; CTA
TIFQITVNL

SEQ ID NO: 28937 - protein, 9 aa, Homo sapiens
  Table A; Target 28937; HLA-A*02:03; GSG1L2; ENSG00000214978; CTA
TIFQITVNL

SEQ ID NO: 28938 - protein, 9 aa, Homo sapiens
  Table A; Target 28938; HLA-A*02:04; GSG1L2; ENSG00000214978; CTA
TIFQITVNL

SEQ ID NO: 28939 - protein, 9 aa, Homo sapiens
  Table A; Target 28939; HLA-A*02:07; GSG1L2; ENSG00000214978; CTA
TIFQITVNL

SEQ ID NO: 28940 - protein, 9 aa, Homo sapiens
  Table A; Target 28940; HLA-A*23:01; GSG1L2; ENSG00000214978; CTA
TIFQITVNL

SEQ ID NO: 28941 - protein, 9 aa, Homo sapiens
  Table A; Target 28941; HLA-A*68:01; GSG1L2; ENSG00000214978; CTA
TIFQITVNL

SEQ ID NO: 28942 - protein, 9 aa, Homo sapiens
  Table A; Target 28942; HLA-A*68:02; GSG1L2; ENSG00000214978; CTA
TIFQITVNL

SEQ ID NO: 28943 - protein, 9 aa, Homo sapiens
  Table A; Target 28943; HLA-B*13:02; GSG1L2; ENSG00000214978; CTA
TIFQITVNL

SEQ ID NO: 28944 - protein, 9 aa, Homo sapiens
  Table A; Target 28944; HLA-B*27:05; GSG1L2; ENSG00000214978; CTA
TIFQITVNL

SEQ ID NO: 28945 - protein, 9 aa, Homo sapiens
  Table A; Target 28945; HLA-B*38:01; GSG1L2; ENSG00000214978; CTA
TIFQITVNL

SEQ ID NO: 28946 - protein, 9 aa, Homo sapiens
  Table A; Target 28946; HLA-C*02:02; GSG1L2; ENSG00000214978; CTA
TIFQITVNL

SEQ ID NO: 28947 - protein, 9 aa, Homo sapiens
  Table A; Target 28947; HLA-A*31:01; GSG1L2; ENSG00000214978; CTA
TSAILLGSR

SEQ ID NO: 28948 - protein, 9 aa, Homo sapiens
  Table A; Target 28948; HLA-A*33:03; GSG1L2; ENSG00000214978; CTA
TSAILLGSR

SEQ ID NO: 28949 - protein, 9 aa, Homo sapiens
  Table A; Target 28949; HLA-A*68:01; GSG1L2; ENSG00000214978; CTA
TSAILLGSR

SEQ ID NO: 28950 - protein, 9 aa, Homo sapiens
  Table A; Target 28950; HLA-C*07:06; GSG1L2; ENSG00000214978; CTA
TSAILLGSR

SEQ ID NO: 28951 - protein, 10 aa, Homo sapiens
  Table A; Target 28951; HLA-A*68:02; GSG1L2; ENSG00000214978; CTA
TSAILLGSRV

SEQ ID NO: 28952 - protein, 10 aa, Homo sapiens
  Table A; Target 28952; HLA-C*06:02; GSG1L2; ENSG00000214978; CTA
TSAILLGSRV

SEQ ID NO: 28953 - protein, 8 aa, Homo sapiens
  Table A; Target 28953; HLA-A*68:02; GSG1L2; ENSG00000214978; CTA
TTIFQITV

SEQ ID NO: 28954 - protein, 10 aa, Homo sapiens
  Table A; Target 28954; HLA-A*68:02; GSG1L2; ENSG00000214978; CTA
TTIFQITVNL

SEQ ID NO: 28955 - protein, 9 aa, Homo sapiens
  Table A; Target 28955; HLA-B*57:01; GSG1L2; ENSG00000214978; CTA
TVNLGPEDW

SEQ ID NO: 28956 - protein, 9 aa, Homo sapiens
  Table A; Target 28956; HLA-A*23:01; GSG1L2; ENSG00000214978; CTA
VAHMMYTTI

SEQ ID NO: 28957 - protein, 9 aa, Homo sapiens
  Table A; Target 28957; HLA-A*24:02; GSG1L2; ENSG00000214978; CTA
VAHMMYTTI

SEQ ID NO: 28958 - protein, 9 aa, Homo sapiens
  Table A; Target 28958; HLA-B*51:01; GSG1L2; ENSG00000214978; CTA
VAHMMYTTI

SEQ ID NO: 28959 - protein, 9 aa, Homo sapiens
  Table A; Target 28959; HLA-C*02:02; GSG1L2; ENSG00000214978; CTA
VAHMMYTTI

SEQ ID NO: 28960 - protein, 8 aa, Homo sapiens
  Table A; Target 28960; HLA-B*18:01; GSG1L2; ENSG00000214978; CTA
VDALVAIF

SEQ ID NO: 28961 - protein, 8 aa, Homo sapiens
  Table A; Target 28961; HLA-B*37:01; GSG1L2; ENSG00000214978; CTA
VDALVAIF

SEQ ID NO: 28962 - protein, 9 aa, Homo sapiens
  Table A; Target 28962; HLA-B*37:01; GSG1L2; ENSG00000214978; CTA
VDALVAIFM

SEQ ID NO: 28963 - protein, 9 aa, Homo sapiens
  Table A; Target 28963; HLA-A*02:01; GSG1L2; ENSG00000214978; CTA
VLAGLLGMV

SEQ ID NO: 28964 - protein, 9 aa, Homo sapiens
  Table A; Target 28964; HLA-A*02:03; GSG1L2; ENSG00000214978; CTA
VLAGLLGMV

SEQ ID NO: 28965 - protein, 9 aa, Homo sapiens
  Table A; Target 28965; HLA-A*02:04; GSG1L2; ENSG00000214978; CTA
VLAGLLGMV

SEQ ID NO: 28966 - protein, 9 aa, Homo sapiens
  Table A; Target 28966; HLA-A*02:07; GSG1L2; ENSG00000214978; CTA
VLAGLLGMV

SEQ ID NO: 28967 - protein, 9 aa, Homo sapiens
  Table A; Target 28967; HLA-B*13:02; GSG1L2; ENSG00000214978; CTA
VLAGLLGMV

SEQ ID NO: 28968 - protein, 9 aa, Homo sapiens
  Table A; Target 28968; HLA-B*55:01; GSG1L2; ENSG00000214978; CTA
VLAGLLGMV

SEQ ID NO: 28969 - protein, 10 aa, Homo sapiens
  Table A; Target 28969; HLA-A*02:03; GSG1L2; ENSG00000214978; CTA
VLAGLLGMVA

SEQ ID NO: 28970 - protein, 10 aa, Homo sapiens
  Table A; Target 28970; HLA-C*12:03; GSG1L2; ENSG00000214978; CTA
VLAGLLGMVA

SEQ ID NO: 28971 - protein, 8 aa, Homo sapiens
  Table A; Target 28971; HLA-B*51:01; GSG1L2; ENSG00000214978; CTA
VPAEEQGV

SEQ ID NO: 28972 - protein, 9 aa, Homo sapiens
  Table A; Target 28972; HLA-B*07:02; GSG1L2; ENSG00000214978; CTA
VPAEEQGVL

SEQ ID NO: 28973 - protein, 9 aa, Homo sapiens
  Table A; Target 28973; HLA-B*35:01; GSG1L2; ENSG00000214978; CTA
VPAEEQGVL

SEQ ID NO: 28974 - protein, 9 aa, Homo sapiens
  Table A; Target 28974; HLA-B*35:03; GSG1L2; ENSG00000214978; CTA
VPAEEQGVL

SEQ ID NO: 28975 - protein, 9 aa, Homo sapiens
  Table A; Target 28975; HLA-B*51:01; GSG1L2; ENSG00000214978; CTA
VPAEEQGVL

SEQ ID NO: 28976 - protein, 9 aa, Homo sapiens
  Table A; Target 28976; HLA-B*55:01; GSG1L2; ENSG00000214978; CTA
VPAEEQGVL

SEQ ID NO: 28977 - protein, 9 aa, Homo sapiens
  Table A; Target 28977; HLA-C*03:03; GSG1L2; ENSG00000214978; CTA
VPAEEQGVL

SEQ ID NO: 28978 - protein, 9 aa, Homo sapiens
  Table A; Target 28978; HLA-C*05:01; GSG1L2; ENSG00000214978; CTA
VPAEEQGVL

SEQ ID NO: 28979 - protein, 9 aa, Homo sapiens
  Table A; Target 28979; HLA-C*07:02; GSG1L2; ENSG00000214978; CTA
VPAEEQGVL

SEQ ID NO: 28980 - protein, 10 aa, Homo sapiens
  Table A; Target 28980; HLA-A*25:01; GSG1L2; ENSG00000214978; CTA
VPAEEQGVLW

SEQ ID NO: 28981 - protein, 10 aa, Homo sapiens
  Table A; Target 28981; HLA-B*35:01; GSG1L2; ENSG00000214978; CTA
VPAEEQGVLW

SEQ ID NO: 28982 - protein, 10 aa, Homo sapiens
  Table A; Target 28982; HLA-B*57:01; GSG1L2; ENSG00000214978; CTA
VPAEEQGVLW

SEQ ID NO: 28983 - protein, 10 aa, Homo sapiens
  Table A; Target 28983; HLA-C*07:06; GSG1L2; ENSG00000214978; CTA
VPAEEQGVLW

SEQ ID NO: 28984 - protein, 9 aa, Homo sapiens
  Table A; Target 28984; HLA-C*16:01; GSG1L2; ENSG00000214978; CTA
VSAMSRFTA

SEQ ID NO: 28985 - protein, 10 aa, Homo sapiens
  Table A; Target 28985; HLA-B*40:02; GSG1L2; ENSG00000214978; CTA
VSAMSRFTAA

SEQ ID NO: 28986 - protein, 9 aa, Homo sapiens
  Table A; Target 28986; HLA-A*23:01; GSG1L2; ENSG00000214978; CTA
VSVSAMSRF

SEQ ID NO: 28987 - protein, 9 aa, Homo sapiens
  Table A; Target 28987; HLA-A*24:02; GSG1L2; ENSG00000214978; CTA
VSVSAMSRF

SEQ ID NO: 28988 - protein, 9 aa, Homo sapiens
  Table A; Target 28988; HLA-A*25:01; GSG1L2; ENSG00000214978; CTA
VSVSAMSRF

SEQ ID NO: 28989 - protein, 9 aa, Homo sapiens
  Table A; Target 28989; HLA-A*26:01; GSG1L2; ENSG00000214978; CTA
VSVSAMSRF

SEQ ID NO: 28990 - protein, 9 aa, Homo sapiens
  Table A; Target 28990; HLA-B*46:01; GSG1L2; ENSG00000214978; CTA
VSVSAMSRF

SEQ ID NO: 28991 - protein, 9 aa, Homo sapiens
  Table A; Target 28991; HLA-B*57:01; GSG1L2; ENSG00000214978; CTA
VSVSAMSRF

SEQ ID NO: 28992 - protein, 9 aa, Homo sapiens
  Table A; Target 28992; HLA-B*58:01; GSG1L2; ENSG00000214978; CTA
VSVSAMSRF

SEQ ID NO: 28993 - protein, 9 aa, Homo sapiens
  Table A; Target 28993; HLA-C*02:02; GSG1L2; ENSG00000214978; CTA
VSVSAMSRF

SEQ ID NO: 28994 - protein, 9 aa, Homo sapiens
  Table A; Target 28994; HLA-C*12:03; GSG1L2; ENSG00000214978; CTA
VSVSAMSRF

SEQ ID NO: 28995 - protein, 9 aa, Homo sapiens
  Table A; Target 28995; HLA-C*16:01; GSG1L2; ENSG00000214978; CTA
VSVSAMSRF

SEQ ID NO: 28996 - protein, 9 aa, Homo sapiens
  Table A; Target 28996; HLA-A*02:07; GSG1L2; ENSG00000214978; CTA
VVPAEEQGV

SEQ ID NO: 28997 - protein, 11 aa, Homo sapiens
  Table A; Target 28997; HLA-A*25:01; GSG1L2; ENSG00000214978; CTA
VVPAEEQGVLW

SEQ ID NO: 28998 - protein, 11 aa, Homo sapiens
  Table A; Target 28998; HLA-B*57:01; GSG1L2; ENSG00000214978; CTA
VVPAEEQGVLW

SEQ ID NO: 28999 - protein, 11 aa, Homo sapiens
  Table A; Target 28999; HLA-B*58:01; GSG1L2; ENSG00000214978; CTA
VVPAEEQGVLW

SEQ ID NO: 29000 - protein, 10 aa, Homo sapiens
  Table A; Target 29000; HLA-A*02:07; GSG1L2; ENSG00000214978; CTA
YIWELGDDKF

SEQ ID NO: 29001 - protein, 9 aa, Homo sapiens
  Table A; Target 29001; HLA-A*30:01; GSG1L2; ENSG00000214978; CTA
YTTIFQITV

SEQ ID NO: 29002 - protein, 9 aa, Homo sapiens
  Table A; Target 29002; HLA-A*68:02; GSG1L2; ENSG00000214978; CTA
YTTIFQITV

SEQ ID NO: 29003 - protein, 9 aa, Homo sapiens
  Table A; Target 29003; HLA-B*13:02; GSG1L2; ENSG00000214978; CTA
YTTIFQITV

SEQ ID NO: 29004 - protein, 9 aa, Homo sapiens
  Table A; Target 29004; HLA-B*40:02; GSG1L2; ENSG00000214978; CTA
YTTIFQITV

SEQ ID NO: 29005 - protein, 9 aa, Homo sapiens
  Table A; Target 29005; HLA-B*49:01; GSG1L2; ENSG00000214978; CTA
YTTIFQITV

SEQ ID NO: 29006 - protein, 9 aa, Homo sapiens
  Table A; Target 29006; HLA-B*51:01; GSG1L2; ENSG00000214978; CTA
YTTIFQITV

SEQ ID NO: 29007 - protein, 9 aa, Homo sapiens
  Table A; Target 29007; HLA-B*54:01; GSG1L2; ENSG00000214978; CTA
YTTIFQITV

SEQ ID NO: 29008 - protein, 9 aa, Homo sapiens
  Table A; Target 29008; HLA-C*02:02; GSG1L2; ENSG00000214978; CTA
YTTIFQITV

SEQ ID NO: 29009 - protein, 9 aa, Homo sapiens
  Table A; Target 29009; HLA-C*16:02; GSG1L2; ENSG00000214978; CTA
YTTIFQITV

SEQ ID NO: 29010 - protein, 11 aa, Homo sapiens
  Table A; Target 29010; HLA-A*68:02; GSG1L2; ENSG00000214978; CTA
YTTIFQITVNL

SEQ ID NO: 29011 - protein, 9 aa, Homo sapiens
  Table A; Target 29011; HLA-B*37:01; GTSF1; ENSG00000170627; TAA
AEISHHISS

SEQ ID NO: 29012 - protein, 9 aa, Homo sapiens
  Table A; Target 29012; HLA-B*40:02; GTSF1; ENSG00000170627; TAA
AEISHHISS

SEQ ID NO: 29013 - protein, 9 aa, Homo sapiens
  Table A; Target 29013; HLA-B*49:01; GTSF1; ENSG00000170627; TAA
AEISHHISS

SEQ ID NO: 29014 - protein, 10 aa, Homo sapiens
  Table A; Target 29014; HLA-A*30:01; GTSF1; ENSG00000170627; TAA
AEISHHISSC

SEQ ID NO: 29015 - protein, 10 aa, Homo sapiens
  Table A; Target 29015; HLA-B*49:01; GTSF1; ENSG00000170627; TAA
AEISHHISSC

SEQ ID NO: 29016 - protein, 8 aa, Homo sapiens
  Table A; Target 29016; HLA-C*16:01; GTSF1; ENSG00000170627; TAA
ASGMRVPK

SEQ ID NO: 29017 - protein, 9 aa, Homo sapiens
  Table A; Target 29017; HLA-A*03:01; GTSF1; ENSG00000170627; TAA
ASNIVTEHK

SEQ ID NO: 29018 - protein, 9 aa, Homo sapiens
  Table A; Target 29018; HLA-A*03:02; GTSF1; ENSG00000170627; TAA
ASNIVTEHK

SEQ ID NO: 29019 - protein, 9 aa, Homo sapiens
  Table A; Target 29019; HLA-A*11:01; GTSF1; ENSG00000170627; TAA
ASNIVTEHK

SEQ ID NO: 29020 - protein, 9 aa, Homo sapiens
  Table A; Target 29020; HLA-A*31:01; GTSF1; ENSG00000170627; TAA
ASNIVTEHK

SEQ ID NO: 29021 - protein, 9 aa, Homo sapiens
  Table A; Target 29021; HLA-B*57:01; GTSF1; ENSG00000170627; TAA
ASNIVTEHK

SEQ ID NO: 29022 - protein, 9 aa, Homo sapiens
  Table A; Target 29022; HLA-C*07:06; GTSF1; ENSG00000170627; TAA
ASNIVTEHK

SEQ ID NO: 29023 - protein, 8 aa, Homo sapiens
  Table A; Target 29023; HLA-A*31:01; GTSF1; ENSG00000170627; TAA
ATCPFNAR

SEQ ID NO: 29024 - protein, 9 aa, Homo sapiens
  Table A; Target 29024; HLA-B*07:02; GTSF1; ENSG00000170627; TAA
CPFNARHQV

SEQ ID NO: 29025 - protein, 9 aa, Homo sapiens
  Table A; Target 29025; HLA-B*51:01; GTSF1; ENSG00000170627; TAA
CPFNARHQV

SEQ ID NO: 29026 - protein, 9 aa, Homo sapiens
  Table A; Target 29026; HLA-B*54:01; GTSF1; ENSG00000170627; TAA
CPFNARHQV

SEQ ID NO: 29027 - protein, 9 aa, Homo sapiens
  Table A; Target 29027; HLA-B*56:01; GTSF1; ENSG00000170627; TAA
CPFNARHQV

SEQ ID NO: 29028 - protein, 9 aa, Homo sapiens
  Table A; Target 29028; HLA-A*23:01; GTSF1; ENSG00000170627; TAA
CPYDKNHQI

SEQ ID NO: 29029 - protein, 9 aa, Homo sapiens
  Table A; Target 29029; HLA-B*07:02; GTSF1; ENSG00000170627; TAA
CPYDKNHQI

SEQ ID NO: 29030 - protein, 9 aa, Homo sapiens
  Table A; Target 29030; HLA-B*08:01; GTSF1; ENSG00000170627; TAA
CPYDKNHQI

SEQ ID NO: 29031 - protein, 9 aa, Homo sapiens
  Table A; Target 29031; HLA-B*13:02; GTSF1; ENSG00000170627; TAA
CPYDKNHQI

SEQ ID NO: 29032 - protein, 9 aa, Homo sapiens
  Table A; Target 29032; HLA-B*35:03; GTSF1; ENSG00000170627; TAA
CPYDKNHQI

SEQ ID NO: 29033 - protein, 9 aa, Homo sapiens
  Table A; Target 29033; HLA-B*49:01; GTSF1; ENSG00000170627; TAA
CPYDKNHQI

SEQ ID NO: 29034 - protein, 9 aa, Homo sapiens
  Table A; Target 29034; HLA-B*51:01; GTSF1; ENSG00000170627; TAA
CPYDKNHQI

SEQ ID NO: 29035 - protein, 9 aa, Homo sapiens
  Table A; Target 29035; HLA-B*54:01; GTSF1; ENSG00000170627; TAA
CPYDKNHQI

SEQ ID NO: 29036 - protein, 9 aa, Homo sapiens
  Table A; Target 29036; HLA-B*55:01; GTSF1; ENSG00000170627; TAA
CPYDKNHQI

SEQ ID NO: 29037 - protein, 9 aa, Homo sapiens
  Table A; Target 29037; HLA-B*56:01; GTSF1; ENSG00000170627; TAA
CPYDKNHQI

SEQ ID NO: 29038 - protein, 9 aa, Homo sapiens
  Table A; Target 29038; HLA-C*16:02; GTSF1; ENSG00000170627; TAA
CPYDKNHQI

SEQ ID NO: 29039 - protein, 10 aa, Homo sapiens
  Table A; Target 29039; HLA-A*25:01; GTSF1; ENSG00000170627; TAA
DLWEQTSTPF

SEQ ID NO: 29040 - protein, 9 aa, Homo sapiens
  Table A; Target 29040; HLA-A*33:01; GTSF1; ENSG00000170627; TAA
DNNSPASNI

SEQ ID NO: 29041 - protein, 9 aa, Homo sapiens
  Table A; Target 29041; HLA-A*33:03; GTSF1; ENSG00000170627; TAA
DNNSPASNI

SEQ ID NO: 29042 - protein, 9 aa, Homo sapiens
  Table A; Target 29042; HLA-B*51:01; GTSF1; ENSG00000170627; TAA
DNNSPASNI

SEQ ID NO: 29043 - protein, 9 aa, Homo sapiens
  Table A; Target 29043; HLA-A*25:01; GTSF1; ENSG00000170627; TAA
DVASKLATC

SEQ ID NO: 29044 - protein, 9 aa, Homo sapiens
  Table A; Target 29044; HLA-A*26:01; GTSF1; ENSG00000170627; TAA
DVASKLATC

SEQ ID NO: 29045 - protein, 9 aa, Homo sapiens
  Table A; Target 29045; HLA-A*25:01; GTSF1; ENSG00000170627; TAA
DVVNQTRSL

SEQ ID NO: 29046 - protein, 9 aa, Homo sapiens
  Table A; Target 29046; HLA-A*26:01; GTSF1; ENSG00000170627; TAA
DVVNQTRSL

SEQ ID NO: 29047 - protein, 9 aa, Homo sapiens
  Table A; Target 29047; HLA-A*68:01; GTSF1; ENSG00000170627; TAA
DVVNQTRSL

SEQ ID NO: 29048 - protein, 9 aa, Homo sapiens
  Table A; Target 29048; HLA-A*68:02; GTSF1; ENSG00000170627; TAA
DVVNQTRSL

SEQ ID NO: 29049 - protein, 9 aa, Homo sapiens
  Table A; Target 29049; HLA-B*08:01; GTSF1; ENSG00000170627; TAA
DVVNQTRSL

SEQ ID NO: 29050 - protein, 9 aa, Homo sapiens
  Table A; Target 29050; HLA-B*51:01; GTSF1; ENSG00000170627; TAA
DVVNQTRSL

SEQ ID NO: 29051 - protein, 9 aa, Homo sapiens
  Table A; Target 29051; HLA-C*01:02; GTSF1; ENSG00000170627; TAA
DVVNQTRSL

SEQ ID NO: 29052 - protein, 9 aa, Homo sapiens
  Table A; Target 29052; HLA-C*03:03; GTSF1; ENSG00000170627; TAA
DVVNQTRSL

SEQ ID NO: 29053 - protein, 9 aa, Homo sapiens
  Table A; Target 29053; HLA-C*03:04; GTSF1; ENSG00000170627; TAA
DVVNQTRSL

SEQ ID NO: 29054 - protein, 9 aa, Homo sapiens
  Table A; Target 29054; HLA-C*14:02; GTSF1; ENSG00000170627; TAA
DVVNQTRSL

SEQ ID NO: 29055 - protein, 10 aa, Homo sapiens
  Table A; Target 29055; HLA-A*26:01; GTSF1; ENSG00000170627; TAA
DVVNQTRSLR

SEQ ID NO: 29056 - protein, 10 aa, Homo sapiens
  Table A; Target 29056; HLA-A*33:01; GTSF1; ENSG00000170627; TAA
DVVNQTRSLR

SEQ ID NO: 29057 - protein, 10 aa, Homo sapiens
  Table A; Target 29057; HLA-A*33:03; GTSF1; ENSG00000170627; TAA
DVVNQTRSLR

SEQ ID NO: 29058 - protein, 10 aa, Homo sapiens
  Table A; Target 29058; HLA-A*68:01; GTSF1; ENSG00000170627; TAA
DVVNQTRSLR

SEQ ID NO: 29059 - protein, 10 aa, Homo sapiens
  Table A; Target 29059; HLA-C*07:06; GTSF1; ENSG00000170627; TAA
DVVNQTRSLR

SEQ ID NO: 29060 - protein, 8 aa, Homo sapiens
  Table A; Target 29060; HLA-B*18:01; GTSF1; ENSG00000170627; TAA
EETYTDSL

SEQ ID NO: 29061 - protein, 8 aa, Homo sapiens
  Table A; Target 29061; HLA-B*40:01; GTSF1; ENSG00000170627; TAA
EETYTDSL

SEQ ID NO: 29062 - protein, 9 aa, Homo sapiens
  Table A; Target 29062; HLA-A*33:03; GTSF1; ENSG00000170627; TAA
EQDVVNQTR

SEQ ID NO: 29063 - protein, 9 aa, Homo sapiens
  Table A; Target 29063; HLA-A*68:01; GTSF1; ENSG00000170627; TAA
EQDVVNQTR

SEQ ID NO: 29064 - protein, 9 aa, Homo sapiens
  Table A; Target 29064; HLA-B*38:01; GTSF1; ENSG00000170627; TAA
EQDVVNQTR

SEQ ID NO: 29065 - protein, 9 aa, Homo sapiens
  Table A; Target 29065; HLA-C*07:06; GTSF1; ENSG00000170627; TAA
EQDVVNQTR

SEQ ID NO: 29066 - protein, 11 aa, Homo sapiens
  Table A; Target 29066; HLA-B*38:01; GTSF1; ENSG00000170627; TAA
EQDVVNQTRSL

SEQ ID NO: 29067 - protein, 8 aa, Homo sapiens
  Table A; Target 29067; HLA-B*13:02; GTSF1; ENSG00000170627; TAA
EQTSTPFV

SEQ ID NO: 29068 - protein, 9 aa, Homo sapiens
  Table A; Target 29068; HLA-A*24:02; GTSF1; ENSG00000170627; TAA
EQTSTPFVW

SEQ ID NO: 29069 - protein, 9 aa, Homo sapiens
  Table A; Target 29069; HLA-A*25:01; GTSF1; ENSG00000170627; TAA
EQTSTPFVW

SEQ ID NO: 29070 - protein, 9 aa, Homo sapiens
  Table A; Target 29070; HLA-B*44:02; GTSF1; ENSG00000170627; TAA
EQTSTPFVW

SEQ ID NO: 29071 - protein, 11 aa, Homo sapiens
  Table A; Target 29071; HLA-A*11:01; GTSF1; ENSG00000170627; TAA
ETYTDSLDPEK

SEQ ID NO: 29072 - protein, 11 aa, Homo sapiens
  Table A; Target 29072; HLA-A*33:01; GTSF1; ENSG00000170627; TAA
ETYTDSLDPEK

SEQ ID NO: 29073 - protein, 11 aa, Homo sapiens
  Table A; Target 29073; HLA-A*33:03; GTSF1; ENSG00000170627; TAA
ETYTDSLDPEK

SEQ ID NO: 29074 - protein, 11 aa, Homo sapiens
  Table A; Target 29074; HLA-A*68:01; GTSF1; ENSG00000170627; TAA
ETYTDSLDPEK

SEQ ID NO: 29075 - protein, 11 aa, Homo sapiens
  Table A; Target 29075; HLA-B*27:02; GTSF1; ENSG00000170627; TAA
ETYTDSLDPEK

SEQ ID NO: 29076 - protein, 11 aa, Homo sapiens
  Table A; Target 29076; HLA-C*07:06; GTSF1; ENSG00000170627; TAA
ETYTDSLDPEK

SEQ ID NO: 29077 - protein, 9 aa, Homo sapiens
  Table A; Target 29077; HLA-A*33:03; GTSF1; ENSG00000170627; TAA
FNARHQVPR

SEQ ID NO: 29078 - protein, 8 aa, Homo sapiens
  Table A; Target 29078; HLA-B*51:01; GTSF1; ENSG00000170627; TAA
FPYHLIKC

SEQ ID NO: 29079 - protein, 8 aa, Homo sapiens
  Table A; Target 29079; HLA-B*54:01; GTSF1; ENSG00000170627; TAA
FPYHLIKC

SEQ ID NO: 29080 - protein, 8 aa, Homo sapiens
  Table A; Target 29080; HLA-B*56:01; GTSF1; ENSG00000170627; TAA
FPYHLIKC

SEQ ID NO: 29081 - protein, 9 aa, Homo sapiens
  Table A; Target 29081; HLA-B*54:01; GTSF1; ENSG00000170627; TAA
FPYHLIKCR

SEQ ID NO: 29082 - protein, 8 aa, Homo sapiens
  Table A; Target 29082; HLA-A*29:02; GTSF1; ENSG00000170627; TAA
FVWGTTHY

SEQ ID NO: 29083 - protein, 10 aa, Homo sapiens
  Table A; Target 29083; HLA-A*03:01; GTSF1; ENSG00000170627; TAA
GMRVPKSLPY

SEQ ID NO: 29084 - protein, 9 aa, Homo sapiens
  Table A; Target 29084; HLA-B*15:03; GTSF1; ENSG00000170627; TAA
HKNNLASGM

SEQ ID NO: 29085 - protein, 8 aa, Homo sapiens
  Table A; Target 29085; HLA-B*07:02; GTSF1; ENSG00000170627; TAA
HPDVASKL

SEQ ID NO: 29086 - protein, 8 aa, Homo sapiens
  Table A; Target 29086; HLA-B*08:01; GTSF1; ENSG00000170627; TAA
HPDVASKL

SEQ ID NO: 29087 - protein, 8 aa, Homo sapiens
  Table A; Target 29087; HLA-B*35:01; GTSF1; ENSG00000170627; TAA
HPDVASKL

SEQ ID NO: 29088 - protein, 8 aa, Homo sapiens
  Table A; Target 29088; HLA-B*35:03; GTSF1; ENSG00000170627; TAA
HPDVASKL

SEQ ID NO: 29089 - protein, 8 aa, Homo sapiens
  Table A; Target 29089; HLA-B*51:01; GTSF1; ENSG00000170627; TAA
HPDVASKL

SEQ ID NO: 29090 - protein, 8 aa, Homo sapiens
  Table A; Target 29090; HLA-B*55:01; GTSF1; ENSG00000170627; TAA
HPDVASKL

SEQ ID NO: 29091 - protein, 8 aa, Homo sapiens
  Table A; Target 29091; HLA-C*03:03; GTSF1; ENSG00000170627; TAA
HPDVASKL

SEQ ID NO: 29092 - protein, 8 aa, Homo sapiens
  Table A; Target 29092; HLA-C*03:04; GTSF1; ENSG00000170627; TAA
HPDVASKL

SEQ ID NO: 29093 - protein, 8 aa, Homo sapiens
  Table A; Target 29093; HLA-C*04:01; GTSF1; ENSG00000170627; TAA
HPDVASKL

SEQ ID NO: 29094 - protein, 8 aa, Homo sapiens
  Table A; Target 29094; HLA-C*05:01; GTSF1; ENSG00000170627; TAA
HPDVASKL

SEQ ID NO: 29095 - protein, 8 aa, Homo sapiens
  Table A; Target 29095; HLA-C*07:02; GTSF1; ENSG00000170627; TAA
HPDVASKL

SEQ ID NO: 29096 - protein, 8 aa, Homo sapiens
  Table A; Target 29096; HLA-C*07:04; GTSF1; ENSG00000170627; TAA
HPDVASKL

SEQ ID NO: 29097 - protein, 8 aa, Homo sapiens
  Table A; Target 29097; HLA-C*16:02; GTSF1; ENSG00000170627; TAA
HPDVASKL

SEQ ID NO: 29098 - protein, 9 aa, Homo sapiens
  Table A; Target 29098; HLA-B*54:01; GTSF1; ENSG00000170627; TAA
HPDVASKLA

SEQ ID NO: 29099 - protein, 9 aa, Homo sapiens
  Table A; Target 29099; HLA-B*55:01; GTSF1; ENSG00000170627; TAA
HPDVASKLA

SEQ ID NO: 29100 - protein, 9 aa, Homo sapiens
  Table A; Target 29100; HLA-B*56:01; GTSF1; ENSG00000170627; TAA
HPDVASKLA

SEQ ID NO: 29101 - protein, 10 aa, Homo sapiens
  Table A; Target 29101; HLA-B*55:01; GTSF1; ENSG00000170627; TAA
HPDVASKLAT

SEQ ID NO: 29102 - protein, 11 aa, Homo sapiens
  Table A; Target 29102; HLA-B*55:01; GTSF1; ENSG00000170627; TAA
HPDVASKLATC

SEQ ID NO: 29103 - protein, 11 aa, Homo sapiens
  Table A; Target 29103; HLA-B*56:01; GTSF1; ENSG00000170627; TAA
HPDVASKLATC

SEQ ID NO: 29104 - protein, 8 aa, Homo sapiens
  Table A; Target 29104; HLA-B*13:02; GTSF1; ENSG00000170627; TAA
HQVPRAEI

SEQ ID NO: 29105 - protein, 9 aa, Homo sapiens
  Table A; Target 29105; HLA-C*14:02; GTSF1; ENSG00000170627; TAA
HYSDNNSPA

SEQ ID NO: 29106 - protein, 9 aa, Homo sapiens
  Table A; Target 29106; HLA-A*30:01; GTSF1; ENSG00000170627; TAA
IEQDVVNQT

SEQ ID NO: 29107 - protein, 9 aa, Homo sapiens
  Table A; Target 29107; HLA-B*13:02; GTSF1; ENSG00000170627; TAA
IEQDVVNQT

SEQ ID NO: 29108 - protein, 9 aa, Homo sapiens
  Table A; Target 29108; HLA-B*18:01; GTSF1; ENSG00000170627; TAA
IEQDVVNQT

SEQ ID NO: 29109 - protein, 9 aa, Homo sapiens
  Table A; Target 29109; HLA-B*40:02; GTSF1; ENSG00000170627; TAA
IEQDVVNQT

SEQ ID NO: 29110 - protein, 9 aa, Homo sapiens
  Table A; Target 29110; HLA-B*44:02; GTSF1; ENSG00000170627; TAA
IEQDVVNQT

SEQ ID NO: 29111 - protein, 9 aa, Homo sapiens
  Table A; Target 29111; HLA-B*44:03; GTSF1; ENSG00000170627; TAA
IEQDVVNQT

SEQ ID NO: 29112 - protein, 9 aa, Homo sapiens
  Table A; Target 29112; HLA-B*49:01; GTSF1; ENSG00000170627; TAA
IEQDVVNQT

SEQ ID NO: 29113 - protein, 9 aa, Homo sapiens
  Table A; Target 29113; HLA-C*16:02; GTSF1; ENSG00000170627; TAA
IEQDVVNQT

SEQ ID NO: 29114 - protein, 10 aa, Homo sapiens
  Table A; Target 29114; HLA-A*31:01; GTSF1; ENSG00000170627; TAA
IEQDVVNQTR

SEQ ID NO: 29115 - protein, 10 aa, Homo sapiens
  Table A; Target 29115; HLA-A*33:03; GTSF1; ENSG00000170627; TAA
IEQDVVNQTR

SEQ ID NO: 29116 - protein, 10 aa, Homo sapiens
  Table A; Target 29116; HLA-A*68:01; GTSF1; ENSG00000170627; TAA
IEQDVVNQTR

SEQ ID NO: 29117 - protein, 10 aa, Homo sapiens
  Table A; Target 29117; HLA-B*27:02; GTSF1; ENSG00000170627; TAA
IEQDVVNQTR

SEQ ID NO: 29118 - protein, 10 aa, Homo sapiens
  Table A; Target 29118; HLA-B*40:01; GTSF1; ENSG00000170627; TAA
IEQDVVNQTR

SEQ ID NO: 29119 - protein, 10 aa, Homo sapiens
  Table A; Target 29119; HLA-B*44:02; GTSF1; ENSG00000170627; TAA
IEQDVVNQTR

SEQ ID NO: 29120 - protein, 10 aa, Homo sapiens
  Table A; Target 29120; HLA-B*44:03; GTSF1; ENSG00000170627; TAA
IEQDVVNQTR

SEQ ID NO: 29121 - protein, 10 aa, Homo sapiens
  Table A; Target 29121; HLA-B*57:01; GTSF1; ENSG00000170627; TAA
IEQDVVNQTR

SEQ ID NO: 29122 - protein, 10 aa, Homo sapiens
  Table A; Target 29122; HLA-C*07:06; GTSF1; ENSG00000170627; TAA
IEQDVVNQTR

SEQ ID NO: 29123 - protein, 9 aa, Homo sapiens
  Table A; Target 29123; HLA-A*23:01; GTSF1; ENSG00000170627; TAA
IVTEHKNNL

SEQ ID NO: 29124 - protein, 9 aa, Homo sapiens
  Table A; Target 29124; HLA-A*32:01; GTSF1; ENSG00000170627; TAA
IVTEHKNNL

SEQ ID NO: 29125 - protein, 9 aa, Homo sapiens
  Table A; Target 29125; HLA-B*27:05; GTSF1; ENSG00000170627; TAA
IVTEHKNNL

SEQ ID NO: 29126 - protein, 9 aa, Homo sapiens
  Table A; Target 29126; HLA-B*37:01; GTSF1; ENSG00000170627; TAA
IVTEHKNNL

SEQ ID NO: 29127 - protein, 9 aa, Homo sapiens
  Table A; Target 29127; HLA-C*16:01; GTSF1; ENSG00000170627; TAA
IVTEHKNNL

SEQ ID NO: 29128 - protein, 9 aa, Homo sapiens
  Table A; Target 29128; HLA-C*16:02; GTSF1; ENSG00000170627; TAA
IVTEHKNNL

SEQ ID NO: 29129 - protein, 10 aa, Homo sapiens
  Table A; Target 29129; HLA-A*03:01; GTSF1; ENSG00000170627; TAA
KLATCPFNAR

SEQ ID NO: 29130 - protein, 9 aa, Homo sapiens
  Table A; Target 29130; HLA-A*03:02; GTSF1; ENSG00000170627; TAA
KNHPDVASK

SEQ ID NO: 29131 - protein, 10 aa, Homo sapiens
  Table A; Target 29131; HLA-C*07:02; GTSF1; ENSG00000170627; TAA
KNHPDVASKL

SEQ ID NO: 29132 - protein, 9 aa, Homo sapiens
  Table A; Target 29132; HLA-A*31:01; GTSF1; ENSG00000170627; TAA
KSLPYVLPW

SEQ ID NO: 29133 - protein, 9 aa, Homo sapiens
  Table A; Target 29133; HLA-B*57:01; GTSF1; ENSG00000170627; TAA
KSLPYVLPW

SEQ ID NO: 29134 - protein, 9 aa, Homo sapiens
  Table A; Target 29134; HLA-A*11:01; GTSF1; ENSG00000170627; TAA
LASGMRVPK

SEQ ID NO: 29135 - protein, 9 aa, Homo sapiens
  Table A; Target 29135; HLA-C*16:01; GTSF1; ENSG00000170627; TAA
LASGMRVPK

SEQ ID NO: 29136 - protein, 9 aa, Homo sapiens
  Table A; Target 29136; HLA-B*54:01; GTSF1; ENSG00000170627; TAA
LPWKNNGNA

SEQ ID NO: 29137 - protein, 10 aa, Homo sapiens
  Table A; Target 29137; HLA-B*35:01; GTSF1; ENSG00000170627; TAA
LPWKNNGNAQ

SEQ ID NO: 29138 - protein, 10 aa, Homo sapiens
  Table A; Target 29138; HLA-B*54:01; GTSF1; ENSG00000170627; TAA
LPWKNNGNAQ

SEQ ID NO: 29139 - protein, 9 aa, Homo sapiens
  Table A; Target 29139; HLA-B*54:01; GTSF1; ENSG00000170627; TAA
LPYVLPWKN

SEQ ID NO: 29140 - protein, 11 aa, Homo sapiens
  Table A; Target 29140; HLA-C*16:04; GTSF1; ENSG00000170627; TAA
LRQETLAESTW

SEQ ID NO: 29141 - protein, 9 aa, Homo sapiens
  Table A; Target 29141; HLA-B*40:01; GTSF1; ENSG00000170627; TAA
MEETYTDSL

SEQ ID NO: 29142 - protein, 9 aa, Homo sapiens
  Table A; Target 29142; HLA-A*02:07; GTSF1; ENSG00000170627; TAA
NHPDVASKL

SEQ ID NO: 29143 - protein, 9 aa, Homo sapiens
  Table A; Target 29143; HLA-A*24:02; GTSF1; ENSG00000170627; TAA
NHPDVASKL

SEQ ID NO: 29144 - protein, 9 aa, Homo sapiens
  Table A; Target 29144; HLA-B*38:01; GTSF1; ENSG00000170627; TAA
NHPDVASKL

SEQ ID NO: 29145 - protein, 9 aa, Homo sapiens
  Table A; Target 29145; HLA-B*39:01; GTSF1; ENSG00000170627; TAA
NHPDVASKL

SEQ ID NO: 29146 - protein, 9 aa, Homo sapiens
  Table A; Target 29146; HLA-C*01:02; GTSF1; ENSG00000170627; TAA
NHPDVASKL

SEQ ID NO: 29147 - protein, 9 aa, Homo sapiens
  Table A; Target 29147; HLA-C*06:02; GTSF1; ENSG00000170627; TAA
NHPDVASKL

SEQ ID NO: 29148 - protein, 11 aa, Homo sapiens
  Table A; Target 29148; HLA-A*33:01; GTSF1; ENSG00000170627; TAA
NNLASGMRVPK

SEQ ID NO: 29149 - protein, 9 aa, Homo sapiens
  Table A; Target 29149; HLA-C*12:03; GTSF1; ENSG00000170627; TAA
NNSPASNIV

SEQ ID NO: 29150 - protein, 9 aa, Homo sapiens
  Table A; Target 29150; HLA-C*12:03; GTSF1; ENSG00000170627; TAA
PASNIVTEH

SEQ ID NO: 29151 - protein, 9 aa, Homo sapiens
  Table A; Target 29151; HLA-A*29:02; GTSF1; ENSG00000170627; TAA
PFVWGTTHY

SEQ ID NO: 29152 - protein, 8 aa, Homo sapiens
  Table A; Target 29152; HLA-A*24:02; GTSF1; ENSG00000170627; TAA
PYDKNHQI

SEQ ID NO: 29153 - protein, 8 aa, Homo sapiens
  Table A; Target 29153; HLA-C*04:01; GTSF1; ENSG00000170627; TAA
PYDKNHQI

SEQ ID NO: 29154 - protein, 9 aa, Homo sapiens
  Table A; Target 29154; HLA-B*18:01; GTSF1; ENSG00000170627; TAA
QETLAESTW

SEQ ID NO: 29155 - protein, 9 aa, Homo sapiens
  Table A; Target 29155; HLA-B*27:02; GTSF1; ENSG00000170627; TAA
QETLAESTW

SEQ ID NO: 29156 - protein, 9 aa, Homo sapiens
  Table A; Target 29156; HLA-B*40:01; GTSF1; ENSG00000170627; TAA
QETLAESTW

SEQ ID NO: 29157 - protein, 9 aa, Homo sapiens
  Table A; Target 29157; HLA-B*40:02; GTSF1; ENSG00000170627; TAA
QETLAESTW

SEQ ID NO: 29158 - protein, 9 aa, Homo sapiens
  Table A; Target 29158; HLA-B*44:02; GTSF1; ENSG00000170627; TAA
QETLAESTW

SEQ ID NO: 29159 - protein, 9 aa, Homo sapiens
  Table A; Target 29159; HLA-B*44:03; GTSF1; ENSG00000170627; TAA
QETLAESTW

SEQ ID NO: 29160 - protein, 9 aa, Homo sapiens
  Table A; Target 29160; HLA-B*49:01; GTSF1; ENSG00000170627; TAA
QETLAESTW

SEQ ID NO: 29161 - protein, 9 aa, Homo sapiens
  Table A; Target 29161; HLA-C*16:04; GTSF1; ENSG00000170627; TAA
QETLAESTW

SEQ ID NO: 29162 - protein, 8 aa, Homo sapiens
  Table A; Target 29162; HLA-B*57:01; GTSF1; ENSG00000170627; TAA
QTSTPFVW

SEQ ID NO: 29163 - protein, 8 aa, Homo sapiens
  Table A; Target 29163; HLA-B*58:01; GTSF1; ENSG00000170627; TAA
QTSTPFVW

SEQ ID NO: 29164 - protein, 10 aa, Homo sapiens
  Table A; Target 29164; HLA-A*32:01; GTSF1; ENSG00000170627; TAA
RQETLAESTW

SEQ ID NO: 29165 - protein, 10 aa, Homo sapiens
  Table A; Target 29165; HLA-B*58:01; GTSF1; ENSG00000170627; TAA
RQETLAESTW

SEQ ID NO: 29166 - protein, 10 aa, Homo sapiens
  Table A; Target 29166; HLA-C*16:04; GTSF1; ENSG00000170627; TAA
RQETLAESTW

SEQ ID NO: 29167 - protein, 8 aa, Homo sapiens
  Table A; Target 29167; HLA-B*58:01; GTSF1; ENSG00000170627; TAA
RSLRQETL

SEQ ID NO: 29168 - protein, 9 aa, Homo sapiens
  Table A; Target 29168; HLA-A*02:04; GTSF1; ENSG00000170627; TAA
RVPKSLPYV

SEQ ID NO: 29169 - protein, 9 aa, Homo sapiens
  Table A; Target 29169; HLA-A*02:07; GTSF1; ENSG00000170627; TAA
RVPKSLPYV

SEQ ID NO: 29170 - protein, 8 aa, Homo sapiens
  Table A; Target 29170; HLA-C*05:01; GTSF1; ENSG00000170627; TAA
SLDPEKLL

SEQ ID NO: 29171 - protein, 10 aa, Homo sapiens
  Table A; Target 29171; HLA-A*02:01; GTSF1; ENSG00000170627; TAA
SLDPEKLLQC

SEQ ID NO: 29172 - protein, 9 aa, Homo sapiens
  Table A; Target 29172; HLA-B*56:01; GTSF1; ENSG00000170627; TAA
SPASNIVTE

SEQ ID NO: 29173 - protein, 10 aa, Homo sapiens
  Table A; Target 29173; HLA-A*68:01; GTSF1; ENSG00000170627; TAA
SPASNIVTEH

SEQ ID NO: 29174 - protein, 10 aa, Homo sapiens
  Table A; Target 29174; HLA-B*07:02; GTSF1; ENSG00000170627; TAA
SPASNIVTEH

SEQ ID NO: 29175 - protein, 10 aa, Homo sapiens
  Table A; Target 29175; HLA-B*35:01; GTSF1; ENSG00000170627; TAA
SPASNIVTEH

SEQ ID NO: 29176 - protein, 10 aa, Homo sapiens
  Table A; Target 29176; HLA-B*56:01; GTSF1; ENSG00000170627; TAA
SPASNIVTEH

SEQ ID NO: 29177 - protein, 10 aa, Homo sapiens
  Table A; Target 29177; HLA-C*07:02; GTSF1; ENSG00000170627; TAA
SPASNIVTEH

SEQ ID NO: 29178 - protein, 10 aa, Homo sapiens
  Table A; Target 29178; HLA-C*07:06; GTSF1; ENSG00000170627; TAA
SPASNIVTEH

SEQ ID NO: 29179 - protein, 8 aa, Homo sapiens
  Table A; Target 29179; HLA-B*27:02; GTSF1; ENSG00000170627; TAA
TDSLDPEK

SEQ ID NO: 29180 - protein, 9 aa, Homo sapiens
  Table A; Target 29180; HLA-B*37:01; GTSF1; ENSG00000170627; TAA
TDSLDPEKL

SEQ ID NO: 29181 - protein, 9 aa, Homo sapiens
  Table A; Target 29181; HLA-B*38:01; GTSF1; ENSG00000170627; TAA
TDSLDPEKL

SEQ ID NO: 29182 - protein, 9 aa, Homo sapiens
  Table A; Target 29182; HLA-B*40:01; GTSF1; ENSG00000170627; TAA
TDSLDPEKL

SEQ ID NO: 29183 - protein, 9 aa, Homo sapiens
  Table A; Target 29183; HLA-B*27:05; GTSF1; ENSG00000170627; TAA
THYSDNNSP

SEQ ID NO: 29184 - protein, 9 aa, Homo sapiens
  Table A; Target 29184; HLA-B*38:01; GTSF1; ENSG00000170627; TAA
THYSDNNSP

SEQ ID NO: 29185 - protein, 9 aa, Homo sapiens
  Table A; Target 29185; HLA-A*02:01; GTSF1; ENSG00000170627; TAA
TLAESTWQC

SEQ ID NO: 29186 - protein, 9 aa, Homo sapiens
  Table A; Target 29186; HLA-B*35:01; GTSF1; ENSG00000170627; TAA
TPFVWGTTH

SEQ ID NO: 29187 - protein, 9 aa, Homo sapiens
  Table A; Target 29187; HLA-B*51:01; GTSF1; ENSG00000170627; TAA
TPFVWGTTH

SEQ ID NO: 29188 - protein, 10 aa, Homo sapiens
  Table A; Target 29188; HLA-A*29:02; GTSF1; ENSG00000170627; TAA
TPFVWGTTHY

SEQ ID NO: 29189 - protein, 10 aa, Homo sapiens
  Table A; Target 29189; HLA-B*35:01; GTSF1; ENSG00000170627; TAA
TPFVWGTTHY

SEQ ID NO: 29190 - protein, 10 aa, Homo sapiens
  Table A; Target 29190; HLA-C*07:01; GTSF1; ENSG00000170627; TAA
TPFVWGTTHY

SEQ ID NO: 29191 - protein, 9 aa, Homo sapiens
  Table A; Target 29191; HLA-B*38:01; GTSF1; ENSG00000170627; TAA
TRSLRQETL

SEQ ID NO: 29192 - protein, 10 aa, Homo sapiens
  Table A; Target 29192; HLA-B*27:02; GTSF1; ENSG00000170627; TAA
TYTDSLDPEK

SEQ ID NO: 29193 - protein, 11 aa, Homo sapiens
  Table A; Target 29193; HLA-A*24:02; GTSF1; ENSG00000170627; TAA
TYTDSLDPEKL

SEQ ID NO: 29194 - protein, 8 aa, Homo sapiens
  Table A; Target 29194; HLA-B*51:01; GTSF1; ENSG00000170627; TAA
VPKSLPYV

SEQ ID NO: 29195 - protein, 8 aa, Homo sapiens
  Table A; Target 29195; HLA-B*56:01; GTSF1; ENSG00000170627; TAA
VPKSLPYV

SEQ ID NO: 29196 - protein, 9 aa, Homo sapiens
  Table A; Target 29196; HLA-A*23:01; GTSF1; ENSG00000170627; TAA
VPKSLPYVL

SEQ ID NO: 29197 - protein, 9 aa, Homo sapiens
  Table A; Target 29197; HLA-B*07:02; GTSF1; ENSG00000170627; TAA
VPKSLPYVL

SEQ ID NO: 29198 - protein, 9 aa, Homo sapiens
  Table A; Target 29198; HLA-B*08:01; GTSF1; ENSG00000170627; TAA
VPKSLPYVL

SEQ ID NO: 29199 - protein, 9 aa, Homo sapiens
  Table A; Target 29199; HLA-B*56:01; GTSF1; ENSG00000170627; TAA
VPKSLPYVL

SEQ ID NO: 29200 - protein, 9 aa, Homo sapiens
  Table A; Target 29200; HLA-C*07:02; GTSF1; ENSG00000170627; TAA
VPKSLPYVL

SEQ ID NO: 29201 - protein, 8 aa, Homo sapiens
  Table A; Target 29201; HLA-A*32:01; GTSF1; ENSG00000170627; TAA
VVNQTRSL

SEQ ID NO: 29202 - protein, 8 aa, Homo sapiens
  Table A; Target 29202; HLA-B*07:02; GTSF1; ENSG00000170627; TAA
VVNQTRSL

SEQ ID NO: 29203 - protein, 8 aa, Homo sapiens
  Table A; Target 29203; HLA-B*08:01; GTSF1; ENSG00000170627; TAA
VVNQTRSL

SEQ ID NO: 29204 - protein, 8 aa, Homo sapiens
  Table A; Target 29204; HLA-B*46:01; GTSF1; ENSG00000170627; TAA
VVNQTRSL

SEQ ID NO: 29205 - protein, 8 aa, Homo sapiens
  Table A; Target 29205; HLA-C*01:02; GTSF1; ENSG00000170627; TAA
VVNQTRSL

SEQ ID NO: 29206 - protein, 8 aa, Homo sapiens
  Table A; Target 29206; HLA-C*03:03; GTSF1; ENSG00000170627; TAA
VVNQTRSL

SEQ ID NO: 29207 - protein, 8 aa, Homo sapiens
  Table A; Target 29207; HLA-C*03:04; GTSF1; ENSG00000170627; TAA
VVNQTRSL

SEQ ID NO: 29208 - protein, 8 aa, Homo sapiens
  Table A; Target 29208; HLA-C*14:02; GTSF1; ENSG00000170627; TAA
VVNQTRSL

SEQ ID NO: 29209 - protein, 8 aa, Homo sapiens
  Table A; Target 29209; HLA-C*16:01; GTSF1; ENSG00000170627; TAA
VVNQTRSL

SEQ ID NO: 29210 - protein, 9 aa, Homo sapiens
  Table A; Target 29210; HLA-A*03:01; GTSF1; ENSG00000170627; TAA
VVNQTRSLR

SEQ ID NO: 29211 - protein, 9 aa, Homo sapiens
  Table A; Target 29211; HLA-A*31:01; GTSF1; ENSG00000170627; TAA
VVNQTRSLR

SEQ ID NO: 29212 - protein, 9 aa, Homo sapiens
  Table A; Target 29212; HLA-A*33:01; GTSF1; ENSG00000170627; TAA
VVNQTRSLR

SEQ ID NO: 29213 - protein, 9 aa, Homo sapiens
  Table A; Target 29213; HLA-A*33:03; GTSF1; ENSG00000170627; TAA
VVNQTRSLR

SEQ ID NO: 29214 - protein, 8 aa, Homo sapiens
  Table A; Target 29214; HLA-B*18:01; GTSF1; ENSG00000170627; TAA
WEQTSTPF

SEQ ID NO: 29215 - protein, 8 aa, Homo sapiens
  Table A; Target 29215; HLA-B*37:01; GTSF1; ENSG00000170627; TAA
WEQTSTPF

SEQ ID NO: 29216 - protein, 9 aa, Homo sapiens
  Table A; Target 29216; HLA-B*49:01; GTSF1; ENSG00000170627; TAA
WEQTSTPFV

SEQ ID NO: 29217 - protein, 10 aa, Homo sapiens
  Table A; Target 29217; HLA-B*44:02; GTSF1; ENSG00000170627; TAA
WEQTSTPFVW

SEQ ID NO: 29218 - protein, 10 aa, Homo sapiens
  Table A; Target 29218; HLA-B*44:03; GTSF1; ENSG00000170627; TAA
WEQTSTPFVW

SEQ ID NO: 29219 - protein, 9 aa, Homo sapiens
  Table A; Target 29219; HLA-A*01:01; GTSF1; ENSG00000170627; TAA
YSDNNSPAS

SEQ ID NO: 29220 - protein, 10 aa, Homo sapiens
  Table A; Target 29220; HLA-A*01:01; GTSF1; ENSG00000170627; TAA
YSDNNSPASN

SEQ ID NO: 29221 - protein, 11 aa, Homo sapiens
  Table A; Target 29221; HLA-A*01:01; GTSF1; ENSG00000170627; TAA
YSDNNSPASNI

SEQ ID NO: 29222 - protein, 11 aa, Homo sapiens
  Table A; Target 29222; HLA-B*38:01; GTSF1; ENSG00000170627; TAA
YSDNNSPASNI

SEQ ID NO: 29223 - protein, 11 aa, Homo sapiens
  Table A; Target 29223; HLA-C*05:01; GTSF1; ENSG00000170627; TAA
YSDNNSPASNI

SEQ ID NO: 29224 - protein, 9 aa, Homo sapiens
  Table A; Target 29224; HLA-A*01:01; GTSF1; ENSG00000170627; TAA
YTDSLDPEK

SEQ ID NO: 29225 - protein, 9 aa, Homo sapiens
  Table A; Target 29225; HLA-A*11:01; GTSF1; ENSG00000170627; TAA
YTDSLDPEK

SEQ ID NO: 29226 - protein, 10 aa, Homo sapiens
  Table A; Target 29226; HLA-A*01:01; GTSF1; ENSG00000170627; TAA
YTDSLDPEKL

SEQ ID NO: 29227 - protein, 10 aa, Homo sapiens
  Table A; Target 29227; HLA-A*02:07; GTSF1; ENSG00000170627; TAA
YTDSLDPEKL

SEQ ID NO: 29228 - protein, 10 aa, Homo sapiens
  Table A; Target 29228; HLA-B*35:03; GTSF1; ENSG00000170627; TAA
YTDSLDPEKL

SEQ ID NO: 29229 - protein, 10 aa, Homo sapiens
  Table A; Target 29229; HLA-B*38:01; GTSF1; ENSG00000170627; TAA
YTDSLDPEKL

SEQ ID NO: 29230 - protein, 10 aa, Homo sapiens
  Table A; Target 29230; HLA-C*05:01; GTSF1; ENSG00000170627; TAA
YTDSLDPEKL

SEQ ID NO: 29231 - protein, 11 aa, Homo sapiens
  Table A; Target 29231; HLA-A*01:01; GTSF1; ENSG00000170627; TAA
YTDSLDPEKLL

SEQ ID NO: 29232 - protein, 11 aa, Homo sapiens
  Table A; Target 29232; HLA-A*02:07; GTSF1; ENSG00000170627; TAA
YTDSLDPEKLL

SEQ ID NO: 29233 - protein, 8 aa, Homo sapiens
  Table A; Target 29233; HLA-B*37:01; HAVCR1; ENSG00000113249; TAA
ADSVAGSV

SEQ ID NO: 29234 - protein, 9 aa, Homo sapiens
  Table A; Target 29234; HLA-B*37:01; HAVCR1; ENSG00000113249; TAA
ADSVAGSVK

SEQ ID NO: 29235 - protein, 10 aa, Homo sapiens
  Table A; Target 29235; HLA-B*37:01; HAVCR1; ENSG00000113249; TAA
ADSVAGSVKV

SEQ ID NO: 29236 - protein, 10 aa, Homo sapiens
  Table A; Target 29236; HLA-B*40:02; HAVCR1; ENSG00000113249; TAA
ADSVAGSVKV

SEQ ID NO: 29237 - protein, 10 aa, Homo sapiens
  Table A; Target 29237; HLA-B*49:01; HAVCR1; ENSG00000113249; TAA
ADSVAGSVKV

SEQ ID NO: 29238 - protein, 11 aa, Homo sapiens
  Table A; Target 29238; HLA-B*07:02; HAVCR1; ENSG00000113249; TAA
ADSVAGSVKVG

SEQ ID NO: 29239 - protein, 11 aa, Homo sapiens
  Table A; Target 29239; HLA-C*07:02; HAVCR1; ENSG00000113249; TAA
ADSVAGSVKVG

SEQ ID NO: 29240 - protein, 11 aa, Homo sapiens
  Table A; Target 29240; HLA-A*30:01; HAVCR1; ENSG00000113249; TAA
AEDNIYIENSL

SEQ ID NO: 29241 - protein, 11 aa, Homo sapiens
  Table A; Target 29241; HLA-B*38:01; HAVCR1; ENSG00000113249; TAA
AEDNIYIENSL

SEQ ID NO: 29242 - protein, 11 aa, Homo sapiens
  Table A; Target 29242; HLA-B*40:01; HAVCR1; ENSG00000113249; TAA
AEDNIYIENSL

SEQ ID NO: 29243 - protein, 8 aa, Homo sapiens
  Table A; Target 29243; HLA-A*30:01; HAVCR1; ENSG00000113249; TAA
AETHPTTL

SEQ ID NO: 29244 - protein, 8 aa, Homo sapiens
  Table A; Target 29244; HLA-B*37:01; HAVCR1; ENSG00000113249; TAA
AETHPTTL

SEQ ID NO: 29245 - protein, 8 aa, Homo sapiens
  Table A; Target 29245; HLA-B*40:01; HAVCR1; ENSG00000113249; TAA
AETHPTTL

SEQ ID NO: 29246 - protein, 8 aa, Homo sapiens
  Table A; Target 29246; HLA-B*44:03; HAVCR1; ENSG00000113249; TAA
AETHPTTL

SEQ ID NO: 29247 - protein, 8 aa, Homo sapiens
  Table A; Target 29247; HLA-B*49:01; HAVCR1; ENSG00000113249; TAA
AETHPTTL

SEQ ID NO: 29248 - protein, 9 aa, Homo sapiens
  Table A; Target 29248; HLA-A*02:01; HAVCR1; ENSG00000113249; TAA
ALLGVIIAK

SEQ ID NO: 29249 - protein, 9 aa, Homo sapiens
  Table A; Target 29249; HLA-A*02:04; HAVCR1; ENSG00000113249; TAA
ALLGVIIAK

SEQ ID NO: 29250 - protein, 9 aa, Homo sapiens
  Table A; Target 29250; HLA-A*03:01; HAVCR1; ENSG00000113249; TAA
ALLGVIIAK

SEQ ID NO: 29251 - protein, 9 aa, Homo sapiens
  Table A; Target 29251; HLA-A*03:02; HAVCR1; ENSG00000113249; TAA
ALLGVIIAK

SEQ ID NO: 29252 - protein, 9 aa, Homo sapiens
  Table A; Target 29252; HLA-A*11:01; HAVCR1; ENSG00000113249; TAA
ALLGVIIAK

SEQ ID NO: 29253 - protein, 9 aa, Homo sapiens
  Table A; Target 29253; HLA-A*29:02; HAVCR1; ENSG00000113249; TAA
ALLGVIIAK

SEQ ID NO: 29254 - protein, 9 aa, Homo sapiens
  Table A; Target 29254; HLA-A*31:01; HAVCR1; ENSG00000113249; TAA
ALLGVIIAK

SEQ ID NO: 29255 - protein, 9 aa, Homo sapiens
  Table A; Target 29255; HLA-A*33:03; HAVCR1; ENSG00000113249; TAA
ALLGVIIAK

SEQ ID NO: 29256 - protein, 9 aa, Homo sapiens
  Table A; Target 29256; HLA-B*13:02; HAVCR1; ENSG00000113249; TAA
ALLGVIIAK

SEQ ID NO: 29257 - protein, 9 aa, Homo sapiens
  Table A; Target 29257; HLA-B*27:05; HAVCR1; ENSG00000113249; TAA
ALLGVIIAK

SEQ ID NO: 29258 - protein, 9 aa, Homo sapiens
  Table A; Target 29258; HLA-C*07:06; HAVCR1; ENSG00000113249; TAA
ALLGVIIAK

SEQ ID NO: 29259 - protein, 10 aa, Homo sapiens
  Table A; Target 29259; HLA-A*03:01; HAVCR1; ENSG00000113249; TAA
ALLGVIIAKK

SEQ ID NO: 29260 - protein, 10 aa, Homo sapiens
  Table A; Target 29260; HLA-A*03:02; HAVCR1; ENSG00000113249; TAA
ALLGVIIAKK

SEQ ID NO: 29261 - protein, 10 aa, Homo sapiens
  Table A; Target 29261; HLA-A*11:01; HAVCR1; ENSG00000113249; TAA
ALLGVIIAKK

SEQ ID NO: 29262 - protein, 11 aa, Homo sapiens
  Table A; Target 29262; HLA-A*29:02; HAVCR1; ENSG00000113249; TAA
ALLGVIIAKKY

SEQ ID NO: 29263 - protein, 11 aa, Homo sapiens
  Table A; Target 29263; HLA-A*30:02; HAVCR1; ENSG00000113249; TAA
ALLGVIIAKKY

SEQ ID NO: 29264 - protein, 8 aa, Homo sapiens
  Table A; Target 29264; HLA-A*03:02; HAVCR1; ENSG00000113249; TAA
ALQNAVEK

SEQ ID NO: 29265 - protein, 8 aa, Homo sapiens
  Table A; Target 29265; HLA-C*16:01; HAVCR1; ENSG00000113249; TAA
ANTTKGIY

SEQ ID NO: 29266 - protein, 8 aa, Homo sapiens
  Table A; Target 29266; HLA-A*30:02; HAVCR1; ENSG00000113249; TAA
AVSDSGVY

SEQ ID NO: 29267 - protein, 8 aa, Homo sapiens
  Table A; Target 29267; HLA-A*32:01; HAVCR1; ENSG00000113249; TAA
AVSDSGVY

SEQ ID NO: 29268 - protein, 8 aa, Homo sapiens
  Table A; Target 29268; HLA-B*15:01; HAVCR1; ENSG00000113249; TAA
AVSDSGVY

SEQ ID NO: 29269 - protein, 8 aa, Homo sapiens
  Table A; Target 29269; HLA-B*39:01; HAVCR1; ENSG00000113249; TAA
AVSDSGVY

SEQ ID NO: 29270 - protein, 11 aa, Homo sapiens
  Table A; Target 29270; HLA-A*31:01; HAVCR1; ENSG00000113249; TAA
AVSDSGVYCCR

SEQ ID NO: 29271 - protein, 11 aa, Homo sapiens
  Table A; Target 29271; HLA-A*68:01; HAVCR1; ENSG00000113249; TAA
AVSDSGVYCCR

SEQ ID NO: 29272 - protein, 9 aa, Homo sapiens
  Table A; Target 29272; HLA-A*31:01; HAVCR1; ENSG00000113249; TAA
AVTSMCWNR

SEQ ID NO: 29273 - protein, 10 aa, Homo sapiens
  Table A; Target 29273; HLA-B*38:01; HAVCR1; ENSG00000113249; TAA
CHYSGAVTSM

SEQ ID NO: 29274 - protein, 10 aa, Homo sapiens
  Table A; Target 29274; HLA-B*39:01; HAVCR1; ENSG00000113249; TAA
CHYSGAVTSM

SEQ ID NO: 29275 - protein, 9 aa, Homo sapiens
  Table A; Target 29275; HLA-B*08:01; HAVCR1; ENSG00000113249; TAA
DLSRRDVSL

SEQ ID NO: 29276 - protein, 8 aa, Homo sapiens
  Table A; Target 29276; HLA-B*08:01; HAVCR1; ENSG00000113249; TAA
DMKITVSL

SEQ ID NO: 29277 - protein, 9 aa, Homo sapiens
  Table A; Target 29277; HLA-B*18:01; HAVCR1; ENSG00000113249; TAA
DNIYIENSL

SEQ ID NO: 29278 - protein, 10 aa, Homo sapiens
  Table A; Target 29278; HLA-A*25:01; HAVCR1; ENSG00000113249; TAA
DNIYIENSLY

SEQ ID NO: 29279 - protein, 10 aa, Homo sapiens
  Table A; Target 29279; HLA-A*26:01; HAVCR1; ENSG00000113249; TAA
DNIYIENSLY

SEQ ID NO: 29280 - protein, 10 aa, Homo sapiens
  Table A; Target 29280; HLA-A*33:01; HAVCR1; ENSG00000113249; TAA
DNIYIENSLY

SEQ ID NO: 29281 - protein, 9 aa, Homo sapiens
  Table A; Target 29281; HLA-A*25:01; HAVCR1; ENSG00000113249; TAA
DSVAGSVKV

SEQ ID NO: 29282 - protein, 9 aa, Homo sapiens
  Table A; Target 29282; HLA-A*26:01; HAVCR1; ENSG00000113249; TAA
DSVAGSVKV

SEQ ID NO: 29283 - protein, 9 aa, Homo sapiens
  Table A; Target 29283; HLA-A*68:01; HAVCR1; ENSG00000113249; TAA
DSVAGSVKV

SEQ ID NO: 29284 - protein, 9 aa, Homo sapiens
  Table A; Target 29284; HLA-A*68:02; HAVCR1; ENSG00000113249; TAA
DSVAGSVKV

SEQ ID NO: 29285 - protein, 9 aa, Homo sapiens
  Table A; Target 29285; HLA-B*51:01; HAVCR1; ENSG00000113249; TAA
DSVAGSVKV

SEQ ID NO: 29286 - protein, 10 aa, Homo sapiens
  Table A; Target 29286; HLA-C*12:03; HAVCR1; ENSG00000113249; TAA
DSVAGSVKVG

SEQ ID NO: 29287 - protein, 11 aa, Homo sapiens
  Table A; Target 29287; HLA-A*01:01; HAVCR1; ENSG00000113249; TAA
DTVTESSDGLW

SEQ ID NO: 29288 - protein, 11 aa, Homo sapiens
  Table A; Target 29288; HLA-A*25:01; HAVCR1; ENSG00000113249; TAA
DTVTESSDGLW

SEQ ID NO: 29289 - protein, 11 aa, Homo sapiens
  Table A; Target 29289; HLA-A*26:01; HAVCR1; ENSG00000113249; TAA
DTVTESSDGLW

SEQ ID NO: 29290 - protein, 11 aa, Homo sapiens
  Table A; Target 29290; HLA-A*33:01; HAVCR1; ENSG00000113249; TAA
DTVTESSDGLW

SEQ ID NO: 29291 - protein, 11 aa, Homo sapiens
  Table A; Target 29291; HLA-A*33:03; HAVCR1; ENSG00000113249; TAA
DTVTESSDGLW

SEQ ID NO: 29292 - protein, 11 aa, Homo sapiens
  Table A; Target 29292; HLA-A*68:01; HAVCR1; ENSG00000113249; TAA
DTVTESSDGLW

SEQ ID NO: 29293 - protein, 11 aa, Homo sapiens
  Table A; Target 29293; HLA-B*57:01; HAVCR1; ENSG00000113249; TAA
DTVTESSDGLW

SEQ ID NO: 29294 - protein, 11 aa, Homo sapiens
  Table A; Target 29294; HLA-A*68:02; HAVCR1; ENSG00000113249; TAA
DVSLTIENTAV

SEQ ID NO: 29295 - protein, 8 aa, Homo sapiens
  Table A; Target 29295; HLA-B*35:03; HAVCR1; ENSG00000113249; TAA
EAGPSVTL

SEQ ID NO: 29296 - protein, 8 aa, Homo sapiens
  Table A; Target 29296; HLA-C*05:01; HAVCR1; ENSG00000113249; TAA
EAGPSVTL

SEQ ID NO: 29297 - protein, 9 aa, Homo sapiens
  Table A; Target 29297; HLA-B*38:01; HAVCR1; ENSG00000113249; TAA
EHSLLTANT

SEQ ID NO: 29298 - protein, 9 aa, Homo sapiens
  Table A; Target 29298; HLA-B*39:01; HAVCR1; ENSG00000113249; TAA
EHSLLTANT

SEQ ID NO: 29299 - protein, 10 aa, Homo sapiens
  Table A; Target 29299; HLA-B*38:01; HAVCR1; ENSG00000113249; TAA
EHSLLTANTT

SEQ ID NO: 29300 - protein, 10 aa, Homo sapiens
  Table A; Target 29300; HLA-B*39:01; HAVCR1; ENSG00000113249; TAA
EHSLLTANTT

SEQ ID NO: 29301 - protein, 10 aa, Homo sapiens
  Table A; Target 29301; HLA-C*07:01; HAVCR1; ENSG00000113249; TAA
EHSLLTANTT

SEQ ID NO: 29302 - protein, 11 aa, Homo sapiens
  Table A; Target 29302; HLA-B*27:02; HAVCR1; ENSG00000113249; TAA
EHSLLTANTTK

SEQ ID NO: 29303 - protein, 11 aa, Homo sapiens
  Table A; Target 29303; HLA-B*38:01; HAVCR1; ENSG00000113249; TAA
EHSLLTANTTK

SEQ ID NO: 29304 - protein, 11 aa, Homo sapiens
  Table A; Target 29304; HLA-B*39:01; HAVCR1; ENSG00000113249; TAA
EHSLLTANTTK

SEQ ID NO: 29305 - protein, 11 aa, Homo sapiens
  Table A; Target 29305; HLA-C*07:01; HAVCR1; ENSG00000113249; TAA
EHSLLTANTTK

SEQ ID NO: 29306 - protein, 11 aa, Homo sapiens
  Table A; Target 29306; HLA-C*07:02; HAVCR1; ENSG00000113249; TAA
EHSLLTANTTK

SEQ ID NO: 29307 - protein, 10 aa, Homo sapiens
  Table A; Target 29307; HLA-A*25:01; HAVCR1; ENSG00000113249; TAA
EIVPPKVTTT

SEQ ID NO: 29308 - protein, 11 aa, Homo sapiens
  Table A; Target 29308; HLA-A*26:01; HAVCR1; ENSG00000113249; TAA
ENTAVSDSGVY

SEQ ID NO: 29309 - protein, 8 aa, Homo sapiens
  Table A; Target 29309; HLA-B*35:01; HAVCR1; ENSG00000113249; TAA
EPTSSPLY

SEQ ID NO: 29310 - protein, 8 aa, Homo sapiens
  Table A; Target 29310; HLA-B*55:01; HAVCR1; ENSG00000113249; TAA
EPTSSPLY

SEQ ID NO: 29311 - protein, 10 aa, Homo sapiens
  Table A; Target 29311; HLA-A*25:01; HAVCR1; ENSG00000113249; TAA
EPTSSPLYSY

SEQ ID NO: 29312 - protein, 10 aa, Homo sapiens
  Table A; Target 29312; HLA-A*26:01; HAVCR1; ENSG00000113249; TAA
EPTSSPLYSY

SEQ ID NO: 29313 - protein, 10 aa, Homo sapiens
  Table A; Target 29313; HLA-B*35:01; HAVCR1; ENSG00000113249; TAA
EPTSSPLYSY

SEQ ID NO: 29314 - protein, 10 aa, Homo sapiens
  Table A; Target 29314; HLA-B*55:01; HAVCR1; ENSG00000113249; TAA
EPTSSPLYSY

SEQ ID NO: 29315 - protein, 9 aa, Homo sapiens
  Table A; Target 29315; HLA-A*23:01; HAVCR1; ENSG00000113249; TAA
EVQQLSVSF

SEQ ID NO: 29316 - protein, 9 aa, Homo sapiens
  Table A; Target 29316; HLA-A*25:01; HAVCR1; ENSG00000113249; TAA
EVQQLSVSF

SEQ ID NO: 29317 - protein, 9 aa, Homo sapiens
  Table A; Target 29317; HLA-A*26:01; HAVCR1; ENSG00000113249; TAA
EVQQLSVSF

SEQ ID NO: 29318 - protein, 9 aa, Homo sapiens
  Table A; Target 29318; HLA-A*33:01; HAVCR1; ENSG00000113249; TAA
EVQQLSVSF

SEQ ID NO: 29319 - protein, 9 aa, Homo sapiens
  Table A; Target 29319; HLA-A*33:03; HAVCR1; ENSG00000113249; TAA
EVQQLSVSF

SEQ ID NO: 29320 - protein, 9 aa, Homo sapiens
  Table A; Target 29320; HLA-A*68:01; HAVCR1; ENSG00000113249; TAA
EVQQLSVSF

SEQ ID NO: 29321 - protein, 9 aa, Homo sapiens
  Table A; Target 29321; HLA-B*15:01; HAVCR1; ENSG00000113249; TAA
EVQQLSVSF

SEQ ID NO: 29322 - protein, 9 aa, Homo sapiens
  Table A; Target 29322; HLA-B*18:01; HAVCR1; ENSG00000113249; TAA
EVQQLSVSF

SEQ ID NO: 29323 - protein, 9 aa, Homo sapiens
  Table A; Target 29323; HLA-B*35:01; HAVCR1; ENSG00000113249; TAA
EVQQLSVSF

SEQ ID NO: 29324 - protein, 9 aa, Homo sapiens
  Table A; Target 29324; HLA-B*44:02; HAVCR1; ENSG00000113249; TAA
EVQQLSVSF

SEQ ID NO: 29325 - protein, 9 aa, Homo sapiens
  Table A; Target 29325; HLA-B*44:03; HAVCR1; ENSG00000113249; TAA
EVQQLSVSF

SEQ ID NO: 29326 - protein, 9 aa, Homo sapiens
  Table A; Target 29326; HLA-C*07:06; HAVCR1; ENSG00000113249; TAA
EVQQLSVSF

SEQ ID NO: 29327 - protein, 9 aa, Homo sapiens
  Table A; Target 29327; HLA-A*23:01; HAVCR1; ENSG00000113249; TAA
FFKKEVQQL

SEQ ID NO: 29328 - protein, 9 aa, Homo sapiens
  Table A; Target 29328; HLA-A*24:02; HAVCR1; ENSG00000113249; TAA
FFKKEVQQL

SEQ ID NO: 29329 - protein, 9 aa, Homo sapiens
  Table A; Target 29329; HLA-A*02:01; HAVCR1; ENSG00000113249; TAA
FLEHSLLTA

SEQ ID NO: 29330 - protein, 9 aa, Homo sapiens
  Table A; Target 29330; HLA-A*02:03; HAVCR1; ENSG00000113249; TAA
FLEHSLLTA

SEQ ID NO: 29331 - protein, 9 aa, Homo sapiens
  Table A; Target 29331; HLA-A*02:07; HAVCR1; ENSG00000113249; TAA
FLEHSLLTA

SEQ ID NO: 29332 - protein, 9 aa, Homo sapiens
  Table A; Target 29332; HLA-A*02:04; HAVCR1; ENSG00000113249; TAA
FSSLQIKAL

SEQ ID NO: 29333 - protein, 9 aa, Homo sapiens
  Table A; Target 29333; HLA-B*07:02; HAVCR1; ENSG00000113249; TAA
FSSLQIKAL

SEQ ID NO: 29334 - protein, 9 aa, Homo sapiens
  Table A; Target 29334; HLA-B*08:01; HAVCR1; ENSG00000113249; TAA
FSSLQIKAL

SEQ ID NO: 29335 - protein, 9 aa, Homo sapiens
  Table A; Target 29335; HLA-B*46:01; HAVCR1; ENSG00000113249; TAA
FSSLQIKAL

SEQ ID NO: 29336 - protein, 9 aa, Homo sapiens
  Table A; Target 29336; HLA-B*54:01; HAVCR1; ENSG00000113249; TAA
FSSLQIKAL

SEQ ID NO: 29337 - protein, 9 aa, Homo sapiens
  Table A; Target 29337; HLA-C*01:02; HAVCR1; ENSG00000113249; TAA
FSSLQIKAL

SEQ ID NO: 29338 - protein, 9 aa, Homo sapiens
  Table A; Target 29338; HLA-C*02:02; HAVCR1; ENSG00000113249; TAA
FSSLQIKAL

SEQ ID NO: 29339 - protein, 9 aa, Homo sapiens
  Table A; Target 29339; HLA-C*03:03; HAVCR1; ENSG00000113249; TAA
FSSLQIKAL

SEQ ID NO: 29340 - protein, 9 aa, Homo sapiens
  Table A; Target 29340; HLA-C*03:04; HAVCR1; ENSG00000113249; TAA
FSSLQIKAL

SEQ ID NO: 29341 - protein, 9 aa, Homo sapiens
  Table A; Target 29341; HLA-C*06:02; HAVCR1; ENSG00000113249; TAA
FSSLQIKAL

SEQ ID NO: 29342 - protein, 9 aa, Homo sapiens
  Table A; Target 29342; HLA-C*12:03; HAVCR1; ENSG00000113249; TAA
FSSLQIKAL

SEQ ID NO: 29343 - protein, 9 aa, Homo sapiens
  Table A; Target 29343; HLA-C*16:01; HAVCR1; ENSG00000113249; TAA
FSSLQIKAL

SEQ ID NO: 29344 - protein, 9 aa, Homo sapiens
  Table A; Target 29344; HLA-C*16:02; HAVCR1; ENSG00000113249; TAA
FSSLQIKAL

SEQ ID NO: 29345 - protein, 9 aa, Homo sapiens
  Table A; Target 29345; HLA-B*57:01; HAVCR1; ENSG00000113249; TAA
FTCQNGIVW

SEQ ID NO: 29346 - protein, 9 aa, Homo sapiens
  Table A; Target 29346; HLA-A*29:02; HAVCR1; ENSG00000113249; TAA
FVPPMPLPR

SEQ ID NO: 29347 - protein, 9 aa, Homo sapiens
  Table A; Target 29347; HLA-A*31:01; HAVCR1; ENSG00000113249; TAA
FVPPMPLPR

SEQ ID NO: 29348 - protein, 9 aa, Homo sapiens
  Table A; Target 29348; HLA-A*33:03; HAVCR1; ENSG00000113249; TAA
FVPPMPLPR

SEQ ID NO: 29349 - protein, 9 aa, Homo sapiens
  Table A; Target 29349; HLA-A*68:01; HAVCR1; ENSG00000113249; TAA
FVPPMPLPR

SEQ ID NO: 29350 - protein, 8 aa, Homo sapiens
  Table A; Target 29350; HLA-B*58:01; HAVCR1; ENSG00000113249; TAA
GAVTSMCW

SEQ ID NO: 29351 - protein, 10 aa, Homo sapiens
  Table A; Target 29351; HLA-B*37:01; HAVCR1; ENSG00000113249; TAA
GDLSRRDVSL

SEQ ID NO: 29352 - protein, 9 aa, Homo sapiens
  Table A; Target 29352; HLA-A*30:01; HAVCR1; ENSG00000113249; TAA
GEAGPSVTL

SEQ ID NO: 29353 - protein, 9 aa, Homo sapiens
  Table A; Target 29353; HLA-B*15:01; HAVCR1; ENSG00000113249; TAA
GEAGPSVTL

SEQ ID NO: 29354 - protein, 9 aa, Homo sapiens
  Table A; Target 29354; HLA-B*15:03; HAVCR1; ENSG00000113249; TAA
GEAGPSVTL

SEQ ID NO: 29355 - protein, 9 aa, Homo sapiens
  Table A; Target 29355; HLA-B*18:01; HAVCR1; ENSG00000113249; TAA
GEAGPSVTL

SEQ ID NO: 29356 - protein, 9 aa, Homo sapiens
  Table A; Target 29356; HLA-B*27:02; HAVCR1; ENSG00000113249; TAA
GEAGPSVTL

SEQ ID NO: 29357 - protein, 9 aa, Homo sapiens
  Table A; Target 29357; HLA-B*27:05; HAVCR1; ENSG00000113249; TAA
GEAGPSVTL

SEQ ID NO: 29358 - protein, 9 aa, Homo sapiens
  Table A; Target 29358; HLA-B*37:01; HAVCR1; ENSG00000113249; TAA
GEAGPSVTL

SEQ ID NO: 29359 - protein, 9 aa, Homo sapiens
  Table A; Target 29359; HLA-B*38:01; HAVCR1; ENSG00000113249; TAA
GEAGPSVTL

SEQ ID NO: 29360 - protein, 9 aa, Homo sapiens
  Table A; Target 29360; HLA-B*39:01; HAVCR1; ENSG00000113249; TAA
GEAGPSVTL

SEQ ID NO: 29361 - protein, 9 aa, Homo sapiens
  Table A; Target 29361; HLA-B*40:01; HAVCR1; ENSG00000113249; TAA
GEAGPSVTL

SEQ ID NO: 29362 - protein, 9 aa, Homo sapiens
  Table A; Target 29362; HLA-B*40:02; HAVCR1; ENSG00000113249; TAA
GEAGPSVTL

SEQ ID NO: 29363 - protein, 9 aa, Homo sapiens
  Table A; Target 29363; HLA-B*44:02; HAVCR1; ENSG00000113249; TAA
GEAGPSVTL

SEQ ID NO: 29364 - protein, 9 aa, Homo sapiens
  Table A; Target 29364; HLA-B*44:03; HAVCR1; ENSG00000113249; TAA
GEAGPSVTL

SEQ ID NO: 29365 - protein, 9 aa, Homo sapiens
  Table A; Target 29365; HLA-B*49:01; HAVCR1; ENSG00000113249; TAA
GEAGPSVTL

SEQ ID NO: 29366 - protein, 9 aa, Homo sapiens
  Table A; Target 29366; HLA-C*16:04; HAVCR1; ENSG00000113249; TAA
GEAGPSVTL

SEQ ID NO: 29367 - protein, 10 aa, Homo sapiens
  Table A; Target 29367; HLA-B*40:01; HAVCR1; ENSG00000113249; TAA
GEAGPSVTLP

SEQ ID NO: 29368 - protein, 10 aa, Homo sapiens
  Table A; Target 29368; HLA-B*49:01; HAVCR1; ENSG00000113249; TAA
GEAGPSVTLP

SEQ ID NO: 29369 - protein, 10 aa, Homo sapiens
  Table A; Target 29369; HLA-B*40:01; HAVCR1; ENSG00000113249; TAA
GGEAGPSVTL

SEQ ID NO: 29370 - protein, 8 aa, Homo sapiens
  Table A; Target 29370; HLA-B*13:02; HAVCR1; ENSG00000113249; TAA
GIYAGVCI

SEQ ID NO: 29371 - protein, 10 aa, Homo sapiens
  Table A; Target 29371; HLA-A*02:01; HAVCR1; ENSG00000113249; TAA
GIYAGVCISV

SEQ ID NO: 29372 - protein, 10 aa, Homo sapiens
  Table A; Target 29372; HLA-A*02:03; HAVCR1; ENSG00000113249; TAA
GIYAGVCISV

SEQ ID NO: 29373 - protein, 10 aa, Homo sapiens
  Table A; Target 29373; HLA-A*02:01; HAVCR1; ENSG00000113249; TAA
GLWNNNQTQL

SEQ ID NO: 29374 - protein, 10 aa, Homo sapiens
  Table A; Target 29374; HLA-A*02:03; HAVCR1; ENSG00000113249; TAA
GLWNNNQTQL

SEQ ID NO: 29375 - protein, 10 aa, Homo sapiens
  Table A; Target 29375; HLA-A*02:04; HAVCR1; ENSG00000113249; TAA
GLWNNNQTQL

SEQ ID NO: 29376 - protein, 11 aa, Homo sapiens
  Table A; Target 29376; HLA-A*29:02; HAVCR1; ENSG00000113249; TAA
GLWNNNQTQLF

SEQ ID NO: 29377 - protein, 8 aa, Homo sapiens
  Table A; Target 29377; HLA-A*11:01; HAVCR1; ENSG00000113249; TAA
GTHVTYRK

SEQ ID NO: 29378 - protein, 10 aa, Homo sapiens
  Table A; Target 29378; HLA-A*02:03; HAVCR1; ENSG00000113249; TAA
HLADSVAGSV

SEQ ID NO: 29379 - protein, 10 aa, Homo sapiens
  Table A; Target 29379; HLA-A*26:01; HAVCR1; ENSG00000113249; TAA
HLADSVAGSV

SEQ ID NO: 29380 - protein, 10 aa, Homo sapiens
  Table A; Target 29380; HLA-A*68:02; HAVCR1; ENSG00000113249; TAA
HLADSVAGSV

SEQ ID NO: 29381 - protein, 10 aa, Homo sapiens
  Table A; Target 29381; HLA-B*13:02; HAVCR1; ENSG00000113249; TAA
HLADSVAGSV

SEQ ID NO: 29382 - protein, 11 aa, Homo sapiens
  Table A; Target 29382; HLA-A*03:01; HAVCR1; ENSG00000113249; TAA
HLADSVAGSVK

SEQ ID NO: 29383 - protein, 11 aa, Homo sapiens
  Table A; Target 29383; HLA-A*03:02; HAVCR1; ENSG00000113249; TAA
HLADSVAGSVK

SEQ ID NO: 29384 - protein, 11 aa, Homo sapiens
  Table A; Target 29384; HLA-A*11:01; HAVCR1; ENSG00000113249; TAA
HLADSVAGSVK

SEQ ID NO: 29385 - protein, 11 aa, Homo sapiens
  Table A; Target 29385; HLA-A*68:01; HAVCR1; ENSG00000113249; TAA
HLADSVAGSVK

SEQ ID NO: 29386 - protein, 11 aa, Homo sapiens
  Table A; Target 29386; HLA-C*07:06; HAVCR1; ENSG00000113249; TAA
HLADSVAGSVK

SEQ ID NO: 29387 - protein, 9 aa, Homo sapiens
  Table A; Target 29387; HLA-B*07:02; HAVCR1; ENSG00000113249; TAA
HPQVVILSL

SEQ ID NO: 29388 - protein, 9 aa, Homo sapiens
  Table A; Target 29388; HLA-B*08:01; HAVCR1; ENSG00000113249; TAA
HPQVVILSL

SEQ ID NO: 29389 - protein, 9 aa, Homo sapiens
  Table A; Target 29389; HLA-B*35:01; HAVCR1; ENSG00000113249; TAA
HPQVVILSL

SEQ ID NO: 29390 - protein, 9 aa, Homo sapiens
  Table A; Target 29390; HLA-B*35:03; HAVCR1; ENSG00000113249; TAA
HPQVVILSL

SEQ ID NO: 29391 - protein, 9 aa, Homo sapiens
  Table A; Target 29391; HLA-B*51:01; HAVCR1; ENSG00000113249; TAA
HPQVVILSL

SEQ ID NO: 29392 - protein, 9 aa, Homo sapiens
  Table A; Target 29392; HLA-B*54:01; HAVCR1; ENSG00000113249; TAA
HPQVVILSL

SEQ ID NO: 29393 - protein, 9 aa, Homo sapiens
  Table A; Target 29393; HLA-B*55:01; HAVCR1; ENSG00000113249; TAA
HPQVVILSL

SEQ ID NO: 29394 - protein, 9 aa, Homo sapiens
  Table A; Target 29394; HLA-B*56:01; HAVCR1; ENSG00000113249; TAA
HPQVVILSL

SEQ ID NO: 29395 - protein, 9 aa, Homo sapiens
  Table A; Target 29395; HLA-C*07:02; HAVCR1; ENSG00000113249; TAA
HPQVVILSL

SEQ ID NO: 29396 - protein, 8 aa, Homo sapiens
  Table A; Target 29396; HLA-B*54:01; HAVCR1; ENSG00000113249; TAA
HPTTLQGA

SEQ ID NO: 29397 - protein, 8 aa, Homo sapiens
  Table A; Target 29397; HLA-B*55:01; HAVCR1; ENSG00000113249; TAA
HPTTLQGA

SEQ ID NO: 29398 - protein, 8 aa, Homo sapiens
  Table A; Target 29398; HLA-B*56:01; HAVCR1; ENSG00000113249; TAA
HPTTLQGA

SEQ ID NO: 29399 - protein, 9 aa, Homo sapiens
  Table A; Target 29399; HLA-B*07:02; HAVCR1; ENSG00000113249; TAA
HPTTLQGAI

SEQ ID NO: 29400 - protein, 9 aa, Homo sapiens
  Table A; Target 29400; HLA-B*35:03; HAVCR1; ENSG00000113249; TAA
HPTTLQGAI

SEQ ID NO: 29401 - protein, 9 aa, Homo sapiens
  Table A; Target 29401; HLA-B*51:01; HAVCR1; ENSG00000113249; TAA
HPTTLQGAI

SEQ ID NO: 29402 - protein, 9 aa, Homo sapiens
  Table A; Target 29402; HLA-B*54:01; HAVCR1; ENSG00000113249; TAA
HPTTLQGAI

SEQ ID NO: 29403 - protein, 9 aa, Homo sapiens
  Table A; Target 29403; HLA-B*56:01; HAVCR1; ENSG00000113249; TAA
HPTTLQGAI

SEQ ID NO: 29404 - protein, 10 aa, Homo sapiens
  Table A; Target 29404; HLA-A*68:01; HAVCR1; ENSG00000113249; TAA
HPTTLQGAIR

SEQ ID NO: 29405 - protein, 10 aa, Homo sapiens
  Table A; Target 29405; HLA-B*35:03; HAVCR1; ENSG00000113249; TAA
HPTTLQGAIR

SEQ ID NO: 29406 - protein, 10 aa, Homo sapiens
  Table A; Target 29406; HLA-C*07:06; HAVCR1; ENSG00000113249; TAA
HPTTLQGAIR

SEQ ID NO: 29407 - protein, 10 aa, Homo sapiens
  Table A; Target 29407; HLA-A*03:02; HAVCR1; ENSG00000113249; TAA
HSLLTANTTK

SEQ ID NO: 29408 - protein, 10 aa, Homo sapiens
  Table A; Target 29408; HLA-A*11:01; HAVCR1; ENSG00000113249; TAA
HSLLTANTTK

SEQ ID NO: 29409 - protein, 10 aa, Homo sapiens
  Table A; Target 29409; HLA-B*27:02; HAVCR1; ENSG00000113249; TAA
HSLLTANTTK

SEQ ID NO: 29410 - protein, 10 aa, Homo sapiens
  Table A; Target 29410; HLA-C*07:06; HAVCR1; ENSG00000113249; TAA
HSLLTANTTK

SEQ ID NO: 29411 - protein, 9 aa, Homo sapiens
  Table A; Target 29411; HLA-A*23:01; HAVCR1; ENSG00000113249; TAA
HYSGAVTSM

SEQ ID NO: 29412 - protein, 9 aa, Homo sapiens
  Table A; Target 29412; HLA-A*24:02; HAVCR1; ENSG00000113249; TAA
HYSGAVTSM

SEQ ID NO: 29413 - protein, 9 aa, Homo sapiens
  Table A; Target 29413; HLA-A*26:01; HAVCR1; ENSG00000113249; TAA
HYSGAVTSM

SEQ ID NO: 29414 - protein, 9 aa, Homo sapiens
  Table A; Target 29414; HLA-A*30:02; HAVCR1; ENSG00000113249; TAA
HYSGAVTSM

SEQ ID NO: 29415 - protein, 9 aa, Homo sapiens
  Table A; Target 29415; HLA-A*32:01; HAVCR1; ENSG00000113249; TAA
HYSGAVTSM

SEQ ID NO: 29416 - protein, 9 aa, Homo sapiens
  Table A; Target 29416; HLA-A*33:03; HAVCR1; ENSG00000113249; TAA
HYSGAVTSM

SEQ ID NO: 29417 - protein, 9 aa, Homo sapiens
  Table A; Target 29417; HLA-B*07:02; HAVCR1; ENSG00000113249; TAA
HYSGAVTSM

SEQ ID NO: 29418 - protein, 9 aa, Homo sapiens
  Table A; Target 29418; HLA-B*15:01; HAVCR1; ENSG00000113249; TAA
HYSGAVTSM

SEQ ID NO: 29419 - protein, 9 aa, Homo sapiens
  Table A; Target 29419; HLA-B*15:03; HAVCR1; ENSG00000113249; TAA
HYSGAVTSM

SEQ ID NO: 29420 - protein, 9 aa, Homo sapiens
  Table A; Target 29420; HLA-B*35:01; HAVCR1; ENSG00000113249; TAA
HYSGAVTSM

SEQ ID NO: 29421 - protein, 9 aa, Homo sapiens
  Table A; Target 29421; HLA-B*35:03; HAVCR1; ENSG00000113249; TAA
HYSGAVTSM

SEQ ID NO: 29422 - protein, 9 aa, Homo sapiens
  Table A; Target 29422; HLA-B*37:01; HAVCR1; ENSG00000113249; TAA
HYSGAVTSM

SEQ ID NO: 29423 - protein, 9 aa, Homo sapiens
  Table A; Target 29423; HLA-B*38:01; HAVCR1; ENSG00000113249; TAA
HYSGAVTSM

SEQ ID NO: 29424 - protein, 9 aa, Homo sapiens
  Table A; Target 29424; HLA-B*39:01; HAVCR1; ENSG00000113249; TAA
HYSGAVTSM

SEQ ID NO: 29425 - protein, 9 aa, Homo sapiens
  Table A; Target 29425; HLA-B*46:01; HAVCR1; ENSG00000113249; TAA
HYSGAVTSM

SEQ ID NO: 29426 - protein, 9 aa, Homo sapiens
  Table A; Target 29426; HLA-B*55:01; HAVCR1; ENSG00000113249; TAA
HYSGAVTSM

SEQ ID NO: 29427 - protein, 9 aa, Homo sapiens
  Table A; Target 29427; HLA-C*01:02; HAVCR1; ENSG00000113249; TAA
HYSGAVTSM

SEQ ID NO: 29428 - protein, 9 aa, Homo sapiens
  Table A; Target 29428; HLA-C*02:02; HAVCR1; ENSG00000113249; TAA
HYSGAVTSM

SEQ ID NO: 29429 - protein, 9 aa, Homo sapiens
  Table A; Target 29429; HLA-C*03:03; HAVCR1; ENSG00000113249; TAA
HYSGAVTSM

SEQ ID NO: 29430 - protein, 9 aa, Homo sapiens
  Table A; Target 29430; HLA-C*03:04; HAVCR1; ENSG00000113249; TAA
HYSGAVTSM

SEQ ID NO: 29431 - protein, 9 aa, Homo sapiens
  Table A; Target 29431; HLA-C*04:01; HAVCR1; ENSG00000113249; TAA
HYSGAVTSM

SEQ ID NO: 29432 - protein, 9 aa, Homo sapiens
  Table A; Target 29432; HLA-C*07:04; HAVCR1; ENSG00000113249; TAA
HYSGAVTSM

SEQ ID NO: 29433 - protein, 9 aa, Homo sapiens
  Table A; Target 29433; HLA-C*07:06; HAVCR1; ENSG00000113249; TAA
HYSGAVTSM

SEQ ID NO: 29434 - protein, 9 aa, Homo sapiens
  Table A; Target 29434; HLA-C*12:03; HAVCR1; ENSG00000113249; TAA
HYSGAVTSM

SEQ ID NO: 29435 - protein, 9 aa, Homo sapiens
  Table A; Target 29435; HLA-C*14:02; HAVCR1; ENSG00000113249; TAA
HYSGAVTSM

SEQ ID NO: 29436 - protein, 9 aa, Homo sapiens
  Table A; Target 29436; HLA-C*16:01; HAVCR1; ENSG00000113249; TAA
HYSGAVTSM

SEQ ID NO: 29437 - protein, 9 aa, Homo sapiens
  Table A; Target 29437; HLA-C*16:02; HAVCR1; ENSG00000113249; TAA
HYSGAVTSM

SEQ ID NO: 29438 - protein, 8 aa, Homo sapiens
  Table A; Target 29438; HLA-B*18:01; HAVCR1; ENSG00000113249; TAA
IENSLYAT

SEQ ID NO: 29439 - protein, 9 aa, Homo sapiens
  Table A; Target 29439; HLA-A*03:01; HAVCR1; ENSG00000113249; TAA
IIAKKYFFK

SEQ ID NO: 29440 - protein, 8 aa, Homo sapiens
  Table A; Target 29440; HLA-B*13:02; HAVCR1; ENSG00000113249; TAA
ILHLADSV

SEQ ID NO: 29441 - protein, 8 aa, Homo sapiens
  Table A; Target 29441; HLA-C*06:02; HAVCR1; ENSG00000113249; TAA
ILHLADSV

SEQ ID NO: 29442 - protein, 8 aa, Homo sapiens
  Table A; Target 29442; HLA-A*02:04; HAVCR1; ENSG00000113249; TAA
ILSLILHL

SEQ ID NO: 29443 - protein, 9 aa, Homo sapiens
  Table A; Target 29443; HLA-B*07:02; HAVCR1; ENSG00000113249; TAA
IPTTTSVPV

SEQ ID NO: 29444 - protein, 9 aa, Homo sapiens
  Table A; Target 29444; HLA-B*35:01; HAVCR1; ENSG00000113249; TAA
IPTTTSVPV

SEQ ID NO: 29445 - protein, 9 aa, Homo sapiens
  Table A; Target 29445; HLA-B*35:03; HAVCR1; ENSG00000113249; TAA
IPTTTSVPV

SEQ ID NO: 29446 - protein, 9 aa, Homo sapiens
  Table A; Target 29446; HLA-B*51:01; HAVCR1; ENSG00000113249; TAA
IPTTTSVPV

SEQ ID NO: 29447 - protein, 9 aa, Homo sapiens
  Table A; Target 29447; HLA-B*54:01; HAVCR1; ENSG00000113249; TAA
IPTTTSVPV

SEQ ID NO: 29448 - protein, 9 aa, Homo sapiens
  Table A; Target 29448; HLA-B*55:01; HAVCR1; ENSG00000113249; TAA
IPTTTSVPV

SEQ ID NO: 29449 - protein, 9 aa, Homo sapiens
  Table A; Target 29449; HLA-B*56:01; HAVCR1; ENSG00000113249; TAA
IPTTTSVPV

SEQ ID NO: 29450 - protein, 9 aa, Homo sapiens
  Table A; Target 29450; HLA-C*04:01; HAVCR1; ENSG00000113249; TAA
IPTTTSVPV

SEQ ID NO: 29451 - protein, 9 aa, Homo sapiens
  Table A; Target 29451; HLA-C*07:02; HAVCR1; ENSG00000113249; TAA
IPTTTSVPV

SEQ ID NO: 29452 - protein, 9 aa, Homo sapiens
  Table A; Target 29452; HLA-C*14:02; HAVCR1; ENSG00000113249; TAA
IPTTTSVPV

SEQ ID NO: 29453 - protein, 8 aa, Homo sapiens
  Table A; Target 29453; HLA-B*07:02; HAVCR1; ENSG00000113249; TAA
IPTTTTVL

SEQ ID NO: 29454 - protein, 8 aa, Homo sapiens
  Table A; Target 29454; HLA-B*08:01; HAVCR1; ENSG00000113249; TAA
IPTTTTVL

SEQ ID NO: 29455 - protein, 8 aa, Homo sapiens
  Table A; Target 29455; HLA-B*35:01; HAVCR1; ENSG00000113249; TAA
IPTTTTVL

SEQ ID NO: 29456 - protein, 8 aa, Homo sapiens
  Table A; Target 29456; HLA-B*35:03; HAVCR1; ENSG00000113249; TAA
IPTTTTVL

SEQ ID NO: 29457 - protein, 8 aa, Homo sapiens
  Table A; Target 29457; HLA-B*51:01; HAVCR1; ENSG00000113249; TAA
IPTTTTVL

SEQ ID NO: 29458 - protein, 8 aa, Homo sapiens
  Table A; Target 29458; HLA-B*55:01; HAVCR1; ENSG00000113249; TAA
IPTTTTVL

SEQ ID NO: 29459 - protein, 8 aa, Homo sapiens
  Table A; Target 29459; HLA-B*56:01; HAVCR1; ENSG00000113249; TAA
IPTTTTVL

SEQ ID NO: 29460 - protein, 8 aa, Homo sapiens
  Table A; Target 29460; HLA-C*05:01; HAVCR1; ENSG00000113249; TAA
IPTTTTVL

SEQ ID NO: 29461 - protein, 8 aa, Homo sapiens
  Table A; Target 29461; HLA-C*07:02; HAVCR1; ENSG00000113249; TAA
IPTTTTVL

SEQ ID NO: 29462 - protein, 9 aa, Homo sapiens
  Table A; Target 29462; HLA-B*56:01; HAVCR1; ENSG00000113249; TAA
IPTTTTVLT

SEQ ID NO: 29463 - protein, 11 aa, Homo sapiens
  Table A; Target 29463; HLA-B*07:02; HAVCR1; ENSG00000113249; TAA
IPTTTTVLTTM

SEQ ID NO: 29464 - protein, 11 aa, Homo sapiens
  Table A; Target 29464; HLA-B*35:01; HAVCR1; ENSG00000113249; TAA
IPTTTTVLTTM

SEQ ID NO: 29465 - protein, 11 aa, Homo sapiens
  Table A; Target 29465; HLA-B*35:03; HAVCR1; ENSG00000113249; TAA
IPTTTTVLTTM

SEQ ID NO: 29466 - protein, 11 aa, Homo sapiens
  Table A; Target 29466; HLA-B*51:01; HAVCR1; ENSG00000113249; TAA
IPTTTTVLTTM

SEQ ID NO: 29467 - protein, 11 aa, Homo sapiens
  Table A; Target 29467; HLA-B*54:01; HAVCR1; ENSG00000113249; TAA
IPTTTTVLTTM

SEQ ID NO: 29468 - protein, 11 aa, Homo sapiens
  Table A; Target 29468; HLA-B*55:01; HAVCR1; ENSG00000113249; TAA
IPTTTTVLTTM

SEQ ID NO: 29469 - protein, 11 aa, Homo sapiens
  Table A; Target 29469; HLA-B*56:01; HAVCR1; ENSG00000113249; TAA
IPTTTTVLTTM

SEQ ID NO: 29470 - protein, 11 aa, Homo sapiens
  Table A; Target 29470; HLA-C*07:02; HAVCR1; ENSG00000113249; TAA
IPTTTTVLTTM

SEQ ID NO: 29471 - protein, 11 aa, Homo sapiens
  Table A; Target 29471; HLA-C*14:02; HAVCR1; ENSG00000113249; TAA
IPTTTTVLTTM

SEQ ID NO: 29472 - protein, 11 aa, Homo sapiens
  Table A; Target 29472; HLA-A*03:01; HAVCR1; ENSG00000113249; TAA
ITVSLEIVPPK

SEQ ID NO: 29473 - protein, 11 aa, Homo sapiens
  Table A; Target 29473; HLA-A*03:02; HAVCR1; ENSG00000113249; TAA
ITVSLEIVPPK

SEQ ID NO: 29474 - protein, 11 aa, Homo sapiens
  Table A; Target 29474; HLA-A*11:01; HAVCR1; ENSG00000113249; TAA
ITVSLEIVPPK

SEQ ID NO: 29475 - protein, 11 aa, Homo sapiens
  Table A; Target 29475; HLA-A*68:01; HAVCR1; ENSG00000113249; TAA
ITVSLEIVPPK

SEQ ID NO: 29476 - protein, 11 aa, Homo sapiens
  Table A; Target 29476; HLA-B*27:02; HAVCR1; ENSG00000113249; TAA
ITVSLEIVPPK

SEQ ID NO: 29477 - protein, 11 aa, Homo sapiens
  Table A; Target 29477; HLA-C*07:06; HAVCR1; ENSG00000113249; TAA
ITVSLEIVPPK

SEQ ID NO: 29478 - protein, 8 aa, Homo sapiens
  Table A; Target 29478; HLA-A*02:01; HAVCR1; ENSG00000113249; TAA
IVTTVPTV

SEQ ID NO: 29479 - protein, 8 aa, Homo sapiens
  Table A; Target 29479; HLA-B*13:02; HAVCR1; ENSG00000113249; TAA
IVTTVPTV

SEQ ID NO: 29480 - protein, 8 aa, Homo sapiens
  Table A; Target 29480; HLA-B*49:01; HAVCR1; ENSG00000113249; TAA
IVTTVPTV

SEQ ID NO: 29481 - protein, 8 aa, Homo sapiens
  Table A; Target 29481; HLA-B*51:01; HAVCR1; ENSG00000113249; TAA
IVTTVPTV

SEQ ID NO: 29482 - protein, 8 aa, Homo sapiens
  Table A; Target 29482; HLA-B*55:01; HAVCR1; ENSG00000113249; TAA
IVTTVPTV

SEQ ID NO: 29483 - protein, 8 aa, Homo sapiens
  Table A; Target 29483; HLA-C*02:02; HAVCR1; ENSG00000113249; TAA
IVTTVPTV

SEQ ID NO: 29484 - protein, 8 aa, Homo sapiens
  Table A; Target 29484; HLA-C*16:02; HAVCR1; ENSG00000113249; TAA
IVTTVPTV

SEQ ID NO: 29485 - protein, 9 aa, Homo sapiens
  Table A; Target 29485; HLA-A*32:01; HAVCR1; ENSG00000113249; TAA
IVTTVPTVT

SEQ ID NO: 29486 - protein, 9 aa, Homo sapiens
  Table A; Target 29486; HLA-C*16:02; HAVCR1; ENSG00000113249; TAA
IVTTVPTVT

SEQ ID NO: 29487 - protein, 11 aa, Homo sapiens
  Table A; Target 29487; HLA-A*02:01; HAVCR1; ENSG00000113249; TAA
IVTTVPTVTTV

SEQ ID NO: 29488 - protein, 9 aa, Homo sapiens
  Table A; Target 29488; HLA-A*02:07; HAVCR1; ENSG00000113249; TAA
IVWTNGTHV

SEQ ID NO: 29489 - protein, 11 aa, Homo sapiens
  Table A; Target 29489; HLA-A*23:01; HAVCR1; ENSG00000113249; TAA
IVWTNGTHVTY

SEQ ID NO: 29490 - protein, 11 aa, Homo sapiens
  Table A; Target 29490; HLA-A*29:02; HAVCR1; ENSG00000113249; TAA
IVWTNGTHVTY

SEQ ID NO: 29491 - protein, 11 aa, Homo sapiens
  Table A; Target 29491; HLA-A*30:02; HAVCR1; ENSG00000113249; TAA
IVWTNGTHVTY

SEQ ID NO: 29492 - protein, 11 aa, Homo sapiens
  Table A; Target 29492; HLA-A*32:01; HAVCR1; ENSG00000113249; TAA
IVWTNGTHVTY

SEQ ID NO: 29493 - protein, 11 aa, Homo sapiens
  Table A; Target 29493; HLA-B*15:01; HAVCR1; ENSG00000113249; TAA
IVWTNGTHVTY

SEQ ID NO: 29494 - protein, 11 aa, Homo sapiens
  Table A; Target 29494; HLA-B*35:01; HAVCR1; ENSG00000113249; TAA
IVWTNGTHVTY

SEQ ID NO: 29495 - protein, 11 aa, Homo sapiens
  Table A; Target 29495; HLA-B*57:01; HAVCR1; ENSG00000113249; TAA
IVWTNGTHVTY

SEQ ID NO: 29496 - protein, 11 aa, Homo sapiens
  Table A; Target 29496; HLA-B*58:01; HAVCR1; ENSG00000113249; TAA
IVWTNGTHVTY

SEQ ID NO: 29497 - protein, 11 aa, Homo sapiens
  Table A; Target 29497; HLA-C*07:04; HAVCR1; ENSG00000113249; TAA
IVWTNGTHVTY

SEQ ID NO: 29498 - protein, 11 aa, Homo sapiens
  Table A; Target 29498; HLA-C*12:03; HAVCR1; ENSG00000113249; TAA
IVWTNGTHVTY

SEQ ID NO: 29499 - protein, 9 aa, Homo sapiens
  Table A; Target 29499; HLA-A*23:01; HAVCR1; ENSG00000113249; TAA
IYAGVCISV

SEQ ID NO: 29500 - protein, 9 aa, Homo sapiens
  Table A; Target 29500; HLA-A*24:02; HAVCR1; ENSG00000113249; TAA
IYAGVCISV

SEQ ID NO: 29501 - protein, 9 aa, Homo sapiens
  Table A; Target 29501; HLA-B*13:02; HAVCR1; ENSG00000113249; TAA
IYAGVCISV

SEQ ID NO: 29502 - protein, 9 aa, Homo sapiens
  Table A; Target 29502; HLA-C*04:01; HAVCR1; ENSG00000113249; TAA
IYAGVCISV

SEQ ID NO: 29503 - protein, 9 aa, Homo sapiens
  Table A; Target 29503; HLA-C*06:02; HAVCR1; ENSG00000113249; TAA
IYAGVCISV

SEQ ID NO: 29504 - protein, 9 aa, Homo sapiens
  Table A; Target 29504; HLA-C*14:02; HAVCR1; ENSG00000113249; TAA
IYAGVCISV

SEQ ID NO: 29505 - protein, 9 aa, Homo sapiens
  Table A; Target 29505; HLA-C*16:02; HAVCR1; ENSG00000113249; TAA
IYAGVCISV

SEQ ID NO: 29506 - protein, 10 aa, Homo sapiens
  Table A; Target 29506; HLA-A*23:01; HAVCR1; ENSG00000113249; TAA
IYAGVCISVL

SEQ ID NO: 29507 - protein, 10 aa, Homo sapiens
  Table A; Target 29507; HLA-A*24:02; HAVCR1; ENSG00000113249; TAA
IYAGVCISVL

SEQ ID NO: 29508 - protein, 8 aa, Homo sapiens
  Table A; Target 29508; HLA-A*23:01; HAVCR1; ENSG00000113249; TAA
IYIENSLY

SEQ ID NO: 29509 - protein, 8 aa, Homo sapiens
  Table A; Target 29509; HLA-A*24:02; HAVCR1; ENSG00000113249; TAA
IYIENSLY

SEQ ID NO: 29510 - protein, 8 aa, Homo sapiens
  Table A; Target 29510; HLA-A*29:02; HAVCR1; ENSG00000113249; TAA
IYIENSLY

SEQ ID NO: 29511 - protein, 8 aa, Homo sapiens
  Table A; Target 29511; HLA-A*30:02; HAVCR1; ENSG00000113249; TAA
IYIENSLY

SEQ ID NO: 29512 - protein, 8 aa, Homo sapiens
  Table A; Target 29512; HLA-B*15:01; HAVCR1; ENSG00000113249; TAA
IYIENSLY

SEQ ID NO: 29513 - protein, 8 aa, Homo sapiens
  Table A; Target 29513; HLA-B*15:03; HAVCR1; ENSG00000113249; TAA
IYIENSLY

SEQ ID NO: 29514 - protein, 8 aa, Homo sapiens
  Table A; Target 29514; HLA-B*39:01; HAVCR1; ENSG00000113249; TAA
IYIENSLY

SEQ ID NO: 29515 - protein, 8 aa, Homo sapiens
  Table A; Target 29515; HLA-C*04:01; HAVCR1; ENSG00000113249; TAA
IYIENSLY

SEQ ID NO: 29516 - protein, 8 aa, Homo sapiens
  Table A; Target 29516; HLA-C*07:01; HAVCR1; ENSG00000113249; TAA
IYIENSLY

SEQ ID NO: 29517 - protein, 8 aa, Homo sapiens
  Table A; Target 29517; HLA-C*14:02; HAVCR1; ENSG00000113249; TAA
IYIENSLY

SEQ ID NO: 29518 - protein, 8 aa, Homo sapiens
  Table A; Target 29518; HLA-C*16:02; HAVCR1; ENSG00000113249; TAA
IYIENSLY

SEQ ID NO: 29519 - protein, 9 aa, Homo sapiens
  Table A; Target 29519; HLA-A*23:01; HAVCR1; ENSG00000113249; TAA
IYIENSLYA

SEQ ID NO: 29520 - protein, 9 aa, Homo sapiens
  Table A; Target 29520; HLA-A*24:02; HAVCR1; ENSG00000113249; TAA
IYIENSLYA

SEQ ID NO: 29521 - protein, 9 aa, Homo sapiens
  Table A; Target 29521; HLA-A*29:02; HAVCR1; ENSG00000113249; TAA
IYIENSLYA

SEQ ID NO: 29522 - protein, 9 aa, Homo sapiens
  Table A; Target 29522; HLA-C*14:02; HAVCR1; ENSG00000113249; TAA
IYIENSLYA

SEQ ID NO: 29523 - protein, 9 aa, Homo sapiens
  Table A; Target 29523; HLA-A*03:01; HAVCR1; ENSG00000113249; TAA
KALQNAVEK

SEQ ID NO: 29524 - protein, 9 aa, Homo sapiens
  Table A; Target 29524; HLA-A*03:02; HAVCR1; ENSG00000113249; TAA
KALQNAVEK

SEQ ID NO: 29525 - protein, 9 aa, Homo sapiens
  Table A; Target 29525; HLA-A*11:01; HAVCR1; ENSG00000113249; TAA
KALQNAVEK

SEQ ID NO: 29526 - protein, 9 aa, Homo sapiens
  Table A; Target 29526; HLA-C*07:06; HAVCR1; ENSG00000113249; TAA
KALQNAVEK

SEQ ID NO: 29527 - protein, 9 aa, Homo sapiens
  Table A; Target 29527; HLA-B*40:01; HAVCR1; ENSG00000113249; TAA
KEVQAEDNI

SEQ ID NO: 29528 - protein, 9 aa, Homo sapiens
  Table A; Target 29528; HLA-B*44:03; HAVCR1; ENSG00000113249; TAA
KEVQAEDNI

SEQ ID NO: 29529 - protein, 9 aa, Homo sapiens
  Table A; Target 29529; HLA-B*49:01; HAVCR1; ENSG00000113249; TAA
KEVQAEDNI

SEQ ID NO: 29530 - protein, 10 aa, Homo sapiens
  Table A; Target 29530; HLA-B*40:01; HAVCR1; ENSG00000113249; TAA
KEVQAEDNIY

SEQ ID NO: 29531 - protein, 10 aa, Homo sapiens
  Table A; Target 29531; HLA-B*44:03; HAVCR1; ENSG00000113249; TAA
KEVQAEDNIY

SEQ ID NO: 29532 - protein, 11 aa, Homo sapiens
  Table A; Target 29532; HLA-B*40:01; HAVCR1; ENSG00000113249; TAA
KEVQAEDNIYI

SEQ ID NO: 29533 - protein, 11 aa, Homo sapiens
  Table A; Target 29533; HLA-B*49:01; HAVCR1; ENSG00000113249; TAA
KEVQAEDNIYI

SEQ ID NO: 29534 - protein, 8 aa, Homo sapiens
  Table A; Target 29534; HLA-A*30:01; HAVCR1; ENSG00000113249; TAA
KEVQQLSV

SEQ ID NO: 29535 - protein, 8 aa, Homo sapiens
  Table A; Target 29535; HLA-B*49:01; HAVCR1; ENSG00000113249; TAA
KEVQQLSV

SEQ ID NO: 29536 - protein, 10 aa, Homo sapiens
  Table A; Target 29536; HLA-A*23:01; HAVCR1; ENSG00000113249; TAA
KEVQQLSVSF

SEQ ID NO: 29537 - protein, 10 aa, Homo sapiens
  Table A; Target 29537; HLA-A*30:01; HAVCR1; ENSG00000113249; TAA
KEVQQLSVSF

SEQ ID NO: 29538 - protein, 10 aa, Homo sapiens
  Table A; Target 29538; HLA-B*15:03; HAVCR1; ENSG00000113249; TAA
KEVQQLSVSF

SEQ ID NO: 29539 - protein, 10 aa, Homo sapiens
  Table A; Target 29539; HLA-B*18:01; HAVCR1; ENSG00000113249; TAA
KEVQQLSVSF

SEQ ID NO: 29540 - protein, 10 aa, Homo sapiens
  Table A; Target 29540; HLA-B*27:02; HAVCR1; ENSG00000113249; TAA
KEVQQLSVSF

SEQ ID NO: 29541 - protein, 10 aa, Homo sapiens
  Table A; Target 29541; HLA-B*37:01; HAVCR1; ENSG00000113249; TAA
KEVQQLSVSF

SEQ ID NO: 29542 - protein, 10 aa, Homo sapiens
  Table A; Target 29542; HLA-B*40:01; HAVCR1; ENSG00000113249; TAA
KEVQQLSVSF

SEQ ID NO: 29543 - protein, 10 aa, Homo sapiens
  Table A; Target 29543; HLA-B*40:02; HAVCR1; ENSG00000113249; TAA
KEVQQLSVSF

SEQ ID NO: 29544 - protein, 10 aa, Homo sapiens
  Table A; Target 29544; HLA-B*44:02; HAVCR1; ENSG00000113249; TAA
KEVQQLSVSF

SEQ ID NO: 29545 - protein, 10 aa, Homo sapiens
  Table A; Target 29545; HLA-B*44:03; HAVCR1; ENSG00000113249; TAA
KEVQQLSVSF

SEQ ID NO: 29546 - protein, 10 aa, Homo sapiens
  Table A; Target 29546; HLA-B*49:01; HAVCR1; ENSG00000113249; TAA
KEVQQLSVSF

SEQ ID NO: 29547 - protein, 10 aa, Homo sapiens
  Table A; Target 29547; HLA-B*57:01; HAVCR1; ENSG00000113249; TAA
KEVQQLSVSF

SEQ ID NO: 29548 - protein, 10 aa, Homo sapiens
  Table A; Target 29548; HLA-C*16:04; HAVCR1; ENSG00000113249; TAA
KEVQQLSVSF

SEQ ID NO: 29549 - protein, 8 aa, Homo sapiens
  Table A; Target 29549; HLA-B*13:02; HAVCR1; ENSG00000113249; TAA
KITVSLEI

SEQ ID NO: 29550 - protein, 9 aa, Homo sapiens
  Table A; Target 29550; HLA-A*31:01; HAVCR1; ENSG00000113249; TAA
KLLGDLSRR

SEQ ID NO: 29551 - protein, 11 aa, Homo sapiens
  Table A; Target 29551; HLA-A*24:02; HAVCR1; ENSG00000113249; TAA
KYFFKKEVQQL

SEQ ID NO: 29552 - protein, 9 aa, Homo sapiens
  Table A; Target 29552; HLA-A*01:01; HAVCR1; ENSG00000113249; TAA
LADSVAGSV

SEQ ID NO: 29553 - protein, 9 aa, Homo sapiens
  Table A; Target 29553; HLA-B*35:03; HAVCR1; ENSG00000113249; TAA
LADSVAGSV

SEQ ID NO: 29554 - protein, 9 aa, Homo sapiens
  Table A; Target 29554; HLA-B*51:01; HAVCR1; ENSG00000113249; TAA
LADSVAGSV

SEQ ID NO: 29555 - protein, 9 aa, Homo sapiens
  Table A; Target 29555; HLA-C*03:03; HAVCR1; ENSG00000113249; TAA
LADSVAGSV

SEQ ID NO: 29556 - protein, 9 aa, Homo sapiens
  Table A; Target 29556; HLA-C*03:04; HAVCR1; ENSG00000113249; TAA
LADSVAGSV

SEQ ID NO: 29557 - protein, 9 aa, Homo sapiens
  Table A; Target 29557; HLA-C*05:01; HAVCR1; ENSG00000113249; TAA
LADSVAGSV

SEQ ID NO: 29558 - protein, 10 aa, Homo sapiens
  Table A; Target 29558; HLA-A*01:01; HAVCR1; ENSG00000113249; TAA
LADSVAGSVK

SEQ ID NO: 29559 - protein, 10 aa, Homo sapiens
  Table A; Target 29559; HLA-A*03:02; HAVCR1; ENSG00000113249; TAA
LADSVAGSVK

SEQ ID NO: 29560 - protein, 10 aa, Homo sapiens
  Table A; Target 29560; HLA-A*68:01; HAVCR1; ENSG00000113249; TAA
LADSVAGSVK

SEQ ID NO: 29561 - protein, 10 aa, Homo sapiens
  Table A; Target 29561; HLA-B*27:02; HAVCR1; ENSG00000113249; TAA
LADSVAGSVK

SEQ ID NO: 29562 - protein, 10 aa, Homo sapiens
  Table A; Target 29562; HLA-B*27:05; HAVCR1; ENSG00000113249; TAA
LADSVAGSVK

SEQ ID NO: 29563 - protein, 10 aa, Homo sapiens
  Table A; Target 29563; HLA-C*05:01; HAVCR1; ENSG00000113249; TAA
LADSVAGSVK

SEQ ID NO: 29564 - protein, 10 aa, Homo sapiens
  Table A; Target 29564; HLA-C*07:06; HAVCR1; ENSG00000113249; TAA
LADSVAGSVK

SEQ ID NO: 29565 - protein, 11 aa, Homo sapiens
  Table A; Target 29565; HLA-B*38:01; HAVCR1; ENSG00000113249; TAA
LADSVAGSVKV

SEQ ID NO: 29566 - protein, 11 aa, Homo sapiens
  Table A; Target 29566; HLA-C*05:01; HAVCR1; ENSG00000113249; TAA
LADSVAGSVKV

SEQ ID NO: 29567 - protein, 8 aa, Homo sapiens
  Table A; Target 29567; HLA-B*51:01; HAVCR1; ENSG00000113249; TAA
LALLGVII

SEQ ID NO: 29568 - protein, 9 aa, Homo sapiens
  Table A; Target 29568; HLA-B*54:01; HAVCR1; ENSG00000113249; TAA
LALLGVIIA

SEQ ID NO: 29569 - protein, 10 aa, Homo sapiens
  Table A; Target 29569; HLA-B*27:02; HAVCR1; ENSG00000113249; TAA
LALLGVIIAK

SEQ ID NO: 29570 - protein, 8 aa, Homo sapiens
  Table A; Target 29570; HLA-B*18:01; HAVCR1; ENSG00000113249; TAA
LEHSLLTA

SEQ ID NO: 29571 - protein, 8 aa, Homo sapiens
  Table A; Target 29571; HLA-B*49:01; HAVCR1; ENSG00000113249; TAA
LEHSLLTA

SEQ ID NO: 29572 - protein, 9 aa, Homo sapiens
  Table A; Target 29572; HLA-B*18:01; HAVCR1; ENSG00000113249; TAA
LEHSLLTAN

SEQ ID NO: 29573 - protein, 8 aa, Homo sapiens
  Table A; Target 29573; HLA-A*30:01; HAVCR1; ENSG00000113249; TAA
LEIVPPKV

SEQ ID NO: 29574 - protein, 8 aa, Homo sapiens
  Table A; Target 29574; HLA-B*18:01; HAVCR1; ENSG00000113249; TAA
LEIVPPKV

SEQ ID NO: 29575 - protein, 8 aa, Homo sapiens
  Table A; Target 29575; HLA-B*40:02; HAVCR1; ENSG00000113249; TAA
LEIVPPKV

SEQ ID NO: 29576 - protein, 8 aa, Homo sapiens
  Table A; Target 29576; HLA-B*49:01; HAVCR1; ENSG00000113249; TAA
LEIVPPKV

SEQ ID NO: 29577 - protein, 9 aa, Homo sapiens
  Table A; Target 29577; HLA-B*49:01; HAVCR1; ENSG00000113249; TAA
LEIVPPKVT

SEQ ID NO: 29578 - protein, 8 aa, Homo sapiens
  Table A; Target 29578; HLA-B*08:01; HAVCR1; ENSG00000113249; TAA
LFLEHSLL

SEQ ID NO: 29579 - protein, 9 aa, Homo sapiens
  Table A; Target 29579; HLA-C*12:03; HAVCR1; ENSG00000113249; TAA
LGVIIAKKY

SEQ ID NO: 29580 - protein, 9 aa, Homo sapiens
  Table A; Target 29580; HLA-A*02:07; HAVCR1; ENSG00000113249; TAA
LILHLADSV

SEQ ID NO: 29581 - protein, 8 aa, Homo sapiens
  Table A; Target 29581; HLA-A*03:01; HAVCR1; ENSG00000113249; TAA
LLGVIIAK

SEQ ID NO: 29582 - protein, 8 aa, Homo sapiens
  Table A; Target 29582; HLA-A*03:02; HAVCR1; ENSG00000113249; TAA
LLGVIIAK

SEQ ID NO: 29583 - protein, 8 aa, Homo sapiens
  Table A; Target 29583; HLA-B*27:02; HAVCR1; ENSG00000113249; TAA
LLGVIIAK

SEQ ID NO: 29584 - protein, 9 aa, Homo sapiens
  Table A; Target 29584; HLA-A*03:01; HAVCR1; ENSG00000113249; TAA
LLGVIIAKK

SEQ ID NO: 29585 - protein, 9 aa, Homo sapiens
  Table A; Target 29585; HLA-A*03:02; HAVCR1; ENSG00000113249; TAA
LLGVIIAKK

SEQ ID NO: 29586 - protein, 11 aa, Homo sapiens
  Table A; Target 29586; HLA-A*30:02; HAVCR1; ENSG00000113249; TAA
LLTANTTKGIY

SEQ ID NO: 29587 - protein, 9 aa, Homo sapiens
  Table A; Target 29587; HLA-B*07:02; HAVCR1; ENSG00000113249; TAA
LPRQNHEPV

SEQ ID NO: 29588 - protein, 9 aa, Homo sapiens
  Table A; Target 29588; HLA-B*51:01; HAVCR1; ENSG00000113249; TAA
LPRQNHEPV

SEQ ID NO: 29589 - protein, 10 aa, Homo sapiens
  Table A; Target 29589; HLA-B*54:01; HAVCR1; ENSG00000113249; TAA
LPRQNHEPVA

SEQ ID NO: 29590 - protein, 10 aa, Homo sapiens
  Table A; Target 29590; HLA-B*55:01; HAVCR1; ENSG00000113249; TAA
LPRQNHEPVA

SEQ ID NO: 29591 - protein, 10 aa, Homo sapiens
  Table A; Target 29591; HLA-B*56:01; HAVCR1; ENSG00000113249; TAA
LPRQNHEPVA

SEQ ID NO: 29592 - protein, 9 aa, Homo sapiens
  Table A; Target 29592; HLA-B*13:02; HAVCR1; ENSG00000113249; TAA
LQNAVEKEV

SEQ ID NO: 29593 - protein, 9 aa, Homo sapiens
  Table A; Target 29593; HLA-C*06:02; HAVCR1; ENSG00000113249; TAA
LQNAVEKEV

SEQ ID NO: 29594 - protein, 8 aa, Homo sapiens
  Table A; Target 29594; HLA-C*03:03; HAVCR1; ENSG00000113249; TAA
LSVSFSSL

SEQ ID NO: 29595 - protein, 8 aa, Homo sapiens
  Table A; Target 29595; HLA-C*03:04; HAVCR1; ENSG00000113249; TAA
LSVSFSSL

SEQ ID NO: 29596 - protein, 10 aa, Homo sapiens
  Table A; Target 29596; HLA-A*01:01; HAVCR1; ENSG00000113249; TAA
LTANTTKGIY

SEQ ID NO: 29597 - protein, 10 aa, Homo sapiens
  Table A; Target 29597; HLA-A*26:01; HAVCR1; ENSG00000113249; TAA
LTANTTKGIY

SEQ ID NO: 29598 - protein, 10 aa, Homo sapiens
  Table A; Target 29598; HLA-A*30:02; HAVCR1; ENSG00000113249; TAA
LTANTTKGIY

SEQ ID NO: 29599 - protein, 10 aa, Homo sapiens
  Table A; Target 29599; HLA-A*32:01; HAVCR1; ENSG00000113249; TAA
LTANTTKGIY

SEQ ID NO: 29600 - protein, 10 aa, Homo sapiens
  Table A; Target 29600; HLA-B*58:01; HAVCR1; ENSG00000113249; TAA
LTANTTKGIY

SEQ ID NO: 29601 - protein, 10 aa, Homo sapiens
  Table A; Target 29601; HLA-C*12:03; HAVCR1; ENSG00000113249; TAA
LTANTTKGIY

SEQ ID NO: 29602 - protein, 10 aa, Homo sapiens
  Table A; Target 29602; HLA-C*16:01; HAVCR1; ENSG00000113249; TAA
LTANTTKGIY

SEQ ID NO: 29603 - protein, 10 aa, Homo sapiens
  Table A; Target 29603; HLA-C*16:02; HAVCR1; ENSG00000113249; TAA
LTANTTKGIY

SEQ ID NO: 29604 - protein, 9 aa, Homo sapiens
  Table A; Target 29604; HLA-A*23:01; HAVCR1; ENSG00000113249; TAA
LWNNNQTQL

SEQ ID NO: 29605 - protein, 9 aa, Homo sapiens
  Table A; Target 29605; HLA-A*24:02; HAVCR1; ENSG00000113249; TAA
LWNNNQTQL

SEQ ID NO: 29606 - protein, 9 aa, Homo sapiens
  Table A; Target 29606; HLA-C*14:02; HAVCR1; ENSG00000113249; TAA
LWNNNQTQL

SEQ ID NO: 29607 - protein, 10 aa, Homo sapiens
  Table A; Target 29607; HLA-A*23:01; HAVCR1; ENSG00000113249; TAA
LWNNNQTQLF

SEQ ID NO: 29608 - protein, 10 aa, Homo sapiens
  Table A; Target 29608; HLA-A*24:02; HAVCR1; ENSG00000113249; TAA
LWNNNQTQLF

SEQ ID NO: 29609 - protein, 10 aa, Homo sapiens
  Table A; Target 29609; HLA-B*54:01; HAVCR1; ENSG00000113249; TAA
MPLPRQNHEP

SEQ ID NO: 29610 - protein, 11 aa, Homo sapiens
  Table A; Target 29610; HLA-B*54:01; HAVCR1; ENSG00000113249; TAA
MPLPRQNHEPV

SEQ ID NO: 29611 - protein, 9 aa, Homo sapiens
  Table A; Target 29611; HLA-A*02:03; HAVCR1; ENSG00000113249; TAA
MSIPTTTTV

SEQ ID NO: 29612 - protein, 9 aa, Homo sapiens
  Table A; Target 29612; HLA-A*68:02; HAVCR1; ENSG00000113249; TAA
MSIPTTTTV

SEQ ID NO: 29613 - protein, 9 aa, Homo sapiens
  Table A; Target 29613; HLA-B*46:01; HAVCR1; ENSG00000113249; TAA
MSIPTTTTV

SEQ ID NO: 29614 - protein, 9 aa, Homo sapiens
  Table A; Target 29614; HLA-B*49:01; HAVCR1; ENSG00000113249; TAA
MSIPTTTTV

SEQ ID NO: 29615 - protein, 9 aa, Homo sapiens
  Table A; Target 29615; HLA-B*51:01; HAVCR1; ENSG00000113249; TAA
MSIPTTTTV

SEQ ID NO: 29616 - protein, 9 aa, Homo sapiens
  Table A; Target 29616; HLA-B*58:01; HAVCR1; ENSG00000113249; TAA
MSIPTTTTV

SEQ ID NO: 29617 - protein, 9 aa, Homo sapiens
  Table A; Target 29617; HLA-C*02:02; HAVCR1; ENSG00000113249; TAA
MSIPTTTTV

SEQ ID NO: 29618 - protein, 9 aa, Homo sapiens
  Table A; Target 29618; HLA-C*03:03; HAVCR1; ENSG00000113249; TAA
MSIPTTTTV

SEQ ID NO: 29619 - protein, 9 aa, Homo sapiens
  Table A; Target 29619; HLA-C*03:04; HAVCR1; ENSG00000113249; TAA
MSIPTTTTV

SEQ ID NO: 29620 - protein, 10 aa, Homo sapiens
  Table A; Target 29620; HLA-B*58:01; HAVCR1; ENSG00000113249; TAA
MSIPTTTTVL

SEQ ID NO: 29621 - protein, 10 aa, Homo sapiens
  Table A; Target 29621; HLA-C*03:04; HAVCR1; ENSG00000113249; TAA
MSIPTTTTVL

SEQ ID NO: 29622 - protein, 9 aa, Homo sapiens
  Table A; Target 29622; HLA-A*02:03; HAVCR1; ENSG00000113249; TAA
MTVSTTTSV

SEQ ID NO: 29623 - protein, 9 aa, Homo sapiens
  Table A; Target 29623; HLA-A*25:01; HAVCR1; ENSG00000113249; TAA
MTVSTTTSV

SEQ ID NO: 29624 - protein, 9 aa, Homo sapiens
  Table A; Target 29624; HLA-A*26:01; HAVCR1; ENSG00000113249; TAA
MTVSTTTSV

SEQ ID NO: 29625 - protein, 9 aa, Homo sapiens
  Table A; Target 29625; HLA-A*68:02; HAVCR1; ENSG00000113249; TAA
MTVSTTTSV

SEQ ID NO: 29626 - protein, 9 aa, Homo sapiens
  Table A; Target 29626; HLA-B*13:02; HAVCR1; ENSG00000113249; TAA
MTVSTTTSV

SEQ ID NO: 29627 - protein, 9 aa, Homo sapiens
  Table A; Target 29627; HLA-B*46:01; HAVCR1; ENSG00000113249; TAA
MTVSTTTSV

SEQ ID NO: 29628 - protein, 9 aa, Homo sapiens
  Table A; Target 29628; HLA-C*02:02; HAVCR1; ENSG00000113249; TAA
MTVSTTTSV

SEQ ID NO: 29629 - protein, 9 aa, Homo sapiens
  Table A; Target 29629; HLA-C*03:03; HAVCR1; ENSG00000113249; TAA
MTVSTTTSV

SEQ ID NO: 29630 - protein, 9 aa, Homo sapiens
  Table A; Target 29630; HLA-C*03:04; HAVCR1; ENSG00000113249; TAA
MTVSTTTSV

SEQ ID NO: 29631 - protein, 9 aa, Homo sapiens
  Table A; Target 29631; HLA-B*35:03; HAVCR1; ENSG00000113249; TAA
NAVEKEVQA

SEQ ID NO: 29632 - protein, 9 aa, Homo sapiens
  Table A; Target 29632; HLA-B*54:01; HAVCR1; ENSG00000113249; TAA
NAVEKEVQA

SEQ ID NO: 29633 - protein, 9 aa, Homo sapiens
  Table A; Target 29633; HLA-C*16:01; HAVCR1; ENSG00000113249; TAA
NAVEKEVQA

SEQ ID NO: 29634 - protein, 9 aa, Homo sapiens
  Table A; Target 29634; HLA-A*23:01; HAVCR1; ENSG00000113249; TAA
NDMKITVSL

SEQ ID NO: 29635 - protein, 9 aa, Homo sapiens
  Table A; Target 29635; HLA-A*30:01; HAVCR1; ENSG00000113249; TAA
NDMKITVSL

SEQ ID NO: 29636 - protein, 9 aa, Homo sapiens
  Table A; Target 29636; HLA-B*08:01; HAVCR1; ENSG00000113249; TAA
NDMKITVSL

SEQ ID NO: 29637 - protein, 9 aa, Homo sapiens
  Table A; Target 29637; HLA-B*18:01; HAVCR1; ENSG00000113249; TAA
NDMKITVSL

SEQ ID NO: 29638 - protein, 9 aa, Homo sapiens
  Table A; Target 29638; HLA-B*37:01; HAVCR1; ENSG00000113249; TAA
NDMKITVSL

SEQ ID NO: 29639 - protein, 9 aa, Homo sapiens
  Table A; Target 29639; HLA-B*40:01; HAVCR1; ENSG00000113249; TAA
NDMKITVSL

SEQ ID NO: 29640 - protein, 9 aa, Homo sapiens
  Table A; Target 29640; HLA-B*44:02; HAVCR1; ENSG00000113249; TAA
NDMKITVSL

SEQ ID NO: 29641 - protein, 9 aa, Homo sapiens
  Table A; Target 29641; HLA-B*44:03; HAVCR1; ENSG00000113249; TAA
NDMKITVSL

SEQ ID NO: 29642 - protein, 8 aa, Homo sapiens
  Table A; Target 29642; HLA-A*33:01; HAVCR1; ENSG00000113249; TAA
NGTHVTYR

SEQ ID NO: 29643 - protein, 8 aa, Homo sapiens
  Table A; Target 29643; HLA-C*01:02; HAVCR1; ENSG00000113249; TAA
NIYIENSL

SEQ ID NO: 29644 - protein, 8 aa, Homo sapiens
  Table A; Target 29644; HLA-C*14:02; HAVCR1; ENSG00000113249; TAA
NIYIENSL

SEQ ID NO: 29645 - protein, 9 aa, Homo sapiens
  Table A; Target 29645; HLA-A*01:01; HAVCR1; ENSG00000113249; TAA
NIYIENSLY

SEQ ID NO: 29646 - protein, 9 aa, Homo sapiens
  Table A; Target 29646; HLA-A*26:01; HAVCR1; ENSG00000113249; TAA
NIYIENSLY

SEQ ID NO: 29647 - protein, 9 aa, Homo sapiens
  Table A; Target 29647; HLA-A*29:02; HAVCR1; ENSG00000113249; TAA
NIYIENSLY

SEQ ID NO: 29648 - protein, 9 aa, Homo sapiens
  Table A; Target 29648; HLA-A*30:02; HAVCR1; ENSG00000113249; TAA
NIYIENSLY

SEQ ID NO: 29649 - protein, 9 aa, Homo sapiens
  Table A; Target 29649; HLA-B*15:01; HAVCR1; ENSG00000113249; TAA
NIYIENSLY

SEQ ID NO: 29650 - protein, 9 aa, Homo sapiens
  Table A; Target 29650; HLA-B*15:03; HAVCR1; ENSG00000113249; TAA
NIYIENSLY

SEQ ID NO: 29651 - protein, 9 aa, Homo sapiens
  Table A; Target 29651; HLA-B*35:01; HAVCR1; ENSG00000113249; TAA
NIYIENSLY

SEQ ID NO: 29652 - protein, 9 aa, Homo sapiens
  Table A; Target 29652; HLA-B*46:01; HAVCR1; ENSG00000113249; TAA
NIYIENSLY

SEQ ID NO: 29653 - protein, 9 aa, Homo sapiens
  Table A; Target 29653; HLA-C*04:01; HAVCR1; ENSG00000113249; TAA
NIYIENSLY

SEQ ID NO: 29654 - protein, 9 aa, Homo sapiens
  Table A; Target 29654; HLA-C*07:01; HAVCR1; ENSG00000113249; TAA
NIYIENSLY

SEQ ID NO: 29655 - protein, 9 aa, Homo sapiens
  Table A; Target 29655; HLA-C*07:04; HAVCR1; ENSG00000113249; TAA
NIYIENSLY

SEQ ID NO: 29656 - protein, 9 aa, Homo sapiens
  Table A; Target 29656; HLA-C*14:02; HAVCR1; ENSG00000113249; TAA
NIYIENSLY

SEQ ID NO: 29657 - protein, 10 aa, Homo sapiens
  Table A; Target 29657; HLA-A*01:01; HAVCR1; ENSG00000113249; TAA
NTAVSDSGVY

SEQ ID NO: 29658 - protein, 10 aa, Homo sapiens
  Table A; Target 29658; HLA-A*25:01; HAVCR1; ENSG00000113249; TAA
NTAVSDSGVY

SEQ ID NO: 29659 - protein, 10 aa, Homo sapiens
  Table A; Target 29659; HLA-A*26:01; HAVCR1; ENSG00000113249; TAA
NTAVSDSGVY

SEQ ID NO: 29660 - protein, 10 aa, Homo sapiens
  Table A; Target 29660; HLA-A*68:01; HAVCR1; ENSG00000113249; TAA
NTTKGIYAGV

SEQ ID NO: 29661 - protein, 10 aa, Homo sapiens
  Table A; Target 29661; HLA-A*68:02; HAVCR1; ENSG00000113249; TAA
NTTKGIYAGV

SEQ ID NO: 29662 - protein, 9 aa, Homo sapiens
  Table A; Target 29662; HLA-C*05:01; HAVCR1; ENSG00000113249; TAA
PAETHPTTL

SEQ ID NO: 29663 - protein, 9 aa, Homo sapiens
  Table A; Target 29663; HLA-C*16:02; HAVCR1; ENSG00000113249; TAA
PAETHPTTL

SEQ ID NO: 29664 - protein, 11 aa, Homo sapiens
  Table A; Target 29664; HLA-C*07:02; HAVCR1; ENSG00000113249; TAA
PQPAETHPTTL

SEQ ID NO: 29665 - protein, 9 aa, Homo sapiens
  Table A; Target 29665; HLA-A*01:01; HAVCR1; ENSG00000113249; TAA
PTSSPLYSY

SEQ ID NO: 29666 - protein, 9 aa, Homo sapiens
  Table A; Target 29666; HLA-A*03:01; HAVCR1; ENSG00000113249; TAA
PTSSPLYSY

SEQ ID NO: 29667 - protein, 9 aa, Homo sapiens
  Table A; Target 29667; HLA-A*03:02; HAVCR1; ENSG00000113249; TAA
PTSSPLYSY

SEQ ID NO: 29668 - protein, 9 aa, Homo sapiens
  Table A; Target 29668; HLA-A*11:01; HAVCR1; ENSG00000113249; TAA
PTSSPLYSY

SEQ ID NO: 29669 - protein, 9 aa, Homo sapiens
  Table A; Target 29669; HLA-A*29:02; HAVCR1; ENSG00000113249; TAA
PTSSPLYSY

SEQ ID NO: 29670 - protein, 9 aa, Homo sapiens
  Table A; Target 29670; HLA-A*30:02; HAVCR1; ENSG00000113249; TAA
PTSSPLYSY

SEQ ID NO: 29671 - protein, 10 aa, Homo sapiens
  Table A; Target 29671; HLA-C*07:02; HAVCR1; ENSG00000113249; TAA
PTTTTVLTTM

SEQ ID NO: 29672 - protein, 9 aa, Homo sapiens
  Table A; Target 29672; HLA-A*25:01; HAVCR1; ENSG00000113249; TAA
PVTTTVSTF

SEQ ID NO: 29673 - protein, 9 aa, Homo sapiens
  Table A; Target 29673; HLA-A*26:01; HAVCR1; ENSG00000113249; TAA
PVTTTVSTF

SEQ ID NO: 29674 - protein, 9 aa, Homo sapiens
  Table A; Target 29674; HLA-A*02:03; HAVCR1; ENSG00000113249; TAA
QIKALQNAV

SEQ ID NO: 29675 - protein, 9 aa, Homo sapiens
  Table A; Target 29675; HLA-A*32:01; HAVCR1; ENSG00000113249; TAA
QIKALQNAV

SEQ ID NO: 29676 - protein, 9 aa, Homo sapiens
  Table A; Target 29676; HLA-B*08:01; HAVCR1; ENSG00000113249; TAA
QIKALQNAV

SEQ ID NO: 29677 - protein, 9 aa, Homo sapiens
  Table A; Target 29677; HLA-B*13:02; HAVCR1; ENSG00000113249; TAA
QIKALQNAV

SEQ ID NO: 29678 - protein, 11 aa, Homo sapiens
  Table A; Target 29678; HLA-A*03:02; HAVCR1; ENSG00000113249; TAA
QIKALQNAVEK

SEQ ID NO: 29679 - protein, 9 aa, Homo sapiens
  Table A; Target 29679; HLA-A*02:04; HAVCR1; ENSG00000113249; TAA
QLFLEHSLL

SEQ ID NO: 29680 - protein, 11 aa, Homo sapiens
  Table A; Target 29680; HLA-A*02:03; HAVCR1; ENSG00000113249; TAA
QLFLEHSLLTA

SEQ ID NO: 29681 - protein, 9 aa, Homo sapiens
  Table A; Target 29681; HLA-A*25:01; HAVCR1; ENSG00000113249; TAA
QLSVSFSSL

SEQ ID NO: 29682 - protein, 9 aa, Homo sapiens
  Table A; Target 29682; HLA-B*07:02; HAVCR1; ENSG00000113249; TAA
QLSVSFSSL

SEQ ID NO: 29683 - protein, 9 aa, Homo sapiens
  Table A; Target 29683; HLA-B*39:01; HAVCR1; ENSG00000113249; TAA
QLSVSFSSL

SEQ ID NO: 29684 - protein, 9 aa, Homo sapiens
  Table A; Target 29684; HLA-C*01:02; HAVCR1; ENSG00000113249; TAA
QLSVSFSSL

SEQ ID NO: 29685 - protein, 9 aa, Homo sapiens
  Table A; Target 29685; HLA-C*14:02; HAVCR1; ENSG00000113249; TAA
QLSVSFSSL

SEQ ID NO: 29686 - protein, 9 aa, Homo sapiens
  Table A; Target 29686; HLA-B*35:03; HAVCR1; ENSG00000113249; TAA
QPAETHPTT

SEQ ID NO: 29687 - protein, 9 aa, Homo sapiens
  Table A; Target 29687; HLA-B*56:01; HAVCR1; ENSG00000113249; TAA
QPAETHPTT

SEQ ID NO: 29688 - protein, 10 aa, Homo sapiens
  Table A; Target 29688; HLA-B*07:02; HAVCR1; ENSG00000113249; TAA
QPAETHPTTL

SEQ ID NO: 29689 - protein, 10 aa, Homo sapiens
  Table A; Target 29689; HLA-B*35:01; HAVCR1; ENSG00000113249; TAA
QPAETHPTTL

SEQ ID NO: 29690 - protein, 10 aa, Homo sapiens
  Table A; Target 29690; HLA-B*35:03; HAVCR1; ENSG00000113249; TAA
QPAETHPTTL

SEQ ID NO: 29691 - protein, 10 aa, Homo sapiens
  Table A; Target 29691; HLA-B*40:01; HAVCR1; ENSG00000113249; TAA
QPAETHPTTL

SEQ ID NO: 29692 - protein, 10 aa, Homo sapiens
  Table A; Target 29692; HLA-B*56:01; HAVCR1; ENSG00000113249; TAA
QPAETHPTTL

SEQ ID NO: 29693 - protein, 10 aa, Homo sapiens
  Table A; Target 29693; HLA-C*07:02; HAVCR1; ENSG00000113249; TAA
QPAETHPTTL

SEQ ID NO: 29694 - protein, 8 aa, Homo sapiens
  Table A; Target 29694; HLA-B*37:01; HAVCR1; ENSG00000113249; TAA
REPTSSPL

SEQ ID NO: 29695 - protein, 9 aa, Homo sapiens
  Table A; Target 29695; HLA-A*24:02; HAVCR1; ENSG00000113249; TAA
REPTSSPLY

SEQ ID NO: 29696 - protein, 9 aa, Homo sapiens
  Table A; Target 29696; HLA-A*30:02; HAVCR1; ENSG00000113249; TAA
REPTSSPLY

SEQ ID NO: 29697 - protein, 9 aa, Homo sapiens
  Table A; Target 29697; HLA-B*15:03; HAVCR1; ENSG00000113249; TAA
REPTSSPLY

SEQ ID NO: 29698 - protein, 9 aa, Homo sapiens
  Table A; Target 29698; HLA-B*37:01; HAVCR1; ENSG00000113249; TAA
REPTSSPLY

SEQ ID NO: 29699 - protein, 9 aa, Homo sapiens
  Table A; Target 29699; HLA-B*44:02; HAVCR1; ENSG00000113249; TAA
REPTSSPLY

SEQ ID NO: 29700 - protein, 9 aa, Homo sapiens
  Table A; Target 29700; HLA-B*44:03; HAVCR1; ENSG00000113249; TAA
REPTSSPLY

SEQ ID NO: 29701 - protein, 9 aa, Homo sapiens
  Table A; Target 29701; HLA-C*16:04; HAVCR1; ENSG00000113249; TAA
REPTSSPLY

SEQ ID NO: 29702 - protein, 11 aa, Homo sapiens
  Table A; Target 29702; HLA-A*24:02; HAVCR1; ENSG00000113249; TAA
REPTSSPLYSY

SEQ ID NO: 29703 - protein, 11 aa, Homo sapiens
  Table A; Target 29703; HLA-A*29:02; HAVCR1; ENSG00000113249; TAA
REPTSSPLYSY

SEQ ID NO: 29704 - protein, 11 aa, Homo sapiens
  Table A; Target 29704; HLA-A*30:02; HAVCR1; ENSG00000113249; TAA
REPTSSPLYSY

SEQ ID NO: 29705 - protein, 11 aa, Homo sapiens
  Table A; Target 29705; HLA-B*44:02; HAVCR1; ENSG00000113249; TAA
REPTSSPLYSY

SEQ ID NO: 29706 - protein, 11 aa, Homo sapiens
  Table A; Target 29706; HLA-B*44:03; HAVCR1; ENSG00000113249; TAA
REPTSSPLYSY

SEQ ID NO: 29707 - protein, 11 aa, Homo sapiens
  Table A; Target 29707; HLA-C*16:04; HAVCR1; ENSG00000113249; TAA
REPTSSPLYSY

SEQ ID NO: 29708 - protein, 10 aa, Homo sapiens
  Table A; Target 29708; HLA-B*27:02; HAVCR1; ENSG00000113249; TAA
RREPTSSPLY

SEQ ID NO: 29709 - protein, 10 aa, Homo sapiens
  Table A; Target 29709; HLA-C*16:04; HAVCR1; ENSG00000113249; TAA
RREPTSSPLY

SEQ ID NO: 29710 - protein, 9 aa, Homo sapiens
  Table A; Target 29710; HLA-A*32:01; HAVCR1; ENSG00000113249; TAA
RTSTTVPTT

SEQ ID NO: 29711 - protein, 10 aa, Homo sapiens
  Table A; Target 29711; HLA-A*31:01; HAVCR1; ENSG00000113249; TAA
RYKLLGDLSR

SEQ ID NO: 29712 - protein, 11 aa, Homo sapiens
  Table A; Target 29712; HLA-A*31:01; HAVCR1; ENSG00000113249; TAA
RYKLLGDLSRR

SEQ ID NO: 29713 - protein, 9 aa, Homo sapiens
  Table A; Target 29713; HLA-B*58:01; HAVCR1; ENSG00000113249; TAA
SGAVTSMCW

SEQ ID NO: 29714 - protein, 8 aa, Homo sapiens
  Table A; Target 29714; HLA-C*01:02; HAVCR1; ENSG00000113249; TAA
SIPTTTSV

SEQ ID NO: 29715 - protein, 8 aa, Homo sapiens
  Table A; Target 29715; HLA-C*01:02; HAVCR1; ENSG00000113249; TAA
SIPTTTTV

SEQ ID NO: 29716 - protein, 8 aa, Homo sapiens
  Table A; Target 29716; HLA-C*05:01; HAVCR1; ENSG00000113249; TAA
SIPTTTTV

SEQ ID NO: 29717 - protein, 9 aa, Homo sapiens
  Table A; Target 29717; HLA-A*02:07; HAVCR1; ENSG00000113249; TAA
SIPTTTTVL

SEQ ID NO: 29718 - protein, 9 aa, Homo sapiens
  Table A; Target 29718; HLA-B*15:01; HAVCR1; ENSG00000113249; TAA
SIPTTTTVL

SEQ ID NO: 29719 - protein, 9 aa, Homo sapiens
  Table A; Target 29719; HLA-B*46:01; HAVCR1; ENSG00000113249; TAA
SIPTTTTVL

SEQ ID NO: 29720 - protein, 9 aa, Homo sapiens
  Table A; Target 29720; HLA-C*01:02; HAVCR1; ENSG00000113249; TAA
SIPTTTTVL

SEQ ID NO: 29721 - protein, 9 aa, Homo sapiens
  Table A; Target 29721; HLA-C*07:04; HAVCR1; ENSG00000113249; TAA
SIPTTTTVL

SEQ ID NO: 29722 - protein, 9 aa, Homo sapiens
  Table A; Target 29722; HLA-C*14:02; HAVCR1; ENSG00000113249; TAA
SIPTTTTVL

SEQ ID NO: 29723 - protein, 8 aa, Homo sapiens
  Table A; Target 29723; HLA-A*03:02; HAVCR1; ENSG00000113249; TAA
SLEIVPPK

SEQ ID NO: 29724 - protein, 9 aa, Homo sapiens
  Table A; Target 29724; HLA-A*02:01; HAVCR1; ENSG00000113249; TAA
SLEIVPPKV

SEQ ID NO: 29725 - protein, 9 aa, Homo sapiens
  Table A; Target 29725; HLA-A*02:03; HAVCR1; ENSG00000113249; TAA
SLEIVPPKV

SEQ ID NO: 29726 - protein, 9 aa, Homo sapiens
  Table A; Target 29726; HLA-A*02:04; HAVCR1; ENSG00000113249; TAA
SLEIVPPKV

SEQ ID NO: 29727 - protein, 9 aa, Homo sapiens
  Table A; Target 29727; HLA-A*02:07; HAVCR1; ENSG00000113249; TAA
SLEIVPPKV

SEQ ID NO: 29728 - protein, 9 aa, Homo sapiens
  Table A; Target 29728; HLA-B*13:02; HAVCR1; ENSG00000113249; TAA
SLEIVPPKV

SEQ ID NO: 29729 - protein, 9 aa, Homo sapiens
  Table A; Target 29729; HLA-B*55:01; HAVCR1; ENSG00000113249; TAA
SLEIVPPKV

SEQ ID NO: 29730 - protein, 9 aa, Homo sapiens
  Table A; Target 29730; HLA-B*13:02; HAVCR1; ENSG00000113249; TAA
SLFTCQNGI

SEQ ID NO: 29731 - protein, 9 aa, Homo sapiens
  Table A; Target 29731; HLA-A*03:01; HAVCR1; ENSG00000113249; TAA
SLLTANTTK

SEQ ID NO: 29732 - protein, 9 aa, Homo sapiens
  Table A; Target 29732; HLA-A*03:02; HAVCR1; ENSG00000113249; TAA
SLLTANTTK

SEQ ID NO: 29733 - protein, 9 aa, Homo sapiens
  Table A; Target 29733; HLA-A*11:01; HAVCR1; ENSG00000113249; TAA
SLLTANTTK

SEQ ID NO: 29734 - protein, 9 aa, Homo sapiens
  Table A; Target 29734; HLA-A*32:01; HAVCR1; ENSG00000113249; TAA
SLLTANTTK

SEQ ID NO: 29735 - protein, 9 aa, Homo sapiens
  Table A; Target 29735; HLA-A*02:01; HAVCR1; ENSG00000113249; TAA
SLTIENTAV

SEQ ID NO: 29736 - protein, 9 aa, Homo sapiens
  Table A; Target 29736; HLA-A*02:03; HAVCR1; ENSG00000113249; TAA
SLTIENTAV

SEQ ID NO: 29737 - protein, 9 aa, Homo sapiens
  Table A; Target 29737; HLA-B*13:02; HAVCR1; ENSG00000113249; TAA
SLTIENTAV

SEQ ID NO: 29738 - protein, 9 aa, Homo sapiens
  Table A; Target 29738; HLA-B*55:01; HAVCR1; ENSG00000113249; TAA
SLTIENTAV

SEQ ID NO: 29739 - protein, 8 aa, Homo sapiens
  Table A; Target 29739; HLA-C*16:01; HAVCR1; ENSG00000113249; TAA
SSLQIKAL

SEQ ID NO: 29740 - protein, 9 aa, Homo sapiens
  Table A; Target 29740; HLA-A*02:03; HAVCR1; ENSG00000113249; TAA
STFVPPMPL

SEQ ID NO: 29741 - protein, 9 aa, Homo sapiens
  Table A; Target 29741; HLA-A*31:01; HAVCR1; ENSG00000113249; TAA
STFVPPMPL

SEQ ID NO: 29742 - protein, 9 aa, Homo sapiens
  Table A; Target 29742; HLA-A*68:02; HAVCR1; ENSG00000113249; TAA
STFVPPMPL

SEQ ID NO: 29743 - protein, 9 aa, Homo sapiens
  Table A; Target 29743; HLA-C*03:03; HAVCR1; ENSG00000113249; TAA
STFVPPMPL

SEQ ID NO: 29744 - protein, 9 aa, Homo sapiens
  Table A; Target 29744; HLA-C*03:04; HAVCR1; ENSG00000113249; TAA
STFVPPMPL

SEQ ID NO: 29745 - protein, 11 aa, Homo sapiens
  Table A; Target 29745; HLA-A*11:01; HAVCR1; ENSG00000113249; TAA
STFVPPMPLPR

SEQ ID NO: 29746 - protein, 11 aa, Homo sapiens
  Table A; Target 29746; HLA-A*31:01; HAVCR1; ENSG00000113249; TAA
STFVPPMPLPR

SEQ ID NO: 29747 - protein, 11 aa, Homo sapiens
  Table A; Target 29747; HLA-A*33:01; HAVCR1; ENSG00000113249; TAA
STFVPPMPLPR

SEQ ID NO: 29748 - protein, 11 aa, Homo sapiens
  Table A; Target 29748; HLA-A*33:03; HAVCR1; ENSG00000113249; TAA
STFVPPMPLPR

SEQ ID NO: 29749 - protein, 11 aa, Homo sapiens
  Table A; Target 29749; HLA-A*68:01; HAVCR1; ENSG00000113249; TAA
STFVPPMPLPR

SEQ ID NO: 29750 - protein, 11 aa, Homo sapiens
  Table A; Target 29750; HLA-C*07:06; HAVCR1; ENSG00000113249; TAA
STFVPPMPLPR

SEQ ID NO: 29751 - protein, 8 aa, Homo sapiens
  Table A; Target 29751; HLA-C*06:02; HAVCR1; ENSG00000113249; TAA
SVAGSVKV

SEQ ID NO: 29752 - protein, 9 aa, Homo sapiens
  Table A; Target 29752; HLA-C*07:04; HAVCR1; ENSG00000113249; TAA
SVAGSVKVG

SEQ ID NO: 29753 - protein, 9 aa, Homo sapiens
  Table A; Target 29753; HLA-C*12:03; HAVCR1; ENSG00000113249; TAA
SVAGSVKVG

SEQ ID NO: 29754 - protein, 9 aa, Homo sapiens
  Table A; Target 29754; HLA-C*16:02; HAVCR1; ENSG00000113249; TAA
SVAGSVKVG

SEQ ID NO: 29755 - protein, 10 aa, Homo sapiens
  Table A; Target 29755; HLA-A*32:01; HAVCR1; ENSG00000113249; TAA
SVAGSVKVGG

SEQ ID NO: 29756 - protein, 9 aa, Homo sapiens
  Table A; Target 29756; HLA-A*02:04; HAVCR1; ENSG00000113249; TAA
SVLVLLALL

SEQ ID NO: 29757 - protein, 8 aa, Homo sapiens
  Table A; Target 29757; HLA-B*51:01; HAVCR1; ENSG00000113249; TAA
SVPTTTSI

SEQ ID NO: 29758 - protein, 8 aa, Homo sapiens
  Table A; Target 29758; HLA-C*01:02; HAVCR1; ENSG00000113249; TAA
SVPTTTSI

SEQ ID NO: 29759 - protein, 10 aa, Homo sapiens
  Table A; Target 29759; HLA-C*01:02; HAVCR1; ENSG00000113249; TAA
SVPTTTSIPT

SEQ ID NO: 29760 - protein, 8 aa, Homo sapiens
  Table A; Target 29760; HLA-B*51:01; HAVCR1; ENSG00000113249; TAA
SVPVTTTV

SEQ ID NO: 29761 - protein, 8 aa, Homo sapiens
  Table A; Target 29761; HLA-C*01:02; HAVCR1; ENSG00000113249; TAA
SVPVTTTV

SEQ ID NO: 29762 - protein, 8 aa, Homo sapiens
  Table A; Target 29762; HLA-C*05:01; HAVCR1; ENSG00000113249; TAA
SVPVTTTV

SEQ ID NO: 29763 - protein, 11 aa, Homo sapiens
  Table A; Target 29763; HLA-A*25:01; HAVCR1; ENSG00000113249; TAA
SVPVTTTVSTF

SEQ ID NO: 29764 - protein, 11 aa, Homo sapiens
  Table A; Target 29764; HLA-A*26:01; HAVCR1; ENSG00000113249; TAA
SVPVTTTVSTF

SEQ ID NO: 29765 - protein, 11 aa, Homo sapiens
  Table A; Target 29765; HLA-C*01:02; HAVCR1; ENSG00000113249; TAA
SVPVTTTVSTF

SEQ ID NO: 29766 - protein, 9 aa, Homo sapiens
  Table A; Target 29766; HLA-B*13:02; HAVCR1; ENSG00000113249; TAA
SVSFSSLQI

SEQ ID NO: 29767 - protein, 10 aa, Homo sapiens
  Table A; Target 29767; HLA-A*03:01; HAVCR1; ENSG00000113249; TAA
SVSFSSLQIK

SEQ ID NO: 29768 - protein, 10 aa, Homo sapiens
  Table A; Target 29768; HLA-A*03:02; HAVCR1; ENSG00000113249; TAA
SVSFSSLQIK

SEQ ID NO: 29769 - protein, 10 aa, Homo sapiens
  Table A; Target 29769; HLA-A*11:01; HAVCR1; ENSG00000113249; TAA
SVSFSSLQIK

SEQ ID NO: 29770 - protein, 8 aa, Homo sapiens
  Table A; Target 29770; HLA-B*51:01; HAVCR1; ENSG00000113249; TAA
TANTTKGI

SEQ ID NO: 29771 - protein, 9 aa, Homo sapiens
  Table A; Target 29771; HLA-A*25:01; HAVCR1; ENSG00000113249; TAA
TANTTKGIY

SEQ ID NO: 29772 - protein, 9 aa, Homo sapiens
  Table A; Target 29772; HLA-A*26:01; HAVCR1; ENSG00000113249; TAA
TANTTKGIY

SEQ ID NO: 29773 - protein, 9 aa, Homo sapiens
  Table A; Target 29773; HLA-A*29:02; HAVCR1; ENSG00000113249; TAA
TANTTKGIY

SEQ ID NO: 29774 - protein, 9 aa, Homo sapiens
  Table A; Target 29774; HLA-A*30:02; HAVCR1; ENSG00000113249; TAA
TANTTKGIY

SEQ ID NO: 29775 - protein, 9 aa, Homo sapiens
  Table A; Target 29775; HLA-A*32:01; HAVCR1; ENSG00000113249; TAA
TANTTKGIY

SEQ ID NO: 29776 - protein, 9 aa, Homo sapiens
  Table A; Target 29776; HLA-B*15:01; HAVCR1; ENSG00000113249; TAA
TANTTKGIY

SEQ ID NO: 29777 - protein, 9 aa, Homo sapiens
  Table A; Target 29777; HLA-B*15:03; HAVCR1; ENSG00000113249; TAA
TANTTKGIY

SEQ ID NO: 29778 - protein, 9 aa, Homo sapiens
  Table A; Target 29778; HLA-B*35:01; HAVCR1; ENSG00000113249; TAA
TANTTKGIY

SEQ ID NO: 29779 - protein, 9 aa, Homo sapiens
  Table A; Target 29779; HLA-B*46:01; HAVCR1; ENSG00000113249; TAA
TANTTKGIY

SEQ ID NO: 29780 - protein, 9 aa, Homo sapiens
  Table A; Target 29780; HLA-B*55:01; HAVCR1; ENSG00000113249; TAA
TANTTKGIY

SEQ ID NO: 29781 - protein, 9 aa, Homo sapiens
  Table A; Target 29781; HLA-B*58:01; HAVCR1; ENSG00000113249; TAA
TANTTKGIY

SEQ ID NO: 29782 - protein, 9 aa, Homo sapiens
  Table A; Target 29782; HLA-C*01:02; HAVCR1; ENSG00000113249; TAA
TANTTKGIY

SEQ ID NO: 29783 - protein, 9 aa, Homo sapiens
  Table A; Target 29783; HLA-C*02:02; HAVCR1; ENSG00000113249; TAA
TANTTKGIY

SEQ ID NO: 29784 - protein, 9 aa, Homo sapiens
  Table A; Target 29784; HLA-C*04:01; HAVCR1; ENSG00000113249; TAA
TANTTKGIY

SEQ ID NO: 29785 - protein, 9 aa, Homo sapiens
  Table A; Target 29785; HLA-C*07:04; HAVCR1; ENSG00000113249; TAA
TANTTKGIY

SEQ ID NO: 29786 - protein, 9 aa, Homo sapiens
  Table A; Target 29786; HLA-C*12:03; HAVCR1; ENSG00000113249; TAA
TANTTKGIY

SEQ ID NO: 29787 - protein, 9 aa, Homo sapiens
  Table A; Target 29787; HLA-C*14:02; HAVCR1; ENSG00000113249; TAA
TANTTKGIY

SEQ ID NO: 29788 - protein, 9 aa, Homo sapiens
  Table A; Target 29788; HLA-C*16:01; HAVCR1; ENSG00000113249; TAA
TANTTKGIY

SEQ ID NO: 29789 - protein, 9 aa, Homo sapiens
  Table A; Target 29789; HLA-C*16:02; HAVCR1; ENSG00000113249; TAA
TANTTKGIY

SEQ ID NO: 29790 - protein, 9 aa, Homo sapiens
  Table A; Target 29790; HLA-C*16:04; HAVCR1; ENSG00000113249; TAA
TANTTKGIY

SEQ ID NO: 29791 - protein, 10 aa, Homo sapiens
  Table A; Target 29791; HLA-B*54:01; HAVCR1; ENSG00000113249; TAA
TANTTKGIYA

SEQ ID NO: 29792 - protein, 9 aa, Homo sapiens
  Table A; Target 29792; HLA-A*25:01; HAVCR1; ENSG00000113249; TAA
TAVSDSGVY

SEQ ID NO: 29793 - protein, 9 aa, Homo sapiens
  Table A; Target 29793; HLA-A*26:01; HAVCR1; ENSG00000113249; TAA
TAVSDSGVY

SEQ ID NO: 29794 - protein, 9 aa, Homo sapiens
  Table A; Target 29794; HLA-A*30:02; HAVCR1; ENSG00000113249; TAA
TAVSDSGVY

SEQ ID NO: 29795 - protein, 9 aa, Homo sapiens
  Table A; Target 29795; HLA-B*15:01; HAVCR1; ENSG00000113249; TAA
TAVSDSGVY

SEQ ID NO: 29796 - protein, 9 aa, Homo sapiens
  Table A; Target 29796; HLA-B*15:03; HAVCR1; ENSG00000113249; TAA
TAVSDSGVY

SEQ ID NO: 29797 - protein, 9 aa, Homo sapiens
  Table A; Target 29797; HLA-B*27:05; HAVCR1; ENSG00000113249; TAA
TAVSDSGVY

SEQ ID NO: 29798 - protein, 9 aa, Homo sapiens
  Table A; Target 29798; HLA-B*35:01; HAVCR1; ENSG00000113249; TAA
TAVSDSGVY

SEQ ID NO: 29799 - protein, 9 aa, Homo sapiens
  Table A; Target 29799; HLA-B*35:03; HAVCR1; ENSG00000113249; TAA
TAVSDSGVY

SEQ ID NO: 29800 - protein, 9 aa, Homo sapiens
  Table A; Target 29800; HLA-B*39:01; HAVCR1; ENSG00000113249; TAA
TAVSDSGVY

SEQ ID NO: 29801 - protein, 9 aa, Homo sapiens
  Table A; Target 29801; HLA-B*46:01; HAVCR1; ENSG00000113249; TAA
TAVSDSGVY

SEQ ID NO: 29802 - protein, 9 aa, Homo sapiens
  Table A; Target 29802; HLA-B*55:01; HAVCR1; ENSG00000113249; TAA
TAVSDSGVY

SEQ ID NO: 29803 - protein, 9 aa, Homo sapiens
  Table A; Target 29803; HLA-B*58:01; HAVCR1; ENSG00000113249; TAA
TAVSDSGVY

SEQ ID NO: 29804 - protein, 9 aa, Homo sapiens
  Table A; Target 29804; HLA-C*02:02; HAVCR1; ENSG00000113249; TAA
TAVSDSGVY

SEQ ID NO: 29805 - protein, 9 aa, Homo sapiens
  Table A; Target 29805; HLA-C*03:03; HAVCR1; ENSG00000113249; TAA
TAVSDSGVY

SEQ ID NO: 29806 - protein, 9 aa, Homo sapiens
  Table A; Target 29806; HLA-C*03:04; HAVCR1; ENSG00000113249; TAA
TAVSDSGVY

SEQ ID NO: 29807 - protein, 9 aa, Homo sapiens
  Table A; Target 29807; HLA-C*07:01; HAVCR1; ENSG00000113249; TAA
TAVSDSGVY

SEQ ID NO: 29808 - protein, 9 aa, Homo sapiens
  Table A; Target 29808; HLA-C*07:04; HAVCR1; ENSG00000113249; TAA
TAVSDSGVY

SEQ ID NO: 29809 - protein, 9 aa, Homo sapiens
  Table A; Target 29809; HLA-C*07:06; HAVCR1; ENSG00000113249; TAA
TAVSDSGVY

SEQ ID NO: 29810 - protein, 9 aa, Homo sapiens
  Table A; Target 29810; HLA-C*12:03; HAVCR1; ENSG00000113249; TAA
TAVSDSGVY

SEQ ID NO: 29811 - protein, 9 aa, Homo sapiens
  Table A; Target 29811; HLA-C*16:01; HAVCR1; ENSG00000113249; TAA
TAVSDSGVY

SEQ ID NO: 29812 - protein, 9 aa, Homo sapiens
  Table A; Target 29812; HLA-C*16:02; HAVCR1; ENSG00000113249; TAA
TAVSDSGVY

SEQ ID NO: 29813 - protein, 9 aa, Homo sapiens
  Table A; Target 29813; HLA-C*16:04; HAVCR1; ENSG00000113249; TAA
TAVSDSGVY

SEQ ID NO: 29814 - protein, 10 aa, Homo sapiens
  Table A; Target 29814; HLA-C*03:03; HAVCR1; ENSG00000113249; TAA
TAVSDSGVYC

SEQ ID NO: 29815 - protein, 9 aa, Homo sapiens
  Table A; Target 29815; HLA-A*23:01; HAVCR1; ENSG00000113249; TAA
TFVPPMPLP

SEQ ID NO: 29816 - protein, 10 aa, Homo sapiens
  Table A; Target 29816; HLA-A*31:01; HAVCR1; ENSG00000113249; TAA
TFVPPMPLPR

SEQ ID NO: 29817 - protein, 8 aa, Homo sapiens
  Table A; Target 29817; HLA-A*32:01; HAVCR1; ENSG00000113249; TAA
TNGTHVTY

SEQ ID NO: 29818 - protein, 8 aa, Homo sapiens
  Table A; Target 29818; HLA-B*18:01; HAVCR1; ENSG00000113249; TAA
TNGTHVTY

SEQ ID NO: 29819 - protein, 8 aa, Homo sapiens
  Table A; Target 29819; HLA-B*35:01; HAVCR1; ENSG00000113249; TAA
TNGTHVTY

SEQ ID NO: 29820 - protein, 8 aa, Homo sapiens
  Table A; Target 29820; HLA-C*03:03; HAVCR1; ENSG00000113249; TAA
TNGTHVTY

SEQ ID NO: 29821 - protein, 8 aa, Homo sapiens
  Table A; Target 29821; HLA-C*04:01; HAVCR1; ENSG00000113249; TAA
TNGTHVTY

SEQ ID NO: 29822 - protein, 8 aa, Homo sapiens
  Table A; Target 29822; HLA-C*07:01; HAVCR1; ENSG00000113249; TAA
TNGTHVTY

SEQ ID NO: 29823 - protein, 8 aa, Homo sapiens
  Table A; Target 29823; HLA-C*07:04; HAVCR1; ENSG00000113249; TAA
TNGTHVTY

SEQ ID NO: 29824 - protein, 8 aa, Homo sapiens
  Table A; Target 29824; HLA-C*12:03; HAVCR1; ENSG00000113249; TAA
TNGTHVTY

SEQ ID NO: 29825 - protein, 8 aa, Homo sapiens
  Table A; Target 29825; HLA-C*16:01; HAVCR1; ENSG00000113249; TAA
TNGTHVTY

SEQ ID NO: 29826 - protein, 8 aa, Homo sapiens
  Table A; Target 29826; HLA-C*16:02; HAVCR1; ENSG00000113249; TAA
TNGTHVTY

SEQ ID NO: 29827 - protein, 9 aa, Homo sapiens
  Table A; Target 29827; HLA-A*31:01; HAVCR1; ENSG00000113249; TAA
TNGTHVTYR

SEQ ID NO: 29828 - protein, 9 aa, Homo sapiens
  Table A; Target 29828; HLA-A*33:01; HAVCR1; ENSG00000113249; TAA
TNGTHVTYR

SEQ ID NO: 29829 - protein, 9 aa, Homo sapiens
  Table A; Target 29829; HLA-A*33:03; HAVCR1; ENSG00000113249; TAA
TNGTHVTYR

SEQ ID NO: 29830 - protein, 9 aa, Homo sapiens
  Table A; Target 29830; HLA-A*68:01; HAVCR1; ENSG00000113249; TAA
TNGTHVTYR

SEQ ID NO: 29831 - protein, 9 aa, Homo sapiens
  Table A; Target 29831; HLA-C*07:06; HAVCR1; ENSG00000113249; TAA
TNGTHVTYR

SEQ ID NO: 29832 - protein, 9 aa, Homo sapiens
  Table A; Target 29832; HLA-B*35:03; HAVCR1; ENSG00000113249; TAA
TPIVTTVPT

SEQ ID NO: 29833 - protein, 9 aa, Homo sapiens
  Table A; Target 29833; HLA-B*56:01; HAVCR1; ENSG00000113249; TAA
TPIVTTVPT

SEQ ID NO: 29834 - protein, 10 aa, Homo sapiens
  Table A; Target 29834; HLA-B*51:01; HAVCR1; ENSG00000113249; TAA
TPIVTTVPTV

SEQ ID NO: 29835 - protein, 10 aa, Homo sapiens
  Table A; Target 29835; HLA-B*54:01; HAVCR1; ENSG00000113249; TAA
TPIVTTVPTV

SEQ ID NO: 29836 - protein, 10 aa, Homo sapiens
  Table A; Target 29836; HLA-B*56:01; HAVCR1; ENSG00000113249; TAA
TPIVTTVPTV

SEQ ID NO: 29837 - protein, 9 aa, Homo sapiens
  Table A; Target 29837; HLA-A*02:04; HAVCR1; ENSG00000113249; TAA
TQLFLEHSL

SEQ ID NO: 29838 - protein, 9 aa, Homo sapiens
  Table A; Target 29838; HLA-B*13:02; HAVCR1; ENSG00000113249; TAA
TQLFLEHSL

SEQ ID NO: 29839 - protein, 9 aa, Homo sapiens
  Table A; Target 29839; HLA-B*38:01; HAVCR1; ENSG00000113249; TAA
TQLFLEHSL

SEQ ID NO: 29840 - protein, 9 aa, Homo sapiens
  Table A; Target 29840; HLA-B*39:01; HAVCR1; ENSG00000113249; TAA
TQLFLEHSL

SEQ ID NO: 29841 - protein, 9 aa, Homo sapiens
  Table A; Target 29841; HLA-A*02:03; HAVCR1; ENSG00000113249; TAA
TSIPTTTSV

SEQ ID NO: 29842 - protein, 9 aa, Homo sapiens
  Table A; Target 29842; HLA-A*25:01; HAVCR1; ENSG00000113249; TAA
TSIPTTTSV

SEQ ID NO: 29843 - protein, 9 aa, Homo sapiens
  Table A; Target 29843; HLA-A*32:01; HAVCR1; ENSG00000113249; TAA
TSIPTTTSV

SEQ ID NO: 29844 - protein, 9 aa, Homo sapiens
  Table A; Target 29844; HLA-B*13:02; HAVCR1; ENSG00000113249; TAA
TSIPTTTSV

SEQ ID NO: 29845 - protein, 9 aa, Homo sapiens
  Table A; Target 29845; HLA-B*39:01; HAVCR1; ENSG00000113249; TAA
TSIPTTTSV

SEQ ID NO: 29846 - protein, 9 aa, Homo sapiens
  Table A; Target 29846; HLA-B*46:01; HAVCR1; ENSG00000113249; TAA
TSIPTTTSV

SEQ ID NO: 29847 - protein, 9 aa, Homo sapiens
  Table A; Target 29847; HLA-B*49:01; HAVCR1; ENSG00000113249; TAA
TSIPTTTSV

SEQ ID NO: 29848 - protein, 9 aa, Homo sapiens
  Table A; Target 29848; HLA-B*51:01; HAVCR1; ENSG00000113249; TAA
TSIPTTTSV

SEQ ID NO: 29849 - protein, 9 aa, Homo sapiens
  Table A; Target 29849; HLA-B*58:01; HAVCR1; ENSG00000113249; TAA
TSIPTTTSV

SEQ ID NO: 29850 - protein, 9 aa, Homo sapiens
  Table A; Target 29850; HLA-C*01:02; HAVCR1; ENSG00000113249; TAA
TSIPTTTSV

SEQ ID NO: 29851 - protein, 9 aa, Homo sapiens
  Table A; Target 29851; HLA-C*02:02; HAVCR1; ENSG00000113249; TAA
TSIPTTTSV

SEQ ID NO: 29852 - protein, 9 aa, Homo sapiens
  Table A; Target 29852; HLA-C*03:03; HAVCR1; ENSG00000113249; TAA
TSIPTTTSV

SEQ ID NO: 29853 - protein, 9 aa, Homo sapiens
  Table A; Target 29853; HLA-C*03:04; HAVCR1; ENSG00000113249; TAA
TSIPTTTSV

SEQ ID NO: 29854 - protein, 9 aa, Homo sapiens
  Table A; Target 29854; HLA-C*16:02; HAVCR1; ENSG00000113249; TAA
TSIPTTTSV

SEQ ID NO: 29855 - protein, 11 aa, Homo sapiens
  Table A; Target 29855; HLA-C*06:02; HAVCR1; ENSG00000113249; TAA
TSIPTTTSVPV

SEQ ID NO: 29856 - protein, 8 aa, Homo sapiens
  Table A; Target 29856; HLA-A*30:02; HAVCR1; ENSG00000113249; TAA
TSSPLYSY

SEQ ID NO: 29857 - protein, 8 aa, Homo sapiens
  Table A; Target 29857; HLA-B*58:01; HAVCR1; ENSG00000113249; TAA
TSSPLYSY

SEQ ID NO: 29858 - protein, 9 aa, Homo sapiens
  Table A; Target 29858; HLA-C*16:02; HAVCR1; ENSG00000113249; TAA
TSTTVPTTT

SEQ ID NO: 29859 - protein, 9 aa, Homo sapiens
  Table A; Target 29859; HLA-A*23:01; HAVCR1; ENSG00000113249; TAA
TSVPTTTSI

SEQ ID NO: 29860 - protein, 9 aa, Homo sapiens
  Table A; Target 29860; HLA-A*25:01; HAVCR1; ENSG00000113249; TAA
TSVPTTTSI

SEQ ID NO: 29861 - protein, 9 aa, Homo sapiens
  Table A; Target 29861; HLA-A*32:01; HAVCR1; ENSG00000113249; TAA
TSVPTTTSI

SEQ ID NO: 29862 - protein, 9 aa, Homo sapiens
  Table A; Target 29862; HLA-B*13:02; HAVCR1; ENSG00000113249; TAA
TSVPTTTSI

SEQ ID NO: 29863 - protein, 9 aa, Homo sapiens
  Table A; Target 29863; HLA-B*46:01; HAVCR1; ENSG00000113249; TAA
TSVPTTTSI

SEQ ID NO: 29864 - protein, 9 aa, Homo sapiens
  Table A; Target 29864; HLA-B*49:01; HAVCR1; ENSG00000113249; TAA
TSVPTTTSI

SEQ ID NO: 29865 - protein, 9 aa, Homo sapiens
  Table A; Target 29865; HLA-B*51:01; HAVCR1; ENSG00000113249; TAA
TSVPTTTSI

SEQ ID NO: 29866 - protein, 9 aa, Homo sapiens
  Table A; Target 29866; HLA-B*58:01; HAVCR1; ENSG00000113249; TAA
TSVPTTTSI

SEQ ID NO: 29867 - protein, 9 aa, Homo sapiens
  Table A; Target 29867; HLA-C*01:02; HAVCR1; ENSG00000113249; TAA
TSVPTTTSI

SEQ ID NO: 29868 - protein, 9 aa, Homo sapiens
  Table A; Target 29868; HLA-C*03:03; HAVCR1; ENSG00000113249; TAA
TSVPTTTSI

SEQ ID NO: 29869 - protein, 9 aa, Homo sapiens
  Table A; Target 29869; HLA-C*03:04; HAVCR1; ENSG00000113249; TAA
TSVPTTTSI

SEQ ID NO: 29870 - protein, 11 aa, Homo sapiens
  Table A; Target 29870; HLA-C*04:01; HAVCR1; ENSG00000113249; TAA
TSVPTTTSIPT

SEQ ID NO: 29871 - protein, 9 aa, Homo sapiens
  Table A; Target 29871; HLA-A*02:01; HAVCR1; ENSG00000113249; TAA
TSVPVTTTV

SEQ ID NO: 29872 - protein, 9 aa, Homo sapiens
  Table A; Target 29872; HLA-A*02:03; HAVCR1; ENSG00000113249; TAA
TSVPVTTTV

SEQ ID NO: 29873 - protein, 9 aa, Homo sapiens
  Table A; Target 29873; HLA-A*02:07; HAVCR1; ENSG00000113249; TAA
TSVPVTTTV

SEQ ID NO: 29874 - protein, 9 aa, Homo sapiens
  Table A; Target 29874; HLA-A*23:01; HAVCR1; ENSG00000113249; TAA
TSVPVTTTV

SEQ ID NO: 29875 - protein, 9 aa, Homo sapiens
  Table A; Target 29875; HLA-A*25:01; HAVCR1; ENSG00000113249; TAA
TSVPVTTTV

SEQ ID NO: 29876 - protein, 9 aa, Homo sapiens
  Table A; Target 29876; HLA-A*30:01; HAVCR1; ENSG00000113249; TAA
TSVPVTTTV

SEQ ID NO: 29877 - protein, 9 aa, Homo sapiens
  Table A; Target 29877; HLA-A*32:01; HAVCR1; ENSG00000113249; TAA
TSVPVTTTV

SEQ ID NO: 29878 - protein, 9 aa, Homo sapiens
  Table A; Target 29878; HLA-A*68:02; HAVCR1; ENSG00000113249; TAA
TSVPVTTTV

SEQ ID NO: 29879 - protein, 9 aa, Homo sapiens
  Table A; Target 29879; HLA-B*13:02; HAVCR1; ENSG00000113249; TAA
TSVPVTTTV

SEQ ID NO: 29880 - protein, 9 aa, Homo sapiens
  Table A; Target 29880; HLA-B*39:01; HAVCR1; ENSG00000113249; TAA
TSVPVTTTV

SEQ ID NO: 29881 - protein, 9 aa, Homo sapiens
  Table A; Target 29881; HLA-B*40:02; HAVCR1; ENSG00000113249; TAA
TSVPVTTTV

SEQ ID NO: 29882 - protein, 9 aa, Homo sapiens
  Table A; Target 29882; HLA-B*46:01; HAVCR1; ENSG00000113249; TAA
TSVPVTTTV

SEQ ID NO: 29883 - protein, 9 aa, Homo sapiens
  Table A; Target 29883; HLA-B*49:01; HAVCR1; ENSG00000113249; TAA
TSVPVTTTV

SEQ ID NO: 29884 - protein, 9 aa, Homo sapiens
  Table A; Target 29884; HLA-B*51:01; HAVCR1; ENSG00000113249; TAA
TSVPVTTTV

SEQ ID NO: 29885 - protein, 9 aa, Homo sapiens
  Table A; Target 29885; HLA-B*58:01; HAVCR1; ENSG00000113249; TAA
TSVPVTTTV

SEQ ID NO: 29886 - protein, 9 aa, Homo sapiens
  Table A; Target 29886; HLA-C*02:02; HAVCR1; ENSG00000113249; TAA
TSVPVTTTV

SEQ ID NO: 29887 - protein, 9 aa, Homo sapiens
  Table A; Target 29887; HLA-C*03:03; HAVCR1; ENSG00000113249; TAA
TSVPVTTTV

SEQ ID NO: 29888 - protein, 9 aa, Homo sapiens
  Table A; Target 29888; HLA-C*03:04; HAVCR1; ENSG00000113249; TAA
TSVPVTTTV

SEQ ID NO: 29889 - protein, 9 aa, Homo sapiens
  Table A; Target 29889; HLA-C*05:01; HAVCR1; ENSG00000113249; TAA
TSVPVTTTV

SEQ ID NO: 29890 - protein, 9 aa, Homo sapiens
  Table A; Target 29890; HLA-C*12:03; HAVCR1; ENSG00000113249; TAA
TSVPVTTTV

SEQ ID NO: 29891 - protein, 9 aa, Homo sapiens
  Table A; Target 29891; HLA-C*16:02; HAVCR1; ENSG00000113249; TAA
TSVPVTTTV

SEQ ID NO: 29892 - protein, 9 aa, Homo sapiens
  Table A; Target 29892; HLA-C*16:04; HAVCR1; ENSG00000113249; TAA
TSVPVTTTV

SEQ ID NO: 29893 - protein, 8 aa, Homo sapiens
  Table A; Target 29893; HLA-C*05:01; HAVCR1; ENSG00000113249; TAA
TTDGNDTV

SEQ ID NO: 29894 - protein, 11 aa, Homo sapiens
  Table A; Target 29894; HLA-B*39:01; HAVCR1; ENSG00000113249; TAA
TTDGNDTVTES

SEQ ID NO: 29895 - protein, 9 aa, Homo sapiens
  Table A; Target 29895; HLA-A*02:03; HAVCR1; ENSG00000113249; TAA
TTKGIYAGV

SEQ ID NO: 29896 - protein, 9 aa, Homo sapiens
  Table A; Target 29896; HLA-A*25:01; HAVCR1; ENSG00000113249; TAA
TTKGIYAGV

SEQ ID NO: 29897 - protein, 9 aa, Homo sapiens
  Table A; Target 29897; HLA-A*26:01; HAVCR1; ENSG00000113249; TAA
TTKGIYAGV

SEQ ID NO: 29898 - protein, 9 aa, Homo sapiens
  Table A; Target 29898; HLA-A*31:01; HAVCR1; ENSG00000113249; TAA
TTKGIYAGV

SEQ ID NO: 29899 - protein, 9 aa, Homo sapiens
  Table A; Target 29899; HLA-A*33:01; HAVCR1; ENSG00000113249; TAA
TTKGIYAGV

SEQ ID NO: 29900 - protein, 9 aa, Homo sapiens
  Table A; Target 29900; HLA-A*33:03; HAVCR1; ENSG00000113249; TAA
TTKGIYAGV

SEQ ID NO: 29901 - protein, 9 aa, Homo sapiens
  Table A; Target 29901; HLA-A*68:01; HAVCR1; ENSG00000113249; TAA
TTKGIYAGV

SEQ ID NO: 29902 - protein, 9 aa, Homo sapiens
  Table A; Target 29902; HLA-A*68:02; HAVCR1; ENSG00000113249; TAA
TTKGIYAGV

SEQ ID NO: 29903 - protein, 9 aa, Homo sapiens
  Table A; Target 29903; HLA-B*40:02; HAVCR1; ENSG00000113249; TAA
TTKGIYAGV

SEQ ID NO: 29904 - protein, 9 aa, Homo sapiens
  Table A; Target 29904; HLA-C*06:02; HAVCR1; ENSG00000113249; TAA
TTKGIYAGV

SEQ ID NO: 29905 - protein, 9 aa, Homo sapiens
  Table A; Target 29905; HLA-C*16:02; HAVCR1; ENSG00000113249; TAA
TTKGIYAGV

SEQ ID NO: 29906 - protein, 9 aa, Homo sapiens
  Table A; Target 29906; HLA-A*11:01; HAVCR1; ENSG00000113249; TAA
TTLQGAIRR

SEQ ID NO: 29907 - protein, 9 aa, Homo sapiens
  Table A; Target 29907; HLA-A*31:01; HAVCR1; ENSG00000113249; TAA
TTLQGAIRR

SEQ ID NO: 29908 - protein, 9 aa, Homo sapiens
  Table A; Target 29908; HLA-A*33:01; HAVCR1; ENSG00000113249; TAA
TTLQGAIRR

SEQ ID NO: 29909 - protein, 9 aa, Homo sapiens
  Table A; Target 29909; HLA-A*33:03; HAVCR1; ENSG00000113249; TAA
TTLQGAIRR

SEQ ID NO: 29910 - protein, 9 aa, Homo sapiens
  Table A; Target 29910; HLA-A*68:01; HAVCR1; ENSG00000113249; TAA
TTLQGAIRR

SEQ ID NO: 29911 - protein, 9 aa, Homo sapiens
  Table A; Target 29911; HLA-C*07:06; HAVCR1; ENSG00000113249; TAA
TTLQGAIRR

SEQ ID NO: 29912 - protein, 9 aa, Homo sapiens
  Table A; Target 29912; HLA-A*32:01; HAVCR1; ENSG00000113249; TAA
TTMSIPTTT

SEQ ID NO: 29913 - protein, 9 aa, Homo sapiens
  Table A; Target 29913; HLA-A*32:01; HAVCR1; ENSG00000113249; TAA
TTMTVSTTT

SEQ ID NO: 29914 - protein, 8 aa, Homo sapiens
  Table A; Target 29914; HLA-B*51:01; HAVCR1; ENSG00000113249; TAA
TTPIVTTV

SEQ ID NO: 29915 - protein, 10 aa, Homo sapiens
  Table A; Target 29915; HLA-A*68:02; HAVCR1; ENSG00000113249; TAA
TTSVPVTTTV

SEQ ID NO: 29916 - protein, 10 aa, Homo sapiens
  Table A; Target 29916; HLA-C*07:06; HAVCR1; ENSG00000113249; TAA
TTSVPVTTTV

SEQ ID NO: 29917 - protein, 9 aa, Homo sapiens
  Table A; Target 29917; HLA-A*02:01; HAVCR1; ENSG00000113249; TAA
TTTPIVTTV

SEQ ID NO: 29918 - protein, 9 aa, Homo sapiens
  Table A; Target 29918; HLA-A*02:03; HAVCR1; ENSG00000113249; TAA
TTTPIVTTV

SEQ ID NO: 29919 - protein, 9 aa, Homo sapiens
  Table A; Target 29919; HLA-A*02:04; HAVCR1; ENSG00000113249; TAA
TTTPIVTTV

SEQ ID NO: 29920 - protein, 9 aa, Homo sapiens
  Table A; Target 29920; HLA-A*26:01; HAVCR1; ENSG00000113249; TAA
TTTPIVTTV

SEQ ID NO: 29921 - protein, 9 aa, Homo sapiens
  Table A; Target 29921; HLA-A*32:01; HAVCR1; ENSG00000113249; TAA
TTTPIVTTV

SEQ ID NO: 29922 - protein, 9 aa, Homo sapiens
  Table A; Target 29922; HLA-A*68:02; HAVCR1; ENSG00000113249; TAA
TTTPIVTTV

SEQ ID NO: 29923 - protein, 9 aa, Homo sapiens
  Table A; Target 29923; HLA-B*13:02; HAVCR1; ENSG00000113249; TAA
TTTPIVTTV

SEQ ID NO: 29924 - protein, 9 aa, Homo sapiens
  Table A; Target 29924; HLA-C*02:02; HAVCR1; ENSG00000113249; TAA
TTTPIVTTV

SEQ ID NO: 29925 - protein, 9 aa, Homo sapiens
  Table A; Target 29925; HLA-C*12:03; HAVCR1; ENSG00000113249; TAA
TTTPIVTTV

SEQ ID NO: 29926 - protein, 9 aa, Homo sapiens
  Table A; Target 29926; HLA-C*16:02; HAVCR1; ENSG00000113249; TAA
TTTPIVTTV

SEQ ID NO: 29927 - protein, 9 aa, Homo sapiens
  Table A; Target 29927; HLA-A*32:01; HAVCR1; ENSG00000113249; TAA
TTTSIPTTT

SEQ ID NO: 29928 - protein, 9 aa, Homo sapiens
  Table A; Target 29928; HLA-C*16:02; HAVCR1; ENSG00000113249; TAA
TTTSIPTTT

SEQ ID NO: 29929 - protein, 9 aa, Homo sapiens
  Table A; Target 29929; HLA-A*32:01; HAVCR1; ENSG00000113249; TAA
TTTSVPTTT

SEQ ID NO: 29930 - protein, 9 aa, Homo sapiens
  Table A; Target 29930; HLA-C*16:02; HAVCR1; ENSG00000113249; TAA
TTTSVPTTT

SEQ ID NO: 29931 - protein, 9 aa, Homo sapiens
  Table A; Target 29931; HLA-A*32:01; HAVCR1; ENSG00000113249; TAA
TTTSVPVTT

SEQ ID NO: 29932 - protein, 9 aa, Homo sapiens
  Table A; Target 29932; HLA-C*16:02; HAVCR1; ENSG00000113249; TAA
TTTSVPVTT

SEQ ID NO: 29933 - protein, 11 aa, Homo sapiens
  Table A; Target 29933; HLA-A*68:02; HAVCR1; ENSG00000113249; TAA
TTTSVPVTTTV

SEQ ID NO: 29934 - protein, 9 aa, Homo sapiens
  Table A; Target 29934; HLA-A*23:01; HAVCR1; ENSG00000113249; TAA
TTTTVLTTM

SEQ ID NO: 29935 - protein, 9 aa, Homo sapiens
  Table A; Target 29935; HLA-A*25:01; HAVCR1; ENSG00000113249; TAA
TTTTVLTTM

SEQ ID NO: 29936 - protein, 9 aa, Homo sapiens
  Table A; Target 29936; HLA-A*26:01; HAVCR1; ENSG00000113249; TAA
TTTTVLTTM

SEQ ID NO: 29937 - protein, 9 aa, Homo sapiens
  Table A; Target 29937; HLA-A*32:01; HAVCR1; ENSG00000113249; TAA
TTTTVLTTM

SEQ ID NO: 29938 - protein, 9 aa, Homo sapiens
  Table A; Target 29938; HLA-A*33:03; HAVCR1; ENSG00000113249; TAA
TTTTVLTTM

SEQ ID NO: 29939 - protein, 9 aa, Homo sapiens
  Table A; Target 29939; HLA-A*68:01; HAVCR1; ENSG00000113249; TAA
TTTTVLTTM

SEQ ID NO: 29940 - protein, 9 aa, Homo sapiens
  Table A; Target 29940; HLA-A*68:02; HAVCR1; ENSG00000113249; TAA
TTTTVLTTM

SEQ ID NO: 29941 - protein, 9 aa, Homo sapiens
  Table A; Target 29941; HLA-B*35:01; HAVCR1; ENSG00000113249; TAA
TTTTVLTTM

SEQ ID NO: 29942 - protein, 9 aa, Homo sapiens
  Table A; Target 29942; HLA-B*35:03; HAVCR1; ENSG00000113249; TAA
TTTTVLTTM

SEQ ID NO: 29943 - protein, 9 aa, Homo sapiens
  Table A; Target 29943; HLA-B*39:01; HAVCR1; ENSG00000113249; TAA
TTTTVLTTM

SEQ ID NO: 29944 - protein, 9 aa, Homo sapiens
  Table A; Target 29944; HLA-B*46:01; HAVCR1; ENSG00000113249; TAA
TTTTVLTTM

SEQ ID NO: 29945 - protein, 9 aa, Homo sapiens
  Table A; Target 29945; HLA-B*57:01; HAVCR1; ENSG00000113249; TAA
TTTTVLTTM

SEQ ID NO: 29946 - protein, 9 aa, Homo sapiens
  Table A; Target 29946; HLA-B*58:01; HAVCR1; ENSG00000113249; TAA
TTTTVLTTM

SEQ ID NO: 29947 - protein, 9 aa, Homo sapiens
  Table A; Target 29947; HLA-C*01:02; HAVCR1; ENSG00000113249; TAA
TTTTVLTTM

SEQ ID NO: 29948 - protein, 9 aa, Homo sapiens
  Table A; Target 29948; HLA-C*02:02; HAVCR1; ENSG00000113249; TAA
TTTTVLTTM

SEQ ID NO: 29949 - protein, 9 aa, Homo sapiens
  Table A; Target 29949; HLA-C*03:03; HAVCR1; ENSG00000113249; TAA
TTTTVLTTM

SEQ ID NO: 29950 - protein, 9 aa, Homo sapiens
  Table A; Target 29950; HLA-C*03:04; HAVCR1; ENSG00000113249; TAA
TTTTVLTTM

SEQ ID NO: 29951 - protein, 9 aa, Homo sapiens
  Table A; Target 29951; HLA-C*07:04; HAVCR1; ENSG00000113249; TAA
TTTTVLTTM

SEQ ID NO: 29952 - protein, 9 aa, Homo sapiens
  Table A; Target 29952; HLA-C*07:06; HAVCR1; ENSG00000113249; TAA
TTTTVLTTM

SEQ ID NO: 29953 - protein, 9 aa, Homo sapiens
  Table A; Target 29953; HLA-C*16:01; HAVCR1; ENSG00000113249; TAA
TTTTVLTTM

SEQ ID NO: 29954 - protein, 9 aa, Homo sapiens
  Table A; Target 29954; HLA-C*16:02; HAVCR1; ENSG00000113249; TAA
TTTTVLTTM

SEQ ID NO: 29955 - protein, 8 aa, Homo sapiens
  Table A; Target 29955; HLA-A*32:01; HAVCR1; ENSG00000113249; TAA
TTTVLTTM

SEQ ID NO: 29956 - protein, 8 aa, Homo sapiens
  Table A; Target 29956; HLA-C*05:01; HAVCR1; ENSG00000113249; TAA
TTTVPTTM

SEQ ID NO: 29957 - protein, 9 aa, Homo sapiens
  Table A; Target 29957; HLA-C*05:01; HAVCR1; ENSG00000113249; TAA
TTTVPTTTV

SEQ ID NO: 29958 - protein, 9 aa, Homo sapiens
  Table A; Target 29958; HLA-A*68:02; HAVCR1; ENSG00000113249; TAA
TTVLTTMTV

SEQ ID NO: 29959 - protein, 9 aa, Homo sapiens
  Table A; Target 29959; HLA-B*13:02; HAVCR1; ENSG00000113249; TAA
TTVLTTMTV

SEQ ID NO: 29960 - protein, 9 aa, Homo sapiens
  Table A; Target 29960; HLA-B*40:02; HAVCR1; ENSG00000113249; TAA
TTVLTTMTV

SEQ ID NO: 29961 - protein, 9 aa, Homo sapiens
  Table A; Target 29961; HLA-B*51:01; HAVCR1; ENSG00000113249; TAA
TTVLTTMTV

SEQ ID NO: 29962 - protein, 9 aa, Homo sapiens
  Table A; Target 29962; HLA-C*06:02; HAVCR1; ENSG00000113249; TAA
TTVLTTMTV

SEQ ID NO: 29963 - protein, 9 aa, Homo sapiens
  Table A; Target 29963; HLA-A*25:01; HAVCR1; ENSG00000113249; TAA
TTVPTTMSI

SEQ ID NO: 29964 - protein, 9 aa, Homo sapiens
  Table A; Target 29964; HLA-B*58:01; HAVCR1; ENSG00000113249; TAA
TTVPTTMSI

SEQ ID NO: 29965 - protein, 9 aa, Homo sapiens
  Table A; Target 29965; HLA-C*03:04; HAVCR1; ENSG00000113249; TAA
TTVPTTMSI

SEQ ID NO: 29966 - protein, 9 aa, Homo sapiens
  Table A; Target 29966; HLA-A*02:01; HAVCR1; ENSG00000113249; TAA
TTVPTTTTV

SEQ ID NO: 29967 - protein, 9 aa, Homo sapiens
  Table A; Target 29967; HLA-A*02:03; HAVCR1; ENSG00000113249; TAA
TTVPTTTTV

SEQ ID NO: 29968 - protein, 9 aa, Homo sapiens
  Table A; Target 29968; HLA-A*02:07; HAVCR1; ENSG00000113249; TAA
TTVPTTTTV

SEQ ID NO: 29969 - protein, 9 aa, Homo sapiens
  Table A; Target 29969; HLA-A*25:01; HAVCR1; ENSG00000113249; TAA
TTVPTTTTV

SEQ ID NO: 29970 - protein, 9 aa, Homo sapiens
  Table A; Target 29970; HLA-A*26:01; HAVCR1; ENSG00000113249; TAA
TTVPTTTTV

SEQ ID NO: 29971 - protein, 9 aa, Homo sapiens
  Table A; Target 29971; HLA-A*32:01; HAVCR1; ENSG00000113249; TAA
TTVPTTTTV

SEQ ID NO: 29972 - protein, 9 aa, Homo sapiens
  Table A; Target 29972; HLA-A*68:02; HAVCR1; ENSG00000113249; TAA
TTVPTTTTV

SEQ ID NO: 29973 - protein, 9 aa, Homo sapiens
  Table A; Target 29973; HLA-B*13:02; HAVCR1; ENSG00000113249; TAA
TTVPTTTTV

SEQ ID NO: 29974 - protein, 9 aa, Homo sapiens
  Table A; Target 29974; HLA-B*46:01; HAVCR1; ENSG00000113249; TAA
TTVPTTTTV

SEQ ID NO: 29975 - protein, 9 aa, Homo sapiens
  Table A; Target 29975; HLA-B*49:01; HAVCR1; ENSG00000113249; TAA
TTVPTTTTV

SEQ ID NO: 29976 - protein, 9 aa, Homo sapiens
  Table A; Target 29976; HLA-B*51:01; HAVCR1; ENSG00000113249; TAA
TTVPTTTTV

SEQ ID NO: 29977 - protein, 9 aa, Homo sapiens
  Table A; Target 29977; HLA-B*58:01; HAVCR1; ENSG00000113249; TAA
TTVPTTTTV

SEQ ID NO: 29978 - protein, 9 aa, Homo sapiens
  Table A; Target 29978; HLA-C*02:02; HAVCR1; ENSG00000113249; TAA
TTVPTTTTV

SEQ ID NO: 29979 - protein, 9 aa, Homo sapiens
  Table A; Target 29979; HLA-C*03:03; HAVCR1; ENSG00000113249; TAA
TTVPTTTTV

SEQ ID NO: 29980 - protein, 9 aa, Homo sapiens
  Table A; Target 29980; HLA-C*03:04; HAVCR1; ENSG00000113249; TAA
TTVPTTTTV

SEQ ID NO: 29981 - protein, 9 aa, Homo sapiens
  Table A; Target 29981; HLA-C*07:06; HAVCR1; ENSG00000113249; TAA
TTVPTTTTV

SEQ ID NO: 29982 - protein, 9 aa, Homo sapiens
  Table A; Target 29982; HLA-C*12:03; HAVCR1; ENSG00000113249; TAA
TTVPTTTTV

SEQ ID NO: 29983 - protein, 9 aa, Homo sapiens
  Table A; Target 29983; HLA-C*16:02; HAVCR1; ENSG00000113249; TAA
TTVPTTTTV

SEQ ID NO: 29984 - protein, 9 aa, Homo sapiens
  Table A; Target 29984; HLA-A*02:01; HAVCR1; ENSG00000113249; TAA
TTVPTVTTV

SEQ ID NO: 29985 - protein, 9 aa, Homo sapiens
  Table A; Target 29985; HLA-A*02:03; HAVCR1; ENSG00000113249; TAA
TTVPTVTTV

SEQ ID NO: 29986 - protein, 9 aa, Homo sapiens
  Table A; Target 29986; HLA-A*02:04; HAVCR1; ENSG00000113249; TAA
TTVPTVTTV

SEQ ID NO: 29987 - protein, 9 aa, Homo sapiens
  Table A; Target 29987; HLA-A*02:07; HAVCR1; ENSG00000113249; TAA
TTVPTVTTV

SEQ ID NO: 29988 - protein, 9 aa, Homo sapiens
  Table A; Target 29988; HLA-A*25:01; HAVCR1; ENSG00000113249; TAA
TTVPTVTTV

SEQ ID NO: 29989 - protein, 9 aa, Homo sapiens
  Table A; Target 29989; HLA-A*26:01; HAVCR1; ENSG00000113249; TAA
TTVPTVTTV

SEQ ID NO: 29990 - protein, 9 aa, Homo sapiens
  Table A; Target 29990; HLA-A*32:01; HAVCR1; ENSG00000113249; TAA
TTVPTVTTV

SEQ ID NO: 29991 - protein, 9 aa, Homo sapiens
  Table A; Target 29991; HLA-A*68:02; HAVCR1; ENSG00000113249; TAA
TTVPTVTTV

SEQ ID NO: 29992 - protein, 9 aa, Homo sapiens
  Table A; Target 29992; HLA-B*13:02; HAVCR1; ENSG00000113249; TAA
TTVPTVTTV

SEQ ID NO: 29993 - protein, 9 aa, Homo sapiens
  Table A; Target 29993; HLA-B*46:01; HAVCR1; ENSG00000113249; TAA
TTVPTVTTV

SEQ ID NO: 29994 - protein, 9 aa, Homo sapiens
  Table A; Target 29994; HLA-B*49:01; HAVCR1; ENSG00000113249; TAA
TTVPTVTTV

SEQ ID NO: 29995 - protein, 9 aa, Homo sapiens
  Table A; Target 29995; HLA-B*51:01; HAVCR1; ENSG00000113249; TAA
TTVPTVTTV

SEQ ID NO: 29996 - protein, 9 aa, Homo sapiens
  Table A; Target 29996; HLA-B*55:01; HAVCR1; ENSG00000113249; TAA
TTVPTVTTV

SEQ ID NO: 29997 - protein, 9 aa, Homo sapiens
  Table A; Target 29997; HLA-B*58:01; HAVCR1; ENSG00000113249; TAA
TTVPTVTTV

SEQ ID NO: 29998 - protein, 9 aa, Homo sapiens
  Table A; Target 29998; HLA-C*02:02; HAVCR1; ENSG00000113249; TAA
TTVPTVTTV

SEQ ID NO: 29999 - protein, 9 aa, Homo sapiens
  Table A; Target 29999; HLA-C*03:04; HAVCR1; ENSG00000113249; TAA
TTVPTVTTV

SEQ ID NO: 30000 - protein, 9 aa, Homo sapiens
  Table A; Target 30000; HLA-C*07:06; HAVCR1; ENSG00000113249; TAA
TTVPTVTTV

SEQ ID NO: 30001 - protein, 9 aa, Homo sapiens
  Table A; Target 30001; HLA-C*12:03; HAVCR1; ENSG00000113249; TAA
TTVPTVTTV

SEQ ID NO: 30002 - protein, 9 aa, Homo sapiens
  Table A; Target 30002; HLA-C*16:02; HAVCR1; ENSG00000113249; TAA
TTVPTVTTV

SEQ ID NO: 30003 - protein, 10 aa, Homo sapiens
  Table A; Target 30003; HLA-A*11:01; HAVCR1; ENSG00000113249; TAA
TTVPTVTTVR

SEQ ID NO: 30004 - protein, 10 aa, Homo sapiens
  Table A; Target 30004; HLA-A*31:01; HAVCR1; ENSG00000113249; TAA
TTVPTVTTVR

SEQ ID NO: 30005 - protein, 10 aa, Homo sapiens
  Table A; Target 30005; HLA-A*33:03; HAVCR1; ENSG00000113249; TAA
TTVPTVTTVR

SEQ ID NO: 30006 - protein, 10 aa, Homo sapiens
  Table A; Target 30006; HLA-A*68:01; HAVCR1; ENSG00000113249; TAA
TTVPTVTTVR

SEQ ID NO: 30007 - protein, 10 aa, Homo sapiens
  Table A; Target 30007; HLA-C*07:06; HAVCR1; ENSG00000113249; TAA
TTVPTVTTVR

SEQ ID NO: 30008 - protein, 8 aa, Homo sapiens
  Table A; Target 30008; HLA-B*51:01; HAVCR1; ENSG00000113249; TAA
TVLTTMTV

SEQ ID NO: 30009 - protein, 8 aa, Homo sapiens
  Table A; Target 30009; HLA-B*51:01; HAVCR1; ENSG00000113249; TAA
TVPTTMSI

SEQ ID NO: 30010 - protein, 8 aa, Homo sapiens
  Table A; Target 30010; HLA-B*51:01; HAVCR1; ENSG00000113249; TAA
TVPTTTTV

SEQ ID NO: 30011 - protein, 8 aa, Homo sapiens
  Table A; Target 30011; HLA-C*01:02; HAVCR1; ENSG00000113249; TAA
TVPTTTTV

SEQ ID NO: 30012 - protein, 9 aa, Homo sapiens
  Table A; Target 30012; HLA-C*01:02; HAVCR1; ENSG00000113249; TAA
TVPTTTVPT

SEQ ID NO: 30013 - protein, 11 aa, Homo sapiens
  Table A; Target 30013; HLA-A*26:01; HAVCR1; ENSG00000113249; TAA
TVPTTTVPTTM

SEQ ID NO: 30014 - protein, 11 aa, Homo sapiens
  Table A; Target 30014; HLA-B*39:01; HAVCR1; ENSG00000113249; TAA
TVPTTTVPTTM

SEQ ID NO: 30015 - protein, 11 aa, Homo sapiens
  Table A; Target 30015; HLA-C*01:02; HAVCR1; ENSG00000113249; TAA
TVPTTTVPTTM

SEQ ID NO: 30016 - protein, 8 aa, Homo sapiens
  Table A; Target 30016; HLA-B*51:01; HAVCR1; ENSG00000113249; TAA
TVPTVTTV

SEQ ID NO: 30017 - protein, 8 aa, Homo sapiens
  Table A; Target 30017; HLA-C*01:02; HAVCR1; ENSG00000113249; TAA
TVPTVTTV

SEQ ID NO: 30018 - protein, 9 aa, Homo sapiens
  Table A; Target 30018; HLA-A*26:01; HAVCR1; ENSG00000113249; TAA
TVPTVTTVR

SEQ ID NO: 30019 - protein, 9 aa, Homo sapiens
  Table A; Target 30019; HLA-A*31:01; HAVCR1; ENSG00000113249; TAA
TVPTVTTVR

SEQ ID NO: 30020 - protein, 9 aa, Homo sapiens
  Table A; Target 30020; HLA-A*33:01; HAVCR1; ENSG00000113249; TAA
TVPTVTTVR

SEQ ID NO: 30021 - protein, 9 aa, Homo sapiens
  Table A; Target 30021; HLA-A*33:03; HAVCR1; ENSG00000113249; TAA
TVPTVTTVR

SEQ ID NO: 30022 - protein, 9 aa, Homo sapiens
  Table A; Target 30022; HLA-A*68:01; HAVCR1; ENSG00000113249; TAA
TVPTVTTVR

SEQ ID NO: 30023 - protein, 9 aa, Homo sapiens
  Table A; Target 30023; HLA-C*07:06; HAVCR1; ENSG00000113249; TAA
TVPTVTTVR

SEQ ID NO: 30024 - protein, 10 aa, Homo sapiens
  Table A; Target 30024; HLA-A*03:01; HAVCR1; ENSG00000113249; TAA
TVSLEIVPPK

SEQ ID NO: 30025 - protein, 10 aa, Homo sapiens
  Table A; Target 30025; HLA-A*03:02; HAVCR1; ENSG00000113249; TAA
TVSLEIVPPK

SEQ ID NO: 30026 - protein, 10 aa, Homo sapiens
  Table A; Target 30026; HLA-A*11:01; HAVCR1; ENSG00000113249; TAA
TVSLEIVPPK

SEQ ID NO: 30027 - protein, 10 aa, Homo sapiens
  Table A; Target 30027; HLA-A*68:01; HAVCR1; ENSG00000113249; TAA
TVSLEIVPPK

SEQ ID NO: 30028 - protein, 10 aa, Homo sapiens
  Table A; Target 30028; HLA-B*27:02; HAVCR1; ENSG00000113249; TAA
TVSLEIVPPK

SEQ ID NO: 30029 - protein, 10 aa, Homo sapiens
  Table A; Target 30029; HLA-C*07:06; HAVCR1; ENSG00000113249; TAA
TVSLEIVPPK

SEQ ID NO: 30030 - protein, 9 aa, Homo sapiens
  Table A; Target 30030; HLA-A*26:01; HAVCR1; ENSG00000113249; TAA
TVSTFVPPM

SEQ ID NO: 30031 - protein, 9 aa, Homo sapiens
  Table A; Target 30031; HLA-B*35:01; HAVCR1; ENSG00000113249; TAA
TVSTFVPPM

SEQ ID NO: 30032 - protein, 9 aa, Homo sapiens
  Table A; Target 30032; HLA-C*07:06; HAVCR1; ENSG00000113249; TAA
TVSTFVPPM

SEQ ID NO: 30033 - protein, 8 aa, Homo sapiens
  Table A; Target 30033; HLA-C*05:01; HAVCR1; ENSG00000113249; TAA
TVSTTTSV

SEQ ID NO: 30034 - protein, 9 aa, Homo sapiens
  Table A; Target 30034; HLA-B*39:01; HAVCR1; ENSG00000113249; TAA
TVTESSDGL

SEQ ID NO: 30035 - protein, 10 aa, Homo sapiens
  Table A; Target 30035; HLA-A*25:01; HAVCR1; ENSG00000113249; TAA
TVTESSDGLW

SEQ ID NO: 30036 - protein, 9 aa, Homo sapiens
  Table A; Target 30036; HLA-A*32:01; HAVCR1; ENSG00000113249; TAA
TVTTVRTST

SEQ ID NO: 30037 - protein, 9 aa, Homo sapiens
  Table A; Target 30037; HLA-C*16:01; HAVCR1; ENSG00000113249; TAA
TVTTVRTST

SEQ ID NO: 30038 - protein, 8 aa, Homo sapiens
  Table A; Target 30038; HLA-C*07:01; HAVCR1; ENSG00000113249; TAA
VAGSVKVG

SEQ ID NO: 30039 - protein, 8 aa, Homo sapiens
  Table A; Target 30039; HLA-C*12:03; HAVCR1; ENSG00000113249; TAA
VAGSVKVG

SEQ ID NO: 30040 - protein, 9 aa, Homo sapiens
  Table A; Target 30040; HLA-A*23:01; HAVCR1; ENSG00000113249; TAA
VCISVLVLL

SEQ ID NO: 30041 - protein, 11 aa, Homo sapiens
  Table A; Target 30041; HLA-A*30:01; HAVCR1; ENSG00000113249; TAA
VEKEVQAEDNI

SEQ ID NO: 30042 - protein, 11 aa, Homo sapiens
  Table A; Target 30042; HLA-B*49:01; HAVCR1; ENSG00000113249; TAA
VEKEVQAEDNI

SEQ ID NO: 30043 - protein, 9 aa, Homo sapiens
  Table A; Target 30043; HLA-A*02:01; HAVCR1; ENSG00000113249; TAA
VGGEAGPSV

SEQ ID NO: 30044 - protein, 9 aa, Homo sapiens
  Table A; Target 30044; HLA-B*46:01; HAVCR1; ENSG00000113249; TAA
VGGEAGPSV

SEQ ID NO: 30045 - protein, 9 aa, Homo sapiens
  Table A; Target 30045; HLA-B*51:01; HAVCR1; ENSG00000113249; TAA
VGGEAGPSV

SEQ ID NO: 30046 - protein, 9 aa, Homo sapiens
  Table A; Target 30046; HLA-C*01:02; HAVCR1; ENSG00000113249; TAA
VGGEAGPSV

SEQ ID NO: 30047 - protein, 9 aa, Homo sapiens
  Table A; Target 30047; HLA-C*03:03; HAVCR1; ENSG00000113249; TAA
VGGEAGPSV

SEQ ID NO: 30048 - protein, 9 aa, Homo sapiens
  Table A; Target 30048; HLA-C*03:04; HAVCR1; ENSG00000113249; TAA
VGGEAGPSV

SEQ ID NO: 30049 - protein, 9 aa, Homo sapiens
  Table A; Target 30049; HLA-C*05:01; HAVCR1; ENSG00000113249; TAA
VGGEAGPSV

SEQ ID NO: 30050 - protein, 9 aa, Homo sapiens
  Table A; Target 30050; HLA-A*24:02; HAVCR1; ENSG00000113249; TAA
VIIAKKYFF

SEQ ID NO: 30051 - protein, 9 aa, Homo sapiens
  Table A; Target 30051; HLA-A*02:01; HAVCR1; ENSG00000113249; TAA
VILSLILHL

SEQ ID NO: 30052 - protein, 9 aa, Homo sapiens
  Table A; Target 30052; HLA-A*02:04; HAVCR1; ENSG00000113249; TAA
VILSLILHL

SEQ ID NO: 30053 - protein, 9 aa, Homo sapiens
  Table A; Target 30053; HLA-A*02:07; HAVCR1; ENSG00000113249; TAA
VILSLILHL

SEQ ID NO: 30054 - protein, 9 aa, Homo sapiens
  Table A; Target 30054; HLA-A*23:01; HAVCR1; ENSG00000113249; TAA
VILSLILHL

SEQ ID NO: 30055 - protein, 11 aa, Homo sapiens
  Table A; Target 30055; HLA-B*15:03; HAVCR1; ENSG00000113249; TAA
VKVGGEAGPSV

SEQ ID NO: 30056 - protein, 9 aa, Homo sapiens
  Table A; Target 30056; HLA-A*02:01; HAVCR1; ENSG00000113249; TAA
VLTTMTVST

SEQ ID NO: 30057 - protein, 9 aa, Homo sapiens
  Table A; Target 30057; HLA-A*32:01; HAVCR1; ENSG00000113249; TAA
VLTTMTVST

SEQ ID NO: 30058 - protein, 9 aa, Homo sapiens
  Table A; Target 30058; HLA-C*16:02; HAVCR1; ENSG00000113249; TAA
VLTTMTVST

SEQ ID NO: 30059 - protein, 8 aa, Homo sapiens
  Table A; Target 30059; HLA-B*51:01; HAVCR1; ENSG00000113249; TAA
VPPKVTTT

SEQ ID NO: 30060 - protein, 9 aa, Homo sapiens
  Table A; Target 30060; HLA-B*51:01; HAVCR1; ENSG00000113249; TAA
VPPKVTTTP

SEQ ID NO: 30061 - protein, 10 aa, Homo sapiens
  Table A; Target 30061; HLA-B*07:02; HAVCR1; ENSG00000113249; TAA
VPPKVTTTPI

SEQ ID NO: 30062 - protein, 10 aa, Homo sapiens
  Table A; Target 30062; HLA-B*51:01; HAVCR1; ENSG00000113249; TAA
VPPKVTTTPI

SEQ ID NO: 30063 - protein, 9 aa, Homo sapiens
  Table A; Target 30063; HLA-B*56:01; HAVCR1; ENSG00000113249; TAA
VPTTMSIPT

SEQ ID NO: 30064 - protein, 9 aa, Homo sapiens
  Table A; Target 30064; HLA-B*35:03; HAVCR1; ENSG00000113249; TAA
VPTTTSIPT

SEQ ID NO: 30065 - protein, 9 aa, Homo sapiens
  Table A; Target 30065; HLA-B*55:01; HAVCR1; ENSG00000113249; TAA
VPTTTSIPT

SEQ ID NO: 30066 - protein, 9 aa, Homo sapiens
  Table A; Target 30066; HLA-B*56:01; HAVCR1; ENSG00000113249; TAA
VPTTTSIPT

SEQ ID NO: 30067 - protein, 10 aa, Homo sapiens
  Table A; Target 30067; HLA-B*56:01; HAVCR1; ENSG00000113249; TAA
VPTTTSIPTT

SEQ ID NO: 30068 - protein, 8 aa, Homo sapiens
  Table A; Target 30068; HLA-B*56:01; HAVCR1; ENSG00000113249; TAA
VPTTTTVP

SEQ ID NO: 30069 - protein, 9 aa, Homo sapiens
  Table A; Target 30069; HLA-B*55:01; HAVCR1; ENSG00000113249; TAA
VPTTTTVPT

SEQ ID NO: 30070 - protein, 9 aa, Homo sapiens
  Table A; Target 30070; HLA-B*56:01; HAVCR1; ENSG00000113249; TAA
VPTTTTVPT

SEQ ID NO: 30071 - protein, 9 aa, Homo sapiens
  Table A; Target 30071; HLA-B*35:03; HAVCR1; ENSG00000113249; TAA
VPTTTVPTT

SEQ ID NO: 30072 - protein, 9 aa, Homo sapiens
  Table A; Target 30072; HLA-B*51:01; HAVCR1; ENSG00000113249; TAA
VPTTTVPTT

SEQ ID NO: 30073 - protein, 9 aa, Homo sapiens
  Table A; Target 30073; HLA-B*54:01; HAVCR1; ENSG00000113249; TAA
VPTTTVPTT

SEQ ID NO: 30074 - protein, 9 aa, Homo sapiens
  Table A; Target 30074; HLA-B*55:01; HAVCR1; ENSG00000113249; TAA
VPTTTVPTT

SEQ ID NO: 30075 - protein, 9 aa, Homo sapiens
  Table A; Target 30075; HLA-B*56:01; HAVCR1; ENSG00000113249; TAA
VPTTTVPTT

SEQ ID NO: 30076 - protein, 9 aa, Homo sapiens
  Table A; Target 30076; HLA-C*16:02; HAVCR1; ENSG00000113249; TAA
VPTTTVPTT

SEQ ID NO: 30077 - protein, 10 aa, Homo sapiens
  Table A; Target 30077; HLA-B*07:02; HAVCR1; ENSG00000113249; TAA
VPTTTVPTTM

SEQ ID NO: 30078 - protein, 10 aa, Homo sapiens
  Table A; Target 30078; HLA-B*35:01; HAVCR1; ENSG00000113249; TAA
VPTTTVPTTM

SEQ ID NO: 30079 - protein, 10 aa, Homo sapiens
  Table A; Target 30079; HLA-B*35:03; HAVCR1; ENSG00000113249; TAA
VPTTTVPTTM

SEQ ID NO: 30080 - protein, 10 aa, Homo sapiens
  Table A; Target 30080; HLA-B*51:01; HAVCR1; ENSG00000113249; TAA
VPTTTVPTTM

SEQ ID NO: 30081 - protein, 10 aa, Homo sapiens
  Table A; Target 30081; HLA-B*55:01; HAVCR1; ENSG00000113249; TAA
VPTTTVPTTM

SEQ ID NO: 30082 - protein, 10 aa, Homo sapiens
  Table A; Target 30082; HLA-B*56:01; HAVCR1; ENSG00000113249; TAA
VPTTTVPTTM

SEQ ID NO: 30083 - protein, 10 aa, Homo sapiens
  Table A; Target 30083; HLA-C*07:02; HAVCR1; ENSG00000113249; TAA
VPTTTVPTTM

SEQ ID NO: 30084 - protein, 10 aa, Homo sapiens
  Table A; Target 30084; HLA-C*14:02; HAVCR1; ENSG00000113249; TAA
VPTTTVPTTM

SEQ ID NO: 30085 - protein, 8 aa, Homo sapiens
  Table A; Target 30085; HLA-B*56:01; HAVCR1; ENSG00000113249; TAA
VPTVTTVR

SEQ ID NO: 30086 - protein, 8 aa, Homo sapiens
  Table A; Target 30086; HLA-C*07:06; HAVCR1; ENSG00000113249; TAA
VPTVTTVR

SEQ ID NO: 30087 - protein, 9 aa, Homo sapiens
  Table A; Target 30087; HLA-B*55:01; HAVCR1; ENSG00000113249; TAA
VPTVTTVRT

SEQ ID NO: 30088 - protein, 9 aa, Homo sapiens
  Table A; Target 30088; HLA-B*56:01; HAVCR1; ENSG00000113249; TAA
VPTVTTVRT

SEQ ID NO: 30089 - protein, 9 aa, Homo sapiens
  Table A; Target 30089; HLA-B*35:01; HAVCR1; ENSG00000113249; TAA
VPVTTTVST

SEQ ID NO: 30090 - protein, 9 aa, Homo sapiens
  Table A; Target 30090; HLA-B*35:03; HAVCR1; ENSG00000113249; TAA
VPVTTTVST

SEQ ID NO: 30091 - protein, 9 aa, Homo sapiens
  Table A; Target 30091; HLA-B*54:01; HAVCR1; ENSG00000113249; TAA
VPVTTTVST

SEQ ID NO: 30092 - protein, 9 aa, Homo sapiens
  Table A; Target 30092; HLA-B*55:01; HAVCR1; ENSG00000113249; TAA
VPVTTTVST

SEQ ID NO: 30093 - protein, 9 aa, Homo sapiens
  Table A; Target 30093; HLA-B*56:01; HAVCR1; ENSG00000113249; TAA
VPVTTTVST

SEQ ID NO: 30094 - protein, 10 aa, Homo sapiens
  Table A; Target 30094; HLA-A*23:01; HAVCR1; ENSG00000113249; TAA
VPVTTTVSTF

SEQ ID NO: 30095 - protein, 10 aa, Homo sapiens
  Table A; Target 30095; HLA-B*07:02; HAVCR1; ENSG00000113249; TAA
VPVTTTVSTF

SEQ ID NO: 30096 - protein, 10 aa, Homo sapiens
  Table A; Target 30096; HLA-B*35:01; HAVCR1; ENSG00000113249; TAA
VPVTTTVSTF

SEQ ID NO: 30097 - protein, 9 aa, Homo sapiens
  Table A; Target 30097; HLA-A*30:01; HAVCR1; ENSG00000113249; TAA
VQAEDNIYI

SEQ ID NO: 30098 - protein, 9 aa, Homo sapiens
  Table A; Target 30098; HLA-B*13:02; HAVCR1; ENSG00000113249; TAA
VQAEDNIYI

SEQ ID NO: 30099 - protein, 9 aa, Homo sapiens
  Table A; Target 30099; HLA-B*27:05; HAVCR1; ENSG00000113249; TAA
VQAEDNIYI

SEQ ID NO: 30100 - protein, 9 aa, Homo sapiens
  Table A; Target 30100; HLA-B*38:01; HAVCR1; ENSG00000113249; TAA
VQAEDNIYI

SEQ ID NO: 30101 - protein, 9 aa, Homo sapiens
  Table A; Target 30101; HLA-B*39:01; HAVCR1; ENSG00000113249; TAA
VQAEDNIYI

SEQ ID NO: 30102 - protein, 9 aa, Homo sapiens
  Table A; Target 30102; HLA-C*06:02; HAVCR1; ENSG00000113249; TAA
VQAEDNIYI

SEQ ID NO: 30103 - protein, 8 aa, Homo sapiens
  Table A; Target 30103; HLA-B*15:01; HAVCR1; ENSG00000113249; TAA
VQQLSVSF

SEQ ID NO: 30104 - protein, 8 aa, Homo sapiens
  Table A; Target 30104; HLA-B*15:03; HAVCR1; ENSG00000113249; TAA
VQQLSVSF

SEQ ID NO: 30105 - protein, 8 aa, Homo sapiens
  Table A; Target 30105; HLA-B*37:01; HAVCR1; ENSG00000113249; TAA
VQQLSVSF

SEQ ID NO: 30106 - protein, 8 aa, Homo sapiens
  Table A; Target 30106; HLA-C*07:04; HAVCR1; ENSG00000113249; TAA
VQQLSVSF

SEQ ID NO: 30107 - protein, 8 aa, Homo sapiens
  Table A; Target 30107; HLA-C*14:02; HAVCR1; ENSG00000113249; TAA
VQQLSVSF

SEQ ID NO: 30108 - protein, 8 aa, Homo sapiens
  Table A; Target 30108; HLA-C*05:01; HAVCR1; ENSG00000113249; TAA
VSDSGVYC

SEQ ID NO: 30109 - protein, 9 aa, Homo sapiens
  Table A; Target 30109; HLA-C*05:01; HAVCR1; ENSG00000113249; TAA
VSDSGVYCC

SEQ ID NO: 30110 - protein, 8 aa, Homo sapiens
  Table A; Target 30110; HLA-B*13:02; HAVCR1; ENSG00000113249; TAA
VSFSSLQI

SEQ ID NO: 30111 - protein, 8 aa, Homo sapiens
  Table A; Target 30111; HLA-B*51:01; HAVCR1; ENSG00000113249; TAA
VSFSSLQI

SEQ ID NO: 30112 - protein, 9 aa, Homo sapiens
  Table A; Target 30112; HLA-A*03:01; HAVCR1; ENSG00000113249; TAA
VSFSSLQIK

SEQ ID NO: 30113 - protein, 9 aa, Homo sapiens
  Table A; Target 30113; HLA-A*03:02; HAVCR1; ENSG00000113249; TAA
VSFSSLQIK

SEQ ID NO: 30114 - protein, 9 aa, Homo sapiens
  Table A; Target 30114; HLA-A*11:01; HAVCR1; ENSG00000113249; TAA
VSFSSLQIK

SEQ ID NO: 30115 - protein, 9 aa, Homo sapiens
  Table A; Target 30115; HLA-B*27:05; HAVCR1; ENSG00000113249; TAA
VSFSSLQIK

SEQ ID NO: 30116 - protein, 9 aa, Homo sapiens
  Table A; Target 30116; HLA-B*57:01; HAVCR1; ENSG00000113249; TAA
VSFSSLQIK

SEQ ID NO: 30117 - protein, 9 aa, Homo sapiens
  Table A; Target 30117; HLA-C*07:06; HAVCR1; ENSG00000113249; TAA
VSFSSLQIK

SEQ ID NO: 30118 - protein, 9 aa, Homo sapiens
  Table A; Target 30118; HLA-A*03:01; HAVCR1; ENSG00000113249; TAA
VSLEIVPPK

SEQ ID NO: 30119 - protein, 9 aa, Homo sapiens
  Table A; Target 30119; HLA-A*03:02; HAVCR1; ENSG00000113249; TAA
VSLEIVPPK

SEQ ID NO: 30120 - protein, 9 aa, Homo sapiens
  Table A; Target 30120; HLA-A*11:01; HAVCR1; ENSG00000113249; TAA
VSLEIVPPK

SEQ ID NO: 30121 - protein, 9 aa, Homo sapiens
  Table A; Target 30121; HLA-B*27:02; HAVCR1; ENSG00000113249; TAA
VSLEIVPPK

SEQ ID NO: 30122 - protein, 9 aa, Homo sapiens
  Table A; Target 30122; HLA-C*07:06; HAVCR1; ENSG00000113249; TAA
VSLEIVPPK

SEQ ID NO: 30123 - protein, 8 aa, Homo sapiens
  Table A; Target 30123; HLA-C*05:01; HAVCR1; ENSG00000113249; TAA
VTESSDGL

SEQ ID NO: 30124 - protein, 9 aa, Homo sapiens
  Table A; Target 30124; HLA-C*16:02; HAVCR1; ENSG00000113249; TAA
VTTTPIVTT

SEQ ID NO: 30125 - protein, 8 aa, Homo sapiens
  Table A; Target 30125; HLA-A*23:01; HAVCR1; ENSG00000113249; TAA
VTTTVSTF

SEQ ID NO: 30126 - protein, 8 aa, Homo sapiens
  Table A; Target 30126; HLA-A*32:01; HAVCR1; ENSG00000113249; TAA
VTTTVSTF

SEQ ID NO: 30127 - protein, 9 aa, Homo sapiens
  Table A; Target 30127; HLA-A*68:02; HAVCR1; ENSG00000113249; TAA
VTTTVSTFV

SEQ ID NO: 30128 - protein, 9 aa, Homo sapiens
  Table A; Target 30128; HLA-B*13:02; HAVCR1; ENSG00000113249; TAA
VTTTVSTFV

SEQ ID NO: 30129 - protein, 11 aa, Homo sapiens
  Table A; Target 30129; HLA-C*07:06; HAVCR1; ENSG00000113249; TAA
VTTVPTVTTVR

SEQ ID NO: 30130 - protein, 9 aa, Homo sapiens
  Table A; Target 30130; HLA-A*01:01; HAVCR1; ENSG00000113249; TAA
VTYRKDTRY

SEQ ID NO: 30131 - protein, 10 aa, Homo sapiens
  Table A; Target 30131; HLA-A*23:01; HAVCR1; ENSG00000113249; TAA
VWTNGTHVTY

SEQ ID NO: 30132 - protein, 10 aa, Homo sapiens
  Table A; Target 30132; HLA-A*24:02; HAVCR1; ENSG00000113249; TAA
VWTNGTHVTY

SEQ ID NO: 30133 - protein, 10 aa, Homo sapiens
  Table A; Target 30133; HLA-A*29:02; HAVCR1; ENSG00000113249; TAA
VWTNGTHVTY

SEQ ID NO: 30134 - protein, 9 aa, Homo sapiens
  Table A; Target 30134; HLA-A*01:01; HAVCR1; ENSG00000113249; TAA
WTNGTHVTY

SEQ ID NO: 30135 - protein, 9 aa, Homo sapiens
  Table A; Target 30135; HLA-A*25:01; HAVCR1; ENSG00000113249; TAA
WTNGTHVTY

SEQ ID NO: 30136 - protein, 9 aa, Homo sapiens
  Table A; Target 30136; HLA-A*26:01; HAVCR1; ENSG00000113249; TAA
WTNGTHVTY

SEQ ID NO: 30137 - protein, 9 aa, Homo sapiens
  Table A; Target 30137; HLA-A*29:02; HAVCR1; ENSG00000113249; TAA
WTNGTHVTY

SEQ ID NO: 30138 - protein, 9 aa, Homo sapiens
  Table A; Target 30138; HLA-A*30:02; HAVCR1; ENSG00000113249; TAA
WTNGTHVTY

SEQ ID NO: 30139 - protein, 9 aa, Homo sapiens
  Table A; Target 30139; HLA-A*32:01; HAVCR1; ENSG00000113249; TAA
WTNGTHVTY

SEQ ID NO: 30140 - protein, 9 aa, Homo sapiens
  Table A; Target 30140; HLA-A*68:01; HAVCR1; ENSG00000113249; TAA
WTNGTHVTY

SEQ ID NO: 30141 - protein, 9 aa, Homo sapiens
  Table A; Target 30141; HLA-B*15:01; HAVCR1; ENSG00000113249; TAA
WTNGTHVTY

SEQ ID NO: 30142 - protein, 9 aa, Homo sapiens
  Table A; Target 30142; HLA-B*15:03; HAVCR1; ENSG00000113249; TAA
WTNGTHVTY

SEQ ID NO: 30143 - protein, 9 aa, Homo sapiens
  Table A; Target 30143; HLA-B*35:01; HAVCR1; ENSG00000113249; TAA
WTNGTHVTY

SEQ ID NO: 30144 - protein, 9 aa, Homo sapiens
  Table A; Target 30144; HLA-B*46:01; HAVCR1; ENSG00000113249; TAA
WTNGTHVTY

SEQ ID NO: 30145 - protein, 9 aa, Homo sapiens
  Table A; Target 30145; HLA-B*57:01; HAVCR1; ENSG00000113249; TAA
WTNGTHVTY

SEQ ID NO: 30146 - protein, 9 aa, Homo sapiens
  Table A; Target 30146; HLA-B*58:01; HAVCR1; ENSG00000113249; TAA
WTNGTHVTY

SEQ ID NO: 30147 - protein, 9 aa, Homo sapiens
  Table A; Target 30147; HLA-C*02:02; HAVCR1; ENSG00000113249; TAA
WTNGTHVTY

SEQ ID NO: 30148 - protein, 9 aa, Homo sapiens
  Table A; Target 30148; HLA-C*07:04; HAVCR1; ENSG00000113249; TAA
WTNGTHVTY

SEQ ID NO: 30149 - protein, 9 aa, Homo sapiens
  Table A; Target 30149; HLA-C*12:03; HAVCR1; ENSG00000113249; TAA
WTNGTHVTY

SEQ ID NO: 30150 - protein, 9 aa, Homo sapiens
  Table A; Target 30150; HLA-C*14:02; HAVCR1; ENSG00000113249; TAA
WTNGTHVTY

SEQ ID NO: 30151 - protein, 9 aa, Homo sapiens
  Table A; Target 30151; HLA-C*16:01; HAVCR1; ENSG00000113249; TAA
WTNGTHVTY

SEQ ID NO: 30152 - protein, 9 aa, Homo sapiens
  Table A; Target 30152; HLA-C*16:02; HAVCR1; ENSG00000113249; TAA
WTNGTHVTY

SEQ ID NO: 30153 - protein, 9 aa, Homo sapiens
  Table A; Target 30153; HLA-C*16:04; HAVCR1; ENSG00000113249; TAA
WTNGTHVTY

SEQ ID NO: 30154 - protein, 10 aa, Homo sapiens
  Table A; Target 30154; HLA-A*31:01; HAVCR1; ENSG00000113249; TAA
WTNGTHVTYR

SEQ ID NO: 30155 - protein, 10 aa, Homo sapiens
  Table A; Target 30155; HLA-A*33:01; HAVCR1; ENSG00000113249; TAA
WTNGTHVTYR

SEQ ID NO: 30156 - protein, 10 aa, Homo sapiens
  Table A; Target 30156; HLA-A*33:03; HAVCR1; ENSG00000113249; TAA
WTNGTHVTYR

SEQ ID NO: 30157 - protein, 10 aa, Homo sapiens
  Table A; Target 30157; HLA-A*68:01; HAVCR1; ENSG00000113249; TAA
WTNGTHVTYR

SEQ ID NO: 30158 - protein, 8 aa, Homo sapiens
  Table A; Target 30158; HLA-B*08:01; HAVCR1; ENSG00000113249; TAA
YAGVCISV

SEQ ID NO: 30159 - protein, 8 aa, Homo sapiens
  Table A; Target 30159; HLA-B*51:01; HAVCR1; ENSG00000113249; TAA
YAGVCISV

SEQ ID NO: 30160 - protein, 8 aa, Homo sapiens
  Table A; Target 30160; HLA-C*12:03; HAVCR1; ENSG00000113249; TAA
YAGVCISV

SEQ ID NO: 30161 - protein, 9 aa, Homo sapiens
  Table A; Target 30161; HLA-C*03:03; HAVCR1; ENSG00000113249; TAA
YAGVCISVL

SEQ ID NO: 30162 - protein, 9 aa, Homo sapiens
  Table A; Target 30162; HLA-C*03:04; HAVCR1; ENSG00000113249; TAA
YAGVCISVL

SEQ ID NO: 30163 - protein, 9 aa, Homo sapiens
  Table A; Target 30163; HLA-C*12:03; HAVCR1; ENSG00000113249; TAA
YAGVCISVL

SEQ ID NO: 30164 - protein, 8 aa, Homo sapiens
  Table A; Target 30164; HLA-A*30:01; HAVCR1; ENSG00000113249; TAA
YSGAVTSM

SEQ ID NO: 30165 - protein, 8 aa, Homo sapiens
  Table A; Target 30165; HLA-A*32:01; HAVCR1; ENSG00000113249; TAA
YSGAVTSM

SEQ ID NO: 30166 - protein, 8 aa, Homo sapiens
  Table A; Target 30166; HLA-B*08:01; HAVCR1; ENSG00000113249; TAA
YSGAVTSM

SEQ ID NO: 30167 - protein, 8 aa, Homo sapiens
  Table A; Target 30167; HLA-B*15:01; HAVCR1; ENSG00000113249; TAA
YSGAVTSM

SEQ ID NO: 30168 - protein, 8 aa, Homo sapiens
  Table A; Target 30168; HLA-B*15:03; HAVCR1; ENSG00000113249; TAA
YSGAVTSM

SEQ ID NO: 30169 - protein, 8 aa, Homo sapiens
  Table A; Target 30169; HLA-B*18:01; HAVCR1; ENSG00000113249; TAA
YSGAVTSM

SEQ ID NO: 30170 - protein, 8 aa, Homo sapiens
  Table A; Target 30170; HLA-B*35:01; HAVCR1; ENSG00000113249; TAA
YSGAVTSM

SEQ ID NO: 30171 - protein, 8 aa, Homo sapiens
  Table A; Target 30171; HLA-B*35:03; HAVCR1; ENSG00000113249; TAA
YSGAVTSM

SEQ ID NO: 30172 - protein, 8 aa, Homo sapiens
  Table A; Target 30172; HLA-B*37:01; HAVCR1; ENSG00000113249; TAA
YSGAVTSM

SEQ ID NO: 30173 - protein, 8 aa, Homo sapiens
  Table A; Target 30173; HLA-B*39:01; HAVCR1; ENSG00000113249; TAA
YSGAVTSM

SEQ ID NO: 30174 - protein, 8 aa, Homo sapiens
  Table A; Target 30174; HLA-B*40:02; HAVCR1; ENSG00000113249; TAA
YSGAVTSM

SEQ ID NO: 30175 - protein, 8 aa, Homo sapiens
  Table A; Target 30175; HLA-B*46:01; HAVCR1; ENSG00000113249; TAA
YSGAVTSM

SEQ ID NO: 30176 - protein, 8 aa, Homo sapiens
  Table A; Target 30176; HLA-B*58:01; HAVCR1; ENSG00000113249; TAA
YSGAVTSM

SEQ ID NO: 30177 - protein, 8 aa, Homo sapiens
  Table A; Target 30177; HLA-C*01:02; HAVCR1; ENSG00000113249; TAA
YSGAVTSM

SEQ ID NO: 30178 - protein, 8 aa, Homo sapiens
  Table A; Target 30178; HLA-C*02:02; HAVCR1; ENSG00000113249; TAA
YSGAVTSM

SEQ ID NO: 30179 - protein, 8 aa, Homo sapiens
  Table A; Target 30179; HLA-C*03:03; HAVCR1; ENSG00000113249; TAA
YSGAVTSM

SEQ ID NO: 30180 - protein, 8 aa, Homo sapiens
  Table A; Target 30180; HLA-C*03:04; HAVCR1; ENSG00000113249; TAA
YSGAVTSM

SEQ ID NO: 30181 - protein, 8 aa, Homo sapiens
  Table A; Target 30181; HLA-C*05:01; HAVCR1; ENSG00000113249; TAA
YSGAVTSM

SEQ ID NO: 30182 - protein, 8 aa, Homo sapiens
  Table A; Target 30182; HLA-C*07:04; HAVCR1; ENSG00000113249; TAA
YSGAVTSM

SEQ ID NO: 30183 - protein, 8 aa, Homo sapiens
  Table A; Target 30183; HLA-C*12:03; HAVCR1; ENSG00000113249; TAA
YSGAVTSM

SEQ ID NO: 30184 - protein, 8 aa, Homo sapiens
  Table A; Target 30184; HLA-C*14:02; HAVCR1; ENSG00000113249; TAA
YSGAVTSM

SEQ ID NO: 30185 - protein, 8 aa, Homo sapiens
  Table A; Target 30185; HLA-C*16:01; HAVCR1; ENSG00000113249; TAA
YSGAVTSM

SEQ ID NO: 30186 - protein, 8 aa, Homo sapiens
  Table A; Target 30186; HLA-C*16:02; HAVCR1; ENSG00000113249; TAA
YSGAVTSM

SEQ ID NO: 30187 - protein, 8 aa, Homo sapiens
  Table A; Target 30187; HLA-C*16:04; HAVCR1; ENSG00000113249; TAA
YSGAVTSM

SEQ ID NO: 30188 - protein, 9 aa, Homo sapiens
  Table A; Target 30188; HLA-A*02:01; HAVCR1; ENSG00000113249; TAA
YTTDGNDTV

SEQ ID NO: 30189 - protein, 9 aa, Homo sapiens
  Table A; Target 30189; HLA-A*68:02; HAVCR1; ENSG00000113249; TAA
YTTDGNDTV

SEQ ID NO: 30190 - protein, 9 aa, Homo sapiens
  Table A; Target 30190; HLA-B*27:05; HAVCR1; ENSG00000113249; TAA
YTTDGNDTV

SEQ ID NO: 30191 - protein, 9 aa, Homo sapiens
  Table A; Target 30191; HLA-B*39:01; HAVCR1; ENSG00000113249; TAA
YTTDGNDTV

SEQ ID NO: 30192 - protein, 9 aa, Homo sapiens
  Table A; Target 30192; HLA-C*03:04; HAVCR1; ENSG00000113249; TAA
YTTDGNDTV

SEQ ID NO: 30193 - protein, 8 aa, Homo sapiens
  Table A; Target 30193; HLA-B*40:02; IFNK; ENSG00000147896; CTA
AEYLNQCL

SEQ ID NO: 30194 - protein, 11 aa, Homo sapiens
  Table A; Target 30194; HLA-A*29:02; IFNK; ENSG00000147896; CTA
AFELPQEFLQY

SEQ ID NO: 30195 - protein, 10 aa, Homo sapiens
  Table A; Target 30195; HLA-A*23:01; IFNK; ENSG00000147896; CTA
AFNIFSQHTF

SEQ ID NO: 30196 - protein, 10 aa, Homo sapiens
  Table A; Target 30196; HLA-A*24:02; IFNK; ENSG00000147896; CTA
AFNIFSQHTF

SEQ ID NO: 30197 - protein, 10 aa, Homo sapiens
  Table A; Target 30197; HLA-A*30:02; IFNK; ENSG00000147896; CTA
AFNIFSQHTF

SEQ ID NO: 30198 - protein, 10 aa, Homo sapiens
  Table A; Target 30198; HLA-A*32:01; IFNK; ENSG00000147896; CTA
AFNIFSQHTF

SEQ ID NO: 30199 - protein, 10 aa, Homo sapiens
  Table A; Target 30199; HLA-A*23:01; IFNK; ENSG00000147896; CTA
AFYEMSLQAF

SEQ ID NO: 30200 - protein, 9 aa, Homo sapiens
  Table A; Target 30200; HLA-B*27:05; IFNK; ENSG00000147896; CTA
ARVPQLSSL

SEQ ID NO: 30201 - protein, 9 aa, Homo sapiens
  Table A; Target 30201; HLA-C*02:02; IFNK; ENSG00000147896; CTA
ARVPQLSSL

SEQ ID NO: 30202 - protein, 9 aa, Homo sapiens
  Table A; Target 30202; HLA-C*16:04; IFNK; ENSG00000147896; CTA
ARVPQLSSL

SEQ ID NO: 30203 - protein, 8 aa, Homo sapiens
  Table A; Target 30203; HLA-B*51:01; IFNK; ENSG00000147896; CTA
CAWEIVRV

SEQ ID NO: 30204 - protein, 9 aa, Homo sapiens
  Table A; Target 30204; HLA-A*33:01; IFNK; ENSG00000147896; CTA
CNLLNVHLR

SEQ ID NO: 30205 - protein, 9 aa, Homo sapiens
  Table A; Target 30205; HLA-A*33:01; IFNK; ENSG00000147896; CTA
DCNLLNVHL

SEQ ID NO: 30206 - protein, 10 aa, Homo sapiens
  Table A; Target 30206; HLA-A*33:01; IFNK; ENSG00000147896; CTA
DCNLLNVHLR

SEQ ID NO: 30207 - protein, 11 aa, Homo sapiens
  Table A; Target 30207; HLA-A*33:01; IFNK; ENSG00000147896; CTA
DCNLLNVHLRR

SEQ ID NO: 30208 - protein, 9 aa, Homo sapiens
  Table A; Target 30208; HLA-A*33:01; IFNK; ENSG00000147896; CTA
DIKKAFYEM

SEQ ID NO: 30209 - protein, 9 aa, Homo sapiens
  Table A; Target 30209; HLA-B*08:01; IFNK; ENSG00000147896; CTA
DIKKAFYEM

SEQ ID NO: 30210 - protein, 10 aa, Homo sapiens
  Table A; Target 30210; HLA-B*08:01; IFNK; ENSG00000147896; CTA
DMKEMKENEM

SEQ ID NO: 30211 - protein, 10 aa, Homo sapiens
  Table A; Target 30211; HLA-A*25:01; IFNK; ENSG00000147896; CTA
EARVPQLSSL

SEQ ID NO: 30212 - protein, 9 aa, Homo sapiens
  Table A; Target 30212; HLA-C*14:02; IFNK; ENSG00000147896; CTA
EFLQYTQPM

SEQ ID NO: 30213 - protein, 11 aa, Homo sapiens
  Table A; Target 30213; HLA-A*33:01; IFNK; ENSG00000147896; CTA
EFLQYTQPMKR

SEQ ID NO: 30214 - protein, 9 aa, Homo sapiens
  Table A; Target 30214; HLA-A*01:01; IFNK; ENSG00000147896; CTA
ELPQEFLQY

SEQ ID NO: 30215 - protein, 9 aa, Homo sapiens
  Table A; Target 30215; HLA-A*25:01; IFNK; ENSG00000147896; CTA
ELPQEFLQY

SEQ ID NO: 30216 - protein, 9 aa, Homo sapiens
  Table A; Target 30216; HLA-A*26:01; IFNK; ENSG00000147896; CTA
ELPQEFLQY

SEQ ID NO: 30217 - protein, 9 aa, Homo sapiens
  Table A; Target 30217; HLA-A*29:02; IFNK; ENSG00000147896; CTA
ELPQEFLQY

SEQ ID NO: 30218 - protein, 8 aa, Homo sapiens
  Table A; Target 30218; HLA-A*33:03; IFNK; ENSG00000147896; CTA
EMKPSEAR

SEQ ID NO: 30219 - protein, 8 aa, Homo sapiens
  Table A; Target 30219; HLA-B*49:01; IFNK; ENSG00000147896; CTA
FELPQEFL

SEQ ID NO: 30220 - protein, 10 aa, Homo sapiens
  Table A; Target 30220; HLA-A*29:02; IFNK; ENSG00000147896; CTA
FELPQEFLQY

SEQ ID NO: 30221 - protein, 10 aa, Homo sapiens
  Table A; Target 30221; HLA-B*18:01; IFNK; ENSG00000147896; CTA
FELPQEFLQY

SEQ ID NO: 30222 - protein, 10 aa, Homo sapiens
  Table A; Target 30222; HLA-B*44:02; IFNK; ENSG00000147896; CTA
FELPQEFLQY

SEQ ID NO: 30223 - protein, 10 aa, Homo sapiens
  Table A; Target 30223; HLA-B*44:03; IFNK; ENSG00000147896; CTA
FELPQEFLQY

SEQ ID NO: 30224 - protein, 8 aa, Homo sapiens
  Table A; Target 30224; HLA-C*03:04; IFNK; ENSG00000147896; CTA
FIAGTLSL

SEQ ID NO: 30225 - protein, 9 aa, Homo sapiens
  Table A; Target 30225; HLA-A*03:02; IFNK; ENSG00000147896; CTA
FLQYTQPMK

SEQ ID NO: 30226 - protein, 11 aa, Homo sapiens
  Table A; Target 30226; HLA-A*29:02; IFNK; ENSG00000147896; CTA
FNIFSQHTFKY

SEQ ID NO: 30227 - protein, 9 aa, Homo sapiens
  Table A; Target 30227; HLA-B*57:01; IFNK; ENSG00000147896; CTA
FSQHTFKYW

SEQ ID NO: 30228 - protein, 9 aa, Homo sapiens
  Table A; Target 30228; HLA-A*23:01; IFNK; ENSG00000147896; CTA
FYEMSLQAF

SEQ ID NO: 30229 - protein, 9 aa, Homo sapiens
  Table A; Target 30229; HLA-A*24:02; IFNK; ENSG00000147896; CTA
FYEMSLQAF

SEQ ID NO: 30230 - protein, 9 aa, Homo sapiens
  Table A; Target 30230; HLA-B*35:03; IFNK; ENSG00000147896; CTA
FYEMSLQAF

SEQ ID NO: 30231 - protein, 9 aa, Homo sapiens
  Table A; Target 30231; HLA-C*04:01; IFNK; ENSG00000147896; CTA
FYEMSLQAF

SEQ ID NO: 30232 - protein, 9 aa, Homo sapiens
  Table A; Target 30232; HLA-C*14:02; IFNK; ENSG00000147896; CTA
FYEMSLQAF

SEQ ID NO: 30233 - protein, 8 aa, Homo sapiens
  Table A; Target 30233; HLA-A*01:01; IFNK; ENSG00000147896; CTA
GLDQQAEY

SEQ ID NO: 30234 - protein, 9 aa, Homo sapiens
  Table A; Target 30234; HLA-A*02:01; IFNK; ENSG00000147896; CTA
GLDQQAEYL

SEQ ID NO: 30235 - protein, 9 aa, Homo sapiens
  Table A; Target 30235; HLA-A*02:07; IFNK; ENSG00000147896; CTA
GLDQQAEYL

SEQ ID NO: 30236 - protein, 9 aa, Homo sapiens
  Table A; Target 30236; HLA-B*38:01; IFNK; ENSG00000147896; CTA
GLDQQAEYL

SEQ ID NO: 30237 - protein, 9 aa, Homo sapiens
  Table A; Target 30237; HLA-B*55:01; IFNK; ENSG00000147896; CTA
GLDQQAEYL

SEQ ID NO: 30238 - protein, 9 aa, Homo sapiens
  Table A; Target 30238; HLA-C*05:01; IFNK; ENSG00000147896; CTA
GLDQQAEYL

SEQ ID NO: 30239 - protein, 9 aa, Homo sapiens
  Table A; Target 30239; HLA-A*02:03; IFNK; ENSG00000147896; CTA
HLKQIQIGL

SEQ ID NO: 30240 - protein, 9 aa, Homo sapiens
  Table A; Target 30240; HLA-A*02:04; IFNK; ENSG00000147896; CTA
HLKQIQIGL

SEQ ID NO: 30241 - protein, 9 aa, Homo sapiens
  Table A; Target 30241; HLA-B*08:01; IFNK; ENSG00000147896; CTA
HLKQIQIGL

SEQ ID NO: 30242 - protein, 9 aa, Homo sapiens
  Table A; Target 30242; HLA-A*25:01; IFNK; ENSG00000147896; CTA
HLSSMSNSF

SEQ ID NO: 30243 - protein, 9 aa, Homo sapiens
  Table A; Target 30243; HLA-A*26:01; IFNK; ENSG00000147896; CTA
HLSSMSNSF

SEQ ID NO: 30244 - protein, 9 aa, Homo sapiens
  Table A; Target 30244; HLA-A*32:01; IFNK; ENSG00000147896; CTA
HLSSMSNSF

SEQ ID NO: 30245 - protein, 9 aa, Homo sapiens
  Table A; Target 30245; HLA-B*15:01; IFNK; ENSG00000147896; CTA
HLSSMSNSF

SEQ ID NO: 30246 - protein, 9 aa, Homo sapiens
  Table A; Target 30246; HLA-B*15:03; IFNK; ENSG00000147896; CTA
HLSSMSNSF

SEQ ID NO: 30247 - protein, 9 aa, Homo sapiens
  Table A; Target 30247; HLA-B*27:05; IFNK; ENSG00000147896; CTA
HLSSMSNSF

SEQ ID NO: 30248 - protein, 9 aa, Homo sapiens
  Table A; Target 30248; HLA-B*35:01; IFNK; ENSG00000147896; CTA
HLSSMSNSF

SEQ ID NO: 30249 - protein, 9 aa, Homo sapiens
  Table A; Target 30249; HLA-B*37:01; IFNK; ENSG00000147896; CTA
HLSSMSNSF

SEQ ID NO: 30250 - protein, 9 aa, Homo sapiens
  Table A; Target 30250; HLA-B*38:01; IFNK; ENSG00000147896; CTA
HLSSMSNSF

SEQ ID NO: 30251 - protein, 9 aa, Homo sapiens
  Table A; Target 30251; HLA-C*07:04; IFNK; ENSG00000147896; CTA
HLSSMSNSF

SEQ ID NO: 30252 - protein, 9 aa, Homo sapiens
  Table A; Target 30252; HLA-A*23:01; IFNK; ENSG00000147896; CTA
IAFELPQEF

SEQ ID NO: 30253 - protein, 9 aa, Homo sapiens
  Table A; Target 30253; HLA-A*24:02; IFNK; ENSG00000147896; CTA
IAFELPQEF

SEQ ID NO: 30254 - protein, 9 aa, Homo sapiens
  Table A; Target 30254; HLA-A*25:01; IFNK; ENSG00000147896; CTA
IAFELPQEF

SEQ ID NO: 30255 - protein, 9 aa, Homo sapiens
  Table A; Target 30255; HLA-A*26:01; IFNK; ENSG00000147896; CTA
IAFELPQEF

SEQ ID NO: 30256 - protein, 9 aa, Homo sapiens
  Table A; Target 30256; HLA-A*29:02; IFNK; ENSG00000147896; CTA
IAFELPQEF

SEQ ID NO: 30257 - protein, 9 aa, Homo sapiens
  Table A; Target 30257; HLA-A*32:01; IFNK; ENSG00000147896; CTA
IAFELPQEF

SEQ ID NO: 30258 - protein, 9 aa, Homo sapiens
  Table A; Target 30258; HLA-B*15:01; IFNK; ENSG00000147896; CTA
IAFELPQEF

SEQ ID NO: 30259 - protein, 9 aa, Homo sapiens
  Table A; Target 30259; HLA-B*15:03; IFNK; ENSG00000147896; CTA
IAFELPQEF

SEQ ID NO: 30260 - protein, 9 aa, Homo sapiens
  Table A; Target 30260; HLA-B*18:01; IFNK; ENSG00000147896; CTA
IAFELPQEF

SEQ ID NO: 30261 - protein, 9 aa, Homo sapiens
  Table A; Target 30261; HLA-B*27:02; IFNK; ENSG00000147896; CTA
IAFELPQEF

SEQ ID NO: 30262 - protein, 9 aa, Homo sapiens
  Table A; Target 30262; HLA-B*35:01; IFNK; ENSG00000147896; CTA
IAFELPQEF

SEQ ID NO: 30263 - protein, 9 aa, Homo sapiens
  Table A; Target 30263; HLA-B*35:03; IFNK; ENSG00000147896; CTA
IAFELPQEF

SEQ ID NO: 30264 - protein, 9 aa, Homo sapiens
  Table A; Target 30264; HLA-B*38:01; IFNK; ENSG00000147896; CTA
IAFELPQEF

SEQ ID NO: 30265 - protein, 9 aa, Homo sapiens
  Table A; Target 30265; HLA-B*46:01; IFNK; ENSG00000147896; CTA
IAFELPQEF

SEQ ID NO: 30266 - protein, 9 aa, Homo sapiens
  Table A; Target 30266; HLA-B*51:01; IFNK; ENSG00000147896; CTA
IAFELPQEF

SEQ ID NO: 30267 - protein, 9 aa, Homo sapiens
  Table A; Target 30267; HLA-B*54:01; IFNK; ENSG00000147896; CTA
IAFELPQEF

SEQ ID NO: 30268 - protein, 9 aa, Homo sapiens
  Table A; Target 30268; HLA-B*57:01; IFNK; ENSG00000147896; CTA
IAFELPQEF

SEQ ID NO: 30269 - protein, 9 aa, Homo sapiens
  Table A; Target 30269; HLA-B*58:01; IFNK; ENSG00000147896; CTA
IAFELPQEF

SEQ ID NO: 30270 - protein, 9 aa, Homo sapiens
  Table A; Target 30270; HLA-C*02:02; IFNK; ENSG00000147896; CTA
IAFELPQEF

SEQ ID NO: 30271 - protein, 9 aa, Homo sapiens
  Table A; Target 30271; HLA-C*03:03; IFNK; ENSG00000147896; CTA
IAFELPQEF

SEQ ID NO: 30272 - protein, 9 aa, Homo sapiens
  Table A; Target 30272; HLA-C*03:04; IFNK; ENSG00000147896; CTA
IAFELPQEF

SEQ ID NO: 30273 - protein, 9 aa, Homo sapiens
  Table A; Target 30273; HLA-C*05:01; IFNK; ENSG00000147896; CTA
IAFELPQEF

SEQ ID NO: 30274 - protein, 9 aa, Homo sapiens
  Table A; Target 30274; HLA-C*07:04; IFNK; ENSG00000147896; CTA
IAFELPQEF

SEQ ID NO: 30275 - protein, 9 aa, Homo sapiens
  Table A; Target 30275; HLA-C*07:06; IFNK; ENSG00000147896; CTA
IAFELPQEF

SEQ ID NO: 30276 - protein, 9 aa, Homo sapiens
  Table A; Target 30276; HLA-C*12:03; IFNK; ENSG00000147896; CTA
IAFELPQEF

SEQ ID NO: 30277 - protein, 9 aa, Homo sapiens
  Table A; Target 30277; HLA-C*16:01; IFNK; ENSG00000147896; CTA
IAFELPQEF

SEQ ID NO: 30278 - protein, 9 aa, Homo sapiens
  Table A; Target 30278; HLA-C*16:02; IFNK; ENSG00000147896; CTA
IAFELPQEF

SEQ ID NO: 30279 - protein, 9 aa, Homo sapiens
  Table A; Target 30279; HLA-C*16:04; IFNK; ENSG00000147896; CTA
IAFELPQEF

SEQ ID NO: 30280 - protein, 9 aa, Homo sapiens
  Table A; Target 30280; HLA-A*23:01; IFNK; ENSG00000147896; CTA
IFIAGTLSL

SEQ ID NO: 30281 - protein, 9 aa, Homo sapiens
  Table A; Target 30281; HLA-A*24:02; IFNK; ENSG00000147896; CTA
IFIAGTLSL

SEQ ID NO: 30282 - protein, 9 aa, Homo sapiens
  Table A; Target 30282; HLA-A*29:02; IFNK; ENSG00000147896; CTA
IFIAGTLSL

SEQ ID NO: 30283 - protein, 9 aa, Homo sapiens
  Table A; Target 30283; HLA-B*46:01; IFNK; ENSG00000147896; CTA
IFIAGTLSL

SEQ ID NO: 30284 - protein, 9 aa, Homo sapiens
  Table A; Target 30284; HLA-C*01:02; IFNK; ENSG00000147896; CTA
IFIAGTLSL

SEQ ID NO: 30285 - protein, 9 aa, Homo sapiens
  Table A; Target 30285; HLA-C*03:03; IFNK; ENSG00000147896; CTA
IFIAGTLSL

SEQ ID NO: 30286 - protein, 9 aa, Homo sapiens
  Table A; Target 30286; HLA-C*03:04; IFNK; ENSG00000147896; CTA
IFIAGTLSL

SEQ ID NO: 30287 - protein, 9 aa, Homo sapiens
  Table A; Target 30287; HLA-C*14:02; IFNK; ENSG00000147896; CTA
IFIAGTLSL

SEQ ID NO: 30288 - protein, 9 aa, Homo sapiens
  Table A; Target 30288; HLA-A*24:02; IFNK; ENSG00000147896; CTA
IFSQHTFKY

SEQ ID NO: 30289 - protein, 9 aa, Homo sapiens
  Table A; Target 30289; HLA-A*29:02; IFNK; ENSG00000147896; CTA
IFSQHTFKY

SEQ ID NO: 30290 - protein, 9 aa, Homo sapiens
  Table A; Target 30290; HLA-A*29:02; IFNK; ENSG00000147896; CTA
IGLDQQAEY

SEQ ID NO: 30291 - protein, 9 aa, Homo sapiens
  Table A; Target 30291; HLA-A*30:02; IFNK; ENSG00000147896; CTA
IGLDQQAEY

SEQ ID NO: 30292 - protein, 9 aa, Homo sapiens
  Table A; Target 30292; HLA-B*15:01; IFNK; ENSG00000147896; CTA
IGLDQQAEY

SEQ ID NO: 30293 - protein, 9 aa, Homo sapiens
  Table A; Target 30293; HLA-B*15:03; IFNK; ENSG00000147896; CTA
IGLDQQAEY

SEQ ID NO: 30294 - protein, 9 aa, Homo sapiens
  Table A; Target 30294; HLA-B*35:01; IFNK; ENSG00000147896; CTA
IGLDQQAEY

SEQ ID NO: 30295 - protein, 9 aa, Homo sapiens
  Table A; Target 30295; HLA-B*46:01; IFNK; ENSG00000147896; CTA
IGLDQQAEY

SEQ ID NO: 30296 - protein, 9 aa, Homo sapiens
  Table A; Target 30296; HLA-C*14:02; IFNK; ENSG00000147896; CTA
IGLDQQAEY

SEQ ID NO: 30297 - protein, 9 aa, Homo sapiens
  Table A; Target 30297; HLA-B*13:02; IFNK; ENSG00000147896; CTA
IQIGLDQQA

SEQ ID NO: 30298 - protein, 11 aa, Homo sapiens
  Table A; Target 30298; HLA-A*23:01; IFNK; ENSG00000147896; CTA
IQIGLDQQAEY

SEQ ID NO: 30299 - protein, 11 aa, Homo sapiens
  Table A; Target 30299; HLA-A*26:01; IFNK; ENSG00000147896; CTA
IQIGLDQQAEY

SEQ ID NO: 30300 - protein, 11 aa, Homo sapiens
  Table A; Target 30300; HLA-A*29:02; IFNK; ENSG00000147896; CTA
IQIGLDQQAEY

SEQ ID NO: 30301 - protein, 11 aa, Homo sapiens
  Table A; Target 30301; HLA-A*30:02; IFNK; ENSG00000147896; CTA
IQIGLDQQAEY

SEQ ID NO: 30302 - protein, 11 aa, Homo sapiens
  Table A; Target 30302; HLA-A*32:01; IFNK; ENSG00000147896; CTA
IQIGLDQQAEY

SEQ ID NO: 30303 - protein, 11 aa, Homo sapiens
  Table A; Target 30303; HLA-B*15:01; IFNK; ENSG00000147896; CTA
IQIGLDQQAEY

SEQ ID NO: 30304 - protein, 11 aa, Homo sapiens
  Table A; Target 30304; HLA-B*15:03; IFNK; ENSG00000147896; CTA
IQIGLDQQAEY

SEQ ID NO: 30305 - protein, 11 aa, Homo sapiens
  Table A; Target 30305; HLA-B*46:01; IFNK; ENSG00000147896; CTA
IQIGLDQQAEY

SEQ ID NO: 30306 - protein, 11 aa, Homo sapiens
  Table A; Target 30306; HLA-B*58:01; IFNK; ENSG00000147896; CTA
IQIGLDQQAEY

SEQ ID NO: 30307 - protein, 11 aa, Homo sapiens
  Table A; Target 30307; HLA-C*02:02; IFNK; ENSG00000147896; CTA
IQIGLDQQAEY

SEQ ID NO: 30308 - protein, 11 aa, Homo sapiens
  Table A; Target 30308; HLA-C*07:04; IFNK; ENSG00000147896; CTA
IQIGLDQQAEY

SEQ ID NO: 30309 - protein, 11 aa, Homo sapiens
  Table A; Target 30309; HLA-C*16:04; IFNK; ENSG00000147896; CTA
IQIGLDQQAEY

SEQ ID NO: 30310 - protein, 8 aa, Homo sapiens
  Table A; Target 30310; HLA-B*37:01; IFNK; ENSG00000147896; CTA
KEMKENEM

SEQ ID NO: 30311 - protein, 10 aa, Homo sapiens
  Table A; Target 30311; HLA-B*07:02; IFNK; ENSG00000147896; CTA
KPSEARVPQL

SEQ ID NO: 30312 - protein, 10 aa, Homo sapiens
  Table A; Target 30312; HLA-C*07:02; IFNK; ENSG00000147896; CTA
KPSEARVPQL

SEQ ID NO: 30313 - protein, 9 aa, Homo sapiens
  Table A; Target 30313; HLA-A*24:02; IFNK; ENSG00000147896; CTA
KYSDCAWEI

SEQ ID NO: 30314 - protein, 9 aa, Homo sapiens
  Table A; Target 30314; HLA-B*49:01; IFNK; ENSG00000147896; CTA
LEILMGIFI

SEQ ID NO: 30315 - protein, 8 aa, Homo sapiens
  Table A; Target 30315; HLA-B*18:01; IFNK; ENSG00000147896; CTA
LPQEFLQY

SEQ ID NO: 30316 - protein, 8 aa, Homo sapiens
  Table A; Target 30316; HLA-B*35:01; IFNK; ENSG00000147896; CTA
LPQEFLQY

SEQ ID NO: 30317 - protein, 9 aa, Homo sapiens
  Table A; Target 30317; HLA-B*51:01; IFNK; ENSG00000147896; CTA
LPQEFLQYT

SEQ ID NO: 30318 - protein, 9 aa, Homo sapiens
  Table A; Target 30318; HLA-A*03:01; IFNK; ENSG00000147896; CTA
LQYTQPMKR

SEQ ID NO: 30319 - protein, 9 aa, Homo sapiens
  Table A; Target 30319; HLA-A*31:01; IFNK; ENSG00000147896; CTA
LQYTQPMKR

SEQ ID NO: 30320 - protein, 9 aa, Homo sapiens
  Table A; Target 30320; HLA-C*03:04; IFNK; ENSG00000147896; CTA
MGIFIAGTL

SEQ ID NO: 30321 - protein, 9 aa, Homo sapiens
  Table A; Target 30321; HLA-B*54:01; IFNK; ENSG00000147896; CTA
MSNSFPVEC

SEQ ID NO: 30322 - protein, 9 aa, Homo sapiens
  Table A; Target 30322; HLA-C*12:03; IFNK; ENSG00000147896; CTA
MSNSFPVEC

SEQ ID NO: 30323 - protein, 8 aa, Homo sapiens
  Table A; Target 30323; HLA-B*18:01; IFNK; ENSG00000147896; CTA
NEMKPSEA

SEQ ID NO: 30324 - protein, 9 aa, Homo sapiens
  Table A; Target 30324; HLA-B*18:01; IFNK; ENSG00000147896; CTA
NENEDMKEM

SEQ ID NO: 30325 - protein, 9 aa, Homo sapiens
  Table A; Target 30325; HLA-B*44:02; IFNK; ENSG00000147896; CTA
NENEDMKEM

SEQ ID NO: 30326 - protein, 9 aa, Homo sapiens
  Table A; Target 30326; HLA-B*44:03; IFNK; ENSG00000147896; CTA
NENEDMKEM

SEQ ID NO: 30327 - protein, 9 aa, Homo sapiens
  Table A; Target 30327; HLA-C*16:04; IFNK; ENSG00000147896; CTA
NENEDMKEM

SEQ ID NO: 30328 - protein, 8 aa, Homo sapiens
  Table A; Target 30328; HLA-A*32:01; IFNK; ENSG00000147896; CTA
NIFSQHTF

SEQ ID NO: 30329 - protein, 9 aa, Homo sapiens
  Table A; Target 30329; HLA-A*03:01; IFNK; ENSG00000147896; CTA
NIFSQHTFK

SEQ ID NO: 30330 - protein, 10 aa, Homo sapiens
  Table A; Target 30330; HLA-A*29:02; IFNK; ENSG00000147896; CTA
NIFSQHTFKY

SEQ ID NO: 30331 - protein, 9 aa, Homo sapiens
  Table A; Target 30331; HLA-A*31:01; IFNK; ENSG00000147896; CTA
NSFPVECLR

SEQ ID NO: 30332 - protein, 9 aa, Homo sapiens
  Table A; Target 30332; HLA-A*33:01; IFNK; ENSG00000147896; CTA
NSFPVECLR

SEQ ID NO: 30333 - protein, 9 aa, Homo sapiens
  Table A; Target 30333; HLA-C*07:06; IFNK; ENSG00000147896; CTA
QAFNIFSQH

SEQ ID NO: 30334 - protein, 10 aa, Homo sapiens
  Table A; Target 30334; HLA-A*01:01; IFNK; ENSG00000147896; CTA
QIGLDQQAEY

SEQ ID NO: 30335 - protein, 10 aa, Homo sapiens
  Table A; Target 30335; HLA-A*30:02; IFNK; ENSG00000147896; CTA
QIGLDQQAEY

SEQ ID NO: 30336 - protein, 10 aa, Homo sapiens
  Table A; Target 30336; HLA-B*13:02; IFNK; ENSG00000147896; CTA
QQAEYLNQCL

SEQ ID NO: 30337 - protein, 10 aa, Homo sapiens
  Table A; Target 30337; HLA-B*27:05; IFNK; ENSG00000147896; CTA
QQAEYLNQCL

SEQ ID NO: 30338 - protein, 10 aa, Homo sapiens
  Table A; Target 30338; HLA-B*38:01; IFNK; ENSG00000147896; CTA
QQAEYLNQCL

SEQ ID NO: 30339 - protein, 8 aa, Homo sapiens
  Table A; Target 30339; HLA-B*18:01; IFNK; ENSG00000147896; CTA
RENIAFEL

SEQ ID NO: 30340 - protein, 8 aa, Homo sapiens
  Table A; Target 30340; HLA-B*37:01; IFNK; ENSG00000147896; CTA
RENIAFEL

SEQ ID NO: 30341 - protein, 10 aa, Homo sapiens
  Table A; Target 30341; HLA-B*38:01; IFNK; ENSG00000147896; CTA
RHLSSMSNSF

SEQ ID NO: 30342 - protein, 9 aa, Homo sapiens
  Table A; Target 30342; HLA-A*03:01; IFNK; ENSG00000147896; CTA
RIDNFLKEK

SEQ ID NO: 30343 - protein, 9 aa, Homo sapiens
  Table A; Target 30343; HLA-A*03:02; IFNK; ENSG00000147896; CTA
RIDNFLKEK

SEQ ID NO: 30344 - protein, 11 aa, Homo sapiens
  Table A; Target 30344; HLA-A*31:01; IFNK; ENSG00000147896; CTA
RVPQLSSLELR

SEQ ID NO: 30345 - protein, 9 aa, Homo sapiens
  Table A; Target 30345; HLA-A*24:02; IFNK; ENSG00000147896; CTA
RYFHRIDNF

SEQ ID NO: 30346 - protein, 8 aa, Homo sapiens
  Table A; Target 30346; HLA-A*30:01; IFNK; ENSG00000147896; CTA
SEARVPQL

SEQ ID NO: 30347 - protein, 8 aa, Homo sapiens
  Table A; Target 30347; HLA-B*18:01; IFNK; ENSG00000147896; CTA
SEARVPQL

SEQ ID NO: 30348 - protein, 8 aa, Homo sapiens
  Table A; Target 30348; HLA-B*37:01; IFNK; ENSG00000147896; CTA
SEARVPQL

SEQ ID NO: 30349 - protein, 8 aa, Homo sapiens
  Table A; Target 30349; HLA-B*40:01; IFNK; ENSG00000147896; CTA
SEARVPQL

SEQ ID NO: 30350 - protein, 8 aa, Homo sapiens
  Table A; Target 30350; HLA-B*44:02; IFNK; ENSG00000147896; CTA
SEARVPQL

SEQ ID NO: 30351 - protein, 8 aa, Homo sapiens
  Table A; Target 30351; HLA-B*44:03; IFNK; ENSG00000147896; CTA
SEARVPQL

SEQ ID NO: 30352 - protein, 8 aa, Homo sapiens
  Table A; Target 30352; HLA-B*49:01; IFNK; ENSG00000147896; CTA
SEARVPQL

SEQ ID NO: 30353 - protein, 11 aa, Homo sapiens
  Table A; Target 30353; HLA-A*30:01; IFNK; ENSG00000147896; CTA
SEARVPQLSSL

SEQ ID NO: 30354 - protein, 11 aa, Homo sapiens
  Table A; Target 30354; HLA-B*40:01; IFNK; ENSG00000147896; CTA
SEARVPQLSSL

SEQ ID NO: 30355 - protein, 9 aa, Homo sapiens
  Table A; Target 30355; HLA-A*02:01; IFNK; ENSG00000147896; CTA
SLDCNLLNV

SEQ ID NO: 30356 - protein, 9 aa, Homo sapiens
  Table A; Target 30356; HLA-A*02:07; IFNK; ENSG00000147896; CTA
SLDCNLLNV

SEQ ID NO: 30357 - protein, 9 aa, Homo sapiens
  Table A; Target 30357; HLA-B*57:01; IFNK; ENSG00000147896; CTA
SSLELRRYF

SEQ ID NO: 30358 - protein, 9 aa, Homo sapiens
  Table A; Target 30358; HLA-A*11:01; IFNK; ENSG00000147896; CTA
SSMSNSFPV

SEQ ID NO: 30359 - protein, 9 aa, Homo sapiens
  Table A; Target 30359; HLA-A*03:01; IFNK; ENSG00000147896; CTA
STKPDMIQK

SEQ ID NO: 30360 - protein, 9 aa, Homo sapiens
  Table A; Target 30360; HLA-A*03:02; IFNK; ENSG00000147896; CTA
STKPDMIQK

SEQ ID NO: 30361 - protein, 9 aa, Homo sapiens
  Table A; Target 30361; HLA-A*11:01; IFNK; ENSG00000147896; CTA
STKPDMIQK

SEQ ID NO: 30362 - protein, 9 aa, Homo sapiens
  Table A; Target 30362; HLA-A*31:01; IFNK; ENSG00000147896; CTA
STKPDMIQK

SEQ ID NO: 30363 - protein, 9 aa, Homo sapiens
  Table A; Target 30363; HLA-A*33:01; IFNK; ENSG00000147896; CTA
STKPDMIQK

SEQ ID NO: 30364 - protein, 9 aa, Homo sapiens
  Table A; Target 30364; HLA-A*33:03; IFNK; ENSG00000147896; CTA
STKPDMIQK

SEQ ID NO: 30365 - protein, 9 aa, Homo sapiens
  Table A; Target 30365; HLA-A*68:01; IFNK; ENSG00000147896; CTA
STKPDMIQK

SEQ ID NO: 30366 - protein, 9 aa, Homo sapiens
  Table A; Target 30366; HLA-B*13:02; IFNK; ENSG00000147896; CTA
STKPDMIQK

SEQ ID NO: 30367 - protein, 9 aa, Homo sapiens
  Table A; Target 30367; HLA-B*40:02; IFNK; ENSG00000147896; CTA
STKPDMIQK

SEQ ID NO: 30368 - protein, 9 aa, Homo sapiens
  Table A; Target 30368; HLA-B*57:01; IFNK; ENSG00000147896; CTA
STKPDMIQK

SEQ ID NO: 30369 - protein, 9 aa, Homo sapiens
  Table A; Target 30369; HLA-C*07:06; IFNK; ENSG00000147896; CTA
STKPDMIQK

SEQ ID NO: 30370 - protein, 9 aa, Homo sapiens
  Table A; Target 30370; HLA-B*07:02; IFNK; ENSG00000147896; CTA
VPQLSSLEL

SEQ ID NO: 30371 - protein, 9 aa, Homo sapiens
  Table A; Target 30371; HLA-B*08:01; IFNK; ENSG00000147896; CTA
VPQLSSLEL

SEQ ID NO: 30372 - protein, 9 aa, Homo sapiens
  Table A; Target 30372; HLA-B*35:01; IFNK; ENSG00000147896; CTA
VPQLSSLEL

SEQ ID NO: 30373 - protein, 9 aa, Homo sapiens
  Table A; Target 30373; HLA-B*35:03; IFNK; ENSG00000147896; CTA
VPQLSSLEL

SEQ ID NO: 30374 - protein, 9 aa, Homo sapiens
  Table A; Target 30374; HLA-C*07:02; IFNK; ENSG00000147896; CTA
VPQLSSLEL

SEQ ID NO: 30375 - protein, 8 aa, Homo sapiens
  Table A; Target 30375; HLA-B*49:01; IFNK; ENSG00000147896; CTA
WEIVRVEI

SEQ ID NO: 30376 - protein, 8 aa, Homo sapiens
  Table A; Target 30376; HLA-A*30:01; IFNK; ENSG00000147896; CTA
YEMSLQAF

SEQ ID NO: 30377 - protein, 8 aa, Homo sapiens
  Table A; Target 30377; HLA-B*18:01; IFNK; ENSG00000147896; CTA
YEMSLQAF

SEQ ID NO: 30378 - protein, 8 aa, Homo sapiens
  Table A; Target 30378; HLA-B*37:01; IFNK; ENSG00000147896; CTA
YEMSLQAF

SEQ ID NO: 30379 - protein, 8 aa, Homo sapiens
  Table A; Target 30379; HLA-B*40:01; IFNK; ENSG00000147896; CTA
YEMSLQAF

SEQ ID NO: 30380 - protein, 8 aa, Homo sapiens
  Table A; Target 30380; HLA-B*40:02; IFNK; ENSG00000147896; CTA
YEMSLQAF

SEQ ID NO: 30381 - protein, 8 aa, Homo sapiens
  Table A; Target 30381; HLA-B*44:02; IFNK; ENSG00000147896; CTA
YEMSLQAF

SEQ ID NO: 30382 - protein, 8 aa, Homo sapiens
  Table A; Target 30382; HLA-B*44:03; IFNK; ENSG00000147896; CTA
YEMSLQAF

SEQ ID NO: 30383 - protein, 8 aa, Homo sapiens
  Table A; Target 30383; HLA-B*49:01; IFNK; ENSG00000147896; CTA
YEMSLQAF

SEQ ID NO: 30384 - protein, 8 aa, Homo sapiens
  Table A; Target 30384; HLA-C*16:04; IFNK; ENSG00000147896; CTA
YEMSLQAF

SEQ ID NO: 30385 - protein, 10 aa, Homo sapiens
  Table A; Target 30385; HLA-B*44:02; IFNK; ENSG00000147896; CTA
YEMSLQAFNI

SEQ ID NO: 30386 - protein, 10 aa, Homo sapiens
  Table A; Target 30386; HLA-B*49:01; IFNK; ENSG00000147896; CTA
YEMSLQAFNI

SEQ ID NO: 30387 - protein, 8 aa, Homo sapiens
  Table A; Target 30387; HLA-B*08:01; IFNK; ENSG00000147896; CTA
YFYKFTAL

SEQ ID NO: 30388 - protein, 9 aa, Homo sapiens
  Table A; Target 30388; HLA-A*24:02; IFNK; ENSG00000147896; CTA
YFYKFTALF

SEQ ID NO: 30389 - protein, 9 aa, Homo sapiens
  Table A; Target 30389; HLA-A*29:02; IFNK; ENSG00000147896; CTA
YFYKFTALF

SEQ ID NO: 30390 - protein, 9 aa, Homo sapiens
  Table A; Target 30390; HLA-A*24:02; IFNK; ENSG00000147896; CTA
YYFYKFTAL

SEQ ID NO: 30391 - protein, 10 aa, Homo sapiens
  Table A; Target 30391; HLA-A*25:01; IL22RA2; ENSG00000164485; CTA
AASAGSYSEW

SEQ ID NO: 30392 - protein, 10 aa, Homo sapiens
  Table A; Target 30392; HLA-A*26:01; IL22RA2; ENSG00000164485; CTA
AASAGSYSEW

SEQ ID NO: 30393 - protein, 10 aa, Homo sapiens
  Table A; Target 30393; HLA-A*32:01; IL22RA2; ENSG00000164485; CTA
AASAGSYSEW

SEQ ID NO: 30394 - protein, 10 aa, Homo sapiens
  Table A; Target 30394; HLA-B*27:02; IL22RA2; ENSG00000164485; CTA
AASAGSYSEW

SEQ ID NO: 30395 - protein, 10 aa, Homo sapiens
  Table A; Target 30395; HLA-B*44:02; IL22RA2; ENSG00000164485; CTA
AASAGSYSEW

SEQ ID NO: 30396 - protein, 10 aa, Homo sapiens
  Table A; Target 30396; HLA-B*44:03; IL22RA2; ENSG00000164485; CTA
AASAGSYSEW

SEQ ID NO: 30397 - protein, 10 aa, Homo sapiens
  Table A; Target 30397; HLA-B*57:01; IL22RA2; ENSG00000164485; CTA
AASAGSYSEW

SEQ ID NO: 30398 - protein, 10 aa, Homo sapiens
  Table A; Target 30398; HLA-B*58:01; IL22RA2; ENSG00000164485; CTA
AASAGSYSEW

SEQ ID NO: 30399 - protein, 10 aa, Homo sapiens
  Table A; Target 30399; HLA-C*01:02; IL22RA2; ENSG00000164485; CTA
AASAGSYSEW

SEQ ID NO: 30400 - protein, 10 aa, Homo sapiens
  Table A; Target 30400; HLA-C*02:02; IL22RA2; ENSG00000164485; CTA
AASAGSYSEW

SEQ ID NO: 30401 - protein, 10 aa, Homo sapiens
  Table A; Target 30401; HLA-C*03:03; IL22RA2; ENSG00000164485; CTA
AASAGSYSEW

SEQ ID NO: 30402 - protein, 10 aa, Homo sapiens
  Table A; Target 30402; HLA-C*07:06; IL22RA2; ENSG00000164485; CTA
AASAGSYSEW

SEQ ID NO: 30403 - protein, 10 aa, Homo sapiens
  Table A; Target 30403; HLA-C*12:03; IL22RA2; ENSG00000164485; CTA
AASAGSYSEW

SEQ ID NO: 30404 - protein, 10 aa, Homo sapiens
  Table A; Target 30404; HLA-C*16:02; IL22RA2; ENSG00000164485; CTA
AASAGSYSEW

SEQ ID NO: 30405 - protein, 10 aa, Homo sapiens
  Table A; Target 30405; HLA-C*16:04; IL22RA2; ENSG00000164485; CTA
AASAGSYSEW

SEQ ID NO: 30406 - protein, 8 aa, Homo sapiens
  Table A; Target 30406; HLA-A*30:01; IL22RA2; ENSG00000164485; CTA
AEIYQPML

SEQ ID NO: 30407 - protein, 8 aa, Homo sapiens
  Table A; Target 30407; HLA-B*37:01; IL22RA2; ENSG00000164485; CTA
AEIYQPML

SEQ ID NO: 30408 - protein, 8 aa, Homo sapiens
  Table A; Target 30408; HLA-B*40:01; IL22RA2; ENSG00000164485; CTA
AEIYQPML

SEQ ID NO: 30409 - protein, 8 aa, Homo sapiens
  Table A; Target 30409; HLA-B*40:02; IL22RA2; ENSG00000164485; CTA
AEIYQPML

SEQ ID NO: 30410 - protein, 8 aa, Homo sapiens
  Table A; Target 30410; HLA-B*44:02; IL22RA2; ENSG00000164485; CTA
AEIYQPML

SEQ ID NO: 30411 - protein, 8 aa, Homo sapiens
  Table A; Target 30411; HLA-B*44:03; IL22RA2; ENSG00000164485; CTA
AEIYQPML

SEQ ID NO: 30412 - protein, 8 aa, Homo sapiens
  Table A; Target 30412; HLA-B*49:01; IL22RA2; ENSG00000164485; CTA
AEIYQPML

SEQ ID NO: 30413 - protein, 8 aa, Homo sapiens
  Table A; Target 30413; HLA-C*16:04; IL22RA2; ENSG00000164485; CTA
AEIYQPML

SEQ ID NO: 30414 - protein, 10 aa, Homo sapiens
  Table A; Target 30414; HLA-B*44:03; IL22RA2; ENSG00000164485; CTA
AEIYQPMLDR

SEQ ID NO: 30415 - protein, 10 aa, Homo sapiens
  Table A; Target 30415; HLA-C*16:01; IL22RA2; ENSG00000164485; CTA
AGTQSTHESL

SEQ ID NO: 30416 - protein, 10 aa, Homo sapiens
  Table A; Target 30416; HLA-B*38:01; IL22RA2; ENSG00000164485; CTA
AHRAVEIEAL

SEQ ID NO: 30417 - protein, 9 aa, Homo sapiens
  Table A; Target 30417; HLA-A*25:01; IL22RA2; ENSG00000164485; CTA
ALTGNSSVY

SEQ ID NO: 30418 - protein, 9 aa, Homo sapiens
  Table A; Target 30418; HLA-A*26:01; IL22RA2; ENSG00000164485; CTA
ALTGNSSVY

SEQ ID NO: 30419 - protein, 9 aa, Homo sapiens
  Table A; Target 30419; HLA-A*29:02; IL22RA2; ENSG00000164485; CTA
ALTGNSSVY

SEQ ID NO: 30420 - protein, 9 aa, Homo sapiens
  Table A; Target 30420; HLA-A*30:02; IL22RA2; ENSG00000164485; CTA
ALTGNSSVY

SEQ ID NO: 30421 - protein, 9 aa, Homo sapiens
  Table A; Target 30421; HLA-A*32:01; IL22RA2; ENSG00000164485; CTA
ALTGNSSVY

SEQ ID NO: 30422 - protein, 9 aa, Homo sapiens
  Table A; Target 30422; HLA-B*15:01; IL22RA2; ENSG00000164485; CTA
ALTGNSSVY

SEQ ID NO: 30423 - protein, 9 aa, Homo sapiens
  Table A; Target 30423; HLA-B*15:03; IL22RA2; ENSG00000164485; CTA
ALTGNSSVY

SEQ ID NO: 30424 - protein, 9 aa, Homo sapiens
  Table A; Target 30424; HLA-B*39:01; IL22RA2; ENSG00000164485; CTA
ALTGNSSVY

SEQ ID NO: 30425 - protein, 9 aa, Homo sapiens
  Table A; Target 30425; HLA-B*46:01; IL22RA2; ENSG00000164485; CTA
ALTGNSSVY

SEQ ID NO: 30426 - protein, 9 aa, Homo sapiens
  Table A; Target 30426; HLA-C*02:02; IL22RA2; ENSG00000164485; CTA
ALTGNSSVY

SEQ ID NO: 30427 - protein, 9 aa, Homo sapiens
  Table A; Target 30427; HLA-C*07:04; IL22RA2; ENSG00000164485; CTA
ALTGNSSVY

SEQ ID NO: 30428 - protein, 9 aa, Homo sapiens
  Table A; Target 30428; HLA-C*14:02; IL22RA2; ENSG00000164485; CTA
ALTGNSSVY

SEQ ID NO: 30429 - protein, 9 aa, Homo sapiens
  Table A; Target 30429; HLA-C*16:01; IL22RA2; ENSG00000164485; CTA
ALTGNSSVY

SEQ ID NO: 30430 - protein, 9 aa, Homo sapiens
  Table A; Target 30430; HLA-C*16:02; IL22RA2; ENSG00000164485; CTA
ALTGNSSVY

SEQ ID NO: 30431 - protein, 9 aa, Homo sapiens
  Table A; Target 30431; HLA-C*16:04; IL22RA2; ENSG00000164485; CTA
ALTGNSSVY

SEQ ID NO: 30432 - protein, 10 aa, Homo sapiens
  Table A; Target 30432; HLA-C*04:01; IL22RA2; ENSG00000164485; CTA
ALTGNSSVYF

SEQ ID NO: 30433 - protein, 8 aa, Homo sapiens
  Table A; Target 30433; HLA-A*30:02; IL22RA2; ENSG00000164485; CTA
ALTPHSSY

SEQ ID NO: 30434 - protein, 8 aa, Homo sapiens
  Table A; Target 30434; HLA-A*32:01; IL22RA2; ENSG00000164485; CTA
ALTPHSSY

SEQ ID NO: 30435 - protein, 8 aa, Homo sapiens
  Table A; Target 30435; HLA-B*15:01; IL22RA2; ENSG00000164485; CTA
ALTPHSSY

SEQ ID NO: 30436 - protein, 8 aa, Homo sapiens
  Table A; Target 30436; HLA-B*15:03; IL22RA2; ENSG00000164485; CTA
ALTPHSSY

SEQ ID NO: 30437 - protein, 8 aa, Homo sapiens
  Table A; Target 30437; HLA-C*16:01; IL22RA2; ENSG00000164485; CTA
ALTPHSSY

SEQ ID NO: 30438 - protein, 8 aa, Homo sapiens
  Table A; Target 30438; HLA-B*35:01; IL22RA2; ENSG00000164485; CTA
APNLPYRY

SEQ ID NO: 30439 - protein, 10 aa, Homo sapiens
  Table A; Target 30439; HLA-B*56:01; IL22RA2; ENSG00000164485; CTA
APNLPYRYQK

SEQ ID NO: 30440 - protein, 9 aa, Homo sapiens
  Table A; Target 30440; HLA-A*01:01; IL22RA2; ENSG00000164485; CTA
ASAGSYSEW

SEQ ID NO: 30441 - protein, 9 aa, Homo sapiens
  Table A; Target 30441; HLA-A*25:01; IL22RA2; ENSG00000164485; CTA
ASAGSYSEW

SEQ ID NO: 30442 - protein, 9 aa, Homo sapiens
  Table A; Target 30442; HLA-A*26:01; IL22RA2; ENSG00000164485; CTA
ASAGSYSEW

SEQ ID NO: 30443 - protein, 9 aa, Homo sapiens
  Table A; Target 30443; HLA-A*30:02; IL22RA2; ENSG00000164485; CTA
ASAGSYSEW

SEQ ID NO: 30444 - protein, 9 aa, Homo sapiens
  Table A; Target 30444; HLA-A*32:01; IL22RA2; ENSG00000164485; CTA
ASAGSYSEW

SEQ ID NO: 30445 - protein, 9 aa, Homo sapiens
  Table A; Target 30445; HLA-B*15:01; IL22RA2; ENSG00000164485; CTA
ASAGSYSEW

SEQ ID NO: 30446 - protein, 9 aa, Homo sapiens
  Table A; Target 30446; HLA-B*27:02; IL22RA2; ENSG00000164485; CTA
ASAGSYSEW

SEQ ID NO: 30447 - protein, 9 aa, Homo sapiens
  Table A; Target 30447; HLA-B*44:02; IL22RA2; ENSG00000164485; CTA
ASAGSYSEW

SEQ ID NO: 30448 - protein, 9 aa, Homo sapiens
  Table A; Target 30448; HLA-B*44:03; IL22RA2; ENSG00000164485; CTA
ASAGSYSEW

SEQ ID NO: 30449 - protein, 9 aa, Homo sapiens
  Table A; Target 30449; HLA-B*46:01; IL22RA2; ENSG00000164485; CTA
ASAGSYSEW

SEQ ID NO: 30450 - protein, 9 aa, Homo sapiens
  Table A; Target 30450; HLA-B*57:01; IL22RA2; ENSG00000164485; CTA
ASAGSYSEW

SEQ ID NO: 30451 - protein, 9 aa, Homo sapiens
  Table A; Target 30451; HLA-B*58:01; IL22RA2; ENSG00000164485; CTA
ASAGSYSEW

SEQ ID NO: 30452 - protein, 9 aa, Homo sapiens
  Table A; Target 30452; HLA-C*01:02; IL22RA2; ENSG00000164485; CTA
ASAGSYSEW

SEQ ID NO: 30453 - protein, 9 aa, Homo sapiens
  Table A; Target 30453; HLA-C*02:02; IL22RA2; ENSG00000164485; CTA
ASAGSYSEW

SEQ ID NO: 30454 - protein, 9 aa, Homo sapiens
  Table A; Target 30454; HLA-C*03:04; IL22RA2; ENSG00000164485; CTA
ASAGSYSEW

SEQ ID NO: 30455 - protein, 9 aa, Homo sapiens
  Table A; Target 30455; HLA-C*04:01; IL22RA2; ENSG00000164485; CTA
ASAGSYSEW

SEQ ID NO: 30456 - protein, 9 aa, Homo sapiens
  Table A; Target 30456; HLA-C*07:06; IL22RA2; ENSG00000164485; CTA
ASAGSYSEW

SEQ ID NO: 30457 - protein, 9 aa, Homo sapiens
  Table A; Target 30457; HLA-C*12:03; IL22RA2; ENSG00000164485; CTA
ASAGSYSEW

SEQ ID NO: 30458 - protein, 9 aa, Homo sapiens
  Table A; Target 30458; HLA-C*16:01; IL22RA2; ENSG00000164485; CTA
ASAGSYSEW

SEQ ID NO: 30459 - protein, 9 aa, Homo sapiens
  Table A; Target 30459; HLA-C*16:04; IL22RA2; ENSG00000164485; CTA
ASAGSYSEW

SEQ ID NO: 30460 - protein, 9 aa, Homo sapiens
  Table A; Target 30460; HLA-A*23:01; IL22RA2; ENSG00000164485; CTA
CFLGFLISF

SEQ ID NO: 30461 - protein, 9 aa, Homo sapiens
  Table A; Target 30461; HLA-C*06:02; IL22RA2; ENSG00000164485; CTA
CNFPGCRTL

SEQ ID NO: 30462 - protein, 9 aa, Homo sapiens
  Table A; Target 30462; HLA-C*12:03; IL22RA2; ENSG00000164485; CTA
CNFPGCRTL

SEQ ID NO: 30463 - protein, 9 aa, Homo sapiens
  Table A; Target 30463; HLA-A*03:02; IL22RA2; ENSG00000164485; CTA
CSMKSSHQK

SEQ ID NO: 30464 - protein, 9 aa, Homo sapiens
  Table A; Target 30464; HLA-A*11:01; IL22RA2; ENSG00000164485; CTA
CSMKSSHQK

SEQ ID NO: 30465 - protein, 9 aa, Homo sapiens
  Table A; Target 30465; HLA-A*03:02; IL22RA2; ENSG00000164485; CTA
DIQEPYYGR

SEQ ID NO: 30466 - protein, 9 aa, Homo sapiens
  Table A; Target 30466; HLA-A*11:01; IL22RA2; ENSG00000164485; CTA
DIQEPYYGR

SEQ ID NO: 30467 - protein, 9 aa, Homo sapiens
  Table A; Target 30467; HLA-A*26:01; IL22RA2; ENSG00000164485; CTA
DIQEPYYGR

SEQ ID NO: 30468 - protein, 9 aa, Homo sapiens
  Table A; Target 30468; HLA-A*31:01; IL22RA2; ENSG00000164485; CTA
DIQEPYYGR

SEQ ID NO: 30469 - protein, 9 aa, Homo sapiens
  Table A; Target 30469; HLA-A*33:01; IL22RA2; ENSG00000164485; CTA
DIQEPYYGR

SEQ ID NO: 30470 - protein, 9 aa, Homo sapiens
  Table A; Target 30470; HLA-A*33:03; IL22RA2; ENSG00000164485; CTA
DIQEPYYGR

SEQ ID NO: 30471 - protein, 9 aa, Homo sapiens
  Table A; Target 30471; HLA-A*68:01; IL22RA2; ENSG00000164485; CTA
DIQEPYYGR

SEQ ID NO: 30472 - protein, 9 aa, Homo sapiens
  Table A; Target 30472; HLA-C*07:06; IL22RA2; ENSG00000164485; CTA
DIQEPYYGR

SEQ ID NO: 30473 - protein, 10 aa, Homo sapiens
  Table A; Target 30473; HLA-A*26:01; IL22RA2; ENSG00000164485; CTA
DIQEPYYGRV

SEQ ID NO: 30474 - protein, 10 aa, Homo sapiens
  Table A; Target 30474; HLA-A*68:01; IL22RA2; ENSG00000164485; CTA
DIQEPYYGRV

SEQ ID NO: 30475 - protein, 10 aa, Homo sapiens
  Table A; Target 30475; HLA-A*68:02; IL22RA2; ENSG00000164485; CTA
DIQEPYYGRV

SEQ ID NO: 30476 - protein, 11 aa, Homo sapiens
  Table A; Target 30476; HLA-A*33:01; IL22RA2; ENSG00000164485; CTA
DIQEPYYGRVR

SEQ ID NO: 30477 - protein, 11 aa, Homo sapiens
  Table A; Target 30477; HLA-A*68:01; IL22RA2; ENSG00000164485; CTA
DIQEPYYGRVR

SEQ ID NO: 30478 - protein, 10 aa, Homo sapiens
  Table A; Target 30478; HLA-B*51:01; IL22RA2; ENSG00000164485; CTA
DPPVMNITQV

SEQ ID NO: 30479 - protein, 8 aa, Homo sapiens
  Table A; Target 30479; HLA-A*33:01; IL22RA2; ENSG00000164485; CTA
DYYELLYR

SEQ ID NO: 30480 - protein, 8 aa, Homo sapiens
  Table A; Target 30480; HLA-A*33:03; IL22RA2; ENSG00000164485; CTA
DYYELLYR

SEQ ID NO: 30481 - protein, 9 aa, Homo sapiens
  Table A; Target 30481; HLA-A*23:01; IL22RA2; ENSG00000164485; CTA
EALTPHSSY

SEQ ID NO: 30482 - protein, 9 aa, Homo sapiens
  Table A; Target 30482; HLA-A*25:01; IL22RA2; ENSG00000164485; CTA
EALTPHSSY

SEQ ID NO: 30483 - protein, 9 aa, Homo sapiens
  Table A; Target 30483; HLA-A*26:01; IL22RA2; ENSG00000164485; CTA
EALTPHSSY

SEQ ID NO: 30484 - protein, 9 aa, Homo sapiens
  Table A; Target 30484; HLA-A*29:02; IL22RA2; ENSG00000164485; CTA
EALTPHSSY

SEQ ID NO: 30485 - protein, 9 aa, Homo sapiens
  Table A; Target 30485; HLA-A*30:02; IL22RA2; ENSG00000164485; CTA
EALTPHSSY

SEQ ID NO: 30486 - protein, 9 aa, Homo sapiens
  Table A; Target 30486; HLA-A*32:01; IL22RA2; ENSG00000164485; CTA
EALTPHSSY

SEQ ID NO: 30487 - protein, 9 aa, Homo sapiens
  Table A; Target 30487; HLA-A*33:01; IL22RA2; ENSG00000164485; CTA
EALTPHSSY

SEQ ID NO: 30488 - protein, 9 aa, Homo sapiens
  Table A; Target 30488; HLA-A*33:03; IL22RA2; ENSG00000164485; CTA
EALTPHSSY

SEQ ID NO: 30489 - protein, 9 aa, Homo sapiens
  Table A; Target 30489; HLA-A*68:01; IL22RA2; ENSG00000164485; CTA
EALTPHSSY

SEQ ID NO: 30490 - protein, 9 aa, Homo sapiens
  Table A; Target 30490; HLA-B*08:01; IL22RA2; ENSG00000164485; CTA
EALTPHSSY

SEQ ID NO: 30491 - protein, 9 aa, Homo sapiens
  Table A; Target 30491; HLA-B*15:01; IL22RA2; ENSG00000164485; CTA
EALTPHSSY

SEQ ID NO: 30492 - protein, 9 aa, Homo sapiens
  Table A; Target 30492; HLA-B*15:03; IL22RA2; ENSG00000164485; CTA
EALTPHSSY

SEQ ID NO: 30493 - protein, 9 aa, Homo sapiens
  Table A; Target 30493; HLA-B*18:01; IL22RA2; ENSG00000164485; CTA
EALTPHSSY

SEQ ID NO: 30494 - protein, 9 aa, Homo sapiens
  Table A; Target 30494; HLA-B*35:01; IL22RA2; ENSG00000164485; CTA
EALTPHSSY

SEQ ID NO: 30495 - protein, 9 aa, Homo sapiens
  Table A; Target 30495; HLA-B*35:03; IL22RA2; ENSG00000164485; CTA
EALTPHSSY

SEQ ID NO: 30496 - protein, 9 aa, Homo sapiens
  Table A; Target 30496; HLA-B*39:01; IL22RA2; ENSG00000164485; CTA
EALTPHSSY

SEQ ID NO: 30497 - protein, 9 aa, Homo sapiens
  Table A; Target 30497; HLA-B*44:02; IL22RA2; ENSG00000164485; CTA
EALTPHSSY

SEQ ID NO: 30498 - protein, 9 aa, Homo sapiens
  Table A; Target 30498; HLA-B*44:03; IL22RA2; ENSG00000164485; CTA
EALTPHSSY

SEQ ID NO: 30499 - protein, 9 aa, Homo sapiens
  Table A; Target 30499; HLA-B*46:01; IL22RA2; ENSG00000164485; CTA
EALTPHSSY

SEQ ID NO: 30500 - protein, 9 aa, Homo sapiens
  Table A; Target 30500; HLA-B*51:01; IL22RA2; ENSG00000164485; CTA
EALTPHSSY

SEQ ID NO: 30501 - protein, 9 aa, Homo sapiens
  Table A; Target 30501; HLA-B*54:01; IL22RA2; ENSG00000164485; CTA
EALTPHSSY

SEQ ID NO: 30502 - protein, 9 aa, Homo sapiens
  Table A; Target 30502; HLA-B*55:01; IL22RA2; ENSG00000164485; CTA
EALTPHSSY

SEQ ID NO: 30503 - protein, 9 aa, Homo sapiens
  Table A; Target 30503; HLA-B*57:01; IL22RA2; ENSG00000164485; CTA
EALTPHSSY

SEQ ID NO: 30504 - protein, 9 aa, Homo sapiens
  Table A; Target 30504; HLA-B*58:01; IL22RA2; ENSG00000164485; CTA
EALTPHSSY

SEQ ID NO: 30505 - protein, 9 aa, Homo sapiens
  Table A; Target 30505; HLA-C*01:02; IL22RA2; ENSG00000164485; CTA
EALTPHSSY

SEQ ID NO: 30506 - protein, 9 aa, Homo sapiens
  Table A; Target 30506; HLA-C*02:02; IL22RA2; ENSG00000164485; CTA
EALTPHSSY

SEQ ID NO: 30507 - protein, 9 aa, Homo sapiens
  Table A; Target 30507; HLA-C*03:03; IL22RA2; ENSG00000164485; CTA
EALTPHSSY

SEQ ID NO: 30508 - protein, 9 aa, Homo sapiens
  Table A; Target 30508; HLA-C*03:04; IL22RA2; ENSG00000164485; CTA
EALTPHSSY

SEQ ID NO: 30509 - protein, 9 aa, Homo sapiens
  Table A; Target 30509; HLA-C*07:01; IL22RA2; ENSG00000164485; CTA
EALTPHSSY

SEQ ID NO: 30510 - protein, 9 aa, Homo sapiens
  Table A; Target 30510; HLA-C*07:04; IL22RA2; ENSG00000164485; CTA
EALTPHSSY

SEQ ID NO: 30511 - protein, 9 aa, Homo sapiens
  Table A; Target 30511; HLA-C*07:06; IL22RA2; ENSG00000164485; CTA
EALTPHSSY

SEQ ID NO: 30512 - protein, 9 aa, Homo sapiens
  Table A; Target 30512; HLA-C*12:03; IL22RA2; ENSG00000164485; CTA
EALTPHSSY

SEQ ID NO: 30513 - protein, 9 aa, Homo sapiens
  Table A; Target 30513; HLA-C*14:02; IL22RA2; ENSG00000164485; CTA
EALTPHSSY

SEQ ID NO: 30514 - protein, 9 aa, Homo sapiens
  Table A; Target 30514; HLA-C*16:01; IL22RA2; ENSG00000164485; CTA
EALTPHSSY

SEQ ID NO: 30515 - protein, 9 aa, Homo sapiens
  Table A; Target 30515; HLA-C*16:02; IL22RA2; ENSG00000164485; CTA
EALTPHSSY

SEQ ID NO: 30516 - protein, 9 aa, Homo sapiens
  Table A; Target 30516; HLA-C*16:04; IL22RA2; ENSG00000164485; CTA
EALTPHSSY

SEQ ID NO: 30517 - protein, 9 aa, Homo sapiens
  Table A; Target 30517; HLA-A*33:01; IL22RA2; ENSG00000164485; CTA
EDYYELLYR

SEQ ID NO: 30518 - protein, 10 aa, Homo sapiens
  Table A; Target 30518; HLA-A*68:02; IL22RA2; ENSG00000164485; CTA
EDYYELLYRV

SEQ ID NO: 30519 - protein, 11 aa, Homo sapiens
  Table A; Target 30519; HLA-A*01:01; IL22RA2; ENSG00000164485; CTA
EIEALTPHSSY

SEQ ID NO: 30520 - protein, 11 aa, Homo sapiens
  Table A; Target 30520; HLA-A*25:01; IL22RA2; ENSG00000164485; CTA
EIEALTPHSSY

SEQ ID NO: 30521 - protein, 11 aa, Homo sapiens
  Table A; Target 30521; HLA-A*26:01; IL22RA2; ENSG00000164485; CTA
EIEALTPHSSY

SEQ ID NO: 30522 - protein, 11 aa, Homo sapiens
  Table A; Target 30522; HLA-A*30:02; IL22RA2; ENSG00000164485; CTA
EIEALTPHSSY

SEQ ID NO: 30523 - protein, 11 aa, Homo sapiens
  Table A; Target 30523; HLA-C*07:01; IL22RA2; ENSG00000164485; CTA
EIEALTPHSSY

SEQ ID NO: 30524 - protein, 9 aa, Homo sapiens
  Table A; Target 30524; HLA-A*26:01; IL22RA2; ENSG00000164485; CTA
EIYQPMLDR

SEQ ID NO: 30525 - protein, 9 aa, Homo sapiens
  Table A; Target 30525; HLA-A*33:01; IL22RA2; ENSG00000164485; CTA
EIYQPMLDR

SEQ ID NO: 30526 - protein, 9 aa, Homo sapiens
  Table A; Target 30526; HLA-A*33:03; IL22RA2; ENSG00000164485; CTA
EIYQPMLDR

SEQ ID NO: 30527 - protein, 9 aa, Homo sapiens
  Table A; Target 30527; HLA-A*68:01; IL22RA2; ENSG00000164485; CTA
EIYQPMLDR

SEQ ID NO: 30528 - protein, 9 aa, Homo sapiens
  Table A; Target 30528; HLA-A*68:02; IL22RA2; ENSG00000164485; CTA
EIYQPMLDR

SEQ ID NO: 30529 - protein, 9 aa, Homo sapiens
  Table A; Target 30529; HLA-C*07:06; IL22RA2; ENSG00000164485; CTA
EIYQPMLDR

SEQ ID NO: 30530 - protein, 10 aa, Homo sapiens
  Table A; Target 30530; HLA-A*68:02; IL22RA2; ENSG00000164485; CTA
EIYQPMLDRR

SEQ ID NO: 30531 - protein, 9 aa, Homo sapiens
  Table A; Target 30531; HLA-B*15:03; IL22RA2; ENSG00000164485; CTA
EKNVSIEDY

SEQ ID NO: 30532 - protein, 9 aa, Homo sapiens
  Table A; Target 30532; HLA-A*02:04; IL22RA2; ENSG00000164485; CTA
ELLYRVFII

SEQ ID NO: 30533 - protein, 9 aa, Homo sapiens
  Table A; Target 30533; HLA-A*24:02; IL22RA2; ENSG00000164485; CTA
ELLYRVFII

SEQ ID NO: 30534 - protein, 9 aa, Homo sapiens
  Table A; Target 30534; HLA-B*51:01; IL22RA2; ENSG00000164485; CTA
EPYYGRVRA

SEQ ID NO: 30535 - protein, 9 aa, Homo sapiens
  Table A; Target 30535; HLA-B*54:01; IL22RA2; ENSG00000164485; CTA
EPYYGRVRA

SEQ ID NO: 30536 - protein, 9 aa, Homo sapiens
  Table A; Target 30536; HLA-B*55:01; IL22RA2; ENSG00000164485; CTA
EPYYGRVRA

SEQ ID NO: 30537 - protein, 9 aa, Homo sapiens
  Table A; Target 30537; HLA-B*56:01; IL22RA2; ENSG00000164485; CTA
EPYYGRVRA

SEQ ID NO: 30538 - protein, 10 aa, Homo sapiens
  Table A; Target 30538; HLA-B*54:01; IL22RA2; ENSG00000164485; CTA
EPYYGRVRAA

SEQ ID NO: 30539 - protein, 10 aa, Homo sapiens
  Table A; Target 30539; HLA-B*55:01; IL22RA2; ENSG00000164485; CTA
EPYYGRVRAA

SEQ ID NO: 30540 - protein, 10 aa, Homo sapiens
  Table A; Target 30540; HLA-B*56:01; IL22RA2; ENSG00000164485; CTA
EPYYGRVRAA

SEQ ID NO: 30541 - protein, 10 aa, Homo sapiens
  Table A; Target 30541; HLA-A*33:03; IL22RA2; ENSG00000164485; CTA
EQKVYEGAHR

SEQ ID NO: 30542 - protein, 10 aa, Homo sapiens
  Table A; Target 30542; HLA-A*23:01; IL22RA2; ENSG00000164485; CTA
ESLKPQRVQF

SEQ ID NO: 30543 - protein, 10 aa, Homo sapiens
  Table A; Target 30543; HLA-A*24:02; IL22RA2; ENSG00000164485; CTA
ESLKPQRVQF

SEQ ID NO: 30544 - protein, 10 aa, Homo sapiens
  Table A; Target 30544; HLA-A*33:03; IL22RA2; ENSG00000164485; CTA
ESLKPQRVQF

SEQ ID NO: 30545 - protein, 10 aa, Homo sapiens
  Table A; Target 30545; HLA-B*57:01; IL22RA2; ENSG00000164485; CTA
ESLKPQRVQF

SEQ ID NO: 30546 - protein, 9 aa, Homo sapiens
  Table A; Target 30546; HLA-A*01:01; IL22RA2; ENSG00000164485; CTA
ETKIDPPVM

SEQ ID NO: 30547 - protein, 9 aa, Homo sapiens
  Table A; Target 30547; HLA-A*25:01; IL22RA2; ENSG00000164485; CTA
ETKIDPPVM

SEQ ID NO: 30548 - protein, 9 aa, Homo sapiens
  Table A; Target 30548; HLA-A*26:01; IL22RA2; ENSG00000164485; CTA
ETKIDPPVM

SEQ ID NO: 30549 - protein, 9 aa, Homo sapiens
  Table A; Target 30549; HLA-A*33:01; IL22RA2; ENSG00000164485; CTA
ETKIDPPVM

SEQ ID NO: 30550 - protein, 9 aa, Homo sapiens
  Table A; Target 30550; HLA-A*33:03; IL22RA2; ENSG00000164485; CTA
ETKIDPPVM

SEQ ID NO: 30551 - protein, 9 aa, Homo sapiens
  Table A; Target 30551; HLA-A*68:01; IL22RA2; ENSG00000164485; CTA
ETKIDPPVM

SEQ ID NO: 30552 - protein, 9 aa, Homo sapiens
  Table A; Target 30552; HLA-B*39:01; IL22RA2; ENSG00000164485; CTA
ETKIDPPVM

SEQ ID NO: 30553 - protein, 9 aa, Homo sapiens
  Table A; Target 30553; HLA-B*40:02; IL22RA2; ENSG00000164485; CTA
ETKIDPPVM

SEQ ID NO: 30554 - protein, 9 aa, Homo sapiens
  Table A; Target 30554; HLA-B*57:01; IL22RA2; ENSG00000164485; CTA
ETKIDPPVM

SEQ ID NO: 30555 - protein, 9 aa, Homo sapiens
  Table A; Target 30555; HLA-A*01:01; IL22RA2; ENSG00000164485; CTA
ETSDIQEPY

SEQ ID NO: 30556 - protein, 9 aa, Homo sapiens
  Table A; Target 30556; HLA-A*11:01; IL22RA2; ENSG00000164485; CTA
ETSDIQEPY

SEQ ID NO: 30557 - protein, 9 aa, Homo sapiens
  Table A; Target 30557; HLA-A*25:01; IL22RA2; ENSG00000164485; CTA
ETSDIQEPY

SEQ ID NO: 30558 - protein, 9 aa, Homo sapiens
  Table A; Target 30558; HLA-A*26:01; IL22RA2; ENSG00000164485; CTA
ETSDIQEPY

SEQ ID NO: 30559 - protein, 9 aa, Homo sapiens
  Table A; Target 30559; HLA-A*29:02; IL22RA2; ENSG00000164485; CTA
ETSDIQEPY

SEQ ID NO: 30560 - protein, 9 aa, Homo sapiens
  Table A; Target 30560; HLA-A*30:02; IL22RA2; ENSG00000164485; CTA
ETSDIQEPY

SEQ ID NO: 30561 - protein, 9 aa, Homo sapiens
  Table A; Target 30561; HLA-A*33:01; IL22RA2; ENSG00000164485; CTA
ETSDIQEPY

SEQ ID NO: 30562 - protein, 9 aa, Homo sapiens
  Table A; Target 30562; HLA-A*33:03; IL22RA2; ENSG00000164485; CTA
ETSDIQEPY

SEQ ID NO: 30563 - protein, 9 aa, Homo sapiens
  Table A; Target 30563; HLA-A*68:01; IL22RA2; ENSG00000164485; CTA
ETSDIQEPY

SEQ ID NO: 30564 - protein, 9 aa, Homo sapiens
  Table A; Target 30564; HLA-A*68:02; IL22RA2; ENSG00000164485; CTA
ETSDIQEPY

SEQ ID NO: 30565 - protein, 9 aa, Homo sapiens
  Table A; Target 30565; HLA-B*35:01; IL22RA2; ENSG00000164485; CTA
ETSDIQEPY

SEQ ID NO: 30566 - protein, 9 aa, Homo sapiens
  Table A; Target 30566; HLA-C*07:06; IL22RA2; ENSG00000164485; CTA
ETSDIQEPY

SEQ ID NO: 30567 - protein, 10 aa, Homo sapiens
  Table A; Target 30567; HLA-A*01:01; IL22RA2; ENSG00000164485; CTA
ETSDIQEPYY

SEQ ID NO: 30568 - protein, 10 aa, Homo sapiens
  Table A; Target 30568; HLA-A*25:01; IL22RA2; ENSG00000164485; CTA
ETSDIQEPYY

SEQ ID NO: 30569 - protein, 10 aa, Homo sapiens
  Table A; Target 30569; HLA-A*26:01; IL22RA2; ENSG00000164485; CTA
ETSDIQEPYY

SEQ ID NO: 30570 - protein, 10 aa, Homo sapiens
  Table A; Target 30570; HLA-A*29:02; IL22RA2; ENSG00000164485; CTA
ETSDIQEPYY

SEQ ID NO: 30571 - protein, 10 aa, Homo sapiens
  Table A; Target 30571; HLA-A*30:02; IL22RA2; ENSG00000164485; CTA
ETSDIQEPYY

SEQ ID NO: 30572 - protein, 10 aa, Homo sapiens
  Table A; Target 30572; HLA-A*33:03; IL22RA2; ENSG00000164485; CTA
ETSDIQEPYY

SEQ ID NO: 30573 - protein, 10 aa, Homo sapiens
  Table A; Target 30573; HLA-A*68:01; IL22RA2; ENSG00000164485; CTA
ETSDIQEPYY

SEQ ID NO: 30574 - protein, 10 aa, Homo sapiens
  Table A; Target 30574; HLA-A*68:02; IL22RA2; ENSG00000164485; CTA
ETSDIQEPYY

SEQ ID NO: 30575 - protein, 8 aa, Homo sapiens
  Table A; Target 30575; HLA-C*14:02; IL22RA2; ENSG00000164485; CTA
FFLTGVAG

SEQ ID NO: 30576 - protein, 10 aa, Homo sapiens
  Table A; Target 30576; HLA-A*29:02; IL22RA2; ENSG00000164485; CTA
FFLTGVAGTQ

SEQ ID NO: 30577 - protein, 11 aa, Homo sapiens
  Table A; Target 30577; HLA-C*14:02; IL22RA2; ENSG00000164485; CTA
FFLTGVAGTQS

SEQ ID NO: 30578 - protein, 9 aa, Homo sapiens
  Table A; Target 30578; HLA-A*03:01; IL22RA2; ENSG00000164485; CTA
FIINNSLEK

SEQ ID NO: 30579 - protein, 9 aa, Homo sapiens
  Table A; Target 30579; HLA-A*11:01; IL22RA2; ENSG00000164485; CTA
FIINNSLEK

SEQ ID NO: 30580 - protein, 9 aa, Homo sapiens
  Table A; Target 30580; HLA-B*27:02; IL22RA2; ENSG00000164485; CTA
FIINNSLEK

SEQ ID NO: 30581 - protein, 9 aa, Homo sapiens
  Table A; Target 30581; HLA-B*46:01; IL22RA2; ENSG00000164485; CTA
FIINNSLEK

SEQ ID NO: 30582 - protein, 9 aa, Homo sapiens
  Table A; Target 30582; HLA-C*02:02; IL22RA2; ENSG00000164485; CTA
FIINNSLEK

SEQ ID NO: 30583 - protein, 9 aa, Homo sapiens
  Table A; Target 30583; HLA-C*07:06; IL22RA2; ENSG00000164485; CTA
FIINNSLEK

SEQ ID NO: 30584 - protein, 10 aa, Homo sapiens
  Table A; Target 30584; HLA-A*02:01; IL22RA2; ENSG00000164485; CTA
FLISFFLTGV

SEQ ID NO: 30585 - protein, 10 aa, Homo sapiens
  Table A; Target 30585; HLA-A*02:03; IL22RA2; ENSG00000164485; CTA
FLISFFLTGV

SEQ ID NO: 30586 - protein, 10 aa, Homo sapiens
  Table A; Target 30586; HLA-A*02:04; IL22RA2; ENSG00000164485; CTA
FLISFFLTGV

SEQ ID NO: 30587 - protein, 10 aa, Homo sapiens
  Table A; Target 30587; HLA-A*02:07; IL22RA2; ENSG00000164485; CTA
FLISFFLTGV

SEQ ID NO: 30588 - protein, 9 aa, Homo sapiens
  Table A; Target 30588; HLA-A*26:01; IL22RA2; ENSG00000164485; CTA
FLTGVAGTQ

SEQ ID NO: 30589 - protein, 9 aa, Homo sapiens
  Table A; Target 30589; HLA-B*39:01; IL22RA2; ENSG00000164485; CTA
FLTGVAGTQ

SEQ ID NO: 30590 - protein, 9 aa, Homo sapiens
  Table A; Target 30590; HLA-C*06:02; IL22RA2; ENSG00000164485; CTA
FLTGVAGTQ

SEQ ID NO: 30591 - protein, 9 aa, Homo sapiens
  Table A; Target 30591; HLA-C*07:01; IL22RA2; ENSG00000164485; CTA
FLTGVAGTQ

SEQ ID NO: 30592 - protein, 9 aa, Homo sapiens
  Table A; Target 30592; HLA-C*07:02; IL22RA2; ENSG00000164485; CTA
FLTGVAGTQ

SEQ ID NO: 30593 - protein, 9 aa, Homo sapiens
  Table A; Target 30593; HLA-C*07:04; IL22RA2; ENSG00000164485; CTA
FLTGVAGTQ

SEQ ID NO: 30594 - protein, 9 aa, Homo sapiens
  Table A; Target 30594; HLA-C*12:03; IL22RA2; ENSG00000164485; CTA
FLTGVAGTQ

SEQ ID NO: 30595 - protein, 9 aa, Homo sapiens
  Table A; Target 30595; HLA-C*16:02; IL22RA2; ENSG00000164485; CTA
FLTGVAGTQ

SEQ ID NO: 30596 - protein, 10 aa, Homo sapiens
  Table A; Target 30596; HLA-B*39:01; IL22RA2; ENSG00000164485; CTA
FLTGVAGTQS

SEQ ID NO: 30597 - protein, 10 aa, Homo sapiens
  Table A; Target 30597; HLA-C*07:04; IL22RA2; ENSG00000164485; CTA
FLTGVAGTQS

SEQ ID NO: 30598 - protein, 9 aa, Homo sapiens
  Table A; Target 30598; HLA-A*24:02; IL22RA2; ENSG00000164485; CTA
FQSRNFHNI

SEQ ID NO: 30599 - protein, 9 aa, Homo sapiens
  Table A; Target 30599; HLA-A*02:07; IL22RA2; ENSG00000164485; CTA
FTPWWETKI

SEQ ID NO: 30600 - protein, 9 aa, Homo sapiens
  Table A; Target 30600; HLA-A*68:02; IL22RA2; ENSG00000164485; CTA
FTPWWETKI

SEQ ID NO: 30601 - protein, 8 aa, Homo sapiens
  Table A; Target 30601; HLA-B*08:01; IL22RA2; ENSG00000164485; CTA
FVQYKIMF

SEQ ID NO: 30602 - protein, 10 aa, Homo sapiens
  Table A; Target 30602; HLA-A*29:02; IL22RA2; ENSG00000164485; CTA
GNSSVYFVQY

SEQ ID NO: 30603 - protein, 10 aa, Homo sapiens
  Table A; Target 30603; HLA-A*30:02; IL22RA2; ENSG00000164485; CTA
GNSSVYFVQY

SEQ ID NO: 30604 - protein, 11 aa, Homo sapiens
  Table A; Target 30604; HLA-C*16:04; IL22RA2; ENSG00000164485; CTA
GRALTGNSSVY

SEQ ID NO: 30605 - protein, 11 aa, Homo sapiens
  Table A; Target 30605; HLA-A*30:02; IL22RA2; ENSG00000164485; CTA
GRVRAASAGSY

SEQ ID NO: 30606 - protein, 11 aa, Homo sapiens
  Table A; Target 30606; HLA-B*27:02; IL22RA2; ENSG00000164485; CTA
GRVRAASAGSY

SEQ ID NO: 30607 - protein, 11 aa, Homo sapiens
  Table A; Target 30607; HLA-C*16:04; IL22RA2; ENSG00000164485; CTA
GRVRAASAGSY

SEQ ID NO: 30608 - protein, 9 aa, Homo sapiens
  Table A; Target 30608; HLA-A*32:01; IL22RA2; ENSG00000164485; CTA
GTQSTHESL

SEQ ID NO: 30609 - protein, 9 aa, Homo sapiens
  Table A; Target 30609; HLA-B*58:01; IL22RA2; ENSG00000164485; CTA
GTQSTHESL

SEQ ID NO: 30610 - protein, 9 aa, Homo sapiens
  Table A; Target 30610; HLA-C*01:02; IL22RA2; ENSG00000164485; CTA
GTQSTHESL

SEQ ID NO: 30611 - protein, 9 aa, Homo sapiens
  Table A; Target 30611; HLA-C*14:02; IL22RA2; ENSG00000164485; CTA
GTQSTHESL

SEQ ID NO: 30612 - protein, 9 aa, Homo sapiens
  Table A; Target 30612; HLA-C*16:01; IL22RA2; ENSG00000164485; CTA
GTQSTHESL

SEQ ID NO: 30613 - protein, 9 aa, Homo sapiens
  Table A; Target 30613; HLA-C*16:02; IL22RA2; ENSG00000164485; CTA
GTQSTHESL

SEQ ID NO: 30614 - protein, 10 aa, Homo sapiens
  Table A; Target 30614; HLA-A*03:01; IL22RA2; ENSG00000164485; CTA
GTQSTHESLK

SEQ ID NO: 30615 - protein, 10 aa, Homo sapiens
  Table A; Target 30615; HLA-A*03:02; IL22RA2; ENSG00000164485; CTA
GTQSTHESLK

SEQ ID NO: 30616 - protein, 10 aa, Homo sapiens
  Table A; Target 30616; HLA-A*11:01; IL22RA2; ENSG00000164485; CTA
GTQSTHESLK

SEQ ID NO: 30617 - protein, 9 aa, Homo sapiens
  Table A; Target 30617; HLA-B*15:01; IL22RA2; ENSG00000164485; CTA
GVAGTQSTH

SEQ ID NO: 30618 - protein, 8 aa, Homo sapiens
  Table A; Target 30618; HLA-A*33:03; IL22RA2; ENSG00000164485; CTA
HAPNLPYR

SEQ ID NO: 30619 - protein, 8 aa, Homo sapiens
  Table A; Target 30619; HLA-B*51:01; IL22RA2; ENSG00000164485; CTA
HAPNLPYR

SEQ ID NO: 30620 - protein, 9 aa, Homo sapiens
  Table A; Target 30620; HLA-A*29:02; IL22RA2; ENSG00000164485; CTA
HAPNLPYRY

SEQ ID NO: 30621 - protein, 9 aa, Homo sapiens
  Table A; Target 30621; HLA-A*30:02; IL22RA2; ENSG00000164485; CTA
HAPNLPYRY

SEQ ID NO: 30622 - protein, 9 aa, Homo sapiens
  Table A; Target 30622; HLA-B*35:01; IL22RA2; ENSG00000164485; CTA
HAPNLPYRY

SEQ ID NO: 30623 - protein, 9 aa, Homo sapiens
  Table A; Target 30623; HLA-B*51:01; IL22RA2; ENSG00000164485; CTA
HAPNLPYRY

SEQ ID NO: 30624 - protein, 9 aa, Homo sapiens
  Table A; Target 30624; HLA-C*02:02; IL22RA2; ENSG00000164485; CTA
HAPNLPYRY

SEQ ID NO: 30625 - protein, 9 aa, Homo sapiens
  Table A; Target 30625; HLA-B*37:01; IL22RA2; ENSG00000164485; CTA
HESLKPQRV

SEQ ID NO: 30626 - protein, 9 aa, Homo sapiens
  Table A; Target 30626; HLA-B*44:03; IL22RA2; ENSG00000164485; CTA
HESLKPQRV

SEQ ID NO: 30627 - protein, 9 aa, Homo sapiens
  Table A; Target 30627; HLA-B*49:01; IL22RA2; ENSG00000164485; CTA
HESLKPQRV

SEQ ID NO: 30628 - protein, 9 aa, Homo sapiens
  Table A; Target 30628; HLA-B*27:02; IL22RA2; ENSG00000164485; CTA
HRAVEIEAL

SEQ ID NO: 30629 - protein, 9 aa, Homo sapiens
  Table A; Target 30629; HLA-B*27:05; IL22RA2; ENSG00000164485; CTA
HRAVEIEAL

SEQ ID NO: 30630 - protein, 9 aa, Homo sapiens
  Table A; Target 30630; HLA-B*38:01; IL22RA2; ENSG00000164485; CTA
HRAVEIEAL

SEQ ID NO: 30631 - protein, 9 aa, Homo sapiens
  Table A; Target 30631; HLA-B*39:01; IL22RA2; ENSG00000164485; CTA
HRAVEIEAL

SEQ ID NO: 30632 - protein, 8 aa, Homo sapiens
  Table A; Target 30632; HLA-B*37:01; IL22RA2; ENSG00000164485; CTA
IDPPVMNI

SEQ ID NO: 30633 - protein, 8 aa, Homo sapiens
  Table A; Target 30633; HLA-B*49:01; IL22RA2; ENSG00000164485; CTA
IDPPVMNI

SEQ ID NO: 30634 - protein, 8 aa, Homo sapiens
  Table A; Target 30634; HLA-B*51:01; IL22RA2; ENSG00000164485; CTA
IDPPVMNI

SEQ ID NO: 30635 - protein, 8 aa, Homo sapiens
  Table A; Target 30635; HLA-C*06:02; IL22RA2; ENSG00000164485; CTA
IDPPVMNI

SEQ ID NO: 30636 - protein, 8 aa, Homo sapiens
  Table A; Target 30636; HLA-C*12:03; IL22RA2; ENSG00000164485; CTA
IDPPVMNI

SEQ ID NO: 30637 - protein, 11 aa, Homo sapiens
  Table A; Target 30637; HLA-A*02:07; IL22RA2; ENSG00000164485; CTA
IDPPVMNITQV

SEQ ID NO: 30638 - protein, 10 aa, Homo sapiens
  Table A; Target 30638; HLA-A*01:01; IL22RA2; ENSG00000164485; CTA
IEALTPHSSY

SEQ ID NO: 30639 - protein, 10 aa, Homo sapiens
  Table A; Target 30639; HLA-A*25:01; IL22RA2; ENSG00000164485; CTA
IEALTPHSSY

SEQ ID NO: 30640 - protein, 10 aa, Homo sapiens
  Table A; Target 30640; HLA-A*26:01; IL22RA2; ENSG00000164485; CTA
IEALTPHSSY

SEQ ID NO: 30641 - protein, 10 aa, Homo sapiens
  Table A; Target 30641; HLA-A*30:01; IL22RA2; ENSG00000164485; CTA
IEALTPHSSY

SEQ ID NO: 30642 - protein, 10 aa, Homo sapiens
  Table A; Target 30642; HLA-A*30:02; IL22RA2; ENSG00000164485; CTA
IEALTPHSSY

SEQ ID NO: 30643 - protein, 10 aa, Homo sapiens
  Table A; Target 30643; HLA-B*15:01; IL22RA2; ENSG00000164485; CTA
IEALTPHSSY

SEQ ID NO: 30644 - protein, 10 aa, Homo sapiens
  Table A; Target 30644; HLA-B*15:03; IL22RA2; ENSG00000164485; CTA
IEALTPHSSY

SEQ ID NO: 30645 - protein, 10 aa, Homo sapiens
  Table A; Target 30645; HLA-B*18:01; IL22RA2; ENSG00000164485; CTA
IEALTPHSSY

SEQ ID NO: 30646 - protein, 10 aa, Homo sapiens
  Table A; Target 30646; HLA-B*27:02; IL22RA2; ENSG00000164485; CTA
IEALTPHSSY

SEQ ID NO: 30647 - protein, 10 aa, Homo sapiens
  Table A; Target 30647; HLA-B*37:01; IL22RA2; ENSG00000164485; CTA
IEALTPHSSY

SEQ ID NO: 30648 - protein, 10 aa, Homo sapiens
  Table A; Target 30648; HLA-B*40:01; IL22RA2; ENSG00000164485; CTA
IEALTPHSSY

SEQ ID NO: 30649 - protein, 10 aa, Homo sapiens
  Table A; Target 30649; HLA-B*44:02; IL22RA2; ENSG00000164485; CTA
IEALTPHSSY

SEQ ID NO: 30650 - protein, 10 aa, Homo sapiens
  Table A; Target 30650; HLA-B*44:03; IL22RA2; ENSG00000164485; CTA
IEALTPHSSY

SEQ ID NO: 30651 - protein, 10 aa, Homo sapiens
  Table A; Target 30651; HLA-B*49:01; IL22RA2; ENSG00000164485; CTA
IEALTPHSSY

SEQ ID NO: 30652 - protein, 10 aa, Homo sapiens
  Table A; Target 30652; HLA-C*02:02; IL22RA2; ENSG00000164485; CTA
IEALTPHSSY

SEQ ID NO: 30653 - protein, 10 aa, Homo sapiens
  Table A; Target 30653; HLA-C*14:02; IL22RA2; ENSG00000164485; CTA
IEALTPHSSY

SEQ ID NO: 30654 - protein, 10 aa, Homo sapiens
  Table A; Target 30654; HLA-C*16:01; IL22RA2; ENSG00000164485; CTA
IEALTPHSSY

SEQ ID NO: 30655 - protein, 10 aa, Homo sapiens
  Table A; Target 30655; HLA-C*16:04; IL22RA2; ENSG00000164485; CTA
IEALTPHSSY

SEQ ID NO: 30656 - protein, 9 aa, Homo sapiens
  Table A; Target 30656; HLA-A*01:01; IL22RA2; ENSG00000164485; CTA
IEDYYELLY

SEQ ID NO: 30657 - protein, 9 aa, Homo sapiens
  Table A; Target 30657; HLA-B*18:01; IL22RA2; ENSG00000164485; CTA
IEDYYELLY

SEQ ID NO: 30658 - protein, 9 aa, Homo sapiens
  Table A; Target 30658; HLA-B*44:02; IL22RA2; ENSG00000164485; CTA
IEDYYELLY

SEQ ID NO: 30659 - protein, 9 aa, Homo sapiens
  Table A; Target 30659; HLA-B*44:03; IL22RA2; ENSG00000164485; CTA
IEDYYELLY

SEQ ID NO: 30660 - protein, 8 aa, Homo sapiens
  Table A; Target 30660; HLA-A*03:01; IL22RA2; ENSG00000164485; CTA
IINNSLEK

SEQ ID NO: 30661 - protein, 8 aa, Homo sapiens
  Table A; Target 30661; HLA-A*03:02; IL22RA2; ENSG00000164485; CTA
IINNSLEK

SEQ ID NO: 30662 - protein, 8 aa, Homo sapiens
  Table A; Target 30662; HLA-B*27:02; IL22RA2; ENSG00000164485; CTA
IINNSLEK

SEQ ID NO: 30663 - protein, 11 aa, Homo sapiens
  Table A; Target 30663; HLA-A*03:02; IL22RA2; ENSG00000164485; CTA
IINNSLEKEQK

SEQ ID NO: 30664 - protein, 9 aa, Homo sapiens
  Table A; Target 30664; HLA-A*01:01; IL22RA2; ENSG00000164485; CTA
ILHAPNLPY

SEQ ID NO: 30665 - protein, 9 aa, Homo sapiens
  Table A; Target 30665; HLA-A*03:01; IL22RA2; ENSG00000164485; CTA
ILHAPNLPY

SEQ ID NO: 30666 - protein, 9 aa, Homo sapiens
  Table A; Target 30666; HLA-A*29:02; IL22RA2; ENSG00000164485; CTA
ILHAPNLPY

SEQ ID NO: 30667 - protein, 9 aa, Homo sapiens
  Table A; Target 30667; HLA-A*30:02; IL22RA2; ENSG00000164485; CTA
ILHAPNLPY

SEQ ID NO: 30668 - protein, 9 aa, Homo sapiens
  Table A; Target 30668; HLA-B*15:01; IL22RA2; ENSG00000164485; CTA
ILHAPNLPY

SEQ ID NO: 30669 - protein, 9 aa, Homo sapiens
  Table A; Target 30669; HLA-B*46:01; IL22RA2; ENSG00000164485; CTA
ILHAPNLPY

SEQ ID NO: 30670 - protein, 9 aa, Homo sapiens
  Table A; Target 30670; HLA-C*07:04; IL22RA2; ENSG00000164485; CTA
ILHAPNLPY

SEQ ID NO: 30671 - protein, 11 aa, Homo sapiens
  Table A; Target 30671; HLA-A*29:02; IL22RA2; ENSG00000164485; CTA
ILHAPNLPYRY

SEQ ID NO: 30672 - protein, 11 aa, Homo sapiens
  Table A; Target 30672; HLA-A*30:02; IL22RA2; ENSG00000164485; CTA
ILHAPNLPYRY

SEQ ID NO: 30673 - protein, 10 aa, Homo sapiens
  Table A; Target 30673; HLA-B*27:02; IL22RA2; ENSG00000164485; CTA
INNSLEKEQK

SEQ ID NO: 30674 - protein, 8 aa, Homo sapiens
  Table A; Target 30674; HLA-C*01:02; IL22RA2; ENSG00000164485; CTA
ITQVNGSL

SEQ ID NO: 30675 - protein, 8 aa, Homo sapiens
  Table A; Target 30675; HLA-C*03:04; IL22RA2; ENSG00000164485; CTA
ITQVNGSL

SEQ ID NO: 30676 - protein, 9 aa, Homo sapiens
  Table A; Target 30676; HLA-C*01:02; IL22RA2; ENSG00000164485; CTA
ITQVNGSLL

SEQ ID NO: 30677 - protein, 9 aa, Homo sapiens
  Table A; Target 30677; HLA-C*03:03; IL22RA2; ENSG00000164485; CTA
ITQVNGSLL

SEQ ID NO: 30678 - protein, 9 aa, Homo sapiens
  Table A; Target 30678; HLA-C*03:04; IL22RA2; ENSG00000164485; CTA
ITQVNGSLL

SEQ ID NO: 30679 - protein, 9 aa, Homo sapiens
  Table A; Target 30679; HLA-C*14:02; IL22RA2; ENSG00000164485; CTA
ITQVNGSLL

SEQ ID NO: 30680 - protein, 9 aa, Homo sapiens
  Table A; Target 30680; HLA-A*24:02; IL22RA2; ENSG00000164485; CTA
IYQPMLDRR

SEQ ID NO: 30681 - protein, 9 aa, Homo sapiens
  Table A; Target 30681; HLA-A*31:01; IL22RA2; ENSG00000164485; CTA
IYQPMLDRR

SEQ ID NO: 30682 - protein, 10 aa, Homo sapiens
  Table A; Target 30682; HLA-B*40:01; IL22RA2; ENSG00000164485; CTA
KEDCWGTQEL

SEQ ID NO: 30683 - protein, 10 aa, Homo sapiens
  Table A; Target 30683; HLA-A*30:02; IL22RA2; ENSG00000164485; CTA
KEKNVSIEDY

SEQ ID NO: 30684 - protein, 10 aa, Homo sapiens
  Table A; Target 30684; HLA-B*44:02; IL22RA2; ENSG00000164485; CTA
KEKNVSIEDY

SEQ ID NO: 30685 - protein, 10 aa, Homo sapiens
  Table A; Target 30685; HLA-B*44:03; IL22RA2; ENSG00000164485; CTA
KEKNVSIEDY

SEQ ID NO: 30686 - protein, 11 aa, Homo sapiens
  Table A; Target 30686; HLA-A*30:02; IL22RA2; ENSG00000164485; CTA
KEKNVSIEDYY

SEQ ID NO: 30687 - protein, 11 aa, Homo sapiens
  Table A; Target 30687; HLA-B*44:02; IL22RA2; ENSG00000164485; CTA
KEKNVSIEDYY

SEQ ID NO: 30688 - protein, 11 aa, Homo sapiens
  Table A; Target 30688; HLA-B*44:03; IL22RA2; ENSG00000164485; CTA
KEKNVSIEDYY

SEQ ID NO: 30689 - protein, 11 aa, Homo sapiens
  Table A; Target 30689; HLA-C*16:04; IL22RA2; ENSG00000164485; CTA
KEKNVSIEDYY

SEQ ID NO: 30690 - protein, 9 aa, Homo sapiens
  Table A; Target 30690; HLA-B*40:02; IL22RA2; ENSG00000164485; CTA
KEQKVYEGA

SEQ ID NO: 30691 - protein, 9 aa, Homo sapiens
  Table A; Target 30691; HLA-A*01:01; IL22RA2; ENSG00000164485; CTA
KIDPPVMNI

SEQ ID NO: 30692 - protein, 9 aa, Homo sapiens
  Table A; Target 30692; HLA-A*02:01; IL22RA2; ENSG00000164485; CTA
KIDPPVMNI

SEQ ID NO: 30693 - protein, 9 aa, Homo sapiens
  Table A; Target 30693; HLA-A*02:03; IL22RA2; ENSG00000164485; CTA
KIDPPVMNI

SEQ ID NO: 30694 - protein, 9 aa, Homo sapiens
  Table A; Target 30694; HLA-A*02:04; IL22RA2; ENSG00000164485; CTA
KIDPPVMNI

SEQ ID NO: 30695 - protein, 9 aa, Homo sapiens
  Table A; Target 30695; HLA-A*02:07; IL22RA2; ENSG00000164485; CTA
KIDPPVMNI

SEQ ID NO: 30696 - protein, 9 aa, Homo sapiens
  Table A; Target 30696; HLA-A*03:01; IL22RA2; ENSG00000164485; CTA
KIDPPVMNI

SEQ ID NO: 30697 - protein, 9 aa, Homo sapiens
  Table A; Target 30697; HLA-A*03:02; IL22RA2; ENSG00000164485; CTA
KIDPPVMNI

SEQ ID NO: 30698 - protein, 9 aa, Homo sapiens
  Table A; Target 30698; HLA-A*30:01; IL22RA2; ENSG00000164485; CTA
KIDPPVMNI

SEQ ID NO: 30699 - protein, 9 aa, Homo sapiens
  Table A; Target 30699; HLA-A*31:01; IL22RA2; ENSG00000164485; CTA
KIDPPVMNI

SEQ ID NO: 30700 - protein, 9 aa, Homo sapiens
  Table A; Target 30700; HLA-A*32:01; IL22RA2; ENSG00000164485; CTA
KIDPPVMNI

SEQ ID NO: 30701 - protein, 9 aa, Homo sapiens
  Table A; Target 30701; HLA-B*13:02; IL22RA2; ENSG00000164485; CTA
KIDPPVMNI

SEQ ID NO: 30702 - protein, 9 aa, Homo sapiens
  Table A; Target 30702; HLA-B*37:01; IL22RA2; ENSG00000164485; CTA
KIDPPVMNI

SEQ ID NO: 30703 - protein, 9 aa, Homo sapiens
  Table A; Target 30703; HLA-B*38:01; IL22RA2; ENSG00000164485; CTA
KIDPPVMNI

SEQ ID NO: 30704 - protein, 9 aa, Homo sapiens
  Table A; Target 30704; HLA-B*49:01; IL22RA2; ENSG00000164485; CTA
KIDPPVMNI

SEQ ID NO: 30705 - protein, 9 aa, Homo sapiens
  Table A; Target 30705; HLA-B*58:01; IL22RA2; ENSG00000164485; CTA
KIDPPVMNI

SEQ ID NO: 30706 - protein, 9 aa, Homo sapiens
  Table A; Target 30706; HLA-C*04:01; IL22RA2; ENSG00000164485; CTA
KIDPPVMNI

SEQ ID NO: 30707 - protein, 9 aa, Homo sapiens
  Table A; Target 30707; HLA-C*05:01; IL22RA2; ENSG00000164485; CTA
KIDPPVMNI

SEQ ID NO: 30708 - protein, 9 aa, Homo sapiens
  Table A; Target 30708; HLA-A*29:02; IL22RA2; ENSG00000164485; CTA
KNVSIEDYY

SEQ ID NO: 30709 - protein, 9 aa, Homo sapiens
  Table A; Target 30709; HLA-A*30:02; IL22RA2; ENSG00000164485; CTA
KNVSIEDYY

SEQ ID NO: 30710 - protein, 10 aa, Homo sapiens
  Table A; Target 30710; HLA-B*56:01; IL22RA2; ENSG00000164485; CTA
KPQRVQFQSR

SEQ ID NO: 30711 - protein, 8 aa, Homo sapiens
  Table A; Target 30711; HLA-A*03:01; IL22RA2; ENSG00000164485; CTA
KVYEGAHR

SEQ ID NO: 30712 - protein, 8 aa, Homo sapiens
  Table A; Target 30712; HLA-A*31:01; IL22RA2; ENSG00000164485; CTA
KVYEGAHR

SEQ ID NO: 30713 - protein, 9 aa, Homo sapiens
  Table A; Target 30713; HLA-B*55:01; IL22RA2; ENSG00000164485; CTA
KVYEGAHRA

SEQ ID NO: 30714 - protein, 10 aa, Homo sapiens
  Table A; Target 30714; HLA-A*02:01; IL22RA2; ENSG00000164485; CTA
KVYEGAHRAV

SEQ ID NO: 30715 - protein, 10 aa, Homo sapiens
  Table A; Target 30715; HLA-A*02:03; IL22RA2; ENSG00000164485; CTA
KVYEGAHRAV

SEQ ID NO: 30716 - protein, 10 aa, Homo sapiens
  Table A; Target 30716; HLA-A*03:01; IL22RA2; ENSG00000164485; CTA
KVYEGAHRAV

SEQ ID NO: 30717 - protein, 10 aa, Homo sapiens
  Table A; Target 30717; HLA-C*06:02; IL22RA2; ENSG00000164485; CTA
KVYEGAHRAV

SEQ ID NO: 30718 - protein, 9 aa, Homo sapiens
  Table A; Target 30718; HLA-B*57:01; IL22RA2; ENSG00000164485; CTA
LAKYGQRQW

SEQ ID NO: 30719 - protein, 8 aa, Homo sapiens
  Table A; Target 30719; HLA-B*15:03; IL22RA2; ENSG00000164485; CTA
LEKEQKVY

SEQ ID NO: 30720 - protein, 8 aa, Homo sapiens
  Table A; Target 30720; HLA-B*18:01; IL22RA2; ENSG00000164485; CTA
LEKEQKVY

SEQ ID NO: 30721 - protein, 10 aa, Homo sapiens
  Table A; Target 30721; HLA-A*29:02; IL22RA2; ENSG00000164485; CTA
LHAPNLPYRY

SEQ ID NO: 30722 - protein, 10 aa, Homo sapiens
  Table A; Target 30722; HLA-B*57:01; IL22RA2; ENSG00000164485; CTA
LHAPNLPYRY

SEQ ID NO: 30723 - protein, 9 aa, Homo sapiens
  Table A; Target 30723; HLA-A*02:01; IL22RA2; ENSG00000164485; CTA
LISFFLTGV

SEQ ID NO: 30724 - protein, 9 aa, Homo sapiens
  Table A; Target 30724; HLA-A*02:03; IL22RA2; ENSG00000164485; CTA
LISFFLTGV

SEQ ID NO: 30725 - protein, 9 aa, Homo sapiens
  Table A; Target 30725; HLA-A*02:04; IL22RA2; ENSG00000164485; CTA
LISFFLTGV

SEQ ID NO: 30726 - protein, 9 aa, Homo sapiens
  Table A; Target 30726; HLA-A*02:07; IL22RA2; ENSG00000164485; CTA
LISFFLTGV

SEQ ID NO: 30727 - protein, 9 aa, Homo sapiens
  Table A; Target 30727; HLA-A*68:02; IL22RA2; ENSG00000164485; CTA
LISFFLTGV

SEQ ID NO: 30728 - protein, 9 aa, Homo sapiens
  Table A; Target 30728; HLA-B*15:03; IL22RA2; ENSG00000164485; CTA
LQWQPGRAL

SEQ ID NO: 30729 - protein, 9 aa, Homo sapiens
  Table A; Target 30729; HLA-C*03:03; IL22RA2; ENSG00000164485; CTA
LQWQPGRAL

SEQ ID NO: 30730 - protein, 9 aa, Homo sapiens
  Table A; Target 30730; HLA-C*03:04; IL22RA2; ENSG00000164485; CTA
LQWQPGRAL

SEQ ID NO: 30731 - protein, 8 aa, Homo sapiens
  Table A; Target 30731; HLA-A*01:01; IL22RA2; ENSG00000164485; CTA
LTGNSSVY

SEQ ID NO: 30732 - protein, 8 aa, Homo sapiens
  Table A; Target 30732; HLA-B*15:01; IL22RA2; ENSG00000164485; CTA
LTGNSSVY

SEQ ID NO: 30733 - protein, 8 aa, Homo sapiens
  Table A; Target 30733; HLA-B*39:01; IL22RA2; ENSG00000164485; CTA
LTGNSSVY

SEQ ID NO: 30734 - protein, 8 aa, Homo sapiens
  Table A; Target 30734; HLA-B*46:01; IL22RA2; ENSG00000164485; CTA
LTGNSSVY

SEQ ID NO: 30735 - protein, 8 aa, Homo sapiens
  Table A; Target 30735; HLA-C*01:02; IL22RA2; ENSG00000164485; CTA
LTGNSSVY

SEQ ID NO: 30736 - protein, 8 aa, Homo sapiens
  Table A; Target 30736; HLA-C*07:01; IL22RA2; ENSG00000164485; CTA
LTGNSSVY

SEQ ID NO: 30737 - protein, 8 aa, Homo sapiens
  Table A; Target 30737; HLA-C*07:04; IL22RA2; ENSG00000164485; CTA
LTGNSSVY

SEQ ID NO: 30738 - protein, 8 aa, Homo sapiens
  Table A; Target 30738; HLA-C*12:03; IL22RA2; ENSG00000164485; CTA
LTGNSSVY

SEQ ID NO: 30739 - protein, 8 aa, Homo sapiens
  Table A; Target 30739; HLA-C*14:02; IL22RA2; ENSG00000164485; CTA
LTGNSSVY

SEQ ID NO: 30740 - protein, 9 aa, Homo sapiens
  Table A; Target 30740; HLA-A*32:01; IL22RA2; ENSG00000164485; CTA
LTGNSSVYF

SEQ ID NO: 30741 - protein, 9 aa, Homo sapiens
  Table A; Target 30741; HLA-C*07:04; IL22RA2; ENSG00000164485; CTA
LTGNSSVYF

SEQ ID NO: 30742 - protein, 8 aa, Homo sapiens
  Table A; Target 30742; HLA-C*12:03; IL22RA2; ENSG00000164485; CTA
LTGVAGTQ

SEQ ID NO: 30743 - protein, 9 aa, Homo sapiens
  Table A; Target 30743; HLA-A*02:04; IL22RA2; ENSG00000164485; CTA
LVILHAPNL

SEQ ID NO: 30744 - protein, 9 aa, Homo sapiens
  Table A; Target 30744; HLA-C*03:04; IL22RA2; ENSG00000164485; CTA
LVILHAPNL

SEQ ID NO: 30745 - protein, 9 aa, Homo sapiens
  Table A; Target 30745; HLA-B*57:01; IL22RA2; ENSG00000164485; CTA
MTPRFTPWW

SEQ ID NO: 30746 - protein, 9 aa, Homo sapiens
  Table A; Target 30746; HLA-C*01:02; IL22RA2; ENSG00000164485; CTA
NITQVNGSL

SEQ ID NO: 30747 - protein, 10 aa, Homo sapiens
  Table A; Target 30747; HLA-C*16:02; IL22RA2; ENSG00000164485; CTA
NSLEKEQKVY

SEQ ID NO: 30748 - protein, 9 aa, Homo sapiens
  Table A; Target 30748; HLA-A*01:01; IL22RA2; ENSG00000164485; CTA
NSSVYFVQY

SEQ ID NO: 30749 - protein, 9 aa, Homo sapiens
  Table A; Target 30749; HLA-A*29:02; IL22RA2; ENSG00000164485; CTA
NSSVYFVQY

SEQ ID NO: 30750 - protein, 9 aa, Homo sapiens
  Table A; Target 30750; HLA-A*30:02; IL22RA2; ENSG00000164485; CTA
NSSVYFVQY

SEQ ID NO: 30751 - protein, 9 aa, Homo sapiens
  Table A; Target 30751; HLA-B*18:01; IL22RA2; ENSG00000164485; CTA
NSSVYFVQY

SEQ ID NO: 30752 - protein, 9 aa, Homo sapiens
  Table A; Target 30752; HLA-B*35:01; IL22RA2; ENSG00000164485; CTA
NSSVYFVQY

SEQ ID NO: 30753 - protein, 9 aa, Homo sapiens
  Table A; Target 30753; HLA-C*01:02; IL22RA2; ENSG00000164485; CTA
NSSVYFVQY

SEQ ID NO: 30754 - protein, 9 aa, Homo sapiens
  Table A; Target 30754; HLA-C*02:02; IL22RA2; ENSG00000164485; CTA
NSSVYFVQY

SEQ ID NO: 30755 - protein, 9 aa, Homo sapiens
  Table A; Target 30755; HLA-C*07:06; IL22RA2; ENSG00000164485; CTA
NSSVYFVQY

SEQ ID NO: 30756 - protein, 9 aa, Homo sapiens
  Table A; Target 30756; HLA-C*12:03; IL22RA2; ENSG00000164485; CTA
NSSVYFVQY

SEQ ID NO: 30757 - protein, 9 aa, Homo sapiens
  Table A; Target 30757; HLA-C*16:01; IL22RA2; ENSG00000164485; CTA
NSSVYFVQY

SEQ ID NO: 30758 - protein, 9 aa, Homo sapiens
  Table A; Target 30758; HLA-C*16:02; IL22RA2; ENSG00000164485; CTA
NSSVYFVQY

SEQ ID NO: 30759 - protein, 9 aa, Homo sapiens
  Table A; Target 30759; HLA-B*56:01; IL22RA2; ENSG00000164485; CTA
PPVMNITQV

SEQ ID NO: 30760 - protein, 9 aa, Homo sapiens
  Table A; Target 30760; HLA-A*31:01; IL22RA2; ENSG00000164485; CTA
PQRVQFQSR

SEQ ID NO: 30761 - protein, 10 aa, Homo sapiens
  Table A; Target 30761; HLA-B*27:02; IL22RA2; ENSG00000164485; CTA
QRVQFQSRNF

SEQ ID NO: 30762 - protein, 10 aa, Homo sapiens
  Table A; Target 30762; HLA-C*16:04; IL22RA2; ENSG00000164485; CTA
QRVQFQSRNF

SEQ ID NO: 30763 - protein, 11 aa, Homo sapiens
  Table A; Target 30763; HLA-B*57:01; IL22RA2; ENSG00000164485; CTA
QSRNFHNILQW

SEQ ID NO: 30764 - protein, 9 aa, Homo sapiens
  Table A; Target 30764; HLA-A*25:01; IL22RA2; ENSG00000164485; CTA
QVNGSLLVI

SEQ ID NO: 30765 - protein, 9 aa, Homo sapiens
  Table A; Target 30765; HLA-B*13:02; IL22RA2; ENSG00000164485; CTA
QVNGSLLVI

SEQ ID NO: 30766 - protein, 8 aa, Homo sapiens
  Table A; Target 30766; HLA-A*30:02; IL22RA2; ENSG00000164485; CTA
RAASAGSY

SEQ ID NO: 30767 - protein, 8 aa, Homo sapiens
  Table A; Target 30767; HLA-B*15:01; IL22RA2; ENSG00000164485; CTA
RAASAGSY

SEQ ID NO: 30768 - protein, 8 aa, Homo sapiens
  Table A; Target 30768; HLA-B*46:01; IL22RA2; ENSG00000164485; CTA
RAASAGSY

SEQ ID NO: 30769 - protein, 8 aa, Homo sapiens
  Table A; Target 30769; HLA-B*58:01; IL22RA2; ENSG00000164485; CTA
RAASAGSY

SEQ ID NO: 30770 - protein, 8 aa, Homo sapiens
  Table A; Target 30770; HLA-C*16:01; IL22RA2; ENSG00000164485; CTA
RAASAGSY

SEQ ID NO: 30771 - protein, 11 aa, Homo sapiens
  Table A; Target 30771; HLA-A*25:01; IL22RA2; ENSG00000164485; CTA
RAASAGSYSEW

SEQ ID NO: 30772 - protein, 11 aa, Homo sapiens
  Table A; Target 30772; HLA-A*30:02; IL22RA2; ENSG00000164485; CTA
RAASAGSYSEW

SEQ ID NO: 30773 - protein, 11 aa, Homo sapiens
  Table A; Target 30773; HLA-A*32:01; IL22RA2; ENSG00000164485; CTA
RAASAGSYSEW

SEQ ID NO: 30774 - protein, 11 aa, Homo sapiens
  Table A; Target 30774; HLA-B*44:02; IL22RA2; ENSG00000164485; CTA
RAASAGSYSEW

SEQ ID NO: 30775 - protein, 11 aa, Homo sapiens
  Table A; Target 30775; HLA-B*44:03; IL22RA2; ENSG00000164485; CTA
RAASAGSYSEW

SEQ ID NO: 30776 - protein, 11 aa, Homo sapiens
  Table A; Target 30776; HLA-B*57:01; IL22RA2; ENSG00000164485; CTA
RAASAGSYSEW

SEQ ID NO: 30777 - protein, 11 aa, Homo sapiens
  Table A; Target 30777; HLA-B*58:01; IL22RA2; ENSG00000164485; CTA
RAASAGSYSEW

SEQ ID NO: 30778 - protein, 11 aa, Homo sapiens
  Table A; Target 30778; HLA-C*02:02; IL22RA2; ENSG00000164485; CTA
RAASAGSYSEW

SEQ ID NO: 30779 - protein, 11 aa, Homo sapiens
  Table A; Target 30779; HLA-C*16:04; IL22RA2; ENSG00000164485; CTA
RAASAGSYSEW

SEQ ID NO: 30780 - protein, 10 aa, Homo sapiens
  Table A; Target 30780; HLA-A*23:01; IL22RA2; ENSG00000164485; CTA
RALTGNSSVY

SEQ ID NO: 30781 - protein, 10 aa, Homo sapiens
  Table A; Target 30781; HLA-A*30:02; IL22RA2; ENSG00000164485; CTA
RALTGNSSVY

SEQ ID NO: 30782 - protein, 10 aa, Homo sapiens
  Table A; Target 30782; HLA-A*32:01; IL22RA2; ENSG00000164485; CTA
RALTGNSSVY

SEQ ID NO: 30783 - protein, 10 aa, Homo sapiens
  Table A; Target 30783; HLA-B*15:01; IL22RA2; ENSG00000164485; CTA
RALTGNSSVY

SEQ ID NO: 30784 - protein, 10 aa, Homo sapiens
  Table A; Target 30784; HLA-B*15:03; IL22RA2; ENSG00000164485; CTA
RALTGNSSVY

SEQ ID NO: 30785 - protein, 10 aa, Homo sapiens
  Table A; Target 30785; HLA-B*46:01; IL22RA2; ENSG00000164485; CTA
RALTGNSSVY

SEQ ID NO: 30786 - protein, 10 aa, Homo sapiens
  Table A; Target 30786; HLA-B*57:01; IL22RA2; ENSG00000164485; CTA
RALTGNSSVY

SEQ ID NO: 30787 - protein, 10 aa, Homo sapiens
  Table A; Target 30787; HLA-B*58:01; IL22RA2; ENSG00000164485; CTA
RALTGNSSVY

SEQ ID NO: 30788 - protein, 10 aa, Homo sapiens
  Table A; Target 30788; HLA-C*02:02; IL22RA2; ENSG00000164485; CTA
RALTGNSSVY

SEQ ID NO: 30789 - protein, 10 aa, Homo sapiens
  Table A; Target 30789; HLA-C*14:02; IL22RA2; ENSG00000164485; CTA
RALTGNSSVY

SEQ ID NO: 30790 - protein, 10 aa, Homo sapiens
  Table A; Target 30790; HLA-C*16:04; IL22RA2; ENSG00000164485; CTA
RALTGNSSVY

SEQ ID NO: 30791 - protein, 11 aa, Homo sapiens
  Table A; Target 30791; HLA-B*57:01; IL22RA2; ENSG00000164485; CTA
RALTGNSSVYF

SEQ ID NO: 30792 - protein, 11 aa, Homo sapiens
  Table A; Target 30792; HLA-B*58:01; IL22RA2; ENSG00000164485; CTA
RALTGNSSVYF

SEQ ID NO: 30793 - protein, 8 aa, Homo sapiens
  Table A; Target 30793; HLA-B*58:01; IL22RA2; ENSG00000164485; CTA
RAVEIEAL

SEQ ID NO: 30794 - protein, 9 aa, Homo sapiens
  Table A; Target 30794; HLA-B*57:01; IL22RA2; ENSG00000164485; CTA
RNFHNILQW

SEQ ID NO: 30795 - protein, 9 aa, Homo sapiens
  Table A; Target 30795; HLA-A*03:01; IL22RA2; ENSG00000164485; CTA
RTLAKYGQR

SEQ ID NO: 30796 - protein, 9 aa, Homo sapiens
  Table A; Target 30796; HLA-A*31:01; IL22RA2; ENSG00000164485; CTA
RTLAKYGQR

SEQ ID NO: 30797 - protein, 11 aa, Homo sapiens
  Table A; Target 30797; HLA-B*57:01; IL22RA2; ENSG00000164485; CTA
RTLAKYGQRQW

SEQ ID NO: 30798 - protein, 9 aa, Homo sapiens
  Table A; Target 30798; HLA-A*02:04; IL22RA2; ENSG00000164485; CTA
RVFIINNSL

SEQ ID NO: 30799 - protein, 9 aa, Homo sapiens
  Table A; Target 30799; HLA-A*31:01; IL22RA2; ENSG00000164485; CTA
RVFIINNSL

SEQ ID NO: 30800 - protein, 9 aa, Homo sapiens
  Table A; Target 30800; HLA-A*32:01; IL22RA2; ENSG00000164485; CTA
RVFIINNSL

SEQ ID NO: 30801 - protein, 9 aa, Homo sapiens
  Table A; Target 30801; HLA-A*68:02; IL22RA2; ENSG00000164485; CTA
RVFIINNSL

SEQ ID NO: 30802 - protein, 9 aa, Homo sapiens
  Table A; Target 30802; HLA-B*07:02; IL22RA2; ENSG00000164485; CTA
RVFIINNSL

SEQ ID NO: 30803 - protein, 9 aa, Homo sapiens
  Table A; Target 30803; HLA-B*08:01; IL22RA2; ENSG00000164485; CTA
RVFIINNSL

SEQ ID NO: 30804 - protein, 9 aa, Homo sapiens
  Table A; Target 30804; HLA-B*27:05; IL22RA2; ENSG00000164485; CTA
RVFIINNSL

SEQ ID NO: 30805 - protein, 9 aa, Homo sapiens
  Table A; Target 30805; HLA-B*57:01; IL22RA2; ENSG00000164485; CTA
RVFIINNSL

SEQ ID NO: 30806 - protein, 9 aa, Homo sapiens
  Table A; Target 30806; HLA-B*58:01; IL22RA2; ENSG00000164485; CTA
RVFIINNSL

SEQ ID NO: 30807 - protein, 9 aa, Homo sapiens
  Table A; Target 30807; HLA-C*01:02; IL22RA2; ENSG00000164485; CTA
RVFIINNSL

SEQ ID NO: 30808 - protein, 9 aa, Homo sapiens
  Table A; Target 30808; HLA-C*07:02; IL22RA2; ENSG00000164485; CTA
RVFIINNSL

SEQ ID NO: 30809 - protein, 11 aa, Homo sapiens
  Table A; Target 30809; HLA-A*03:01; IL22RA2; ENSG00000164485; CTA
RVFIINNSLEK

SEQ ID NO: 30810 - protein, 11 aa, Homo sapiens
  Table A; Target 30810; HLA-A*11:01; IL22RA2; ENSG00000164485; CTA
RVFIINNSLEK

SEQ ID NO: 30811 - protein, 9 aa, Homo sapiens
  Table A; Target 30811; HLA-A*32:01; IL22RA2; ENSG00000164485; CTA
RVQFQSRNF

SEQ ID NO: 30812 - protein, 10 aa, Homo sapiens
  Table A; Target 30812; HLA-A*30:02; IL22RA2; ENSG00000164485; CTA
RVRAASAGSY

SEQ ID NO: 30813 - protein, 10 aa, Homo sapiens
  Table A; Target 30813; HLA-A*32:01; IL22RA2; ENSG00000164485; CTA
RVRAASAGSY

SEQ ID NO: 30814 - protein, 10 aa, Homo sapiens
  Table A; Target 30814; HLA-B*15:01; IL22RA2; ENSG00000164485; CTA
RVRAASAGSY

SEQ ID NO: 30815 - protein, 10 aa, Homo sapiens
  Table A; Target 30815; HLA-B*15:03; IL22RA2; ENSG00000164485; CTA
RVRAASAGSY

SEQ ID NO: 30816 - protein, 10 aa, Homo sapiens
  Table A; Target 30816; HLA-B*46:01; IL22RA2; ENSG00000164485; CTA
RVRAASAGSY

SEQ ID NO: 30817 - protein, 8 aa, Homo sapiens
  Table A; Target 30817; HLA-A*25:01; IL22RA2; ENSG00000164485; CTA
SAGSYSEW

SEQ ID NO: 30818 - protein, 8 aa, Homo sapiens
  Table A; Target 30818; HLA-A*32:01; IL22RA2; ENSG00000164485; CTA
SAGSYSEW

SEQ ID NO: 30819 - protein, 8 aa, Homo sapiens
  Table A; Target 30819; HLA-B*57:01; IL22RA2; ENSG00000164485; CTA
SAGSYSEW

SEQ ID NO: 30820 - protein, 8 aa, Homo sapiens
  Table A; Target 30820; HLA-B*58:01; IL22RA2; ENSG00000164485; CTA
SAGSYSEW

SEQ ID NO: 30821 - protein, 8 aa, Homo sapiens
  Table A; Target 30821; HLA-C*07:01; IL22RA2; ENSG00000164485; CTA
SAGSYSEW

SEQ ID NO: 30822 - protein, 8 aa, Homo sapiens
  Table A; Target 30822; HLA-C*12:03; IL22RA2; ENSG00000164485; CTA
SAGSYSEW

SEQ ID NO: 30823 - protein, 8 aa, Homo sapiens
  Table A; Target 30823; HLA-C*16:01; IL22RA2; ENSG00000164485; CTA
SAGSYSEW

SEQ ID NO: 30824 - protein, 8 aa, Homo sapiens
  Table A; Target 30824; HLA-B*18:01; IL22RA2; ENSG00000164485; CTA
SDIQEPYY

SEQ ID NO: 30825 - protein, 8 aa, Homo sapiens
  Table A; Target 30825; HLA-C*06:02; IL22RA2; ENSG00000164485; CTA
SDIQEPYY

SEQ ID NO: 30826 - protein, 8 aa, Homo sapiens
  Table A; Target 30826; HLA-C*07:01; IL22RA2; ENSG00000164485; CTA
SDIQEPYY

SEQ ID NO: 30827 - protein, 10 aa, Homo sapiens
  Table A; Target 30827; HLA-A*33:01; IL22RA2; ENSG00000164485; CTA
SDIQEPYYGR

SEQ ID NO: 30828 - protein, 10 aa, Homo sapiens
  Table A; Target 30828; HLA-A*30:02; IL22RA2; ENSG00000164485; CTA
SETSDIQEPY

SEQ ID NO: 30829 - protein, 10 aa, Homo sapiens
  Table A; Target 30829; HLA-B*18:01; IL22RA2; ENSG00000164485; CTA
SETSDIQEPY

SEQ ID NO: 30830 - protein, 10 aa, Homo sapiens
  Table A; Target 30830; HLA-B*27:02; IL22RA2; ENSG00000164485; CTA
SETSDIQEPY

SEQ ID NO: 30831 - protein, 10 aa, Homo sapiens
  Table A; Target 30831; HLA-B*40:01; IL22RA2; ENSG00000164485; CTA
SETSDIQEPY

SEQ ID NO: 30832 - protein, 10 aa, Homo sapiens
  Table A; Target 30832; HLA-B*44:02; IL22RA2; ENSG00000164485; CTA
SETSDIQEPY

SEQ ID NO: 30833 - protein, 10 aa, Homo sapiens
  Table A; Target 30833; HLA-B*44:03; IL22RA2; ENSG00000164485; CTA
SETSDIQEPY

SEQ ID NO: 30834 - protein, 10 aa, Homo sapiens
  Table A; Target 30834; HLA-C*16:04; IL22RA2; ENSG00000164485; CTA
SETSDIQEPY

SEQ ID NO: 30835 - protein, 11 aa, Homo sapiens
  Table A; Target 30835; HLA-A*30:02; IL22RA2; ENSG00000164485; CTA
SETSDIQEPYY

SEQ ID NO: 30836 - protein, 11 aa, Homo sapiens
  Table A; Target 30836; HLA-B*39:01; IL22RA2; ENSG00000164485; CTA
SETSDIQEPYY

SEQ ID NO: 30837 - protein, 11 aa, Homo sapiens
  Table A; Target 30837; HLA-B*44:02; IL22RA2; ENSG00000164485; CTA
SETSDIQEPYY

SEQ ID NO: 30838 - protein, 11 aa, Homo sapiens
  Table A; Target 30838; HLA-B*44:03; IL22RA2; ENSG00000164485; CTA
SETSDIQEPYY

SEQ ID NO: 30839 - protein, 9 aa, Homo sapiens
  Table A; Target 30839; HLA-B*18:01; IL22RA2; ENSG00000164485; CTA
SEWSMTPRF

SEQ ID NO: 30840 - protein, 9 aa, Homo sapiens
  Table A; Target 30840; HLA-B*37:01; IL22RA2; ENSG00000164485; CTA
SEWSMTPRF

SEQ ID NO: 30841 - protein, 9 aa, Homo sapiens
  Table A; Target 30841; HLA-B*44:02; IL22RA2; ENSG00000164485; CTA
SEWSMTPRF

SEQ ID NO: 30842 - protein, 9 aa, Homo sapiens
  Table A; Target 30842; HLA-B*44:03; IL22RA2; ENSG00000164485; CTA
SEWSMTPRF

SEQ ID NO: 30843 - protein, 9 aa, Homo sapiens
  Table A; Target 30843; HLA-C*14:02; IL22RA2; ENSG00000164485; CTA
SFFLTGVAG

SEQ ID NO: 30844 - protein, 8 aa, Homo sapiens
  Table A; Target 30844; HLA-C*05:01; IL22RA2; ENSG00000164485; CTA
SIEDYYEL

SEQ ID NO: 30845 - protein, 9 aa, Homo sapiens
  Table A; Target 30845; HLA-A*02:07; IL22RA2; ENSG00000164485; CTA
SIEDYYELL

SEQ ID NO: 30846 - protein, 9 aa, Homo sapiens
  Table A; Target 30846; HLA-C*05:01; IL22RA2; ENSG00000164485; CTA
SIEDYYELL

SEQ ID NO: 30847 - protein, 10 aa, Homo sapiens
  Table A; Target 30847; HLA-A*01:01; IL22RA2; ENSG00000164485; CTA
SIEDYYELLY

SEQ ID NO: 30848 - protein, 10 aa, Homo sapiens
  Table A; Target 30848; HLA-A*29:02; IL22RA2; ENSG00000164485; CTA
SIEDYYELLY

SEQ ID NO: 30849 - protein, 9 aa, Homo sapiens
  Table A; Target 30849; HLA-A*01:01; IL22RA2; ENSG00000164485; CTA
SLEKEQKVY

SEQ ID NO: 30850 - protein, 9 aa, Homo sapiens
  Table A; Target 30850; HLA-A*30:02; IL22RA2; ENSG00000164485; CTA
SLEKEQKVY

SEQ ID NO: 30851 - protein, 9 aa, Homo sapiens
  Table A; Target 30851; HLA-B*15:01; IL22RA2; ENSG00000164485; CTA
SLEKEQKVY

SEQ ID NO: 30852 - protein, 9 aa, Homo sapiens
  Table A; Target 30852; HLA-B*15:03; IL22RA2; ENSG00000164485; CTA
SLEKEQKVY

SEQ ID NO: 30853 - protein, 9 aa, Homo sapiens
  Table A; Target 30853; HLA-C*03:03; IL22RA2; ENSG00000164485; CTA
SLEKEQKVY

SEQ ID NO: 30854 - protein, 9 aa, Homo sapiens
  Table A; Target 30854; HLA-C*07:04; IL22RA2; ENSG00000164485; CTA
SLEKEQKVY

SEQ ID NO: 30855 - protein, 9 aa, Homo sapiens
  Table A; Target 30855; HLA-C*16:02; IL22RA2; ENSG00000164485; CTA
SLEKEQKVY

SEQ ID NO: 30856 - protein, 9 aa, Homo sapiens
  Table A; Target 30856; HLA-A*31:01; IL22RA2; ENSG00000164485; CTA
SLKPQRVQF

SEQ ID NO: 30857 - protein, 9 aa, Homo sapiens
  Table A; Target 30857; HLA-A*32:01; IL22RA2; ENSG00000164485; CTA
SLKPQRVQF

SEQ ID NO: 30858 - protein, 9 aa, Homo sapiens
  Table A; Target 30858; HLA-B*08:01; IL22RA2; ENSG00000164485; CTA
SLKPQRVQF

SEQ ID NO: 30859 - protein, 9 aa, Homo sapiens
  Table A; Target 30859; HLA-B*15:01; IL22RA2; ENSG00000164485; CTA
SLKPQRVQF

SEQ ID NO: 30860 - protein, 9 aa, Homo sapiens
  Table A; Target 30860; HLA-B*37:01; IL22RA2; ENSG00000164485; CTA
SLKPQRVQF

SEQ ID NO: 30861 - protein, 9 aa, Homo sapiens
  Table A; Target 30861; HLA-B*46:01; IL22RA2; ENSG00000164485; CTA
SLKPQRVQF

SEQ ID NO: 30862 - protein, 9 aa, Homo sapiens
  Table A; Target 30862; HLA-B*57:01; IL22RA2; ENSG00000164485; CTA
SLKPQRVQF

SEQ ID NO: 30863 - protein, 9 aa, Homo sapiens
  Table A; Target 30863; HLA-C*16:01; IL22RA2; ENSG00000164485; CTA
SLKPQRVQF

SEQ ID NO: 30864 - protein, 11 aa, Homo sapiens
  Table A; Target 30864; HLA-A*02:04; IL22RA2; ENSG00000164485; CTA
SLLVILHAPNL

SEQ ID NO: 30865 - protein, 9 aa, Homo sapiens
  Table A; Target 30865; HLA-A*24:02; IL22RA2; ENSG00000164485; CTA
SMTPRFTPW

SEQ ID NO: 30866 - protein, 8 aa, Homo sapiens
  Table A; Target 30866; HLA-B*15:01; IL22RA2; ENSG00000164485; CTA
SSVYFVQY

SEQ ID NO: 30867 - protein, 8 aa, Homo sapiens
  Table A; Target 30867; HLA-B*18:01; IL22RA2; ENSG00000164485; CTA
SSVYFVQY

SEQ ID NO: 30868 - protein, 8 aa, Homo sapiens
  Table A; Target 30868; HLA-C*12:03; IL22RA2; ENSG00000164485; CTA
SSVYFVQY

SEQ ID NO: 30869 - protein, 9 aa, Homo sapiens
  Table A; Target 30869; HLA-A*03:02; IL22RA2; ENSG00000164485; CTA
SSVYFVQYK

SEQ ID NO: 30870 - protein, 9 aa, Homo sapiens
  Table A; Target 30870; HLA-A*11:01; IL22RA2; ENSG00000164485; CTA
SSVYFVQYK

SEQ ID NO: 30871 - protein, 9 aa, Homo sapiens
  Table A; Target 30871; HLA-C*07:06; IL22RA2; ENSG00000164485; CTA
SSVYFVQYK

SEQ ID NO: 30872 - protein, 9 aa, Homo sapiens
  Table A; Target 30872; HLA-B*13:02; IL22RA2; ENSG00000164485; CTA
SSYCVVAEI

SEQ ID NO: 30873 - protein, 10 aa, Homo sapiens
  Table A; Target 30873; HLA-A*68:01; IL22RA2; ENSG00000164485; CTA
STHESLKPQR

SEQ ID NO: 30874 - protein, 9 aa, Homo sapiens
  Table A; Target 30874; HLA-A*02:07; IL22RA2; ENSG00000164485; CTA
SVYFVQYKI

SEQ ID NO: 30875 - protein, 9 aa, Homo sapiens
  Table A; Target 30875; HLA-A*68:02; IL22RA2; ENSG00000164485; CTA
SVYFVQYKI

SEQ ID NO: 30876 - protein, 9 aa, Homo sapiens
  Table A; Target 30876; HLA-B*13:02; IL22RA2; ENSG00000164485; CTA
SVYFVQYKI

SEQ ID NO: 30877 - protein, 9 aa, Homo sapiens
  Table A; Target 30877; HLA-A*29:02; IL22RA2; ENSG00000164485; CTA
SYCVVAEIY

SEQ ID NO: 30878 - protein, 10 aa, Homo sapiens
  Table A; Target 30878; HLA-A*31:01; IL22RA2; ENSG00000164485; CTA
SYSEWSMTPR

SEQ ID NO: 30879 - protein, 10 aa, Homo sapiens
  Table A; Target 30879; HLA-A*33:03; IL22RA2; ENSG00000164485; CTA
SYSEWSMTPR

SEQ ID NO: 30880 - protein, 11 aa, Homo sapiens
  Table A; Target 30880; HLA-A*24:02; IL22RA2; ENSG00000164485; CTA
SYSEWSMTPRF

SEQ ID NO: 30881 - protein, 8 aa, Homo sapiens
  Table A; Target 30881; HLA-C*04:01; IL22RA2; ENSG00000164485; CTA
TGNSSVYF

SEQ ID NO: 30882 - protein, 9 aa, Homo sapiens
  Table A; Target 30882; HLA-B*13:02; IL22RA2; ENSG00000164485; CTA
TGNSSVYFV

SEQ ID NO: 30883 - protein, 9 aa, Homo sapiens
  Table A; Target 30883; HLA-C*06:02; IL22RA2; ENSG00000164485; CTA
TGNSSVYFV

SEQ ID NO: 30884 - protein, 11 aa, Homo sapiens
  Table A; Target 30884; HLA-A*30:02; IL22RA2; ENSG00000164485; CTA
TGNSSVYFVQY

SEQ ID NO: 30885 - protein, 11 aa, Homo sapiens
  Table A; Target 30885; HLA-B*35:01; IL22RA2; ENSG00000164485; CTA
TGNSSVYFVQY

SEQ ID NO: 30886 - protein, 11 aa, Homo sapiens
  Table A; Target 30886; HLA-C*07:01; IL22RA2; ENSG00000164485; CTA
TGVAGTQSTHE

SEQ ID NO: 30887 - protein, 10 aa, Homo sapiens
  Table A; Target 30887; HLA-B*38:01; IL22RA2; ENSG00000164485; CTA
THESLKPQRV

SEQ ID NO: 30888 - protein, 8 aa, Homo sapiens
  Table A; Target 30888; HLA-B*15:03; IL22RA2; ENSG00000164485; CTA
TKIDPPVM

SEQ ID NO: 30889 - protein, 8 aa, Homo sapiens
  Table A; Target 30889; HLA-B*51:01; IL22RA2; ENSG00000164485; CTA
TPHSSYCV

SEQ ID NO: 30890 - protein, 8 aa, Homo sapiens
  Table A; Target 30890; HLA-B*56:01; IL22RA2; ENSG00000164485; CTA
TPHSSYCV

SEQ ID NO: 30891 - protein, 9 aa, Homo sapiens
  Table A; Target 30891; HLA-B*07:02; IL22RA2; ENSG00000164485; CTA
TPHSSYCVV

SEQ ID NO: 30892 - protein, 9 aa, Homo sapiens
  Table A; Target 30892; HLA-B*51:01; IL22RA2; ENSG00000164485; CTA
TPHSSYCVV

SEQ ID NO: 30893 - protein, 9 aa, Homo sapiens
  Table A; Target 30893; HLA-B*54:01; IL22RA2; ENSG00000164485; CTA
TPHSSYCVV

SEQ ID NO: 30894 - protein, 9 aa, Homo sapiens
  Table A; Target 30894; HLA-B*56:01; IL22RA2; ENSG00000164485; CTA
TPHSSYCVV

SEQ ID NO: 30895 - protein, 10 aa, Homo sapiens
  Table A; Target 30895; HLA-B*54:01; IL22RA2; ENSG00000164485; CTA
TPHSSYCVVA

SEQ ID NO: 30896 - protein, 10 aa, Homo sapiens
  Table A; Target 30896; HLA-B*56:01; IL22RA2; ENSG00000164485; CTA
TPHSSYCVVA

SEQ ID NO: 30897 - protein, 8 aa, Homo sapiens
  Table A; Target 30897; HLA-B*08:01; IL22RA2; ENSG00000164485; CTA
TQSTHESL

SEQ ID NO: 30898 - protein, 8 aa, Homo sapiens
  Table A; Target 30898; HLA-B*37:01; IL22RA2; ENSG00000164485; CTA
TQSTHESL

SEQ ID NO: 30899 - protein, 8 aa, Homo sapiens
  Table A; Target 30899; HLA-B*38:01; IL22RA2; ENSG00000164485; CTA
TQSTHESL

SEQ ID NO: 30900 - protein, 8 aa, Homo sapiens
  Table A; Target 30900; HLA-B*39:01; IL22RA2; ENSG00000164485; CTA
TQSTHESL

SEQ ID NO: 30901 - protein, 8 aa, Homo sapiens
  Table A; Target 30901; HLA-B*15:01; IL22RA2; ENSG00000164485; CTA
TQVNGSLL

SEQ ID NO: 30902 - protein, 8 aa, Homo sapiens
  Table A; Target 30902; HLA-B*15:03; IL22RA2; ENSG00000164485; CTA
TQVNGSLL

SEQ ID NO: 30903 - protein, 8 aa, Homo sapiens
  Table A; Target 30903; HLA-B*38:01; IL22RA2; ENSG00000164485; CTA
TQVNGSLL

SEQ ID NO: 30904 - protein, 8 aa, Homo sapiens
  Table A; Target 30904; HLA-B*39:01; IL22RA2; ENSG00000164485; CTA
TQVNGSLL

SEQ ID NO: 30905 - protein, 8 aa, Homo sapiens
  Table A; Target 30905; HLA-C*03:03; IL22RA2; ENSG00000164485; CTA
TQVNGSLL

SEQ ID NO: 30906 - protein, 8 aa, Homo sapiens
  Table A; Target 30906; HLA-C*03:04; IL22RA2; ENSG00000164485; CTA
TQVNGSLL

SEQ ID NO: 30907 - protein, 8 aa, Homo sapiens
  Table A; Target 30907; HLA-C*05:01; IL22RA2; ENSG00000164485; CTA
TQVNGSLL

SEQ ID NO: 30908 - protein, 8 aa, Homo sapiens
  Table A; Target 30908; HLA-C*14:02; IL22RA2; ENSG00000164485; CTA
TQVNGSLL

SEQ ID NO: 30909 - protein, 9 aa, Homo sapiens
  Table A; Target 30909; HLA-B*13:02; IL22RA2; ENSG00000164485; CTA
TQVNGSLLV

SEQ ID NO: 30910 - protein, 9 aa, Homo sapiens
  Table A; Target 30910; HLA-B*27:05; IL22RA2; ENSG00000164485; CTA
TQVNGSLLV

SEQ ID NO: 30911 - protein, 9 aa, Homo sapiens
  Table A; Target 30911; HLA-B*38:01; IL22RA2; ENSG00000164485; CTA
TQVNGSLLV

SEQ ID NO: 30912 - protein, 9 aa, Homo sapiens
  Table A; Target 30912; HLA-B*39:01; IL22RA2; ENSG00000164485; CTA
TQVNGSLLV

SEQ ID NO: 30913 - protein, 9 aa, Homo sapiens
  Table A; Target 30913; HLA-B*49:01; IL22RA2; ENSG00000164485; CTA
TQVNGSLLV

SEQ ID NO: 30914 - protein, 9 aa, Homo sapiens
  Table A; Target 30914; HLA-C*06:02; IL22RA2; ENSG00000164485; CTA
TQVNGSLLV

SEQ ID NO: 30915 - protein, 10 aa, Homo sapiens
  Table A; Target 30915; HLA-B*13:02; IL22RA2; ENSG00000164485; CTA
TQVNGSLLVI

SEQ ID NO: 30916 - protein, 10 aa, Homo sapiens
  Table A; Target 30916; HLA-B*38:01; IL22RA2; ENSG00000164485; CTA
TQVNGSLLVI

SEQ ID NO: 30917 - protein, 10 aa, Homo sapiens
  Table A; Target 30917; HLA-B*39:01; IL22RA2; ENSG00000164485; CTA
TQVNGSLLVI

SEQ ID NO: 30918 - protein, 11 aa, Homo sapiens
  Table A; Target 30918; HLA-B*38:01; IL22RA2; ENSG00000164485; CTA
TQVNGSLLVIL

SEQ ID NO: 30919 - protein, 8 aa, Homo sapiens
  Table A; Target 30919; HLA-A*01:01; IL22RA2; ENSG00000164485; CTA
TSDIQEPY

SEQ ID NO: 30920 - protein, 9 aa, Homo sapiens
  Table A; Target 30920; HLA-A*01:01; IL22RA2; ENSG00000164485; CTA
TSDIQEPYY

SEQ ID NO: 30921 - protein, 9 aa, Homo sapiens
  Table A; Target 30921; HLA-A*30:02; IL22RA2; ENSG00000164485; CTA
TSDIQEPYY

SEQ ID NO: 30922 - protein, 9 aa, Homo sapiens
  Table A; Target 30922; HLA-B*55:01; IL22RA2; ENSG00000164485; CTA
TSDIQEPYY

SEQ ID NO: 30923 - protein, 9 aa, Homo sapiens
  Table A; Target 30923; HLA-C*05:01; IL22RA2; ENSG00000164485; CTA
TSDIQEPYY

SEQ ID NO: 30924 - protein, 9 aa, Homo sapiens
  Table A; Target 30924; HLA-C*07:01; IL22RA2; ENSG00000164485; CTA
TSDIQEPYY

SEQ ID NO: 30925 - protein, 11 aa, Homo sapiens
  Table A; Target 30925; HLA-A*31:01; IL22RA2; ENSG00000164485; CTA
TSDIQEPYYGR

SEQ ID NO: 30926 - protein, 11 aa, Homo sapiens
  Table A; Target 30926; HLA-A*33:01; IL22RA2; ENSG00000164485; CTA
TSDIQEPYYGR

SEQ ID NO: 30927 - protein, 11 aa, Homo sapiens
  Table A; Target 30927; HLA-A*68:01; IL22RA2; ENSG00000164485; CTA
TSDIQEPYYGR

SEQ ID NO: 30928 - protein, 11 aa, Homo sapiens
  Table A; Target 30928; HLA-A*01:01; IL22RA2; ENSG00000164485; CTA
TSETSDIQEPY

SEQ ID NO: 30929 - protein, 11 aa, Homo sapiens
  Table A; Target 30929; HLA-C*07:01; IL22RA2; ENSG00000164485; CTA
TSETSDIQEPY

SEQ ID NO: 30930 - protein, 9 aa, Homo sapiens
  Table A; Target 30930; HLA-B*35:03; IL22RA2; ENSG00000164485; CTA
VAEIYQPML

SEQ ID NO: 30931 - protein, 9 aa, Homo sapiens
  Table A; Target 30931; HLA-C*03:03; IL22RA2; ENSG00000164485; CTA
VAEIYQPML

SEQ ID NO: 30932 - protein, 9 aa, Homo sapiens
  Table A; Target 30932; HLA-C*03:04; IL22RA2; ENSG00000164485; CTA
VAEIYQPML

SEQ ID NO: 30933 - protein, 9 aa, Homo sapiens
  Table A; Target 30933; HLA-C*05:01; IL22RA2; ENSG00000164485; CTA
VAEIYQPML

SEQ ID NO: 30934 - protein, 9 aa, Homo sapiens
  Table A; Target 30934; HLA-C*16:02; IL22RA2; ENSG00000164485; CTA
VAEIYQPML

SEQ ID NO: 30935 - protein, 8 aa, Homo sapiens
  Table A; Target 30935; HLA-B*18:01; IL22RA2; ENSG00000164485; CTA
VEIEALTP

SEQ ID NO: 30936 - protein, 8 aa, Homo sapiens
  Table A; Target 30936; HLA-B*49:01; IL22RA2; ENSG00000164485; CTA
VEIEALTP

SEQ ID NO: 30937 - protein, 9 aa, Homo sapiens
  Table A; Target 30937; HLA-B*18:01; IL22RA2; ENSG00000164485; CTA
VEIEALTPH

SEQ ID NO: 30938 - protein, 9 aa, Homo sapiens
  Table A; Target 30938; HLA-B*40:02; IL22RA2; ENSG00000164485; CTA
VEIEALTPH

SEQ ID NO: 30939 - protein, 9 aa, Homo sapiens
  Table A; Target 30939; HLA-B*46:01; IL22RA2; ENSG00000164485; CTA
VEIEALTPH

SEQ ID NO: 30940 - protein, 9 aa, Homo sapiens
  Table A; Target 30940; HLA-B*49:01; IL22RA2; ENSG00000164485; CTA
VEIEALTPH

SEQ ID NO: 30941 - protein, 8 aa, Homo sapiens
  Table A; Target 30941; HLA-A*23:01; IL22RA2; ENSG00000164485; CTA
VFIINNSL

SEQ ID NO: 30942 - protein, 8 aa, Homo sapiens
  Table A; Target 30942; HLA-A*24:02; IL22RA2; ENSG00000164485; CTA
VFIINNSL

SEQ ID NO: 30943 - protein, 8 aa, Homo sapiens
  Table A; Target 30943; HLA-B*08:01; IL22RA2; ENSG00000164485; CTA
VFIINNSL

SEQ ID NO: 30944 - protein, 8 aa, Homo sapiens
  Table A; Target 30944; HLA-C*01:02; IL22RA2; ENSG00000164485; CTA
VFIINNSL

SEQ ID NO: 30945 - protein, 8 aa, Homo sapiens
  Table A; Target 30945; HLA-C*14:02; IL22RA2; ENSG00000164485; CTA
VFIINNSL

SEQ ID NO: 30946 - protein, 10 aa, Homo sapiens
  Table A; Target 30946; HLA-A*03:01; IL22RA2; ENSG00000164485; CTA
VILHAPNLPY

SEQ ID NO: 30947 - protein, 10 aa, Homo sapiens
  Table A; Target 30947; HLA-A*29:02; IL22RA2; ENSG00000164485; CTA
VILHAPNLPY

SEQ ID NO: 30948 - protein, 8 aa, Homo sapiens
  Table A; Target 30948; HLA-B*15:01; IL22RA2; ENSG00000164485; CTA
VQFQSRNF

SEQ ID NO: 30949 - protein, 8 aa, Homo sapiens
  Table A; Target 30949; HLA-B*15:03; IL22RA2; ENSG00000164485; CTA
VQFQSRNF

SEQ ID NO: 30950 - protein, 9 aa, Homo sapiens
  Table A; Target 30950; HLA-A*30:02; IL22RA2; ENSG00000164485; CTA
VRAASAGSY

SEQ ID NO: 30951 - protein, 9 aa, Homo sapiens
  Table A; Target 30951; HLA-A*32:01; IL22RA2; ENSG00000164485; CTA
VRAASAGSY

SEQ ID NO: 30952 - protein, 9 aa, Homo sapiens
  Table A; Target 30952; HLA-B*07:02; IL22RA2; ENSG00000164485; CTA
VRAASAGSY

SEQ ID NO: 30953 - protein, 9 aa, Homo sapiens
  Table A; Target 30953; HLA-B*15:03; IL22RA2; ENSG00000164485; CTA
VRAASAGSY

SEQ ID NO: 30954 - protein, 9 aa, Homo sapiens
  Table A; Target 30954; HLA-B*27:02; IL22RA2; ENSG00000164485; CTA
VRAASAGSY

SEQ ID NO: 30955 - protein, 9 aa, Homo sapiens
  Table A; Target 30955; HLA-B*27:05; IL22RA2; ENSG00000164485; CTA
VRAASAGSY

SEQ ID NO: 30956 - protein, 9 aa, Homo sapiens
  Table A; Target 30956; HLA-B*39:01; IL22RA2; ENSG00000164485; CTA
VRAASAGSY

SEQ ID NO: 30957 - protein, 9 aa, Homo sapiens
  Table A; Target 30957; HLA-C*06:02; IL22RA2; ENSG00000164485; CTA
VRAASAGSY

SEQ ID NO: 30958 - protein, 9 aa, Homo sapiens
  Table A; Target 30958; HLA-C*07:01; IL22RA2; ENSG00000164485; CTA
VRAASAGSY

SEQ ID NO: 30959 - protein, 9 aa, Homo sapiens
  Table A; Target 30959; HLA-C*07:02; IL22RA2; ENSG00000164485; CTA
VRAASAGSY

SEQ ID NO: 30960 - protein, 9 aa, Homo sapiens
  Table A; Target 30960; HLA-C*07:04; IL22RA2; ENSG00000164485; CTA
VRAASAGSY

SEQ ID NO: 30961 - protein, 9 aa, Homo sapiens
  Table A; Target 30961; HLA-C*12:03; IL22RA2; ENSG00000164485; CTA
VRAASAGSY

SEQ ID NO: 30962 - protein, 9 aa, Homo sapiens
  Table A; Target 30962; HLA-C*16:01; IL22RA2; ENSG00000164485; CTA
VRAASAGSY

SEQ ID NO: 30963 - protein, 9 aa, Homo sapiens
  Table A; Target 30963; HLA-C*16:04; IL22RA2; ENSG00000164485; CTA
VRAASAGSY

SEQ ID NO: 30964 - protein, 9 aa, Homo sapiens
  Table A; Target 30964; HLA-A*02:07; IL22RA2; ENSG00000164485; CTA
VSIEDYYEL

SEQ ID NO: 30965 - protein, 9 aa, Homo sapiens
  Table A; Target 30965; HLA-A*23:01; IL22RA2; ENSG00000164485; CTA
VSIEDYYEL

SEQ ID NO: 30966 - protein, 9 aa, Homo sapiens
  Table A; Target 30966; HLA-B*27:05; IL22RA2; ENSG00000164485; CTA
VSIEDYYEL

SEQ ID NO: 30967 - protein, 9 aa, Homo sapiens
  Table A; Target 30967; HLA-B*35:03; IL22RA2; ENSG00000164485; CTA
VSIEDYYEL

SEQ ID NO: 30968 - protein, 9 aa, Homo sapiens
  Table A; Target 30968; HLA-B*46:01; IL22RA2; ENSG00000164485; CTA
VSIEDYYEL

SEQ ID NO: 30969 - protein, 9 aa, Homo sapiens
  Table A; Target 30969; HLA-B*58:01; IL22RA2; ENSG00000164485; CTA
VSIEDYYEL

SEQ ID NO: 30970 - protein, 9 aa, Homo sapiens
  Table A; Target 30970; HLA-C*03:03; IL22RA2; ENSG00000164485; CTA
VSIEDYYEL

SEQ ID NO: 30971 - protein, 9 aa, Homo sapiens
  Table A; Target 30971; HLA-C*03:04; IL22RA2; ENSG00000164485; CTA
VSIEDYYEL

SEQ ID NO: 30972 - protein, 11 aa, Homo sapiens
  Table A; Target 30972; HLA-A*01:01; IL22RA2; ENSG00000164485; CTA
VSIEDYYELLY

SEQ ID NO: 30973 - protein, 9 aa, Homo sapiens
  Table A; Target 30973; HLA-A*01:01; IL22RA2; ENSG00000164485; CTA
VVAEIYQPM

SEQ ID NO: 30974 - protein, 9 aa, Homo sapiens
  Table A; Target 30974; HLA-A*02:01; IL22RA2; ENSG00000164485; CTA
VVAEIYQPM

SEQ ID NO: 30975 - protein, 9 aa, Homo sapiens
  Table A; Target 30975; HLA-A*02:03; IL22RA2; ENSG00000164485; CTA
VVAEIYQPM

SEQ ID NO: 30976 - protein, 9 aa, Homo sapiens
  Table A; Target 30976; HLA-A*02:07; IL22RA2; ENSG00000164485; CTA
VVAEIYQPM

SEQ ID NO: 30977 - protein, 9 aa, Homo sapiens
  Table A; Target 30977; HLA-A*03:01; IL22RA2; ENSG00000164485; CTA
VVAEIYQPM

SEQ ID NO: 30978 - protein, 9 aa, Homo sapiens
  Table A; Target 30978; HLA-A*03:02; IL22RA2; ENSG00000164485; CTA
VVAEIYQPM

SEQ ID NO: 30979 - protein, 9 aa, Homo sapiens
  Table A; Target 30979; HLA-A*11:01; IL22RA2; ENSG00000164485; CTA
VVAEIYQPM

SEQ ID NO: 30980 - protein, 9 aa, Homo sapiens
  Table A; Target 30980; HLA-A*23:01; IL22RA2; ENSG00000164485; CTA
VVAEIYQPM

SEQ ID NO: 30981 - protein, 9 aa, Homo sapiens
  Table A; Target 30981; HLA-A*25:01; IL22RA2; ENSG00000164485; CTA
VVAEIYQPM

SEQ ID NO: 30982 - protein, 9 aa, Homo sapiens
  Table A; Target 30982; HLA-A*26:01; IL22RA2; ENSG00000164485; CTA
VVAEIYQPM

SEQ ID NO: 30983 - protein, 9 aa, Homo sapiens
  Table A; Target 30983; HLA-A*29:02; IL22RA2; ENSG00000164485; CTA
VVAEIYQPM

SEQ ID NO: 30984 - protein, 9 aa, Homo sapiens
  Table A; Target 30984; HLA-A*30:02; IL22RA2; ENSG00000164485; CTA
VVAEIYQPM

SEQ ID NO: 30985 - protein, 9 aa, Homo sapiens
  Table A; Target 30985; HLA-A*31:01; IL22RA2; ENSG00000164485; CTA
VVAEIYQPM

SEQ ID NO: 30986 - protein, 9 aa, Homo sapiens
  Table A; Target 30986; HLA-A*32:01; IL22RA2; ENSG00000164485; CTA
VVAEIYQPM

SEQ ID NO: 30987 - protein, 9 aa, Homo sapiens
  Table A; Target 30987; HLA-A*33:01; IL22RA2; ENSG00000164485; CTA
VVAEIYQPM

SEQ ID NO: 30988 - protein, 9 aa, Homo sapiens
  Table A; Target 30988; HLA-A*33:03; IL22RA2; ENSG00000164485; CTA
VVAEIYQPM

SEQ ID NO: 30989 - protein, 9 aa, Homo sapiens
  Table A; Target 30989; HLA-A*68:01; IL22RA2; ENSG00000164485; CTA
VVAEIYQPM

SEQ ID NO: 30990 - protein, 9 aa, Homo sapiens
  Table A; Target 30990; HLA-A*68:02; IL22RA2; ENSG00000164485; CTA
VVAEIYQPM

SEQ ID NO: 30991 - protein, 9 aa, Homo sapiens
  Table A; Target 30991; HLA-B*15:01; IL22RA2; ENSG00000164485; CTA
VVAEIYQPM

SEQ ID NO: 30992 - protein, 9 aa, Homo sapiens
  Table A; Target 30992; HLA-B*27:05; IL22RA2; ENSG00000164485; CTA
VVAEIYQPM

SEQ ID NO: 30993 - protein, 9 aa, Homo sapiens
  Table A; Target 30993; HLA-B*35:01; IL22RA2; ENSG00000164485; CTA
VVAEIYQPM

SEQ ID NO: 30994 - protein, 9 aa, Homo sapiens
  Table A; Target 30994; HLA-B*35:03; IL22RA2; ENSG00000164485; CTA
VVAEIYQPM

SEQ ID NO: 30995 - protein, 9 aa, Homo sapiens
  Table A; Target 30995; HLA-B*46:01; IL22RA2; ENSG00000164485; CTA
VVAEIYQPM

SEQ ID NO: 30996 - protein, 9 aa, Homo sapiens
  Table A; Target 30996; HLA-B*56:01; IL22RA2; ENSG00000164485; CTA
VVAEIYQPM

SEQ ID NO: 30997 - protein, 9 aa, Homo sapiens
  Table A; Target 30997; HLA-C*01:02; IL22RA2; ENSG00000164485; CTA
VVAEIYQPM

SEQ ID NO: 30998 - protein, 9 aa, Homo sapiens
  Table A; Target 30998; HLA-C*02:02; IL22RA2; ENSG00000164485; CTA
VVAEIYQPM

SEQ ID NO: 30999 - protein, 9 aa, Homo sapiens
  Table A; Target 30999; HLA-C*03:03; IL22RA2; ENSG00000164485; CTA
VVAEIYQPM

SEQ ID NO: 31000 - protein, 9 aa, Homo sapiens
  Table A; Target 31000; HLA-C*03:04; IL22RA2; ENSG00000164485; CTA
VVAEIYQPM

SEQ ID NO: 31001 - protein, 9 aa, Homo sapiens
  Table A; Target 31001; HLA-C*04:01; IL22RA2; ENSG00000164485; CTA
VVAEIYQPM

SEQ ID NO: 31002 - protein, 9 aa, Homo sapiens
  Table A; Target 31002; HLA-C*05:01; IL22RA2; ENSG00000164485; CTA
VVAEIYQPM

SEQ ID NO: 31003 - protein, 9 aa, Homo sapiens
  Table A; Target 31003; HLA-C*07:04; IL22RA2; ENSG00000164485; CTA
VVAEIYQPM

SEQ ID NO: 31004 - protein, 9 aa, Homo sapiens
  Table A; Target 31004; HLA-C*07:06; IL22RA2; ENSG00000164485; CTA
VVAEIYQPM

SEQ ID NO: 31005 - protein, 9 aa, Homo sapiens
  Table A; Target 31005; HLA-C*12:03; IL22RA2; ENSG00000164485; CTA
VVAEIYQPM

SEQ ID NO: 31006 - protein, 9 aa, Homo sapiens
  Table A; Target 31006; HLA-C*14:02; IL22RA2; ENSG00000164485; CTA
VVAEIYQPM

SEQ ID NO: 31007 - protein, 9 aa, Homo sapiens
  Table A; Target 31007; HLA-C*16:04; IL22RA2; ENSG00000164485; CTA
VVAEIYQPM

SEQ ID NO: 31008 - protein, 10 aa, Homo sapiens
  Table A; Target 31008; HLA-A*02:01; IL22RA2; ENSG00000164485; CTA
VVAEIYQPML

SEQ ID NO: 31009 - protein, 10 aa, Homo sapiens
  Table A; Target 31009; HLA-A*02:04; IL22RA2; ENSG00000164485; CTA
VVAEIYQPML

SEQ ID NO: 31010 - protein, 10 aa, Homo sapiens
  Table A; Target 31010; HLA-A*02:07; IL22RA2; ENSG00000164485; CTA
VVAEIYQPML

SEQ ID NO: 31011 - protein, 10 aa, Homo sapiens
  Table A; Target 31011; HLA-A*23:01; IL22RA2; ENSG00000164485; CTA
VVAEIYQPML

SEQ ID NO: 31012 - protein, 10 aa, Homo sapiens
  Table A; Target 31012; HLA-A*68:02; IL22RA2; ENSG00000164485; CTA
VVAEIYQPML

SEQ ID NO: 31013 - protein, 9 aa, Homo sapiens
  Table A; Target 31013; HLA-A*32:01; IL22RA2; ENSG00000164485; CTA
VYEGAHRAV

SEQ ID NO: 31014 - protein, 9 aa, Homo sapiens
  Table A; Target 31014; HLA-C*01:02; IL22RA2; ENSG00000164485; CTA
VYEGAHRAV

SEQ ID NO: 31015 - protein, 9 aa, Homo sapiens
  Table A; Target 31015; HLA-C*04:01; IL22RA2; ENSG00000164485; CTA
VYEGAHRAV

SEQ ID NO: 31016 - protein, 9 aa, Homo sapiens
  Table A; Target 31016; HLA-C*06:02; IL22RA2; ENSG00000164485; CTA
VYEGAHRAV

SEQ ID NO: 31017 - protein, 9 aa, Homo sapiens
  Table A; Target 31017; HLA-C*07:01; IL22RA2; ENSG00000164485; CTA
VYEGAHRAV

SEQ ID NO: 31018 - protein, 9 aa, Homo sapiens
  Table A; Target 31018; HLA-C*14:02; IL22RA2; ENSG00000164485; CTA
VYEGAHRAV

SEQ ID NO: 31019 - protein, 9 aa, Homo sapiens
  Table A; Target 31019; HLA-C*16:01; IL22RA2; ENSG00000164485; CTA
VYEGAHRAV

SEQ ID NO: 31020 - protein, 11 aa, Homo sapiens
  Table A; Target 31020; HLA-A*24:02; IL22RA2; ENSG00000164485; CTA
VYEGAHRAVEI

SEQ ID NO: 31021 - protein, 8 aa, Homo sapiens
  Table A; Target 31021; HLA-A*23:01; IL22RA2; ENSG00000164485; CTA
VYFVQYKI

SEQ ID NO: 31022 - protein, 8 aa, Homo sapiens
  Table A; Target 31022; HLA-A*24:02; IL22RA2; ENSG00000164485; CTA
VYFVQYKI

SEQ ID NO: 31023 - protein, 10 aa, Homo sapiens
  Table A; Target 31023; HLA-A*24:02; IL22RA2; ENSG00000164485; CTA
VYFVQYKIMF

SEQ ID NO: 31024 - protein, 9 aa, Homo sapiens
  Table A; Target 31024; HLA-B*49:01; IL22RA2; ENSG00000164485; CTA
WETKIDPPV

SEQ ID NO: 31025 - protein, 8 aa, Homo sapiens
  Table A; Target 31025; HLA-B*46:01; IL22RA2; ENSG00000164485; CTA
YCVVAEIY

SEQ ID NO: 31026 - protein, 8 aa, Homo sapiens
  Table A; Target 31026; HLA-B*37:01; IL22RA2; ENSG00000164485; CTA
YEGAHRAV

SEQ ID NO: 31027 - protein, 8 aa, Homo sapiens
  Table A; Target 31027; HLA-B*49:01; IL22RA2; ENSG00000164485; CTA
YEGAHRAV

SEQ ID NO: 31028 - protein, 8 aa, Homo sapiens
  Table A; Target 31028; HLA-B*18:01; IL22RA2; ENSG00000164485; CTA
YELLYRVF

SEQ ID NO: 31029 - protein, 9 aa, Homo sapiens
  Table A; Target 31029; HLA-A*23:01; IL22RA2; ENSG00000164485; CTA
YFVQYKIMF

SEQ ID NO: 31030 - protein, 9 aa, Homo sapiens
  Table A; Target 31030; HLA-A*24:02; IL22RA2; ENSG00000164485; CTA
YFVQYKIMF

SEQ ID NO: 31031 - protein, 9 aa, Homo sapiens
  Table A; Target 31031; HLA-A*29:02; IL22RA2; ENSG00000164485; CTA
YFVQYKIMF

SEQ ID NO: 31032 - protein, 9 aa, Homo sapiens
  Table A; Target 31032; HLA-B*08:01; IL22RA2; ENSG00000164485; CTA
YGRVRAASA

SEQ ID NO: 31033 - protein, 9 aa, Homo sapiens
  Table A; Target 31033; HLA-B*54:01; IL22RA2; ENSG00000164485; CTA
YGRVRAASA

SEQ ID NO: 31034 - protein, 9 aa, Homo sapiens
  Table A; Target 31034; HLA-A*02:03; IL22RA2; ENSG00000164485; CTA
YQKEKNVSI

SEQ ID NO: 31035 - protein, 9 aa, Homo sapiens
  Table A; Target 31035; HLA-A*30:01; IL22RA2; ENSG00000164485; CTA
YQKEKNVSI

SEQ ID NO: 31036 - protein, 9 aa, Homo sapiens
  Table A; Target 31036; HLA-A*32:01; IL22RA2; ENSG00000164485; CTA
YQKEKNVSI

SEQ ID NO: 31037 - protein, 9 aa, Homo sapiens
  Table A; Target 31037; HLA-B*08:01; IL22RA2; ENSG00000164485; CTA
YQKEKNVSI

SEQ ID NO: 31038 - protein, 9 aa, Homo sapiens
  Table A; Target 31038; HLA-B*13:02; IL22RA2; ENSG00000164485; CTA
YQKEKNVSI

SEQ ID NO: 31039 - protein, 9 aa, Homo sapiens
  Table A; Target 31039; HLA-B*15:03; IL22RA2; ENSG00000164485; CTA
YQKEKNVSI

SEQ ID NO: 31040 - protein, 9 aa, Homo sapiens
  Table A; Target 31040; HLA-B*38:01; IL22RA2; ENSG00000164485; CTA
YQKEKNVSI

SEQ ID NO: 31041 - protein, 9 aa, Homo sapiens
  Table A; Target 31041; HLA-B*39:01; IL22RA2; ENSG00000164485; CTA
YQKEKNVSI

SEQ ID NO: 31042 - protein, 9 aa, Homo sapiens
  Table A; Target 31042; HLA-B*40:02; IL22RA2; ENSG00000164485; CTA
YQKEKNVSI

SEQ ID NO: 31043 - protein, 9 aa, Homo sapiens
  Table A; Target 31043; HLA-B*46:01; IL22RA2; ENSG00000164485; CTA
YQKEKNVSI

SEQ ID NO: 31044 - protein, 9 aa, Homo sapiens
  Table A; Target 31044; HLA-C*02:02; IL22RA2; ENSG00000164485; CTA
YQKEKNVSI

SEQ ID NO: 31045 - protein, 9 aa, Homo sapiens
  Table A; Target 31045; HLA-A*24:02; IL22RA2; ENSG00000164485; CTA
YYELLYRVF

SEQ ID NO: 31046 - protein, 9 aa, Homo sapiens
  Table A; Target 31046; HLA-A*29:02; IL22RA2; ENSG00000164485; CTA
YYELLYRVF

SEQ ID NO: 31047 - protein, 9 aa, Homo sapiens
  Table A; Target 31047; HLA-A*02:04; INSL4; ENSG00000120211; CTA
AIWLLLSQL

SEQ ID NO: 31048 - protein, 8 aa, Homo sapiens
  Table A; Target 31048; HLA-A*32:01; INSL4; ENSG00000120211; CTA
ALGTTSEF

SEQ ID NO: 31049 - protein, 8 aa, Homo sapiens
  Table A; Target 31049; HLA-B*37:01; INSL4; ENSG00000120211; CTA
ALGTTSEF

SEQ ID NO: 31050 - protein, 8 aa, Homo sapiens
  Table A; Target 31050; HLA-B*46:01; INSL4; ENSG00000120211; CTA
ALGTTSEF

SEQ ID NO: 31051 - protein, 8 aa, Homo sapiens
  Table A; Target 31051; HLA-C*05:01; INSL4; ENSG00000120211; CTA
ALGTTSEF

SEQ ID NO: 31052 - protein, 8 aa, Homo sapiens
  Table A; Target 31052; HLA-C*14:02; INSL4; ENSG00000120211; CTA
ALGTTSEF

SEQ ID NO: 31053 - protein, 9 aa, Homo sapiens
  Table A; Target 31053; HLA-B*13:02; INSL4; ENSG00000120211; CTA
ALGTTSEFI

SEQ ID NO: 31054 - protein, 9 aa, Homo sapiens
  Table A; Target 31054; HLA-B*38:01; INSL4; ENSG00000120211; CTA
CDDGTSVKL

SEQ ID NO: 31055 - protein, 9 aa, Homo sapiens
  Table A; Target 31055; HLA-B*40:01; INSL4; ENSG00000120211; CTA
CDDGTSVKL

SEQ ID NO: 31056 - protein, 9 aa, Homo sapiens
  Table A; Target 31056; HLA-C*04:01; INSL4; ENSG00000120211; CTA
CDDGTSVKL

SEQ ID NO: 31057 - protein, 9 aa, Homo sapiens
  Table A; Target 31057; HLA-C*05:01; INSL4; ENSG00000120211; CTA
CDDGTSVKL

SEQ ID NO: 31058 - protein, 11 aa, Homo sapiens
  Table A; Target 31058; HLA-B*56:01; INSL4; ENSG00000120211; CTA
CPMPEKTFTTT

SEQ ID NO: 31059 - protein, 8 aa, Homo sapiens
  Table A; Target 31059; HLA-B*18:01; INSL4; ENSG00000120211; CTA
DDGTSVKL

SEQ ID NO: 31060 - protein, 8 aa, Homo sapiens
  Table A; Target 31060; HLA-C*07:01; INSL4; ENSG00000120211; CTA
DDGTSVKL

SEQ ID NO: 31061 - protein, 8 aa, Homo sapiens
  Table A; Target 31061; HLA-B*51:01; INSL4; ENSG00000120211; CTA
DPFCCEVI

SEQ ID NO: 31062 - protein, 10 aa, Homo sapiens
  Table A; Target 31062; HLA-A*23:01; INSL4; ENSG00000120211; CTA
EFIPNLSPEL

SEQ ID NO: 31063 - protein, 10 aa, Homo sapiens
  Table A; Target 31063; HLA-A*24:02; INSL4; ENSG00000120211; CTA
EFIPNLSPEL

SEQ ID NO: 31064 - protein, 10 aa, Homo sapiens
  Table A; Target 31064; HLA-C*14:02; INSL4; ENSG00000120211; CTA
EFIPNLSPEL

SEQ ID NO: 31065 - protein, 9 aa, Homo sapiens
  Table A; Target 31065; HLA-A*33:03; INSL4; ENSG00000120211; CTA
EMVSTSNNK

SEQ ID NO: 31066 - protein, 8 aa, Homo sapiens
  Table A; Target 31066; HLA-A*33:03; INSL4; ENSG00000120211; CTA
ESLAAELR

SEQ ID NO: 31067 - protein, 10 aa, Homo sapiens
  Table A; Target 31067; HLA-A*25:01; INSL4; ENSG00000120211; CTA
EVICDDGTSV

SEQ ID NO: 31068 - protein, 10 aa, Homo sapiens
  Table A; Target 31068; HLA-A*26:01; INSL4; ENSG00000120211; CTA
EVICDDGTSV

SEQ ID NO: 31069 - protein, 10 aa, Homo sapiens
  Table A; Target 31069; HLA-A*68:02; INSL4; ENSG00000120211; CTA
EVICDDGTSV

SEQ ID NO: 31070 - protein, 11 aa, Homo sapiens
  Table A; Target 31070; HLA-A*26:01; INSL4; ENSG00000120211; CTA
EVICDDGTSVK

SEQ ID NO: 31071 - protein, 11 aa, Homo sapiens
  Table A; Target 31071; HLA-A*68:01; INSL4; ENSG00000120211; CTA
EVICDDGTSVK

SEQ ID NO: 31072 - protein, 11 aa, Homo sapiens
  Table A; Target 31072; HLA-C*07:06; INSL4; ENSG00000120211; CTA
EVICDDGTSVK

SEQ ID NO: 31073 - protein, 9 aa, Homo sapiens
  Table A; Target 31073; HLA-A*02:01; INSL4; ENSG00000120211; CTA
FIPNLSPEL

SEQ ID NO: 31074 - protein, 9 aa, Homo sapiens
  Table A; Target 31074; HLA-A*02:04; INSL4; ENSG00000120211; CTA
FIPNLSPEL

SEQ ID NO: 31075 - protein, 9 aa, Homo sapiens
  Table A; Target 31075; HLA-A*02:07; INSL4; ENSG00000120211; CTA
FIPNLSPEL

SEQ ID NO: 31076 - protein, 9 aa, Homo sapiens
  Table A; Target 31076; HLA-A*23:01; INSL4; ENSG00000120211; CTA
FIPNLSPEL

SEQ ID NO: 31077 - protein, 9 aa, Homo sapiens
  Table A; Target 31077; HLA-A*24:02; INSL4; ENSG00000120211; CTA
FIPNLSPEL

SEQ ID NO: 31078 - protein, 9 aa, Homo sapiens
  Table A; Target 31078; HLA-A*26:01; INSL4; ENSG00000120211; CTA
FIPNLSPEL

SEQ ID NO: 31079 - protein, 9 aa, Homo sapiens
  Table A; Target 31079; HLA-A*68:02; INSL4; ENSG00000120211; CTA
FIPNLSPEL

SEQ ID NO: 31080 - protein, 9 aa, Homo sapiens
  Table A; Target 31080; HLA-B*35:03; INSL4; ENSG00000120211; CTA
FIPNLSPEL

SEQ ID NO: 31081 - protein, 9 aa, Homo sapiens
  Table A; Target 31081; HLA-B*46:01; INSL4; ENSG00000120211; CTA
FIPNLSPEL

SEQ ID NO: 31082 - protein, 9 aa, Homo sapiens
  Table A; Target 31082; HLA-B*58:01; INSL4; ENSG00000120211; CTA
FIPNLSPEL

SEQ ID NO: 31083 - protein, 9 aa, Homo sapiens
  Table A; Target 31083; HLA-C*01:02; INSL4; ENSG00000120211; CTA
FIPNLSPEL

SEQ ID NO: 31084 - protein, 9 aa, Homo sapiens
  Table A; Target 31084; HLA-C*02:02; INSL4; ENSG00000120211; CTA
FIPNLSPEL

SEQ ID NO: 31085 - protein, 9 aa, Homo sapiens
  Table A; Target 31085; HLA-C*03:03; INSL4; ENSG00000120211; CTA
FIPNLSPEL

SEQ ID NO: 31086 - protein, 9 aa, Homo sapiens
  Table A; Target 31086; HLA-C*03:04; INSL4; ENSG00000120211; CTA
FIPNLSPEL

SEQ ID NO: 31087 - protein, 8 aa, Homo sapiens
  Table A; Target 31087; HLA-A*32:01; INSL4; ENSG00000120211; CTA
FTTTPGGW

SEQ ID NO: 31088 - protein, 10 aa, Homo sapiens
  Table A; Target 31088; HLA-A*01:01; INSL4; ENSG00000120211; CTA
FTTTPGGWLL

SEQ ID NO: 31089 - protein, 10 aa, Homo sapiens
  Table A; Target 31089; HLA-A*68:02; INSL4; ENSG00000120211; CTA
FTTTPGGWLL

SEQ ID NO: 31090 - protein, 9 aa, Homo sapiens
  Table A; Target 31090; HLA-B*07:02; INSL4; ENSG00000120211; CTA
GPRFGKHLL

SEQ ID NO: 31091 - protein, 10 aa, Homo sapiens
  Table A; Target 31091; HLA-A*30:02; INSL4; ENSG00000120211; CTA
GQALGTTSEF

SEQ ID NO: 31092 - protein, 10 aa, Homo sapiens
  Table A; Target 31092; HLA-B*15:01; INSL4; ENSG00000120211; CTA
GQALGTTSEF

SEQ ID NO: 31093 - protein, 10 aa, Homo sapiens
  Table A; Target 31093; HLA-B*15:03; INSL4; ENSG00000120211; CTA
GQALGTTSEF

SEQ ID NO: 31094 - protein, 10 aa, Homo sapiens
  Table A; Target 31094; HLA-B*27:02; INSL4; ENSG00000120211; CTA
GQALGTTSEF

SEQ ID NO: 31095 - protein, 10 aa, Homo sapiens
  Table A; Target 31095; HLA-B*27:05; INSL4; ENSG00000120211; CTA
GQALGTTSEF

SEQ ID NO: 31096 - protein, 10 aa, Homo sapiens
  Table A; Target 31096; HLA-C*07:04; INSL4; ENSG00000120211; CTA
GQALGTTSEF

SEQ ID NO: 31097 - protein, 10 aa, Homo sapiens
  Table A; Target 31097; HLA-C*16:04; INSL4; ENSG00000120211; CTA
GQALGTTSEF

SEQ ID NO: 31098 - protein, 11 aa, Homo sapiens
  Table A; Target 31098; HLA-B*13:02; INSL4; ENSG00000120211; CTA
GQALGTTSEFI

SEQ ID NO: 31099 - protein, 10 aa, Homo sapiens
  Table A; Target 31099; HLA-A*02:04; INSL4; ENSG00000120211; CTA
GTTSEFIPNL

SEQ ID NO: 31100 - protein, 10 aa, Homo sapiens
  Table A; Target 31100; HLA-A*11:01; INSL4; ENSG00000120211; CTA
GTTSEFIPNL

SEQ ID NO: 31101 - protein, 10 aa, Homo sapiens
  Table A; Target 31101; HLA-A*68:02; INSL4; ENSG00000120211; CTA
GTTSEFIPNL

SEQ ID NO: 31102 - protein, 8 aa, Homo sapiens
  Table A; Target 31102; HLA-C*05:01; INSL4; ENSG00000120211; CTA
ICDDGTSV

SEQ ID NO: 31103 - protein, 9 aa, Homo sapiens
  Table A; Target 31103; HLA-C*05:01; INSL4; ENSG00000120211; CTA
ICDDGTSVK

SEQ ID NO: 31104 - protein, 10 aa, Homo sapiens
  Table A; Target 31104; HLA-A*02:07; INSL4; ENSG00000120211; CTA
ICDDGTSVKL

SEQ ID NO: 31105 - protein, 10 aa, Homo sapiens
  Table A; Target 31105; HLA-B*35:01; INSL4; ENSG00000120211; CTA
ICDDGTSVKL

SEQ ID NO: 31106 - protein, 10 aa, Homo sapiens
  Table A; Target 31106; HLA-B*35:03; INSL4; ENSG00000120211; CTA
ICDDGTSVKL

SEQ ID NO: 31107 - protein, 10 aa, Homo sapiens
  Table A; Target 31107; HLA-B*38:01; INSL4; ENSG00000120211; CTA
ICDDGTSVKL

SEQ ID NO: 31108 - protein, 10 aa, Homo sapiens
  Table A; Target 31108; HLA-B*39:01; INSL4; ENSG00000120211; CTA
ICDDGTSVKL

SEQ ID NO: 31109 - protein, 10 aa, Homo sapiens
  Table A; Target 31109; HLA-B*40:01; INSL4; ENSG00000120211; CTA
ICDDGTSVKL

SEQ ID NO: 31110 - protein, 10 aa, Homo sapiens
  Table A; Target 31110; HLA-B*55:01; INSL4; ENSG00000120211; CTA
ICDDGTSVKL

SEQ ID NO: 31111 - protein, 10 aa, Homo sapiens
  Table A; Target 31111; HLA-C*03:04; INSL4; ENSG00000120211; CTA
ICDDGTSVKL

SEQ ID NO: 31112 - protein, 10 aa, Homo sapiens
  Table A; Target 31112; HLA-C*05:01; INSL4; ENSG00000120211; CTA
ICDDGTSVKL

SEQ ID NO: 31113 - protein, 10 aa, Homo sapiens
  Table A; Target 31113; HLA-C*07:04; INSL4; ENSG00000120211; CTA
ICDDGTSVKL

SEQ ID NO: 31114 - protein, 10 aa, Homo sapiens
  Table A; Target 31114; HLA-C*12:03; INSL4; ENSG00000120211; CTA
ICDDGTSVKL

SEQ ID NO: 31115 - protein, 8 aa, Homo sapiens
  Table A; Target 31115; HLA-B*07:02; INSL4; ENSG00000120211; CTA
IPNLSPEL

SEQ ID NO: 31116 - protein, 8 aa, Homo sapiens
  Table A; Target 31116; HLA-B*08:01; INSL4; ENSG00000120211; CTA
IPNLSPEL

SEQ ID NO: 31117 - protein, 8 aa, Homo sapiens
  Table A; Target 31117; HLA-B*35:01; INSL4; ENSG00000120211; CTA
IPNLSPEL

SEQ ID NO: 31118 - protein, 8 aa, Homo sapiens
  Table A; Target 31118; HLA-B*35:03; INSL4; ENSG00000120211; CTA
IPNLSPEL

SEQ ID NO: 31119 - protein, 8 aa, Homo sapiens
  Table A; Target 31119; HLA-B*39:01; INSL4; ENSG00000120211; CTA
IPNLSPEL

SEQ ID NO: 31120 - protein, 8 aa, Homo sapiens
  Table A; Target 31120; HLA-B*51:01; INSL4; ENSG00000120211; CTA
IPNLSPEL

SEQ ID NO: 31121 - protein, 8 aa, Homo sapiens
  Table A; Target 31121; HLA-B*54:01; INSL4; ENSG00000120211; CTA
IPNLSPEL

SEQ ID NO: 31122 - protein, 8 aa, Homo sapiens
  Table A; Target 31122; HLA-B*55:01; INSL4; ENSG00000120211; CTA
IPNLSPEL

SEQ ID NO: 31123 - protein, 8 aa, Homo sapiens
  Table A; Target 31123; HLA-B*56:01; INSL4; ENSG00000120211; CTA
IPNLSPEL

SEQ ID NO: 31124 - protein, 8 aa, Homo sapiens
  Table A; Target 31124; HLA-C*01:02; INSL4; ENSG00000120211; CTA
IPNLSPEL

SEQ ID NO: 31125 - protein, 8 aa, Homo sapiens
  Table A; Target 31125; HLA-C*03:03; INSL4; ENSG00000120211; CTA
IPNLSPEL

SEQ ID NO: 31126 - protein, 8 aa, Homo sapiens
  Table A; Target 31126; HLA-C*03:04; INSL4; ENSG00000120211; CTA
IPNLSPEL

SEQ ID NO: 31127 - protein, 8 aa, Homo sapiens
  Table A; Target 31127; HLA-C*05:01; INSL4; ENSG00000120211; CTA
IPNLSPEL

SEQ ID NO: 31128 - protein, 8 aa, Homo sapiens
  Table A; Target 31128; HLA-C*07:02; INSL4; ENSG00000120211; CTA
IPNLSPEL

SEQ ID NO: 31129 - protein, 8 aa, Homo sapiens
  Table A; Target 31129; HLA-C*14:02; INSL4; ENSG00000120211; CTA
IPNLSPEL

SEQ ID NO: 31130 - protein, 8 aa, Homo sapiens
  Table A; Target 31130; HLA-C*16:01; INSL4; ENSG00000120211; CTA
IPNLSPEL

SEQ ID NO: 31131 - protein, 8 aa, Homo sapiens
  Table A; Target 31131; HLA-C*16:02; INSL4; ENSG00000120211; CTA
IPNLSPEL

SEQ ID NO: 31132 - protein, 9 aa, Homo sapiens
  Table A; Target 31132; HLA-A*24:02; INSL4; ENSG00000120211; CTA
IWLLLSQLL

SEQ ID NO: 31133 - protein, 11 aa, Homo sapiens
  Table A; Target 31133; HLA-B*15:03; INSL4; ENSG00000120211; CTA
KKPLSEGQPSL

SEQ ID NO: 31134 - protein, 10 aa, Homo sapiens
  Table A; Target 31134; HLA-B*07:02; INSL4; ENSG00000120211; CTA
KPLSEGQPSL

SEQ ID NO: 31135 - protein, 10 aa, Homo sapiens
  Table A; Target 31135; HLA-B*35:01; INSL4; ENSG00000120211; CTA
KPLSEGQPSL

SEQ ID NO: 31136 - protein, 10 aa, Homo sapiens
  Table A; Target 31136; HLA-B*35:03; INSL4; ENSG00000120211; CTA
KPLSEGQPSL

SEQ ID NO: 31137 - protein, 10 aa, Homo sapiens
  Table A; Target 31137; HLA-B*40:01; INSL4; ENSG00000120211; CTA
KPLSEGQPSL

SEQ ID NO: 31138 - protein, 10 aa, Homo sapiens
  Table A; Target 31138; HLA-B*55:01; INSL4; ENSG00000120211; CTA
KPLSEGQPSL

SEQ ID NO: 31139 - protein, 10 aa, Homo sapiens
  Table A; Target 31139; HLA-B*56:01; INSL4; ENSG00000120211; CTA
KPLSEGQPSL

SEQ ID NO: 31140 - protein, 10 aa, Homo sapiens
  Table A; Target 31140; HLA-C*07:02; INSL4; ENSG00000120211; CTA
KPLSEGQPSL

SEQ ID NO: 31141 - protein, 11 aa, Homo sapiens
  Table A; Target 31141; HLA-A*03:01; INSL4; ENSG00000120211; CTA
KPLSEGQPSLK

SEQ ID NO: 31142 - protein, 11 aa, Homo sapiens
  Table A; Target 31142; HLA-A*03:02; INSL4; ENSG00000120211; CTA
KPLSEGQPSLK

SEQ ID NO: 31143 - protein, 11 aa, Homo sapiens
  Table A; Target 31143; HLA-B*27:02; INSL4; ENSG00000120211; CTA
KPLSEGQPSLK

SEQ ID NO: 31144 - protein, 10 aa, Homo sapiens
  Table A; Target 31144; HLA-A*25:01; INSL4; ENSG00000120211; CTA
KTFTTTPGGW

SEQ ID NO: 31145 - protein, 10 aa, Homo sapiens
  Table A; Target 31145; HLA-A*32:01; INSL4; ENSG00000120211; CTA
KTFTTTPGGW

SEQ ID NO: 31146 - protein, 10 aa, Homo sapiens
  Table A; Target 31146; HLA-B*57:01; INSL4; ENSG00000120211; CTA
KTFTTTPGGW

SEQ ID NO: 31147 - protein, 10 aa, Homo sapiens
  Table A; Target 31147; HLA-B*58:01; INSL4; ENSG00000120211; CTA
KTFTTTPGGW

SEQ ID NO: 31148 - protein, 9 aa, Homo sapiens
  Table A; Target 31148; HLA-B*37:01; INSL4; ENSG00000120211; CTA
LESGRPKEM

SEQ ID NO: 31149 - protein, 10 aa, Homo sapiens
  Table A; Target 31149; HLA-A*02:03; INSL4; ENSG00000120211; CTA
LLRESLAAEL

SEQ ID NO: 31150 - protein, 10 aa, Homo sapiens
  Table A; Target 31150; HLA-A*02:04; INSL4; ENSG00000120211; CTA
LLRESLAAEL

SEQ ID NO: 31151 - protein, 10 aa, Homo sapiens
  Table A; Target 31151; HLA-A*02:04; INSL4; ENSG00000120211; CTA
LLSQLLRESL

SEQ ID NO: 31152 - protein, 9 aa, Homo sapiens
  Table A; Target 31152; HLA-B*27:05; INSL4; ENSG00000120211; CTA
LRESLAAEL

SEQ ID NO: 31153 - protein, 9 aa, Homo sapiens
  Table A; Target 31153; HLA-B*38:01; INSL4; ENSG00000120211; CTA
LRESLAAEL

SEQ ID NO: 31154 - protein, 9 aa, Homo sapiens
  Table A; Target 31154; HLA-B*39:01; INSL4; ENSG00000120211; CTA
LRESLAAEL

SEQ ID NO: 31155 - protein, 9 aa, Homo sapiens
  Table A; Target 31155; HLA-C*06:02; INSL4; ENSG00000120211; CTA
LRESLAAEL

SEQ ID NO: 31156 - protein, 9 aa, Homo sapiens
  Table A; Target 31156; HLA-C*07:02; INSL4; ENSG00000120211; CTA
LRESLAAEL

SEQ ID NO: 31157 - protein, 8 aa, Homo sapiens
  Table A; Target 31157; HLA-C*03:04; INSL4; ENSG00000120211; CTA
LSEGQPSL

SEQ ID NO: 31158 - protein, 8 aa, Homo sapiens
  Table A; Target 31158; HLA-C*05:01; INSL4; ENSG00000120211; CTA
LSEGQPSL

SEQ ID NO: 31159 - protein, 9 aa, Homo sapiens
  Table A; Target 31159; HLA-A*01:01; INSL4; ENSG00000120211; CTA
LSEGQPSLK

SEQ ID NO: 31160 - protein, 9 aa, Homo sapiens
  Table A; Target 31160; HLA-A*03:02; INSL4; ENSG00000120211; CTA
LSEGQPSLK

SEQ ID NO: 31161 - protein, 9 aa, Homo sapiens
  Table A; Target 31161; HLA-C*05:01; INSL4; ENSG00000120211; CTA
LSEGQPSLK

SEQ ID NO: 31162 - protein, 9 aa, Homo sapiens
  Table A; Target 31162; HLA-A*32:01; INSL4; ENSG00000120211; CTA
LSQLLRESL

SEQ ID NO: 31163 - protein, 9 aa, Homo sapiens
  Table A; Target 31163; HLA-C*01:02; INSL4; ENSG00000120211; CTA
LSQLLRESL

SEQ ID NO: 31164 - protein, 9 aa, Homo sapiens
  Table A; Target 31164; HLA-C*07:02; INSL4; ENSG00000120211; CTA
LSQLLRESL

SEQ ID NO: 31165 - protein, 9 aa, Homo sapiens
  Table A; Target 31165; HLA-C*16:01; INSL4; ENSG00000120211; CTA
LSQLLRESL

SEQ ID NO: 31166 - protein, 9 aa, Homo sapiens
  Table A; Target 31166; HLA-A*03:01; INSL4; ENSG00000120211; CTA
LSYCPMPEK

SEQ ID NO: 31167 - protein, 9 aa, Homo sapiens
  Table A; Target 31167; HLA-A*11:01; INSL4; ENSG00000120211; CTA
LSYCPMPEK

SEQ ID NO: 31168 - protein, 8 aa, Homo sapiens
  Table A; Target 31168; HLA-C*16:01; INSL4; ENSG00000120211; CTA
MASLFRSY

SEQ ID NO: 31169 - protein, 9 aa, Homo sapiens
  Table A; Target 31169; HLA-B*07:02; INSL4; ENSG00000120211; CTA
MPEKTFTTT

SEQ ID NO: 31170 - protein, 9 aa, Homo sapiens
  Table A; Target 31170; HLA-B*35:01; INSL4; ENSG00000120211; CTA
MPEKTFTTT

SEQ ID NO: 31171 - protein, 9 aa, Homo sapiens
  Table A; Target 31171; HLA-B*35:03; INSL4; ENSG00000120211; CTA
MPEKTFTTT

SEQ ID NO: 31172 - protein, 9 aa, Homo sapiens
  Table A; Target 31172; HLA-B*54:01; INSL4; ENSG00000120211; CTA
MPEKTFTTT

SEQ ID NO: 31173 - protein, 9 aa, Homo sapiens
  Table A; Target 31173; HLA-B*55:01; INSL4; ENSG00000120211; CTA
MPEKTFTTT

SEQ ID NO: 31174 - protein, 9 aa, Homo sapiens
  Table A; Target 31174; HLA-B*56:01; INSL4; ENSG00000120211; CTA
MPEKTFTTT

SEQ ID NO: 31175 - protein, 8 aa, Homo sapiens
  Table A; Target 31175; HLA-B*08:01; INSL4; ENSG00000120211; CTA
NNKDGQAL

SEQ ID NO: 31176 - protein, 8 aa, Homo sapiens
  Table A; Target 31176; HLA-C*01:02; INSL4; ENSG00000120211; CTA
NNKDGQAL

SEQ ID NO: 31177 - protein, 9 aa, Homo sapiens
  Table A; Target 31177; HLA-A*02:01; INSL4; ENSG00000120211; CTA
PLSEGQPSL

SEQ ID NO: 31178 - protein, 9 aa, Homo sapiens
  Table A; Target 31178; HLA-A*02:04; INSL4; ENSG00000120211; CTA
PLSEGQPSL

SEQ ID NO: 31179 - protein, 9 aa, Homo sapiens
  Table A; Target 31179; HLA-B*13:02; INSL4; ENSG00000120211; CTA
PLSEGQPSL

SEQ ID NO: 31180 - protein, 9 aa, Homo sapiens
  Table A; Target 31180; HLA-B*39:01; INSL4; ENSG00000120211; CTA
PLSEGQPSL

SEQ ID NO: 31181 - protein, 9 aa, Homo sapiens
  Table A; Target 31181; HLA-B*55:01; INSL4; ENSG00000120211; CTA
PLSEGQPSL

SEQ ID NO: 31182 - protein, 9 aa, Homo sapiens
  Table A; Target 31182; HLA-A*23:01; INSL4; ENSG00000120211; CTA
QALGTTSEF

SEQ ID NO: 31183 - protein, 9 aa, Homo sapiens
  Table A; Target 31183; HLA-A*24:02; INSL4; ENSG00000120211; CTA
QALGTTSEF

SEQ ID NO: 31184 - protein, 9 aa, Homo sapiens
  Table A; Target 31184; HLA-A*25:01; INSL4; ENSG00000120211; CTA
QALGTTSEF

SEQ ID NO: 31185 - protein, 9 aa, Homo sapiens
  Table A; Target 31185; HLA-A*26:01; INSL4; ENSG00000120211; CTA
QALGTTSEF

SEQ ID NO: 31186 - protein, 9 aa, Homo sapiens
  Table A; Target 31186; HLA-A*30:02; INSL4; ENSG00000120211; CTA
QALGTTSEF

SEQ ID NO: 31187 - protein, 9 aa, Homo sapiens
  Table A; Target 31187; HLA-A*32:01; INSL4; ENSG00000120211; CTA
QALGTTSEF

SEQ ID NO: 31188 - protein, 9 aa, Homo sapiens
  Table A; Target 31188; HLA-B*07:02; INSL4; ENSG00000120211; CTA
QALGTTSEF

SEQ ID NO: 31189 - protein, 9 aa, Homo sapiens
  Table A; Target 31189; HLA-B*15:01; INSL4; ENSG00000120211; CTA
QALGTTSEF

SEQ ID NO: 31190 - protein, 9 aa, Homo sapiens
  Table A; Target 31190; HLA-B*15:03; INSL4; ENSG00000120211; CTA
QALGTTSEF

SEQ ID NO: 31191 - protein, 9 aa, Homo sapiens
  Table A; Target 31191; HLA-B*35:01; INSL4; ENSG00000120211; CTA
QALGTTSEF

SEQ ID NO: 31192 - protein, 9 aa, Homo sapiens
  Table A; Target 31192; HLA-B*35:03; INSL4; ENSG00000120211; CTA
QALGTTSEF

SEQ ID NO: 31193 - protein, 9 aa, Homo sapiens
  Table A; Target 31193; HLA-B*39:01; INSL4; ENSG00000120211; CTA
QALGTTSEF

SEQ ID NO: 31194 - protein, 9 aa, Homo sapiens
  Table A; Target 31194; HLA-B*46:01; INSL4; ENSG00000120211; CTA
QALGTTSEF

SEQ ID NO: 31195 - protein, 9 aa, Homo sapiens
  Table A; Target 31195; HLA-B*55:01; INSL4; ENSG00000120211; CTA
QALGTTSEF

SEQ ID NO: 31196 - protein, 9 aa, Homo sapiens
  Table A; Target 31196; HLA-B*58:01; INSL4; ENSG00000120211; CTA
QALGTTSEF

SEQ ID NO: 31197 - protein, 9 aa, Homo sapiens
  Table A; Target 31197; HLA-C*01:02; INSL4; ENSG00000120211; CTA
QALGTTSEF

SEQ ID NO: 31198 - protein, 9 aa, Homo sapiens
  Table A; Target 31198; HLA-C*02:02; INSL4; ENSG00000120211; CTA
QALGTTSEF

SEQ ID NO: 31199 - protein, 9 aa, Homo sapiens
  Table A; Target 31199; HLA-C*03:03; INSL4; ENSG00000120211; CTA
QALGTTSEF

SEQ ID NO: 31200 - protein, 9 aa, Homo sapiens
  Table A; Target 31200; HLA-C*03:04; INSL4; ENSG00000120211; CTA
QALGTTSEF

SEQ ID NO: 31201 - protein, 9 aa, Homo sapiens
  Table A; Target 31201; HLA-C*04:01; INSL4; ENSG00000120211; CTA
QALGTTSEF

SEQ ID NO: 31202 - protein, 9 aa, Homo sapiens
  Table A; Target 31202; HLA-C*05:01; INSL4; ENSG00000120211; CTA
QALGTTSEF

SEQ ID NO: 31203 - protein, 9 aa, Homo sapiens
  Table A; Target 31203; HLA-C*07:06; INSL4; ENSG00000120211; CTA
QALGTTSEF

SEQ ID NO: 31204 - protein, 9 aa, Homo sapiens
  Table A; Target 31204; HLA-C*12:03; INSL4; ENSG00000120211; CTA
QALGTTSEF

SEQ ID NO: 31205 - protein, 9 aa, Homo sapiens
  Table A; Target 31205; HLA-C*14:02; INSL4; ENSG00000120211; CTA
QALGTTSEF

SEQ ID NO: 31206 - protein, 9 aa, Homo sapiens
  Table A; Target 31206; HLA-C*16:01; INSL4; ENSG00000120211; CTA
QALGTTSEF

SEQ ID NO: 31207 - protein, 9 aa, Homo sapiens
  Table A; Target 31207; HLA-C*16:02; INSL4; ENSG00000120211; CTA
QALGTTSEF

SEQ ID NO: 31208 - protein, 9 aa, Homo sapiens
  Table A; Target 31208; HLA-C*16:04; INSL4; ENSG00000120211; CTA
QALGTTSEF

SEQ ID NO: 31209 - protein, 11 aa, Homo sapiens
  Table A; Target 31209; HLA-A*02:01; INSL4; ENSG00000120211; CTA
QLLRESLAAEL

SEQ ID NO: 31210 - protein, 11 aa, Homo sapiens
  Table A; Target 31210; HLA-A*02:04; INSL4; ENSG00000120211; CTA
QLLRESLAAEL

SEQ ID NO: 31211 - protein, 8 aa, Homo sapiens
  Table A; Target 31211; HLA-B*08:01; INSL4; ENSG00000120211; CTA
QPSLKKII

SEQ ID NO: 31212 - protein, 9 aa, Homo sapiens
  Table A; Target 31212; HLA-B*07:02; INSL4; ENSG00000120211; CTA
QPSLKKIIL

SEQ ID NO: 31213 - protein, 9 aa, Homo sapiens
  Table A; Target 31213; HLA-B*08:01; INSL4; ENSG00000120211; CTA
QPSLKKIIL

SEQ ID NO: 31214 - protein, 9 aa, Homo sapiens
  Table A; Target 31214; HLA-C*07:02; INSL4; ENSG00000120211; CTA
QPSLKKIIL

SEQ ID NO: 31215 - protein, 8 aa, Homo sapiens
  Table A; Target 31215; HLA-A*30:01; INSL4; ENSG00000120211; CTA
RESLAAEL

SEQ ID NO: 31216 - protein, 8 aa, Homo sapiens
  Table A; Target 31216; HLA-B*18:01; INSL4; ENSG00000120211; CTA
RESLAAEL

SEQ ID NO: 31217 - protein, 8 aa, Homo sapiens
  Table A; Target 31217; HLA-B*37:01; INSL4; ENSG00000120211; CTA
RESLAAEL

SEQ ID NO: 31218 - protein, 8 aa, Homo sapiens
  Table A; Target 31218; HLA-B*40:01; INSL4; ENSG00000120211; CTA
RESLAAEL

SEQ ID NO: 31219 - protein, 9 aa, Homo sapiens
  Table A; Target 31219; HLA-A*29:02; INSL4; ENSG00000120211; CTA
RFGKHLLSY

SEQ ID NO: 31220 - protein, 8 aa, Homo sapiens
  Table A; Target 31220; HLA-B*57:01; INSL4; ENSG00000120211; CTA
RSYLPAIW

SEQ ID NO: 31221 - protein, 9 aa, Homo sapiens
  Table A; Target 31221; HLA-B*40:02; INSL4; ENSG00000120211; CTA
SEFIPNLSP

SEQ ID NO: 31222 - protein, 9 aa, Homo sapiens
  Table A; Target 31222; HLA-B*49:01; INSL4; ENSG00000120211; CTA
SEFIPNLSP

SEQ ID NO: 31223 - protein, 11 aa, Homo sapiens
  Table A; Target 31223; HLA-A*30:01; INSL4; ENSG00000120211; CTA
SEFIPNLSPEL

SEQ ID NO: 31224 - protein, 11 aa, Homo sapiens
  Table A; Target 31224; HLA-B*40:01; INSL4; ENSG00000120211; CTA
SEFIPNLSPEL

SEQ ID NO: 31225 - protein, 11 aa, Homo sapiens
  Table A; Target 31225; HLA-B*44:02; INSL4; ENSG00000120211; CTA
SEFIPNLSPEL

SEQ ID NO: 31226 - protein, 11 aa, Homo sapiens
  Table A; Target 31226; HLA-B*44:03; INSL4; ENSG00000120211; CTA
SEFIPNLSPEL

SEQ ID NO: 31227 - protein, 9 aa, Homo sapiens
  Table A; Target 31227; HLA-B*44:03; INSL4; ENSG00000120211; CTA
SEGQPSLKK

SEQ ID NO: 31228 - protein, 10 aa, Homo sapiens
  Table A; Target 31228; HLA-B*44:02; INSL4; ENSG00000120211; CTA
SEGQPSLKKI

SEQ ID NO: 31229 - protein, 10 aa, Homo sapiens
  Table A; Target 31229; HLA-B*44:03; INSL4; ENSG00000120211; CTA
SEGQPSLKKI

SEQ ID NO: 31230 - protein, 10 aa, Homo sapiens
  Table A; Target 31230; HLA-B*49:01; INSL4; ENSG00000120211; CTA
SEGQPSLKKI

SEQ ID NO: 31231 - protein, 9 aa, Homo sapiens
  Table A; Target 31231; HLA-A*02:03; INSL4; ENSG00000120211; CTA
SLAAELRGC

SEQ ID NO: 31232 - protein, 10 aa, Homo sapiens
  Table A; Target 31232; HLA-A*02:01; INSL4; ENSG00000120211; CTA
SLFRSYLPAI

SEQ ID NO: 31233 - protein, 10 aa, Homo sapiens
  Table A; Target 31233; HLA-A*02:03; INSL4; ENSG00000120211; CTA
SLFRSYLPAI

SEQ ID NO: 31234 - protein, 10 aa, Homo sapiens
  Table A; Target 31234; HLA-A*02:04; INSL4; ENSG00000120211; CTA
SLFRSYLPAI

SEQ ID NO: 31235 - protein, 9 aa, Homo sapiens
  Table A; Target 31235; HLA-A*02:03; INSL4; ENSG00000120211; CTA
SLKKIILSR

SEQ ID NO: 31236 - protein, 9 aa, Homo sapiens
  Table A; Target 31236; HLA-A*03:01; INSL4; ENSG00000120211; CTA
SLKKIILSR

SEQ ID NO: 31237 - protein, 9 aa, Homo sapiens
  Table A; Target 31237; HLA-A*31:01; INSL4; ENSG00000120211; CTA
SLKKIILSR

SEQ ID NO: 31238 - protein, 9 aa, Homo sapiens
  Table A; Target 31238; HLA-A*33:01; INSL4; ENSG00000120211; CTA
SLKKIILSR

SEQ ID NO: 31239 - protein, 9 aa, Homo sapiens
  Table A; Target 31239; HLA-A*33:03; INSL4; ENSG00000120211; CTA
SLKKIILSR

SEQ ID NO: 31240 - protein, 9 aa, Homo sapiens
  Table A; Target 31240; HLA-B*08:01; INSL4; ENSG00000120211; CTA
SLKKIILSR

SEQ ID NO: 31241 - protein, 10 aa, Homo sapiens
  Table A; Target 31241; HLA-A*03:01; INSL4; ENSG00000120211; CTA
SLKKIILSRK

SEQ ID NO: 31242 - protein, 9 aa, Homo sapiens
  Table A; Target 31242; HLA-C*01:02; INSL4; ENSG00000120211; CTA
SNNKDGQAL

SEQ ID NO: 31243 - protein, 9 aa, Homo sapiens
  Table A; Target 31243; HLA-C*14:02; INSL4; ENSG00000120211; CTA
SNNKDGQAL

SEQ ID NO: 31244 - protein, 8 aa, Homo sapiens
  Table A; Target 31244; HLA-B*07:02; INSL4; ENSG00000120211; CTA
SPELKKPL

SEQ ID NO: 31245 - protein, 8 aa, Homo sapiens
  Table A; Target 31245; HLA-B*08:01; INSL4; ENSG00000120211; CTA
SPELKKPL

SEQ ID NO: 31246 - protein, 8 aa, Homo sapiens
  Table A; Target 31246; HLA-C*07:02; INSL4; ENSG00000120211; CTA
SPELKKPL

SEQ ID NO: 31247 - protein, 8 aa, Homo sapiens
  Table A; Target 31247; HLA-B*08:01; INSL4; ENSG00000120211; CTA
SQLLRESL

SEQ ID NO: 31248 - protein, 10 aa, Homo sapiens
  Table A; Target 31248; HLA-A*23:01; INSL4; ENSG00000120211; CTA
SYCPMPEKTF

SEQ ID NO: 31249 - protein, 10 aa, Homo sapiens
  Table A; Target 31249; HLA-A*24:02; INSL4; ENSG00000120211; CTA
SYCPMPEKTF

SEQ ID NO: 31250 - protein, 9 aa, Homo sapiens
  Table A; Target 31250; HLA-A*02:04; INSL4; ENSG00000120211; CTA
SYLPAIWLL

SEQ ID NO: 31251 - protein, 9 aa, Homo sapiens
  Table A; Target 31251; HLA-A*23:01; INSL4; ENSG00000120211; CTA
SYLPAIWLL

SEQ ID NO: 31252 - protein, 9 aa, Homo sapiens
  Table A; Target 31252; HLA-A*24:02; INSL4; ENSG00000120211; CTA
SYLPAIWLL

SEQ ID NO: 31253 - protein, 9 aa, Homo sapiens
  Table A; Target 31253; HLA-A*29:02; INSL4; ENSG00000120211; CTA
SYLPAIWLL

SEQ ID NO: 31254 - protein, 10 aa, Homo sapiens
  Table A; Target 31254; HLA-A*23:01; INSL4; ENSG00000120211; CTA
SYLPAIWLLL

SEQ ID NO: 31255 - protein, 10 aa, Homo sapiens
  Table A; Target 31255; HLA-A*24:02; INSL4; ENSG00000120211; CTA
SYLPAIWLLL

SEQ ID NO: 31256 - protein, 9 aa, Homo sapiens
  Table A; Target 31256; HLA-A*02:01; INSL4; ENSG00000120211; CTA
TTSEFIPNL

SEQ ID NO: 31257 - protein, 9 aa, Homo sapiens
  Table A; Target 31257; HLA-A*02:03; INSL4; ENSG00000120211; CTA
TTSEFIPNL

SEQ ID NO: 31258 - protein, 9 aa, Homo sapiens
  Table A; Target 31258; HLA-A*02:04; INSL4; ENSG00000120211; CTA
TTSEFIPNL

SEQ ID NO: 31259 - protein, 9 aa, Homo sapiens
  Table A; Target 31259; HLA-A*02:07; INSL4; ENSG00000120211; CTA
TTSEFIPNL

SEQ ID NO: 31260 - protein, 9 aa, Homo sapiens
  Table A; Target 31260; HLA-A*03:02; INSL4; ENSG00000120211; CTA
TTSEFIPNL

SEQ ID NO: 31261 - protein, 9 aa, Homo sapiens
  Table A; Target 31261; HLA-A*11:01; INSL4; ENSG00000120211; CTA
TTSEFIPNL

SEQ ID NO: 31262 - protein, 9 aa, Homo sapiens
  Table A; Target 31262; HLA-A*23:01; INSL4; ENSG00000120211; CTA
TTSEFIPNL

SEQ ID NO: 31263 - protein, 9 aa, Homo sapiens
  Table A; Target 31263; HLA-A*25:01; INSL4; ENSG00000120211; CTA
TTSEFIPNL

SEQ ID NO: 31264 - protein, 9 aa, Homo sapiens
  Table A; Target 31264; HLA-A*26:01; INSL4; ENSG00000120211; CTA
TTSEFIPNL

SEQ ID NO: 31265 - protein, 9 aa, Homo sapiens
  Table A; Target 31265; HLA-A*31:01; INSL4; ENSG00000120211; CTA
TTSEFIPNL

SEQ ID NO: 31266 - protein, 9 aa, Homo sapiens
  Table A; Target 31266; HLA-A*68:01; INSL4; ENSG00000120211; CTA
TTSEFIPNL

SEQ ID NO: 31267 - protein, 9 aa, Homo sapiens
  Table A; Target 31267; HLA-A*68:02; INSL4; ENSG00000120211; CTA
TTSEFIPNL

SEQ ID NO: 31268 - protein, 9 aa, Homo sapiens
  Table A; Target 31268; HLA-B*13:02; INSL4; ENSG00000120211; CTA
TTSEFIPNL

SEQ ID NO: 31269 - protein, 9 aa, Homo sapiens
  Table A; Target 31269; HLA-B*27:05; INSL4; ENSG00000120211; CTA
TTSEFIPNL

SEQ ID NO: 31270 - protein, 9 aa, Homo sapiens
  Table A; Target 31270; HLA-B*35:03; INSL4; ENSG00000120211; CTA
TTSEFIPNL

SEQ ID NO: 31271 - protein, 9 aa, Homo sapiens
  Table A; Target 31271; HLA-B*38:01; INSL4; ENSG00000120211; CTA
TTSEFIPNL

SEQ ID NO: 31272 - protein, 9 aa, Homo sapiens
  Table A; Target 31272; HLA-B*39:01; INSL4; ENSG00000120211; CTA
TTSEFIPNL

SEQ ID NO: 31273 - protein, 9 aa, Homo sapiens
  Table A; Target 31273; HLA-C*01:02; INSL4; ENSG00000120211; CTA
TTSEFIPNL

SEQ ID NO: 31274 - protein, 9 aa, Homo sapiens
  Table A; Target 31274; HLA-C*02:02; INSL4; ENSG00000120211; CTA
TTSEFIPNL

SEQ ID NO: 31275 - protein, 9 aa, Homo sapiens
  Table A; Target 31275; HLA-C*03:04; INSL4; ENSG00000120211; CTA
TTSEFIPNL

SEQ ID NO: 31276 - protein, 9 aa, Homo sapiens
  Table A; Target 31276; HLA-C*07:04; INSL4; ENSG00000120211; CTA
TTSEFIPNL

SEQ ID NO: 31277 - protein, 9 aa, Homo sapiens
  Table A; Target 31277; HLA-C*07:06; INSL4; ENSG00000120211; CTA
TTSEFIPNL

SEQ ID NO: 31278 - protein, 9 aa, Homo sapiens
  Table A; Target 31278; HLA-C*12:03; INSL4; ENSG00000120211; CTA
TTSEFIPNL

SEQ ID NO: 31279 - protein, 9 aa, Homo sapiens
  Table A; Target 31279; HLA-C*16:01; INSL4; ENSG00000120211; CTA
TTSEFIPNL

SEQ ID NO: 31280 - protein, 9 aa, Homo sapiens
  Table A; Target 31280; HLA-C*16:02; INSL4; ENSG00000120211; CTA
TTSEFIPNL

SEQ ID NO: 31281 - protein, 9 aa, Homo sapiens
  Table A; Target 31281; HLA-A*68:02; INSL4; ENSG00000120211; CTA
TTTPGGWLL

SEQ ID NO: 31282 - protein, 9 aa, Homo sapiens
  Table A; Target 31282; HLA-A*02:01; INSL4; ENSG00000120211; CTA
VICDDGTSV

SEQ ID NO: 31283 - protein, 9 aa, Homo sapiens
  Table A; Target 31283; HLA-A*02:03; INSL4; ENSG00000120211; CTA
VICDDGTSV

SEQ ID NO: 31284 - protein, 9 aa, Homo sapiens
  Table A; Target 31284; HLA-B*55:01; INSL4; ENSG00000120211; CTA
VICDDGTSV

SEQ ID NO: 31285 - protein, 9 aa, Homo sapiens
  Table A; Target 31285; HLA-C*01:02; INSL4; ENSG00000120211; CTA
VICDDGTSV

SEQ ID NO: 31286 - protein, 9 aa, Homo sapiens
  Table A; Target 31286; HLA-C*05:01; INSL4; ENSG00000120211; CTA
VICDDGTSV

SEQ ID NO: 31287 - protein, 10 aa, Homo sapiens
  Table A; Target 31287; HLA-A*03:02; INSL4; ENSG00000120211; CTA
VICDDGTSVK

SEQ ID NO: 31288 - protein, 8 aa, Homo sapiens
  Table A; Target 31288; HLA-A*02:04; INSL4; ENSG00000120211; CTA
YLPAIWLL

SEQ ID NO: 31289 - protein, 8 aa, Homo sapiens
  Table A; Target 31289; HLA-A*02:07; INSL4; ENSG00000120211; CTA
YLPAIWLL

SEQ ID NO: 31290 - protein, 9 aa, Homo sapiens
  Table A; Target 31290; HLA-A*02:01; INSL4; ENSG00000120211; CTA
YLPAIWLLL

SEQ ID NO: 31291 - protein, 9 aa, Homo sapiens
  Table A; Target 31291; HLA-A*02:03; INSL4; ENSG00000120211; CTA
YLPAIWLLL

SEQ ID NO: 31292 - protein, 9 aa, Homo sapiens
  Table A; Target 31292; HLA-A*02:04; INSL4; ENSG00000120211; CTA
YLPAIWLLL

SEQ ID NO: 31293 - protein, 9 aa, Homo sapiens
  Table A; Target 31293; HLA-A*02:07; INSL4; ENSG00000120211; CTA
YLPAIWLLL

SEQ ID NO: 31294 - protein, 9 aa, Homo sapiens
  Table A; Target 31294; HLA-A*24:02; INSL4; ENSG00000120211; CTA
YLPAIWLLL

SEQ ID NO: 31295 - protein, 9 aa, Homo sapiens
  Table A; Target 31295; HLA-A*29:02; INSL4; ENSG00000120211; CTA
YLPAIWLLL

SEQ ID NO: 31296 - protein, 9 aa, Homo sapiens
  Table A; Target 31296; HLA-A*11:01; INSL6; ENSG00000120210; CTA
ACLPYIDFK

SEQ ID NO: 31297 - protein, 10 aa, Homo sapiens
  Table A; Target 31297; HLA-A*25:01; INSL6; ENSG00000120210; CTA
AQASEKVEAY

SEQ ID NO: 31298 - protein, 10 aa, Homo sapiens
  Table A; Target 31298; HLA-A*26:01; INSL6; ENSG00000120210; CTA
AQASEKVEAY

SEQ ID NO: 31299 - protein, 10 aa, Homo sapiens
  Table A; Target 31299; HLA-A*30:02; INSL6; ENSG00000120210; CTA
AQASEKVEAY

SEQ ID NO: 31300 - protein, 10 aa, Homo sapiens
  Table A; Target 31300; HLA-A*32:01; INSL6; ENSG00000120210; CTA
AQASEKVEAY

SEQ ID NO: 31301 - protein, 10 aa, Homo sapiens
  Table A; Target 31301; HLA-B*15:03; INSL6; ENSG00000120210; CTA
AQASEKVEAY

SEQ ID NO: 31302 - protein, 10 aa, Homo sapiens
  Table A; Target 31302; HLA-B*44:02; INSL6; ENSG00000120210; CTA
AQASEKVEAY

SEQ ID NO: 31303 - protein, 10 aa, Homo sapiens
  Table A; Target 31303; HLA-B*44:03; INSL6; ENSG00000120210; CTA
AQASEKVEAY

SEQ ID NO: 31304 - protein, 10 aa, Homo sapiens
  Table A; Target 31304; HLA-C*07:04; INSL6; ENSG00000120210; CTA
AQASEKVEAY

SEQ ID NO: 31305 - protein, 10 aa, Homo sapiens
  Table A; Target 31305; HLA-C*16:04; INSL6; ENSG00000120210; CTA
AQASEKVEAY

SEQ ID NO: 31306 - protein, 8 aa, Homo sapiens
  Table A; Target 31306; HLA-A*01:01; INSL6; ENSG00000120210; CTA
ASEKVEAY

SEQ ID NO: 31307 - protein, 8 aa, Homo sapiens
  Table A; Target 31307; HLA-A*30:02; INSL6; ENSG00000120210; CTA
ASEKVEAY

SEQ ID NO: 31308 - protein, 8 aa, Homo sapiens
  Table A; Target 31308; HLA-B*58:01; INSL6; ENSG00000120210; CTA
ASEKVEAY

SEQ ID NO: 31309 - protein, 11 aa, Homo sapiens
  Table A; Target 31309; HLA-A*01:01; INSL6; ENSG00000120210; CTA
ASEKVEAYSPY

SEQ ID NO: 31310 - protein, 8 aa, Homo sapiens
  Table A; Target 31310; HLA-B*08:01; INSL6; ENSG00000120210; CTA
DISSARKL

SEQ ID NO: 31311 - protein, 8 aa, Homo sapiens
  Table A; Target 31311; HLA-B*35:01; INSL6; ENSG00000120210; CTA
EAVNSWEM

SEQ ID NO: 31312 - protein, 8 aa, Homo sapiens
  Table A; Target 31312; HLA-B*35:03; INSL6; ENSG00000120210; CTA
EAVNSWEM

SEQ ID NO: 31313 - protein, 8 aa, Homo sapiens
  Table A; Target 31313; HLA-A*23:01; INSL6; ENSG00000120210; CTA
EAYSPYQF

SEQ ID NO: 31314 - protein, 8 aa, Homo sapiens
  Table A; Target 31314; HLA-B*08:01; INSL6; ENSG00000120210; CTA
EAYSPYQF

SEQ ID NO: 31315 - protein, 9 aa, Homo sapiens
  Table A; Target 31315; HLA-B*18:01; INSL6; ENSG00000120210; CTA
EEAVNSWEM

SEQ ID NO: 31316 - protein, 9 aa, Homo sapiens
  Table A; Target 31316; HLA-B*40:01; INSL6; ENSG00000120210; CTA
EEAVNSWEM

SEQ ID NO: 31317 - protein, 9 aa, Homo sapiens
  Table A; Target 31317; HLA-B*40:01; INSL6; ENSG00000120210; CTA
EEETPFSRL

SEQ ID NO: 31318 - protein, 9 aa, Homo sapiens
  Table A; Target 31318; HLA-B*44:03; INSL6; ENSG00000120210; CTA
EEETPFSRL

SEQ ID NO: 31319 - protein, 10 aa, Homo sapiens
  Table A; Target 31319; HLA-B*44:02; INSL6; ENSG00000120210; CTA
EEETPFSRLI

SEQ ID NO: 31320 - protein, 10 aa, Homo sapiens
  Table A; Target 31320; HLA-B*44:03; INSL6; ENSG00000120210; CTA
EEETPFSRLI

SEQ ID NO: 31321 - protein, 10 aa, Homo sapiens
  Table A; Target 31321; HLA-B*49:01; INSL6; ENSG00000120210; CTA
EEETPFSRLI

SEQ ID NO: 31322 - protein, 8 aa, Homo sapiens
  Table A; Target 31322; HLA-B*18:01; INSL6; ENSG00000120210; CTA
EELSIACL

SEQ ID NO: 31323 - protein, 8 aa, Homo sapiens
  Table A; Target 31323; HLA-B*18:01; INSL6; ENSG00000120210; CTA
EETPFSRL

SEQ ID NO: 31324 - protein, 8 aa, Homo sapiens
  Table A; Target 31324; HLA-B*44:03; INSL6; ENSG00000120210; CTA
EETPFSRL

SEQ ID NO: 31325 - protein, 9 aa, Homo sapiens
  Table A; Target 31325; HLA-A*30:01; INSL6; ENSG00000120210; CTA
EETPFSRLI

SEQ ID NO: 31326 - protein, 9 aa, Homo sapiens
  Table A; Target 31326; HLA-A*68:02; INSL6; ENSG00000120210; CTA
EETPFSRLI

SEQ ID NO: 31327 - protein, 9 aa, Homo sapiens
  Table A; Target 31327; HLA-B*18:01; INSL6; ENSG00000120210; CTA
EETPFSRLI

SEQ ID NO: 31328 - protein, 9 aa, Homo sapiens
  Table A; Target 31328; HLA-B*44:02; INSL6; ENSG00000120210; CTA
EETPFSRLI

SEQ ID NO: 31329 - protein, 9 aa, Homo sapiens
  Table A; Target 31329; HLA-B*44:03; INSL6; ENSG00000120210; CTA
EETPFSRLI

SEQ ID NO: 31330 - protein, 9 aa, Homo sapiens
  Table A; Target 31330; HLA-B*49:01; INSL6; ENSG00000120210; CTA
EETPFSRLI

SEQ ID NO: 31331 - protein, 9 aa, Homo sapiens
  Table A; Target 31331; HLA-C*16:02; INSL6; ENSG00000120210; CTA
EETPFSRLI

SEQ ID NO: 31332 - protein, 9 aa, Homo sapiens
  Table A; Target 31332; HLA-A*26:01; INSL6; ENSG00000120210; CTA
EKVEAYSPY

SEQ ID NO: 31333 - protein, 9 aa, Homo sapiens
  Table A; Target 31333; HLA-B*15:03; INSL6; ENSG00000120210; CTA
EKVEAYSPY

SEQ ID NO: 31334 - protein, 9 aa, Homo sapiens
  Table A; Target 31334; HLA-A*26:01; INSL6; ENSG00000120210; CTA
ELSDISSAR

SEQ ID NO: 31335 - protein, 9 aa, Homo sapiens
  Table A; Target 31335; HLA-A*33:01; INSL6; ENSG00000120210; CTA
ELSDISSAR

SEQ ID NO: 31336 - protein, 9 aa, Homo sapiens
  Table A; Target 31336; HLA-A*33:03; INSL6; ENSG00000120210; CTA
ELSDISSAR

SEQ ID NO: 31337 - protein, 9 aa, Homo sapiens
  Table A; Target 31337; HLA-A*68:01; INSL6; ENSG00000120210; CTA
ELSDISSAR

SEQ ID NO: 31338 - protein, 9 aa, Homo sapiens
  Table A; Target 31338; HLA-C*07:06; INSL6; ENSG00000120210; CTA
ELSDISSAR

SEQ ID NO: 31339 - protein, 10 aa, Homo sapiens
  Table A; Target 31339; HLA-A*33:03; INSL6; ENSG00000120210; CTA
ELSDISSARK

SEQ ID NO: 31340 - protein, 10 aa, Homo sapiens
  Table A; Target 31340; HLA-A*68:01; INSL6; ENSG00000120210; CTA
ELSDISSARK

SEQ ID NO: 31341 - protein, 11 aa, Homo sapiens
  Table A; Target 31341; HLA-A*68:02; INSL6; ENSG00000120210; CTA
ELSDISSARKL

SEQ ID NO: 31342 - protein, 8 aa, Homo sapiens
  Table A; Target 31342; HLA-A*30:02; INSL6; ENSG00000120210; CTA
EMQSLPEY

SEQ ID NO: 31343 - protein, 9 aa, Homo sapiens
  Table A; Target 31343; HLA-A*03:02; INSL6; ENSG00000120210; CTA
EMQSLPEYK

SEQ ID NO: 31344 - protein, 9 aa, Homo sapiens
  Table A; Target 31344; HLA-A*33:03; INSL6; ENSG00000120210; CTA
EMQSLPEYK

SEQ ID NO: 31345 - protein, 9 aa, Homo sapiens
  Table A; Target 31345; HLA-A*33:03; INSL6; ENSG00000120210; CTA
ENAKFQKKR

SEQ ID NO: 31346 - protein, 10 aa, Homo sapiens
  Table A; Target 31346; HLA-A*68:01; INSL6; ENSG00000120210; CTA
ESPQTASPAR

SEQ ID NO: 31347 - protein, 10 aa, Homo sapiens
  Table A; Target 31347; HLA-C*07:06; INSL6; ENSG00000120210; CTA
ESPQTASPAR

SEQ ID NO: 31348 - protein, 10 aa, Homo sapiens
  Table A; Target 31348; HLA-B*40:01; INSL6; ENSG00000120210; CTA
FEEETPFSRL

SEQ ID NO: 31349 - protein, 10 aa, Homo sapiens
  Table A; Target 31349; HLA-B*49:01; INSL6; ENSG00000120210; CTA
FEEETPFSRL

SEQ ID NO: 31350 - protein, 11 aa, Homo sapiens
  Table A; Target 31350; HLA-B*49:01; INSL6; ENSG00000120210; CTA
FEEETPFSRLI

SEQ ID NO: 31351 - protein, 9 aa, Homo sapiens
  Table A; Target 31351; HLA-B*49:01; INSL6; ENSG00000120210; CTA
FESPQTASP

SEQ ID NO: 31352 - protein, 11 aa, Homo sapiens
  Table A; Target 31352; HLA-B*27:02; INSL6; ENSG00000120210; CTA
FESPQTASPAR

SEQ ID NO: 31353 - protein, 11 aa, Homo sapiens
  Table A; Target 31353; HLA-B*27:05; INSL6; ENSG00000120210; CTA
FESPQTASPAR

SEQ ID NO: 31354 - protein, 9 aa, Homo sapiens
  Table A; Target 31354; HLA-A*68:02; INSL6; ENSG00000120210; CTA
FSSSHNINV

SEQ ID NO: 31355 - protein, 9 aa, Homo sapiens
  Table A; Target 31355; HLA-C*02:02; INSL6; ENSG00000120210; CTA
FSSSHNINV

SEQ ID NO: 31356 - protein, 10 aa, Homo sapiens
  Table A; Target 31356; HLA-A*01:01; INSL6; ENSG00000120210; CTA
FSSSHNINVY

SEQ ID NO: 31357 - protein, 10 aa, Homo sapiens
  Table A; Target 31357; HLA-A*30:02; INSL6; ENSG00000120210; CTA
FSSSHNINVY

SEQ ID NO: 31358 - protein, 10 aa, Homo sapiens
  Table A; Target 31358; HLA-B*46:01; INSL6; ENSG00000120210; CTA
FSSSHNINVY

SEQ ID NO: 31359 - protein, 10 aa, Homo sapiens
  Table A; Target 31359; HLA-C*02:02; INSL6; ENSG00000120210; CTA
FSSSHNINVY

SEQ ID NO: 31360 - protein, 11 aa, Homo sapiens
  Table A; Target 31360; HLA-B*27:02; INSL6; ENSG00000120210; CTA
GRGTNPVSTSW

SEQ ID NO: 31361 - protein, 11 aa, Homo sapiens
  Table A; Target 31361; HLA-C*16:04; INSL6; ENSG00000120210; CTA
GRGTNPVSTSW

SEQ ID NO: 31362 - protein, 10 aa, Homo sapiens
  Table A; Target 31362; HLA-B*27:05; INSL6; ENSG00000120210; CTA
GRYLVKEIEK

SEQ ID NO: 31363 - protein, 9 aa, Homo sapiens
  Table A; Target 31363; HLA-A*11:01; INSL6; ENSG00000120210; CTA
GTNPVSTSW

SEQ ID NO: 31364 - protein, 9 aa, Homo sapiens
  Table A; Target 31364; HLA-A*23:01; INSL6; ENSG00000120210; CTA
GTNPVSTSW

SEQ ID NO: 31365 - protein, 9 aa, Homo sapiens
  Table A; Target 31365; HLA-A*25:01; INSL6; ENSG00000120210; CTA
GTNPVSTSW

SEQ ID NO: 31366 - protein, 9 aa, Homo sapiens
  Table A; Target 31366; HLA-A*26:01; INSL6; ENSG00000120210; CTA
GTNPVSTSW

SEQ ID NO: 31367 - protein, 9 aa, Homo sapiens
  Table A; Target 31367; HLA-A*29:02; INSL6; ENSG00000120210; CTA
GTNPVSTSW

SEQ ID NO: 31368 - protein, 9 aa, Homo sapiens
  Table A; Target 31368; HLA-A*30:02; INSL6; ENSG00000120210; CTA
GTNPVSTSW

SEQ ID NO: 31369 - protein, 9 aa, Homo sapiens
  Table A; Target 31369; HLA-A*31:01; INSL6; ENSG00000120210; CTA
GTNPVSTSW

SEQ ID NO: 31370 - protein, 9 aa, Homo sapiens
  Table A; Target 31370; HLA-A*33:03; INSL6; ENSG00000120210; CTA
GTNPVSTSW

SEQ ID NO: 31371 - protein, 9 aa, Homo sapiens
  Table A; Target 31371; HLA-B*15:01; INSL6; ENSG00000120210; CTA
GTNPVSTSW

SEQ ID NO: 31372 - protein, 9 aa, Homo sapiens
  Table A; Target 31372; HLA-B*15:03; INSL6; ENSG00000120210; CTA
GTNPVSTSW

SEQ ID NO: 31373 - protein, 9 aa, Homo sapiens
  Table A; Target 31373; HLA-B*27:02; INSL6; ENSG00000120210; CTA
GTNPVSTSW

SEQ ID NO: 31374 - protein, 9 aa, Homo sapiens
  Table A; Target 31374; HLA-B*44:02; INSL6; ENSG00000120210; CTA
GTNPVSTSW

SEQ ID NO: 31375 - protein, 9 aa, Homo sapiens
  Table A; Target 31375; HLA-B*44:03; INSL6; ENSG00000120210; CTA
GTNPVSTSW

SEQ ID NO: 31376 - protein, 9 aa, Homo sapiens
  Table A; Target 31376; HLA-B*46:01; INSL6; ENSG00000120210; CTA
GTNPVSTSW

SEQ ID NO: 31377 - protein, 9 aa, Homo sapiens
  Table A; Target 31377; HLA-B*57:01; INSL6; ENSG00000120210; CTA
GTNPVSTSW

SEQ ID NO: 31378 - protein, 9 aa, Homo sapiens
  Table A; Target 31378; HLA-B*58:01; INSL6; ENSG00000120210; CTA
GTNPVSTSW

SEQ ID NO: 31379 - protein, 9 aa, Homo sapiens
  Table A; Target 31379; HLA-C*02:02; INSL6; ENSG00000120210; CTA
GTNPVSTSW

SEQ ID NO: 31380 - protein, 9 aa, Homo sapiens
  Table A; Target 31380; HLA-C*07:06; INSL6; ENSG00000120210; CTA
GTNPVSTSW

SEQ ID NO: 31381 - protein, 9 aa, Homo sapiens
  Table A; Target 31381; HLA-C*16:01; INSL6; ENSG00000120210; CTA
GTNPVSTSW

SEQ ID NO: 31382 - protein, 9 aa, Homo sapiens
  Table A; Target 31382; HLA-C*16:04; INSL6; ENSG00000120210; CTA
GTNPVSTSW

SEQ ID NO: 31383 - protein, 9 aa, Homo sapiens
  Table A; Target 31383; HLA-A*33:03; INSL6; ENSG00000120210; CTA
GYSPLGKTR

SEQ ID NO: 31384 - protein, 11 aa, Homo sapiens
  Table A; Target 31384; HLA-A*24:02; INSL6; ENSG00000120210; CTA
GYSPLGKTREF

SEQ ID NO: 31385 - protein, 10 aa, Homo sapiens
  Table A; Target 31385; HLA-B*54:01; INSL6; ENSG00000120210; CTA
IAQASEKVEA

SEQ ID NO: 31386 - protein, 11 aa, Homo sapiens
  Table A; Target 31386; HLA-A*26:01; INSL6; ENSG00000120210; CTA
IAQASEKVEAY

SEQ ID NO: 31387 - protein, 11 aa, Homo sapiens
  Table A; Target 31387; HLA-A*30:02; INSL6; ENSG00000120210; CTA
IAQASEKVEAY

SEQ ID NO: 31388 - protein, 11 aa, Homo sapiens
  Table A; Target 31388; HLA-B*15:01; INSL6; ENSG00000120210; CTA
IAQASEKVEAY

SEQ ID NO: 31389 - protein, 11 aa, Homo sapiens
  Table A; Target 31389; HLA-B*35:01; INSL6; ENSG00000120210; CTA
IAQASEKVEAY

SEQ ID NO: 31390 - protein, 11 aa, Homo sapiens
  Table A; Target 31390; HLA-B*46:01; INSL6; ENSG00000120210; CTA
IAQASEKVEAY

SEQ ID NO: 31391 - protein, 11 aa, Homo sapiens
  Table A; Target 31391; HLA-C*02:02; INSL6; ENSG00000120210; CTA
IAQASEKVEAY

SEQ ID NO: 31392 - protein, 11 aa, Homo sapiens
  Table A; Target 31392; HLA-C*16:02; INSL6; ENSG00000120210; CTA
IAQASEKVEAY

SEQ ID NO: 31393 - protein, 11 aa, Homo sapiens
  Table A; Target 31393; HLA-C*16:04; INSL6; ENSG00000120210; CTA
IAQASEKVEAY

SEQ ID NO: 31394 - protein, 9 aa, Homo sapiens
  Table A; Target 31394; HLA-B*40:01; INSL6; ENSG00000120210; CTA
KEELSIACL

SEQ ID NO: 31395 - protein, 8 aa, Homo sapiens
  Table A; Target 31395; HLA-A*03:01; INSL6; ENSG00000120210; CTA
KGYSPLGK

SEQ ID NO: 31396 - protein, 8 aa, Homo sapiens
  Table A; Target 31396; HLA-A*03:02; INSL6; ENSG00000120210; CTA
KGYSPLGK

SEQ ID NO: 31397 - protein, 10 aa, Homo sapiens
  Table A; Target 31397; HLA-A*31:01; INSL6; ENSG00000120210; CTA
KGYSPLGKTR

SEQ ID NO: 31398 - protein, 10 aa, Homo sapiens
  Table A; Target 31398; HLA-B*57:01; INSL6; ENSG00000120210; CTA
KGYSPLGKTR

SEQ ID NO: 31399 - protein, 10 aa, Homo sapiens
  Table A; Target 31399; HLA-B*57:01; INSL6; ENSG00000120210; CTA
KIKTLSNLFW

SEQ ID NO: 31400 - protein, 9 aa, Homo sapiens
  Table A; Target 31400; HLA-C*06:02; INSL6; ENSG00000120210; CTA
KRSSLVTKI

SEQ ID NO: 31401 - protein, 8 aa, Homo sapiens
  Table A; Target 31401; HLA-B*57:01; INSL6; ENSG00000120210; CTA
KTLSNLFW

SEQ ID NO: 31402 - protein, 9 aa, Homo sapiens
  Table A; Target 31402; HLA-A*02:01; INSL6; ENSG00000120210; CTA
LLWLGLLLV

SEQ ID NO: 31403 - protein, 9 aa, Homo sapiens
  Table A; Target 31403; HLA-A*02:04; INSL6; ENSG00000120210; CTA
LLWLGLLLV

SEQ ID NO: 31404 - protein, 9 aa, Homo sapiens
  Table A; Target 31404; HLA-A*02:07; INSL6; ENSG00000120210; CTA
LLWLGLLLV

SEQ ID NO: 31405 - protein, 9 aa, Homo sapiens
  Table A; Target 31405; HLA-B*51:01; INSL6; ENSG00000120210; CTA
LPYIDFKRL

SEQ ID NO: 31406 - protein, 9 aa, Homo sapiens
  Table A; Target 31406; HLA-A*01:01; INSL6; ENSG00000120210; CTA
LSDISSARK

SEQ ID NO: 31407 - protein, 10 aa, Homo sapiens
  Table A; Target 31407; HLA-C*07:02; INSL6; ENSG00000120210; CTA
LSDISSARKL

SEQ ID NO: 31408 - protein, 8 aa, Homo sapiens
  Table A; Target 31408; HLA-B*08:01; INSL6; ENSG00000120210; CTA
LVKEIEKL

SEQ ID NO: 31409 - protein, 9 aa, Homo sapiens
  Table A; Target 31409; HLA-B*07:02; INSL6; ENSG00000120210; CTA
MPRLLRLSL

SEQ ID NO: 31410 - protein, 9 aa, Homo sapiens
  Table A; Target 31410; HLA-A*03:01; INSL6; ENSG00000120210; CTA
NVYIHENAK

SEQ ID NO: 31411 - protein, 9 aa, Homo sapiens
  Table A; Target 31411; HLA-A*03:02; INSL6; ENSG00000120210; CTA
NVYIHENAK

SEQ ID NO: 31412 - protein, 9 aa, Homo sapiens
  Table A; Target 31412; HLA-A*11:01; INSL6; ENSG00000120210; CTA
NVYIHENAK

SEQ ID NO: 31413 - protein, 10 aa, Homo sapiens
  Table A; Target 31413; HLA-A*25:01; INSL6; ENSG00000120210; CTA
NVYIHENAKF

SEQ ID NO: 31414 - protein, 9 aa, Homo sapiens
  Table A; Target 31414; HLA-A*01:01; INSL6; ENSG00000120210; CTA
QASEKVEAY

SEQ ID NO: 31415 - protein, 9 aa, Homo sapiens
  Table A; Target 31415; HLA-A*25:01; INSL6; ENSG00000120210; CTA
QASEKVEAY

SEQ ID NO: 31416 - protein, 9 aa, Homo sapiens
  Table A; Target 31416; HLA-A*26:01; INSL6; ENSG00000120210; CTA
QASEKVEAY

SEQ ID NO: 31417 - protein, 9 aa, Homo sapiens
  Table A; Target 31417; HLA-A*29:02; INSL6; ENSG00000120210; CTA
QASEKVEAY

SEQ ID NO: 31418 - protein, 9 aa, Homo sapiens
  Table A; Target 31418; HLA-A*30:02; INSL6; ENSG00000120210; CTA
QASEKVEAY

SEQ ID NO: 31419 - protein, 9 aa, Homo sapiens
  Table A; Target 31419; HLA-A*32:01; INSL6; ENSG00000120210; CTA
QASEKVEAY

SEQ ID NO: 31420 - protein, 9 aa, Homo sapiens
  Table A; Target 31420; HLA-B*15:01; INSL6; ENSG00000120210; CTA
QASEKVEAY

SEQ ID NO: 31421 - protein, 9 aa, Homo sapiens
  Table A; Target 31421; HLA-B*15:03; INSL6; ENSG00000120210; CTA
QASEKVEAY

SEQ ID NO: 31422 - protein, 9 aa, Homo sapiens
  Table A; Target 31422; HLA-B*18:01; INSL6; ENSG00000120210; CTA
QASEKVEAY

SEQ ID NO: 31423 - protein, 9 aa, Homo sapiens
  Table A; Target 31423; HLA-B*39:01; INSL6; ENSG00000120210; CTA
QASEKVEAY

SEQ ID NO: 31424 - protein, 9 aa, Homo sapiens
  Table A; Target 31424; HLA-B*44:02; INSL6; ENSG00000120210; CTA
QASEKVEAY

SEQ ID NO: 31425 - protein, 9 aa, Homo sapiens
  Table A; Target 31425; HLA-B*44:03; INSL6; ENSG00000120210; CTA
QASEKVEAY

SEQ ID NO: 31426 - protein, 9 aa, Homo sapiens
  Table A; Target 31426; HLA-B*46:01; INSL6; ENSG00000120210; CTA
QASEKVEAY

SEQ ID NO: 31427 - protein, 9 aa, Homo sapiens
  Table A; Target 31427; HLA-B*55:01; INSL6; ENSG00000120210; CTA
QASEKVEAY

SEQ ID NO: 31428 - protein, 9 aa, Homo sapiens
  Table A; Target 31428; HLA-B*58:01; INSL6; ENSG00000120210; CTA
QASEKVEAY

SEQ ID NO: 31429 - protein, 9 aa, Homo sapiens
  Table A; Target 31429; HLA-C*01:02; INSL6; ENSG00000120210; CTA
QASEKVEAY

SEQ ID NO: 31430 - protein, 9 aa, Homo sapiens
  Table A; Target 31430; HLA-C*02:02; INSL6; ENSG00000120210; CTA
QASEKVEAY

SEQ ID NO: 31431 - protein, 9 aa, Homo sapiens
  Table A; Target 31431; HLA-C*03:03; INSL6; ENSG00000120210; CTA
QASEKVEAY

SEQ ID NO: 31432 - protein, 9 aa, Homo sapiens
  Table A; Target 31432; HLA-C*07:04; INSL6; ENSG00000120210; CTA
QASEKVEAY

SEQ ID NO: 31433 - protein, 9 aa, Homo sapiens
  Table A; Target 31433; HLA-C*07:06; INSL6; ENSG00000120210; CTA
QASEKVEAY

SEQ ID NO: 31434 - protein, 9 aa, Homo sapiens
  Table A; Target 31434; HLA-C*12:03; INSL6; ENSG00000120210; CTA
QASEKVEAY

SEQ ID NO: 31435 - protein, 9 aa, Homo sapiens
  Table A; Target 31435; HLA-C*14:02; INSL6; ENSG00000120210; CTA
QASEKVEAY

SEQ ID NO: 31436 - protein, 9 aa, Homo sapiens
  Table A; Target 31436; HLA-C*16:01; INSL6; ENSG00000120210; CTA
QASEKVEAY

SEQ ID NO: 31437 - protein, 9 aa, Homo sapiens
  Table A; Target 31437; HLA-C*16:02; INSL6; ENSG00000120210; CTA
QASEKVEAY

SEQ ID NO: 31438 - protein, 9 aa, Homo sapiens
  Table A; Target 31438; HLA-C*16:04; INSL6; ENSG00000120210; CTA
QASEKVEAY

SEQ ID NO: 31439 - protein, 9 aa, Homo sapiens
  Table A; Target 31439; HLA-A*31:01; INSL6; ENSG00000120210; CTA
QTASPARGR

SEQ ID NO: 31440 - protein, 9 aa, Homo sapiens
  Table A; Target 31440; HLA-A*33:03; INSL6; ENSG00000120210; CTA
QTASPARGR

SEQ ID NO: 31441 - protein, 9 aa, Homo sapiens
  Table A; Target 31441; HLA-A*68:01; INSL6; ENSG00000120210; CTA
QTASPARGR

SEQ ID NO: 31442 - protein, 9 aa, Homo sapiens
  Table A; Target 31442; HLA-C*07:06; INSL6; ENSG00000120210; CTA
QTASPARGR

SEQ ID NO: 31443 - protein, 9 aa, Homo sapiens
  Table A; Target 31443; HLA-B*37:01; INSL6; ENSG00000120210; CTA
REFSSSHNI

SEQ ID NO: 31444 - protein, 9 aa, Homo sapiens
  Table A; Target 31444; HLA-B*40:01; INSL6; ENSG00000120210; CTA
REFSSSHNI

SEQ ID NO: 31445 - protein, 9 aa, Homo sapiens
  Table A; Target 31445; HLA-B*44:02; INSL6; ENSG00000120210; CTA
REFSSSHNI

SEQ ID NO: 31446 - protein, 9 aa, Homo sapiens
  Table A; Target 31446; HLA-B*44:03; INSL6; ENSG00000120210; CTA
REFSSSHNI

SEQ ID NO: 31447 - protein, 9 aa, Homo sapiens
  Table A; Target 31447; HLA-B*49:01; INSL6; ENSG00000120210; CTA
REFSSSHNI

SEQ ID NO: 31448 - protein, 9 aa, Homo sapiens
  Table A; Target 31448; HLA-A*30:01; INSL6; ENSG00000120210; CTA
RELSDISSA

SEQ ID NO: 31449 - protein, 9 aa, Homo sapiens
  Table A; Target 31449; HLA-B*40:01; INSL6; ENSG00000120210; CTA
RELSDISSA

SEQ ID NO: 31450 - protein, 9 aa, Homo sapiens
  Table A; Target 31450; HLA-B*40:02; INSL6; ENSG00000120210; CTA
RELSDISSA

SEQ ID NO: 31451 - protein, 9 aa, Homo sapiens
  Table A; Target 31451; HLA-B*49:01; INSL6; ENSG00000120210; CTA
RELSDISSA

SEQ ID NO: 31452 - protein, 10 aa, Homo sapiens
  Table A; Target 31452; HLA-B*40:01; INSL6; ENSG00000120210; CTA
RELSDISSAR

SEQ ID NO: 31453 - protein, 10 aa, Homo sapiens
  Table A; Target 31453; HLA-A*25:01; INSL6; ENSG00000120210; CTA
RGTNPVSTSW

SEQ ID NO: 31454 - protein, 10 aa, Homo sapiens
  Table A; Target 31454; HLA-A*32:01; INSL6; ENSG00000120210; CTA
RGTNPVSTSW

SEQ ID NO: 31455 - protein, 10 aa, Homo sapiens
  Table A; Target 31455; HLA-B*57:01; INSL6; ENSG00000120210; CTA
RGTNPVSTSW

SEQ ID NO: 31456 - protein, 10 aa, Homo sapiens
  Table A; Target 31456; HLA-B*58:01; INSL6; ENSG00000120210; CTA
RGTNPVSTSW

SEQ ID NO: 31457 - protein, 10 aa, Homo sapiens
  Table A; Target 31457; HLA-C*16:04; INSL6; ENSG00000120210; CTA
RGTNPVSTSW

SEQ ID NO: 31458 - protein, 9 aa, Homo sapiens
  Table A; Target 31458; HLA-A*03:01; INSL6; ENSG00000120210; CTA
RLIAQASEK

SEQ ID NO: 31459 - protein, 9 aa, Homo sapiens
  Table A; Target 31459; HLA-A*03:02; INSL6; ENSG00000120210; CTA
RLIAQASEK

SEQ ID NO: 31460 - protein, 10 aa, Homo sapiens
  Table A; Target 31460; HLA-A*02:03; INSL6; ENSG00000120210; CTA
RLIAQASEKV

SEQ ID NO: 31461 - protein, 9 aa, Homo sapiens
  Table A; Target 31461; HLA-B*08:01; INSL6; ENSG00000120210; CTA
RLKEKRSSL

SEQ ID NO: 31462 - protein, 9 aa, Homo sapiens
  Table A; Target 31462; HLA-B*57:01; INSL6; ENSG00000120210; CTA
RLLRLSLLW

SEQ ID NO: 31463 - protein, 8 aa, Homo sapiens
  Table A; Target 31463; HLA-B*37:01; INSL6; ENSG00000120210; CTA
RSSLVTKI

SEQ ID NO: 31464 - protein, 9 aa, Homo sapiens
  Table A; Target 31464; HLA-A*01:01; INSL6; ENSG00000120210; CTA
RSSLVTKIY

SEQ ID NO: 31465 - protein, 9 aa, Homo sapiens
  Table A; Target 31465; HLA-A*03:01; INSL6; ENSG00000120210; CTA
RSSLVTKIY

SEQ ID NO: 31466 - protein, 9 aa, Homo sapiens
  Table A; Target 31466; HLA-A*29:02; INSL6; ENSG00000120210; CTA
RSSLVTKIY

SEQ ID NO: 31467 - protein, 9 aa, Homo sapiens
  Table A; Target 31467; HLA-A*30:02; INSL6; ENSG00000120210; CTA
RSSLVTKIY

SEQ ID NO: 31468 - protein, 9 aa, Homo sapiens
  Table A; Target 31468; HLA-A*32:01; INSL6; ENSG00000120210; CTA
RSSLVTKIY

SEQ ID NO: 31469 - protein, 9 aa, Homo sapiens
  Table A; Target 31469; HLA-B*07:02; INSL6; ENSG00000120210; CTA
RSSLVTKIY

SEQ ID NO: 31470 - protein, 9 aa, Homo sapiens
  Table A; Target 31470; HLA-B*15:01; INSL6; ENSG00000120210; CTA
RSSLVTKIY

SEQ ID NO: 31471 - protein, 9 aa, Homo sapiens
  Table A; Target 31471; HLA-B*15:03; INSL6; ENSG00000120210; CTA
RSSLVTKIY

SEQ ID NO: 31472 - protein, 9 aa, Homo sapiens
  Table A; Target 31472; HLA-B*44:02; INSL6; ENSG00000120210; CTA
RSSLVTKIY

SEQ ID NO: 31473 - protein, 9 aa, Homo sapiens
  Table A; Target 31473; HLA-B*44:03; INSL6; ENSG00000120210; CTA
RSSLVTKIY

SEQ ID NO: 31474 - protein, 9 aa, Homo sapiens
  Table A; Target 31474; HLA-B*57:01; INSL6; ENSG00000120210; CTA
RSSLVTKIY

SEQ ID NO: 31475 - protein, 9 aa, Homo sapiens
  Table A; Target 31475; HLA-B*58:01; INSL6; ENSG00000120210; CTA
RSSLVTKIY

SEQ ID NO: 31476 - protein, 9 aa, Homo sapiens
  Table A; Target 31476; HLA-C*02:02; INSL6; ENSG00000120210; CTA
RSSLVTKIY

SEQ ID NO: 31477 - protein, 9 aa, Homo sapiens
  Table A; Target 31477; HLA-C*04:01; INSL6; ENSG00000120210; CTA
RSSLVTKIY

SEQ ID NO: 31478 - protein, 9 aa, Homo sapiens
  Table A; Target 31478; HLA-C*06:02; INSL6; ENSG00000120210; CTA
RSSLVTKIY

SEQ ID NO: 31479 - protein, 9 aa, Homo sapiens
  Table A; Target 31479; HLA-C*07:01; INSL6; ENSG00000120210; CTA
RSSLVTKIY

SEQ ID NO: 31480 - protein, 9 aa, Homo sapiens
  Table A; Target 31480; HLA-C*12:03; INSL6; ENSG00000120210; CTA
RSSLVTKIY

SEQ ID NO: 31481 - protein, 9 aa, Homo sapiens
  Table A; Target 31481; HLA-C*16:01; INSL6; ENSG00000120210; CTA
RSSLVTKIY

SEQ ID NO: 31482 - protein, 9 aa, Homo sapiens
  Table A; Target 31482; HLA-C*16:02; INSL6; ENSG00000120210; CTA
RSSLVTKIY

SEQ ID NO: 31483 - protein, 9 aa, Homo sapiens
  Table A; Target 31483; HLA-C*16:04; INSL6; ENSG00000120210; CTA
RSSLVTKIY

SEQ ID NO: 31484 - protein, 10 aa, Homo sapiens
  Table A; Target 31484; HLA-A*24:02; INSL6; ENSG00000120210; CTA
RYLVKEIEKL

SEQ ID NO: 31485 - protein, 9 aa, Homo sapiens
  Table A; Target 31485; HLA-A*30:01; INSL6; ENSG00000120210; CTA
SDISSARKL

SEQ ID NO: 31486 - protein, 9 aa, Homo sapiens
  Table A; Target 31486; HLA-B*37:01; INSL6; ENSG00000120210; CTA
SDISSARKL

SEQ ID NO: 31487 - protein, 9 aa, Homo sapiens
  Table A; Target 31487; HLA-B*44:02; INSL6; ENSG00000120210; CTA
SDISSARKL

SEQ ID NO: 31488 - protein, 9 aa, Homo sapiens
  Table A; Target 31488; HLA-B*44:03; INSL6; ENSG00000120210; CTA
SDISSARKL

SEQ ID NO: 31489 - protein, 9 aa, Homo sapiens
  Table A; Target 31489; HLA-C*06:02; INSL6; ENSG00000120210; CTA
SDISSARKL

SEQ ID NO: 31490 - protein, 9 aa, Homo sapiens
  Table A; Target 31490; HLA-C*12:03; INSL6; ENSG00000120210; CTA
SDISSARKL

SEQ ID NO: 31491 - protein, 9 aa, Homo sapiens
  Table A; Target 31491; HLA-C*16:01; INSL6; ENSG00000120210; CTA
SDISSARKL

SEQ ID NO: 31492 - protein, 9 aa, Homo sapiens
  Table A; Target 31492; HLA-C*16:02; INSL6; ENSG00000120210; CTA
SDISSARKL

SEQ ID NO: 31493 - protein, 9 aa, Homo sapiens
  Table A; Target 31493; HLA-B*40:02; INSL6; ENSG00000120210; CTA
SEKVEAYSP

SEQ ID NO: 31494 - protein, 10 aa, Homo sapiens
  Table A; Target 31494; HLA-A*30:02; INSL6; ENSG00000120210; CTA
SEKVEAYSPY

SEQ ID NO: 31495 - protein, 10 aa, Homo sapiens
  Table A; Target 31495; HLA-B*44:02; INSL6; ENSG00000120210; CTA
SEKVEAYSPY

SEQ ID NO: 31496 - protein, 10 aa, Homo sapiens
  Table A; Target 31496; HLA-B*44:03; INSL6; ENSG00000120210; CTA
SEKVEAYSPY

SEQ ID NO: 31497 - protein, 8 aa, Homo sapiens
  Table A; Target 31497; HLA-B*38:01; INSL6; ENSG00000120210; CTA
SHNINVYI

SEQ ID NO: 31498 - protein, 9 aa, Homo sapiens
  Table A; Target 31498; HLA-A*02:01; INSL6; ENSG00000120210; CTA
SLLWLGLLL

SEQ ID NO: 31499 - protein, 9 aa, Homo sapiens
  Table A; Target 31499; HLA-A*02:04; INSL6; ENSG00000120210; CTA
SLLWLGLLL

SEQ ID NO: 31500 - protein, 10 aa, Homo sapiens
  Table A; Target 31500; HLA-A*02:01; INSL6; ENSG00000120210; CTA
SLLWLGLLLV

SEQ ID NO: 31501 - protein, 10 aa, Homo sapiens
  Table A; Target 31501; HLA-A*02:04; INSL6; ENSG00000120210; CTA
SLLWLGLLLV

SEQ ID NO: 31502 - protein, 11 aa, Homo sapiens
  Table A; Target 31502; HLA-B*07:02; INSL6; ENSG00000120210; CTA
SPARGRGTNPV

SEQ ID NO: 31503 - protein, 9 aa, Homo sapiens
  Table A; Target 31503; HLA-B*07:02; INSL6; ENSG00000120210; CTA
SPLGKTREF

SEQ ID NO: 31504 - protein, 9 aa, Homo sapiens
  Table A; Target 31504; HLA-B*08:01; INSL6; ENSG00000120210; CTA
SPLGKTREF

SEQ ID NO: 31505 - protein, 9 aa, Homo sapiens
  Table A; Target 31505; HLA-B*35:01; INSL6; ENSG00000120210; CTA
SPLGKTREF

SEQ ID NO: 31506 - protein, 9 aa, Homo sapiens
  Table A; Target 31506; HLA-C*07:02; INSL6; ENSG00000120210; CTA
SPLGKTREF

SEQ ID NO: 31507 - protein, 9 aa, Homo sapiens
  Table A; Target 31507; HLA-C*16:01; INSL6; ENSG00000120210; CTA
SPLGKTREF

SEQ ID NO: 31508 - protein, 9 aa, Homo sapiens
  Table A; Target 31508; HLA-C*07:06; INSL6; ENSG00000120210; CTA
SPQTASPAR

SEQ ID NO: 31509 - protein, 8 aa, Homo sapiens
  Table A; Target 31509; HLA-B*56:01; INSL6; ENSG00000120210; CTA
SPYQFESP

SEQ ID NO: 31510 - protein, 10 aa, Homo sapiens
  Table A; Target 31510; HLA-B*51:01; INSL6; ENSG00000120210; CTA
SPYQFESPQT

SEQ ID NO: 31511 - protein, 10 aa, Homo sapiens
  Table A; Target 31511; HLA-B*56:01; INSL6; ENSG00000120210; CTA
SPYQFESPQT

SEQ ID NO: 31512 - protein, 11 aa, Homo sapiens
  Table A; Target 31512; HLA-B*54:01; INSL6; ENSG00000120210; CTA
SPYQFESPQTA

SEQ ID NO: 31513 - protein, 11 aa, Homo sapiens
  Table A; Target 31513; HLA-B*55:01; INSL6; ENSG00000120210; CTA
SPYQFESPQTA

SEQ ID NO: 31514 - protein, 11 aa, Homo sapiens
  Table A; Target 31514; HLA-B*56:01; INSL6; ENSG00000120210; CTA
SPYQFESPQTA

SEQ ID NO: 31515 - protein, 8 aa, Homo sapiens
  Table A; Target 31515; HLA-A*30:02; INSL6; ENSG00000120210; CTA
SSHNINVY

SEQ ID NO: 31516 - protein, 8 aa, Homo sapiens
  Table A; Target 31516; HLA-B*15:01; INSL6; ENSG00000120210; CTA
SSHNINVY

SEQ ID NO: 31517 - protein, 8 aa, Homo sapiens
  Table A; Target 31517; HLA-B*46:01; INSL6; ENSG00000120210; CTA
SSHNINVY

SEQ ID NO: 31518 - protein, 8 aa, Homo sapiens
  Table A; Target 31518; HLA-C*16:01; INSL6; ENSG00000120210; CTA
SSHNINVY

SEQ ID NO: 31519 - protein, 9 aa, Homo sapiens
  Table A; Target 31519; HLA-A*68:02; INSL6; ENSG00000120210; CTA
SSHNINVYI

SEQ ID NO: 31520 - protein, 9 aa, Homo sapiens
  Table A; Target 31520; HLA-B*13:02; INSL6; ENSG00000120210; CTA
SSHNINVYI

SEQ ID NO: 31521 - protein, 8 aa, Homo sapiens
  Table A; Target 31521; HLA-B*15:01; INSL6; ENSG00000120210; CTA
SSLVTKIY

SEQ ID NO: 31522 - protein, 8 aa, Homo sapiens
  Table A; Target 31522; HLA-B*15:03; INSL6; ENSG00000120210; CTA
SSLVTKIY

SEQ ID NO: 31523 - protein, 8 aa, Homo sapiens
  Table A; Target 31523; HLA-B*46:01; INSL6; ENSG00000120210; CTA
SSLVTKIY

SEQ ID NO: 31524 - protein, 8 aa, Homo sapiens
  Table A; Target 31524; HLA-C*07:01; INSL6; ENSG00000120210; CTA
SSLVTKIY

SEQ ID NO: 31525 - protein, 8 aa, Homo sapiens
  Table A; Target 31525; HLA-C*12:03; INSL6; ENSG00000120210; CTA
SSLVTKIY

SEQ ID NO: 31526 - protein, 8 aa, Homo sapiens
  Table A; Target 31526; HLA-C*16:01; INSL6; ENSG00000120210; CTA
SSLVTKIY

SEQ ID NO: 31527 - protein, 9 aa, Homo sapiens
  Table A; Target 31527; HLA-A*01:01; INSL6; ENSG00000120210; CTA
SSSHNINVY

SEQ ID NO: 31528 - protein, 9 aa, Homo sapiens
  Table A; Target 31528; HLA-A*26:01; INSL6; ENSG00000120210; CTA
SSSHNINVY

SEQ ID NO: 31529 - protein, 9 aa, Homo sapiens
  Table A; Target 31529; HLA-A*30:02; INSL6; ENSG00000120210; CTA
SSSHNINVY

SEQ ID NO: 31530 - protein, 9 aa, Homo sapiens
  Table A; Target 31530; HLA-A*32:01; INSL6; ENSG00000120210; CTA
SSSHNINVY

SEQ ID NO: 31531 - protein, 9 aa, Homo sapiens
  Table A; Target 31531; HLA-B*15:01; INSL6; ENSG00000120210; CTA
SSSHNINVY

SEQ ID NO: 31532 - protein, 9 aa, Homo sapiens
  Table A; Target 31532; HLA-B*46:01; INSL6; ENSG00000120210; CTA
SSSHNINVY

SEQ ID NO: 31533 - protein, 9 aa, Homo sapiens
  Table A; Target 31533; HLA-B*58:01; INSL6; ENSG00000120210; CTA
SSSHNINVY

SEQ ID NO: 31534 - protein, 9 aa, Homo sapiens
  Table A; Target 31534; HLA-C*02:02; INSL6; ENSG00000120210; CTA
SSSHNINVY

SEQ ID NO: 31535 - protein, 9 aa, Homo sapiens
  Table A; Target 31535; HLA-C*07:04; INSL6; ENSG00000120210; CTA
SSSHNINVY

SEQ ID NO: 31536 - protein, 9 aa, Homo sapiens
  Table A; Target 31536; HLA-C*12:03; INSL6; ENSG00000120210; CTA
SSSHNINVY

SEQ ID NO: 31537 - protein, 9 aa, Homo sapiens
  Table A; Target 31537; HLA-C*16:01; INSL6; ENSG00000120210; CTA
SSSHNINVY

SEQ ID NO: 31538 - protein, 9 aa, Homo sapiens
  Table A; Target 31538; HLA-C*16:02; INSL6; ENSG00000120210; CTA
SSSHNINVY

SEQ ID NO: 31539 - protein, 10 aa, Homo sapiens
  Table A; Target 31539; HLA-A*68:02; INSL6; ENSG00000120210; CTA
SSSHNINVYI

SEQ ID NO: 31540 - protein, 11 aa, Homo sapiens
  Table A; Target 31540; HLA-A*25:01; INSL6; ENSG00000120210; CTA
STSWEEAVNSW

SEQ ID NO: 31541 - protein, 8 aa, Homo sapiens
  Table A; Target 31541; HLA-B*54:01; INSL6; ENSG00000120210; CTA
TPFSRLIA

SEQ ID NO: 31542 - protein, 8 aa, Homo sapiens
  Table A; Target 31542; HLA-B*56:01; INSL6; ENSG00000120210; CTA
TPFSRLIA

SEQ ID NO: 31543 - protein, 9 aa, Homo sapiens
  Table A; Target 31543; HLA-B*54:01; INSL6; ENSG00000120210; CTA
TPFSRLIAQ

SEQ ID NO: 31544 - protein, 9 aa, Homo sapiens
  Table A; Target 31544; HLA-B*56:01; INSL6; ENSG00000120210; CTA
TPFSRLIAQ

SEQ ID NO: 31545 - protein, 10 aa, Homo sapiens
  Table A; Target 31545; HLA-B*54:01; INSL6; ENSG00000120210; CTA
TPFSRLIAQA

SEQ ID NO: 31546 - protein, 10 aa, Homo sapiens
  Table A; Target 31546; HLA-B*56:01; INSL6; ENSG00000120210; CTA
TPFSRLIAQA

SEQ ID NO: 31547 - protein, 10 aa, Homo sapiens
  Table A; Target 31547; HLA-A*25:01; INSL6; ENSG00000120210; CTA
TSWEEAVNSW

SEQ ID NO: 31548 - protein, 10 aa, Homo sapiens
  Table A; Target 31548; HLA-B*57:01; INSL6; ENSG00000120210; CTA
TSWEEAVNSW

SEQ ID NO: 31549 - protein, 10 aa, Homo sapiens
  Table A; Target 31549; HLA-B*58:01; INSL6; ENSG00000120210; CTA
TSWEEAVNSW

SEQ ID NO: 31550 - protein, 10 aa, Homo sapiens
  Table A; Target 31550; HLA-C*07:06; INSL6; ENSG00000120210; CTA
TSWEEAVNSW

SEQ ID NO: 31551 - protein, 9 aa, Homo sapiens
  Table A; Target 31551; HLA-A*23:01; INSL6; ENSG00000120210; CTA
VEAYSPYQF

SEQ ID NO: 31552 - protein, 9 aa, Homo sapiens
  Table A; Target 31552; HLA-A*24:02; INSL6; ENSG00000120210; CTA
VEAYSPYQF

SEQ ID NO: 31553 - protein, 9 aa, Homo sapiens
  Table A; Target 31553; HLA-A*30:01; INSL6; ENSG00000120210; CTA
VEAYSPYQF

SEQ ID NO: 31554 - protein, 9 aa, Homo sapiens
  Table A; Target 31554; HLA-B*18:01; INSL6; ENSG00000120210; CTA
VEAYSPYQF

SEQ ID NO: 31555 - protein, 9 aa, Homo sapiens
  Table A; Target 31555; HLA-B*27:02; INSL6; ENSG00000120210; CTA
VEAYSPYQF

SEQ ID NO: 31556 - protein, 9 aa, Homo sapiens
  Table A; Target 31556; HLA-B*37:01; INSL6; ENSG00000120210; CTA
VEAYSPYQF

SEQ ID NO: 31557 - protein, 9 aa, Homo sapiens
  Table A; Target 31557; HLA-B*40:01; INSL6; ENSG00000120210; CTA
VEAYSPYQF

SEQ ID NO: 31558 - protein, 9 aa, Homo sapiens
  Table A; Target 31558; HLA-B*44:02; INSL6; ENSG00000120210; CTA
VEAYSPYQF

SEQ ID NO: 31559 - protein, 9 aa, Homo sapiens
  Table A; Target 31559; HLA-B*44:03; INSL6; ENSG00000120210; CTA
VEAYSPYQF

SEQ ID NO: 31560 - protein, 9 aa, Homo sapiens
  Table A; Target 31560; HLA-A*23:01; INSL6; ENSG00000120210; CTA
VYIHENAKF

SEQ ID NO: 31561 - protein, 9 aa, Homo sapiens
  Table A; Target 31561; HLA-A*29:02; INSL6; ENSG00000120210; CTA
VYIHENAKF

SEQ ID NO: 31562 - protein, 9 aa, Homo sapiens
  Table A; Target 31562; HLA-B*58:01; INSL6; ENSG00000120210; CTA
VYIHENAKF

SEQ ID NO: 31563 - protein, 9 aa, Homo sapiens
  Table A; Target 31563; HLA-C*14:02; INSL6; ENSG00000120210; CTA
VYIHENAKF

SEQ ID NO: 31564 - protein, 9 aa, Homo sapiens
  Table A; Target 31564; HLA-B*15:03; INSL6; ENSG00000120210; CTA
WEMQSLPEY

SEQ ID NO: 31565 - protein, 9 aa, Homo sapiens
  Table A; Target 31565; HLA-B*18:01; INSL6; ENSG00000120210; CTA
WEMQSLPEY

SEQ ID NO: 31566 - protein, 9 aa, Homo sapiens
  Table A; Target 31566; HLA-B*44:02; INSL6; ENSG00000120210; CTA
WEMQSLPEY

SEQ ID NO: 31567 - protein, 9 aa, Homo sapiens
  Table A; Target 31567; HLA-B*44:03; INSL6; ENSG00000120210; CTA
WEMQSLPEY

SEQ ID NO: 31568 - protein, 9 aa, Homo sapiens
  Table A; Target 31568; HLA-B*49:01; INSL6; ENSG00000120210; CTA
WEMQSLPEY

SEQ ID NO: 31569 - protein, 9 aa, Homo sapiens
  Table A; Target 31569; HLA-C*16:04; INSL6; ENSG00000120210; CTA
WEMQSLPEY

SEQ ID NO: 31570 - protein, 9 aa, Homo sapiens
  Table A; Target 31570; HLA-A*02:01; INSL6; ENSG00000120210; CTA
YLVKEIEKL

SEQ ID NO: 31571 - protein, 9 aa, Homo sapiens
  Table A; Target 31571; HLA-A*02:03; INSL6; ENSG00000120210; CTA
YLVKEIEKL

SEQ ID NO: 31572 - protein, 9 aa, Homo sapiens
  Table A; Target 31572; HLA-A*02:04; INSL6; ENSG00000120210; CTA
YLVKEIEKL

SEQ ID NO: 31573 - protein, 9 aa, Homo sapiens
  Table A; Target 31573; HLA-A*02:07; INSL6; ENSG00000120210; CTA
YLVKEIEKL

SEQ ID NO: 31574 - protein, 9 aa, Homo sapiens
  Table A; Target 31574; HLA-A*68:02; INSL6; ENSG00000120210; CTA
YLVKEIEKL

SEQ ID NO: 31575 - protein, 8 aa, Homo sapiens
  Table A; Target 31575; HLA-B*13:02; INSL6; ENSG00000120210; CTA
YQFESPQT

SEQ ID NO: 31576 - protein, 9 aa, Homo sapiens
  Table A; Target 31576; HLA-A*02:01; INSL6; ENSG00000120210; CTA
YQFESPQTA

SEQ ID NO: 31577 - protein, 9 aa, Homo sapiens
  Table A; Target 31577; HLA-A*02:03; INSL6; ENSG00000120210; CTA
YQFESPQTA

SEQ ID NO: 31578 - protein, 9 aa, Homo sapiens
  Table A; Target 31578; HLA-A*30:01; INSL6; ENSG00000120210; CTA
YQFESPQTA

SEQ ID NO: 31579 - protein, 9 aa, Homo sapiens
  Table A; Target 31579; HLA-A*32:01; INSL6; ENSG00000120210; CTA
YQFESPQTA

SEQ ID NO: 31580 - protein, 9 aa, Homo sapiens
  Table A; Target 31580; HLA-B*13:02; INSL6; ENSG00000120210; CTA
YQFESPQTA

SEQ ID NO: 31581 - protein, 9 aa, Homo sapiens
  Table A; Target 31581; HLA-B*15:01; INSL6; ENSG00000120210; CTA
YQFESPQTA

SEQ ID NO: 31582 - protein, 9 aa, Homo sapiens
  Table A; Target 31582; HLA-B*15:03; INSL6; ENSG00000120210; CTA
YQFESPQTA

SEQ ID NO: 31583 - protein, 9 aa, Homo sapiens
  Table A; Target 31583; HLA-B*27:05; INSL6; ENSG00000120210; CTA
YQFESPQTA

SEQ ID NO: 31584 - protein, 9 aa, Homo sapiens
  Table A; Target 31584; HLA-B*39:01; INSL6; ENSG00000120210; CTA
YQFESPQTA

SEQ ID NO: 31585 - protein, 9 aa, Homo sapiens
  Table A; Target 31585; HLA-C*02:02; INSL6; ENSG00000120210; CTA
YQFESPQTA

SEQ ID NO: 31586 - protein, 9 aa, Homo sapiens
  Table A; Target 31586; HLA-C*03:04; INSL6; ENSG00000120210; CTA
YQFESPQTA

SEQ ID NO: 31587 - protein, 9 aa, Homo sapiens
  Table A; Target 31587; HLA-C*12:03; INSL6; ENSG00000120210; CTA
YQFESPQTA

SEQ ID NO: 31588 - protein, 8 aa, Homo sapiens
  Table A; Target 31588; HLA-C*05:01; KCNU1; ENSG00000215262; CTA
AADDKIKF

SEQ ID NO: 31589 - protein, 9 aa, Homo sapiens
  Table A; Target 31589; HLA-B*44:02; KCNU1; ENSG00000215262; CTA
AADDKIKFW

SEQ ID NO: 31590 - protein, 9 aa, Homo sapiens
  Table A; Target 31590; HLA-B*57:01; KCNU1; ENSG00000215262; CTA
AADDKIKFW

SEQ ID NO: 31591 - protein, 8 aa, Homo sapiens
  Table A; Target 31591; HLA-B*46:01; KCNU1; ENSG00000215262; CTA
AAFILSSF

SEQ ID NO: 31592 - protein, 8 aa, Homo sapiens
  Table A; Target 31592; HLA-C*02:02; KCNU1; ENSG00000215262; CTA
AAFILSSF

SEQ ID NO: 31593 - protein, 8 aa, Homo sapiens
  Table A; Target 31593; HLA-C*12:03; KCNU1; ENSG00000215262; CTA
AAGFIHLV

SEQ ID NO: 31594 - protein, 9 aa, Homo sapiens
  Table A; Target 31594; HLA-B*46:01; KCNU1; ENSG00000215262; CTA
AANIEQCSM

SEQ ID NO: 31595 - protein, 9 aa, Homo sapiens
  Table A; Target 31595; HLA-B*58:01; KCNU1; ENSG00000215262; CTA
AANIEQCSM

SEQ ID NO: 31596 - protein, 9 aa, Homo sapiens
  Table A; Target 31596; HLA-C*01:02; KCNU1; ENSG00000215262; CTA
AANIEQCSM

SEQ ID NO: 31597 - protein, 9 aa, Homo sapiens
  Table A; Target 31597; HLA-C*03:03; KCNU1; ENSG00000215262; CTA
AANIEQCSM

SEQ ID NO: 31598 - protein, 9 aa, Homo sapiens
  Table A; Target 31598; HLA-C*03:04; KCNU1; ENSG00000215262; CTA
AANIEQCSM

SEQ ID NO: 31599 - protein, 9 aa, Homo sapiens
  Table A; Target 31599; HLA-C*16:01; KCNU1; ENSG00000215262; CTA
AANIEQCSM

SEQ ID NO: 31600 - protein, 9 aa, Homo sapiens
  Table A; Target 31600; HLA-C*16:02; KCNU1; ENSG00000215262; CTA
AANIEQCSM

SEQ ID NO: 31601 - protein, 9 aa, Homo sapiens
  Table A; Target 31601; HLA-C*16:04; KCNU1; ENSG00000215262; CTA
AANIEQCSM

SEQ ID NO: 31602 - protein, 10 aa, Homo sapiens
  Table A; Target 31602; HLA-B*44:02; KCNU1; ENSG00000215262; CTA
ADPVGSCSSY

SEQ ID NO: 31603 - protein, 10 aa, Homo sapiens
  Table A; Target 31603; HLA-C*04:01; KCNU1; ENSG00000215262; CTA
ADPVGSCSSY

SEQ ID NO: 31604 - protein, 10 aa, Homo sapiens
  Table A; Target 31604; HLA-C*07:01; KCNU1; ENSG00000215262; CTA
ADPVGSCSSY

SEQ ID NO: 31605 - protein, 10 aa, Homo sapiens
  Table A; Target 31605; HLA-C*07:02; KCNU1; ENSG00000215262; CTA
ADPVGSCSSY

SEQ ID NO: 31606 - protein, 8 aa, Homo sapiens
  Table A; Target 31606; HLA-B*37:01; KCNU1; ENSG00000215262; CTA
ADSCTSLL

SEQ ID NO: 31607 - protein, 8 aa, Homo sapiens
  Table A; Target 31607; HLA-B*18:01; KCNU1; ENSG00000215262; CTA
AEDISNIM

SEQ ID NO: 31608 - protein, 8 aa, Homo sapiens
  Table A; Target 31608; HLA-B*37:01; KCNU1; ENSG00000215262; CTA
AEDISNIM

SEQ ID NO: 31609 - protein, 8 aa, Homo sapiens
  Table A; Target 31609; HLA-B*40:01; KCNU1; ENSG00000215262; CTA
AEDISNIM

SEQ ID NO: 31610 - protein, 8 aa, Homo sapiens
  Table A; Target 31610; HLA-B*49:01; KCNU1; ENSG00000215262; CTA
AEDISNIM

SEQ ID NO: 31611 - protein, 10 aa, Homo sapiens
  Table A; Target 31611; HLA-B*40:01; KCNU1; ENSG00000215262; CTA
AEDISNIMRV

SEQ ID NO: 31612 - protein, 10 aa, Homo sapiens
  Table A; Target 31612; HLA-B*49:01; KCNU1; ENSG00000215262; CTA
AEDISNIMRV

SEQ ID NO: 31613 - protein, 11 aa, Homo sapiens
  Table A; Target 31613; HLA-A*30:01; KCNU1; ENSG00000215262; CTA
AEDISNIMRVL

SEQ ID NO: 31614 - protein, 11 aa, Homo sapiens
  Table A; Target 31614; HLA-B*40:01; KCNU1; ENSG00000215262; CTA
AEDISNIMRVL

SEQ ID NO: 31615 - protein, 11 aa, Homo sapiens
  Table A; Target 31615; HLA-B*40:02; KCNU1; ENSG00000215262; CTA
AEDISNIMRVL

SEQ ID NO: 31616 - protein, 11 aa, Homo sapiens
  Table A; Target 31616; HLA-B*44:02; KCNU1; ENSG00000215262; CTA
AEDISNIMRVL

SEQ ID NO: 31617 - protein, 11 aa, Homo sapiens
  Table A; Target 31617; HLA-B*44:03; KCNU1; ENSG00000215262; CTA
AEDISNIMRVL

SEQ ID NO: 31618 - protein, 11 aa, Homo sapiens
  Table A; Target 31618; HLA-B*49:01; KCNU1; ENSG00000215262; CTA
AEDISNIMRVL

SEQ ID NO: 31619 - protein, 8 aa, Homo sapiens
  Table A; Target 31619; HLA-B*49:01; KCNU1; ENSG00000215262; CTA
AELKLGFI

SEQ ID NO: 31620 - protein, 9 aa, Homo sapiens
  Table A; Target 31620; HLA-B*40:02; KCNU1; ENSG00000215262; CTA
AELKLGFIA

SEQ ID NO: 31621 - protein, 10 aa, Homo sapiens
  Table A; Target 31621; HLA-B*44:02; KCNU1; ENSG00000215262; CTA
AELKLGFIAQ

SEQ ID NO: 31622 - protein, 10 aa, Homo sapiens
  Table A; Target 31622; HLA-A*23:01; KCNU1; ENSG00000215262; CTA
AFILSSFVTF

SEQ ID NO: 31623 - protein, 10 aa, Homo sapiens
  Table A; Target 31623; HLA-A*24:02; KCNU1; ENSG00000215262; CTA
AFILSSFVTF

SEQ ID NO: 31624 - protein, 8 aa, Homo sapiens
  Table A; Target 31624; HLA-A*23:01; KCNU1; ENSG00000215262; CTA
AFSTGTVF

SEQ ID NO: 31625 - protein, 8 aa, Homo sapiens
  Table A; Target 31625; HLA-B*15:03; KCNU1; ENSG00000215262; CTA
AFSTGTVF

SEQ ID NO: 31626 - protein, 8 aa, Homo sapiens
  Table A; Target 31626; HLA-C*01:02; KCNU1; ENSG00000215262; CTA
AFSTGTVF

SEQ ID NO: 31627 - protein, 8 aa, Homo sapiens
  Table A; Target 31627; HLA-C*04:01; KCNU1; ENSG00000215262; CTA
AFSTGTVF

SEQ ID NO: 31628 - protein, 8 aa, Homo sapiens
  Table A; Target 31628; HLA-C*14:02; KCNU1; ENSG00000215262; CTA
AFSTGTVF

SEQ ID NO: 31629 - protein, 8 aa, Homo sapiens
  Table A; Target 31629; HLA-C*16:01; KCNU1; ENSG00000215262; CTA
AFSTGTVF

SEQ ID NO: 31630 - protein, 10 aa, Homo sapiens
  Table A; Target 31630; HLA-A*11:01; KCNU1; ENSG00000215262; CTA
AGMSFPEVAR

SEQ ID NO: 31631 - protein, 10 aa, Homo sapiens
  Table A; Target 31631; HLA-A*31:01; KCNU1; ENSG00000215262; CTA
AGMSFPEVAR

SEQ ID NO: 31632 - protein, 10 aa, Homo sapiens
  Table A; Target 31632; HLA-C*07:06; KCNU1; ENSG00000215262; CTA
AGMSFPEVAR

SEQ ID NO: 31633 - protein, 11 aa, Homo sapiens
  Table A; Target 31633; HLA-A*02:04; KCNU1; ENSG00000215262; CTA
AGMSFPEVARL

SEQ ID NO: 31634 - protein, 8 aa, Homo sapiens
  Table A; Target 31634; HLA-B*37:01; KCNU1; ENSG00000215262; CTA
AHSAPMGL

SEQ ID NO: 31635 - protein, 8 aa, Homo sapiens
  Table A; Target 31635; HLA-B*38:01; KCNU1; ENSG00000215262; CTA
AHSAPMGL

SEQ ID NO: 31636 - protein, 8 aa, Homo sapiens
  Table A; Target 31636; HLA-A*32:01; KCNU1; ENSG00000215262; CTA
AIKTSNSV

SEQ ID NO: 31637 - protein, 8 aa, Homo sapiens
  Table A; Target 31637; HLA-B*08:01; KCNU1; ENSG00000215262; CTA
AIKTSNSV

SEQ ID NO: 31638 - protein, 9 aa, Homo sapiens
  Table A; Target 31638; HLA-A*03:01; KCNU1; ENSG00000215262; CTA
AIKTSNSVK

SEQ ID NO: 31639 - protein, 9 aa, Homo sapiens
  Table A; Target 31639; HLA-A*03:02; KCNU1; ENSG00000215262; CTA
AIKTSNSVK

SEQ ID NO: 31640 - protein, 10 aa, Homo sapiens
  Table A; Target 31640; HLA-B*15:01; KCNU1; ENSG00000215262; CTA
AIKTSNSVKF

SEQ ID NO: 31641 - protein, 10 aa, Homo sapiens
  Table A; Target 31641; HLA-B*46:01; KCNU1; ENSG00000215262; CTA
AIKTSNSVKF

SEQ ID NO: 31642 - protein, 8 aa, Homo sapiens
  Table A; Target 31642; HLA-B*13:02; KCNU1; ENSG00000215262; CTA
AIMATLTI

SEQ ID NO: 31643 - protein, 9 aa, Homo sapiens
  Table A; Target 31643; HLA-A*26:01; KCNU1; ENSG00000215262; CTA
AIPFSTACY

SEQ ID NO: 31644 - protein, 9 aa, Homo sapiens
  Table A; Target 31644; HLA-A*29:02; KCNU1; ENSG00000215262; CTA
AIPFSTACY

SEQ ID NO: 31645 - protein, 9 aa, Homo sapiens
  Table A; Target 31645; HLA-A*30:02; KCNU1; ENSG00000215262; CTA
AIPFSTACY

SEQ ID NO: 31646 - protein, 9 aa, Homo sapiens
  Table A; Target 31646; HLA-B*15:01; KCNU1; ENSG00000215262; CTA
AIPFSTACY

SEQ ID NO: 31647 - protein, 9 aa, Homo sapiens
  Table A; Target 31647; HLA-B*15:03; KCNU1; ENSG00000215262; CTA
AIPFSTACY

SEQ ID NO: 31648 - protein, 9 aa, Homo sapiens
  Table A; Target 31648; HLA-B*46:01; KCNU1; ENSG00000215262; CTA
AIPFSTACY

SEQ ID NO: 31649 - protein, 9 aa, Homo sapiens
  Table A; Target 31649; HLA-C*01:02; KCNU1; ENSG00000215262; CTA
AIPFSTACY

SEQ ID NO: 31650 - protein, 9 aa, Homo sapiens
  Table A; Target 31650; HLA-C*07:04; KCNU1; ENSG00000215262; CTA
AIPFSTACY

SEQ ID NO: 31651 - protein, 10 aa, Homo sapiens
  Table A; Target 31651; HLA-A*03:01; KCNU1; ENSG00000215262; CTA
AIPFSTACYK

SEQ ID NO: 31652 - protein, 10 aa, Homo sapiens
  Table A; Target 31652; HLA-A*03:02; KCNU1; ENSG00000215262; CTA
AIPFSTACYK

SEQ ID NO: 31653 - protein, 10 aa, Homo sapiens
  Table A; Target 31653; HLA-A*11:01; KCNU1; ENSG00000215262; CTA
AIPFSTACYK

SEQ ID NO: 31654 - protein, 9 aa, Homo sapiens
  Table A; Target 31654; HLA-B*15:03; KCNU1; ENSG00000215262; CTA
AKTSLGRTF

SEQ ID NO: 31655 - protein, 10 aa, Homo sapiens
  Table A; Target 31655; HLA-A*02:04; KCNU1; ENSG00000215262; CTA
ALRLLELPQI

SEQ ID NO: 31656 - protein, 9 aa, Homo sapiens
  Table A; Target 31656; HLA-A*02:01; KCNU1; ENSG00000215262; CTA
ALYSGDLHA

SEQ ID NO: 31657 - protein, 9 aa, Homo sapiens
  Table A; Target 31657; HLA-A*02:03; KCNU1; ENSG00000215262; CTA
ALYSGDLHA

SEQ ID NO: 31658 - protein, 9 aa, Homo sapiens
  Table A; Target 31658; HLA-A*02:04; KCNU1; ENSG00000215262; CTA
ALYSGDLHA

SEQ ID NO: 31659 - protein, 9 aa, Homo sapiens
  Table A; Target 31659; HLA-B*13:02; KCNU1; ENSG00000215262; CTA
ALYSGDLHA

SEQ ID NO: 31660 - protein, 9 aa, Homo sapiens
  Table A; Target 31660; HLA-B*55:01; KCNU1; ENSG00000215262; CTA
ALYSGDLHA

SEQ ID NO: 31661 - protein, 10 aa, Homo sapiens
  Table A; Target 31661; HLA-A*02:03; KCNU1; ENSG00000215262; CTA
ALYSGDLHAA

SEQ ID NO: 31662 - protein, 10 aa, Homo sapiens
  Table A; Target 31662; HLA-A*02:04; KCNU1; ENSG00000215262; CTA
ALYSGDLHAA

SEQ ID NO: 31663 - protein, 10 aa, Homo sapiens
  Table A; Target 31663; HLA-A*02:07; KCNU1; ENSG00000215262; CTA
ALYSGDLHAA

SEQ ID NO: 31664 - protein, 10 aa, Homo sapiens
  Table A; Target 31664; HLA-A*03:01; KCNU1; ENSG00000215262; CTA
ALYSGDLHAA

SEQ ID NO: 31665 - protein, 10 aa, Homo sapiens
  Table A; Target 31665; HLA-A*32:01; KCNU1; ENSG00000215262; CTA
ALYSGDLHAA

SEQ ID NO: 31666 - protein, 10 aa, Homo sapiens
  Table A; Target 31666; HLA-B*13:02; KCNU1; ENSG00000215262; CTA
ALYSGDLHAA

SEQ ID NO: 31667 - protein, 10 aa, Homo sapiens
  Table A; Target 31667; HLA-B*46:01; KCNU1; ENSG00000215262; CTA
ALYSGDLHAA

SEQ ID NO: 31668 - protein, 10 aa, Homo sapiens
  Table A; Target 31668; HLA-B*55:01; KCNU1; ENSG00000215262; CTA
ALYSGDLHAA

SEQ ID NO: 31669 - protein, 10 aa, Homo sapiens
  Table A; Target 31669; HLA-B*56:01; KCNU1; ENSG00000215262; CTA
ALYSGDLHAA

SEQ ID NO: 31670 - protein, 9 aa, Homo sapiens
  Table A; Target 31670; HLA-B*07:02; KCNU1; ENSG00000215262; CTA
APMGLRNFV

SEQ ID NO: 31671 - protein, 9 aa, Homo sapiens
  Table A; Target 31671; HLA-B*56:01; KCNU1; ENSG00000215262; CTA
APMGLRNFV

SEQ ID NO: 31672 - protein, 9 aa, Homo sapiens
  Table A; Target 31672; HLA-C*07:02; KCNU1; ENSG00000215262; CTA
APMGLRNFV

SEQ ID NO: 31673 - protein, 10 aa, Homo sapiens
  Table A; Target 31673; HLA-B*07:02; KCNU1; ENSG00000215262; CTA
APMGLRNFVM

SEQ ID NO: 31674 - protein, 10 aa, Homo sapiens
  Table A; Target 31674; HLA-B*08:01; KCNU1; ENSG00000215262; CTA
APMGLRNFVM

SEQ ID NO: 31675 - protein, 10 aa, Homo sapiens
  Table A; Target 31675; HLA-B*35:03; KCNU1; ENSG00000215262; CTA
APMGLRNFVM

SEQ ID NO: 31676 - protein, 10 aa, Homo sapiens
  Table A; Target 31676; HLA-B*56:01; KCNU1; ENSG00000215262; CTA
APMGLRNFVM

SEQ ID NO: 31677 - protein, 10 aa, Homo sapiens
  Table A; Target 31677; HLA-C*07:02; KCNU1; ENSG00000215262; CTA
APMGLRNFVM

SEQ ID NO: 31678 - protein, 8 aa, Homo sapiens
  Table A; Target 31678; HLA-B*13:02; KCNU1; ENSG00000215262; CTA
AQTFVGQV

SEQ ID NO: 31679 - protein, 9 aa, Homo sapiens
  Table A; Target 31679; HLA-A*30:01; KCNU1; ENSG00000215262; CTA
AQTFVGQVL

SEQ ID NO: 31680 - protein, 9 aa, Homo sapiens
  Table A; Target 31680; HLA-A*32:01; KCNU1; ENSG00000215262; CTA
AQTFVGQVL

SEQ ID NO: 31681 - protein, 9 aa, Homo sapiens
  Table A; Target 31681; HLA-B*13:02; KCNU1; ENSG00000215262; CTA
AQTFVGQVL

SEQ ID NO: 31682 - protein, 9 aa, Homo sapiens
  Table A; Target 31682; HLA-B*15:01; KCNU1; ENSG00000215262; CTA
AQTFVGQVL

SEQ ID NO: 31683 - protein, 9 aa, Homo sapiens
  Table A; Target 31683; HLA-B*15:03; KCNU1; ENSG00000215262; CTA
AQTFVGQVL

SEQ ID NO: 31684 - protein, 9 aa, Homo sapiens
  Table A; Target 31684; HLA-B*27:02; KCNU1; ENSG00000215262; CTA
AQTFVGQVL

SEQ ID NO: 31685 - protein, 9 aa, Homo sapiens
  Table A; Target 31685; HLA-B*27:05; KCNU1; ENSG00000215262; CTA
AQTFVGQVL

SEQ ID NO: 31686 - protein, 9 aa, Homo sapiens
  Table A; Target 31686; HLA-B*37:01; KCNU1; ENSG00000215262; CTA
AQTFVGQVL

SEQ ID NO: 31687 - protein, 9 aa, Homo sapiens
  Table A; Target 31687; HLA-B*38:01; KCNU1; ENSG00000215262; CTA
AQTFVGQVL

SEQ ID NO: 31688 - protein, 9 aa, Homo sapiens
  Table A; Target 31688; HLA-B*39:01; KCNU1; ENSG00000215262; CTA
AQTFVGQVL

SEQ ID NO: 31689 - protein, 9 aa, Homo sapiens
  Table A; Target 31689; HLA-B*40:01; KCNU1; ENSG00000215262; CTA
AQTFVGQVL

SEQ ID NO: 31690 - protein, 9 aa, Homo sapiens
  Table A; Target 31690; HLA-B*40:02; KCNU1; ENSG00000215262; CTA
AQTFVGQVL

SEQ ID NO: 31691 - protein, 9 aa, Homo sapiens
  Table A; Target 31691; HLA-B*44:02; KCNU1; ENSG00000215262; CTA
AQTFVGQVL

SEQ ID NO: 31692 - protein, 9 aa, Homo sapiens
  Table A; Target 31692; HLA-B*44:03; KCNU1; ENSG00000215262; CTA
AQTFVGQVL

SEQ ID NO: 31693 - protein, 9 aa, Homo sapiens
  Table A; Target 31693; HLA-B*58:01; KCNU1; ENSG00000215262; CTA
AQTFVGQVL

SEQ ID NO: 31694 - protein, 9 aa, Homo sapiens
  Table A; Target 31694; HLA-C*02:02; KCNU1; ENSG00000215262; CTA
AQTFVGQVL

SEQ ID NO: 31695 - protein, 9 aa, Homo sapiens
  Table A; Target 31695; HLA-C*03:03; KCNU1; ENSG00000215262; CTA
AQTFVGQVL

SEQ ID NO: 31696 - protein, 9 aa, Homo sapiens
  Table A; Target 31696; HLA-C*03:04; KCNU1; ENSG00000215262; CTA
AQTFVGQVL

SEQ ID NO: 31697 - protein, 9 aa, Homo sapiens
  Table A; Target 31697; HLA-C*06:02; KCNU1; ENSG00000215262; CTA
AQTFVGQVL

SEQ ID NO: 31698 - protein, 9 aa, Homo sapiens
  Table A; Target 31698; HLA-C*07:04; KCNU1; ENSG00000215262; CTA
AQTFVGQVL

SEQ ID NO: 31699 - protein, 9 aa, Homo sapiens
  Table A; Target 31699; HLA-C*16:02; KCNU1; ENSG00000215262; CTA
AQTFVGQVL

SEQ ID NO: 31700 - protein, 9 aa, Homo sapiens
  Table A; Target 31700; HLA-C*16:04; KCNU1; ENSG00000215262; CTA
AQTFVGQVL

SEQ ID NO: 31701 - protein, 10 aa, Homo sapiens
  Table A; Target 31701; HLA-B*13:02; KCNU1; ENSG00000215262; CTA
AQTFVGQVLV

SEQ ID NO: 31702 - protein, 9 aa, Homo sapiens
  Table A; Target 31702; HLA-B*58:01; KCNU1; ENSG00000215262; CTA
ASNYTRKEL

SEQ ID NO: 31703 - protein, 9 aa, Homo sapiens
  Table A; Target 31703; HLA-C*16:01; KCNU1; ENSG00000215262; CTA
ASNYTRKEL

SEQ ID NO: 31704 - protein, 9 aa, Homo sapiens
  Table A; Target 31704; HLA-A*30:02; KCNU1; ENSG00000215262; CTA
ASTSSISNF

SEQ ID NO: 31705 - protein, 9 aa, Homo sapiens
  Table A; Target 31705; HLA-A*32:01; KCNU1; ENSG00000215262; CTA
ASTSSISNF

SEQ ID NO: 31706 - protein, 9 aa, Homo sapiens
  Table A; Target 31706; HLA-B*46:01; KCNU1; ENSG00000215262; CTA
ASTSSISNF

SEQ ID NO: 31707 - protein, 9 aa, Homo sapiens
  Table A; Target 31707; HLA-B*58:01; KCNU1; ENSG00000215262; CTA
ASTSSISNF

SEQ ID NO: 31708 - protein, 9 aa, Homo sapiens
  Table A; Target 31708; HLA-C*02:02; KCNU1; ENSG00000215262; CTA
ASTSSISNF

SEQ ID NO: 31709 - protein, 9 aa, Homo sapiens
  Table A; Target 31709; HLA-C*07:04; KCNU1; ENSG00000215262; CTA
ASTSSISNF

SEQ ID NO: 31710 - protein, 9 aa, Homo sapiens
  Table A; Target 31710; HLA-C*16:01; KCNU1; ENSG00000215262; CTA
ASTSSISNF

SEQ ID NO: 31711 - protein, 9 aa, Homo sapiens
  Table A; Target 31711; HLA-C*16:02; KCNU1; ENSG00000215262; CTA
ASTSSISNF

SEQ ID NO: 31712 - protein, 9 aa, Homo sapiens
  Table A; Target 31712; HLA-C*16:04; KCNU1; ENSG00000215262; CTA
ASTSSISNF

SEQ ID NO: 31713 - protein, 9 aa, Homo sapiens
  Table A; Target 31713; HLA-A*68:02; KCNU1; ENSG00000215262; CTA
ATAFYNYHV

SEQ ID NO: 31714 - protein, 8 aa, Homo sapiens
  Table A; Target 31714; HLA-A*32:01; KCNU1; ENSG00000215262; CTA
ATTSTVGF

SEQ ID NO: 31715 - protein, 8 aa, Homo sapiens
  Table A; Target 31715; HLA-B*58:01; KCNU1; ENSG00000215262; CTA
ATTSTVGF

SEQ ID NO: 31716 - protein, 9 aa, Homo sapiens
  Table A; Target 31716; HLA-B*27:05; KCNU1; ENSG00000215262; CTA
AVLSPPPQP

SEQ ID NO: 31717 - protein, 10 aa, Homo sapiens
  Table A; Target 31717; HLA-B*27:05; KCNU1; ENSG00000215262; CTA
AVLSPPPQPS

SEQ ID NO: 31718 - protein, 11 aa, Homo sapiens
  Table A; Target 31718; HLA-C*04:01; KCNU1; ENSG00000215262; CTA
AYTTFISGSAM

SEQ ID NO: 31719 - protein, 11 aa, Homo sapiens
  Table A; Target 31719; HLA-C*14:02; KCNU1; ENSG00000215262; CTA
AYTTFISGSAM

SEQ ID NO: 31720 - protein, 9 aa, Homo sapiens
  Table A; Target 31720; HLA-C*03:04; KCNU1; ENSG00000215262; CTA
CAIPFSTAC

SEQ ID NO: 31721 - protein, 9 aa, Homo sapiens
  Table A; Target 31721; HLA-C*12:03; KCNU1; ENSG00000215262; CTA
CAIPFSTAC

SEQ ID NO: 31722 - protein, 10 aa, Homo sapiens
  Table A; Target 31722; HLA-A*26:01; KCNU1; ENSG00000215262; CTA
CAIPFSTACY

SEQ ID NO: 31723 - protein, 10 aa, Homo sapiens
  Table A; Target 31723; HLA-A*30:02; KCNU1; ENSG00000215262; CTA
CAIPFSTACY

SEQ ID NO: 31724 - protein, 10 aa, Homo sapiens
  Table A; Target 31724; HLA-B*15:01; KCNU1; ENSG00000215262; CTA
CAIPFSTACY

SEQ ID NO: 31725 - protein, 10 aa, Homo sapiens
  Table A; Target 31725; HLA-B*15:03; KCNU1; ENSG00000215262; CTA
CAIPFSTACY

SEQ ID NO: 31726 - protein, 10 aa, Homo sapiens
  Table A; Target 31726; HLA-B*46:01; KCNU1; ENSG00000215262; CTA
CAIPFSTACY

SEQ ID NO: 31727 - protein, 10 aa, Homo sapiens
  Table A; Target 31727; HLA-C*02:02; KCNU1; ENSG00000215262; CTA
CAIPFSTACY

SEQ ID NO: 31728 - protein, 10 aa, Homo sapiens
  Table A; Target 31728; HLA-C*16:04; KCNU1; ENSG00000215262; CTA
CAIPFSTACY

SEQ ID NO: 31729 - protein, 8 aa, Homo sapiens
  Table A; Target 31729; HLA-B*51:01; KCNU1; ENSG00000215262; CTA
CPPTIDSV

SEQ ID NO: 31730 - protein, 10 aa, Homo sapiens
  Table A; Target 31730; HLA-A*31:01; KCNU1; ENSG00000215262; CTA
CTSLLSGRNR

SEQ ID NO: 31731 - protein, 9 aa, Homo sapiens
  Table A; Target 31731; HLA-A*23:01; KCNU1; ENSG00000215262; CTA
CTTEIQAAF

SEQ ID NO: 31732 - protein, 9 aa, Homo sapiens
  Table A; Target 31732; HLA-A*26:01; KCNU1; ENSG00000215262; CTA
CTTEIQAAF

SEQ ID NO: 31733 - protein, 9 aa, Homo sapiens
  Table A; Target 31733; HLA-A*30:02; KCNU1; ENSG00000215262; CTA
CTTEIQAAF

SEQ ID NO: 31734 - protein, 9 aa, Homo sapiens
  Table A; Target 31734; HLA-A*32:01; KCNU1; ENSG00000215262; CTA
CTTEIQAAF

SEQ ID NO: 31735 - protein, 9 aa, Homo sapiens
  Table A; Target 31735; HLA-B*15:03; KCNU1; ENSG00000215262; CTA
CTTEIQAAF

SEQ ID NO: 31736 - protein, 9 aa, Homo sapiens
  Table A; Target 31736; HLA-B*46:01; KCNU1; ENSG00000215262; CTA
CTTEIQAAF

SEQ ID NO: 31737 - protein, 9 aa, Homo sapiens
  Table A; Target 31737; HLA-B*57:01; KCNU1; ENSG00000215262; CTA
CTTEIQAAF

SEQ ID NO: 31738 - protein, 9 aa, Homo sapiens
  Table A; Target 31738; HLA-B*58:01; KCNU1; ENSG00000215262; CTA
CTTEIQAAF

SEQ ID NO: 31739 - protein, 9 aa, Homo sapiens
  Table A; Target 31739; HLA-C*02:02; KCNU1; ENSG00000215262; CTA
CTTEIQAAF

SEQ ID NO: 31740 - protein, 9 aa, Homo sapiens
  Table A; Target 31740; HLA-C*03:04; KCNU1; ENSG00000215262; CTA
CTTEIQAAF

SEQ ID NO: 31741 - protein, 9 aa, Homo sapiens
  Table A; Target 31741; HLA-C*16:01; KCNU1; ENSG00000215262; CTA
CTTEIQAAF

SEQ ID NO: 31742 - protein, 9 aa, Homo sapiens
  Table A; Target 31742; HLA-C*16:04; KCNU1; ENSG00000215262; CTA
CTTEIQAAF

SEQ ID NO: 31743 - protein, 9 aa, Homo sapiens
  Table A; Target 31743; HLA-B*54:01; KCNU1; ENSG00000215262; CTA
CVFGDAHSA

SEQ ID NO: 31744 - protein, 9 aa, Homo sapiens
  Table A; Target 31744; HLA-B*56:01; KCNU1; ENSG00000215262; CTA
CVFGDAHSA

SEQ ID NO: 31745 - protein, 8 aa, Homo sapiens
  Table A; Target 31745; HLA-A*23:01; KCNU1; ENSG00000215262; CTA
CYLAYTTF

SEQ ID NO: 31746 - protein, 8 aa, Homo sapiens
  Table A; Target 31746; HLA-A*24:02; KCNU1; ENSG00000215262; CTA
CYLAYTTF

SEQ ID NO: 31747 - protein, 8 aa, Homo sapiens
  Table A; Target 31747; HLA-C*14:02; KCNU1; ENSG00000215262; CTA
CYLAYTTF

SEQ ID NO: 31748 - protein, 9 aa, Homo sapiens
  Table A; Target 31748; HLA-A*24:02; KCNU1; ENSG00000215262; CTA
CYLAYTTFI

SEQ ID NO: 31749 - protein, 8 aa, Homo sapiens
  Table A; Target 31749; HLA-B*51:01; KCNU1; ENSG00000215262; CTA
DAHSAPMG

SEQ ID NO: 31750 - protein, 9 aa, Homo sapiens
  Table A; Target 31750; HLA-A*25:01; KCNU1; ENSG00000215262; CTA
DAHSAPMGL

SEQ ID NO: 31751 - protein, 9 aa, Homo sapiens
  Table A; Target 31751; HLA-A*26:01; KCNU1; ENSG00000215262; CTA
DAHSAPMGL

SEQ ID NO: 31752 - protein, 9 aa, Homo sapiens
  Table A; Target 31752; HLA-A*33:01; KCNU1; ENSG00000215262; CTA
DAHSAPMGL

SEQ ID NO: 31753 - protein, 9 aa, Homo sapiens
  Table A; Target 31753; HLA-A*33:03; KCNU1; ENSG00000215262; CTA
DAHSAPMGL

SEQ ID NO: 31754 - protein, 9 aa, Homo sapiens
  Table A; Target 31754; HLA-A*68:01; KCNU1; ENSG00000215262; CTA
DAHSAPMGL

SEQ ID NO: 31755 - protein, 9 aa, Homo sapiens
  Table A; Target 31755; HLA-B*07:02; KCNU1; ENSG00000215262; CTA
DAHSAPMGL

SEQ ID NO: 31756 - protein, 9 aa, Homo sapiens
  Table A; Target 31756; HLA-B*08:01; KCNU1; ENSG00000215262; CTA
DAHSAPMGL

SEQ ID NO: 31757 - protein, 9 aa, Homo sapiens
  Table A; Target 31757; HLA-B*35:01; KCNU1; ENSG00000215262; CTA
DAHSAPMGL

SEQ ID NO: 31758 - protein, 9 aa, Homo sapiens
  Table A; Target 31758; HLA-B*35:03; KCNU1; ENSG00000215262; CTA
DAHSAPMGL

SEQ ID NO: 31759 - protein, 9 aa, Homo sapiens
  Table A; Target 31759; HLA-B*51:01; KCNU1; ENSG00000215262; CTA
DAHSAPMGL

SEQ ID NO: 31760 - protein, 9 aa, Homo sapiens
  Table A; Target 31760; HLA-C*07:01; KCNU1; ENSG00000215262; CTA
DAHSAPMGL

SEQ ID NO: 31761 - protein, 9 aa, Homo sapiens
  Table A; Target 31761; HLA-C*07:02; KCNU1; ENSG00000215262; CTA
DAHSAPMGL

SEQ ID NO: 31762 - protein, 9 aa, Homo sapiens
  Table A; Target 31762; HLA-C*07:04; KCNU1; ENSG00000215262; CTA
DAHSAPMGL

SEQ ID NO: 31763 - protein, 9 aa, Homo sapiens
  Table A; Target 31763; HLA-C*07:06; KCNU1; ENSG00000215262; CTA
DAHSAPMGL

SEQ ID NO: 31764 - protein, 10 aa, Homo sapiens
  Table A; Target 31764; HLA-A*33:01; KCNU1; ENSG00000215262; CTA
DAHSAPMGLR

SEQ ID NO: 31765 - protein, 10 aa, Homo sapiens
  Table A; Target 31765; HLA-A*33:03; KCNU1; ENSG00000215262; CTA
DAHSAPMGLR

SEQ ID NO: 31766 - protein, 10 aa, Homo sapiens
  Table A; Target 31766; HLA-A*68:01; KCNU1; ENSG00000215262; CTA
DAHSAPMGLR

SEQ ID NO: 31767 - protein, 8 aa, Homo sapiens
  Table A; Target 31767; HLA-B*18:01; KCNU1; ENSG00000215262; CTA
DDFAGMSF

SEQ ID NO: 31768 - protein, 8 aa, Homo sapiens
  Table A; Target 31768; HLA-B*37:01; KCNU1; ENSG00000215262; CTA
DDFAGMSF

SEQ ID NO: 31769 - protein, 8 aa, Homo sapiens
  Table A; Target 31769; HLA-B*40:02; KCNU1; ENSG00000215262; CTA
DDFAGMSF

SEQ ID NO: 31770 - protein, 8 aa, Homo sapiens
  Table A; Target 31770; HLA-B*18:01; KCNU1; ENSG00000215262; CTA
DDVFIPEL

SEQ ID NO: 31771 - protein, 9 aa, Homo sapiens
  Table A; Target 31771; HLA-A*68:02; KCNU1; ENSG00000215262; CTA
DDVFIPELI

SEQ ID NO: 31772 - protein, 9 aa, Homo sapiens
  Table A; Target 31772; HLA-B*18:01; KCNU1; ENSG00000215262; CTA
DEDPFAYSE

SEQ ID NO: 31773 - protein, 11 aa, Homo sapiens
  Table A; Target 31773; HLA-B*18:01; KCNU1; ENSG00000215262; CTA
DEDPFAYSEPL

SEQ ID NO: 31774 - protein, 9 aa, Homo sapiens
  Table A; Target 31774; HLA-B*18:01; KCNU1; ENSG00000215262; CTA
DEVYDEDPF

SEQ ID NO: 31775 - protein, 11 aa, Homo sapiens
  Table A; Target 31775; HLA-B*18:01; KCNU1; ENSG00000215262; CTA
DEVYDEDPFAY

SEQ ID NO: 31776 - protein, 9 aa, Homo sapiens
  Table A; Target 31776; HLA-A*23:01; KCNU1; ENSG00000215262; CTA
DIFTIPPTF

SEQ ID NO: 31777 - protein, 9 aa, Homo sapiens
  Table A; Target 31777; HLA-A*25:01; KCNU1; ENSG00000215262; CTA
DIFTIPPTF

SEQ ID NO: 31778 - protein, 9 aa, Homo sapiens
  Table A; Target 31778; HLA-A*26:01; KCNU1; ENSG00000215262; CTA
DIFTIPPTF

SEQ ID NO: 31779 - protein, 9 aa, Homo sapiens
  Table A; Target 31779; HLA-A*68:01; KCNU1; ENSG00000215262; CTA
DIFTIPPTF

SEQ ID NO: 31780 - protein, 9 aa, Homo sapiens
  Table A; Target 31780; HLA-B*18:01; KCNU1; ENSG00000215262; CTA
DIFTIPPTF

SEQ ID NO: 31781 - protein, 10 aa, Homo sapiens
  Table A; Target 31781; HLA-A*68:02; KCNU1; ENSG00000215262; CTA
DIFTIPPTFI

SEQ ID NO: 31782 - protein, 8 aa, Homo sapiens
  Table A; Target 31782; HLA-B*51:01; KCNU1; ENSG00000215262; CTA
DISNIMRV

SEQ ID NO: 31783 - protein, 9 aa, Homo sapiens
  Table A; Target 31783; HLA-A*25:01; KCNU1; ENSG00000215262; CTA
DISNIMRVL

SEQ ID NO: 31784 - protein, 9 aa, Homo sapiens
  Table A; Target 31784; HLA-A*68:02; KCNU1; ENSG00000215262; CTA
DISNIMRVL

SEQ ID NO: 31785 - protein, 9 aa, Homo sapiens
  Table A; Target 31785; HLA-C*12:03; KCNU1; ENSG00000215262; CTA
DISNIMRVL

SEQ ID NO: 31786 - protein, 10 aa, Homo sapiens
  Table A; Target 31786; HLA-A*26:01; KCNU1; ENSG00000215262; CTA
DIVFIGSLDY

SEQ ID NO: 31787 - protein, 11 aa, Homo sapiens
  Table A; Target 31787; HLA-A*68:02; KCNU1; ENSG00000215262; CTA
DIVFIGSLDYL

SEQ ID NO: 31788 - protein, 8 aa, Homo sapiens
  Table A; Target 31788; HLA-B*51:01; KCNU1; ENSG00000215262; CTA
DLFGILCV

SEQ ID NO: 31789 - protein, 9 aa, Homo sapiens
  Table A; Target 31789; HLA-A*25:01; KCNU1; ENSG00000215262; CTA
DPFAYSEPL

SEQ ID NO: 31790 - protein, 9 aa, Homo sapiens
  Table A; Target 31790; HLA-A*26:01; KCNU1; ENSG00000215262; CTA
DPFAYSEPL

SEQ ID NO: 31791 - protein, 9 aa, Homo sapiens
  Table A; Target 31791; HLA-A*33:01; KCNU1; ENSG00000215262; CTA
DPFAYSEPL

SEQ ID NO: 31792 - protein, 9 aa, Homo sapiens
  Table A; Target 31792; HLA-A*68:01; KCNU1; ENSG00000215262; CTA
DPFAYSEPL

SEQ ID NO: 31793 - protein, 9 aa, Homo sapiens
  Table A; Target 31793; HLA-A*68:02; KCNU1; ENSG00000215262; CTA
DPFAYSEPL

SEQ ID NO: 31794 - protein, 9 aa, Homo sapiens
  Table A; Target 31794; HLA-B*07:02; KCNU1; ENSG00000215262; CTA
DPFAYSEPL

SEQ ID NO: 31795 - protein, 9 aa, Homo sapiens
  Table A; Target 31795; HLA-B*18:01; KCNU1; ENSG00000215262; CTA
DPFAYSEPL

SEQ ID NO: 31796 - protein, 9 aa, Homo sapiens
  Table A; Target 31796; HLA-B*27:02; KCNU1; ENSG00000215262; CTA
DPFAYSEPL

SEQ ID NO: 31797 - protein, 9 aa, Homo sapiens
  Table A; Target 31797; HLA-B*35:01; KCNU1; ENSG00000215262; CTA
DPFAYSEPL

SEQ ID NO: 31798 - protein, 9 aa, Homo sapiens
  Table A; Target 31798; HLA-B*35:03; KCNU1; ENSG00000215262; CTA
DPFAYSEPL

SEQ ID NO: 31799 - protein, 9 aa, Homo sapiens
  Table A; Target 31799; HLA-B*51:01; KCNU1; ENSG00000215262; CTA
DPFAYSEPL

SEQ ID NO: 31800 - protein, 9 aa, Homo sapiens
  Table A; Target 31800; HLA-B*55:01; KCNU1; ENSG00000215262; CTA
DPFAYSEPL

SEQ ID NO: 31801 - protein, 9 aa, Homo sapiens
  Table A; Target 31801; HLA-C*07:01; KCNU1; ENSG00000215262; CTA
DPFAYSEPL

SEQ ID NO: 31802 - protein, 9 aa, Homo sapiens
  Table A; Target 31802; HLA-C*07:02; KCNU1; ENSG00000215262; CTA
DPFAYSEPL

SEQ ID NO: 31803 - protein, 9 aa, Homo sapiens
  Table A; Target 31803; HLA-A*25:01; KCNU1; ENSG00000215262; CTA
DPVGSCSSY

SEQ ID NO: 31804 - protein, 9 aa, Homo sapiens
  Table A; Target 31804; HLA-A*26:01; KCNU1; ENSG00000215262; CTA
DPVGSCSSY

SEQ ID NO: 31805 - protein, 9 aa, Homo sapiens
  Table A; Target 31805; HLA-B*35:01; KCNU1; ENSG00000215262; CTA
DPVGSCSSY

SEQ ID NO: 31806 - protein, 10 aa, Homo sapiens
  Table A; Target 31806; HLA-A*33:01; KCNU1; ENSG00000215262; CTA
DSCTSLLSGR

SEQ ID NO: 31807 - protein, 10 aa, Homo sapiens
  Table A; Target 31807; HLA-A*33:03; KCNU1; ENSG00000215262; CTA
DSCTSLLSGR

SEQ ID NO: 31808 - protein, 10 aa, Homo sapiens
  Table A; Target 31808; HLA-A*68:01; KCNU1; ENSG00000215262; CTA
DSCTSLLSGR

SEQ ID NO: 31809 - protein, 8 aa, Homo sapiens
  Table A; Target 31809; HLA-B*08:01; KCNU1; ENSG00000215262; CTA
DSLLATAF

SEQ ID NO: 31810 - protein, 8 aa, Homo sapiens
  Table A; Target 31810; HLA-B*18:01; KCNU1; ENSG00000215262; CTA
DSLLATAF

SEQ ID NO: 31811 - protein, 8 aa, Homo sapiens
  Table A; Target 31811; HLA-B*35:01; KCNU1; ENSG00000215262; CTA
DSLLATAF

SEQ ID NO: 31812 - protein, 9 aa, Homo sapiens
  Table A; Target 31812; HLA-A*01:01; KCNU1; ENSG00000215262; CTA
DSLLATAFY

SEQ ID NO: 31813 - protein, 9 aa, Homo sapiens
  Table A; Target 31813; HLA-A*26:01; KCNU1; ENSG00000215262; CTA
DSLLATAFY

SEQ ID NO: 31814 - protein, 9 aa, Homo sapiens
  Table A; Target 31814; HLA-A*33:01; KCNU1; ENSG00000215262; CTA
DSLLATAFY

SEQ ID NO: 31815 - protein, 8 aa, Homo sapiens
  Table A; Target 31815; HLA-B*08:01; KCNU1; ENSG00000215262; CTA
DSTTRIII

SEQ ID NO: 31816 - protein, 8 aa, Homo sapiens
  Table A; Target 31816; HLA-C*16:01; KCNU1; ENSG00000215262; CTA
DSTTRIII

SEQ ID NO: 31817 - protein, 8 aa, Homo sapiens
  Table A; Target 31817; HLA-A*33:01; KCNU1; ENSG00000215262; CTA
DSVTAFLR

SEQ ID NO: 31818 - protein, 8 aa, Homo sapiens
  Table A; Target 31818; HLA-A*68:01; KCNU1; ENSG00000215262; CTA
DSVTAFLR

SEQ ID NO: 31819 - protein, 10 aa, Homo sapiens
  Table A; Target 31819; HLA-A*25:01; KCNU1; ENSG00000215262; CTA
DSVTAFLRNF

SEQ ID NO: 31820 - protein, 10 aa, Homo sapiens
  Table A; Target 31820; HLA-A*26:01; KCNU1; ENSG00000215262; CTA
DSVTAFLRNF

SEQ ID NO: 31821 - protein, 9 aa, Homo sapiens
  Table A; Target 31821; HLA-A*25:01; KCNU1; ENSG00000215262; CTA
DTEAIMATL

SEQ ID NO: 31822 - protein, 9 aa, Homo sapiens
  Table A; Target 31822; HLA-A*68:01; KCNU1; ENSG00000215262; CTA
DTEAIMATL

SEQ ID NO: 31823 - protein, 9 aa, Homo sapiens
  Table A; Target 31823; HLA-A*68:02; KCNU1; ENSG00000215262; CTA
DTEAIMATL

SEQ ID NO: 31824 - protein, 9 aa, Homo sapiens
  Table A; Target 31824; HLA-B*35:03; KCNU1; ENSG00000215262; CTA
DTEAIMATL

SEQ ID NO: 31825 - protein, 9 aa, Homo sapiens
  Table A; Target 31825; HLA-B*51:01; KCNU1; ENSG00000215262; CTA
DTEAIMATL

SEQ ID NO: 31826 - protein, 9 aa, Homo sapiens
  Table A; Target 31826; HLA-C*07:06; KCNU1; ENSG00000215262; CTA
DTEAIMATL

SEQ ID NO: 31827 - protein, 9 aa, Homo sapiens
  Table A; Target 31827; HLA-A*25:01; KCNU1; ENSG00000215262; CTA
DTGDNIICF

SEQ ID NO: 31828 - protein, 9 aa, Homo sapiens
  Table A; Target 31828; HLA-A*26:01; KCNU1; ENSG00000215262; CTA
DTGDNIICF

SEQ ID NO: 31829 - protein, 9 aa, Homo sapiens
  Table A; Target 31829; HLA-A*33:01; KCNU1; ENSG00000215262; CTA
DTGDNIICF

SEQ ID NO: 31830 - protein, 9 aa, Homo sapiens
  Table A; Target 31830; HLA-A*33:03; KCNU1; ENSG00000215262; CTA
DTGDNIICF

SEQ ID NO: 31831 - protein, 9 aa, Homo sapiens
  Table A; Target 31831; HLA-A*68:01; KCNU1; ENSG00000215262; CTA
DTGDNIICF

SEQ ID NO: 31832 - protein, 8 aa, Homo sapiens
  Table A; Target 31832; HLA-B*51:01; KCNU1; ENSG00000215262; CTA
DTNCPPTI

SEQ ID NO: 31833 - protein, 8 aa, Homo sapiens
  Table A; Target 31833; HLA-B*51:01; KCNU1; ENSG00000215262; CTA
DVFIPELI

SEQ ID NO: 31834 - protein, 10 aa, Homo sapiens
  Table A; Target 31834; HLA-A*68:02; KCNU1; ENSG00000215262; CTA
DVFIPELITN

SEQ ID NO: 31835 - protein, 8 aa, Homo sapiens
  Table A; Target 31835; HLA-A*25:01; KCNU1; ENSG00000215262; CTA
DVNPRNTF

SEQ ID NO: 31836 - protein, 8 aa, Homo sapiens
  Table A; Target 31836; HLA-A*32:01; KCNU1; ENSG00000215262; CTA
DVNPRNTF

SEQ ID NO: 31837 - protein, 8 aa, Homo sapiens
  Table A; Target 31837; HLA-B*08:01; KCNU1; ENSG00000215262; CTA
DVNPRNTF

SEQ ID NO: 31838 - protein, 11 aa, Homo sapiens
  Table A; Target 31838; HLA-A*25:01; KCNU1; ENSG00000215262; CTA
DVNPRNTFGQL

SEQ ID NO: 31839 - protein, 11 aa, Homo sapiens
  Table A; Target 31839; HLA-A*33:01; KCNU1; ENSG00000215262; CTA
DVNPRNTFGQL

SEQ ID NO: 31840 - protein, 8 aa, Homo sapiens
  Table A; Target 31840; HLA-B*08:01; KCNU1; ENSG00000215262; CTA
DVVAKTSL

SEQ ID NO: 31841 - protein, 9 aa, Homo sapiens
  Table A; Target 31841; HLA-A*26:01; KCNU1; ENSG00000215262; CTA
DVVAKTSLG

SEQ ID NO: 31842 - protein, 10 aa, Homo sapiens
  Table A; Target 31842; HLA-A*33:01; KCNU1; ENSG00000215262; CTA
DVVAKTSLGR

SEQ ID NO: 31843 - protein, 10 aa, Homo sapiens
  Table A; Target 31843; HLA-A*33:03; KCNU1; ENSG00000215262; CTA
DVVAKTSLGR

SEQ ID NO: 31844 - protein, 10 aa, Homo sapiens
  Table A; Target 31844; HLA-A*68:01; KCNU1; ENSG00000215262; CTA
DVVAKTSLGR

SEQ ID NO: 31845 - protein, 10 aa, Homo sapiens
  Table A; Target 31845; HLA-C*07:06; KCNU1; ENSG00000215262; CTA
DVVAKTSLGR

SEQ ID NO: 31846 - protein, 9 aa, Homo sapiens
  Table A; Target 31846; HLA-A*24:02; KCNU1; ENSG00000215262; CTA
DYLQREWRF

SEQ ID NO: 31847 - protein, 9 aa, Homo sapiens
  Table A; Target 31847; HLA-A*23:01; KCNU1; ENSG00000215262; CTA
EAIMATLTI

SEQ ID NO: 31848 - protein, 9 aa, Homo sapiens
  Table A; Target 31848; HLA-A*25:01; KCNU1; ENSG00000215262; CTA
EAIMATLTI

SEQ ID NO: 31849 - protein, 9 aa, Homo sapiens
  Table A; Target 31849; HLA-A*26:01; KCNU1; ENSG00000215262; CTA
EAIMATLTI

SEQ ID NO: 31850 - protein, 9 aa, Homo sapiens
  Table A; Target 31850; HLA-A*68:02; KCNU1; ENSG00000215262; CTA
EAIMATLTI

SEQ ID NO: 31851 - protein, 9 aa, Homo sapiens
  Table A; Target 31851; HLA-B*13:02; KCNU1; ENSG00000215262; CTA
EAIMATLTI

SEQ ID NO: 31852 - protein, 9 aa, Homo sapiens
  Table A; Target 31852; HLA-B*35:03; KCNU1; ENSG00000215262; CTA
EAIMATLTI

SEQ ID NO: 31853 - protein, 9 aa, Homo sapiens
  Table A; Target 31853; HLA-B*51:01; KCNU1; ENSG00000215262; CTA
EAIMATLTI

SEQ ID NO: 31854 - protein, 9 aa, Homo sapiens
  Table A; Target 31854; HLA-C*03:04; KCNU1; ENSG00000215262; CTA
EAIMATLTI

SEQ ID NO: 31855 - protein, 9 aa, Homo sapiens
  Table A; Target 31855; HLA-A*26:01; KCNU1; ENSG00000215262; CTA
EDISNIMRV

SEQ ID NO: 31856 - protein, 9 aa, Homo sapiens
  Table A; Target 31856; HLA-A*68:02; KCNU1; ENSG00000215262; CTA
EDISNIMRV

SEQ ID NO: 31857 - protein, 10 aa, Homo sapiens
  Table A; Target 31857; HLA-B*44:02; KCNU1; ENSG00000215262; CTA
EDISNIMRVL

SEQ ID NO: 31858 - protein, 11 aa, Homo sapiens
  Table A; Target 31858; HLA-B*44:02; KCNU1; ENSG00000215262; CTA
EEELNPENKRF

SEQ ID NO: 31859 - protein, 11 aa, Homo sapiens
  Table A; Target 31859; HLA-B*44:03; KCNU1; ENSG00000215262; CTA
EEELNPENKRF

SEQ ID NO: 31860 - protein, 9 aa, Homo sapiens
  Table A; Target 31860; HLA-A*25:01; KCNU1; ENSG00000215262; CTA
EEFSLQKSY

SEQ ID NO: 31861 - protein, 9 aa, Homo sapiens
  Table A; Target 31861; HLA-A*26:01; KCNU1; ENSG00000215262; CTA
EEFSLQKSY

SEQ ID NO: 31862 - protein, 9 aa, Homo sapiens
  Table A; Target 31862; HLA-A*30:01; KCNU1; ENSG00000215262; CTA
EEFSLQKSY

SEQ ID NO: 31863 - protein, 9 aa, Homo sapiens
  Table A; Target 31863; HLA-B*27:02; KCNU1; ENSG00000215262; CTA
EEFSLQKSY

SEQ ID NO: 31864 - protein, 9 aa, Homo sapiens
  Table A; Target 31864; HLA-B*49:01; KCNU1; ENSG00000215262; CTA
EEFSLQKSY

SEQ ID NO: 31865 - protein, 9 aa, Homo sapiens
  Table A; Target 31865; HLA-C*16:04; KCNU1; ENSG00000215262; CTA
EEFSLQKSY

SEQ ID NO: 31866 - protein, 10 aa, Homo sapiens
  Table A; Target 31866; HLA-B*44:02; KCNU1; ENSG00000215262; CTA
EELNPENKRF

SEQ ID NO: 31867 - protein, 10 aa, Homo sapiens
  Table A; Target 31867; HLA-B*44:03; KCNU1; ENSG00000215262; CTA
EELNPENKRF

SEQ ID NO: 31868 - protein, 10 aa, Homo sapiens
  Table A; Target 31868; HLA-C*16:04; KCNU1; ENSG00000215262; CTA
EELNPENKRF

SEQ ID NO: 31869 - protein, 9 aa, Homo sapiens
  Table A; Target 31869; HLA-B*39:01; KCNU1; ENSG00000215262; CTA
EGSLQETNL

SEQ ID NO: 31870 - protein, 9 aa, Homo sapiens
  Table A; Target 31870; HLA-A*68:02; KCNU1; ENSG00000215262; CTA
EINTEIVFL

SEQ ID NO: 31871 - protein, 11 aa, Homo sapiens
  Table A; Target 31871; HLA-A*25:01; KCNU1; ENSG00000215262; CTA
EIQAAFILSSF

SEQ ID NO: 31872 - protein, 11 aa, Homo sapiens
  Table A; Target 31872; HLA-A*26:01; KCNU1; ENSG00000215262; CTA
EIQAAFILSSF

SEQ ID NO: 31873 - protein, 9 aa, Homo sapiens
  Table A; Target 31873; HLA-A*01:01; KCNU1; ENSG00000215262; CTA
ELETIFKCY

SEQ ID NO: 31874 - protein, 9 aa, Homo sapiens
  Table A; Target 31874; HLA-A*26:01; KCNU1; ENSG00000215262; CTA
ELFTSGTIA

SEQ ID NO: 31875 - protein, 10 aa, Homo sapiens
  Table A; Target 31875; HLA-A*25:01; KCNU1; ENSG00000215262; CTA
ELFTSGTIAR

SEQ ID NO: 31876 - protein, 10 aa, Homo sapiens
  Table A; Target 31876; HLA-A*26:01; KCNU1; ENSG00000215262; CTA
ELFTSGTIAR

SEQ ID NO: 31877 - protein, 10 aa, Homo sapiens
  Table A; Target 31877; HLA-A*33:01; KCNU1; ENSG00000215262; CTA
ELFTSGTIAR

SEQ ID NO: 31878 - protein, 10 aa, Homo sapiens
  Table A; Target 31878; HLA-A*33:03; KCNU1; ENSG00000215262; CTA
ELFTSGTIAR

SEQ ID NO: 31879 - protein, 10 aa, Homo sapiens
  Table A; Target 31879; HLA-A*68:01; KCNU1; ENSG00000215262; CTA
ELFTSGTIAR

SEQ ID NO: 31880 - protein, 10 aa, Homo sapiens
  Table A; Target 31880; HLA-A*68:02; KCNU1; ENSG00000215262; CTA
ELFTSGTIAR

SEQ ID NO: 31881 - protein, 10 aa, Homo sapiens
  Table A; Target 31881; HLA-C*07:06; KCNU1; ENSG00000215262; CTA
ELFTSGTIAR

SEQ ID NO: 31882 - protein, 10 aa, Homo sapiens
  Table A; Target 31882; HLA-A*33:03; KCNU1; ENSG00000215262; CTA
ELKNPSNIHF

SEQ ID NO: 31883 - protein, 9 aa, Homo sapiens
  Table A; Target 31883; HLA-A*02:07; KCNU1; ENSG00000215262; CTA
ELPQILQIL

SEQ ID NO: 31884 - protein, 9 aa, Homo sapiens
  Table A; Target 31884; HLA-A*24:02; KCNU1; ENSG00000215262; CTA
ELPQILQIL

SEQ ID NO: 31885 - protein, 9 aa, Homo sapiens
  Table A; Target 31885; HLA-A*68:02; KCNU1; ENSG00000215262; CTA
ELPQILQIL

SEQ ID NO: 31886 - protein, 10 aa, Homo sapiens
  Table A; Target 31886; HLA-A*68:02; KCNU1; ENSG00000215262; CTA
ELPQILQILR

SEQ ID NO: 31887 - protein, 9 aa, Homo sapiens
  Table A; Target 31887; HLA-A*23:01; KCNU1; ENSG00000215262; CTA
EMLLSAQTF

SEQ ID NO: 31888 - protein, 9 aa, Homo sapiens
  Table A; Target 31888; HLA-A*24:02; KCNU1; ENSG00000215262; CTA
EMLLSAQTF

SEQ ID NO: 31889 - protein, 9 aa, Homo sapiens
  Table A; Target 31889; HLA-A*33:03; KCNU1; ENSG00000215262; CTA
EMLLSAQTF

SEQ ID NO: 31890 - protein, 9 aa, Homo sapiens
  Table A; Target 31890; HLA-B*18:01; KCNU1; ENSG00000215262; CTA
EMLLSAQTF

SEQ ID NO: 31891 - protein, 9 aa, Homo sapiens
  Table A; Target 31891; HLA-B*44:02; KCNU1; ENSG00000215262; CTA
EMLLSAQTF

SEQ ID NO: 31892 - protein, 9 aa, Homo sapiens
  Table A; Target 31892; HLA-C*14:02; KCNU1; ENSG00000215262; CTA
EMLLSAQTF

SEQ ID NO: 31893 - protein, 9 aa, Homo sapiens
  Table A; Target 31893; HLA-A*24:02; KCNU1; ENSG00000215262; CTA
EMNSIVDIF

SEQ ID NO: 31894 - protein, 9 aa, Homo sapiens
  Table A; Target 31894; HLA-A*26:01; KCNU1; ENSG00000215262; CTA
EMNSIVDIF

SEQ ID NO: 31895 - protein, 9 aa, Homo sapiens
  Table A; Target 31895; HLA-A*33:03; KCNU1; ENSG00000215262; CTA
EMNSIVDIF

SEQ ID NO: 31896 - protein, 9 aa, Homo sapiens
  Table A; Target 31896; HLA-A*11:01; KCNU1; ENSG00000215262; CTA
EMVELFANK

SEQ ID NO: 31897 - protein, 9 aa, Homo sapiens
  Table A; Target 31897; HLA-A*25:01; KCNU1; ENSG00000215262; CTA
EMVELFANK

SEQ ID NO: 31898 - protein, 9 aa, Homo sapiens
  Table A; Target 31898; HLA-A*26:01; KCNU1; ENSG00000215262; CTA
EMVELFANK

SEQ ID NO: 31899 - protein, 9 aa, Homo sapiens
  Table A; Target 31899; HLA-A*33:01; KCNU1; ENSG00000215262; CTA
EMVELFANK

SEQ ID NO: 31900 - protein, 9 aa, Homo sapiens
  Table A; Target 31900; HLA-A*33:03; KCNU1; ENSG00000215262; CTA
EMVELFANK

SEQ ID NO: 31901 - protein, 9 aa, Homo sapiens
  Table A; Target 31901; HLA-A*68:01; KCNU1; ENSG00000215262; CTA
EMVELFANK

SEQ ID NO: 31902 - protein, 9 aa, Homo sapiens
  Table A; Target 31902; HLA-A*68:02; KCNU1; ENSG00000215262; CTA
EMVELFANK

SEQ ID NO: 31903 - protein, 9 aa, Homo sapiens
  Table A; Target 31903; HLA-B*27:02; KCNU1; ENSG00000215262; CTA
EMVELFANK

SEQ ID NO: 31904 - protein, 9 aa, Homo sapiens
  Table A; Target 31904; HLA-C*07:06; KCNU1; ENSG00000215262; CTA
EMVELFANK

SEQ ID NO: 31905 - protein, 10 aa, Homo sapiens
  Table A; Target 31905; HLA-A*33:03; KCNU1; ENSG00000215262; CTA
EMVELFANKR

SEQ ID NO: 31906 - protein, 10 aa, Homo sapiens
  Table A; Target 31906; HLA-A*68:01; KCNU1; ENSG00000215262; CTA
EMVELFANKR

SEQ ID NO: 31907 - protein, 10 aa, Homo sapiens
  Table A; Target 31907; HLA-C*07:06; KCNU1; ENSG00000215262; CTA
EMVELFANKR

SEQ ID NO: 31908 - protein, 9 aa, Homo sapiens
  Table A; Target 31908; HLA-A*33:01; KCNU1; ENSG00000215262; CTA
ENKRFVITR

SEQ ID NO: 31909 - protein, 9 aa, Homo sapiens
  Table A; Target 31909; HLA-A*33:03; KCNU1; ENSG00000215262; CTA
ENKRFVITR

SEQ ID NO: 31910 - protein, 10 aa, Homo sapiens
  Table A; Target 31910; HLA-B*39:01; KCNU1; ENSG00000215262; CTA
EQLGGLEGSL

SEQ ID NO: 31911 - protein, 9 aa, Homo sapiens
  Table A; Target 31911; HLA-A*33:03; KCNU1; ENSG00000215262; CTA
EQNKKVMPK

SEQ ID NO: 31912 - protein, 10 aa, Homo sapiens
  Table A; Target 31912; HLA-A*11:01; KCNU1; ENSG00000215262; CTA
ETILSDVNPR

SEQ ID NO: 31913 - protein, 10 aa, Homo sapiens
  Table A; Target 31913; HLA-A*26:01; KCNU1; ENSG00000215262; CTA
ETILSDVNPR

SEQ ID NO: 31914 - protein, 10 aa, Homo sapiens
  Table A; Target 31914; HLA-A*33:01; KCNU1; ENSG00000215262; CTA
ETILSDVNPR

SEQ ID NO: 31915 - protein, 10 aa, Homo sapiens
  Table A; Target 31915; HLA-A*33:03; KCNU1; ENSG00000215262; CTA
ETILSDVNPR

SEQ ID NO: 31916 - protein, 10 aa, Homo sapiens
  Table A; Target 31916; HLA-A*68:01; KCNU1; ENSG00000215262; CTA
ETILSDVNPR

SEQ ID NO: 31917 - protein, 10 aa, Homo sapiens
  Table A; Target 31917; HLA-B*27:02; KCNU1; ENSG00000215262; CTA
ETILSDVNPR

SEQ ID NO: 31918 - protein, 10 aa, Homo sapiens
  Table A; Target 31918; HLA-C*07:06; KCNU1; ENSG00000215262; CTA
ETILSDVNPR

SEQ ID NO: 31919 - protein, 8 aa, Homo sapiens
  Table A; Target 31919; HLA-A*26:01; KCNU1; ENSG00000215262; CTA
ETLYSPVY

SEQ ID NO: 31920 - protein, 8 aa, Homo sapiens
  Table A; Target 31920; HLA-B*18:01; KCNU1; ENSG00000215262; CTA
ETLYSPVY

SEQ ID NO: 31921 - protein, 10 aa, Homo sapiens
  Table A; Target 31921; HLA-A*01:01; KCNU1; ENSG00000215262; CTA
ETLYSPVYSY

SEQ ID NO: 31922 - protein, 10 aa, Homo sapiens
  Table A; Target 31922; HLA-A*25:01; KCNU1; ENSG00000215262; CTA
ETLYSPVYSY

SEQ ID NO: 31923 - protein, 10 aa, Homo sapiens
  Table A; Target 31923; HLA-A*26:01; KCNU1; ENSG00000215262; CTA
ETLYSPVYSY

SEQ ID NO: 31924 - protein, 10 aa, Homo sapiens
  Table A; Target 31924; HLA-A*29:02; KCNU1; ENSG00000215262; CTA
ETLYSPVYSY

SEQ ID NO: 31925 - protein, 10 aa, Homo sapiens
  Table A; Target 31925; HLA-A*25:01; KCNU1; ENSG00000215262; CTA
ETNLHLSTAF

SEQ ID NO: 31926 - protein, 10 aa, Homo sapiens
  Table A; Target 31926; HLA-A*26:01; KCNU1; ENSG00000215262; CTA
ETNLHLSTAF

SEQ ID NO: 31927 - protein, 10 aa, Homo sapiens
  Table A; Target 31927; HLA-A*33:01; KCNU1; ENSG00000215262; CTA
ETNLHLSTAF

SEQ ID NO: 31928 - protein, 10 aa, Homo sapiens
  Table A; Target 31928; HLA-A*33:03; KCNU1; ENSG00000215262; CTA
ETNLHLSTAF

SEQ ID NO: 31929 - protein, 10 aa, Homo sapiens
  Table A; Target 31929; HLA-B*44:02; KCNU1; ENSG00000215262; CTA
ETNLHLSTAF

SEQ ID NO: 31930 - protein, 10 aa, Homo sapiens
  Table A; Target 31930; HLA-B*44:03; KCNU1; ENSG00000215262; CTA
ETNLHLSTAF

SEQ ID NO: 31931 - protein, 9 aa, Homo sapiens
  Table A; Target 31931; HLA-A*26:01; KCNU1; ENSG00000215262; CTA
ETPGYTNGH

SEQ ID NO: 31932 - protein, 11 aa, Homo sapiens
  Table A; Target 31932; HLA-A*25:01; KCNU1; ENSG00000215262; CTA
ETPPSLELETI

SEQ ID NO: 31933 - protein, 11 aa, Homo sapiens
  Table A; Target 31933; HLA-A*68:02; KCNU1; ENSG00000215262; CTA
ETPPSLELETI

SEQ ID NO: 31934 - protein, 9 aa, Homo sapiens
  Table A; Target 31934; HLA-A*02:01; KCNU1; ENSG00000215262; CTA
ETWEDLPKM

SEQ ID NO: 31935 - protein, 9 aa, Homo sapiens
  Table A; Target 31935; HLA-A*02:07; KCNU1; ENSG00000215262; CTA
ETWEDLPKM

SEQ ID NO: 31936 - protein, 9 aa, Homo sapiens
  Table A; Target 31936; HLA-A*25:01; KCNU1; ENSG00000215262; CTA
ETWEDLPKM

SEQ ID NO: 31937 - protein, 9 aa, Homo sapiens
  Table A; Target 31937; HLA-A*26:01; KCNU1; ENSG00000215262; CTA
ETWEDLPKM

SEQ ID NO: 31938 - protein, 9 aa, Homo sapiens
  Table A; Target 31938; HLA-A*33:03; KCNU1; ENSG00000215262; CTA
ETWEDLPKM

SEQ ID NO: 31939 - protein, 9 aa, Homo sapiens
  Table A; Target 31939; HLA-A*68:02; KCNU1; ENSG00000215262; CTA
ETWEDLPKM

SEQ ID NO: 31940 - protein, 9 aa, Homo sapiens
  Table A; Target 31940; HLA-A*26:01; KCNU1; ENSG00000215262; CTA
EVYDEDPFA

SEQ ID NO: 31941 - protein, 10 aa, Homo sapiens
  Table A; Target 31941; HLA-A*01:01; KCNU1; ENSG00000215262; CTA
EVYDEDPFAY

SEQ ID NO: 31942 - protein, 10 aa, Homo sapiens
  Table A; Target 31942; HLA-A*25:01; KCNU1; ENSG00000215262; CTA
EVYDEDPFAY

SEQ ID NO: 31943 - protein, 10 aa, Homo sapiens
  Table A; Target 31943; HLA-A*29:02; KCNU1; ENSG00000215262; CTA
EVYDEDPFAY

SEQ ID NO: 31944 - protein, 10 aa, Homo sapiens
  Table A; Target 31944; HLA-A*30:02; KCNU1; ENSG00000215262; CTA
EVYDEDPFAY

SEQ ID NO: 31945 - protein, 10 aa, Homo sapiens
  Table A; Target 31945; HLA-A*33:01; KCNU1; ENSG00000215262; CTA
EVYDEDPFAY

SEQ ID NO: 31946 - protein, 10 aa, Homo sapiens
  Table A; Target 31946; HLA-A*33:03; KCNU1; ENSG00000215262; CTA
EVYDEDPFAY

SEQ ID NO: 31947 - protein, 10 aa, Homo sapiens
  Table A; Target 31947; HLA-A*68:01; KCNU1; ENSG00000215262; CTA
EVYDEDPFAY

SEQ ID NO: 31948 - protein, 10 aa, Homo sapiens
  Table A; Target 31948; HLA-B*15:01; KCNU1; ENSG00000215262; CTA
EVYDEDPFAY

SEQ ID NO: 31949 - protein, 10 aa, Homo sapiens
  Table A; Target 31949; HLA-B*18:01; KCNU1; ENSG00000215262; CTA
EVYDEDPFAY

SEQ ID NO: 31950 - protein, 10 aa, Homo sapiens
  Table A; Target 31950; HLA-B*35:01; KCNU1; ENSG00000215262; CTA
EVYDEDPFAY

SEQ ID NO: 31951 - protein, 10 aa, Homo sapiens
  Table A; Target 31951; HLA-C*07:06; KCNU1; ENSG00000215262; CTA
EVYDEDPFAY

SEQ ID NO: 31952 - protein, 10 aa, Homo sapiens
  Table A; Target 31952; HLA-A*24:02; KCNU1; ENSG00000215262; CTA
EYKSLFTDGF

SEQ ID NO: 31953 - protein, 9 aa, Homo sapiens
  Table A; Target 31953; HLA-B*35:03; KCNU1; ENSG00000215262; CTA
FAGMSFPEV

SEQ ID NO: 31954 - protein, 9 aa, Homo sapiens
  Table A; Target 31954; HLA-B*46:01; KCNU1; ENSG00000215262; CTA
FAGMSFPEV

SEQ ID NO: 31955 - protein, 9 aa, Homo sapiens
  Table A; Target 31955; HLA-B*51:01; KCNU1; ENSG00000215262; CTA
FAGMSFPEV

SEQ ID NO: 31956 - protein, 9 aa, Homo sapiens
  Table A; Target 31956; HLA-B*54:01; KCNU1; ENSG00000215262; CTA
FAGMSFPEV

SEQ ID NO: 31957 - protein, 9 aa, Homo sapiens
  Table A; Target 31957; HLA-C*02:02; KCNU1; ENSG00000215262; CTA
FAGMSFPEV

SEQ ID NO: 31958 - protein, 9 aa, Homo sapiens
  Table A; Target 31958; HLA-C*03:03; KCNU1; ENSG00000215262; CTA
FAGMSFPEV

SEQ ID NO: 31959 - protein, 9 aa, Homo sapiens
  Table A; Target 31959; HLA-C*03:04; KCNU1; ENSG00000215262; CTA
FAGMSFPEV

SEQ ID NO: 31960 - protein, 9 aa, Homo sapiens
  Table A; Target 31960; HLA-C*12:03; KCNU1; ENSG00000215262; CTA
FAGMSFPEV

SEQ ID NO: 31961 - protein, 9 aa, Homo sapiens
  Table A; Target 31961; HLA-C*16:04; KCNU1; ENSG00000215262; CTA
FAGMSFPEV

SEQ ID NO: 31962 - protein, 8 aa, Homo sapiens
  Table A; Target 31962; HLA-B*35:01; KCNU1; ENSG00000215262; CTA
FANYIPEM

SEQ ID NO: 31963 - protein, 8 aa, Homo sapiens
  Table A; Target 31963; HLA-B*46:01; KCNU1; ENSG00000215262; CTA
FANYIPEM

SEQ ID NO: 31964 - protein, 8 aa, Homo sapiens
  Table A; Target 31964; HLA-B*51:01; KCNU1; ENSG00000215262; CTA
FANYIPEM

SEQ ID NO: 31965 - protein, 8 aa, Homo sapiens
  Table A; Target 31965; HLA-B*54:01; KCNU1; ENSG00000215262; CTA
FANYIPEM

SEQ ID NO: 31966 - protein, 8 aa, Homo sapiens
  Table A; Target 31966; HLA-C*03:03; KCNU1; ENSG00000215262; CTA
FANYIPEM

SEQ ID NO: 31967 - protein, 8 aa, Homo sapiens
  Table A; Target 31967; HLA-C*03:04; KCNU1; ENSG00000215262; CTA
FANYIPEM

SEQ ID NO: 31968 - protein, 9 aa, Homo sapiens
  Table A; Target 31968; HLA-A*68:02; KCNU1; ENSG00000215262; CTA
FANYIPEMV

SEQ ID NO: 31969 - protein, 9 aa, Homo sapiens
  Table A; Target 31969; HLA-B*54:01; KCNU1; ENSG00000215262; CTA
FANYIPEMV

SEQ ID NO: 31970 - protein, 9 aa, Homo sapiens
  Table A; Target 31970; HLA-B*54:01; KCNU1; ENSG00000215262; CTA
FCAIPFSTA

SEQ ID NO: 31971 - protein, 9 aa, Homo sapiens
  Table A; Target 31971; HLA-C*03:03; KCNU1; ENSG00000215262; CTA
FCAIPFSTA

SEQ ID NO: 31972 - protein, 8 aa, Homo sapiens
  Table A; Target 31972; HLA-B*18:01; KCNU1; ENSG00000215262; CTA
FESIYLVM

SEQ ID NO: 31973 - protein, 8 aa, Homo sapiens
  Table A; Target 31973; HLA-B*49:01; KCNU1; ENSG00000215262; CTA
FESIYLVM

SEQ ID NO: 31974 - protein, 9 aa, Homo sapiens
  Table A; Target 31974; HLA-B*49:01; KCNU1; ENSG00000215262; CTA
FESIYLVMA

SEQ ID NO: 31975 - protein, 10 aa, Homo sapiens
  Table A; Target 31975; HLA-A*29:02; KCNU1; ENSG00000215262; CTA
FFSFYFGLRF

SEQ ID NO: 31976 - protein, 9 aa, Homo sapiens
  Table A; Target 31976; HLA-A*32:01; KCNU1; ENSG00000215262; CTA
FGDAHSAPM

SEQ ID NO: 31977 - protein, 9 aa, Homo sapiens
  Table A; Target 31977; HLA-B*35:01; KCNU1; ENSG00000215262; CTA
FGDAHSAPM

SEQ ID NO: 31978 - protein, 9 aa, Homo sapiens
  Table A; Target 31978; HLA-B*35:03; KCNU1; ENSG00000215262; CTA
FGDAHSAPM

SEQ ID NO: 31979 - protein, 9 aa, Homo sapiens
  Table A; Target 31979; HLA-B*37:01; KCNU1; ENSG00000215262; CTA
FGDAHSAPM

SEQ ID NO: 31980 - protein, 9 aa, Homo sapiens
  Table A; Target 31980; HLA-B*46:01; KCNU1; ENSG00000215262; CTA
FGDAHSAPM

SEQ ID NO: 31981 - protein, 9 aa, Homo sapiens
  Table A; Target 31981; HLA-B*55:01; KCNU1; ENSG00000215262; CTA
FGDAHSAPM

SEQ ID NO: 31982 - protein, 9 aa, Homo sapiens
  Table A; Target 31982; HLA-C*02:02; KCNU1; ENSG00000215262; CTA
FGDAHSAPM

SEQ ID NO: 31983 - protein, 9 aa, Homo sapiens
  Table A; Target 31983; HLA-C*03:03; KCNU1; ENSG00000215262; CTA
FGDAHSAPM

SEQ ID NO: 31984 - protein, 9 aa, Homo sapiens
  Table A; Target 31984; HLA-C*03:04; KCNU1; ENSG00000215262; CTA
FGDAHSAPM

SEQ ID NO: 31985 - protein, 9 aa, Homo sapiens
  Table A; Target 31985; HLA-C*04:01; KCNU1; ENSG00000215262; CTA
FGDAHSAPM

SEQ ID NO: 31986 - protein, 9 aa, Homo sapiens
  Table A; Target 31986; HLA-C*05:01; KCNU1; ENSG00000215262; CTA
FGDAHSAPM

SEQ ID NO: 31987 - protein, 9 aa, Homo sapiens
  Table A; Target 31987; HLA-C*07:04; KCNU1; ENSG00000215262; CTA
FGDAHSAPM

SEQ ID NO: 31988 - protein, 9 aa, Homo sapiens
  Table A; Target 31988; HLA-C*12:03; KCNU1; ENSG00000215262; CTA
FGDAHSAPM

SEQ ID NO: 31989 - protein, 9 aa, Homo sapiens
  Table A; Target 31989; HLA-C*16:01; KCNU1; ENSG00000215262; CTA
FGDAHSAPM

SEQ ID NO: 31990 - protein, 11 aa, Homo sapiens
  Table A; Target 31990; HLA-C*05:01; KCNU1; ENSG00000215262; CTA
FGDAHSAPMGL

SEQ ID NO: 31991 - protein, 10 aa, Homo sapiens
  Table A; Target 31991; HLA-A*02:07; KCNU1; ENSG00000215262; CTA
FGDVVAKTSL

SEQ ID NO: 31992 - protein, 10 aa, Homo sapiens
  Table A; Target 31992; HLA-B*35:03; KCNU1; ENSG00000215262; CTA
FGDVVAKTSL

SEQ ID NO: 31993 - protein, 10 aa, Homo sapiens
  Table A; Target 31993; HLA-B*38:01; KCNU1; ENSG00000215262; CTA
FGDVVAKTSL

SEQ ID NO: 31994 - protein, 10 aa, Homo sapiens
  Table A; Target 31994; HLA-B*40:01; KCNU1; ENSG00000215262; CTA
FGDVVAKTSL

SEQ ID NO: 31995 - protein, 10 aa, Homo sapiens
  Table A; Target 31995; HLA-C*03:03; KCNU1; ENSG00000215262; CTA
FGDVVAKTSL

SEQ ID NO: 31996 - protein, 10 aa, Homo sapiens
  Table A; Target 31996; HLA-C*03:04; KCNU1; ENSG00000215262; CTA
FGDVVAKTSL

SEQ ID NO: 31997 - protein, 10 aa, Homo sapiens
  Table A; Target 31997; HLA-C*05:01; KCNU1; ENSG00000215262; CTA
FGDVVAKTSL

SEQ ID NO: 31998 - protein, 8 aa, Homo sapiens
  Table A; Target 31998; HLA-B*54:01; KCNU1; ENSG00000215262; CTA
FGLRFMAA

SEQ ID NO: 31999 - protein, 9 aa, Homo sapiens
  Table A; Target 31999; HLA-A*02:03; KCNU1; ENSG00000215262; CTA
FIAETPKDV

SEQ ID NO: 32000 - protein, 9 aa, Homo sapiens
  Table A; Target 32000; HLA-A*02:07; KCNU1; ENSG00000215262; CTA
FIAETPKDV

SEQ ID NO: 32001 - protein, 9 aa, Homo sapiens
  Table A; Target 32001; HLA-C*12:03; KCNU1; ENSG00000215262; CTA
FIAETPKDV

SEQ ID NO: 32002 - protein, 9 aa, Homo sapiens
  Table A; Target 32002; HLA-C*16:02; KCNU1; ENSG00000215262; CTA
FIAETPKDV

SEQ ID NO: 32003 - protein, 10 aa, Homo sapiens
  Table A; Target 32003; HLA-A*33:01; KCNU1; ENSG00000215262; CTA
FIAETPKDVR

SEQ ID NO: 32004 - protein, 10 aa, Homo sapiens
  Table A; Target 32004; HLA-A*33:03; KCNU1; ENSG00000215262; CTA
FIAETPKDVR

SEQ ID NO: 32005 - protein, 10 aa, Homo sapiens
  Table A; Target 32005; HLA-A*68:01; KCNU1; ENSG00000215262; CTA
FIAETPKDVR

SEQ ID NO: 32006 - protein, 10 aa, Homo sapiens
  Table A; Target 32006; HLA-A*68:02; KCNU1; ENSG00000215262; CTA
FIAETPKDVR

SEQ ID NO: 32007 - protein, 10 aa, Homo sapiens
  Table A; Target 32007; HLA-B*35:01; KCNU1; ENSG00000215262; CTA
FIAETPKDVR

SEQ ID NO: 32008 - protein, 10 aa, Homo sapiens
  Table A; Target 32008; HLA-C*07:06; KCNU1; ENSG00000215262; CTA
FIAETPKDVR

SEQ ID NO: 32009 - protein, 9 aa, Homo sapiens
  Table A; Target 32009; HLA-A*02:04; KCNU1; ENSG00000215262; CTA
FILSSFVTF

SEQ ID NO: 32010 - protein, 9 aa, Homo sapiens
  Table A; Target 32010; HLA-A*02:07; KCNU1; ENSG00000215262; CTA
FILSSFVTF

SEQ ID NO: 32011 - protein, 9 aa, Homo sapiens
  Table A; Target 32011; HLA-A*23:01; KCNU1; ENSG00000215262; CTA
FILSSFVTF

SEQ ID NO: 32012 - protein, 9 aa, Homo sapiens
  Table A; Target 32012; HLA-A*24:02; KCNU1; ENSG00000215262; CTA
FILSSFVTF

SEQ ID NO: 32013 - protein, 9 aa, Homo sapiens
  Table A; Target 32013; HLA-A*25:01; KCNU1; ENSG00000215262; CTA
FILSSFVTF

SEQ ID NO: 32014 - protein, 9 aa, Homo sapiens
  Table A; Target 32014; HLA-A*29:02; KCNU1; ENSG00000215262; CTA
FILSSFVTF

SEQ ID NO: 32015 - protein, 9 aa, Homo sapiens
  Table A; Target 32015; HLA-B*46:01; KCNU1; ENSG00000215262; CTA
FILSSFVTF

SEQ ID NO: 32016 - protein, 9 aa, Homo sapiens
  Table A; Target 32016; HLA-B*57:01; KCNU1; ENSG00000215262; CTA
FILSSFVTF

SEQ ID NO: 32017 - protein, 9 aa, Homo sapiens
  Table A; Target 32017; HLA-C*02:02; KCNU1; ENSG00000215262; CTA
FILSSFVTF

SEQ ID NO: 32018 - protein, 9 aa, Homo sapiens
  Table A; Target 32018; HLA-C*07:04; KCNU1; ENSG00000215262; CTA
FILSSFVTF

SEQ ID NO: 32019 - protein, 9 aa, Homo sapiens
  Table A; Target 32019; HLA-A*02:01; KCNU1; ENSG00000215262; CTA
FIPELITNC

SEQ ID NO: 32020 - protein, 9 aa, Homo sapiens
  Table A; Target 32020; HLA-A*02:07; KCNU1; ENSG00000215262; CTA
FIPELITNC

SEQ ID NO: 32021 - protein, 9 aa, Homo sapiens
  Table A; Target 32021; HLA-A*25:01; KCNU1; ENSG00000215262; CTA
FISGSAMKW

SEQ ID NO: 32022 - protein, 9 aa, Homo sapiens
  Table A; Target 32022; HLA-B*57:01; KCNU1; ENSG00000215262; CTA
FISGSAMKW

SEQ ID NO: 32023 - protein, 9 aa, Homo sapiens
  Table A; Target 32023; HLA-C*02:02; KCNU1; ENSG00000215262; CTA
FISGSAMKW

SEQ ID NO: 32024 - protein, 9 aa, Homo sapiens
  Table A; Target 32024; HLA-A*02:01; KCNU1; ENSG00000215262; CTA
FLDSLLATA

SEQ ID NO: 32025 - protein, 9 aa, Homo sapiens
  Table A; Target 32025; HLA-A*02:07; KCNU1; ENSG00000215262; CTA
FLDSLLATA

SEQ ID NO: 32026 - protein, 10 aa, Homo sapiens
  Table A; Target 32026; HLA-A*01:01; KCNU1; ENSG00000215262; CTA
FLDSLLATAF

SEQ ID NO: 32027 - protein, 10 aa, Homo sapiens
  Table A; Target 32027; HLA-A*02:07; KCNU1; ENSG00000215262; CTA
FLDSLLATAF

SEQ ID NO: 32028 - protein, 10 aa, Homo sapiens
  Table A; Target 32028; HLA-A*29:02; KCNU1; ENSG00000215262; CTA
FLDSLLATAF

SEQ ID NO: 32029 - protein, 11 aa, Homo sapiens
  Table A; Target 32029; HLA-A*01:01; KCNU1; ENSG00000215262; CTA
FLDSLLATAFY

SEQ ID NO: 32030 - protein, 9 aa, Homo sapiens
  Table A; Target 32030; HLA-A*02:01; KCNU1; ENSG00000215262; CTA
FLGETPPSL

SEQ ID NO: 32031 - protein, 9 aa, Homo sapiens
  Table A; Target 32031; HLA-A*02:03; KCNU1; ENSG00000215262; CTA
FLGETPPSL

SEQ ID NO: 32032 - protein, 9 aa, Homo sapiens
  Table A; Target 32032; HLA-A*02:04; KCNU1; ENSG00000215262; CTA
FLGETPPSL

SEQ ID NO: 32033 - protein, 9 aa, Homo sapiens
  Table A; Target 32033; HLA-A*02:07; KCNU1; ENSG00000215262; CTA
FLGETPPSL

SEQ ID NO: 32034 - protein, 9 aa, Homo sapiens
  Table A; Target 32034; HLA-A*23:01; KCNU1; ENSG00000215262; CTA
FLGETPPSL

SEQ ID NO: 32035 - protein, 9 aa, Homo sapiens
  Table A; Target 32035; HLA-A*30:01; KCNU1; ENSG00000215262; CTA
FLGETPPSL

SEQ ID NO: 32036 - protein, 9 aa, Homo sapiens
  Table A; Target 32036; HLA-A*32:01; KCNU1; ENSG00000215262; CTA
FLGETPPSL

SEQ ID NO: 32037 - protein, 9 aa, Homo sapiens
  Table A; Target 32037; HLA-B*13:02; KCNU1; ENSG00000215262; CTA
FLGETPPSL

SEQ ID NO: 32038 - protein, 9 aa, Homo sapiens
  Table A; Target 32038; HLA-B*35:03; KCNU1; ENSG00000215262; CTA
FLGETPPSL

SEQ ID NO: 32039 - protein, 9 aa, Homo sapiens
  Table A; Target 32039; HLA-B*38:01; KCNU1; ENSG00000215262; CTA
FLGETPPSL

SEQ ID NO: 32040 - protein, 9 aa, Homo sapiens
  Table A; Target 32040; HLA-B*39:01; KCNU1; ENSG00000215262; CTA
FLGETPPSL

SEQ ID NO: 32041 - protein, 9 aa, Homo sapiens
  Table A; Target 32041; HLA-B*40:01; KCNU1; ENSG00000215262; CTA
FLGETPPSL

SEQ ID NO: 32042 - protein, 9 aa, Homo sapiens
  Table A; Target 32042; HLA-B*46:01; KCNU1; ENSG00000215262; CTA
FLGETPPSL

SEQ ID NO: 32043 - protein, 9 aa, Homo sapiens
  Table A; Target 32043; HLA-B*55:01; KCNU1; ENSG00000215262; CTA
FLGETPPSL

SEQ ID NO: 32044 - protein, 9 aa, Homo sapiens
  Table A; Target 32044; HLA-C*01:02; KCNU1; ENSG00000215262; CTA
FLGETPPSL

SEQ ID NO: 32045 - protein, 9 aa, Homo sapiens
  Table A; Target 32045; HLA-C*02:02; KCNU1; ENSG00000215262; CTA
FLGETPPSL

SEQ ID NO: 32046 - protein, 9 aa, Homo sapiens
  Table A; Target 32046; HLA-C*03:03; KCNU1; ENSG00000215262; CTA
FLGETPPSL

SEQ ID NO: 32047 - protein, 9 aa, Homo sapiens
  Table A; Target 32047; HLA-C*03:04; KCNU1; ENSG00000215262; CTA
FLGETPPSL

SEQ ID NO: 32048 - protein, 9 aa, Homo sapiens
  Table A; Target 32048; HLA-C*05:01; KCNU1; ENSG00000215262; CTA
FLGETPPSL

SEQ ID NO: 32049 - protein, 9 aa, Homo sapiens
  Table A; Target 32049; HLA-C*07:04; KCNU1; ENSG00000215262; CTA
FLGETPPSL

SEQ ID NO: 32050 - protein, 9 aa, Homo sapiens
  Table A; Target 32050; HLA-C*14:02; KCNU1; ENSG00000215262; CTA
FLGETPPSL

SEQ ID NO: 32051 - protein, 9 aa, Homo sapiens
  Table A; Target 32051; HLA-C*16:01; KCNU1; ENSG00000215262; CTA
FLGETPPSL

SEQ ID NO: 32052 - protein, 11 aa, Homo sapiens
  Table A; Target 32052; HLA-A*02:01; KCNU1; ENSG00000215262; CTA
FLGETPPSLEL

SEQ ID NO: 32053 - protein, 9 aa, Homo sapiens
  Table A; Target 32053; HLA-A*02:03; KCNU1; ENSG00000215262; CTA
FLKMHLLLI

SEQ ID NO: 32054 - protein, 10 aa, Homo sapiens
  Table A; Target 32054; HLA-A*02:03; KCNU1; ENSG00000215262; CTA
FLRALRLLEL

SEQ ID NO: 32055 - protein, 9 aa, Homo sapiens
  Table A; Target 32055; HLA-A*02:03; KCNU1; ENSG00000215262; CTA
FLRDKSGEI

SEQ ID NO: 32056 - protein, 9 aa, Homo sapiens
  Table A; Target 32056; HLA-B*46:01; KCNU1; ENSG00000215262; CTA
FLRDKSGEI

SEQ ID NO: 32057 - protein, 8 aa, Homo sapiens
  Table A; Target 32057; HLA-A*02:07; KCNU1; ENSG00000215262; CTA
FLWNFPQI

SEQ ID NO: 32058 - protein, 9 aa, Homo sapiens
  Table A; Target 32058; HLA-A*29:02; KCNU1; ENSG00000215262; CTA
FLWNFPQIY

SEQ ID NO: 32059 - protein, 10 aa, Homo sapiens
  Table A; Target 32059; HLA-A*02:01; KCNU1; ENSG00000215262; CTA
FLWNFPQIYI

SEQ ID NO: 32060 - protein, 10 aa, Homo sapiens
  Table A; Target 32060; HLA-A*02:04; KCNU1; ENSG00000215262; CTA
FLWNFPQIYI

SEQ ID NO: 32061 - protein, 11 aa, Homo sapiens
  Table A; Target 32061; HLA-A*02:04; KCNU1; ENSG00000215262; CTA
FLWNFPQIYIL

SEQ ID NO: 32062 - protein, 9 aa, Homo sapiens
  Table A; Target 32062; HLA-B*35:01; KCNU1; ENSG00000215262; CTA
FPEVARLCF

SEQ ID NO: 32063 - protein, 10 aa, Homo sapiens
  Table A; Target 32063; HLA-B*57:01; KCNU1; ENSG00000215262; CTA
FQTKLRNETW

SEQ ID NO: 32064 - protein, 9 aa, Homo sapiens
  Table A; Target 32064; HLA-A*29:02; KCNU1; ENSG00000215262; CTA
FSFYFGLRF

SEQ ID NO: 32065 - protein, 9 aa, Homo sapiens
  Table A; Target 32065; HLA-B*57:01; KCNU1; ENSG00000215262; CTA
FSFYFGLRF

SEQ ID NO: 32066 - protein, 9 aa, Homo sapiens
  Table A; Target 32066; HLA-A*68:02; KCNU1; ENSG00000215262; CTA
FSGLIILLI

SEQ ID NO: 32067 - protein, 9 aa, Homo sapiens
  Table A; Target 32067; HLA-A*02:01; KCNU1; ENSG00000215262; CTA
FTAAGFIHL

SEQ ID NO: 32068 - protein, 9 aa, Homo sapiens
  Table A; Target 32068; HLA-A*02:04; KCNU1; ENSG00000215262; CTA
FTAAGFIHL

SEQ ID NO: 32069 - protein, 9 aa, Homo sapiens
  Table A; Target 32069; HLA-A*02:07; KCNU1; ENSG00000215262; CTA
FTAAGFIHL

SEQ ID NO: 32070 - protein, 9 aa, Homo sapiens
  Table A; Target 32070; HLA-A*11:01; KCNU1; ENSG00000215262; CTA
FTAAGFIHL

SEQ ID NO: 32071 - protein, 9 aa, Homo sapiens
  Table A; Target 32071; HLA-A*68:01; KCNU1; ENSG00000215262; CTA
FTAAGFIHL

SEQ ID NO: 32072 - protein, 9 aa, Homo sapiens
  Table A; Target 32072; HLA-A*68:02; KCNU1; ENSG00000215262; CTA
FTAAGFIHL

SEQ ID NO: 32073 - protein, 9 aa, Homo sapiens
  Table A; Target 32073; HLA-C*02:02; KCNU1; ENSG00000215262; CTA
FTAAGFIHL

SEQ ID NO: 32074 - protein, 9 aa, Homo sapiens
  Table A; Target 32074; HLA-C*03:03; KCNU1; ENSG00000215262; CTA
FTAAGFIHL

SEQ ID NO: 32075 - protein, 9 aa, Homo sapiens
  Table A; Target 32075; HLA-C*03:04; KCNU1; ENSG00000215262; CTA
FTAAGFIHL

SEQ ID NO: 32076 - protein, 9 aa, Homo sapiens
  Table A; Target 32076; HLA-C*07:04; KCNU1; ENSG00000215262; CTA
FTAAGFIHL

SEQ ID NO: 32077 - protein, 9 aa, Homo sapiens
  Table A; Target 32077; HLA-C*12:03; KCNU1; ENSG00000215262; CTA
FTAAGFIHL

SEQ ID NO: 32078 - protein, 10 aa, Homo sapiens
  Table A; Target 32078; HLA-A*68:02; KCNU1; ENSG00000215262; CTA
FTAAGFIHLV

SEQ ID NO: 32079 - protein, 8 aa, Homo sapiens
  Table A; Target 32079; HLA-C*05:01; KCNU1; ENSG00000215262; CTA
FTDGFCGL

SEQ ID NO: 32080 - protein, 9 aa, Homo sapiens
  Table A; Target 32080; HLA-A*01:01; KCNU1; ENSG00000215262; CTA
FTDGFCGLI

SEQ ID NO: 32081 - protein, 10 aa, Homo sapiens
  Table A; Target 32081; HLA-A*01:01; KCNU1; ENSG00000215262; CTA
FTIPPTFISY

SEQ ID NO: 32082 - protein, 10 aa, Homo sapiens
  Table A; Target 32082; HLA-A*25:01; KCNU1; ENSG00000215262; CTA
FTIPPTFISY

SEQ ID NO: 32083 - protein, 10 aa, Homo sapiens
  Table A; Target 32083; HLA-A*26:01; KCNU1; ENSG00000215262; CTA
FTIPPTFISY

SEQ ID NO: 32084 - protein, 10 aa, Homo sapiens
  Table A; Target 32084; HLA-A*29:02; KCNU1; ENSG00000215262; CTA
FTIPPTFISY

SEQ ID NO: 32085 - protein, 10 aa, Homo sapiens
  Table A; Target 32085; HLA-A*30:02; KCNU1; ENSG00000215262; CTA
FTIPPTFISY

SEQ ID NO: 32086 - protein, 10 aa, Homo sapiens
  Table A; Target 32086; HLA-A*32:01; KCNU1; ENSG00000215262; CTA
FTIPPTFISY

SEQ ID NO: 32087 - protein, 10 aa, Homo sapiens
  Table A; Target 32087; HLA-B*46:01; KCNU1; ENSG00000215262; CTA
FTIPPTFISY

SEQ ID NO: 32088 - protein, 10 aa, Homo sapiens
  Table A; Target 32088; HLA-B*57:01; KCNU1; ENSG00000215262; CTA
FTIPPTFISY

SEQ ID NO: 32089 - protein, 10 aa, Homo sapiens
  Table A; Target 32089; HLA-C*02:02; KCNU1; ENSG00000215262; CTA
FTIPPTFISY

SEQ ID NO: 32090 - protein, 10 aa, Homo sapiens
  Table A; Target 32090; HLA-C*12:03; KCNU1; ENSG00000215262; CTA
FTIPPTFISY

SEQ ID NO: 32091 - protein, 11 aa, Homo sapiens
  Table A; Target 32091; HLA-A*01:01; KCNU1; ENSG00000215262; CTA
FTIPPTFISYY

SEQ ID NO: 32092 - protein, 11 aa, Homo sapiens
  Table A; Target 32092; HLA-A*29:02; KCNU1; ENSG00000215262; CTA
FTIPPTFISYY

SEQ ID NO: 32093 - protein, 9 aa, Homo sapiens
  Table A; Target 32093; HLA-A*23:01; KCNU1; ENSG00000215262; CTA
FTLGSLILF

SEQ ID NO: 32094 - protein, 9 aa, Homo sapiens
  Table A; Target 32094; HLA-A*29:02; KCNU1; ENSG00000215262; CTA
FTLGSLILF

SEQ ID NO: 32095 - protein, 9 aa, Homo sapiens
  Table A; Target 32095; HLA-B*57:01; KCNU1; ENSG00000215262; CTA
FTLGSLILF

SEQ ID NO: 32096 - protein, 8 aa, Homo sapiens
  Table A; Target 32096; HLA-A*11:01; KCNU1; ENSG00000215262; CTA
FTSGTIAR

SEQ ID NO: 32097 - protein, 8 aa, Homo sapiens
  Table A; Target 32097; HLA-A*33:03; KCNU1; ENSG00000215262; CTA
FTSGTIAR

SEQ ID NO: 32098 - protein, 8 aa, Homo sapiens
  Table A; Target 32098; HLA-A*68:01; KCNU1; ENSG00000215262; CTA
FTSGTIAR

SEQ ID NO: 32099 - protein, 8 aa, Homo sapiens
  Table A; Target 32099; HLA-B*27:02; KCNU1; ENSG00000215262; CTA
FTSGTIAR

SEQ ID NO: 32100 - protein, 9 aa, Homo sapiens
  Table A; Target 32100; HLA-B*08:01; KCNU1; ENSG00000215262; CTA
FVEQNKKVM

SEQ ID NO: 32101 - protein, 9 aa, Homo sapiens
  Table A; Target 32101; HLA-B*35:01; KCNU1; ENSG00000215262; CTA
FVEQNKKVM

SEQ ID NO: 32102 - protein, 9 aa, Homo sapiens
  Table A; Target 32102; HLA-B*35:03; KCNU1; ENSG00000215262; CTA
FVEQNKKVM

SEQ ID NO: 32103 - protein, 9 aa, Homo sapiens
  Table A; Target 32103; HLA-C*03:03; KCNU1; ENSG00000215262; CTA
FVEQNKKVM

SEQ ID NO: 32104 - protein, 9 aa, Homo sapiens
  Table A; Target 32104; HLA-C*03:04; KCNU1; ENSG00000215262; CTA
FVEQNKKVM

SEQ ID NO: 32105 - protein, 9 aa, Homo sapiens
  Table A; Target 32105; HLA-C*05:01; KCNU1; ENSG00000215262; CTA
FVEQNKKVM

SEQ ID NO: 32106 - protein, 9 aa, Homo sapiens
  Table A; Target 32106; HLA-C*07:04; KCNU1; ENSG00000215262; CTA
FVEQNKKVM

SEQ ID NO: 32107 - protein, 9 aa, Homo sapiens
  Table A; Target 32107; HLA-C*12:03; KCNU1; ENSG00000215262; CTA
FVEQNKKVM

SEQ ID NO: 32108 - protein, 9 aa, Homo sapiens
  Table A; Target 32108; HLA-C*16:01; KCNU1; ENSG00000215262; CTA
FVEQNKKVM

SEQ ID NO: 32109 - protein, 9 aa, Homo sapiens
  Table A; Target 32109; HLA-C*16:02; KCNU1; ENSG00000215262; CTA
FVEQNKKVM

SEQ ID NO: 32110 - protein, 8 aa, Homo sapiens
  Table A; Target 32110; HLA-B*51:01; KCNU1; ENSG00000215262; CTA
FVGQVLVI

SEQ ID NO: 32111 - protein, 10 aa, Homo sapiens
  Table A; Target 32111; HLA-A*25:01; KCNU1; ENSG00000215262; CTA
FVITRPANEF

SEQ ID NO: 32112 - protein, 10 aa, Homo sapiens
  Table A; Target 32112; HLA-A*26:01; KCNU1; ENSG00000215262; CTA
FVITRPANEF

SEQ ID NO: 32113 - protein, 10 aa, Homo sapiens
  Table A; Target 32113; HLA-B*15:01; KCNU1; ENSG00000215262; CTA
FVITRPANEF

SEQ ID NO: 32114 - protein, 10 aa, Homo sapiens
  Table A; Target 32114; HLA-B*46:01; KCNU1; ENSG00000215262; CTA
FVITRPANEF

SEQ ID NO: 32115 - protein, 10 aa, Homo sapiens
  Table A; Target 32115; HLA-B*58:01; KCNU1; ENSG00000215262; CTA
FVITRPANEF

SEQ ID NO: 32116 - protein, 10 aa, Homo sapiens
  Table A; Target 32116; HLA-C*02:02; KCNU1; ENSG00000215262; CTA
FVITRPANEF

SEQ ID NO: 32117 - protein, 10 aa, Homo sapiens
  Table A; Target 32117; HLA-C*03:03; KCNU1; ENSG00000215262; CTA
FVITRPANEF

SEQ ID NO: 32118 - protein, 10 aa, Homo sapiens
  Table A; Target 32118; HLA-C*03:04; KCNU1; ENSG00000215262; CTA
FVITRPANEF

SEQ ID NO: 32119 - protein, 11 aa, Homo sapiens
  Table A; Target 32119; HLA-A*29:02; KCNU1; ENSG00000215262; CTA
FVLSIGSLIIY

SEQ ID NO: 32120 - protein, 10 aa, Homo sapiens
  Table A; Target 32120; HLA-A*03:01; KCNU1; ENSG00000215262; CTA
FVMPLRASNY

SEQ ID NO: 32121 - protein, 10 aa, Homo sapiens
  Table A; Target 32121; HLA-A*25:01; KCNU1; ENSG00000215262; CTA
FVMPLRASNY

SEQ ID NO: 32122 - protein, 10 aa, Homo sapiens
  Table A; Target 32122; HLA-A*26:01; KCNU1; ENSG00000215262; CTA
FVMPLRASNY

SEQ ID NO: 32123 - protein, 10 aa, Homo sapiens
  Table A; Target 32123; HLA-A*29:02; KCNU1; ENSG00000215262; CTA
FVMPLRASNY

SEQ ID NO: 32124 - protein, 10 aa, Homo sapiens
  Table A; Target 32124; HLA-A*30:02; KCNU1; ENSG00000215262; CTA
FVMPLRASNY

SEQ ID NO: 32125 - protein, 10 aa, Homo sapiens
  Table A; Target 32125; HLA-A*32:01; KCNU1; ENSG00000215262; CTA
FVMPLRASNY

SEQ ID NO: 32126 - protein, 10 aa, Homo sapiens
  Table A; Target 32126; HLA-B*15:01; KCNU1; ENSG00000215262; CTA
FVMPLRASNY

SEQ ID NO: 32127 - protein, 10 aa, Homo sapiens
  Table A; Target 32127; HLA-B*44:02; KCNU1; ENSG00000215262; CTA
FVMPLRASNY

SEQ ID NO: 32128 - protein, 10 aa, Homo sapiens
  Table A; Target 32128; HLA-B*46:01; KCNU1; ENSG00000215262; CTA
FVMPLRASNY

SEQ ID NO: 32129 - protein, 10 aa, Homo sapiens
  Table A; Target 32129; HLA-B*57:01; KCNU1; ENSG00000215262; CTA
FVMPLRASNY

SEQ ID NO: 32130 - protein, 10 aa, Homo sapiens
  Table A; Target 32130; HLA-C*02:02; KCNU1; ENSG00000215262; CTA
FVMPLRASNY

SEQ ID NO: 32131 - protein, 10 aa, Homo sapiens
  Table A; Target 32131; HLA-C*12:03; KCNU1; ENSG00000215262; CTA
FVMPLRASNY

SEQ ID NO: 32132 - protein, 10 aa, Homo sapiens
  Table A; Target 32132; HLA-C*16:01; KCNU1; ENSG00000215262; CTA
FVMPLRASNY

SEQ ID NO: 32133 - protein, 9 aa, Homo sapiens
  Table A; Target 32133; HLA-A*23:01; KCNU1; ENSG00000215262; CTA
FYNYHVLEL

SEQ ID NO: 32134 - protein, 9 aa, Homo sapiens
  Table A; Target 32134; HLA-A*24:02; KCNU1; ENSG00000215262; CTA
FYNYHVLEL

SEQ ID NO: 32135 - protein, 9 aa, Homo sapiens
  Table A; Target 32135; HLA-A*29:02; KCNU1; ENSG00000215262; CTA
FYNYHVLEL

SEQ ID NO: 32136 - protein, 9 aa, Homo sapiens
  Table A; Target 32136; HLA-C*14:02; KCNU1; ENSG00000215262; CTA
FYNYHVLEL

SEQ ID NO: 32137 - protein, 8 aa, Homo sapiens
  Table A; Target 32137; HLA-B*37:01; KCNU1; ENSG00000215262; CTA
GDAHSAPM

SEQ ID NO: 32138 - protein, 8 aa, Homo sapiens
  Table A; Target 32138; HLA-B*37:01; KCNU1; ENSG00000215262; CTA
GDLHAANI

SEQ ID NO: 32139 - protein, 9 aa, Homo sapiens
  Table A; Target 32139; HLA-A*30:01; KCNU1; ENSG00000215262; CTA
GDVVAKTSL

SEQ ID NO: 32140 - protein, 9 aa, Homo sapiens
  Table A; Target 32140; HLA-B*15:03; KCNU1; ENSG00000215262; CTA
GDVVAKTSL

SEQ ID NO: 32141 - protein, 9 aa, Homo sapiens
  Table A; Target 32141; HLA-B*37:01; KCNU1; ENSG00000215262; CTA
GDVVAKTSL

SEQ ID NO: 32142 - protein, 9 aa, Homo sapiens
  Table A; Target 32142; HLA-B*40:01; KCNU1; ENSG00000215262; CTA
GDVVAKTSL

SEQ ID NO: 32143 - protein, 9 aa, Homo sapiens
  Table A; Target 32143; HLA-B*40:02; KCNU1; ENSG00000215262; CTA
GDVVAKTSL

SEQ ID NO: 32144 - protein, 9 aa, Homo sapiens
  Table A; Target 32144; HLA-B*44:03; KCNU1; ENSG00000215262; CTA
GDVVAKTSL

SEQ ID NO: 32145 - protein, 9 aa, Homo sapiens
  Table A; Target 32145; HLA-B*49:01; KCNU1; ENSG00000215262; CTA
GDVVAKTSL

SEQ ID NO: 32146 - protein, 8 aa, Homo sapiens
  Table A; Target 32146; HLA-B*49:01; KCNU1; ENSG00000215262; CTA
GEINTEIV

SEQ ID NO: 32147 - protein, 9 aa, Homo sapiens
  Table A; Target 32147; HLA-A*30:01; KCNU1; ENSG00000215262; CTA
GEINTEIVF

SEQ ID NO: 32148 - protein, 9 aa, Homo sapiens
  Table A; Target 32148; HLA-B*15:01; KCNU1; ENSG00000215262; CTA
GEINTEIVF

SEQ ID NO: 32149 - protein, 9 aa, Homo sapiens
  Table A; Target 32149; HLA-B*15:03; KCNU1; ENSG00000215262; CTA
GEINTEIVF

SEQ ID NO: 32150 - protein, 9 aa, Homo sapiens
  Table A; Target 32150; HLA-B*18:01; KCNU1; ENSG00000215262; CTA
GEINTEIVF

SEQ ID NO: 32151 - protein, 9 aa, Homo sapiens
  Table A; Target 32151; HLA-B*27:02; KCNU1; ENSG00000215262; CTA
GEINTEIVF

SEQ ID NO: 32152 - protein, 9 aa, Homo sapiens
  Table A; Target 32152; HLA-B*37:01; KCNU1; ENSG00000215262; CTA
GEINTEIVF

SEQ ID NO: 32153 - protein, 9 aa, Homo sapiens
  Table A; Target 32153; HLA-B*40:02; KCNU1; ENSG00000215262; CTA
GEINTEIVF

SEQ ID NO: 32154 - protein, 9 aa, Homo sapiens
  Table A; Target 32154; HLA-B*44:02; KCNU1; ENSG00000215262; CTA
GEINTEIVF

SEQ ID NO: 32155 - protein, 9 aa, Homo sapiens
  Table A; Target 32155; HLA-B*49:01; KCNU1; ENSG00000215262; CTA
GEINTEIVF

SEQ ID NO: 32156 - protein, 9 aa, Homo sapiens
  Table A; Target 32156; HLA-C*02:02; KCNU1; ENSG00000215262; CTA
GEINTEIVF

SEQ ID NO: 32157 - protein, 9 aa, Homo sapiens
  Table A; Target 32157; HLA-C*16:04; KCNU1; ENSG00000215262; CTA
GEINTEIVF

SEQ ID NO: 32158 - protein, 10 aa, Homo sapiens
  Table A; Target 32158; HLA-A*30:01; KCNU1; ENSG00000215262; CTA
GEINTEIVFL

SEQ ID NO: 32159 - protein, 10 aa, Homo sapiens
  Table A; Target 32159; HLA-B*40:01; KCNU1; ENSG00000215262; CTA
GEINTEIVFL

SEQ ID NO: 32160 - protein, 10 aa, Homo sapiens
  Table A; Target 32160; HLA-B*44:02; KCNU1; ENSG00000215262; CTA
GEINTEIVFL

SEQ ID NO: 32161 - protein, 10 aa, Homo sapiens
  Table A; Target 32161; HLA-B*44:03; KCNU1; ENSG00000215262; CTA
GEINTEIVFL

SEQ ID NO: 32162 - protein, 10 aa, Homo sapiens
  Table A; Target 32162; HLA-B*49:01; KCNU1; ENSG00000215262; CTA
GEINTEIVFL

SEQ ID NO: 32163 - protein, 9 aa, Homo sapiens
  Table A; Target 32163; HLA-A*30:01; KCNU1; ENSG00000215262; CTA
GETPPSLEL

SEQ ID NO: 32164 - protein, 9 aa, Homo sapiens
  Table A; Target 32164; HLA-B*13:02; KCNU1; ENSG00000215262; CTA
GETPPSLEL

SEQ ID NO: 32165 - protein, 9 aa, Homo sapiens
  Table A; Target 32165; HLA-B*18:01; KCNU1; ENSG00000215262; CTA
GETPPSLEL

SEQ ID NO: 32166 - protein, 9 aa, Homo sapiens
  Table A; Target 32166; HLA-B*27:02; KCNU1; ENSG00000215262; CTA
GETPPSLEL

SEQ ID NO: 32167 - protein, 9 aa, Homo sapiens
  Table A; Target 32167; HLA-B*27:05; KCNU1; ENSG00000215262; CTA
GETPPSLEL

SEQ ID NO: 32168 - protein, 9 aa, Homo sapiens
  Table A; Target 32168; HLA-B*37:01; KCNU1; ENSG00000215262; CTA
GETPPSLEL

SEQ ID NO: 32169 - protein, 9 aa, Homo sapiens
  Table A; Target 32169; HLA-B*39:01; KCNU1; ENSG00000215262; CTA
GETPPSLEL

SEQ ID NO: 32170 - protein, 9 aa, Homo sapiens
  Table A; Target 32170; HLA-B*40:01; KCNU1; ENSG00000215262; CTA
GETPPSLEL

SEQ ID NO: 32171 - protein, 9 aa, Homo sapiens
  Table A; Target 32171; HLA-B*40:02; KCNU1; ENSG00000215262; CTA
GETPPSLEL

SEQ ID NO: 32172 - protein, 9 aa, Homo sapiens
  Table A; Target 32172; HLA-B*44:02; KCNU1; ENSG00000215262; CTA
GETPPSLEL

SEQ ID NO: 32173 - protein, 9 aa, Homo sapiens
  Table A; Target 32173; HLA-B*44:03; KCNU1; ENSG00000215262; CTA
GETPPSLEL

SEQ ID NO: 32174 - protein, 9 aa, Homo sapiens
  Table A; Target 32174; HLA-B*49:01; KCNU1; ENSG00000215262; CTA
GETPPSLEL

SEQ ID NO: 32175 - protein, 9 aa, Homo sapiens
  Table A; Target 32175; HLA-C*02:02; KCNU1; ENSG00000215262; CTA
GETPPSLEL

SEQ ID NO: 32176 - protein, 9 aa, Homo sapiens
  Table A; Target 32176; HLA-C*16:04; KCNU1; ENSG00000215262; CTA
GETPPSLEL

SEQ ID NO: 32177 - protein, 8 aa, Homo sapiens
  Table A; Target 32177; HLA-A*03:02; KCNU1; ENSG00000215262; CTA
GFGDVVAK

SEQ ID NO: 32178 - protein, 8 aa, Homo sapiens
  Table A; Target 32178; HLA-B*27:05; KCNU1; ENSG00000215262; CTA
GFGDVVAK

SEQ ID NO: 32179 - protein, 9 aa, Homo sapiens
  Table A; Target 32179; HLA-A*02:04; KCNU1; ENSG00000215262; CTA
GLCTFLTSL

SEQ ID NO: 32180 - protein, 10 aa, Homo sapiens
  Table A; Target 32180; HLA-A*02:04; KCNU1; ENSG00000215262; CTA
GLIILLIFRL

SEQ ID NO: 32181 - protein, 10 aa, Homo sapiens
  Table A; Target 32181; HLA-A*02:01; KCNU1; ENSG00000215262; CTA
GLILNPPPQV

SEQ ID NO: 32182 - protein, 10 aa, Homo sapiens
  Table A; Target 32182; HLA-A*02:03; KCNU1; ENSG00000215262; CTA
GLILNPPPQV

SEQ ID NO: 32183 - protein, 9 aa, Homo sapiens
  Table A; Target 32183; HLA-A*02:04; KCNU1; ENSG00000215262; CTA
GLLSLHETI

SEQ ID NO: 32184 - protein, 9 aa, Homo sapiens
  Table A; Target 32184; HLA-B*13:02; KCNU1; ENSG00000215262; CTA
GLLSLHETI

SEQ ID NO: 32185 - protein, 10 aa, Homo sapiens
  Table A; Target 32185; HLA-A*02:01; KCNU1; ENSG00000215262; CTA
GLLSLHETIL

SEQ ID NO: 32186 - protein, 10 aa, Homo sapiens
  Table A; Target 32186; HLA-A*02:04; KCNU1; ENSG00000215262; CTA
GLLSLHETIL

SEQ ID NO: 32187 - protein, 9 aa, Homo sapiens
  Table A; Target 32187; HLA-A*02:03; KCNU1; ENSG00000215262; CTA
GLRNFVMPL

SEQ ID NO: 32188 - protein, 11 aa, Homo sapiens
  Table A; Target 32188; HLA-A*02:04; KCNU1; ENSG00000215262; CTA
GLYRIIDEEEL

SEQ ID NO: 32189 - protein, 9 aa, Homo sapiens
  Table A; Target 32189; HLA-C*07:06; KCNU1; ENSG00000215262; CTA
GMSFPEVAR

SEQ ID NO: 32190 - protein, 8 aa, Homo sapiens
  Table A; Target 32190; HLA-A*02:01; KCNU1; ENSG00000215262; CTA
GQDSPPRV

SEQ ID NO: 32191 - protein, 8 aa, Homo sapiens
  Table A; Target 32191; HLA-B*13:02; KCNU1; ENSG00000215262; CTA
GQDSPPRV

SEQ ID NO: 32192 - protein, 8 aa, Homo sapiens
  Table A; Target 32192; HLA-C*05:01; KCNU1; ENSG00000215262; CTA
GQDSPPRV

SEQ ID NO: 32193 - protein, 10 aa, Homo sapiens
  Table A; Target 32193; HLA-B*27:05; KCNU1; ENSG00000215262; CTA
GQDSPPRVSA

SEQ ID NO: 32194 - protein, 9 aa, Homo sapiens
  Table A; Target 32194; HLA-B*13:02; KCNU1; ENSG00000215262; CTA
GQFRDHIEM

SEQ ID NO: 32195 - protein, 9 aa, Homo sapiens
  Table A; Target 32195; HLA-B*15:01; KCNU1; ENSG00000215262; CTA
GQFRDHIEM

SEQ ID NO: 32196 - protein, 8 aa, Homo sapiens
  Table A; Target 32196; HLA-B*13:02; KCNU1; ENSG00000215262; CTA
GQVLVILV

SEQ ID NO: 32197 - protein, 9 aa, Homo sapiens
  Table A; Target 32197; HLA-B*13:02; KCNU1; ENSG00000215262; CTA
GQVLVILVF

SEQ ID NO: 32198 - protein, 9 aa, Homo sapiens
  Table A; Target 32198; HLA-B*15:01; KCNU1; ENSG00000215262; CTA
GQVLVILVF

SEQ ID NO: 32199 - protein, 9 aa, Homo sapiens
  Table A; Target 32199; HLA-B*15:03; KCNU1; ENSG00000215262; CTA
GQVLVILVF

SEQ ID NO: 32200 - protein, 9 aa, Homo sapiens
  Table A; Target 32200; HLA-B*27:02; KCNU1; ENSG00000215262; CTA
GQVLVILVF

SEQ ID NO: 32201 - protein, 9 aa, Homo sapiens
  Table A; Target 32201; HLA-B*44:02; KCNU1; ENSG00000215262; CTA
GQVLVILVF

SEQ ID NO: 32202 - protein, 9 aa, Homo sapiens
  Table A; Target 32202; HLA-B*44:03; KCNU1; ENSG00000215262; CTA
GQVLVILVF

SEQ ID NO: 32203 - protein, 9 aa, Homo sapiens
  Table A; Target 32203; HLA-C*02:02; KCNU1; ENSG00000215262; CTA
GQVLVILVF

SEQ ID NO: 32204 - protein, 9 aa, Homo sapiens
  Table A; Target 32204; HLA-C*16:04; KCNU1; ENSG00000215262; CTA
GQVLVILVF

SEQ ID NO: 32205 - protein, 9 aa, Homo sapiens
  Table A; Target 32205; HLA-A*30:02; KCNU1; ENSG00000215262; CTA
GRNSQNISY

SEQ ID NO: 32206 - protein, 9 aa, Homo sapiens
  Table A; Target 32206; HLA-A*32:01; KCNU1; ENSG00000215262; CTA
GRNSQNISY

SEQ ID NO: 32207 - protein, 9 aa, Homo sapiens
  Table A; Target 32207; HLA-B*27:02; KCNU1; ENSG00000215262; CTA
GRNSQNISY

SEQ ID NO: 32208 - protein, 9 aa, Homo sapiens
  Table A; Target 32208; HLA-B*27:05; KCNU1; ENSG00000215262; CTA
GRNSQNISY

SEQ ID NO: 32209 - protein, 9 aa, Homo sapiens
  Table A; Target 32209; HLA-C*02:02; KCNU1; ENSG00000215262; CTA
GRNSQNISY

SEQ ID NO: 32210 - protein, 9 aa, Homo sapiens
  Table A; Target 32210; HLA-C*16:04; KCNU1; ENSG00000215262; CTA
GRNSQNISY

SEQ ID NO: 32211 - protein, 10 aa, Homo sapiens
  Table A; Target 32211; HLA-B*27:02; KCNU1; ENSG00000215262; CTA
GRNSQNISYF

SEQ ID NO: 32212 - protein, 10 aa, Homo sapiens
  Table A; Target 32212; HLA-B*27:05; KCNU1; ENSG00000215262; CTA
GRNSQNISYF

SEQ ID NO: 32213 - protein, 10 aa, Homo sapiens
  Table A; Target 32213; HLA-C*16:04; KCNU1; ENSG00000215262; CTA
GRNSQNISYF

SEQ ID NO: 32214 - protein, 10 aa, Homo sapiens
  Table A; Target 32214; HLA-B*44:02; KCNU1; ENSG00000215262; CTA
GSLDYLQREW

SEQ ID NO: 32215 - protein, 10 aa, Homo sapiens
  Table A; Target 32215; HLA-B*57:01; KCNU1; ENSG00000215262; CTA
GSLDYLQREW

SEQ ID NO: 32216 - protein, 9 aa, Homo sapiens
  Table A; Target 32216; HLA-A*29:02; KCNU1; ENSG00000215262; CTA
GSLILFANY

SEQ ID NO: 32217 - protein, 9 aa, Homo sapiens
  Table A; Target 32217; HLA-A*30:02; KCNU1; ENSG00000215262; CTA
GSLILFANY

SEQ ID NO: 32218 - protein, 9 aa, Homo sapiens
  Table A; Target 32218; HLA-B*57:01; KCNU1; ENSG00000215262; CTA
GSLILFANY

SEQ ID NO: 32219 - protein, 9 aa, Homo sapiens
  Table A; Target 32219; HLA-B*57:01; KCNU1; ENSG00000215262; CTA
GTGIILELF

SEQ ID NO: 32220 - protein, 9 aa, Homo sapiens
  Table A; Target 32220; HLA-A*03:01; KCNU1; ENSG00000215262; CTA
GTIARSHVR

SEQ ID NO: 32221 - protein, 9 aa, Homo sapiens
  Table A; Target 32221; HLA-A*11:01; KCNU1; ENSG00000215262; CTA
GTIARSHVR

SEQ ID NO: 32222 - protein, 9 aa, Homo sapiens
  Table A; Target 32222; HLA-A*31:01; KCNU1; ENSG00000215262; CTA
GTIARSHVR

SEQ ID NO: 32223 - protein, 9 aa, Homo sapiens
  Table A; Target 32223; HLA-A*33:03; KCNU1; ENSG00000215262; CTA
GTIARSHVR

SEQ ID NO: 32224 - protein, 9 aa, Homo sapiens
  Table A; Target 32224; HLA-B*57:01; KCNU1; ENSG00000215262; CTA
GTIARSHVR

SEQ ID NO: 32225 - protein, 9 aa, Homo sapiens
  Table A; Target 32225; HLA-C*03:03; KCNU1; ENSG00000215262; CTA
GTVFSGSFL

SEQ ID NO: 32226 - protein, 9 aa, Homo sapiens
  Table A; Target 32226; HLA-C*03:04; KCNU1; ENSG00000215262; CTA
GTVFSGSFL

SEQ ID NO: 32227 - protein, 9 aa, Homo sapiens
  Table A; Target 32227; HLA-A*25:01; KCNU1; ENSG00000215262; CTA
GVADSCTSL

SEQ ID NO: 32228 - protein, 9 aa, Homo sapiens
  Table A; Target 32228; HLA-A*26:01; KCNU1; ENSG00000215262; CTA
GVADSCTSL

SEQ ID NO: 32229 - protein, 9 aa, Homo sapiens
  Table A; Target 32229; HLA-B*15:01; KCNU1; ENSG00000215262; CTA
GVADSCTSL

SEQ ID NO: 32230 - protein, 9 aa, Homo sapiens
  Table A; Target 32230; HLA-B*27:05; KCNU1; ENSG00000215262; CTA
GVADSCTSL

SEQ ID NO: 32231 - protein, 9 aa, Homo sapiens
  Table A; Target 32231; HLA-C*01:02; KCNU1; ENSG00000215262; CTA
GVADSCTSL

SEQ ID NO: 32232 - protein, 10 aa, Homo sapiens
  Table A; Target 32232; HLA-A*26:01; KCNU1; ENSG00000215262; CTA
GVADSCTSLL

SEQ ID NO: 32233 - protein, 10 aa, Homo sapiens
  Table A; Target 32233; HLA-B*27:05; KCNU1; ENSG00000215262; CTA
GVSSQLEQHL

SEQ ID NO: 32234 - protein, 10 aa, Homo sapiens
  Table A; Target 32234; HLA-B*35:01; KCNU1; ENSG00000215262; CTA
HAANIEQCSM

SEQ ID NO: 32235 - protein, 10 aa, Homo sapiens
  Table A; Target 32235; HLA-B*35:03; KCNU1; ENSG00000215262; CTA
HAANIEQCSM

SEQ ID NO: 32236 - protein, 10 aa, Homo sapiens
  Table A; Target 32236; HLA-C*07:06; KCNU1; ENSG00000215262; CTA
HAANIEQCSM

SEQ ID NO: 32237 - protein, 8 aa, Homo sapiens
  Table A; Target 32237; HLA-C*05:01; KCNU1; ENSG00000215262; CTA
HAEDISNI

SEQ ID NO: 32238 - protein, 9 aa, Homo sapiens
  Table A; Target 32238; HLA-B*27:05; KCNU1; ENSG00000215262; CTA
HAEDISNIM

SEQ ID NO: 32239 - protein, 9 aa, Homo sapiens
  Table A; Target 32239; HLA-B*35:03; KCNU1; ENSG00000215262; CTA
HAEDISNIM

SEQ ID NO: 32240 - protein, 9 aa, Homo sapiens
  Table A; Target 32240; HLA-B*38:01; KCNU1; ENSG00000215262; CTA
HAEDISNIM

SEQ ID NO: 32241 - protein, 9 aa, Homo sapiens
  Table A; Target 32241; HLA-B*39:01; KCNU1; ENSG00000215262; CTA
HAEDISNIM

SEQ ID NO: 32242 - protein, 9 aa, Homo sapiens
  Table A; Target 32242; HLA-B*55:01; KCNU1; ENSG00000215262; CTA
HAEDISNIM

SEQ ID NO: 32243 - protein, 9 aa, Homo sapiens
  Table A; Target 32243; HLA-C*02:02; KCNU1; ENSG00000215262; CTA
HAEDISNIM

SEQ ID NO: 32244 - protein, 9 aa, Homo sapiens
  Table A; Target 32244; HLA-C*03:03; KCNU1; ENSG00000215262; CTA
HAEDISNIM

SEQ ID NO: 32245 - protein, 9 aa, Homo sapiens
  Table A; Target 32245; HLA-C*03:04; KCNU1; ENSG00000215262; CTA
HAEDISNIM

SEQ ID NO: 32246 - protein, 9 aa, Homo sapiens
  Table A; Target 32246; HLA-C*05:01; KCNU1; ENSG00000215262; CTA
HAEDISNIM

SEQ ID NO: 32247 - protein, 9 aa, Homo sapiens
  Table A; Target 32247; HLA-C*07:04; KCNU1; ENSG00000215262; CTA
HAEDISNIM

SEQ ID NO: 32248 - protein, 9 aa, Homo sapiens
  Table A; Target 32248; HLA-C*07:06; KCNU1; ENSG00000215262; CTA
HAEDISNIM

SEQ ID NO: 32249 - protein, 9 aa, Homo sapiens
  Table A; Target 32249; HLA-C*12:03; KCNU1; ENSG00000215262; CTA
HAEDISNIM

SEQ ID NO: 32250 - protein, 9 aa, Homo sapiens
  Table A; Target 32250; HLA-C*16:04; KCNU1; ENSG00000215262; CTA
HAEDISNIM

SEQ ID NO: 32251 - protein, 10 aa, Homo sapiens
  Table A; Target 32251; HLA-A*33:01; KCNU1; ENSG00000215262; CTA
HAEDISNIMR

SEQ ID NO: 32252 - protein, 10 aa, Homo sapiens
  Table A; Target 32252; HLA-A*33:03; KCNU1; ENSG00000215262; CTA
HAEDISNIMR

SEQ ID NO: 32253 - protein, 10 aa, Homo sapiens
  Table A; Target 32253; HLA-A*68:01; KCNU1; ENSG00000215262; CTA
HAEDISNIMR

SEQ ID NO: 32254 - protein, 10 aa, Homo sapiens
  Table A; Target 32254; HLA-A*68:02; KCNU1; ENSG00000215262; CTA
HAEDISNIMR

SEQ ID NO: 32255 - protein, 10 aa, Homo sapiens
  Table A; Target 32255; HLA-B*35:03; KCNU1; ENSG00000215262; CTA
HAEDISNIMR

SEQ ID NO: 32256 - protein, 10 aa, Homo sapiens
  Table A; Target 32256; HLA-C*07:06; KCNU1; ENSG00000215262; CTA
HAEDISNIMR

SEQ ID NO: 32257 - protein, 11 aa, Homo sapiens
  Table A; Target 32257; HLA-A*68:02; KCNU1; ENSG00000215262; CTA
HAEDISNIMRV

SEQ ID NO: 32258 - protein, 8 aa, Homo sapiens
  Table A; Target 32258; HLA-A*30:01; KCNU1; ENSG00000215262; CTA
HETILSDV

SEQ ID NO: 32259 - protein, 8 aa, Homo sapiens
  Table A; Target 32259; HLA-B*18:01; KCNU1; ENSG00000215262; CTA
HETILSDV

SEQ ID NO: 32260 - protein, 8 aa, Homo sapiens
  Table A; Target 32260; HLA-B*49:01; KCNU1; ENSG00000215262; CTA
HETILSDV

SEQ ID NO: 32261 - protein, 11 aa, Homo sapiens
  Table A; Target 32261; HLA-B*27:02; KCNU1; ENSG00000215262; CTA
HETILSDVNPR

SEQ ID NO: 32262 - protein, 9 aa, Homo sapiens
  Table A; Target 32262; HLA-C*14:02; KCNU1; ENSG00000215262; CTA
HFIEQLGGL

SEQ ID NO: 32263 - protein, 8 aa, Homo sapiens
  Table A; Target 32263; HLA-A*03:01; KCNU1; ENSG00000215262; CTA
HITVPSVK

SEQ ID NO: 32264 - protein, 8 aa, Homo sapiens
  Table A; Target 32264; HLA-A*03:02; KCNU1; ENSG00000215262; CTA
HITVPSVK

SEQ ID NO: 32265 - protein, 9 aa, Homo sapiens
  Table A; Target 32265; HLA-A*33:01; KCNU1; ENSG00000215262; CTA
HITVPSVKR

SEQ ID NO: 32266 - protein, 9 aa, Homo sapiens
  Table A; Target 32266; HLA-A*33:03; KCNU1; ENSG00000215262; CTA
HITVPSVKR

SEQ ID NO: 32267 - protein, 9 aa, Homo sapiens
  Table A; Target 32267; HLA-A*68:01; KCNU1; ENSG00000215262; CTA
HITVPSVKR

SEQ ID NO: 32268 - protein, 9 aa, Homo sapiens
  Table A; Target 32268; HLA-C*07:06; KCNU1; ENSG00000215262; CTA
HITVPSVKR

SEQ ID NO: 32269 - protein, 10 aa, Homo sapiens
  Table A; Target 32269; HLA-A*02:01; KCNU1; ENSG00000215262; CTA
HLDKDKVYGV

SEQ ID NO: 32270 - protein, 10 aa, Homo sapiens
  Table A; Target 32270; HLA-A*02:07; KCNU1; ENSG00000215262; CTA
HLDKDKVYGV

SEQ ID NO: 32271 - protein, 9 aa, Homo sapiens
  Table A; Target 32271; HLA-A*01:01; KCNU1; ENSG00000215262; CTA
HLLLIAIEY

SEQ ID NO: 32272 - protein, 9 aa, Homo sapiens
  Table A; Target 32272; HLA-A*29:02; KCNU1; ENSG00000215262; CTA
HLLLIAIEY

SEQ ID NO: 32273 - protein, 9 aa, Homo sapiens
  Table A; Target 32273; HLA-B*35:01; KCNU1; ENSG00000215262; CTA
HLLLIAIEY

SEQ ID NO: 32274 - protein, 9 aa, Homo sapiens
  Table A; Target 32274; HLA-C*07:04; KCNU1; ENSG00000215262; CTA
HLLLIAIEY

SEQ ID NO: 32275 - protein, 10 aa, Homo sapiens
  Table A; Target 32275; HLA-A*25:01; KCNU1; ENSG00000215262; CTA
HLVENSGDPW

SEQ ID NO: 32276 - protein, 10 aa, Homo sapiens
  Table A; Target 32276; HLA-B*57:01; KCNU1; ENSG00000215262; CTA
HSAPMGLRNF

SEQ ID NO: 32277 - protein, 9 aa, Homo sapiens
  Table A; Target 32277; HLA-A*02:04; KCNU1; ENSG00000215262; CTA
HVLELLQML

SEQ ID NO: 32278 - protein, 9 aa, Homo sapiens
  Table A; Target 32278; HLA-A*02:07; KCNU1; ENSG00000215262; CTA
HVLELLQML

SEQ ID NO: 32279 - protein, 8 aa, Homo sapiens
  Table A; Target 32279; HLA-C*05:01; KCNU1; ENSG00000215262; CTA
IAETPKDV

SEQ ID NO: 32280 - protein, 8 aa, Homo sapiens
  Table A; Target 32280; HLA-C*16:02; KCNU1; ENSG00000215262; CTA
IAETPKDV

SEQ ID NO: 32281 - protein, 9 aa, Homo sapiens
  Table A; Target 32281; HLA-A*68:01; KCNU1; ENSG00000215262; CTA
IAETPKDVR

SEQ ID NO: 32282 - protein, 9 aa, Homo sapiens
  Table A; Target 32282; HLA-C*05:01; KCNU1; ENSG00000215262; CTA
IAETPKDVR

SEQ ID NO: 32283 - protein, 9 aa, Homo sapiens
  Table A; Target 32283; HLA-C*07:06; KCNU1; ENSG00000215262; CTA
IAETPKDVR

SEQ ID NO: 32284 - protein, 8 aa, Homo sapiens
  Table A; Target 32284; HLA-B*46:01; KCNU1; ENSG00000215262; CTA
IAIEYKSL

SEQ ID NO: 32285 - protein, 8 aa, Homo sapiens
  Table A; Target 32285; HLA-C*03:04; KCNU1; ENSG00000215262; CTA
IAIEYKSL

SEQ ID NO: 32286 - protein, 9 aa, Homo sapiens
  Table A; Target 32286; HLA-A*23:01; KCNU1; ENSG00000215262; CTA
IAIEYKSLF

SEQ ID NO: 32287 - protein, 9 aa, Homo sapiens
  Table A; Target 32287; HLA-A*24:02; KCNU1; ENSG00000215262; CTA
IAIEYKSLF

SEQ ID NO: 32288 - protein, 9 aa, Homo sapiens
  Table A; Target 32288; HLA-A*29:02; KCNU1; ENSG00000215262; CTA
IAIEYKSLF

SEQ ID NO: 32289 - protein, 9 aa, Homo sapiens
  Table A; Target 32289; HLA-B*35:01; KCNU1; ENSG00000215262; CTA
IAIEYKSLF

SEQ ID NO: 32290 - protein, 9 aa, Homo sapiens
  Table A; Target 32290; HLA-B*46:01; KCNU1; ENSG00000215262; CTA
IAIEYKSLF

SEQ ID NO: 32291 - protein, 9 aa, Homo sapiens
  Table A; Target 32291; HLA-B*51:01; KCNU1; ENSG00000215262; CTA
IAIEYKSLF

SEQ ID NO: 32292 - protein, 9 aa, Homo sapiens
  Table A; Target 32292; HLA-B*57:01; KCNU1; ENSG00000215262; CTA
IAIEYKSLF

SEQ ID NO: 32293 - protein, 9 aa, Homo sapiens
  Table A; Target 32293; HLA-B*58:01; KCNU1; ENSG00000215262; CTA
IAIEYKSLF

SEQ ID NO: 32294 - protein, 9 aa, Homo sapiens
  Table A; Target 32294; HLA-C*02:02; KCNU1; ENSG00000215262; CTA
IAIEYKSLF

SEQ ID NO: 32295 - protein, 9 aa, Homo sapiens
  Table A; Target 32295; HLA-C*16:01; KCNU1; ENSG00000215262; CTA
IAIEYKSLF

SEQ ID NO: 32296 - protein, 9 aa, Homo sapiens
  Table A; Target 32296; HLA-C*16:02; KCNU1; ENSG00000215262; CTA
IAIEYKSLF

SEQ ID NO: 32297 - protein, 9 aa, Homo sapiens
  Table A; Target 32297; HLA-C*16:02; KCNU1; ENSG00000215262; CTA
IARSHVRSL

SEQ ID NO: 32298 - protein, 11 aa, Homo sapiens
  Table A; Target 32298; HLA-B*27:02; KCNU1; ENSG00000215262; CTA
IDEEELNPENK

SEQ ID NO: 32299 - protein, 8 aa, Homo sapiens
  Table A; Target 32299; HLA-B*37:01; KCNU1; ENSG00000215262; CTA
IDLVFNAF

SEQ ID NO: 32300 - protein, 8 aa, Homo sapiens
  Table A; Target 32300; HLA-B*37:01; KCNU1; ENSG00000215262; CTA
IDSVTETL

SEQ ID NO: 32301 - protein, 10 aa, Homo sapiens
  Table A; Target 32301; HLA-A*30:01; KCNU1; ENSG00000215262; CTA
IEMLLSAQTF

SEQ ID NO: 32302 - protein, 10 aa, Homo sapiens
  Table A; Target 32302; HLA-B*18:01; KCNU1; ENSG00000215262; CTA
IEMLLSAQTF

SEQ ID NO: 32303 - protein, 10 aa, Homo sapiens
  Table A; Target 32303; HLA-B*27:02; KCNU1; ENSG00000215262; CTA
IEMLLSAQTF

SEQ ID NO: 32304 - protein, 10 aa, Homo sapiens
  Table A; Target 32304; HLA-B*37:01; KCNU1; ENSG00000215262; CTA
IEMLLSAQTF

SEQ ID NO: 32305 - protein, 10 aa, Homo sapiens
  Table A; Target 32305; HLA-B*40:01; KCNU1; ENSG00000215262; CTA
IEMLLSAQTF

SEQ ID NO: 32306 - protein, 10 aa, Homo sapiens
  Table A; Target 32306; HLA-B*40:02; KCNU1; ENSG00000215262; CTA
IEMLLSAQTF

SEQ ID NO: 32307 - protein, 10 aa, Homo sapiens
  Table A; Target 32307; HLA-B*44:02; KCNU1; ENSG00000215262; CTA
IEMLLSAQTF

SEQ ID NO: 32308 - protein, 10 aa, Homo sapiens
  Table A; Target 32308; HLA-B*44:03; KCNU1; ENSG00000215262; CTA
IEMLLSAQTF

SEQ ID NO: 32309 - protein, 10 aa, Homo sapiens
  Table A; Target 32309; HLA-B*49:01; KCNU1; ENSG00000215262; CTA
IEMLLSAQTF

SEQ ID NO: 32310 - protein, 10 aa, Homo sapiens
  Table A; Target 32310; HLA-C*16:04; KCNU1; ENSG00000215262; CTA
IEMLLSAQTF

SEQ ID NO: 32311 - protein, 11 aa, Homo sapiens
  Table A; Target 32311; HLA-B*49:01; KCNU1; ENSG00000215262; CTA
IEMLLSAQTFV

SEQ ID NO: 32312 - protein, 9 aa, Homo sapiens
  Table A; Target 32312; HLA-B*49:01; KCNU1; ENSG00000215262; CTA
IEQCSMCAV

SEQ ID NO: 32313 - protein, 11 aa, Homo sapiens
  Table A; Target 32313; HLA-A*30:01; KCNU1; ENSG00000215262; CTA
IEQLGGLEGSL

SEQ ID NO: 32314 - protein, 11 aa, Homo sapiens
  Table A; Target 32314; HLA-B*40:01; KCNU1; ENSG00000215262; CTA
IEQLGGLEGSL

SEQ ID NO: 32315 - protein, 11 aa, Homo sapiens
  Table A; Target 32315; HLA-B*40:02; KCNU1; ENSG00000215262; CTA
IEQLGGLEGSL

SEQ ID NO: 32316 - protein, 8 aa, Homo sapiens
  Table A; Target 32316; HLA-A*23:01; KCNU1; ENSG00000215262; CTA
IFTIPPTF

SEQ ID NO: 32317 - protein, 8 aa, Homo sapiens
  Table A; Target 32317; HLA-A*24:02; KCNU1; ENSG00000215262; CTA
IFTIPPTF

SEQ ID NO: 32318 - protein, 9 aa, Homo sapiens
  Table A; Target 32318; HLA-A*23:01; KCNU1; ENSG00000215262; CTA
IFTIPPTFI

SEQ ID NO: 32319 - protein, 9 aa, Homo sapiens
  Table A; Target 32319; HLA-A*24:02; KCNU1; ENSG00000215262; CTA
IFTIPPTFI

SEQ ID NO: 32320 - protein, 9 aa, Homo sapiens
  Table A; Target 32320; HLA-A*68:02; KCNU1; ENSG00000215262; CTA
IGSLIIYFI

SEQ ID NO: 32321 - protein, 9 aa, Homo sapiens
  Table A; Target 32321; HLA-B*46:01; KCNU1; ENSG00000215262; CTA
IIIQILQSH

SEQ ID NO: 32322 - protein, 9 aa, Homo sapiens
  Table A; Target 32322; HLA-C*07:04; KCNU1; ENSG00000215262; CTA
IIKGTGIIL

SEQ ID NO: 32323 - protein, 8 aa, Homo sapiens
  Table A; Target 32323; HLA-A*02:04; KCNU1; ENSG00000215262; CTA
IILLIFRL

SEQ ID NO: 32324 - protein, 10 aa, Homo sapiens
  Table A; Target 32324; HLA-A*03:02; KCNU1; ENSG00000215262; CTA
IIQILQSHNK

SEQ ID NO: 32325 - protein, 10 aa, Homo sapiens
  Table A; Target 32325; HLA-A*11:01; KCNU1; ENSG00000215262; CTA
IIQILQSHNK

SEQ ID NO: 32326 - protein, 9 aa, Homo sapiens
  Table A; Target 32326; HLA-A*23:01; KCNU1; ENSG00000215262; CTA
IKTSNSVKF

SEQ ID NO: 32327 - protein, 9 aa, Homo sapiens
  Table A; Target 32327; HLA-A*24:02; KCNU1; ENSG00000215262; CTA
IKTSNSVKF

SEQ ID NO: 32328 - protein, 9 aa, Homo sapiens
  Table A; Target 32328; HLA-B*15:03; KCNU1; ENSG00000215262; CTA
IKTSNSVKF

SEQ ID NO: 32329 - protein, 10 aa, Homo sapiens
  Table A; Target 32329; HLA-A*02:04; KCNU1; ENSG00000215262; CTA
ILFANYIPEM

SEQ ID NO: 32330 - protein, 8 aa, Homo sapiens
  Table A; Target 32330; HLA-A*02:01; KCNU1; ENSG00000215262; CTA
ILNPPPQV

SEQ ID NO: 32331 - protein, 8 aa, Homo sapiens
  Table A; Target 32331; HLA-A*02:03; KCNU1; ENSG00000215262; CTA
ILNPPPQV

SEQ ID NO: 32332 - protein, 8 aa, Homo sapiens
  Table A; Target 32332; HLA-A*02:04; KCNU1; ENSG00000215262; CTA
ILNPPPQV

SEQ ID NO: 32333 - protein, 8 aa, Homo sapiens
  Table A; Target 32333; HLA-B*13:02; KCNU1; ENSG00000215262; CTA
ILNPPPQV

SEQ ID NO: 32334 - protein, 8 aa, Homo sapiens
  Table A; Target 32334; HLA-B*55:01; KCNU1; ENSG00000215262; CTA
ILNPPPQV

SEQ ID NO: 32335 - protein, 8 aa, Homo sapiens
  Table A; Target 32335; HLA-C*16:02; KCNU1; ENSG00000215262; CTA
ILNPPPQV

SEQ ID NO: 32336 - protein, 9 aa, Homo sapiens
  Table A; Target 32336; HLA-A*02:03; KCNU1; ENSG00000215262; CTA
ILNPPPQVR

SEQ ID NO: 32337 - protein, 9 aa, Homo sapiens
  Table A; Target 32337; HLA-A*03:01; KCNU1; ENSG00000215262; CTA
ILNPPPQVR

SEQ ID NO: 32338 - protein, 9 aa, Homo sapiens
  Table A; Target 32338; HLA-A*03:02; KCNU1; ENSG00000215262; CTA
ILNPPPQVR

SEQ ID NO: 32339 - protein, 9 aa, Homo sapiens
  Table A; Target 32339; HLA-A*11:01; KCNU1; ENSG00000215262; CTA
ILNPPPQVR

SEQ ID NO: 32340 - protein, 9 aa, Homo sapiens
  Table A; Target 32340; HLA-A*23:01; KCNU1; ENSG00000215262; CTA
ILNPPPQVR

SEQ ID NO: 32341 - protein, 9 aa, Homo sapiens
  Table A; Target 32341; HLA-A*24:02; KCNU1; ENSG00000215262; CTA
ILNPPPQVR

SEQ ID NO: 32342 - protein, 9 aa, Homo sapiens
  Table A; Target 32342; HLA-A*29:02; KCNU1; ENSG00000215262; CTA
ILNPPPQVR

SEQ ID NO: 32343 - protein, 9 aa, Homo sapiens
  Table A; Target 32343; HLA-A*30:02; KCNU1; ENSG00000215262; CTA
ILNPPPQVR

SEQ ID NO: 32344 - protein, 9 aa, Homo sapiens
  Table A; Target 32344; HLA-A*31:01; KCNU1; ENSG00000215262; CTA
ILNPPPQVR

SEQ ID NO: 32345 - protein, 9 aa, Homo sapiens
  Table A; Target 32345; HLA-A*32:01; KCNU1; ENSG00000215262; CTA
ILNPPPQVR

SEQ ID NO: 32346 - protein, 9 aa, Homo sapiens
  Table A; Target 32346; HLA-A*33:01; KCNU1; ENSG00000215262; CTA
ILNPPPQVR

SEQ ID NO: 32347 - protein, 9 aa, Homo sapiens
  Table A; Target 32347; HLA-A*33:03; KCNU1; ENSG00000215262; CTA
ILNPPPQVR

SEQ ID NO: 32348 - protein, 9 aa, Homo sapiens
  Table A; Target 32348; HLA-A*68:01; KCNU1; ENSG00000215262; CTA
ILNPPPQVR

SEQ ID NO: 32349 - protein, 9 aa, Homo sapiens
  Table A; Target 32349; HLA-B*46:01; KCNU1; ENSG00000215262; CTA
ILNPPPQVR

SEQ ID NO: 32350 - protein, 9 aa, Homo sapiens
  Table A; Target 32350; HLA-B*57:01; KCNU1; ENSG00000215262; CTA
ILNPPPQVR

SEQ ID NO: 32351 - protein, 9 aa, Homo sapiens
  Table A; Target 32351; HLA-C*02:02; KCNU1; ENSG00000215262; CTA
ILNPPPQVR

SEQ ID NO: 32352 - protein, 9 aa, Homo sapiens
  Table A; Target 32352; HLA-C*07:06; KCNU1; ENSG00000215262; CTA
ILNPPPQVR

SEQ ID NO: 32353 - protein, 10 aa, Homo sapiens
  Table A; Target 32353; HLA-A*02:01; KCNU1; ENSG00000215262; CTA
ILNPPPQVRI

SEQ ID NO: 32354 - protein, 10 aa, Homo sapiens
  Table A; Target 32354; HLA-A*02:03; KCNU1; ENSG00000215262; CTA
ILNPPPQVRI

SEQ ID NO: 32355 - protein, 10 aa, Homo sapiens
  Table A; Target 32355; HLA-A*02:04; KCNU1; ENSG00000215262; CTA
ILNPPPQVRI

SEQ ID NO: 32356 - protein, 10 aa, Homo sapiens
  Table A; Target 32356; HLA-A*02:07; KCNU1; ENSG00000215262; CTA
ILNPPPQVRI

SEQ ID NO: 32357 - protein, 10 aa, Homo sapiens
  Table A; Target 32357; HLA-A*03:01; KCNU1; ENSG00000215262; CTA
ILNPPPQVRI

SEQ ID NO: 32358 - protein, 10 aa, Homo sapiens
  Table A; Target 32358; HLA-A*23:01; KCNU1; ENSG00000215262; CTA
ILNPPPQVRI

SEQ ID NO: 32359 - protein, 10 aa, Homo sapiens
  Table A; Target 32359; HLA-A*24:02; KCNU1; ENSG00000215262; CTA
ILNPPPQVRI

SEQ ID NO: 32360 - protein, 10 aa, Homo sapiens
  Table A; Target 32360; HLA-A*31:01; KCNU1; ENSG00000215262; CTA
ILNPPPQVRI

SEQ ID NO: 32361 - protein, 10 aa, Homo sapiens
  Table A; Target 32361; HLA-A*32:01; KCNU1; ENSG00000215262; CTA
ILNPPPQVRI

SEQ ID NO: 32362 - protein, 10 aa, Homo sapiens
  Table A; Target 32362; HLA-B*13:02; KCNU1; ENSG00000215262; CTA
ILNPPPQVRI

SEQ ID NO: 32363 - protein, 10 aa, Homo sapiens
  Table A; Target 32363; HLA-B*51:01; KCNU1; ENSG00000215262; CTA
ILNPPPQVRI

SEQ ID NO: 32364 - protein, 11 aa, Homo sapiens
  Table A; Target 32364; HLA-A*31:01; KCNU1; ENSG00000215262; CTA
ILNPPPQVRIR

SEQ ID NO: 32365 - protein, 9 aa, Homo sapiens
  Table A; Target 32365; HLA-A*30:02; KCNU1; ENSG00000215262; CTA
ILQSHNKVY

SEQ ID NO: 32366 - protein, 9 aa, Homo sapiens
  Table A; Target 32366; HLA-A*32:01; KCNU1; ENSG00000215262; CTA
ILQSHNKVY

SEQ ID NO: 32367 - protein, 9 aa, Homo sapiens
  Table A; Target 32367; HLA-B*15:01; KCNU1; ENSG00000215262; CTA
ILQSHNKVY

SEQ ID NO: 32368 - protein, 9 aa, Homo sapiens
  Table A; Target 32368; HLA-C*07:04; KCNU1; ENSG00000215262; CTA
ILQSHNKVY

SEQ ID NO: 32369 - protein, 9 aa, Homo sapiens
  Table A; Target 32369; HLA-C*16:01; KCNU1; ENSG00000215262; CTA
ILQSHNKVY

SEQ ID NO: 32370 - protein, 10 aa, Homo sapiens
  Table A; Target 32370; HLA-A*02:03; KCNU1; ENSG00000215262; CTA
ILSDVNPRNT

SEQ ID NO: 32371 - protein, 11 aa, Homo sapiens
  Table A; Target 32371; HLA-A*23:01; KCNU1; ENSG00000215262; CTA
ILSDVNPRNTF

SEQ ID NO: 32372 - protein, 11 aa, Homo sapiens
  Table A; Target 32372; HLA-A*24:02; KCNU1; ENSG00000215262; CTA
ILSDVNPRNTF

SEQ ID NO: 32373 - protein, 11 aa, Homo sapiens
  Table A; Target 32373; HLA-A*32:01; KCNU1; ENSG00000215262; CTA
ILSDVNPRNTF

SEQ ID NO: 32374 - protein, 11 aa, Homo sapiens
  Table A; Target 32374; HLA-B*15:01; KCNU1; ENSG00000215262; CTA
ILSDVNPRNTF

SEQ ID NO: 32375 - protein, 11 aa, Homo sapiens
  Table A; Target 32375; HLA-B*46:01; KCNU1; ENSG00000215262; CTA
ILSDVNPRNTF

SEQ ID NO: 32376 - protein, 11 aa, Homo sapiens
  Table A; Target 32376; HLA-C*16:01; KCNU1; ENSG00000215262; CTA
ILSDVNPRNTF

SEQ ID NO: 32377 - protein, 8 aa, Homo sapiens
  Table A; Target 32377; HLA-A*23:01; KCNU1; ENSG00000215262; CTA
ILSSFVTF

SEQ ID NO: 32378 - protein, 8 aa, Homo sapiens
  Table A; Target 32378; HLA-B*37:01; KCNU1; ENSG00000215262; CTA
ILSSFVTF

SEQ ID NO: 32379 - protein, 9 aa, Homo sapiens
  Table A; Target 32379; HLA-A*02:01; KCNU1; ENSG00000215262; CTA
ILSSFVTFF

SEQ ID NO: 32380 - protein, 9 aa, Homo sapiens
  Table A; Target 32380; HLA-A*02:03; KCNU1; ENSG00000215262; CTA
ILSSFVTFF

SEQ ID NO: 32381 - protein, 9 aa, Homo sapiens
  Table A; Target 32381; HLA-A*02:04; KCNU1; ENSG00000215262; CTA
ILSSFVTFF

SEQ ID NO: 32382 - protein, 9 aa, Homo sapiens
  Table A; Target 32382; HLA-A*02:07; KCNU1; ENSG00000215262; CTA
ILSSFVTFF

SEQ ID NO: 32383 - protein, 9 aa, Homo sapiens
  Table A; Target 32383; HLA-A*23:01; KCNU1; ENSG00000215262; CTA
ILSSFVTFF

SEQ ID NO: 32384 - protein, 9 aa, Homo sapiens
  Table A; Target 32384; HLA-A*24:02; KCNU1; ENSG00000215262; CTA
ILSSFVTFF

SEQ ID NO: 32385 - protein, 9 aa, Homo sapiens
  Table A; Target 32385; HLA-A*29:02; KCNU1; ENSG00000215262; CTA
ILSSFVTFF

SEQ ID NO: 32386 - protein, 9 aa, Homo sapiens
  Table A; Target 32386; HLA-C*02:02; KCNU1; ENSG00000215262; CTA
ILSSFVTFF

SEQ ID NO: 32387 - protein, 9 aa, Homo sapiens
  Table A; Target 32387; HLA-A*02:03; KCNU1; ENSG00000215262; CTA
ILSTWFTAA

SEQ ID NO: 32388 - protein, 9 aa, Homo sapiens
  Table A; Target 32388; HLA-A*02:04; KCNU1; ENSG00000215262; CTA
ILSTWFTAA

SEQ ID NO: 32389 - protein, 10 aa, Homo sapiens
  Table A; Target 32389; HLA-A*02:03; KCNU1; ENSG00000215262; CTA
IMATLTIGSL

SEQ ID NO: 32390 - protein, 11 aa, Homo sapiens
  Table A; Target 32390; HLA-B*27:02; KCNU1; ENSG00000215262; CTA
IPEMVELFANK

SEQ ID NO: 32391 - protein, 8 aa, Homo sapiens
  Table A; Target 32391; HLA-B*15:01; KCNU1; ENSG00000215262; CTA
IPFSTACY

SEQ ID NO: 32392 - protein, 8 aa, Homo sapiens
  Table A; Target 32392; HLA-B*15:03; KCNU1; ENSG00000215262; CTA
IPFSTACY

SEQ ID NO: 32393 - protein, 8 aa, Homo sapiens
  Table A; Target 32393; HLA-B*18:01; KCNU1; ENSG00000215262; CTA
IPFSTACY

SEQ ID NO: 32394 - protein, 8 aa, Homo sapiens
  Table A; Target 32394; HLA-B*35:01; KCNU1; ENSG00000215262; CTA
IPFSTACY

SEQ ID NO: 32395 - protein, 8 aa, Homo sapiens
  Table A; Target 32395; HLA-B*51:01; KCNU1; ENSG00000215262; CTA
IPFSTACY

SEQ ID NO: 32396 - protein, 8 aa, Homo sapiens
  Table A; Target 32396; HLA-B*56:01; KCNU1; ENSG00000215262; CTA
IPFSTACY

SEQ ID NO: 32397 - protein, 9 aa, Homo sapiens
  Table A; Target 32397; HLA-B*35:03; KCNU1; ENSG00000215262; CTA
IPIDLVFNA

SEQ ID NO: 32398 - protein, 9 aa, Homo sapiens
  Table A; Target 32398; HLA-B*54:01; KCNU1; ENSG00000215262; CTA
IPIDLVFNA

SEQ ID NO: 32399 - protein, 9 aa, Homo sapiens
  Table A; Target 32399; HLA-B*55:01; KCNU1; ENSG00000215262; CTA
IPIDLVFNA

SEQ ID NO: 32400 - protein, 9 aa, Homo sapiens
  Table A; Target 32400; HLA-B*56:01; KCNU1; ENSG00000215262; CTA
IPIDLVFNA

SEQ ID NO: 32401 - protein, 10 aa, Homo sapiens
  Table A; Target 32401; HLA-A*23:01; KCNU1; ENSG00000215262; CTA
IPIDLVFNAF

SEQ ID NO: 32402 - protein, 10 aa, Homo sapiens
  Table A; Target 32402; HLA-B*35:01; KCNU1; ENSG00000215262; CTA
IPIDLVFNAF

SEQ ID NO: 32403 - protein, 10 aa, Homo sapiens
  Table A; Target 32403; HLA-B*35:03; KCNU1; ENSG00000215262; CTA
IPIDLVFNAF

SEQ ID NO: 32404 - protein, 8 aa, Homo sapiens
  Table A; Target 32404; HLA-B*35:01; KCNU1; ENSG00000215262; CTA
IPPTFISY

SEQ ID NO: 32405 - protein, 8 aa, Homo sapiens
  Table A; Target 32405; HLA-B*51:01; KCNU1; ENSG00000215262; CTA
IPPTFISY

SEQ ID NO: 32406 - protein, 9 aa, Homo sapiens
  Table A; Target 32406; HLA-B*35:01; KCNU1; ENSG00000215262; CTA
IPPTFISYY

SEQ ID NO: 32407 - protein, 9 aa, Homo sapiens
  Table A; Target 32407; HLA-B*51:01; KCNU1; ENSG00000215262; CTA
IPPTFISYY

SEQ ID NO: 32408 - protein, 10 aa, Homo sapiens
  Table A; Target 32408; HLA-A*23:01; KCNU1; ENSG00000215262; CTA
IQAAFILSSF

SEQ ID NO: 32409 - protein, 10 aa, Homo sapiens
  Table A; Target 32409; HLA-A*25:01; KCNU1; ENSG00000215262; CTA
IQAAFILSSF

SEQ ID NO: 32410 - protein, 10 aa, Homo sapiens
  Table A; Target 32410; HLA-A*26:01; KCNU1; ENSG00000215262; CTA
IQAAFILSSF

SEQ ID NO: 32411 - protein, 10 aa, Homo sapiens
  Table A; Target 32411; HLA-A*30:02; KCNU1; ENSG00000215262; CTA
IQAAFILSSF

SEQ ID NO: 32412 - protein, 10 aa, Homo sapiens
  Table A; Target 32412; HLA-A*32:01; KCNU1; ENSG00000215262; CTA
IQAAFILSSF

SEQ ID NO: 32413 - protein, 10 aa, Homo sapiens
  Table A; Target 32413; HLA-B*15:01; KCNU1; ENSG00000215262; CTA
IQAAFILSSF

SEQ ID NO: 32414 - protein, 10 aa, Homo sapiens
  Table A; Target 32414; HLA-B*15:03; KCNU1; ENSG00000215262; CTA
IQAAFILSSF

SEQ ID NO: 32415 - protein, 10 aa, Homo sapiens
  Table A; Target 32415; HLA-B*46:01; KCNU1; ENSG00000215262; CTA
IQAAFILSSF

SEQ ID NO: 32416 - protein, 10 aa, Homo sapiens
  Table A; Target 32416; HLA-C*02:02; KCNU1; ENSG00000215262; CTA
IQAAFILSSF

SEQ ID NO: 32417 - protein, 10 aa, Homo sapiens
  Table A; Target 32417; HLA-C*07:04; KCNU1; ENSG00000215262; CTA
IQAAFILSSF

SEQ ID NO: 32418 - protein, 10 aa, Homo sapiens
  Table A; Target 32418; HLA-C*16:04; KCNU1; ENSG00000215262; CTA
IQAAFILSSF

SEQ ID NO: 32419 - protein, 11 aa, Homo sapiens
  Table A; Target 32419; HLA-B*15:01; KCNU1; ENSG00000215262; CTA
IQILQSHNKVY

SEQ ID NO: 32420 - protein, 9 aa, Homo sapiens
  Table A; Target 32420; HLA-A*11:01; KCNU1; ENSG00000215262; CTA
ISGQDSPPR

SEQ ID NO: 32421 - protein, 9 aa, Homo sapiens
  Table A; Target 32421; HLA-A*68:01; KCNU1; ENSG00000215262; CTA
ISGQDSPPR

SEQ ID NO: 32422 - protein, 9 aa, Homo sapiens
  Table A; Target 32422; HLA-C*07:06; KCNU1; ENSG00000215262; CTA
ISGQDSPPR

SEQ ID NO: 32423 - protein, 8 aa, Homo sapiens
  Table A; Target 32423; HLA-A*32:01; KCNU1; ENSG00000215262; CTA
ISGSAMKW

SEQ ID NO: 32424 - protein, 8 aa, Homo sapiens
  Table A; Target 32424; HLA-B*57:01; KCNU1; ENSG00000215262; CTA
ISGSAMKW

SEQ ID NO: 32425 - protein, 8 aa, Homo sapiens
  Table A; Target 32425; HLA-B*58:01; KCNU1; ENSG00000215262; CTA
ISGSAMKW

SEQ ID NO: 32426 - protein, 8 aa, Homo sapiens
  Table A; Target 32426; HLA-C*12:03; KCNU1; ENSG00000215262; CTA
ISGSAMKW

SEQ ID NO: 32427 - protein, 9 aa, Homo sapiens
  Table A; Target 32427; HLA-A*32:01; KCNU1; ENSG00000215262; CTA
ISNFTTRTL

SEQ ID NO: 32428 - protein, 9 aa, Homo sapiens
  Table A; Target 32428; HLA-B*46:01; KCNU1; ENSG00000215262; CTA
ISNFTTRTL

SEQ ID NO: 32429 - protein, 9 aa, Homo sapiens
  Table A; Target 32429; HLA-B*57:01; KCNU1; ENSG00000215262; CTA
ISNFTTRTL

SEQ ID NO: 32430 - protein, 9 aa, Homo sapiens
  Table A; Target 32430; HLA-B*58:01; KCNU1; ENSG00000215262; CTA
ISNFTTRTL

SEQ ID NO: 32431 - protein, 9 aa, Homo sapiens
  Table A; Target 32431; HLA-C*01:02; KCNU1; ENSG00000215262; CTA
ISNFTTRTL

SEQ ID NO: 32432 - protein, 9 aa, Homo sapiens
  Table A; Target 32432; HLA-C*03:03; KCNU1; ENSG00000215262; CTA
ISNFTTRTL

SEQ ID NO: 32433 - protein, 9 aa, Homo sapiens
  Table A; Target 32433; HLA-C*03:04; KCNU1; ENSG00000215262; CTA
ISNFTTRTL

SEQ ID NO: 32434 - protein, 9 aa, Homo sapiens
  Table A; Target 32434; HLA-C*06:02; KCNU1; ENSG00000215262; CTA
ISNFTTRTL

SEQ ID NO: 32435 - protein, 9 aa, Homo sapiens
  Table A; Target 32435; HLA-C*12:03; KCNU1; ENSG00000215262; CTA
ISNFTTRTL

SEQ ID NO: 32436 - protein, 9 aa, Homo sapiens
  Table A; Target 32436; HLA-C*14:02; KCNU1; ENSG00000215262; CTA
ISNFTTRTL

SEQ ID NO: 32437 - protein, 9 aa, Homo sapiens
  Table A; Target 32437; HLA-C*16:01; KCNU1; ENSG00000215262; CTA
ISNFTTRTL

SEQ ID NO: 32438 - protein, 9 aa, Homo sapiens
  Table A; Target 32438; HLA-C*16:02; KCNU1; ENSG00000215262; CTA
ISNFTTRTL

SEQ ID NO: 32439 - protein, 8 aa, Homo sapiens
  Table A; Target 32439; HLA-B*08:01; KCNU1; ENSG00000215262; CTA
ISNIMRVL

SEQ ID NO: 32440 - protein, 8 aa, Homo sapiens
  Table A; Target 32440; HLA-C*03:04; KCNU1; ENSG00000215262; CTA
ISNIMRVL

SEQ ID NO: 32441 - protein, 8 aa, Homo sapiens
  Table A; Target 32441; HLA-C*06:02; KCNU1; ENSG00000215262; CTA
ISNIMRVL

SEQ ID NO: 32442 - protein, 8 aa, Homo sapiens
  Table A; Target 32442; HLA-C*12:03; KCNU1; ENSG00000215262; CTA
ISNIMRVL

SEQ ID NO: 32443 - protein, 8 aa, Homo sapiens
  Table A; Target 32443; HLA-C*16:01; KCNU1; ENSG00000215262; CTA
ISNIMRVL

SEQ ID NO: 32444 - protein, 9 aa, Homo sapiens
  Table A; Target 32444; HLA-B*57:01; KCNU1; ENSG00000215262; CTA
ISYYLKSNW

SEQ ID NO: 32445 - protein, 8 aa, Homo sapiens
  Table A; Target 32445; HLA-A*32:01; KCNU1; ENSG00000215262; CTA
ITRPANEF

SEQ ID NO: 32446 - protein, 8 aa, Homo sapiens
  Table A; Target 32446; HLA-B*07:02; KCNU1; ENSG00000215262; CTA
ITRPANEF

SEQ ID NO: 32447 - protein, 8 aa, Homo sapiens
  Table A; Target 32447; HLA-B*15:01; KCNU1; ENSG00000215262; CTA
ITRPANEF

SEQ ID NO: 32448 - protein, 8 aa, Homo sapiens
  Table A; Target 32448; HLA-B*15:03; KCNU1; ENSG00000215262; CTA
ITRPANEF

SEQ ID NO: 32449 - protein, 8 aa, Homo sapiens
  Table A; Target 32449; HLA-B*46:01; KCNU1; ENSG00000215262; CTA
ITRPANEF

SEQ ID NO: 32450 - protein, 8 aa, Homo sapiens
  Table A; Target 32450; HLA-B*57:01; KCNU1; ENSG00000215262; CTA
ITRPANEF

SEQ ID NO: 32451 - protein, 8 aa, Homo sapiens
  Table A; Target 32451; HLA-B*58:01; KCNU1; ENSG00000215262; CTA
ITRPANEF

SEQ ID NO: 32452 - protein, 8 aa, Homo sapiens
  Table A; Target 32452; HLA-C*01:02; KCNU1; ENSG00000215262; CTA
ITRPANEF

SEQ ID NO: 32453 - protein, 8 aa, Homo sapiens
  Table A; Target 32453; HLA-C*07:02; KCNU1; ENSG00000215262; CTA
ITRPANEF

SEQ ID NO: 32454 - protein, 8 aa, Homo sapiens
  Table A; Target 32454; HLA-C*14:02; KCNU1; ENSG00000215262; CTA
ITRPANEF

SEQ ID NO: 32455 - protein, 8 aa, Homo sapiens
  Table A; Target 32455; HLA-C*16:01; KCNU1; ENSG00000215262; CTA
ITRPANEF

SEQ ID NO: 32456 - protein, 10 aa, Homo sapiens
  Table A; Target 32456; HLA-B*57:01; KCNU1; ENSG00000215262; CTA
ITRPANEFKL

SEQ ID NO: 32457 - protein, 9 aa, Homo sapiens
  Table A; Target 32457; HLA-A*23:01; KCNU1; ENSG00000215262; CTA
ITVDSVTAF

SEQ ID NO: 32458 - protein, 9 aa, Homo sapiens
  Table A; Target 32458; HLA-A*24:02; KCNU1; ENSG00000215262; CTA
ITVDSVTAF

SEQ ID NO: 32459 - protein, 9 aa, Homo sapiens
  Table A; Target 32459; HLA-A*25:01; KCNU1; ENSG00000215262; CTA
ITVDSVTAF

SEQ ID NO: 32460 - protein, 9 aa, Homo sapiens
  Table A; Target 32460; HLA-A*26:01; KCNU1; ENSG00000215262; CTA
ITVDSVTAF

SEQ ID NO: 32461 - protein, 9 aa, Homo sapiens
  Table A; Target 32461; HLA-A*29:02; KCNU1; ENSG00000215262; CTA
ITVDSVTAF

SEQ ID NO: 32462 - protein, 9 aa, Homo sapiens
  Table A; Target 32462; HLA-A*30:01; KCNU1; ENSG00000215262; CTA
ITVDSVTAF

SEQ ID NO: 32463 - protein, 9 aa, Homo sapiens
  Table A; Target 32463; HLA-A*30:02; KCNU1; ENSG00000215262; CTA
ITVDSVTAF

SEQ ID NO: 32464 - protein, 9 aa, Homo sapiens
  Table A; Target 32464; HLA-A*32:01; KCNU1; ENSG00000215262; CTA
ITVDSVTAF

SEQ ID NO: 32465 - protein, 9 aa, Homo sapiens
  Table A; Target 32465; HLA-B*15:01; KCNU1; ENSG00000215262; CTA
ITVDSVTAF

SEQ ID NO: 32466 - protein, 9 aa, Homo sapiens
  Table A; Target 32466; HLA-B*15:03; KCNU1; ENSG00000215262; CTA
ITVDSVTAF

SEQ ID NO: 32467 - protein, 9 aa, Homo sapiens
  Table A; Target 32467; HLA-B*18:01; KCNU1; ENSG00000215262; CTA
ITVDSVTAF

SEQ ID NO: 32468 - protein, 9 aa, Homo sapiens
  Table A; Target 32468; HLA-B*35:01; KCNU1; ENSG00000215262; CTA
ITVDSVTAF

SEQ ID NO: 32469 - protein, 9 aa, Homo sapiens
  Table A; Target 32469; HLA-B*39:01; KCNU1; ENSG00000215262; CTA
ITVDSVTAF

SEQ ID NO: 32470 - protein, 9 aa, Homo sapiens
  Table A; Target 32470; HLA-B*46:01; KCNU1; ENSG00000215262; CTA
ITVDSVTAF

SEQ ID NO: 32471 - protein, 9 aa, Homo sapiens
  Table A; Target 32471; HLA-B*57:01; KCNU1; ENSG00000215262; CTA
ITVDSVTAF

SEQ ID NO: 32472 - protein, 9 aa, Homo sapiens
  Table A; Target 32472; HLA-B*58:01; KCNU1; ENSG00000215262; CTA
ITVDSVTAF

SEQ ID NO: 32473 - protein, 9 aa, Homo sapiens
  Table A; Target 32473; HLA-C*01:02; KCNU1; ENSG00000215262; CTA
ITVDSVTAF

SEQ ID NO: 32474 - protein, 9 aa, Homo sapiens
  Table A; Target 32474; HLA-C*02:02; KCNU1; ENSG00000215262; CTA
ITVDSVTAF

SEQ ID NO: 32475 - protein, 9 aa, Homo sapiens
  Table A; Target 32475; HLA-C*03:03; KCNU1; ENSG00000215262; CTA
ITVDSVTAF

SEQ ID NO: 32476 - protein, 9 aa, Homo sapiens
  Table A; Target 32476; HLA-C*03:04; KCNU1; ENSG00000215262; CTA
ITVDSVTAF

SEQ ID NO: 32477 - protein, 9 aa, Homo sapiens
  Table A; Target 32477; HLA-C*05:01; KCNU1; ENSG00000215262; CTA
ITVDSVTAF

SEQ ID NO: 32478 - protein, 9 aa, Homo sapiens
  Table A; Target 32478; HLA-C*07:04; KCNU1; ENSG00000215262; CTA
ITVDSVTAF

SEQ ID NO: 32479 - protein, 9 aa, Homo sapiens
  Table A; Target 32479; HLA-C*07:06; KCNU1; ENSG00000215262; CTA
ITVDSVTAF

SEQ ID NO: 32480 - protein, 9 aa, Homo sapiens
  Table A; Target 32480; HLA-C*12:03; KCNU1; ENSG00000215262; CTA
ITVDSVTAF

SEQ ID NO: 32481 - protein, 9 aa, Homo sapiens
  Table A; Target 32481; HLA-C*14:02; KCNU1; ENSG00000215262; CTA
ITVDSVTAF

SEQ ID NO: 32482 - protein, 9 aa, Homo sapiens
  Table A; Target 32482; HLA-C*16:01; KCNU1; ENSG00000215262; CTA
ITVDSVTAF

SEQ ID NO: 32483 - protein, 9 aa, Homo sapiens
  Table A; Target 32483; HLA-C*16:04; KCNU1; ENSG00000215262; CTA
ITVDSVTAF

SEQ ID NO: 32484 - protein, 10 aa, Homo sapiens
  Table A; Target 32484; HLA-A*68:02; KCNU1; ENSG00000215262; CTA
ITVDSVTAFL

SEQ ID NO: 32485 - protein, 11 aa, Homo sapiens
  Table A; Target 32485; HLA-A*11:01; KCNU1; ENSG00000215262; CTA
ITVDSVTAFLR

SEQ ID NO: 32486 - protein, 11 aa, Homo sapiens
  Table A; Target 32486; HLA-A*31:01; KCNU1; ENSG00000215262; CTA
ITVDSVTAFLR

SEQ ID NO: 32487 - protein, 11 aa, Homo sapiens
  Table A; Target 32487; HLA-A*33:03; KCNU1; ENSG00000215262; CTA
ITVDSVTAFLR

SEQ ID NO: 32488 - protein, 11 aa, Homo sapiens
  Table A; Target 32488; HLA-A*68:01; KCNU1; ENSG00000215262; CTA
ITVDSVTAFLR

SEQ ID NO: 32489 - protein, 11 aa, Homo sapiens
  Table A; Target 32489; HLA-B*27:02; KCNU1; ENSG00000215262; CTA
ITVDSVTAFLR

SEQ ID NO: 32490 - protein, 11 aa, Homo sapiens
  Table A; Target 32490; HLA-C*07:06; KCNU1; ENSG00000215262; CTA
ITVDSVTAFLR

SEQ ID NO: 32491 - protein, 9 aa, Homo sapiens
  Table A; Target 32491; HLA-A*26:01; KCNU1; ENSG00000215262; CTA
ITVPSVKRM

SEQ ID NO: 32492 - protein, 9 aa, Homo sapiens
  Table A; Target 32492; HLA-B*57:01; KCNU1; ENSG00000215262; CTA
ITVPSVKRM

SEQ ID NO: 32493 - protein, 9 aa, Homo sapiens
  Table A; Target 32493; HLA-B*58:01; KCNU1; ENSG00000215262; CTA
ITVPSVKRM

SEQ ID NO: 32494 - protein, 9 aa, Homo sapiens
  Table A; Target 32494; HLA-C*12:03; KCNU1; ENSG00000215262; CTA
ITVPSVKRM

SEQ ID NO: 32495 - protein, 9 aa, Homo sapiens
  Table A; Target 32495; HLA-C*16:01; KCNU1; ENSG00000215262; CTA
ITVPSVKRM

SEQ ID NO: 32496 - protein, 9 aa, Homo sapiens
  Table A; Target 32496; HLA-C*16:02; KCNU1; ENSG00000215262; CTA
ITVPSVKRM

SEQ ID NO: 32497 - protein, 9 aa, Homo sapiens
  Table A; Target 32497; HLA-A*01:01; KCNU1; ENSG00000215262; CTA
IVFIGSLDY

SEQ ID NO: 32498 - protein, 9 aa, Homo sapiens
  Table A; Target 32498; HLA-A*26:01; KCNU1; ENSG00000215262; CTA
IVFIGSLDY

SEQ ID NO: 32499 - protein, 9 aa, Homo sapiens
  Table A; Target 32499; HLA-A*29:02; KCNU1; ENSG00000215262; CTA
IVFIGSLDY

SEQ ID NO: 32500 - protein, 9 aa, Homo sapiens
  Table A; Target 32500; HLA-A*30:02; KCNU1; ENSG00000215262; CTA
IVFIGSLDY

SEQ ID NO: 32501 - protein, 9 aa, Homo sapiens
  Table A; Target 32501; HLA-B*15:01; KCNU1; ENSG00000215262; CTA
IVFIGSLDY

SEQ ID NO: 32502 - protein, 9 aa, Homo sapiens
  Table A; Target 32502; HLA-B*15:03; KCNU1; ENSG00000215262; CTA
IVFIGSLDY

SEQ ID NO: 32503 - protein, 9 aa, Homo sapiens
  Table A; Target 32503; HLA-B*35:01; KCNU1; ENSG00000215262; CTA
IVFIGSLDY

SEQ ID NO: 32504 - protein, 9 aa, Homo sapiens
  Table A; Target 32504; HLA-B*46:01; KCNU1; ENSG00000215262; CTA
IVFIGSLDY

SEQ ID NO: 32505 - protein, 9 aa, Homo sapiens
  Table A; Target 32505; HLA-C*02:02; KCNU1; ENSG00000215262; CTA
IVFIGSLDY

SEQ ID NO: 32506 - protein, 10 aa, Homo sapiens
  Table A; Target 32506; HLA-A*68:02; KCNU1; ENSG00000215262; CTA
IVFIGSLDYL

SEQ ID NO: 32507 - protein, 11 aa, Homo sapiens
  Table A; Target 32507; HLA-C*01:02; KCNU1; ENSG00000215262; CTA
IVFLGETPPSL

SEQ ID NO: 32508 - protein, 9 aa, Homo sapiens
  Table A; Target 32508; HLA-A*23:01; KCNU1; ENSG00000215262; CTA
IYILPGCAL

SEQ ID NO: 32509 - protein, 9 aa, Homo sapiens
  Table A; Target 32509; HLA-A*24:02; KCNU1; ENSG00000215262; CTA
IYILPGCAL

SEQ ID NO: 32510 - protein, 9 aa, Homo sapiens
  Table A; Target 32510; HLA-C*01:02; KCNU1; ENSG00000215262; CTA
IYILPGCAL

SEQ ID NO: 32511 - protein, 9 aa, Homo sapiens
  Table A; Target 32511; HLA-C*03:03; KCNU1; ENSG00000215262; CTA
IYILPGCAL

SEQ ID NO: 32512 - protein, 9 aa, Homo sapiens
  Table A; Target 32512; HLA-C*03:04; KCNU1; ENSG00000215262; CTA
IYILPGCAL

SEQ ID NO: 32513 - protein, 9 aa, Homo sapiens
  Table A; Target 32513; HLA-C*14:02; KCNU1; ENSG00000215262; CTA
IYILPGCAL

SEQ ID NO: 32514 - protein, 10 aa, Homo sapiens
  Table A; Target 32514; HLA-A*24:02; KCNU1; ENSG00000215262; CTA
IYILPGCALY

SEQ ID NO: 32515 - protein, 10 aa, Homo sapiens
  Table A; Target 32515; HLA-A*29:02; KCNU1; ENSG00000215262; CTA
IYILPGCALY

SEQ ID NO: 32516 - protein, 9 aa, Homo sapiens
  Table A; Target 32516; HLA-A*23:01; KCNU1; ENSG00000215262; CTA
IYLVMATTS

SEQ ID NO: 32517 - protein, 9 aa, Homo sapiens
  Table A; Target 32517; HLA-C*14:02; KCNU1; ENSG00000215262; CTA
IYLVMATTS

SEQ ID NO: 32518 - protein, 9 aa, Homo sapiens
  Table A; Target 32518; HLA-A*32:01; KCNU1; ENSG00000215262; CTA
KASQTTETH

SEQ ID NO: 32519 - protein, 9 aa, Homo sapiens
  Table A; Target 32519; HLA-B*58:01; KCNU1; ENSG00000215262; CTA
KASQTTETH

SEQ ID NO: 32520 - protein, 8 aa, Homo sapiens
  Table A; Target 32520; HLA-B*37:01; KCNU1; ENSG00000215262; CTA
KELKDIVF

SEQ ID NO: 32521 - protein, 9 aa, Homo sapiens
  Table A; Target 32521; HLA-B*40:01; KCNU1; ENSG00000215262; CTA
KELKDIVFI

SEQ ID NO: 32522 - protein, 9 aa, Homo sapiens
  Table A; Target 32522; HLA-B*44:02; KCNU1; ENSG00000215262; CTA
KELKDIVFI

SEQ ID NO: 32523 - protein, 9 aa, Homo sapiens
  Table A; Target 32523; HLA-B*49:01; KCNU1; ENSG00000215262; CTA
KELKDIVFI

SEQ ID NO: 32524 - protein, 10 aa, Homo sapiens
  Table A; Target 32524; HLA-A*30:02; KCNU1; ENSG00000215262; CTA
KGRNSQNISY

SEQ ID NO: 32525 - protein, 10 aa, Homo sapiens
  Table A; Target 32525; HLA-B*46:01; KCNU1; ENSG00000215262; CTA
KGRNSQNISY

SEQ ID NO: 32526 - protein, 9 aa, Homo sapiens
  Table A; Target 32526; HLA-C*16:02; KCNU1; ENSG00000215262; CTA
KGTGIILEL

SEQ ID NO: 32527 - protein, 9 aa, Homo sapiens
  Table A; Target 32527; HLA-A*02:04; KCNU1; ENSG00000215262; CTA
KLLPSDLVF

SEQ ID NO: 32528 - protein, 9 aa, Homo sapiens
  Table A; Target 32528; HLA-A*23:01; KCNU1; ENSG00000215262; CTA
KLLPSDLVF

SEQ ID NO: 32529 - protein, 9 aa, Homo sapiens
  Table A; Target 32529; HLA-A*29:02; KCNU1; ENSG00000215262; CTA
KLLPSDLVF

SEQ ID NO: 32530 - protein, 9 aa, Homo sapiens
  Table A; Target 32530; HLA-B*15:01; KCNU1; ENSG00000215262; CTA
KLLPSDLVF

SEQ ID NO: 32531 - protein, 9 aa, Homo sapiens
  Table A; Target 32531; HLA-B*57:01; KCNU1; ENSG00000215262; CTA
KLLPSDLVF

SEQ ID NO: 32532 - protein, 10 aa, Homo sapiens
  Table A; Target 32532; HLA-A*02:01; KCNU1; ENSG00000215262; CTA
KLLPSDLVFC

SEQ ID NO: 32533 - protein, 10 aa, Homo sapiens
  Table A; Target 32533; HLA-A*02:04; KCNU1; ENSG00000215262; CTA
KLLPSDLVFC

SEQ ID NO: 32534 - protein, 9 aa, Homo sapiens
  Table A; Target 32534; HLA-A*02:04; KCNU1; ENSG00000215262; CTA
KLLSIILST

SEQ ID NO: 32535 - protein, 10 aa, Homo sapiens
  Table A; Target 32535; HLA-A*02:04; KCNU1; ENSG00000215262; CTA
KLLSIILSTW

SEQ ID NO: 32536 - protein, 10 aa, Homo sapiens
  Table A; Target 32536; HLA-B*57:01; KCNU1; ENSG00000215262; CTA
KLLSIILSTW

SEQ ID NO: 32537 - protein, 9 aa, Homo sapiens
  Table A; Target 32537; HLA-C*07:02; KCNU1; ENSG00000215262; CTA
KNKILTQRL

SEQ ID NO: 32538 - protein, 9 aa, Homo sapiens
  Table A; Target 32538; HLA-A*02:07; KCNU1; ENSG00000215262; CTA
KNPSNIHFI

SEQ ID NO: 32539 - protein, 9 aa, Homo sapiens
  Table A; Target 32539; HLA-A*24:02; KCNU1; ENSG00000215262; CTA
KNPSNIHFI

SEQ ID NO: 32540 - protein, 9 aa, Homo sapiens
  Table A; Target 32540; HLA-A*23:01; KCNU1; ENSG00000215262; CTA
KNYDSTTRI

SEQ ID NO: 32541 - protein, 8 aa, Homo sapiens
  Table A; Target 32541; HLA-B*56:01; KCNU1; ENSG00000215262; CTA
KPTSLDKV

SEQ ID NO: 32542 - protein, 10 aa, Homo sapiens
  Table A; Target 32542; HLA-B*07:02; KCNU1; ENSG00000215262; CTA
KPTSLDKVTL

SEQ ID NO: 32543 - protein, 10 aa, Homo sapiens
  Table A; Target 32543; HLA-B*35:01; KCNU1; ENSG00000215262; CTA
KPTSLDKVTL

SEQ ID NO: 32544 - protein, 10 aa, Homo sapiens
  Table A; Target 32544; HLA-B*35:03; KCNU1; ENSG00000215262; CTA
KPTSLDKVTL

SEQ ID NO: 32545 - protein, 10 aa, Homo sapiens
  Table A; Target 32545; HLA-B*40:01; KCNU1; ENSG00000215262; CTA
KPTSLDKVTL

SEQ ID NO: 32546 - protein, 10 aa, Homo sapiens
  Table A; Target 32546; HLA-B*40:02; KCNU1; ENSG00000215262; CTA
KPTSLDKVTL

SEQ ID NO: 32547 - protein, 10 aa, Homo sapiens
  Table A; Target 32547; HLA-B*55:01; KCNU1; ENSG00000215262; CTA
KPTSLDKVTL

SEQ ID NO: 32548 - protein, 10 aa, Homo sapiens
  Table A; Target 32548; HLA-B*56:01; KCNU1; ENSG00000215262; CTA
KPTSLDKVTL

SEQ ID NO: 32549 - protein, 10 aa, Homo sapiens
  Table A; Target 32549; HLA-C*07:02; KCNU1; ENSG00000215262; CTA
KPTSLDKVTL

SEQ ID NO: 32550 - protein, 11 aa, Homo sapiens
  Table A; Target 32550; HLA-A*03:02; KCNU1; ENSG00000215262; CTA
KPTSLDKVTLK

SEQ ID NO: 32551 - protein, 9 aa, Homo sapiens
  Table A; Target 32551; HLA-A*31:01; KCNU1; ENSG00000215262; CTA
KQIAWNQSR

SEQ ID NO: 32552 - protein, 9 aa, Homo sapiens
  Table A; Target 32552; HLA-B*58:01; KCNU1; ENSG00000215262; CTA
KSGEINTEI

SEQ ID NO: 32553 - protein, 8 aa, Homo sapiens
  Table A; Target 32553; HLA-B*58:01; KCNU1; ENSG00000215262; CTA
KSLFTDGF

SEQ ID NO: 32554 - protein, 9 aa, Homo sapiens
  Table A; Target 32554; HLA-B*57:01; KCNU1; ENSG00000215262; CTA
KSNWLGLRF

SEQ ID NO: 32555 - protein, 8 aa, Homo sapiens
  Table A; Target 32555; HLA-A*03:01; KCNU1; ENSG00000215262; CTA
KSYEIVNK

SEQ ID NO: 32556 - protein, 8 aa, Homo sapiens
  Table A; Target 32556; HLA-A*03:02; KCNU1; ENSG00000215262; CTA
KSYEIVNK

SEQ ID NO: 32557 - protein, 8 aa, Homo sapiens
  Table A; Target 32557; HLA-A*11:01; KCNU1; ENSG00000215262; CTA
KSYEIVNK

SEQ ID NO: 32558 - protein, 8 aa, Homo sapiens
  Table A; Target 32558; HLA-A*31:01; KCNU1; ENSG00000215262; CTA
KSYEIVNK

SEQ ID NO: 32559 - protein, 9 aa, Homo sapiens
  Table A; Target 32559; HLA-B*40:02; KCNU1; ENSG00000215262; CTA
KSYEIVNKA

SEQ ID NO: 32560 - protein, 9 aa, Homo sapiens
  Table A; Target 32560; HLA-B*56:01; KCNU1; ENSG00000215262; CTA
KSYEIVNKA

SEQ ID NO: 32561 - protein, 9 aa, Homo sapiens
  Table A; Target 32561; HLA-B*58:01; KCNU1; ENSG00000215262; CTA
KSYEIVNKA

SEQ ID NO: 32562 - protein, 9 aa, Homo sapiens
  Table A; Target 32562; HLA-C*12:03; KCNU1; ENSG00000215262; CTA
KSYEIVNKA

SEQ ID NO: 32563 - protein, 9 aa, Homo sapiens
  Table A; Target 32563; HLA-C*16:02; KCNU1; ENSG00000215262; CTA
KSYEIVNKA

SEQ ID NO: 32564 - protein, 9 aa, Homo sapiens
  Table A; Target 32564; HLA-A*23:01; KCNU1; ENSG00000215262; CTA
KTIPIDLVF

SEQ ID NO: 32565 - protein, 9 aa, Homo sapiens
  Table A; Target 32565; HLA-A*24:02; KCNU1; ENSG00000215262; CTA
KTIPIDLVF

SEQ ID NO: 32566 - protein, 9 aa, Homo sapiens
  Table A; Target 32566; HLA-A*29:02; KCNU1; ENSG00000215262; CTA
KTIPIDLVF

SEQ ID NO: 32567 - protein, 9 aa, Homo sapiens
  Table A; Target 32567; HLA-A*32:01; KCNU1; ENSG00000215262; CTA
KTIPIDLVF

SEQ ID NO: 32568 - protein, 9 aa, Homo sapiens
  Table A; Target 32568; HLA-B*15:01; KCNU1; ENSG00000215262; CTA
KTIPIDLVF

SEQ ID NO: 32569 - protein, 9 aa, Homo sapiens
  Table A; Target 32569; HLA-B*44:03; KCNU1; ENSG00000215262; CTA
KTIPIDLVF

SEQ ID NO: 32570 - protein, 9 aa, Homo sapiens
  Table A; Target 32570; HLA-B*57:01; KCNU1; ENSG00000215262; CTA
KTIPIDLVF

SEQ ID NO: 32571 - protein, 9 aa, Homo sapiens
  Table A; Target 32571; HLA-B*58:01; KCNU1; ENSG00000215262; CTA
KTIPIDLVF

SEQ ID NO: 32572 - protein, 9 aa, Homo sapiens
  Table A; Target 32572; HLA-C*02:02; KCNU1; ENSG00000215262; CTA
KTIPIDLVF

SEQ ID NO: 32573 - protein, 9 aa, Homo sapiens
  Table A; Target 32573; HLA-C*03:04; KCNU1; ENSG00000215262; CTA
KTIPIDLVF

SEQ ID NO: 32574 - protein, 8 aa, Homo sapiens
  Table A; Target 32574; HLA-C*16:01; KCNU1; ENSG00000215262; CTA
KTSLGRTF

SEQ ID NO: 32575 - protein, 8 aa, Homo sapiens
  Table A; Target 32575; HLA-A*32:01; KCNU1; ENSG00000215262; CTA
KTSNSVKF

SEQ ID NO: 32576 - protein, 8 aa, Homo sapiens
  Table A; Target 32576; HLA-B*37:01; KCNU1; ENSG00000215262; CTA
KTSNSVKF

SEQ ID NO: 32577 - protein, 8 aa, Homo sapiens
  Table A; Target 32577; HLA-B*58:01; KCNU1; ENSG00000215262; CTA
KTSNSVKF

SEQ ID NO: 32578 - protein, 8 aa, Homo sapiens
  Table A; Target 32578; HLA-C*16:01; KCNU1; ENSG00000215262; CTA
KTSNSVKF

SEQ ID NO: 32579 - protein, 10 aa, Homo sapiens
  Table A; Target 32579; HLA-A*03:01; KCNU1; ENSG00000215262; CTA
KTSNSVKFSK

SEQ ID NO: 32580 - protein, 10 aa, Homo sapiens
  Table A; Target 32580; HLA-A*03:02; KCNU1; ENSG00000215262; CTA
KTSNSVKFSK

SEQ ID NO: 32581 - protein, 10 aa, Homo sapiens
  Table A; Target 32581; HLA-A*11:01; KCNU1; ENSG00000215262; CTA
KTSNSVKFSK

SEQ ID NO: 32582 - protein, 8 aa, Homo sapiens
  Table A; Target 32582; HLA-A*32:01; KCNU1; ENSG00000215262; CTA
KVMPKQTW

SEQ ID NO: 32583 - protein, 8 aa, Homo sapiens
  Table A; Target 32583; HLA-B*08:01; KCNU1; ENSG00000215262; CTA
KVMPKQTW

SEQ ID NO: 32584 - protein, 8 aa, Homo sapiens
  Table A; Target 32584; HLA-B*57:01; KCNU1; ENSG00000215262; CTA
KVMPKQTW

SEQ ID NO: 32585 - protein, 8 aa, Homo sapiens
  Table A; Target 32585; HLA-B*58:01; KCNU1; ENSG00000215262; CTA
KVMPKQTW

SEQ ID NO: 32586 - protein, 9 aa, Homo sapiens
  Table A; Target 32586; HLA-A*03:01; KCNU1; ENSG00000215262; CTA
KVMPKQTWK

SEQ ID NO: 32587 - protein, 9 aa, Homo sapiens
  Table A; Target 32587; HLA-A*03:02; KCNU1; ENSG00000215262; CTA
KVMPKQTWK

SEQ ID NO: 32588 - protein, 9 aa, Homo sapiens
  Table A; Target 32588; HLA-A*11:01; KCNU1; ENSG00000215262; CTA
KVMPKQTWK

SEQ ID NO: 32589 - protein, 8 aa, Homo sapiens
  Table A; Target 32589; HLA-A*02:07; KCNU1; ENSG00000215262; CTA
KVPILTEL

SEQ ID NO: 32590 - protein, 8 aa, Homo sapiens
  Table A; Target 32590; HLA-C*01:02; KCNU1; ENSG00000215262; CTA
KVPILTEL

SEQ ID NO: 32591 - protein, 9 aa, Homo sapiens
  Table A; Target 32591; HLA-A*03:01; KCNU1; ENSG00000215262; CTA
KVPILTELK

SEQ ID NO: 32592 - protein, 9 aa, Homo sapiens
  Table A; Target 32592; HLA-A*03:02; KCNU1; ENSG00000215262; CTA
KVPILTELK

SEQ ID NO: 32593 - protein, 10 aa, Homo sapiens
  Table A; Target 32593; HLA-A*25:01; KCNU1; ENSG00000215262; CTA
KVYLPKIPSW

SEQ ID NO: 32594 - protein, 10 aa, Homo sapiens
  Table A; Target 32594; HLA-B*57:01; KCNU1; ENSG00000215262; CTA
KVYLPKIPSW

SEQ ID NO: 32595 - protein, 9 aa, Homo sapiens
  Table A; Target 32595; HLA-A*23:01; KCNU1; ENSG00000215262; CTA
KYTSSYEAL

SEQ ID NO: 32596 - protein, 9 aa, Homo sapiens
  Table A; Target 32596; HLA-A*24:02; KCNU1; ENSG00000215262; CTA
KYTSSYEAL

SEQ ID NO: 32597 - protein, 9 aa, Homo sapiens
  Table A; Target 32597; HLA-C*01:02; KCNU1; ENSG00000215262; CTA
KYTSSYEAL

SEQ ID NO: 32598 - protein, 9 aa, Homo sapiens
  Table A; Target 32598; HLA-C*14:02; KCNU1; ENSG00000215262; CTA
KYTSSYEAL

SEQ ID NO: 32599 - protein, 9 aa, Homo sapiens
  Table A; Target 32599; HLA-A*02:03; KCNU1; ENSG00000215262; CTA
LDKDKVYGV

SEQ ID NO: 32600 - protein, 9 aa, Homo sapiens
  Table A; Target 32600; HLA-B*37:01; KCNU1; ENSG00000215262; CTA
LDKDKVYGV

SEQ ID NO: 32601 - protein, 9 aa, Homo sapiens
  Table A; Target 32601; HLA-B*18:01; KCNU1; ENSG00000215262; CTA
LDSLLATAF

SEQ ID NO: 32602 - protein, 9 aa, Homo sapiens
  Table A; Target 32602; HLA-B*37:01; KCNU1; ENSG00000215262; CTA
LDSLLATAF

SEQ ID NO: 32603 - protein, 9 aa, Homo sapiens
  Table A; Target 32603; HLA-B*40:02; KCNU1; ENSG00000215262; CTA
LDSLLATAF

SEQ ID NO: 32604 - protein, 9 aa, Homo sapiens
  Table A; Target 32604; HLA-B*44:02; KCNU1; ENSG00000215262; CTA
LDSLLATAF

SEQ ID NO: 32605 - protein, 10 aa, Homo sapiens
  Table A; Target 32605; HLA-A*30:01; KCNU1; ENSG00000215262; CTA
LEGSLQETNL

SEQ ID NO: 32606 - protein, 10 aa, Homo sapiens
  Table A; Target 32606; HLA-B*40:01; KCNU1; ENSG00000215262; CTA
LEGSLQETNL

SEQ ID NO: 32607 - protein, 10 aa, Homo sapiens
  Table A; Target 32607; HLA-B*44:02; KCNU1; ENSG00000215262; CTA
LELETIFKCY

SEQ ID NO: 32608 - protein, 10 aa, Homo sapiens
  Table A; Target 32608; HLA-B*44:03; KCNU1; ENSG00000215262; CTA
LELETIFKCY

SEQ ID NO: 32609 - protein, 9 aa, Homo sapiens
  Table A; Target 32609; HLA-B*49:01; KCNU1; ENSG00000215262; CTA
LELFTSGTI

SEQ ID NO: 32610 - protein, 8 aa, Homo sapiens
  Table A; Target 32610; HLA-B*49:01; KCNU1; ENSG00000215262; CTA
LELLQMLV

SEQ ID NO: 32611 - protein, 9 aa, Homo sapiens
  Table A; Target 32611; HLA-A*23:01; KCNU1; ENSG00000215262; CTA
LELPQILQI

SEQ ID NO: 32612 - protein, 9 aa, Homo sapiens
  Table A; Target 32612; HLA-A*30:01; KCNU1; ENSG00000215262; CTA
LELPQILQI

SEQ ID NO: 32613 - protein, 9 aa, Homo sapiens
  Table A; Target 32613; HLA-B*13:02; KCNU1; ENSG00000215262; CTA
LELPQILQI

SEQ ID NO: 32614 - protein, 9 aa, Homo sapiens
  Table A; Target 32614; HLA-B*18:01; KCNU1; ENSG00000215262; CTA
LELPQILQI

SEQ ID NO: 32615 - protein, 9 aa, Homo sapiens
  Table A; Target 32615; HLA-B*40:01; KCNU1; ENSG00000215262; CTA
LELPQILQI

SEQ ID NO: 32616 - protein, 9 aa, Homo sapiens
  Table A; Target 32616; HLA-B*44:02; KCNU1; ENSG00000215262; CTA
LELPQILQI

SEQ ID NO: 32617 - protein, 9 aa, Homo sapiens
  Table A; Target 32617; HLA-B*44:03; KCNU1; ENSG00000215262; CTA
LELPQILQI

SEQ ID NO: 32618 - protein, 9 aa, Homo sapiens
  Table A; Target 32618; HLA-B*49:01; KCNU1; ENSG00000215262; CTA
LELPQILQI

SEQ ID NO: 32619 - protein, 9 aa, Homo sapiens
  Table A; Target 32619; HLA-B*51:01; KCNU1; ENSG00000215262; CTA
LELPQILQI

SEQ ID NO: 32620 - protein, 10 aa, Homo sapiens
  Table A; Target 32620; HLA-A*30:01; KCNU1; ENSG00000215262; CTA
LELPQILQIL

SEQ ID NO: 32621 - protein, 10 aa, Homo sapiens
  Table A; Target 32621; HLA-B*40:01; KCNU1; ENSG00000215262; CTA
LELPQILQIL

SEQ ID NO: 32622 - protein, 10 aa, Homo sapiens
  Table A; Target 32622; HLA-B*44:02; KCNU1; ENSG00000215262; CTA
LELPQILQIL

SEQ ID NO: 32623 - protein, 9 aa, Homo sapiens
  Table A; Target 32623; HLA-A*30:01; KCNU1; ENSG00000215262; CTA
LEMNSIVDI

SEQ ID NO: 32624 - protein, 9 aa, Homo sapiens
  Table A; Target 32624; HLA-B*40:01; KCNU1; ENSG00000215262; CTA
LEMNSIVDI

SEQ ID NO: 32625 - protein, 9 aa, Homo sapiens
  Table A; Target 32625; HLA-B*44:02; KCNU1; ENSG00000215262; CTA
LEMNSIVDI

SEQ ID NO: 32626 - protein, 9 aa, Homo sapiens
  Table A; Target 32626; HLA-B*49:01; KCNU1; ENSG00000215262; CTA
LEMNSIVDI

SEQ ID NO: 32627 - protein, 10 aa, Homo sapiens
  Table A; Target 32627; HLA-B*44:02; KCNU1; ENSG00000215262; CTA
LEMNSIVDIF

SEQ ID NO: 32628 - protein, 8 aa, Homo sapiens
  Table A; Target 32628; HLA-B*18:01; KCNU1; ENSG00000215262; CTA
LETIFKCY

SEQ ID NO: 32629 - protein, 9 aa, Homo sapiens
  Table A; Target 32629; HLA-A*23:01; KCNU1; ENSG00000215262; CTA
LFANYIPEM

SEQ ID NO: 32630 - protein, 9 aa, Homo sapiens
  Table A; Target 32630; HLA-A*24:02; KCNU1; ENSG00000215262; CTA
LFANYIPEM

SEQ ID NO: 32631 - protein, 9 aa, Homo sapiens
  Table A; Target 32631; HLA-A*33:01; KCNU1; ENSG00000215262; CTA
LFTSGTIAR

SEQ ID NO: 32632 - protein, 9 aa, Homo sapiens
  Table A; Target 32632; HLA-A*33:03; KCNU1; ENSG00000215262; CTA
LFTSGTIAR

SEQ ID NO: 32633 - protein, 8 aa, Homo sapiens
  Table A; Target 32633; HLA-C*05:01; KCNU1; ENSG00000215262; CTA
LGETPPSL

SEQ ID NO: 32634 - protein, 9 aa, Homo sapiens
  Table A; Target 32634; HLA-A*02:04; KCNU1; ENSG00000215262; CTA
LIILLIFRL

SEQ ID NO: 32635 - protein, 9 aa, Homo sapiens
  Table A; Target 32635; HLA-B*54:01; KCNU1; ENSG00000215262; CTA
LIIYFINSA

SEQ ID NO: 32636 - protein, 9 aa, Homo sapiens
  Table A; Target 32636; HLA-A*02:01; KCNU1; ENSG00000215262; CTA
LILNPPPQV

SEQ ID NO: 32637 - protein, 9 aa, Homo sapiens
  Table A; Target 32637; HLA-A*02:03; KCNU1; ENSG00000215262; CTA
LILNPPPQV

SEQ ID NO: 32638 - protein, 9 aa, Homo sapiens
  Table A; Target 32638; HLA-A*02:04; KCNU1; ENSG00000215262; CTA
LILNPPPQV

SEQ ID NO: 32639 - protein, 9 aa, Homo sapiens
  Table A; Target 32639; HLA-A*02:07; KCNU1; ENSG00000215262; CTA
LILNPPPQV

SEQ ID NO: 32640 - protein, 9 aa, Homo sapiens
  Table A; Target 32640; HLA-B*15:03; KCNU1; ENSG00000215262; CTA
LKNPSNIHF

SEQ ID NO: 32641 - protein, 9 aa, Homo sapiens
  Table A; Target 32641; HLA-A*01:01; KCNU1; ENSG00000215262; CTA
LLATAFYNY

SEQ ID NO: 32642 - protein, 9 aa, Homo sapiens
  Table A; Target 32642; HLA-A*03:01; KCNU1; ENSG00000215262; CTA
LLATAFYNY

SEQ ID NO: 32643 - protein, 9 aa, Homo sapiens
  Table A; Target 32643; HLA-A*29:02; KCNU1; ENSG00000215262; CTA
LLATAFYNY

SEQ ID NO: 32644 - protein, 9 aa, Homo sapiens
  Table A; Target 32644; HLA-A*30:02; KCNU1; ENSG00000215262; CTA
LLATAFYNY

SEQ ID NO: 32645 - protein, 8 aa, Homo sapiens
  Table A; Target 32645; HLA-A*29:02; KCNU1; ENSG00000215262; CTA
LLLIAIEY

SEQ ID NO: 32646 - protein, 8 aa, Homo sapiens
  Table A; Target 32646; HLA-B*46:01; KCNU1; ENSG00000215262; CTA
LLLIAIEY

SEQ ID NO: 32647 - protein, 8 aa, Homo sapiens
  Table A; Target 32647; HLA-C*07:01; KCNU1; ENSG00000215262; CTA
LLLIAIEY

SEQ ID NO: 32648 - protein, 9 aa, Homo sapiens
  Table A; Target 32648; HLA-A*02:01; KCNU1; ENSG00000215262; CTA
LLPSDLVFC

SEQ ID NO: 32649 - protein, 9 aa, Homo sapiens
  Table A; Target 32649; HLA-A*02:07; KCNU1; ENSG00000215262; CTA
LLPSDLVFC

SEQ ID NO: 32650 - protein, 11 aa, Homo sapiens
  Table A; Target 32650; HLA-A*02:07; KCNU1; ENSG00000215262; CTA
LLPSDLVFCAI

SEQ ID NO: 32651 - protein, 9 aa, Homo sapiens
  Table A; Target 32651; HLA-C*07:04; KCNU1; ENSG00000215262; CTA
LLQMLVTGG

SEQ ID NO: 32652 - protein, 9 aa, Homo sapiens
  Table A; Target 32652; HLA-B*44:02; KCNU1; ENSG00000215262; CTA
LLSIILSTW

SEQ ID NO: 32653 - protein, 9 aa, Homo sapiens
  Table A; Target 32653; HLA-B*57:01; KCNU1; ENSG00000215262; CTA
LLSIILSTW

SEQ ID NO: 32654 - protein, 9 aa, Homo sapiens
  Table A; Target 32654; HLA-A*02:04; KCNU1; ENSG00000215262; CTA
LLSLHETIL

SEQ ID NO: 32655 - protein, 8 aa, Homo sapiens
  Table A; Target 32655; HLA-B*51:01; KCNU1; ENSG00000215262; CTA
LPQILQIL

SEQ ID NO: 32656 - protein, 10 aa, Homo sapiens
  Table A; Target 32656; HLA-B*54:01; KCNU1; ENSG00000215262; CTA
LPQILQILRA

SEQ ID NO: 32657 - protein, 10 aa, Homo sapiens
  Table A; Target 32657; HLA-B*56:01; KCNU1; ENSG00000215262; CTA
LPQILQILRA

SEQ ID NO: 32658 - protein, 9 aa, Homo sapiens
  Table A; Target 32658; HLA-B*35:03; KCNU1; ENSG00000215262; CTA
LPSDLVFCA

SEQ ID NO: 32659 - protein, 9 aa, Homo sapiens
  Table A; Target 32659; HLA-B*54:01; KCNU1; ENSG00000215262; CTA
LPSDLVFCA

SEQ ID NO: 32660 - protein, 9 aa, Homo sapiens
  Table A; Target 32660; HLA-B*55:01; KCNU1; ENSG00000215262; CTA
LPSDLVFCA

SEQ ID NO: 32661 - protein, 9 aa, Homo sapiens
  Table A; Target 32661; HLA-B*56:01; KCNU1; ENSG00000215262; CTA
LPSDLVFCA

SEQ ID NO: 32662 - protein, 10 aa, Homo sapiens
  Table A; Target 32662; HLA-A*03:01; KCNU1; ENSG00000215262; CTA
LQKSYEIVNK

SEQ ID NO: 32663 - protein, 9 aa, Homo sapiens
  Table A; Target 32663; HLA-B*13:02; KCNU1; ENSG00000215262; CTA
LQMLVTGGV

SEQ ID NO: 32664 - protein, 8 aa, Homo sapiens
  Table A; Target 32664; HLA-C*05:01; KCNU1; ENSG00000215262; CTA
LSDDFAGM

SEQ ID NO: 32665 - protein, 10 aa, Homo sapiens
  Table A; Target 32665; HLA-A*01:01; KCNU1; ENSG00000215262; CTA
LSDDFAGMSF

SEQ ID NO: 32666 - protein, 10 aa, Homo sapiens
  Table A; Target 32666; HLA-B*46:01; KCNU1; ENSG00000215262; CTA
LSDDFAGMSF

SEQ ID NO: 32667 - protein, 10 aa, Homo sapiens
  Table A; Target 32667; HLA-B*58:01; KCNU1; ENSG00000215262; CTA
LSDDFAGMSF

SEQ ID NO: 32668 - protein, 10 aa, Homo sapiens
  Table A; Target 32668; HLA-C*02:02; KCNU1; ENSG00000215262; CTA
LSDDFAGMSF

SEQ ID NO: 32669 - protein, 10 aa, Homo sapiens
  Table A; Target 32669; HLA-C*03:03; KCNU1; ENSG00000215262; CTA
LSDDFAGMSF

SEQ ID NO: 32670 - protein, 10 aa, Homo sapiens
  Table A; Target 32670; HLA-C*03:04; KCNU1; ENSG00000215262; CTA
LSDDFAGMSF

SEQ ID NO: 32671 - protein, 10 aa, Homo sapiens
  Table A; Target 32671; HLA-C*05:01; KCNU1; ENSG00000215262; CTA
LSDDFAGMSF

SEQ ID NO: 32672 - protein, 10 aa, Homo sapiens
  Table A; Target 32672; HLA-A*01:01; KCNU1; ENSG00000215262; CTA
LSDVNPRNTF

SEQ ID NO: 32673 - protein, 10 aa, Homo sapiens
  Table A; Target 32673; HLA-B*57:01; KCNU1; ENSG00000215262; CTA
LSDVNPRNTF

SEQ ID NO: 32674 - protein, 10 aa, Homo sapiens
  Table A; Target 32674; HLA-B*58:01; KCNU1; ENSG00000215262; CTA
LSDVNPRNTF

SEQ ID NO: 32675 - protein, 10 aa, Homo sapiens
  Table A; Target 32675; HLA-C*05:01; KCNU1; ENSG00000215262; CTA
LSDVNPRNTF

SEQ ID NO: 32676 - protein, 9 aa, Homo sapiens
  Table A; Target 32676; HLA-A*25:01; KCNU1; ENSG00000215262; CTA
LSFPKQIAW

SEQ ID NO: 32677 - protein, 9 aa, Homo sapiens
  Table A; Target 32677; HLA-A*32:01; KCNU1; ENSG00000215262; CTA
LSFPKQIAW

SEQ ID NO: 32678 - protein, 9 aa, Homo sapiens
  Table A; Target 32678; HLA-B*08:01; KCNU1; ENSG00000215262; CTA
LSFPKQIAW

SEQ ID NO: 32679 - protein, 9 aa, Homo sapiens
  Table A; Target 32679; HLA-B*57:01; KCNU1; ENSG00000215262; CTA
LSFPKQIAW

SEQ ID NO: 32680 - protein, 9 aa, Homo sapiens
  Table A; Target 32680; HLA-B*58:01; KCNU1; ENSG00000215262; CTA
LSFPKQIAW

SEQ ID NO: 32681 - protein, 9 aa, Homo sapiens
  Table A; Target 32681; HLA-C*02:02; KCNU1; ENSG00000215262; CTA
LSFPKQIAW

SEQ ID NO: 32682 - protein, 9 aa, Homo sapiens
  Table A; Target 32682; HLA-C*16:01; KCNU1; ENSG00000215262; CTA
LSFPKQIAW

SEQ ID NO: 32683 - protein, 9 aa, Homo sapiens
  Table A; Target 32683; HLA-C*16:04; KCNU1; ENSG00000215262; CTA
LSFPKQIAW

SEQ ID NO: 32684 - protein, 9 aa, Homo sapiens
  Table A; Target 32684; HLA-B*46:01; KCNU1; ENSG00000215262; CTA
LSIGSLIIY

SEQ ID NO: 32685 - protein, 10 aa, Homo sapiens
  Table A; Target 32685; HLA-B*57:01; KCNU1; ENSG00000215262; CTA
LSIGSLIIYF

SEQ ID NO: 32686 - protein, 8 aa, Homo sapiens
  Table A; Target 32686; HLA-B*57:01; KCNU1; ENSG00000215262; CTA
LSIILSTW

SEQ ID NO: 32687 - protein, 8 aa, Homo sapiens
  Table A; Target 32687; HLA-B*58:01; KCNU1; ENSG00000215262; CTA
LSIILSTW

SEQ ID NO: 32688 - protein, 9 aa, Homo sapiens
  Table A; Target 32688; HLA-B*57:01; KCNU1; ENSG00000215262; CTA
LSIILSTWF

SEQ ID NO: 32689 - protein, 11 aa, Homo sapiens
  Table A; Target 32689; HLA-B*57:01; KCNU1; ENSG00000215262; CTA
LSTAFSTGTVF

SEQ ID NO: 32690 - protein, 10 aa, Homo sapiens
  Table A; Target 32690; HLA-A*03:02; KCNU1; ENSG00000215262; CTA
LTSLFVEQNK

SEQ ID NO: 32691 - protein, 10 aa, Homo sapiens
  Table A; Target 32691; HLA-A*11:01; KCNU1; ENSG00000215262; CTA
LTSLFVEQNK

SEQ ID NO: 32692 - protein, 10 aa, Homo sapiens
  Table A; Target 32692; HLA-B*27:02; KCNU1; ENSG00000215262; CTA
LTSLFVEQNK

SEQ ID NO: 32693 - protein, 10 aa, Homo sapiens
  Table A; Target 32693; HLA-B*57:01; KCNU1; ENSG00000215262; CTA
LTSLFVEQNK

SEQ ID NO: 32694 - protein, 8 aa, Homo sapiens
  Table A; Target 32694; HLA-C*05:01; KCNU1; ENSG00000215262; CTA
LVDTEAIM

SEQ ID NO: 32695 - protein, 11 aa, Homo sapiens
  Table A; Target 32695; HLA-A*02:07; KCNU1; ENSG00000215262; CTA
LVDTEAIMATL

SEQ ID NO: 32696 - protein, 9 aa, Homo sapiens
  Table A; Target 32696; HLA-A*02:01; KCNU1; ENSG00000215262; CTA
LVMATTSTV

SEQ ID NO: 32697 - protein, 9 aa, Homo sapiens
  Table A; Target 32697; HLA-A*02:03; KCNU1; ENSG00000215262; CTA
LVMATTSTV

SEQ ID NO: 32698 - protein, 9 aa, Homo sapiens
  Table A; Target 32698; HLA-A*02:07; KCNU1; ENSG00000215262; CTA
LVMATTSTV

SEQ ID NO: 32699 - protein, 9 aa, Homo sapiens
  Table A; Target 32699; HLA-A*25:01; KCNU1; ENSG00000215262; CTA
LVMATTSTV

SEQ ID NO: 32700 - protein, 9 aa, Homo sapiens
  Table A; Target 32700; HLA-B*13:02; KCNU1; ENSG00000215262; CTA
LVMATTSTV

SEQ ID NO: 32701 - protein, 9 aa, Homo sapiens
  Table A; Target 32701; HLA-B*46:01; KCNU1; ENSG00000215262; CTA
LVMATTSTV

SEQ ID NO: 32702 - protein, 9 aa, Homo sapiens
  Table A; Target 32702; HLA-B*51:01; KCNU1; ENSG00000215262; CTA
LVMATTSTV

SEQ ID NO: 32703 - protein, 9 aa, Homo sapiens
  Table A; Target 32703; HLA-B*55:01; KCNU1; ENSG00000215262; CTA
LVMATTSTV

SEQ ID NO: 32704 - protein, 9 aa, Homo sapiens
  Table A; Target 32704; HLA-B*56:01; KCNU1; ENSG00000215262; CTA
LVMATTSTV

SEQ ID NO: 32705 - protein, 9 aa, Homo sapiens
  Table A; Target 32705; HLA-C*01:02; KCNU1; ENSG00000215262; CTA
LVMATTSTV

SEQ ID NO: 32706 - protein, 9 aa, Homo sapiens
  Table A; Target 32706; HLA-C*03:03; KCNU1; ENSG00000215262; CTA
LVMATTSTV

SEQ ID NO: 32707 - protein, 9 aa, Homo sapiens
  Table A; Target 32707; HLA-C*03:04; KCNU1; ENSG00000215262; CTA
LVMATTSTV

SEQ ID NO: 32708 - protein, 9 aa, Homo sapiens
  Table A; Target 32708; HLA-C*14:02; KCNU1; ENSG00000215262; CTA
LVMATTSTV

SEQ ID NO: 32709 - protein, 11 aa, Homo sapiens
  Table A; Target 32709; HLA-A*23:01; KCNU1; ENSG00000215262; CTA
LVMATTSTVGF

SEQ ID NO: 32710 - protein, 9 aa, Homo sapiens
  Table A; Target 32710; HLA-C*14:02; KCNU1; ENSG00000215262; CTA
LYSGDLHAA

SEQ ID NO: 32711 - protein, 8 aa, Homo sapiens
  Table A; Target 32711; HLA-A*23:01; KCNU1; ENSG00000215262; CTA
LYSPVYSY

SEQ ID NO: 32712 - protein, 8 aa, Homo sapiens
  Table A; Target 32712; HLA-A*24:02; KCNU1; ENSG00000215262; CTA
LYSPVYSY

SEQ ID NO: 32713 - protein, 8 aa, Homo sapiens
  Table A; Target 32713; HLA-A*29:02; KCNU1; ENSG00000215262; CTA
LYSPVYSY

SEQ ID NO: 32714 - protein, 8 aa, Homo sapiens
  Table A; Target 32714; HLA-A*30:02; KCNU1; ENSG00000215262; CTA
LYSPVYSY

SEQ ID NO: 32715 - protein, 8 aa, Homo sapiens
  Table A; Target 32715; HLA-C*14:02; KCNU1; ENSG00000215262; CTA
LYSPVYSY

SEQ ID NO: 32716 - protein, 11 aa, Homo sapiens
  Table A; Target 32716; HLA-A*31:01; KCNU1; ENSG00000215262; CTA
LYSPVYSYQPR

SEQ ID NO: 32717 - protein, 9 aa, Homo sapiens
  Table A; Target 32717; HLA-B*35:01; KCNU1; ENSG00000215262; CTA
MAADDKIKF

SEQ ID NO: 32718 - protein, 9 aa, Homo sapiens
  Table A; Target 32718; HLA-B*35:03; KCNU1; ENSG00000215262; CTA
MAADDKIKF

SEQ ID NO: 32719 - protein, 9 aa, Homo sapiens
  Table A; Target 32719; HLA-B*38:01; KCNU1; ENSG00000215262; CTA
MAADDKIKF

SEQ ID NO: 32720 - protein, 9 aa, Homo sapiens
  Table A; Target 32720; HLA-B*55:01; KCNU1; ENSG00000215262; CTA
MAADDKIKF

SEQ ID NO: 32721 - protein, 9 aa, Homo sapiens
  Table A; Target 32721; HLA-B*58:01; KCNU1; ENSG00000215262; CTA
MAADDKIKF

SEQ ID NO: 32722 - protein, 9 aa, Homo sapiens
  Table A; Target 32722; HLA-C*02:02; KCNU1; ENSG00000215262; CTA
MAADDKIKF

SEQ ID NO: 32723 - protein, 9 aa, Homo sapiens
  Table A; Target 32723; HLA-C*03:03; KCNU1; ENSG00000215262; CTA
MAADDKIKF

SEQ ID NO: 32724 - protein, 9 aa, Homo sapiens
  Table A; Target 32724; HLA-C*07:06; KCNU1; ENSG00000215262; CTA
MAADDKIKF

SEQ ID NO: 32725 - protein, 9 aa, Homo sapiens
  Table A; Target 32725; HLA-C*12:03; KCNU1; ENSG00000215262; CTA
MAADDKIKF

SEQ ID NO: 32726 - protein, 9 aa, Homo sapiens
  Table A; Target 32726; HLA-C*16:01; KCNU1; ENSG00000215262; CTA
MAADDKIKF

SEQ ID NO: 32727 - protein, 10 aa, Homo sapiens
  Table A; Target 32727; HLA-A*25:01; KCNU1; ENSG00000215262; CTA
MAADDKIKFW

SEQ ID NO: 32728 - protein, 10 aa, Homo sapiens
  Table A; Target 32728; HLA-B*57:01; KCNU1; ENSG00000215262; CTA
MAADDKIKFW

SEQ ID NO: 32729 - protein, 9 aa, Homo sapiens
  Table A; Target 32729; HLA-B*35:01; KCNU1; ENSG00000215262; CTA
MATLTIGSL

SEQ ID NO: 32730 - protein, 9 aa, Homo sapiens
  Table A; Target 32730; HLA-B*35:03; KCNU1; ENSG00000215262; CTA
MATLTIGSL

SEQ ID NO: 32731 - protein, 9 aa, Homo sapiens
  Table A; Target 32731; HLA-B*51:01; KCNU1; ENSG00000215262; CTA
MATLTIGSL

SEQ ID NO: 32732 - protein, 9 aa, Homo sapiens
  Table A; Target 32732; HLA-B*54:01; KCNU1; ENSG00000215262; CTA
MATLTIGSL

SEQ ID NO: 32733 - protein, 9 aa, Homo sapiens
  Table A; Target 32733; HLA-C*03:03; KCNU1; ENSG00000215262; CTA
MATLTIGSL

SEQ ID NO: 32734 - protein, 9 aa, Homo sapiens
  Table A; Target 32734; HLA-C*03:04; KCNU1; ENSG00000215262; CTA
MATLTIGSL

SEQ ID NO: 32735 - protein, 9 aa, Homo sapiens
  Table A; Target 32735; HLA-C*07:06; KCNU1; ENSG00000215262; CTA
MATLTIGSL

SEQ ID NO: 32736 - protein, 9 aa, Homo sapiens
  Table A; Target 32736; HLA-C*16:01; KCNU1; ENSG00000215262; CTA
MATLTIGSL

SEQ ID NO: 32737 - protein, 9 aa, Homo sapiens
  Table A; Target 32737; HLA-C*16:02; KCNU1; ENSG00000215262; CTA
MATLTIGSL

SEQ ID NO: 32738 - protein, 9 aa, Homo sapiens
  Table A; Target 32738; HLA-A*23:01; KCNU1; ENSG00000215262; CTA
MATTSTVGF

SEQ ID NO: 32739 - protein, 9 aa, Homo sapiens
  Table A; Target 32739; HLA-A*25:01; KCNU1; ENSG00000215262; CTA
MATTSTVGF

SEQ ID NO: 32740 - protein, 9 aa, Homo sapiens
  Table A; Target 32740; HLA-A*26:01; KCNU1; ENSG00000215262; CTA
MATTSTVGF

SEQ ID NO: 32741 - protein, 9 aa, Homo sapiens
  Table A; Target 32741; HLA-A*32:01; KCNU1; ENSG00000215262; CTA
MATTSTVGF

SEQ ID NO: 32742 - protein, 9 aa, Homo sapiens
  Table A; Target 32742; HLA-B*15:01; KCNU1; ENSG00000215262; CTA
MATTSTVGF

SEQ ID NO: 32743 - protein, 9 aa, Homo sapiens
  Table A; Target 32743; HLA-B*15:03; KCNU1; ENSG00000215262; CTA
MATTSTVGF

SEQ ID NO: 32744 - protein, 9 aa, Homo sapiens
  Table A; Target 32744; HLA-B*27:05; KCNU1; ENSG00000215262; CTA
MATTSTVGF

SEQ ID NO: 32745 - protein, 9 aa, Homo sapiens
  Table A; Target 32745; HLA-B*35:01; KCNU1; ENSG00000215262; CTA
MATTSTVGF

SEQ ID NO: 32746 - protein, 9 aa, Homo sapiens
  Table A; Target 32746; HLA-B*35:03; KCNU1; ENSG00000215262; CTA
MATTSTVGF

SEQ ID NO: 32747 - protein, 9 aa, Homo sapiens
  Table A; Target 32747; HLA-B*46:01; KCNU1; ENSG00000215262; CTA
MATTSTVGF

SEQ ID NO: 32748 - protein, 9 aa, Homo sapiens
  Table A; Target 32748; HLA-B*55:01; KCNU1; ENSG00000215262; CTA
MATTSTVGF

SEQ ID NO: 32749 - protein, 9 aa, Homo sapiens
  Table A; Target 32749; HLA-B*58:01; KCNU1; ENSG00000215262; CTA
MATTSTVGF

SEQ ID NO: 32750 - protein, 9 aa, Homo sapiens
  Table A; Target 32750; HLA-C*02:02; KCNU1; ENSG00000215262; CTA
MATTSTVGF

SEQ ID NO: 32751 - protein, 9 aa, Homo sapiens
  Table A; Target 32751; HLA-C*03:03; KCNU1; ENSG00000215262; CTA
MATTSTVGF

SEQ ID NO: 32752 - protein, 9 aa, Homo sapiens
  Table A; Target 32752; HLA-C*03:04; KCNU1; ENSG00000215262; CTA
MATTSTVGF

SEQ ID NO: 32753 - protein, 9 aa, Homo sapiens
  Table A; Target 32753; HLA-C*04:01; KCNU1; ENSG00000215262; CTA
MATTSTVGF

SEQ ID NO: 32754 - protein, 9 aa, Homo sapiens
  Table A; Target 32754; HLA-C*05:01; KCNU1; ENSG00000215262; CTA
MATTSTVGF

SEQ ID NO: 32755 - protein, 9 aa, Homo sapiens
  Table A; Target 32755; HLA-C*07:04; KCNU1; ENSG00000215262; CTA
MATTSTVGF

SEQ ID NO: 32756 - protein, 9 aa, Homo sapiens
  Table A; Target 32756; HLA-C*07:06; KCNU1; ENSG00000215262; CTA
MATTSTVGF

SEQ ID NO: 32757 - protein, 9 aa, Homo sapiens
  Table A; Target 32757; HLA-C*12:03; KCNU1; ENSG00000215262; CTA
MATTSTVGF

SEQ ID NO: 32758 - protein, 9 aa, Homo sapiens
  Table A; Target 32758; HLA-C*14:02; KCNU1; ENSG00000215262; CTA
MATTSTVGF

SEQ ID NO: 32759 - protein, 9 aa, Homo sapiens
  Table A; Target 32759; HLA-C*16:01; KCNU1; ENSG00000215262; CTA
MATTSTVGF

SEQ ID NO: 32760 - protein, 9 aa, Homo sapiens
  Table A; Target 32760; HLA-C*16:02; KCNU1; ENSG00000215262; CTA
MATTSTVGF

SEQ ID NO: 32761 - protein, 9 aa, Homo sapiens
  Table A; Target 32761; HLA-C*16:04; KCNU1; ENSG00000215262; CTA
MATTSTVGF

SEQ ID NO: 32762 - protein, 8 aa, Homo sapiens
  Table A; Target 32762; HLA-A*23:01; KCNU1; ENSG00000215262; CTA
MLLSAQTF

SEQ ID NO: 32763 - protein, 9 aa, Homo sapiens
  Table A; Target 32763; HLA-A*02:01; KCNU1; ENSG00000215262; CTA
MLLSAQTFV

SEQ ID NO: 32764 - protein, 9 aa, Homo sapiens
  Table A; Target 32764; HLA-A*02:04; KCNU1; ENSG00000215262; CTA
MLLSAQTFV

SEQ ID NO: 32765 - protein, 10 aa, Homo sapiens
  Table A; Target 32765; HLA-C*01:02; KCNU1; ENSG00000215262; CTA
MLVTGGVSSQ

SEQ ID NO: 32766 - protein, 10 aa, Homo sapiens
  Table A; Target 32766; HLA-C*07:01; KCNU1; ENSG00000215262; CTA
MLVTGGVSSQ

SEQ ID NO: 32767 - protein, 8 aa, Homo sapiens
  Table A; Target 32767; HLA-B*08:01; KCNU1; ENSG00000215262; CTA
MPLRASNY

SEQ ID NO: 32768 - protein, 8 aa, Homo sapiens
  Table A; Target 32768; HLA-B*18:01; KCNU1; ENSG00000215262; CTA
MPLRASNY

SEQ ID NO: 32769 - protein, 8 aa, Homo sapiens
  Table A; Target 32769; HLA-B*35:01; KCNU1; ENSG00000215262; CTA
MPLRASNY

SEQ ID NO: 32770 - protein, 8 aa, Homo sapiens
  Table A; Target 32770; HLA-B*51:01; KCNU1; ENSG00000215262; CTA
MPLRASNY

SEQ ID NO: 32771 - protein, 8 aa, Homo sapiens
  Table A; Target 32771; HLA-B*55:01; KCNU1; ENSG00000215262; CTA
MPLRASNY

SEQ ID NO: 32772 - protein, 8 aa, Homo sapiens
  Table A; Target 32772; HLA-C*03:03; KCNU1; ENSG00000215262; CTA
MPLRASNY

SEQ ID NO: 32773 - protein, 9 aa, Homo sapiens
  Table A; Target 32773; HLA-B*27:02; KCNU1; ENSG00000215262; CTA
MRVLSIKNY

SEQ ID NO: 32774 - protein, 9 aa, Homo sapiens
  Table A; Target 32774; HLA-B*27:05; KCNU1; ENSG00000215262; CTA
MRVLSIKNY

SEQ ID NO: 32775 - protein, 9 aa, Homo sapiens
  Table A; Target 32775; HLA-C*07:01; KCNU1; ENSG00000215262; CTA
MRVLSIKNY

SEQ ID NO: 32776 - protein, 9 aa, Homo sapiens
  Table A; Target 32776; HLA-C*16:04; KCNU1; ENSG00000215262; CTA
MRVLSIKNY

SEQ ID NO: 32777 - protein, 9 aa, Homo sapiens
  Table A; Target 32777; HLA-A*02:03; KCNU1; ENSG00000215262; CTA
MSFPEVARL

SEQ ID NO: 32778 - protein, 9 aa, Homo sapiens
  Table A; Target 32778; HLA-A*02:04; KCNU1; ENSG00000215262; CTA
MSFPEVARL

SEQ ID NO: 32779 - protein, 9 aa, Homo sapiens
  Table A; Target 32779; HLA-A*02:07; KCNU1; ENSG00000215262; CTA
MSFPEVARL

SEQ ID NO: 32780 - protein, 9 aa, Homo sapiens
  Table A; Target 32780; HLA-A*68:02; KCNU1; ENSG00000215262; CTA
MSFPEVARL

SEQ ID NO: 32781 - protein, 9 aa, Homo sapiens
  Table A; Target 32781; HLA-B*57:01; KCNU1; ENSG00000215262; CTA
MSFPEVARL

SEQ ID NO: 32782 - protein, 9 aa, Homo sapiens
  Table A; Target 32782; HLA-B*58:01; KCNU1; ENSG00000215262; CTA
MSFPEVARL

SEQ ID NO: 32783 - protein, 9 aa, Homo sapiens
  Table A; Target 32783; HLA-C*02:02; KCNU1; ENSG00000215262; CTA
MSFPEVARL

SEQ ID NO: 32784 - protein, 9 aa, Homo sapiens
  Table A; Target 32784; HLA-C*03:03; KCNU1; ENSG00000215262; CTA
MSFPEVARL

SEQ ID NO: 32785 - protein, 9 aa, Homo sapiens
  Table A; Target 32785; HLA-C*03:04; KCNU1; ENSG00000215262; CTA
MSFPEVARL

SEQ ID NO: 32786 - protein, 9 aa, Homo sapiens
  Table A; Target 32786; HLA-C*07:04; KCNU1; ENSG00000215262; CTA
MSFPEVARL

SEQ ID NO: 32787 - protein, 9 aa, Homo sapiens
  Table A; Target 32787; HLA-C*16:02; KCNU1; ENSG00000215262; CTA
MSFPEVARL

SEQ ID NO: 32788 - protein, 11 aa, Homo sapiens
  Table A; Target 32788; HLA-B*57:01; KCNU1; ENSG00000215262; CTA
MSFPEVARLCF

SEQ ID NO: 32789 - protein, 9 aa, Homo sapiens
  Table A; Target 32789; HLA-A*02:07; KCNU1; ENSG00000215262; CTA
NCPPTIDSV

SEQ ID NO: 32790 - protein, 9 aa, Homo sapiens
  Table A; Target 32790; HLA-C*01:02; KCNU1; ENSG00000215262; CTA
NCPPTIDSV

SEQ ID NO: 32791 - protein, 10 aa, Homo sapiens
  Table A; Target 32791; HLA-B*18:01; KCNU1; ENSG00000215262; CTA
NEEFSLQKSY

SEQ ID NO: 32792 - protein, 10 aa, Homo sapiens
  Table A; Target 32792; HLA-B*44:02; KCNU1; ENSG00000215262; CTA
NEEFSLQKSY

SEQ ID NO: 32793 - protein, 10 aa, Homo sapiens
  Table A; Target 32793; HLA-B*44:03; KCNU1; ENSG00000215262; CTA
NEEFSLQKSY

SEQ ID NO: 32794 - protein, 10 aa, Homo sapiens
  Table A; Target 32794; HLA-C*16:04; KCNU1; ENSG00000215262; CTA
NEEFSLQKSY

SEQ ID NO: 32795 - protein, 8 aa, Homo sapiens
  Table A; Target 32795; HLA-B*18:01; KCNU1; ENSG00000215262; CTA
NHIVACVF

SEQ ID NO: 32796 - protein, 8 aa, Homo sapiens
  Table A; Target 32796; HLA-B*51:01; KCNU1; ENSG00000215262; CTA
NIMRVLSI

SEQ ID NO: 32797 - protein, 10 aa, Homo sapiens
  Table A; Target 32797; HLA-A*25:01; KCNU1; ENSG00000215262; CTA
NITVDSVTAF

SEQ ID NO: 32798 - protein, 10 aa, Homo sapiens
  Table A; Target 32798; HLA-B*39:01; KCNU1; ENSG00000215262; CTA
NITVDSVTAF

SEQ ID NO: 32799 - protein, 8 aa, Homo sapiens
  Table A; Target 32799; HLA-B*08:01; KCNU1; ENSG00000215262; CTA
NLHLSTAF

SEQ ID NO: 32800 - protein, 8 aa, Homo sapiens
  Table A; Target 32800; HLA-B*18:01; KCNU1; ENSG00000215262; CTA
NLHLSTAF

SEQ ID NO: 32801 - protein, 8 aa, Homo sapiens
  Table A; Target 32801; HLA-B*37:01; KCNU1; ENSG00000215262; CTA
NLHLSTAF

SEQ ID NO: 32802 - protein, 8 aa, Homo sapiens
  Table A; Target 32802; HLA-B*51:01; KCNU1; ENSG00000215262; CTA
NPPPQVRI

SEQ ID NO: 32803 - protein, 9 aa, Homo sapiens
  Table A; Target 32803; HLA-B*07:02; KCNU1; ENSG00000215262; CTA
NPRNTFGQL

SEQ ID NO: 32804 - protein, 9 aa, Homo sapiens
  Table A; Target 32804; HLA-C*07:02; KCNU1; ENSG00000215262; CTA
NPRNTFGQL

SEQ ID NO: 32805 - protein, 10 aa, Homo sapiens
  Table A; Target 32805; HLA-B*07:02; KCNU1; ENSG00000215262; CTA
NPRNTFGQLF

SEQ ID NO: 32806 - protein, 8 aa, Homo sapiens
  Table A; Target 32806; HLA-B*51:01; KCNU1; ENSG00000215262; CTA
NPSNIHFI

SEQ ID NO: 32807 - protein, 11 aa, Homo sapiens
  Table A; Target 32807; HLA-A*68:02; KCNU1; ENSG00000215262; CTA
NPSNIHFIEQL

SEQ ID NO: 32808 - protein, 9 aa, Homo sapiens
  Table A; Target 32808; HLA-B*38:01; KCNU1; ENSG00000215262; CTA
NQSRTNSII

SEQ ID NO: 32809 - protein, 9 aa, Homo sapiens
  Table A; Target 32809; HLA-C*12:03; KCNU1; ENSG00000215262; CTA
NSADPVGSC

SEQ ID NO: 32810 - protein, 8 aa, Homo sapiens
  Table A; Target 32810; HLA-B*51:01; KCNU1; ENSG00000215262; CTA
NSIISSQI

SEQ ID NO: 32811 - protein, 11 aa, Homo sapiens
  Table A; Target 32811; HLA-B*57:01; KCNU1; ENSG00000215262; CTA
NSLSFPKQIAW

SEQ ID NO: 32812 - protein, 8 aa, Homo sapiens
  Table A; Target 32812; HLA-B*35:03; KCNU1; ENSG00000215262; CTA
NYDSTTRI

SEQ ID NO: 32813 - protein, 8 aa, Homo sapiens
  Table A; Target 32813; HLA-C*04:01; KCNU1; ENSG00000215262; CTA
NYDSTTRI

SEQ ID NO: 32814 - protein, 8 aa, Homo sapiens
  Table A; Target 32814; HLA-C*05:01; KCNU1; ENSG00000215262; CTA
NYDSTTRI

SEQ ID NO: 32815 - protein, 8 aa, Homo sapiens
  Table A; Target 32815; HLA-C*07:04; KCNU1; ENSG00000215262; CTA
NYDSTTRI

SEQ ID NO: 32816 - protein, 9 aa, Homo sapiens
  Table A; Target 32816; HLA-A*23:01; KCNU1; ENSG00000215262; CTA
NYDSTTRII

SEQ ID NO: 32817 - protein, 9 aa, Homo sapiens
  Table A; Target 32817; HLA-A*24:02; KCNU1; ENSG00000215262; CTA
NYDSTTRII

SEQ ID NO: 32818 - protein, 9 aa, Homo sapiens
  Table A; Target 32818; HLA-B*35:01; KCNU1; ENSG00000215262; CTA
NYDSTTRII

SEQ ID NO: 32819 - protein, 9 aa, Homo sapiens
  Table A; Target 32819; HLA-B*35:03; KCNU1; ENSG00000215262; CTA
NYDSTTRII

SEQ ID NO: 32820 - protein, 9 aa, Homo sapiens
  Table A; Target 32820; HLA-C*04:01; KCNU1; ENSG00000215262; CTA
NYDSTTRII

SEQ ID NO: 32821 - protein, 10 aa, Homo sapiens
  Table A; Target 32821; HLA-A*24:02; KCNU1; ENSG00000215262; CTA
NYDSTTRIII

SEQ ID NO: 32822 - protein, 9 aa, Homo sapiens
  Table A; Target 32822; HLA-A*23:01; KCNU1; ENSG00000215262; CTA
NYIPEMVEL

SEQ ID NO: 32823 - protein, 9 aa, Homo sapiens
  Table A; Target 32823; HLA-A*24:02; KCNU1; ENSG00000215262; CTA
NYIPEMVEL

SEQ ID NO: 32824 - protein, 9 aa, Homo sapiens
  Table A; Target 32824; HLA-B*35:03; KCNU1; ENSG00000215262; CTA
NYIPEMVEL

SEQ ID NO: 32825 - protein, 9 aa, Homo sapiens
  Table A; Target 32825; HLA-B*38:01; KCNU1; ENSG00000215262; CTA
NYIPEMVEL

SEQ ID NO: 32826 - protein, 9 aa, Homo sapiens
  Table A; Target 32826; HLA-C*14:02; KCNU1; ENSG00000215262; CTA
NYIPEMVEL

SEQ ID NO: 32827 - protein, 10 aa, Homo sapiens
  Table A; Target 32827; HLA-A*23:01; KCNU1; ENSG00000215262; CTA
NYIPEMVELF

SEQ ID NO: 32828 - protein, 10 aa, Homo sapiens
  Table A; Target 32828; HLA-A*24:02; KCNU1; ENSG00000215262; CTA
NYIPEMVELF

SEQ ID NO: 32829 - protein, 10 aa, Homo sapiens
  Table A; Target 32829; HLA-A*29:02; KCNU1; ENSG00000215262; CTA
NYIPEMVELF

SEQ ID NO: 32830 - protein, 10 aa, Homo sapiens
  Table A; Target 32830; HLA-B*27:02; KCNU1; ENSG00000215262; CTA
PEMVELFANK

SEQ ID NO: 32831 - protein, 11 aa, Homo sapiens
  Table A; Target 32831; HLA-B*07:02; KCNU1; ENSG00000215262; CTA
PPPQPSSNQTL

SEQ ID NO: 32832 - protein, 10 aa, Homo sapiens
  Table A; Target 32832; HLA-B*27:02; KCNU1; ENSG00000215262; CTA
PSLELETIFK

SEQ ID NO: 32833 - protein, 11 aa, Homo sapiens
  Table A; Target 32833; HLA-A*01:01; KCNU1; ENSG00000215262; CTA
PTIDSVTETLY

SEQ ID NO: 32834 - protein, 11 aa, Homo sapiens
  Table A; Target 32834; HLA-A*30:02; KCNU1; ENSG00000215262; CTA
PTIDSVTETLY

SEQ ID NO: 32835 - protein, 8 aa, Homo sapiens
  Table A; Target 32835; HLA-C*07:01; KCNU1; ENSG00000215262; CTA
PVGSCSSY

SEQ ID NO: 32836 - protein, 9 aa, Homo sapiens
  Table A; Target 32836; HLA-A*23:01; KCNU1; ENSG00000215262; CTA
QAAFILSSF

SEQ ID NO: 32837 - protein, 9 aa, Homo sapiens
  Table A; Target 32837; HLA-A*24:02; KCNU1; ENSG00000215262; CTA
QAAFILSSF

SEQ ID NO: 32838 - protein, 9 aa, Homo sapiens
  Table A; Target 32838; HLA-A*25:01; KCNU1; ENSG00000215262; CTA
QAAFILSSF

SEQ ID NO: 32839 - protein, 9 aa, Homo sapiens
  Table A; Target 32839; HLA-A*26:01; KCNU1; ENSG00000215262; CTA
QAAFILSSF

SEQ ID NO: 32840 - protein, 9 aa, Homo sapiens
  Table A; Target 32840; HLA-A*30:02; KCNU1; ENSG00000215262; CTA
QAAFILSSF

SEQ ID NO: 32841 - protein, 9 aa, Homo sapiens
  Table A; Target 32841; HLA-A*32:01; KCNU1; ENSG00000215262; CTA
QAAFILSSF

SEQ ID NO: 32842 - protein, 9 aa, Homo sapiens
  Table A; Target 32842; HLA-A*68:02; KCNU1; ENSG00000215262; CTA
QAAFILSSF

SEQ ID NO: 32843 - protein, 9 aa, Homo sapiens
  Table A; Target 32843; HLA-B*15:01; KCNU1; ENSG00000215262; CTA
QAAFILSSF

SEQ ID NO: 32844 - protein, 9 aa, Homo sapiens
  Table A; Target 32844; HLA-B*15:03; KCNU1; ENSG00000215262; CTA
QAAFILSSF

SEQ ID NO: 32845 - protein, 9 aa, Homo sapiens
  Table A; Target 32845; HLA-B*27:02; KCNU1; ENSG00000215262; CTA
QAAFILSSF

SEQ ID NO: 32846 - protein, 9 aa, Homo sapiens
  Table A; Target 32846; HLA-B*35:01; KCNU1; ENSG00000215262; CTA
QAAFILSSF

SEQ ID NO: 32847 - protein, 9 aa, Homo sapiens
  Table A; Target 32847; HLA-B*38:01; KCNU1; ENSG00000215262; CTA
QAAFILSSF

SEQ ID NO: 32848 - protein, 9 aa, Homo sapiens
  Table A; Target 32848; HLA-B*44:02; KCNU1; ENSG00000215262; CTA
QAAFILSSF

SEQ ID NO: 32849 - protein, 9 aa, Homo sapiens
  Table A; Target 32849; HLA-B*44:03; KCNU1; ENSG00000215262; CTA
QAAFILSSF

SEQ ID NO: 32850 - protein, 9 aa, Homo sapiens
  Table A; Target 32850; HLA-B*46:01; KCNU1; ENSG00000215262; CTA
QAAFILSSF

SEQ ID NO: 32851 - protein, 9 aa, Homo sapiens
  Table A; Target 32851; HLA-B*57:01; KCNU1; ENSG00000215262; CTA
QAAFILSSF

SEQ ID NO: 32852 - protein, 9 aa, Homo sapiens
  Table A; Target 32852; HLA-B*58:01; KCNU1; ENSG00000215262; CTA
QAAFILSSF

SEQ ID NO: 32853 - protein, 9 aa, Homo sapiens
  Table A; Target 32853; HLA-C*01:02; KCNU1; ENSG00000215262; CTA
QAAFILSSF

SEQ ID NO: 32854 - protein, 9 aa, Homo sapiens
  Table A; Target 32854; HLA-C*02:02; KCNU1; ENSG00000215262; CTA
QAAFILSSF

SEQ ID NO: 32855 - protein, 9 aa, Homo sapiens
  Table A; Target 32855; HLA-C*03:03; KCNU1; ENSG00000215262; CTA
QAAFILSSF

SEQ ID NO: 32856 - protein, 9 aa, Homo sapiens
  Table A; Target 32856; HLA-C*03:04; KCNU1; ENSG00000215262; CTA
QAAFILSSF

SEQ ID NO: 32857 - protein, 9 aa, Homo sapiens
  Table A; Target 32857; HLA-C*05:01; KCNU1; ENSG00000215262; CTA
QAAFILSSF

SEQ ID NO: 32858 - protein, 9 aa, Homo sapiens
  Table A; Target 32858; HLA-C*07:06; KCNU1; ENSG00000215262; CTA
QAAFILSSF

SEQ ID NO: 32859 - protein, 9 aa, Homo sapiens
  Table A; Target 32859; HLA-C*12:03; KCNU1; ENSG00000215262; CTA
QAAFILSSF

SEQ ID NO: 32860 - protein, 9 aa, Homo sapiens
  Table A; Target 32860; HLA-C*14:02; KCNU1; ENSG00000215262; CTA
QAAFILSSF

SEQ ID NO: 32861 - protein, 9 aa, Homo sapiens
  Table A; Target 32861; HLA-C*16:02; KCNU1; ENSG00000215262; CTA
QAAFILSSF

SEQ ID NO: 32862 - protein, 9 aa, Homo sapiens
  Table A; Target 32862; HLA-C*16:04; KCNU1; ENSG00000215262; CTA
QAAFILSSF

SEQ ID NO: 32863 - protein, 9 aa, Homo sapiens
  Table A; Target 32863; HLA-A*30:01; KCNU1; ENSG00000215262; CTA
QDSPPRVSA

SEQ ID NO: 32864 - protein, 9 aa, Homo sapiens
  Table A; Target 32864; HLA-B*37:01; KCNU1; ENSG00000215262; CTA
QDSPPRVSA

SEQ ID NO: 32865 - protein, 9 aa, Homo sapiens
  Table A; Target 32865; HLA-B*54:01; KCNU1; ENSG00000215262; CTA
QDSPPRVSA

SEQ ID NO: 32866 - protein, 9 aa, Homo sapiens
  Table A; Target 32866; HLA-B*56:01; KCNU1; ENSG00000215262; CTA
QDSPPRVSA

SEQ ID NO: 32867 - protein, 10 aa, Homo sapiens
  Table A; Target 32867; HLA-A*30:01; KCNU1; ENSG00000215262; CTA
QETNLHLSTA

SEQ ID NO: 32868 - protein, 10 aa, Homo sapiens
  Table A; Target 32868; HLA-B*49:01; KCNU1; ENSG00000215262; CTA
QETNLHLSTA

SEQ ID NO: 32869 - protein, 11 aa, Homo sapiens
  Table A; Target 32869; HLA-A*30:01; KCNU1; ENSG00000215262; CTA
QETNLHLSTAF

SEQ ID NO: 32870 - protein, 11 aa, Homo sapiens
  Table A; Target 32870; HLA-B*18:01; KCNU1; ENSG00000215262; CTA
QETNLHLSTAF

SEQ ID NO: 32871 - protein, 11 aa, Homo sapiens
  Table A; Target 32871; HLA-B*40:02; KCNU1; ENSG00000215262; CTA
QETNLHLSTAF

SEQ ID NO: 32872 - protein, 11 aa, Homo sapiens
  Table A; Target 32872; HLA-B*44:02; KCNU1; ENSG00000215262; CTA
QETNLHLSTAF

SEQ ID NO: 32873 - protein, 11 aa, Homo sapiens
  Table A; Target 32873; HLA-B*44:03; KCNU1; ENSG00000215262; CTA
QETNLHLSTAF

SEQ ID NO: 32874 - protein, 11 aa, Homo sapiens
  Table A; Target 32874; HLA-C*16:04; KCNU1; ENSG00000215262; CTA
QETNLHLSTAF

SEQ ID NO: 32875 - protein, 11 aa, Homo sapiens
  Table A; Target 32875; HLA-B*38:01; KCNU1; ENSG00000215262; CTA
QHDVEQDSDQL

SEQ ID NO: 32876 - protein, 11 aa, Homo sapiens
  Table A; Target 32876; HLA-B*39:01; KCNU1; ENSG00000215262; CTA
QHDVEQDSDQL

SEQ ID NO: 32877 - protein, 8 aa, Homo sapiens
  Table A; Target 32877; HLA-B*13:02; KCNU1; ENSG00000215262; CTA
QHITVPSV

SEQ ID NO: 32878 - protein, 8 aa, Homo sapiens
  Table A; Target 32878; HLA-B*38:01; KCNU1; ENSG00000215262; CTA
QHITVPSV

SEQ ID NO: 32879 - protein, 8 aa, Homo sapiens
  Table A; Target 32879; HLA-B*39:01; KCNU1; ENSG00000215262; CTA
QHITVPSV

SEQ ID NO: 32880 - protein, 8 aa, Homo sapiens
  Table A; Target 32880; HLA-B*51:01; KCNU1; ENSG00000215262; CTA
QHITVPSV

SEQ ID NO: 32881 - protein, 10 aa, Homo sapiens
  Table A; Target 32881; HLA-A*33:03; KCNU1; ENSG00000215262; CTA
QHITVPSVKR

SEQ ID NO: 32882 - protein, 8 aa, Homo sapiens
  Table A; Target 32882; HLA-C*05:01; KCNU1; ENSG00000215262; CTA
QLDSSGMF

SEQ ID NO: 32883 - protein, 9 aa, Homo sapiens
  Table A; Target 32883; HLA-A*01:01; KCNU1; ENSG00000215262; CTA
QLDSSGMFH

SEQ ID NO: 32884 - protein, 10 aa, Homo sapiens
  Table A; Target 32884; HLA-A*01:01; KCNU1; ENSG00000215262; CTA
QLDSSGMFHW

SEQ ID NO: 32885 - protein, 11 aa, Homo sapiens
  Table A; Target 32885; HLA-C*07:01; KCNU1; ENSG00000215262; CTA
QMLVTGGVSSQ

SEQ ID NO: 32886 - protein, 9 aa, Homo sapiens
  Table A; Target 32886; HLA-B*07:02; KCNU1; ENSG00000215262; CTA
QPRTNSLSF

SEQ ID NO: 32887 - protein, 9 aa, Homo sapiens
  Table A; Target 32887; HLA-B*35:01; KCNU1; ENSG00000215262; CTA
QPRTNSLSF

SEQ ID NO: 32888 - protein, 9 aa, Homo sapiens
  Table A; Target 32888; HLA-C*07:02; KCNU1; ENSG00000215262; CTA
QPRTNSLSF

SEQ ID NO: 32889 - protein, 9 aa, Homo sapiens
  Table A; Target 32889; HLA-B*56:01; KCNU1; ENSG00000215262; CTA
QPSSNQTLV

SEQ ID NO: 32890 - protein, 8 aa, Homo sapiens
  Table A; Target 32890; HLA-B*08:01; KCNU1; ENSG00000215262; CTA
QSHNKVYL

SEQ ID NO: 32891 - protein, 8 aa, Homo sapiens
  Table A; Target 32891; HLA-B*08:01; KCNU1; ENSG00000215262; CTA
QTFVGQVL

SEQ ID NO: 32892 - protein, 8 aa, Homo sapiens
  Table A; Target 32892; HLA-B*15:03; KCNU1; ENSG00000215262; CTA
QTFVGQVL

SEQ ID NO: 32893 - protein, 8 aa, Homo sapiens
  Table A; Target 32893; HLA-B*46:01; KCNU1; ENSG00000215262; CTA
QTFVGQVL

SEQ ID NO: 32894 - protein, 8 aa, Homo sapiens
  Table A; Target 32894; HLA-C*01:02; KCNU1; ENSG00000215262; CTA
QTFVGQVL

SEQ ID NO: 32895 - protein, 8 aa, Homo sapiens
  Table A; Target 32895; HLA-C*03:03; KCNU1; ENSG00000215262; CTA
QTFVGQVL

SEQ ID NO: 32896 - protein, 8 aa, Homo sapiens
  Table A; Target 32896; HLA-C*03:04; KCNU1; ENSG00000215262; CTA
QTFVGQVL

SEQ ID NO: 32897 - protein, 8 aa, Homo sapiens
  Table A; Target 32897; HLA-C*14:02; KCNU1; ENSG00000215262; CTA
QTFVGQVL

SEQ ID NO: 32898 - protein, 9 aa, Homo sapiens
  Table A; Target 32898; HLA-A*68:02; KCNU1; ENSG00000215262; CTA
QTFVGQVLV

SEQ ID NO: 32899 - protein, 10 aa, Homo sapiens
  Table A; Target 32899; HLA-A*68:02; KCNU1; ENSG00000215262; CTA
QTFVGQVLVI

SEQ ID NO: 32900 - protein, 9 aa, Homo sapiens
  Table A; Target 32900; HLA-A*32:01; KCNU1; ENSG00000215262; CTA
QTKLRNETW

SEQ ID NO: 32901 - protein, 9 aa, Homo sapiens
  Table A; Target 32901; HLA-B*57:01; KCNU1; ENSG00000215262; CTA
QTKLRNETW

SEQ ID NO: 32902 - protein, 9 aa, Homo sapiens
  Table A; Target 32902; HLA-B*08:01; KCNU1; ENSG00000215262; CTA
QVRIRKNTL

SEQ ID NO: 32903 - protein, 9 aa, Homo sapiens
  Table A; Target 32903; HLA-A*32:01; KCNU1; ENSG00000215262; CTA
RAIKTSNSV

SEQ ID NO: 32904 - protein, 9 aa, Homo sapiens
  Table A; Target 32904; HLA-B*46:01; KCNU1; ENSG00000215262; CTA
RAIKTSNSV

SEQ ID NO: 32905 - protein, 9 aa, Homo sapiens
  Table A; Target 32905; HLA-B*58:01; KCNU1; ENSG00000215262; CTA
RAIKTSNSV

SEQ ID NO: 32906 - protein, 9 aa, Homo sapiens
  Table A; Target 32906; HLA-C*03:03; KCNU1; ENSG00000215262; CTA
RAIKTSNSV

SEQ ID NO: 32907 - protein, 9 aa, Homo sapiens
  Table A; Target 32907; HLA-C*03:04; KCNU1; ENSG00000215262; CTA
RAIKTSNSV

SEQ ID NO: 32908 - protein, 9 aa, Homo sapiens
  Table A; Target 32908; HLA-C*16:02; KCNU1; ENSG00000215262; CTA
RAIKTSNSV

SEQ ID NO: 32909 - protein, 11 aa, Homo sapiens
  Table A; Target 32909; HLA-B*57:01; KCNU1; ENSG00000215262; CTA
RAIKTSNSVKF

SEQ ID NO: 32910 - protein, 11 aa, Homo sapiens
  Table A; Target 32910; HLA-B*58:01; KCNU1; ENSG00000215262; CTA
RAIKTSNSVKF

SEQ ID NO: 32911 - protein, 9 aa, Homo sapiens
  Table A; Target 32911; HLA-A*24:02; KCNU1; ENSG00000215262; CTA
RFLWNFPQI

SEQ ID NO: 32912 - protein, 11 aa, Homo sapiens
  Table A; Target 32912; HLA-A*24:02; KCNU1; ENSG00000215262; CTA
RFMAADDKIKF

SEQ ID NO: 32913 - protein, 11 aa, Homo sapiens
  Table A; Target 32913; HLA-A*24:02; KCNU1; ENSG00000215262; CTA
RFVITRPANEF

SEQ ID NO: 32914 - protein, 9 aa, Homo sapiens
  Table A; Target 32914; HLA-B*15:03; KCNU1; ENSG00000215262; CTA
RKVPILTEL

SEQ ID NO: 32915 - protein, 8 aa, Homo sapiens
  Table A; Target 32915; HLA-A*02:04; KCNU1; ENSG00000215262; CTA
RLLELPQI

SEQ ID NO: 32916 - protein, 9 aa, Homo sapiens
  Table A; Target 32916; HLA-A*02:01; KCNU1; ENSG00000215262; CTA
RLLELPQIL

SEQ ID NO: 32917 - protein, 9 aa, Homo sapiens
  Table A; Target 32917; HLA-A*02:03; KCNU1; ENSG00000215262; CTA
RLLELPQIL

SEQ ID NO: 32918 - protein, 9 aa, Homo sapiens
  Table A; Target 32918; HLA-A*02:04; KCNU1; ENSG00000215262; CTA
RLLELPQIL

SEQ ID NO: 32919 - protein, 9 aa, Homo sapiens
  Table A; Target 32919; HLA-A*02:07; KCNU1; ENSG00000215262; CTA
RLLELPQIL

SEQ ID NO: 32920 - protein, 11 aa, Homo sapiens
  Table A; Target 32920; HLA-A*02:01; KCNU1; ENSG00000215262; CTA
RLLELPQILQI

SEQ ID NO: 32921 - protein, 11 aa, Homo sapiens
  Table A; Target 32921; HLA-A*02:03; KCNU1; ENSG00000215262; CTA
RLLELPQILQI

SEQ ID NO: 32922 - protein, 11 aa, Homo sapiens
  Table A; Target 32922; HLA-A*02:04; KCNU1; ENSG00000215262; CTA
RLLELPQILQI

SEQ ID NO: 32923 - protein, 11 aa, Homo sapiens
  Table A; Target 32923; HLA-B*15:01; KCNU1; ENSG00000215262; CTA
RLSDDFAGMSF

SEQ ID NO: 32924 - protein, 9 aa, Homo sapiens
  Table A; Target 32924; HLA-A*02:01; KCNU1; ENSG00000215262; CTA
RQHITVPSV

SEQ ID NO: 32925 - protein, 9 aa, Homo sapiens
  Table A; Target 32925; HLA-A*02:03; KCNU1; ENSG00000215262; CTA
RQHITVPSV

SEQ ID NO: 32926 - protein, 9 aa, Homo sapiens
  Table A; Target 32926; HLA-A*02:04; KCNU1; ENSG00000215262; CTA
RQHITVPSV

SEQ ID NO: 32927 - protein, 9 aa, Homo sapiens
  Table A; Target 32927; HLA-B*13:02; KCNU1; ENSG00000215262; CTA
RQHITVPSV

SEQ ID NO: 32928 - protein, 9 aa, Homo sapiens
  Table A; Target 32928; HLA-B*15:03; KCNU1; ENSG00000215262; CTA
RQHITVPSV

SEQ ID NO: 32929 - protein, 10 aa, Homo sapiens
  Table A; Target 32929; HLA-A*03:01; KCNU1; ENSG00000215262; CTA
RQHITVPSVK

SEQ ID NO: 32930 - protein, 10 aa, Homo sapiens
  Table A; Target 32930; HLA-A*03:02; KCNU1; ENSG00000215262; CTA
RQHITVPSVK

SEQ ID NO: 32931 - protein, 11 aa, Homo sapiens
  Table A; Target 32931; HLA-A*31:01; KCNU1; ENSG00000215262; CTA
RQHITVPSVKR

SEQ ID NO: 32932 - protein, 9 aa, Homo sapiens
  Table A; Target 32932; HLA-B*57:01; KCNU1; ENSG00000215262; CTA
RSLHFQGQF

SEQ ID NO: 32933 - protein, 10 aa, Homo sapiens
  Table A; Target 32933; HLA-A*31:01; KCNU1; ENSG00000215262; CTA
RSLHFQGQFR

SEQ ID NO: 32934 - protein, 9 aa, Homo sapiens
  Table A; Target 32934; HLA-B*57:01; KCNU1; ENSG00000215262; CTA
RTFIMFFTL

SEQ ID NO: 32935 - protein, 9 aa, Homo sapiens
  Table A; Target 32935; HLA-A*03:01; KCNU1; ENSG00000215262; CTA
RTNSLSFPK

SEQ ID NO: 32936 - protein, 9 aa, Homo sapiens
  Table A; Target 32936; HLA-A*03:02; KCNU1; ENSG00000215262; CTA
RTNSLSFPK

SEQ ID NO: 32937 - protein, 9 aa, Homo sapiens
  Table A; Target 32937; HLA-A*11:01; KCNU1; ENSG00000215262; CTA
RTNSLSFPK

SEQ ID NO: 32938 - protein, 9 aa, Homo sapiens
  Table A; Target 32938; HLA-A*31:01; KCNU1; ENSG00000215262; CTA
RTNSLSFPK

SEQ ID NO: 32939 - protein, 8 aa, Homo sapiens
  Table A; Target 32939; HLA-C*05:01; KCNU1; ENSG00000215262; CTA
SADPVGSC

SEQ ID NO: 32940 - protein, 9 aa, Homo sapiens
  Table A; Target 32940; HLA-C*05:01; KCNU1; ENSG00000215262; CTA
SADPVGSCS

SEQ ID NO: 32941 - protein, 11 aa, Homo sapiens
  Table A; Target 32941; HLA-A*01:01; KCNU1; ENSG00000215262; CTA
SADPVGSCSSY

SEQ ID NO: 32942 - protein, 11 aa, Homo sapiens
  Table A; Target 32942; HLA-A*30:02; KCNU1; ENSG00000215262; CTA
SADPVGSCSSY

SEQ ID NO: 32943 - protein, 11 aa, Homo sapiens
  Table A; Target 32943; HLA-B*27:05; KCNU1; ENSG00000215262; CTA
SADPVGSCSSY

SEQ ID NO: 32944 - protein, 11 aa, Homo sapiens
  Table A; Target 32944; HLA-B*35:01; KCNU1; ENSG00000215262; CTA
SADPVGSCSSY

SEQ ID NO: 32945 - protein, 11 aa, Homo sapiens
  Table A; Target 32945; HLA-B*55:01; KCNU1; ENSG00000215262; CTA
SADPVGSCSSY

SEQ ID NO: 32946 - protein, 11 aa, Homo sapiens
  Table A; Target 32946; HLA-C*05:01; KCNU1; ENSG00000215262; CTA
SADPVGSCSSY

SEQ ID NO: 32947 - protein, 9 aa, Homo sapiens
  Table A; Target 32947; HLA-A*31:01; KCNU1; ENSG00000215262; CTA
SAMKWEDLR

SEQ ID NO: 32948 - protein, 9 aa, Homo sapiens
  Table A; Target 32948; HLA-C*01:02; KCNU1; ENSG00000215262; CTA
SAPMGLRNF

SEQ ID NO: 32949 - protein, 9 aa, Homo sapiens
  Table A; Target 32949; HLA-C*16:01; KCNU1; ENSG00000215262; CTA
SAPMGLRNF

SEQ ID NO: 32950 - protein, 9 aa, Homo sapiens
  Table A; Target 32950; HLA-A*02:03; KCNU1; ENSG00000215262; CTA
SAQTFVGQV

SEQ ID NO: 32951 - protein, 9 aa, Homo sapiens
  Table A; Target 32951; HLA-C*02:02; KCNU1; ENSG00000215262; CTA
SAQTFVGQV

SEQ ID NO: 32952 - protein, 9 aa, Homo sapiens
  Table A; Target 32952; HLA-C*12:03; KCNU1; ENSG00000215262; CTA
SAQTFVGQV

SEQ ID NO: 32953 - protein, 9 aa, Homo sapiens
  Table A; Target 32953; HLA-C*16:02; KCNU1; ENSG00000215262; CTA
SAQTFVGQV

SEQ ID NO: 32954 - protein, 10 aa, Homo sapiens
  Table A; Target 32954; HLA-C*03:03; KCNU1; ENSG00000215262; CTA
SAQTFVGQVL

SEQ ID NO: 32955 - protein, 10 aa, Homo sapiens
  Table A; Target 32955; HLA-C*03:04; KCNU1; ENSG00000215262; CTA
SAQTFVGQVL

SEQ ID NO: 32956 - protein, 10 aa, Homo sapiens
  Table A; Target 32956; HLA-C*16:04; KCNU1; ENSG00000215262; CTA
SAQTFVGQVL

SEQ ID NO: 32957 - protein, 9 aa, Homo sapiens
  Table A; Target 32957; HLA-B*37:01; KCNU1; ENSG00000215262; CTA
SDDFAGMSF

SEQ ID NO: 32958 - protein, 9 aa, Homo sapiens
  Table A; Target 32958; HLA-C*04:01; KCNU1; ENSG00000215262; CTA
SDDFAGMSF

SEQ ID NO: 32959 - protein, 9 aa, Homo sapiens
  Table A; Target 32959; HLA-B*37:01; KCNU1; ENSG00000215262; CTA
SDQLDSSGM

SEQ ID NO: 32960 - protein, 9 aa, Homo sapiens
  Table A; Target 32960; HLA-C*16:02; KCNU1; ENSG00000215262; CTA
SDTNCPPTI

SEQ ID NO: 32961 - protein, 9 aa, Homo sapiens
  Table A; Target 32961; HLA-A*23:01; KCNU1; ENSG00000215262; CTA
SDVNPRNTF

SEQ ID NO: 32962 - protein, 9 aa, Homo sapiens
  Table A; Target 32962; HLA-A*30:01; KCNU1; ENSG00000215262; CTA
SDVNPRNTF

SEQ ID NO: 32963 - protein, 9 aa, Homo sapiens
  Table A; Target 32963; HLA-A*32:01; KCNU1; ENSG00000215262; CTA
SDVNPRNTF

SEQ ID NO: 32964 - protein, 9 aa, Homo sapiens
  Table A; Target 32964; HLA-B*15:03; KCNU1; ENSG00000215262; CTA
SDVNPRNTF

SEQ ID NO: 32965 - protein, 9 aa, Homo sapiens
  Table A; Target 32965; HLA-B*37:01; KCNU1; ENSG00000215262; CTA
SDVNPRNTF

SEQ ID NO: 32966 - protein, 9 aa, Homo sapiens
  Table A; Target 32966; HLA-B*44:02; KCNU1; ENSG00000215262; CTA
SDVNPRNTF

SEQ ID NO: 32967 - protein, 9 aa, Homo sapiens
  Table A; Target 32967; HLA-B*44:03; KCNU1; ENSG00000215262; CTA
SDVNPRNTF

SEQ ID NO: 32968 - protein, 9 aa, Homo sapiens
  Table A; Target 32968; HLA-C*16:01; KCNU1; ENSG00000215262; CTA
SDVNPRNTF

SEQ ID NO: 32969 - protein, 9 aa, Homo sapiens
  Table A; Target 32969; HLA-C*16:04; KCNU1; ENSG00000215262; CTA
SDVNPRNTF

SEQ ID NO: 32970 - protein, 11 aa, Homo sapiens
  Table A; Target 32970; HLA-A*23:01; KCNU1; ENSG00000215262; CTA
SFLDSLLATAF

SEQ ID NO: 32971 - protein, 11 aa, Homo sapiens
  Table A; Target 32971; HLA-A*24:02; KCNU1; ENSG00000215262; CTA
SFLDSLLATAF

SEQ ID NO: 32972 - protein, 11 aa, Homo sapiens
  Table A; Target 32972; HLA-A*29:02; KCNU1; ENSG00000215262; CTA
SFLDSLLATAF

SEQ ID NO: 32973 - protein, 11 aa, Homo sapiens
  Table A; Target 32973; HLA-C*14:02; KCNU1; ENSG00000215262; CTA
SFLDSLLATAF

SEQ ID NO: 32974 - protein, 10 aa, Homo sapiens
  Table A; Target 32974; HLA-A*24:02; KCNU1; ENSG00000215262; CTA
SFPEVARLCF

SEQ ID NO: 32975 - protein, 9 aa, Homo sapiens
  Table A; Target 32975; HLA-B*38:01; KCNU1; ENSG00000215262; CTA
SGDLHAANI

SEQ ID NO: 32976 - protein, 9 aa, Homo sapiens
  Table A; Target 32976; HLA-C*05:01; KCNU1; ENSG00000215262; CTA
SGDLHAANI

SEQ ID NO: 32977 - protein, 9 aa, Homo sapiens
  Table A; Target 32977; HLA-A*31:01; KCNU1; ENSG00000215262; CTA
SGDPWLKGR

SEQ ID NO: 32978 - protein, 9 aa, Homo sapiens
  Table A; Target 32978; HLA-B*27:05; KCNU1; ENSG00000215262; CTA
SHAEDISNI

SEQ ID NO: 32979 - protein, 9 aa, Homo sapiens
  Table A; Target 32979; HLA-B*38:01; KCNU1; ENSG00000215262; CTA
SHAEDISNI

SEQ ID NO: 32980 - protein, 9 aa, Homo sapiens
  Table A; Target 32980; HLA-B*39:01; KCNU1; ENSG00000215262; CTA
SHAEDISNI

SEQ ID NO: 32981 - protein, 10 aa, Homo sapiens
  Table A; Target 32981; HLA-B*38:01; KCNU1; ENSG00000215262; CTA
SHAEDISNIM

SEQ ID NO: 32982 - protein, 10 aa, Homo sapiens
  Table A; Target 32982; HLA-B*39:01; KCNU1; ENSG00000215262; CTA
SHAEDISNIM

SEQ ID NO: 32983 - protein, 9 aa, Homo sapiens
  Table A; Target 32983; HLA-B*35:03; KCNU1; ENSG00000215262; CTA
SIISSQIPL

SEQ ID NO: 32984 - protein, 9 aa, Homo sapiens
  Table A; Target 32984; HLA-C*01:02; KCNU1; ENSG00000215262; CTA
SIISSQIPL

SEQ ID NO: 32985 - protein, 9 aa, Homo sapiens
  Table A; Target 32985; HLA-C*03:03; KCNU1; ENSG00000215262; CTA
SIISSQIPL

SEQ ID NO: 32986 - protein, 9 aa, Homo sapiens
  Table A; Target 32986; HLA-C*03:04; KCNU1; ENSG00000215262; CTA
SIISSQIPL

SEQ ID NO: 32987 - protein, 9 aa, Homo sapiens
  Table A; Target 32987; HLA-C*07:04; KCNU1; ENSG00000215262; CTA
SIISSQIPL

SEQ ID NO: 32988 - protein, 9 aa, Homo sapiens
  Table A; Target 32988; HLA-C*16:01; KCNU1; ENSG00000215262; CTA
SIISSQIPL

SEQ ID NO: 32989 - protein, 10 aa, Homo sapiens
  Table A; Target 32989; HLA-A*31:01; KCNU1; ENSG00000215262; CTA
SIKNYDSTTR

SEQ ID NO: 32990 - protein, 10 aa, Homo sapiens
  Table A; Target 32990; HLA-A*33:03; KCNU1; ENSG00000215262; CTA
SIKNYDSTTR

SEQ ID NO: 32991 - protein, 10 aa, Homo sapiens
  Table A; Target 32991; HLA-A*68:01; KCNU1; ENSG00000215262; CTA
SIKNYDSTTR

SEQ ID NO: 32992 - protein, 10 aa, Homo sapiens
  Table A; Target 32992; HLA-C*07:06; KCNU1; ENSG00000215262; CTA
SIKNYDSTTR

SEQ ID NO: 32993 - protein, 8 aa, Homo sapiens
  Table A; Target 32993; HLA-A*31:01; KCNU1; ENSG00000215262; CTA
SISNFTTR

SEQ ID NO: 32994 - protein, 8 aa, Homo sapiens
  Table A; Target 32994; HLA-A*33:03; KCNU1; ENSG00000215262; CTA
SISNFTTR

SEQ ID NO: 32995 - protein, 8 aa, Homo sapiens
  Table A; Target 32995; HLA-A*68:01; KCNU1; ENSG00000215262; CTA
SISNFTTR

SEQ ID NO: 32996 - protein, 8 aa, Homo sapiens
  Table A; Target 32996; HLA-C*07:06; KCNU1; ENSG00000215262; CTA
SISNFTTR

SEQ ID NO: 32997 - protein, 8 aa, Homo sapiens
  Table A; Target 32997; HLA-A*02:04; KCNU1; ENSG00000215262; CTA
SIVDIFTI

SEQ ID NO: 32998 - protein, 8 aa, Homo sapiens
  Table A; Target 32998; HLA-B*13:02; KCNU1; ENSG00000215262; CTA
SIVDIFTI

SEQ ID NO: 32999 - protein, 8 aa, Homo sapiens
  Table A; Target 32999; HLA-A*03:02; KCNU1; ENSG00000215262; CTA
SLDKVTLK

SEQ ID NO: 33000 - protein, 9 aa, Homo sapiens
  Table A; Target 33000; HLA-A*02:07; KCNU1; ENSG00000215262; CTA
SLDKVTLKR

SEQ ID NO: 33001 - protein, 9 aa, Homo sapiens
  Table A; Target 33001; HLA-A*03:01; KCNU1; ENSG00000215262; CTA
SLDKVTLKR

SEQ ID NO: 33002 - protein, 10 aa, Homo sapiens
  Table A; Target 33002; HLA-A*02:01; KCNU1; ENSG00000215262; CTA
SLDLFGILCV

SEQ ID NO: 33003 - protein, 9 aa, Homo sapiens
  Table A; Target 33003; HLA-B*44:02; KCNU1; ENSG00000215262; CTA
SLDYLQREW

SEQ ID NO: 33004 - protein, 10 aa, Homo sapiens
  Table A; Target 33004; HLA-A*02:01; KCNU1; ENSG00000215262; CTA
SLFTDGFCGL

SEQ ID NO: 33005 - protein, 10 aa, Homo sapiens
  Table A; Target 33005; HLA-A*02:03; KCNU1; ENSG00000215262; CTA
SLFTDGFCGL

SEQ ID NO: 33006 - protein, 10 aa, Homo sapiens
  Table A; Target 33006; HLA-A*02:04; KCNU1; ENSG00000215262; CTA
SLFTDGFCGL

SEQ ID NO: 33007 - protein, 10 aa, Homo sapiens
  Table A; Target 33007; HLA-A*02:07; KCNU1; ENSG00000215262; CTA
SLFTDGFCGL

SEQ ID NO: 33008 - protein, 9 aa, Homo sapiens
  Table A; Target 33008; HLA-A*03:01; KCNU1; ENSG00000215262; CTA
SLFVEQNKK

SEQ ID NO: 33009 - protein, 9 aa, Homo sapiens
  Table A; Target 33009; HLA-A*03:02; KCNU1; ENSG00000215262; CTA
SLFVEQNKK

SEQ ID NO: 33010 - protein, 9 aa, Homo sapiens
  Table A; Target 33010; HLA-A*11:01; KCNU1; ENSG00000215262; CTA
SLFVEQNKK

SEQ ID NO: 33011 - protein, 10 aa, Homo sapiens
  Table A; Target 33011; HLA-A*02:03; KCNU1; ENSG00000215262; CTA
SLFVEQNKKV

SEQ ID NO: 33012 - protein, 10 aa, Homo sapiens
  Table A; Target 33012; HLA-A*02:03; KCNU1; ENSG00000215262; CTA
SLHETILSDV

SEQ ID NO: 33013 - protein, 9 aa, Homo sapiens
  Table A; Target 33013; HLA-A*31:01; KCNU1; ENSG00000215262; CTA
SLHFQGQFR

SEQ ID NO: 33014 - protein, 10 aa, Homo sapiens
  Table A; Target 33014; HLA-A*29:02; KCNU1; ENSG00000215262; CTA
SLLATAFYNY

SEQ ID NO: 33015 - protein, 9 aa, Homo sapiens
  Table A; Target 33015; HLA-A*02:01; KCNU1; ENSG00000215262; CTA
SLQETNLHL

SEQ ID NO: 33016 - protein, 9 aa, Homo sapiens
  Table A; Target 33016; HLA-A*02:03; KCNU1; ENSG00000215262; CTA
SLQETNLHL

SEQ ID NO: 33017 - protein, 9 aa, Homo sapiens
  Table A; Target 33017; HLA-A*02:04; KCNU1; ENSG00000215262; CTA
SLQETNLHL

SEQ ID NO: 33018 - protein, 9 aa, Homo sapiens
  Table A; Target 33018; HLA-A*02:07; KCNU1; ENSG00000215262; CTA
SLQETNLHL

SEQ ID NO: 33019 - protein, 9 aa, Homo sapiens
  Table A; Target 33019; HLA-B*13:02; KCNU1; ENSG00000215262; CTA
SLQETNLHL

SEQ ID NO: 33020 - protein, 9 aa, Homo sapiens
  Table A; Target 33020; HLA-B*55:01; KCNU1; ENSG00000215262; CTA
SLQETNLHL

SEQ ID NO: 33021 - protein, 8 aa, Homo sapiens
  Table A; Target 33021; HLA-B*13:02; KCNU1; ENSG00000215262; CTA
SLQKSYEI

SEQ ID NO: 33022 - protein, 11 aa, Homo sapiens
  Table A; Target 33022; HLA-A*03:02; KCNU1; ENSG00000215262; CTA
SLQKSYEIVNK

SEQ ID NO: 33023 - protein, 11 aa, Homo sapiens
  Table A; Target 33023; HLA-A*11:01; KCNU1; ENSG00000215262; CTA
SLQKSYEIVNK

SEQ ID NO: 33024 - protein, 9 aa, Homo sapiens
  Table A; Target 33024; HLA-B*08:01; KCNU1; ENSG00000215262; CTA
SMKNKILTQ

SEQ ID NO: 33025 - protein, 10 aa, Homo sapiens
  Table A; Target 33025; HLA-A*31:01; KCNU1; ENSG00000215262; CTA
SMKNKILTQR

SEQ ID NO: 33026 - protein, 8 aa, Homo sapiens
  Table A; Target 33026; HLA-C*16:01; KCNU1; ENSG00000215262; CTA
SNFTTRTL

SEQ ID NO: 33027 - protein, 9 aa, Homo sapiens
  Table A; Target 33027; HLA-B*08:01; KCNU1; ENSG00000215262; CTA
SNIMRVLSI

SEQ ID NO: 33028 - protein, 8 aa, Homo sapiens
  Table A; Target 33028; HLA-B*08:01; KCNU1; ENSG00000215262; CTA
SNYTRKEL

SEQ ID NO: 33029 - protein, 8 aa, Homo sapiens
  Table A; Target 33029; HLA-C*16:01; KCNU1; ENSG00000215262; CTA
SNYTRKEL

SEQ ID NO: 33030 - protein, 9 aa, Homo sapiens
  Table A; Target 33030; HLA-A*68:01; KCNU1; ENSG00000215262; CTA
SPVYSYQPR

SEQ ID NO: 33031 - protein, 9 aa, Homo sapiens
  Table A; Target 33031; HLA-C*07:06; KCNU1; ENSG00000215262; CTA
SPVYSYQPR

SEQ ID NO: 33032 - protein, 9 aa, Homo sapiens
  Table A; Target 33032; HLA-B*39:01; KCNU1; ENSG00000215262; CTA
SQIPLGDNA

SEQ ID NO: 33033 - protein, 11 aa, Homo sapiens
  Table A; Target 33033; HLA-B*27:05; KCNU1; ENSG00000215262; CTA
SRISGQDSPPR

SEQ ID NO: 33034 - protein, 8 aa, Homo sapiens
  Table A; Target 33034; HLA-C*05:01; KCNU1; ENSG00000215262; CTA
SSDPSPSV

SEQ ID NO: 33035 - protein, 9 aa, Homo sapiens
  Table A; Target 33035; HLA-A*03:01; KCNU1; ENSG00000215262; CTA
SSISNFTTR

SEQ ID NO: 33036 - protein, 9 aa, Homo sapiens
  Table A; Target 33036; HLA-A*03:02; KCNU1; ENSG00000215262; CTA
SSISNFTTR

SEQ ID NO: 33037 - protein, 9 aa, Homo sapiens
  Table A; Target 33037; HLA-A*11:01; KCNU1; ENSG00000215262; CTA
SSISNFTTR

SEQ ID NO: 33038 - protein, 9 aa, Homo sapiens
  Table A; Target 33038; HLA-A*25:01; KCNU1; ENSG00000215262; CTA
SSISNFTTR

SEQ ID NO: 33039 - protein, 9 aa, Homo sapiens
  Table A; Target 33039; HLA-A*31:01; KCNU1; ENSG00000215262; CTA
SSISNFTTR

SEQ ID NO: 33040 - protein, 9 aa, Homo sapiens
  Table A; Target 33040; HLA-A*32:01; KCNU1; ENSG00000215262; CTA
SSISNFTTR

SEQ ID NO: 33041 - protein, 9 aa, Homo sapiens
  Table A; Target 33041; HLA-A*33:01; KCNU1; ENSG00000215262; CTA
SSISNFTTR

SEQ ID NO: 33042 - protein, 9 aa, Homo sapiens
  Table A; Target 33042; HLA-A*33:03; KCNU1; ENSG00000215262; CTA
SSISNFTTR

SEQ ID NO: 33043 - protein, 9 aa, Homo sapiens
  Table A; Target 33043; HLA-A*68:01; KCNU1; ENSG00000215262; CTA
SSISNFTTR

SEQ ID NO: 33044 - protein, 9 aa, Homo sapiens
  Table A; Target 33044; HLA-A*68:02; KCNU1; ENSG00000215262; CTA
SSISNFTTR

SEQ ID NO: 33045 - protein, 9 aa, Homo sapiens
  Table A; Target 33045; HLA-B*57:01; KCNU1; ENSG00000215262; CTA
SSISNFTTR

SEQ ID NO: 33046 - protein, 9 aa, Homo sapiens
  Table A; Target 33046; HLA-B*58:01; KCNU1; ENSG00000215262; CTA
SSISNFTTR

SEQ ID NO: 33047 - protein, 9 aa, Homo sapiens
  Table A; Target 33047; HLA-C*02:02; KCNU1; ENSG00000215262; CTA
SSISNFTTR

SEQ ID NO: 33048 - protein, 9 aa, Homo sapiens
  Table A; Target 33048; HLA-C*07:06; KCNU1; ENSG00000215262; CTA
SSISNFTTR

SEQ ID NO: 33049 - protein, 11 aa, Homo sapiens
  Table A; Target 33049; HLA-A*11:01; KCNU1; ENSG00000215262; CTA
SSQIPLGDNAK

SEQ ID NO: 33050 - protein, 9 aa, Homo sapiens
  Table A; Target 33050; HLA-A*02:01; KCNU1; ENSG00000215262; CTA
SSSDPSPSV

SEQ ID NO: 33051 - protein, 9 aa, Homo sapiens
  Table A; Target 33051; HLA-B*13:02; KCNU1; ENSG00000215262; CTA
SSSDPSPSV

SEQ ID NO: 33052 - protein, 9 aa, Homo sapiens
  Table A; Target 33052; HLA-B*27:05; KCNU1; ENSG00000215262; CTA
SSSDPSPSV

SEQ ID NO: 33053 - protein, 9 aa, Homo sapiens
  Table A; Target 33053; HLA-B*39:01; KCNU1; ENSG00000215262; CTA
SSSDPSPSV

SEQ ID NO: 33054 - protein, 9 aa, Homo sapiens
  Table A; Target 33054; HLA-B*51:01; KCNU1; ENSG00000215262; CTA
SSSDPSPSV

SEQ ID NO: 33055 - protein, 9 aa, Homo sapiens
  Table A; Target 33055; HLA-C*02:02; KCNU1; ENSG00000215262; CTA
SSSDPSPSV

SEQ ID NO: 33056 - protein, 9 aa, Homo sapiens
  Table A; Target 33056; HLA-C*03:03; KCNU1; ENSG00000215262; CTA
SSSDPSPSV

SEQ ID NO: 33057 - protein, 9 aa, Homo sapiens
  Table A; Target 33057; HLA-C*03:04; KCNU1; ENSG00000215262; CTA
SSSDPSPSV

SEQ ID NO: 33058 - protein, 9 aa, Homo sapiens
  Table A; Target 33058; HLA-C*05:01; KCNU1; ENSG00000215262; CTA
SSSDPSPSV

SEQ ID NO: 33059 - protein, 9 aa, Homo sapiens
  Table A; Target 33059; HLA-C*06:02; KCNU1; ENSG00000215262; CTA
SSSDPSPSV

SEQ ID NO: 33060 - protein, 9 aa, Homo sapiens
  Table A; Target 33060; HLA-C*12:03; KCNU1; ENSG00000215262; CTA
SSSDPSPSV

SEQ ID NO: 33061 - protein, 9 aa, Homo sapiens
  Table A; Target 33061; HLA-C*16:01; KCNU1; ENSG00000215262; CTA
SSSDPSPSV

SEQ ID NO: 33062 - protein, 9 aa, Homo sapiens
  Table A; Target 33062; HLA-C*16:02; KCNU1; ENSG00000215262; CTA
SSSDPSPSV

SEQ ID NO: 33063 - protein, 9 aa, Homo sapiens
  Table A; Target 33063; HLA-C*16:04; KCNU1; ENSG00000215262; CTA
SSSDPSPSV

SEQ ID NO: 33064 - protein, 9 aa, Homo sapiens
  Table A; Target 33064; HLA-A*03:01; KCNU1; ENSG00000215262; CTA
SSYEALKGK

SEQ ID NO: 33065 - protein, 9 aa, Homo sapiens
  Table A; Target 33065; HLA-A*03:02; KCNU1; ENSG00000215262; CTA
SSYEALKGK

SEQ ID NO: 33066 - protein, 9 aa, Homo sapiens
  Table A; Target 33066; HLA-A*11:01; KCNU1; ENSG00000215262; CTA
SSYEALKGK

SEQ ID NO: 33067 - protein, 10 aa, Homo sapiens
  Table A; Target 33067; HLA-A*11:01; KCNU1; ENSG00000215262; CTA
SSYEALKGKK

SEQ ID NO: 33068 - protein, 9 aa, Homo sapiens
  Table A; Target 33068; HLA-A*02:03; KCNU1; ENSG00000215262; CTA
STAFSTGTV

SEQ ID NO: 33069 - protein, 10 aa, Homo sapiens
  Table A; Target 33069; HLA-A*25:01; KCNU1; ENSG00000215262; CTA
STAFSTGTVF

SEQ ID NO: 33070 - protein, 10 aa, Homo sapiens
  Table A; Target 33070; HLA-A*26:01; KCNU1; ENSG00000215262; CTA
STAFSTGTVF

SEQ ID NO: 33071 - protein, 10 aa, Homo sapiens
  Table A; Target 33071; HLA-B*15:01; KCNU1; ENSG00000215262; CTA
STAFSTGTVF

SEQ ID NO: 33072 - protein, 10 aa, Homo sapiens
  Table A; Target 33072; HLA-B*15:03; KCNU1; ENSG00000215262; CTA
STAFSTGTVF

SEQ ID NO: 33073 - protein, 10 aa, Homo sapiens
  Table A; Target 33073; HLA-B*39:01; KCNU1; ENSG00000215262; CTA
STAFSTGTVF

SEQ ID NO: 33074 - protein, 10 aa, Homo sapiens
  Table A; Target 33074; HLA-C*02:02; KCNU1; ENSG00000215262; CTA
STAFSTGTVF

SEQ ID NO: 33075 - protein, 10 aa, Homo sapiens
  Table A; Target 33075; HLA-C*07:04; KCNU1; ENSG00000215262; CTA
STAFSTGTVF

SEQ ID NO: 33076 - protein, 8 aa, Homo sapiens
  Table A; Target 33076; HLA-B*37:01; KCNU1; ENSG00000215262; CTA
STSSISNF

SEQ ID NO: 33077 - protein, 11 aa, Homo sapiens
  Table A; Target 33077; HLA-A*03:02; KCNU1; ENSG00000215262; CTA
STSSISNFTTR

SEQ ID NO: 33078 - protein, 11 aa, Homo sapiens
  Table A; Target 33078; HLA-A*11:01; KCNU1; ENSG00000215262; CTA
STSSISNFTTR

SEQ ID NO: 33079 - protein, 11 aa, Homo sapiens
  Table A; Target 33079; HLA-A*31:01; KCNU1; ENSG00000215262; CTA
STSSISNFTTR

SEQ ID NO: 33080 - protein, 11 aa, Homo sapiens
  Table A; Target 33080; HLA-A*33:01; KCNU1; ENSG00000215262; CTA
STSSISNFTTR

SEQ ID NO: 33081 - protein, 11 aa, Homo sapiens
  Table A; Target 33081; HLA-A*33:03; KCNU1; ENSG00000215262; CTA
STSSISNFTTR

SEQ ID NO: 33082 - protein, 11 aa, Homo sapiens
  Table A; Target 33082; HLA-A*68:01; KCNU1; ENSG00000215262; CTA
STSSISNFTTR

SEQ ID NO: 33083 - protein, 11 aa, Homo sapiens
  Table A; Target 33083; HLA-A*68:02; KCNU1; ENSG00000215262; CTA
STSSISNFTTR

SEQ ID NO: 33084 - protein, 11 aa, Homo sapiens
  Table A; Target 33084; HLA-C*07:06; KCNU1; ENSG00000215262; CTA
STSSISNFTTR

SEQ ID NO: 33085 - protein, 9 aa, Homo sapiens
  Table A; Target 33085; HLA-A*02:04; KCNU1; ENSG00000215262; CTA
STTRIIIQI

SEQ ID NO: 33086 - protein, 9 aa, Homo sapiens
  Table A; Target 33086; HLA-A*68:01; KCNU1; ENSG00000215262; CTA
STTRIIIQI

SEQ ID NO: 33087 - protein, 9 aa, Homo sapiens
  Table A; Target 33087; HLA-A*68:02; KCNU1; ENSG00000215262; CTA
STTRIIIQI

SEQ ID NO: 33088 - protein, 9 aa, Homo sapiens
  Table A; Target 33088; HLA-B*13:02; KCNU1; ENSG00000215262; CTA
STTRIIIQI

SEQ ID NO: 33089 - protein, 9 aa, Homo sapiens
  Table A; Target 33089; HLA-B*57:01; KCNU1; ENSG00000215262; CTA
STTRIIIQI

SEQ ID NO: 33090 - protein, 9 aa, Homo sapiens
  Table A; Target 33090; HLA-C*16:02; KCNU1; ENSG00000215262; CTA
STTRIIIQI

SEQ ID NO: 33091 - protein, 10 aa, Homo sapiens
  Table A; Target 33091; HLA-A*68:02; KCNU1; ENSG00000215262; CTA
STTRIIIQIL

SEQ ID NO: 33092 - protein, 9 aa, Homo sapiens
  Table A; Target 33092; HLA-A*68:02; KCNU1; ENSG00000215262; CTA
STVGFGDVV

SEQ ID NO: 33093 - protein, 9 aa, Homo sapiens
  Table A; Target 33093; HLA-B*13:02; KCNU1; ENSG00000215262; CTA
STVGFGDVV

SEQ ID NO: 33094 - protein, 9 aa, Homo sapiens
  Table A; Target 33094; HLA-B*39:01; KCNU1; ENSG00000215262; CTA
STVGFGDVV

SEQ ID NO: 33095 - protein, 11 aa, Homo sapiens
  Table A; Target 33095; HLA-A*03:01; KCNU1; ENSG00000215262; CTA
STVGFGDVVAK

SEQ ID NO: 33096 - protein, 11 aa, Homo sapiens
  Table A; Target 33096; HLA-A*03:02; KCNU1; ENSG00000215262; CTA
STVGFGDVVAK

SEQ ID NO: 33097 - protein, 11 aa, Homo sapiens
  Table A; Target 33097; HLA-A*31:01; KCNU1; ENSG00000215262; CTA
STVGFGDVVAK

SEQ ID NO: 33098 - protein, 11 aa, Homo sapiens
  Table A; Target 33098; HLA-A*68:01; KCNU1; ENSG00000215262; CTA
STVGFGDVVAK

SEQ ID NO: 33099 - protein, 11 aa, Homo sapiens
  Table A; Target 33099; HLA-A*68:02; KCNU1; ENSG00000215262; CTA
STVGFGDVVAK

SEQ ID NO: 33100 - protein, 11 aa, Homo sapiens
  Table A; Target 33100; HLA-B*27:02; KCNU1; ENSG00000215262; CTA
STVGFGDVVAK

SEQ ID NO: 33101 - protein, 11 aa, Homo sapiens
  Table A; Target 33101; HLA-C*07:06; KCNU1; ENSG00000215262; CTA
STVGFGDVVAK

SEQ ID NO: 33102 - protein, 9 aa, Homo sapiens
  Table A; Target 33102; HLA-A*03:01; KCNU1; ENSG00000215262; CTA
SVKKWQIIK

SEQ ID NO: 33103 - protein, 9 aa, Homo sapiens
  Table A; Target 33103; HLA-A*01:01; KCNU1; ENSG00000215262; CTA
SVSEETPGY

SEQ ID NO: 33104 - protein, 9 aa, Homo sapiens
  Table A; Target 33104; HLA-A*25:01; KCNU1; ENSG00000215262; CTA
SVSEETPGY

SEQ ID NO: 33105 - protein, 9 aa, Homo sapiens
  Table A; Target 33105; HLA-A*26:01; KCNU1; ENSG00000215262; CTA
SVSEETPGY

SEQ ID NO: 33106 - protein, 9 aa, Homo sapiens
  Table A; Target 33106; HLA-A*29:02; KCNU1; ENSG00000215262; CTA
SVSEETPGY

SEQ ID NO: 33107 - protein, 9 aa, Homo sapiens
  Table A; Target 33107; HLA-A*30:02; KCNU1; ENSG00000215262; CTA
SVSEETPGY

SEQ ID NO: 33108 - protein, 9 aa, Homo sapiens
  Table A; Target 33108; HLA-A*32:01; KCNU1; ENSG00000215262; CTA
SVSEETPGY

SEQ ID NO: 33109 - protein, 9 aa, Homo sapiens
  Table A; Target 33109; HLA-B*15:01; KCNU1; ENSG00000215262; CTA
SVSEETPGY

SEQ ID NO: 33110 - protein, 9 aa, Homo sapiens
  Table A; Target 33110; HLA-B*35:01; KCNU1; ENSG00000215262; CTA
SVSEETPGY

SEQ ID NO: 33111 - protein, 9 aa, Homo sapiens
  Table A; Target 33111; HLA-C*07:04; KCNU1; ENSG00000215262; CTA
SVSEETPGY

SEQ ID NO: 33112 - protein, 9 aa, Homo sapiens
  Table A; Target 33112; HLA-C*07:06; KCNU1; ENSG00000215262; CTA
SVSEETPGY

SEQ ID NO: 33113 - protein, 9 aa, Homo sapiens
  Table A; Target 33113; HLA-A*25:01; KCNU1; ENSG00000215262; CTA
SVTAFLRNF

SEQ ID NO: 33114 - protein, 9 aa, Homo sapiens
  Table A; Target 33114; HLA-A*32:01; KCNU1; ENSG00000215262; CTA
SVTAFLRNF

SEQ ID NO: 33115 - protein, 9 aa, Homo sapiens
  Table A; Target 33115; HLA-B*57:01; KCNU1; ENSG00000215262; CTA
SVTAFLRNF

SEQ ID NO: 33116 - protein, 9 aa, Homo sapiens
  Table A; Target 33116; HLA-C*16:01; KCNU1; ENSG00000215262; CTA
SVTAFLRNF

SEQ ID NO: 33117 - protein, 11 aa, Homo sapiens
  Table A; Target 33117; HLA-A*26:01; KCNU1; ENSG00000215262; CTA
SVTETLYSPVY

SEQ ID NO: 33118 - protein, 11 aa, Homo sapiens
  Table A; Target 33118; HLA-A*30:02; KCNU1; ENSG00000215262; CTA
SVTETLYSPVY

SEQ ID NO: 33119 - protein, 9 aa, Homo sapiens
  Table A; Target 33119; HLA-A*02:04; KCNU1; ENSG00000215262; CTA
SYFESIYLV

SEQ ID NO: 33120 - protein, 9 aa, Homo sapiens
  Table A; Target 33120; HLA-A*24:02; KCNU1; ENSG00000215262; CTA
SYFESIYLV

SEQ ID NO: 33121 - protein, 9 aa, Homo sapiens
  Table A; Target 33121; HLA-A*29:02; KCNU1; ENSG00000215262; CTA
SYFESIYLV

SEQ ID NO: 33122 - protein, 9 aa, Homo sapiens
  Table A; Target 33122; HLA-A*68:02; KCNU1; ENSG00000215262; CTA
SYFESIYLV

SEQ ID NO: 33123 - protein, 10 aa, Homo sapiens
  Table A; Target 33123; HLA-A*29:02; KCNU1; ENSG00000215262; CTA
SYFESIYLVM

SEQ ID NO: 33124 - protein, 9 aa, Homo sapiens
  Table A; Target 33124; HLA-A*23:01; KCNU1; ENSG00000215262; CTA
SYQPRTNSL

SEQ ID NO: 33125 - protein, 9 aa, Homo sapiens
  Table A; Target 33125; HLA-A*24:02; KCNU1; ENSG00000215262; CTA
SYQPRTNSL

SEQ ID NO: 33126 - protein, 9 aa, Homo sapiens
  Table A; Target 33126; HLA-B*07:02; KCNU1; ENSG00000215262; CTA
SYQPRTNSL

SEQ ID NO: 33127 - protein, 9 aa, Homo sapiens
  Table A; Target 33127; HLA-B*08:01; KCNU1; ENSG00000215262; CTA
SYQPRTNSL

SEQ ID NO: 33128 - protein, 9 aa, Homo sapiens
  Table A; Target 33128; HLA-B*37:01; KCNU1; ENSG00000215262; CTA
SYQPRTNSL

SEQ ID NO: 33129 - protein, 9 aa, Homo sapiens
  Table A; Target 33129; HLA-C*01:02; KCNU1; ENSG00000215262; CTA
SYQPRTNSL

SEQ ID NO: 33130 - protein, 9 aa, Homo sapiens
  Table A; Target 33130; HLA-C*07:02; KCNU1; ENSG00000215262; CTA
SYQPRTNSL

SEQ ID NO: 33131 - protein, 9 aa, Homo sapiens
  Table A; Target 33131; HLA-C*14:02; KCNU1; ENSG00000215262; CTA
SYQPRTNSL

SEQ ID NO: 33132 - protein, 9 aa, Homo sapiens
  Table A; Target 33132; HLA-C*16:01; KCNU1; ENSG00000215262; CTA
SYQPRTNSL

SEQ ID NO: 33133 - protein, 9 aa, Homo sapiens
  Table A; Target 33133; HLA-C*16:02; KCNU1; ENSG00000215262; CTA
SYQPRTNSL

SEQ ID NO: 33134 - protein, 11 aa, Homo sapiens
  Table A; Target 33134; HLA-A*23:01; KCNU1; ENSG00000215262; CTA
SYQPRTNSLSF

SEQ ID NO: 33135 - protein, 11 aa, Homo sapiens
  Table A; Target 33135; HLA-A*24:02; KCNU1; ENSG00000215262; CTA
SYQPRTNSLSF

SEQ ID NO: 33136 - protein, 8 aa, Homo sapiens
  Table A; Target 33136; HLA-C*02:02; KCNU1; ENSG00000215262; CTA
TAAGFIHL

SEQ ID NO: 33137 - protein, 8 aa, Homo sapiens
  Table A; Target 33137; HLA-C*03:03; KCNU1; ENSG00000215262; CTA
TAAGFIHL

SEQ ID NO: 33138 - protein, 8 aa, Homo sapiens
  Table A; Target 33138; HLA-C*03:04; KCNU1; ENSG00000215262; CTA
TAAGFIHL

SEQ ID NO: 33139 - protein, 8 aa, Homo sapiens
  Table A; Target 33139; HLA-C*16:01; KCNU1; ENSG00000215262; CTA
TAAGFIHL

SEQ ID NO: 33140 - protein, 9 aa, Homo sapiens
  Table A; Target 33140; HLA-A*02:01; KCNU1; ENSG00000215262; CTA
TAAGFIHLV

SEQ ID NO: 33141 - protein, 9 aa, Homo sapiens
  Table A; Target 33141; HLA-A*02:03; KCNU1; ENSG00000215262; CTA
TAAGFIHLV

SEQ ID NO: 33142 - protein, 9 aa, Homo sapiens
  Table A; Target 33142; HLA-A*02:04; KCNU1; ENSG00000215262; CTA
TAAGFIHLV

SEQ ID NO: 33143 - protein, 9 aa, Homo sapiens
  Table A; Target 33143; HLA-A*02:07; KCNU1; ENSG00000215262; CTA
TAAGFIHLV

SEQ ID NO: 33144 - protein, 9 aa, Homo sapiens
  Table A; Target 33144; HLA-A*26:01; KCNU1; ENSG00000215262; CTA
TAAGFIHLV

SEQ ID NO: 33145 - protein, 9 aa, Homo sapiens
  Table A; Target 33145; HLA-A*68:01; KCNU1; ENSG00000215262; CTA
TAAGFIHLV

SEQ ID NO: 33146 - protein, 9 aa, Homo sapiens
  Table A; Target 33146; HLA-A*68:02; KCNU1; ENSG00000215262; CTA
TAAGFIHLV

SEQ ID NO: 33147 - protein, 9 aa, Homo sapiens
  Table A; Target 33147; HLA-B*13:02; KCNU1; ENSG00000215262; CTA
TAAGFIHLV

SEQ ID NO: 33148 - protein, 9 aa, Homo sapiens
  Table A; Target 33148; HLA-B*35:01; KCNU1; ENSG00000215262; CTA
TAAGFIHLV

SEQ ID NO: 33149 - protein, 9 aa, Homo sapiens
  Table A; Target 33149; HLA-B*51:01; KCNU1; ENSG00000215262; CTA
TAAGFIHLV

SEQ ID NO: 33150 - protein, 9 aa, Homo sapiens
  Table A; Target 33150; HLA-B*54:01; KCNU1; ENSG00000215262; CTA
TAAGFIHLV

SEQ ID NO: 33151 - protein, 9 aa, Homo sapiens
  Table A; Target 33151; HLA-B*55:01; KCNU1; ENSG00000215262; CTA
TAAGFIHLV

SEQ ID NO: 33152 - protein, 9 aa, Homo sapiens
  Table A; Target 33152; HLA-C*02:02; KCNU1; ENSG00000215262; CTA
TAAGFIHLV

SEQ ID NO: 33153 - protein, 9 aa, Homo sapiens
  Table A; Target 33153; HLA-C*06:02; KCNU1; ENSG00000215262; CTA
TAAGFIHLV

SEQ ID NO: 33154 - protein, 9 aa, Homo sapiens
  Table A; Target 33154; HLA-C*12:03; KCNU1; ENSG00000215262; CTA
TAAGFIHLV

SEQ ID NO: 33155 - protein, 9 aa, Homo sapiens
  Table A; Target 33155; HLA-C*16:02; KCNU1; ENSG00000215262; CTA
TAAGFIHLV

SEQ ID NO: 33156 - protein, 9 aa, Homo sapiens
  Table A; Target 33156; HLA-C*16:04; KCNU1; ENSG00000215262; CTA
TAAGFIHLV

SEQ ID NO: 33157 - protein, 8 aa, Homo sapiens
  Table A; Target 33157; HLA-B*08:01; KCNU1; ENSG00000215262; CTA
TAFLRNFL

SEQ ID NO: 33158 - protein, 9 aa, Homo sapiens
  Table A; Target 33158; HLA-A*31:01; KCNU1; ENSG00000215262; CTA
TAFLRNFLR

SEQ ID NO: 33159 - protein, 9 aa, Homo sapiens
  Table A; Target 33159; HLA-B*57:01; KCNU1; ENSG00000215262; CTA
TAFLRNFLR

SEQ ID NO: 33160 - protein, 8 aa, Homo sapiens
  Table A; Target 33160; HLA-B*51:01; KCNU1; ENSG00000215262; CTA
TAFSTGTV

SEQ ID NO: 33161 - protein, 8 aa, Homo sapiens
  Table A; Target 33161; HLA-C*12:03; KCNU1; ENSG00000215262; CTA
TAFSTGTV

SEQ ID NO: 33162 - protein, 9 aa, Homo sapiens
  Table A; Target 33162; HLA-A*23:01; KCNU1; ENSG00000215262; CTA
TAFSTGTVF

SEQ ID NO: 33163 - protein, 9 aa, Homo sapiens
  Table A; Target 33163; HLA-A*25:01; KCNU1; ENSG00000215262; CTA
TAFSTGTVF

SEQ ID NO: 33164 - protein, 9 aa, Homo sapiens
  Table A; Target 33164; HLA-A*26:01; KCNU1; ENSG00000215262; CTA
TAFSTGTVF

SEQ ID NO: 33165 - protein, 9 aa, Homo sapiens
  Table A; Target 33165; HLA-A*29:02; KCNU1; ENSG00000215262; CTA
TAFSTGTVF

SEQ ID NO: 33166 - protein, 9 aa, Homo sapiens
  Table A; Target 33166; HLA-A*30:02; KCNU1; ENSG00000215262; CTA
TAFSTGTVF

SEQ ID NO: 33167 - protein, 9 aa, Homo sapiens
  Table A; Target 33167; HLA-A*32:01; KCNU1; ENSG00000215262; CTA
TAFSTGTVF

SEQ ID NO: 33168 - protein, 9 aa, Homo sapiens
  Table A; Target 33168; HLA-A*68:01; KCNU1; ENSG00000215262; CTA
TAFSTGTVF

SEQ ID NO: 33169 - protein, 9 aa, Homo sapiens
  Table A; Target 33169; HLA-B*07:02; KCNU1; ENSG00000215262; CTA
TAFSTGTVF

SEQ ID NO: 33170 - protein, 9 aa, Homo sapiens
  Table A; Target 33170; HLA-B*15:03; KCNU1; ENSG00000215262; CTA
TAFSTGTVF

SEQ ID NO: 33171 - protein, 9 aa, Homo sapiens
  Table A; Target 33171; HLA-B*18:01; KCNU1; ENSG00000215262; CTA
TAFSTGTVF

SEQ ID NO: 33172 - protein, 9 aa, Homo sapiens
  Table A; Target 33172; HLA-B*27:02; KCNU1; ENSG00000215262; CTA
TAFSTGTVF

SEQ ID NO: 33173 - protein, 9 aa, Homo sapiens
  Table A; Target 33173; HLA-B*27:05; KCNU1; ENSG00000215262; CTA
TAFSTGTVF

SEQ ID NO: 33174 - protein, 9 aa, Homo sapiens
  Table A; Target 33174; HLA-B*35:03; KCNU1; ENSG00000215262; CTA
TAFSTGTVF

SEQ ID NO: 33175 - protein, 9 aa, Homo sapiens
  Table A; Target 33175; HLA-B*38:01; KCNU1; ENSG00000215262; CTA
TAFSTGTVF

SEQ ID NO: 33176 - protein, 9 aa, Homo sapiens
  Table A; Target 33176; HLA-B*39:01; KCNU1; ENSG00000215262; CTA
TAFSTGTVF

SEQ ID NO: 33177 - protein, 9 aa, Homo sapiens
  Table A; Target 33177; HLA-B*46:01; KCNU1; ENSG00000215262; CTA
TAFSTGTVF

SEQ ID NO: 33178 - protein, 9 aa, Homo sapiens
  Table A; Target 33178; HLA-B*51:01; KCNU1; ENSG00000215262; CTA
TAFSTGTVF

SEQ ID NO: 33179 - protein, 9 aa, Homo sapiens
  Table A; Target 33179; HLA-B*54:01; KCNU1; ENSG00000215262; CTA
TAFSTGTVF

SEQ ID NO: 33180 - protein, 9 aa, Homo sapiens
  Table A; Target 33180; HLA-B*55:01; KCNU1; ENSG00000215262; CTA
TAFSTGTVF

SEQ ID NO: 33181 - protein, 9 aa, Homo sapiens
  Table A; Target 33181; HLA-B*56:01; KCNU1; ENSG00000215262; CTA
TAFSTGTVF

SEQ ID NO: 33182 - protein, 9 aa, Homo sapiens
  Table A; Target 33182; HLA-B*57:01; KCNU1; ENSG00000215262; CTA
TAFSTGTVF

SEQ ID NO: 33183 - protein, 9 aa, Homo sapiens
  Table A; Target 33183; HLA-B*58:01; KCNU1; ENSG00000215262; CTA
TAFSTGTVF

SEQ ID NO: 33184 - protein, 9 aa, Homo sapiens
  Table A; Target 33184; HLA-C*01:02; KCNU1; ENSG00000215262; CTA
TAFSTGTVF

SEQ ID NO: 33185 - protein, 9 aa, Homo sapiens
  Table A; Target 33185; HLA-C*02:02; KCNU1; ENSG00000215262; CTA
TAFSTGTVF

SEQ ID NO: 33186 - protein, 9 aa, Homo sapiens
  Table A; Target 33186; HLA-C*03:03; KCNU1; ENSG00000215262; CTA
TAFSTGTVF

SEQ ID NO: 33187 - protein, 9 aa, Homo sapiens
  Table A; Target 33187; HLA-C*03:04; KCNU1; ENSG00000215262; CTA
TAFSTGTVF

SEQ ID NO: 33188 - protein, 9 aa, Homo sapiens
  Table A; Target 33188; HLA-C*05:01; KCNU1; ENSG00000215262; CTA
TAFSTGTVF

SEQ ID NO: 33189 - protein, 9 aa, Homo sapiens
  Table A; Target 33189; HLA-C*07:02; KCNU1; ENSG00000215262; CTA
TAFSTGTVF

SEQ ID NO: 33190 - protein, 9 aa, Homo sapiens
  Table A; Target 33190; HLA-C*07:04; KCNU1; ENSG00000215262; CTA
TAFSTGTVF

SEQ ID NO: 33191 - protein, 9 aa, Homo sapiens
  Table A; Target 33191; HLA-C*07:06; KCNU1; ENSG00000215262; CTA
TAFSTGTVF

SEQ ID NO: 33192 - protein, 9 aa, Homo sapiens
  Table A; Target 33192; HLA-C*12:03; KCNU1; ENSG00000215262; CTA
TAFSTGTVF

SEQ ID NO: 33193 - protein, 9 aa, Homo sapiens
  Table A; Target 33193; HLA-C*14:02; KCNU1; ENSG00000215262; CTA
TAFSTGTVF

SEQ ID NO: 33194 - protein, 9 aa, Homo sapiens
  Table A; Target 33194; HLA-C*16:01; KCNU1; ENSG00000215262; CTA
TAFSTGTVF

SEQ ID NO: 33195 - protein, 9 aa, Homo sapiens
  Table A; Target 33195; HLA-C*16:02; KCNU1; ENSG00000215262; CTA
TAFSTGTVF

SEQ ID NO: 33196 - protein, 9 aa, Homo sapiens
  Table A; Target 33196; HLA-C*16:04; KCNU1; ENSG00000215262; CTA
TAFSTGTVF

SEQ ID NO: 33197 - protein, 9 aa, Homo sapiens
  Table A; Target 33197; HLA-A*68:02; KCNU1; ENSG00000215262; CTA
TAFYNYHVL

SEQ ID NO: 33198 - protein, 9 aa, Homo sapiens
  Table A; Target 33198; HLA-B*27:02; KCNU1; ENSG00000215262; CTA
TAFYNYHVL

SEQ ID NO: 33199 - protein, 9 aa, Homo sapiens
  Table A; Target 33199; HLA-B*35:01; KCNU1; ENSG00000215262; CTA
TAFYNYHVL

SEQ ID NO: 33200 - protein, 9 aa, Homo sapiens
  Table A; Target 33200; HLA-B*35:03; KCNU1; ENSG00000215262; CTA
TAFYNYHVL

SEQ ID NO: 33201 - protein, 9 aa, Homo sapiens
  Table A; Target 33201; HLA-B*51:01; KCNU1; ENSG00000215262; CTA
TAFYNYHVL

SEQ ID NO: 33202 - protein, 9 aa, Homo sapiens
  Table A; Target 33202; HLA-B*54:01; KCNU1; ENSG00000215262; CTA
TAFYNYHVL

SEQ ID NO: 33203 - protein, 9 aa, Homo sapiens
  Table A; Target 33203; HLA-C*02:02; KCNU1; ENSG00000215262; CTA
TAFYNYHVL

SEQ ID NO: 33204 - protein, 9 aa, Homo sapiens
  Table A; Target 33204; HLA-C*03:03; KCNU1; ENSG00000215262; CTA
TAFYNYHVL

SEQ ID NO: 33205 - protein, 9 aa, Homo sapiens
  Table A; Target 33205; HLA-C*03:04; KCNU1; ENSG00000215262; CTA
TAFYNYHVL

SEQ ID NO: 33206 - protein, 9 aa, Homo sapiens
  Table A; Target 33206; HLA-C*12:03; KCNU1; ENSG00000215262; CTA
TAFYNYHVL

SEQ ID NO: 33207 - protein, 9 aa, Homo sapiens
  Table A; Target 33207; HLA-C*16:02; KCNU1; ENSG00000215262; CTA
TAFYNYHVL

SEQ ID NO: 33208 - protein, 9 aa, Homo sapiens
  Table A; Target 33208; HLA-C*16:04; KCNU1; ENSG00000215262; CTA
TAFYNYHVL

SEQ ID NO: 33209 - protein, 8 aa, Homo sapiens
  Table A; Target 33209; HLA-A*30:01; KCNU1; ENSG00000215262; CTA
TEAIMATL

SEQ ID NO: 33210 - protein, 8 aa, Homo sapiens
  Table A; Target 33210; HLA-B*18:01; KCNU1; ENSG00000215262; CTA
TEAIMATL

SEQ ID NO: 33211 - protein, 8 aa, Homo sapiens
  Table A; Target 33211; HLA-B*37:01; KCNU1; ENSG00000215262; CTA
TEAIMATL

SEQ ID NO: 33212 - protein, 8 aa, Homo sapiens
  Table A; Target 33212; HLA-B*40:01; KCNU1; ENSG00000215262; CTA
TEAIMATL

SEQ ID NO: 33213 - protein, 8 aa, Homo sapiens
  Table A; Target 33213; HLA-B*40:02; KCNU1; ENSG00000215262; CTA
TEAIMATL

SEQ ID NO: 33214 - protein, 8 aa, Homo sapiens
  Table A; Target 33214; HLA-B*49:01; KCNU1; ENSG00000215262; CTA
TEAIMATL

SEQ ID NO: 33215 - protein, 9 aa, Homo sapiens
  Table A; Target 33215; HLA-B*49:01; KCNU1; ENSG00000215262; CTA
TEAIMATLT

SEQ ID NO: 33216 - protein, 10 aa, Homo sapiens
  Table A; Target 33216; HLA-B*49:01; KCNU1; ENSG00000215262; CTA
TEAIMATLTI

SEQ ID NO: 33217 - protein, 8 aa, Homo sapiens
  Table A; Target 33217; HLA-B*49:01; KCNU1; ENSG00000215262; CTA
TEIQAAFI

SEQ ID NO: 33218 - protein, 9 aa, Homo sapiens
  Table A; Target 33218; HLA-A*30:01; KCNU1; ENSG00000215262; CTA
TEIQAAFIL

SEQ ID NO: 33219 - protein, 9 aa, Homo sapiens
  Table A; Target 33219; HLA-B*40:01; KCNU1; ENSG00000215262; CTA
TEIQAAFIL

SEQ ID NO: 33220 - protein, 9 aa, Homo sapiens
  Table A; Target 33220; HLA-B*40:02; KCNU1; ENSG00000215262; CTA
TEIQAAFIL

SEQ ID NO: 33221 - protein, 9 aa, Homo sapiens
  Table A; Target 33221; HLA-B*44:02; KCNU1; ENSG00000215262; CTA
TEIQAAFIL

SEQ ID NO: 33222 - protein, 9 aa, Homo sapiens
  Table A; Target 33222; HLA-B*44:03; KCNU1; ENSG00000215262; CTA
TEIQAAFIL

SEQ ID NO: 33223 - protein, 9 aa, Homo sapiens
  Table A; Target 33223; HLA-B*49:01; KCNU1; ENSG00000215262; CTA
TEIVFLGET

SEQ ID NO: 33224 - protein, 9 aa, Homo sapiens
  Table A; Target 33224; HLA-B*49:01; KCNU1; ENSG00000215262; CTA
TELKNPSNI

SEQ ID NO: 33225 - protein, 11 aa, Homo sapiens
  Table A; Target 33225; HLA-B*44:02; KCNU1; ENSG00000215262; CTA
TELKNPSNIHF

SEQ ID NO: 33226 - protein, 11 aa, Homo sapiens
  Table A; Target 33226; HLA-B*44:03; KCNU1; ENSG00000215262; CTA
TELKNPSNIHF

SEQ ID NO: 33227 - protein, 8 aa, Homo sapiens
  Table A; Target 33227; HLA-B*18:01; KCNU1; ENSG00000215262; CTA
TETLYSPV

SEQ ID NO: 33228 - protein, 8 aa, Homo sapiens
  Table A; Target 33228; HLA-B*49:01; KCNU1; ENSG00000215262; CTA
TETLYSPV

SEQ ID NO: 33229 - protein, 9 aa, Homo sapiens
  Table A; Target 33229; HLA-A*30:01; KCNU1; ENSG00000215262; CTA
TETLYSPVY

SEQ ID NO: 33230 - protein, 9 aa, Homo sapiens
  Table A; Target 33230; HLA-B*15:03; KCNU1; ENSG00000215262; CTA
TETLYSPVY

SEQ ID NO: 33231 - protein, 9 aa, Homo sapiens
  Table A; Target 33231; HLA-B*18:01; KCNU1; ENSG00000215262; CTA
TETLYSPVY

SEQ ID NO: 33232 - protein, 9 aa, Homo sapiens
  Table A; Target 33232; HLA-B*27:02; KCNU1; ENSG00000215262; CTA
TETLYSPVY

SEQ ID NO: 33233 - protein, 9 aa, Homo sapiens
  Table A; Target 33233; HLA-B*35:01; KCNU1; ENSG00000215262; CTA
TETLYSPVY

SEQ ID NO: 33234 - protein, 9 aa, Homo sapiens
  Table A; Target 33234; HLA-B*37:01; KCNU1; ENSG00000215262; CTA
TETLYSPVY

SEQ ID NO: 33235 - protein, 9 aa, Homo sapiens
  Table A; Target 33235; HLA-B*40:01; KCNU1; ENSG00000215262; CTA
TETLYSPVY

SEQ ID NO: 33236 - protein, 9 aa, Homo sapiens
  Table A; Target 33236; HLA-B*44:02; KCNU1; ENSG00000215262; CTA
TETLYSPVY

SEQ ID NO: 33237 - protein, 9 aa, Homo sapiens
  Table A; Target 33237; HLA-B*44:03; KCNU1; ENSG00000215262; CTA
TETLYSPVY

SEQ ID NO: 33238 - protein, 9 aa, Homo sapiens
  Table A; Target 33238; HLA-B*49:01; KCNU1; ENSG00000215262; CTA
TETLYSPVY

SEQ ID NO: 33239 - protein, 9 aa, Homo sapiens
  Table A; Target 33239; HLA-C*07:01; KCNU1; ENSG00000215262; CTA
TETLYSPVY

SEQ ID NO: 33240 - protein, 9 aa, Homo sapiens
  Table A; Target 33240; HLA-C*07:04; KCNU1; ENSG00000215262; CTA
TETLYSPVY

SEQ ID NO: 33241 - protein, 9 aa, Homo sapiens
  Table A; Target 33241; HLA-C*16:02; KCNU1; ENSG00000215262; CTA
TETLYSPVY

SEQ ID NO: 33242 - protein, 9 aa, Homo sapiens
  Table A; Target 33242; HLA-C*16:04; KCNU1; ENSG00000215262; CTA
TETLYSPVY

SEQ ID NO: 33243 - protein, 11 aa, Homo sapiens
  Table A; Target 33243; HLA-B*18:01; KCNU1; ENSG00000215262; CTA
TETLYSPVYSY

SEQ ID NO: 33244 - protein, 8 aa, Homo sapiens
  Table A; Target 33244; HLA-A*23:01; KCNU1; ENSG00000215262; CTA
TFIMFFTL

SEQ ID NO: 33245 - protein, 8 aa, Homo sapiens
  Table A; Target 33245; HLA-A*23:01; KCNU1; ENSG00000215262; CTA
TFISGSAM

SEQ ID NO: 33246 - protein, 8 aa, Homo sapiens
  Table A; Target 33246; HLA-C*01:02; KCNU1; ENSG00000215262; CTA
TFISGSAM

SEQ ID NO: 33247 - protein, 8 aa, Homo sapiens
  Table A; Target 33247; HLA-C*04:01; KCNU1; ENSG00000215262; CTA
TFISGSAM

SEQ ID NO: 33248 - protein, 8 aa, Homo sapiens
  Table A; Target 33248; HLA-C*14:02; KCNU1; ENSG00000215262; CTA
TFISGSAM

SEQ ID NO: 33249 - protein, 10 aa, Homo sapiens
  Table A; Target 33249; HLA-A*23:01; KCNU1; ENSG00000215262; CTA
TFISGSAMKW

SEQ ID NO: 33250 - protein, 10 aa, Homo sapiens
  Table A; Target 33250; HLA-A*24:02; KCNU1; ENSG00000215262; CTA
TFISGSAMKW

SEQ ID NO: 33251 - protein, 10 aa, Homo sapiens
  Table A; Target 33251; HLA-A*25:01; KCNU1; ENSG00000215262; CTA
TFISGSAMKW

SEQ ID NO: 33252 - protein, 9 aa, Homo sapiens
  Table A; Target 33252; HLA-A*23:01; KCNU1; ENSG00000215262; CTA
TFVGQVLVI

SEQ ID NO: 33253 - protein, 9 aa, Homo sapiens
  Table A; Target 33253; HLA-A*24:02; KCNU1; ENSG00000215262; CTA
TFVGQVLVI

SEQ ID NO: 33254 - protein, 8 aa, Homo sapiens
  Table A; Target 33254; HLA-C*05:01; KCNU1; ENSG00000215262; CTA
TGDNIICF

SEQ ID NO: 33255 - protein, 8 aa, Homo sapiens
  Table A; Target 33255; HLA-C*01:02; KCNU1; ENSG00000215262; CTA
TGGVSSQL

SEQ ID NO: 33256 - protein, 8 aa, Homo sapiens
  Table A; Target 33256; HLA-B*08:01; KCNU1; ENSG00000215262; CTA
TGKSKYKF

SEQ ID NO: 33257 - protein, 9 aa, Homo sapiens
  Table A; Target 33257; HLA-B*15:03; KCNU1; ENSG00000215262; CTA
TGTVFSGSF

SEQ ID NO: 33258 - protein, 9 aa, Homo sapiens
  Table A; Target 33258; HLA-B*39:01; KCNU1; ENSG00000215262; CTA
TGTVFSGSF

SEQ ID NO: 33259 - protein, 9 aa, Homo sapiens
  Table A; Target 33259; HLA-C*03:04; KCNU1; ENSG00000215262; CTA
TGTVFSGSF

SEQ ID NO: 33260 - protein, 9 aa, Homo sapiens
  Table A; Target 33260; HLA-C*14:02; KCNU1; ENSG00000215262; CTA
TGTVFSGSF

SEQ ID NO: 33261 - protein, 9 aa, Homo sapiens
  Table A; Target 33261; HLA-C*16:01; KCNU1; ENSG00000215262; CTA
TGTVFSGSF

SEQ ID NO: 33262 - protein, 11 aa, Homo sapiens
  Table A; Target 33262; HLA-B*38:01; KCNU1; ENSG00000215262; CTA
THSDTNCPPTI

SEQ ID NO: 33263 - protein, 8 aa, Homo sapiens
  Table A; Target 33263; HLA-C*05:01; KCNU1; ENSG00000215262; CTA
TIDSVTET

SEQ ID NO: 33264 - protein, 9 aa, Homo sapiens
  Table A; Target 33264; HLA-A*02:07; KCNU1; ENSG00000215262; CTA
TIDSVTETL

SEQ ID NO: 33265 - protein, 9 aa, Homo sapiens
  Table A; Target 33265; HLA-B*35:03; KCNU1; ENSG00000215262; CTA
TIDSVTETL

SEQ ID NO: 33266 - protein, 9 aa, Homo sapiens
  Table A; Target 33266; HLA-B*38:01; KCNU1; ENSG00000215262; CTA
TIDSVTETL

SEQ ID NO: 33267 - protein, 9 aa, Homo sapiens
  Table A; Target 33267; HLA-C*05:01; KCNU1; ENSG00000215262; CTA
TIDSVTETL

SEQ ID NO: 33268 - protein, 9 aa, Homo sapiens
  Table A; Target 33268; HLA-C*07:04; KCNU1; ENSG00000215262; CTA
TIDSVTETL

SEQ ID NO: 33269 - protein, 10 aa, Homo sapiens
  Table A; Target 33269; HLA-A*01:01; KCNU1; ENSG00000215262; CTA
TIDSVTETLY

SEQ ID NO: 33270 - protein, 9 aa, Homo sapiens
  Table A; Target 33270; HLA-A*03:01; KCNU1; ENSG00000215262; CTA
TIFKCYLAY

SEQ ID NO: 33271 - protein, 9 aa, Homo sapiens
  Table A; Target 33271; HLA-A*29:02; KCNU1; ENSG00000215262; CTA
TIFKCYLAY

SEQ ID NO: 33272 - protein, 9 aa, Homo sapiens
  Table A; Target 33272; HLA-A*03:02; KCNU1; ENSG00000215262; CTA
TILSDVNPR

SEQ ID NO: 33273 - protein, 9 aa, Homo sapiens
  Table A; Target 33273; HLA-A*11:01; KCNU1; ENSG00000215262; CTA
TILSDVNPR

SEQ ID NO: 33274 - protein, 9 aa, Homo sapiens
  Table A; Target 33274; HLA-A*31:01; KCNU1; ENSG00000215262; CTA
TILSDVNPR

SEQ ID NO: 33275 - protein, 9 aa, Homo sapiens
  Table A; Target 33275; HLA-A*33:01; KCNU1; ENSG00000215262; CTA
TILSDVNPR

SEQ ID NO: 33276 - protein, 9 aa, Homo sapiens
  Table A; Target 33276; HLA-A*33:03; KCNU1; ENSG00000215262; CTA
TILSDVNPR

SEQ ID NO: 33277 - protein, 9 aa, Homo sapiens
  Table A; Target 33277; HLA-A*68:01; KCNU1; ENSG00000215262; CTA
TILSDVNPR

SEQ ID NO: 33278 - protein, 9 aa, Homo sapiens
  Table A; Target 33278; HLA-B*27:02; KCNU1; ENSG00000215262; CTA
TILSDVNPR

SEQ ID NO: 33279 - protein, 9 aa, Homo sapiens
  Table A; Target 33279; HLA-B*27:05; KCNU1; ENSG00000215262; CTA
TILSDVNPR

SEQ ID NO: 33280 - protein, 9 aa, Homo sapiens
  Table A; Target 33280; HLA-C*07:06; KCNU1; ENSG00000215262; CTA
TILSDVNPR

SEQ ID NO: 33281 - protein, 9 aa, Homo sapiens
  Table A; Target 33281; HLA-A*03:01; KCNU1; ENSG00000215262; CTA
TIPPTFISY

SEQ ID NO: 33282 - protein, 9 aa, Homo sapiens
  Table A; Target 33282; HLA-A*25:01; KCNU1; ENSG00000215262; CTA
TIPPTFISY

SEQ ID NO: 33283 - protein, 9 aa, Homo sapiens
  Table A; Target 33283; HLA-A*26:01; KCNU1; ENSG00000215262; CTA
TIPPTFISY

SEQ ID NO: 33284 - protein, 9 aa, Homo sapiens
  Table A; Target 33284; HLA-A*29:02; KCNU1; ENSG00000215262; CTA
TIPPTFISY

SEQ ID NO: 33285 - protein, 9 aa, Homo sapiens
  Table A; Target 33285; HLA-A*32:01; KCNU1; ENSG00000215262; CTA
TIPPTFISY

SEQ ID NO: 33286 - protein, 9 aa, Homo sapiens
  Table A; Target 33286; HLA-B*15:01; KCNU1; ENSG00000215262; CTA
TIPPTFISY

SEQ ID NO: 33287 - protein, 9 aa, Homo sapiens
  Table A; Target 33287; HLA-B*15:03; KCNU1; ENSG00000215262; CTA
TIPPTFISY

SEQ ID NO: 33288 - protein, 9 aa, Homo sapiens
  Table A; Target 33288; HLA-B*35:01; KCNU1; ENSG00000215262; CTA
TIPPTFISY

SEQ ID NO: 33289 - protein, 9 aa, Homo sapiens
  Table A; Target 33289; HLA-B*46:01; KCNU1; ENSG00000215262; CTA
TIPPTFISY

SEQ ID NO: 33290 - protein, 9 aa, Homo sapiens
  Table A; Target 33290; HLA-C*01:02; KCNU1; ENSG00000215262; CTA
TIPPTFISY

SEQ ID NO: 33291 - protein, 9 aa, Homo sapiens
  Table A; Target 33291; HLA-C*02:02; KCNU1; ENSG00000215262; CTA
TIPPTFISY

SEQ ID NO: 33292 - protein, 9 aa, Homo sapiens
  Table A; Target 33292; HLA-C*07:04; KCNU1; ENSG00000215262; CTA
TIPPTFISY

SEQ ID NO: 33293 - protein, 11 aa, Homo sapiens
  Table A; Target 33293; HLA-A*02:07; KCNU1; ENSG00000215262; CTA
TIPPTFISYYL

SEQ ID NO: 33294 - protein, 9 aa, Homo sapiens
  Table A; Target 33294; HLA-A*02:01; KCNU1; ENSG00000215262; CTA
TLGSLILFA

SEQ ID NO: 33295 - protein, 9 aa, Homo sapiens
  Table A; Target 33295; HLA-A*02:03; KCNU1; ENSG00000215262; CTA
TLGSLILFA

SEQ ID NO: 33296 - protein, 9 aa, Homo sapiens
  Table A; Target 33296; HLA-A*02:04; KCNU1; ENSG00000215262; CTA
TLGSLILFA

SEQ ID NO: 33297 - protein, 11 aa, Homo sapiens
  Table A; Target 33297; HLA-A*30:02; KCNU1; ENSG00000215262; CTA
TLGSLILFANY

SEQ ID NO: 33298 - protein, 9 aa, Homo sapiens
  Table A; Target 33298; HLA-B*13:02; KCNU1; ENSG00000215262; CTA
TLTIGSLQI

SEQ ID NO: 33299 - protein, 9 aa, Homo sapiens
  Table A; Target 33299; HLA-B*35:01; KCNU1; ENSG00000215262; CTA
TLVDTEAIM

SEQ ID NO: 33300 - protein, 9 aa, Homo sapiens
  Table A; Target 33300; HLA-B*35:03; KCNU1; ENSG00000215262; CTA
TLVDTEAIM

SEQ ID NO: 33301 - protein, 9 aa, Homo sapiens
  Table A; Target 33301; HLA-B*39:01; KCNU1; ENSG00000215262; CTA
TLVDTEAIM

SEQ ID NO: 33302 - protein, 9 aa, Homo sapiens
  Table A; Target 33302; HLA-B*55:01; KCNU1; ENSG00000215262; CTA
TLVDTEAIM

SEQ ID NO: 33303 - protein, 9 aa, Homo sapiens
  Table A; Target 33303; HLA-C*03:03; KCNU1; ENSG00000215262; CTA
TLVDTEAIM

SEQ ID NO: 33304 - protein, 9 aa, Homo sapiens
  Table A; Target 33304; HLA-A*01:01; KCNU1; ENSG00000215262; CTA
TLYSPVYSY

SEQ ID NO: 33305 - protein, 9 aa, Homo sapiens
  Table A; Target 33305; HLA-A*03:01; KCNU1; ENSG00000215262; CTA
TLYSPVYSY

SEQ ID NO: 33306 - protein, 9 aa, Homo sapiens
  Table A; Target 33306; HLA-A*25:01; KCNU1; ENSG00000215262; CTA
TLYSPVYSY

SEQ ID NO: 33307 - protein, 9 aa, Homo sapiens
  Table A; Target 33307; HLA-A*26:01; KCNU1; ENSG00000215262; CTA
TLYSPVYSY

SEQ ID NO: 33308 - protein, 9 aa, Homo sapiens
  Table A; Target 33308; HLA-A*29:02; KCNU1; ENSG00000215262; CTA
TLYSPVYSY

SEQ ID NO: 33309 - protein, 9 aa, Homo sapiens
  Table A; Target 33309; HLA-A*30:02; KCNU1; ENSG00000215262; CTA
TLYSPVYSY

SEQ ID NO: 33310 - protein, 9 aa, Homo sapiens
  Table A; Target 33310; HLA-A*32:01; KCNU1; ENSG00000215262; CTA
TLYSPVYSY

SEQ ID NO: 33311 - protein, 9 aa, Homo sapiens
  Table A; Target 33311; HLA-B*15:01; KCNU1; ENSG00000215262; CTA
TLYSPVYSY

SEQ ID NO: 33312 - protein, 9 aa, Homo sapiens
  Table A; Target 33312; HLA-B*15:03; KCNU1; ENSG00000215262; CTA
TLYSPVYSY

SEQ ID NO: 33313 - protein, 9 aa, Homo sapiens
  Table A; Target 33313; HLA-B*35:01; KCNU1; ENSG00000215262; CTA
TLYSPVYSY

SEQ ID NO: 33314 - protein, 9 aa, Homo sapiens
  Table A; Target 33314; HLA-B*46:01; KCNU1; ENSG00000215262; CTA
TLYSPVYSY

SEQ ID NO: 33315 - protein, 9 aa, Homo sapiens
  Table A; Target 33315; HLA-C*02:02; KCNU1; ENSG00000215262; CTA
TLYSPVYSY

SEQ ID NO: 33316 - protein, 9 aa, Homo sapiens
  Table A; Target 33316; HLA-C*07:04; KCNU1; ENSG00000215262; CTA
TLYSPVYSY

SEQ ID NO: 33317 - protein, 9 aa, Homo sapiens
  Table A; Target 33317; HLA-C*14:02; KCNU1; ENSG00000215262; CTA
TLYSPVYSY

SEQ ID NO: 33318 - protein, 9 aa, Homo sapiens
  Table A; Target 33318; HLA-A*23:01; KCNU1; ENSG00000215262; CTA
TNLHLSTAF

SEQ ID NO: 33319 - protein, 9 aa, Homo sapiens
  Table A; Target 33319; HLA-A*29:02; KCNU1; ENSG00000215262; CTA
TNLHLSTAF

SEQ ID NO: 33320 - protein, 9 aa, Homo sapiens
  Table A; Target 33320; HLA-B*07:02; KCNU1; ENSG00000215262; CTA
TPKDVRRAL

SEQ ID NO: 33321 - protein, 9 aa, Homo sapiens
  Table A; Target 33321; HLA-B*08:01; KCNU1; ENSG00000215262; CTA
TPKDVRRAL

SEQ ID NO: 33322 - protein, 9 aa, Homo sapiens
  Table A; Target 33322; HLA-C*07:02; KCNU1; ENSG00000215262; CTA
TPKDVRRAL

SEQ ID NO: 33323 - protein, 8 aa, Homo sapiens
  Table A; Target 33323; HLA-B*15:03; KCNU1; ENSG00000215262; CTA
TQRLSDDF

SEQ ID NO: 33324 - protein, 8 aa, Homo sapiens
  Table A; Target 33324; HLA-B*08:01; KCNU1; ENSG00000215262; CTA
TSLDKVTL

SEQ ID NO: 33325 - protein, 8 aa, Homo sapiens
  Table A; Target 33325; HLA-C*16:01; KCNU1; ENSG00000215262; CTA
TSLDKVTL

SEQ ID NO: 33326 - protein, 9 aa, Homo sapiens
  Table A; Target 33326; HLA-A*03:01; KCNU1; ENSG00000215262; CTA
TSLDKVTLK

SEQ ID NO: 33327 - protein, 9 aa, Homo sapiens
  Table A; Target 33327; HLA-A*03:02; KCNU1; ENSG00000215262; CTA
TSLDKVTLK

SEQ ID NO: 33328 - protein, 9 aa, Homo sapiens
  Table A; Target 33328; HLA-A*11:01; KCNU1; ENSG00000215262; CTA
TSLDKVTLK

SEQ ID NO: 33329 - protein, 9 aa, Homo sapiens
  Table A; Target 33329; HLA-A*31:01; KCNU1; ENSG00000215262; CTA
TSLDKVTLK

SEQ ID NO: 33330 - protein, 9 aa, Homo sapiens
  Table A; Target 33330; HLA-A*33:01; KCNU1; ENSG00000215262; CTA
TSLDKVTLK

SEQ ID NO: 33331 - protein, 9 aa, Homo sapiens
  Table A; Target 33331; HLA-A*33:03; KCNU1; ENSG00000215262; CTA
TSLDKVTLK

SEQ ID NO: 33332 - protein, 9 aa, Homo sapiens
  Table A; Target 33332; HLA-A*68:01; KCNU1; ENSG00000215262; CTA
TSLDKVTLK

SEQ ID NO: 33333 - protein, 9 aa, Homo sapiens
  Table A; Target 33333; HLA-C*07:06; KCNU1; ENSG00000215262; CTA
TSLDKVTLK

SEQ ID NO: 33334 - protein, 10 aa, Homo sapiens
  Table A; Target 33334; HLA-A*33:01; KCNU1; ENSG00000215262; CTA
TSLDKVTLKR

SEQ ID NO: 33335 - protein, 10 aa, Homo sapiens
  Table A; Target 33335; HLA-A*33:03; KCNU1; ENSG00000215262; CTA
TSLDKVTLKR

SEQ ID NO: 33336 - protein, 9 aa, Homo sapiens
  Table A; Target 33336; HLA-A*03:02; KCNU1; ENSG00000215262; CTA
TSLFVEQNK

SEQ ID NO: 33337 - protein, 9 aa, Homo sapiens
  Table A; Target 33337; HLA-A*11:01; KCNU1; ENSG00000215262; CTA
TSLFVEQNK

SEQ ID NO: 33338 - protein, 9 aa, Homo sapiens
  Table A; Target 33338; HLA-B*27:02; KCNU1; ENSG00000215262; CTA
TSLFVEQNK

SEQ ID NO: 33339 - protein, 9 aa, Homo sapiens
  Table A; Target 33339; HLA-B*57:01; KCNU1; ENSG00000215262; CTA
TSLFVEQNK

SEQ ID NO: 33340 - protein, 9 aa, Homo sapiens
  Table A; Target 33340; HLA-C*07:06; KCNU1; ENSG00000215262; CTA
TSLFVEQNK

SEQ ID NO: 33341 - protein, 10 aa, Homo sapiens
  Table A; Target 33341; HLA-A*11:01; KCNU1; ENSG00000215262; CTA
TSLFVEQNKK

SEQ ID NO: 33342 - protein, 10 aa, Homo sapiens
  Table A; Target 33342; HLA-B*27:02; KCNU1; ENSG00000215262; CTA
TSLFVEQNKK

SEQ ID NO: 33343 - protein, 11 aa, Homo sapiens
  Table A; Target 33343; HLA-C*06:02; KCNU1; ENSG00000215262; CTA
TSLFVEQNKKV

SEQ ID NO: 33344 - protein, 9 aa, Homo sapiens
  Table A; Target 33344; HLA-C*16:01; KCNU1; ENSG00000215262; CTA
TSLGRTFIM

SEQ ID NO: 33345 - protein, 9 aa, Homo sapiens
  Table A; Target 33345; HLA-A*31:01; KCNU1; ENSG00000215262; CTA
TSLLSGRNR

SEQ ID NO: 33346 - protein, 9 aa, Homo sapiens
  Table A; Target 33346; HLA-A*33:03; KCNU1; ENSG00000215262; CTA
TSLLSGRNR

SEQ ID NO: 33347 - protein, 9 aa, Homo sapiens
  Table A; Target 33347; HLA-A*03:02; KCNU1; ENSG00000215262; CTA
TSNSVKFSK

SEQ ID NO: 33348 - protein, 9 aa, Homo sapiens
  Table A; Target 33348; HLA-A*11:01; KCNU1; ENSG00000215262; CTA
TSNSVKFSK

SEQ ID NO: 33349 - protein, 9 aa, Homo sapiens
  Table A; Target 33349; HLA-A*31:01; KCNU1; ENSG00000215262; CTA
TSNSVKFSK

SEQ ID NO: 33350 - protein, 9 aa, Homo sapiens
  Table A; Target 33350; HLA-A*33:01; KCNU1; ENSG00000215262; CTA
TSNSVKFSK

SEQ ID NO: 33351 - protein, 9 aa, Homo sapiens
  Table A; Target 33351; HLA-A*33:03; KCNU1; ENSG00000215262; CTA
TSNSVKFSK

SEQ ID NO: 33352 - protein, 9 aa, Homo sapiens
  Table A; Target 33352; HLA-A*68:01; KCNU1; ENSG00000215262; CTA
TSNSVKFSK

SEQ ID NO: 33353 - protein, 9 aa, Homo sapiens
  Table A; Target 33353; HLA-C*07:06; KCNU1; ENSG00000215262; CTA
TSNSVKFSK

SEQ ID NO: 33354 - protein, 10 aa, Homo sapiens
  Table A; Target 33354; HLA-A*68:01; KCNU1; ENSG00000215262; CTA
TSSISNFTTR

SEQ ID NO: 33355 - protein, 10 aa, Homo sapiens
  Table A; Target 33355; HLA-C*07:06; KCNU1; ENSG00000215262; CTA
TSSISNFTTR

SEQ ID NO: 33356 - protein, 10 aa, Homo sapiens
  Table A; Target 33356; HLA-B*39:01; KCNU1; ENSG00000215262; CTA
TSTVGFGDVV

SEQ ID NO: 33357 - protein, 9 aa, Homo sapiens
  Table A; Target 33357; HLA-A*26:01; KCNU1; ENSG00000215262; CTA
TTFISGSAM

SEQ ID NO: 33358 - protein, 9 aa, Homo sapiens
  Table A; Target 33358; HLA-A*32:01; KCNU1; ENSG00000215262; CTA
TTFISGSAM

SEQ ID NO: 33359 - protein, 9 aa, Homo sapiens
  Table A; Target 33359; HLA-B*07:02; KCNU1; ENSG00000215262; CTA
TTFISGSAM

SEQ ID NO: 33360 - protein, 9 aa, Homo sapiens
  Table A; Target 33360; HLA-B*15:01; KCNU1; ENSG00000215262; CTA
TTFISGSAM

SEQ ID NO: 33361 - protein, 9 aa, Homo sapiens
  Table A; Target 33361; HLA-B*15:03; KCNU1; ENSG00000215262; CTA
TTFISGSAM

SEQ ID NO: 33362 - protein, 9 aa, Homo sapiens
  Table A; Target 33362; HLA-B*27:05; KCNU1; ENSG00000215262; CTA
TTFISGSAM

SEQ ID NO: 33363 - protein, 9 aa, Homo sapiens
  Table A; Target 33363; HLA-B*35:01; KCNU1; ENSG00000215262; CTA
TTFISGSAM

SEQ ID NO: 33364 - protein, 9 aa, Homo sapiens
  Table A; Target 33364; HLA-B*35:03; KCNU1; ENSG00000215262; CTA
TTFISGSAM

SEQ ID NO: 33365 - protein, 9 aa, Homo sapiens
  Table A; Target 33365; HLA-B*39:01; KCNU1; ENSG00000215262; CTA
TTFISGSAM

SEQ ID NO: 33366 - protein, 9 aa, Homo sapiens
  Table A; Target 33366; HLA-B*46:01; KCNU1; ENSG00000215262; CTA
TTFISGSAM

SEQ ID NO: 33367 - protein, 9 aa, Homo sapiens
  Table A; Target 33367; HLA-C*01:02; KCNU1; ENSG00000215262; CTA
TTFISGSAM

SEQ ID NO: 33368 - protein, 9 aa, Homo sapiens
  Table A; Target 33368; HLA-C*03:03; KCNU1; ENSG00000215262; CTA
TTFISGSAM

SEQ ID NO: 33369 - protein, 9 aa, Homo sapiens
  Table A; Target 33369; HLA-C*03:04; KCNU1; ENSG00000215262; CTA
TTFISGSAM

SEQ ID NO: 33370 - protein, 9 aa, Homo sapiens
  Table A; Target 33370; HLA-C*07:04; KCNU1; ENSG00000215262; CTA
TTFISGSAM

SEQ ID NO: 33371 - protein, 9 aa, Homo sapiens
  Table A; Target 33371; HLA-C*07:06; KCNU1; ENSG00000215262; CTA
TTFISGSAM

SEQ ID NO: 33372 - protein, 9 aa, Homo sapiens
  Table A; Target 33372; HLA-C*14:02; KCNU1; ENSG00000215262; CTA
TTFISGSAM

SEQ ID NO: 33373 - protein, 9 aa, Homo sapiens
  Table A; Target 33373; HLA-C*16:01; KCNU1; ENSG00000215262; CTA
TTFISGSAM

SEQ ID NO: 33374 - protein, 10 aa, Homo sapiens
  Table A; Target 33374; HLA-A*03:01; KCNU1; ENSG00000215262; CTA
TTFISGSAMK

SEQ ID NO: 33375 - protein, 10 aa, Homo sapiens
  Table A; Target 33375; HLA-A*03:02; KCNU1; ENSG00000215262; CTA
TTFISGSAMK

SEQ ID NO: 33376 - protein, 10 aa, Homo sapiens
  Table A; Target 33376; HLA-A*11:01; KCNU1; ENSG00000215262; CTA
TTFISGSAMK

SEQ ID NO: 33377 - protein, 10 aa, Homo sapiens
  Table A; Target 33377; HLA-A*68:01; KCNU1; ENSG00000215262; CTA
TTFISGSAMK

SEQ ID NO: 33378 - protein, 11 aa, Homo sapiens
  Table A; Target 33378; HLA-A*25:01; KCNU1; ENSG00000215262; CTA
TTFISGSAMKW

SEQ ID NO: 33379 - protein, 11 aa, Homo sapiens
  Table A; Target 33379; HLA-A*33:01; KCNU1; ENSG00000215262; CTA
TTFISGSAMKW

SEQ ID NO: 33380 - protein, 11 aa, Homo sapiens
  Table A; Target 33380; HLA-B*44:02; KCNU1; ENSG00000215262; CTA
TTFISGSAMKW

SEQ ID NO: 33381 - protein, 11 aa, Homo sapiens
  Table A; Target 33381; HLA-B*44:03; KCNU1; ENSG00000215262; CTA
TTFISGSAMKW

SEQ ID NO: 33382 - protein, 11 aa, Homo sapiens
  Table A; Target 33382; HLA-B*57:01; KCNU1; ENSG00000215262; CTA
TTFISGSAMKW

SEQ ID NO: 33383 - protein, 11 aa, Homo sapiens
  Table A; Target 33383; HLA-B*58:01; KCNU1; ENSG00000215262; CTA
TTFISGSAMKW

SEQ ID NO: 33384 - protein, 11 aa, Homo sapiens
  Table A; Target 33384; HLA-A*01:01; KCNU1; ENSG00000215262; CTA
TTSTVGFGDVV

SEQ ID NO: 33385 - protein, 11 aa, Homo sapiens
  Table A; Target 33385; HLA-A*68:02; KCNU1; ENSG00000215262; CTA
TTSTVGFGDVV

SEQ ID NO: 33386 - protein, 8 aa, Homo sapiens
  Table A; Target 33386; HLA-B*37:01; KCNU1; ENSG00000215262; CTA
TVDSVTAF

SEQ ID NO: 33387 - protein, 8 aa, Homo sapiens
  Table A; Target 33387; HLA-C*05:01; KCNU1; ENSG00000215262; CTA
TVDSVTAF

SEQ ID NO: 33388 - protein, 9 aa, Homo sapiens
  Table A; Target 33388; HLA-A*01:01; KCNU1; ENSG00000215262; CTA
TVDSVTAFL

SEQ ID NO: 33389 - protein, 9 aa, Homo sapiens
  Table A; Target 33389; HLA-A*02:01; KCNU1; ENSG00000215262; CTA
TVDSVTAFL

SEQ ID NO: 33390 - protein, 9 aa, Homo sapiens
  Table A; Target 33390; HLA-A*02:07; KCNU1; ENSG00000215262; CTA
TVDSVTAFL

SEQ ID NO: 33391 - protein, 9 aa, Homo sapiens
  Table A; Target 33391; HLA-A*68:02; KCNU1; ENSG00000215262; CTA
TVDSVTAFL

SEQ ID NO: 33392 - protein, 9 aa, Homo sapiens
  Table A; Target 33392; HLA-B*13:02; KCNU1; ENSG00000215262; CTA
TVDSVTAFL

SEQ ID NO: 33393 - protein, 9 aa, Homo sapiens
  Table A; Target 33393; HLA-B*35:03; KCNU1; ENSG00000215262; CTA
TVDSVTAFL

SEQ ID NO: 33394 - protein, 9 aa, Homo sapiens
  Table A; Target 33394; HLA-B*38:01; KCNU1; ENSG00000215262; CTA
TVDSVTAFL

SEQ ID NO: 33395 - protein, 9 aa, Homo sapiens
  Table A; Target 33395; HLA-B*39:01; KCNU1; ENSG00000215262; CTA
TVDSVTAFL

SEQ ID NO: 33396 - protein, 9 aa, Homo sapiens
  Table A; Target 33396; HLA-B*55:01; KCNU1; ENSG00000215262; CTA
TVDSVTAFL

SEQ ID NO: 33397 - protein, 9 aa, Homo sapiens
  Table A; Target 33397; HLA-C*04:01; KCNU1; ENSG00000215262; CTA
TVDSVTAFL

SEQ ID NO: 33398 - protein, 9 aa, Homo sapiens
  Table A; Target 33398; HLA-C*05:01; KCNU1; ENSG00000215262; CTA
TVDSVTAFL

SEQ ID NO: 33399 - protein, 9 aa, Homo sapiens
  Table A; Target 33399; HLA-C*07:04; KCNU1; ENSG00000215262; CTA
TVDSVTAFL

SEQ ID NO: 33400 - protein, 10 aa, Homo sapiens
  Table A; Target 33400; HLA-A*03:02; KCNU1; ENSG00000215262; CTA
TVDSVTAFLR

SEQ ID NO: 33401 - protein, 10 aa, Homo sapiens
  Table A; Target 33401; HLA-A*68:01; KCNU1; ENSG00000215262; CTA
TVDSVTAFLR

SEQ ID NO: 33402 - protein, 10 aa, Homo sapiens
  Table A; Target 33402; HLA-B*27:02; KCNU1; ENSG00000215262; CTA
TVDSVTAFLR

SEQ ID NO: 33403 - protein, 10 aa, Homo sapiens
  Table A; Target 33403; HLA-C*07:06; KCNU1; ENSG00000215262; CTA
TVDSVTAFLR

SEQ ID NO: 33404 - protein, 11 aa, Homo sapiens
  Table A; Target 33404; HLA-A*02:04; KCNU1; ENSG00000215262; CTA
TVFSGSFLDSL

SEQ ID NO: 33405 - protein, 11 aa, Homo sapiens
  Table A; Target 33405; HLA-A*68:02; KCNU1; ENSG00000215262; CTA
TVFSGSFLDSL

SEQ ID NO: 33406 - protein, 8 aa, Homo sapiens
  Table A; Target 33406; HLA-B*39:01; KCNU1; ENSG00000215262; CTA
TVGFGDVV

SEQ ID NO: 33407 - protein, 10 aa, Homo sapiens
  Table A; Target 33407; HLA-A*03:01; KCNU1; ENSG00000215262; CTA
TVGFGDVVAK

SEQ ID NO: 33408 - protein, 10 aa, Homo sapiens
  Table A; Target 33408; HLA-A*03:02; KCNU1; ENSG00000215262; CTA
TVGFGDVVAK

SEQ ID NO: 33409 - protein, 10 aa, Homo sapiens
  Table A; Target 33409; HLA-A*11:01; KCNU1; ENSG00000215262; CTA
TVGFGDVVAK

SEQ ID NO: 33410 - protein, 10 aa, Homo sapiens
  Table A; Target 33410; HLA-A*68:01; KCNU1; ENSG00000215262; CTA
TVGFGDVVAK

SEQ ID NO: 33411 - protein, 10 aa, Homo sapiens
  Table A; Target 33411; HLA-B*27:02; KCNU1; ENSG00000215262; CTA
TVGFGDVVAK

SEQ ID NO: 33412 - protein, 10 aa, Homo sapiens
  Table A; Target 33412; HLA-C*07:06; KCNU1; ENSG00000215262; CTA
TVGFGDVVAK

SEQ ID NO: 33413 - protein, 8 aa, Homo sapiens
  Table A; Target 33413; HLA-C*05:01; KCNU1; ENSG00000215262; CTA
VADSCTSL

SEQ ID NO: 33414 - protein, 9 aa, Homo sapiens
  Table A; Target 33414; HLA-A*01:01; KCNU1; ENSG00000215262; CTA
VADSCTSLL

SEQ ID NO: 33415 - protein, 9 aa, Homo sapiens
  Table A; Target 33415; HLA-A*02:07; KCNU1; ENSG00000215262; CTA
VADSCTSLL

SEQ ID NO: 33416 - protein, 9 aa, Homo sapiens
  Table A; Target 33416; HLA-B*35:03; KCNU1; ENSG00000215262; CTA
VADSCTSLL

SEQ ID NO: 33417 - protein, 9 aa, Homo sapiens
  Table A; Target 33417; HLA-B*38:01; KCNU1; ENSG00000215262; CTA
VADSCTSLL

SEQ ID NO: 33418 - protein, 9 aa, Homo sapiens
  Table A; Target 33418; HLA-C*03:03; KCNU1; ENSG00000215262; CTA
VADSCTSLL

SEQ ID NO: 33419 - protein, 9 aa, Homo sapiens
  Table A; Target 33419; HLA-C*03:04; KCNU1; ENSG00000215262; CTA
VADSCTSLL

SEQ ID NO: 33420 - protein, 9 aa, Homo sapiens
  Table A; Target 33420; HLA-C*04:01; KCNU1; ENSG00000215262; CTA
VADSCTSLL

SEQ ID NO: 33421 - protein, 9 aa, Homo sapiens
  Table A; Target 33421; HLA-C*07:04; KCNU1; ENSG00000215262; CTA
VADSCTSLL

SEQ ID NO: 33422 - protein, 8 aa, Homo sapiens
  Table A; Target 33422; HLA-B*46:01; KCNU1; ENSG00000215262; CTA
VAVESAEA

SEQ ID NO: 33423 - protein, 8 aa, Homo sapiens
  Table A; Target 33423; HLA-C*03:03; KCNU1; ENSG00000215262; CTA
VAVESAEA

SEQ ID NO: 33424 - protein, 8 aa, Homo sapiens
  Table A; Target 33424; HLA-C*03:04; KCNU1; ENSG00000215262; CTA
VAVESAEA

SEQ ID NO: 33425 - protein, 9 aa, Homo sapiens
  Table A; Target 33425; HLA-B*46:01; KCNU1; ENSG00000215262; CTA
VAVESAEAC

SEQ ID NO: 33426 - protein, 9 aa, Homo sapiens
  Table A; Target 33426; HLA-C*03:03; KCNU1; ENSG00000215262; CTA
VAVESAEAC

SEQ ID NO: 33427 - protein, 9 aa, Homo sapiens
  Table A; Target 33427; HLA-C*03:04; KCNU1; ENSG00000215262; CTA
VAVESAEAC

SEQ ID NO: 33428 - protein, 10 aa, Homo sapiens
  Table A; Target 33428; HLA-B*35:03; KCNU1; ENSG00000215262; CTA
VAVESAEACL

SEQ ID NO: 33429 - protein, 10 aa, Homo sapiens
  Table A; Target 33429; HLA-C*03:03; KCNU1; ENSG00000215262; CTA
VAVESAEACL

SEQ ID NO: 33430 - protein, 10 aa, Homo sapiens
  Table A; Target 33430; HLA-C*03:04; KCNU1; ENSG00000215262; CTA
VAVESAEACL

SEQ ID NO: 33431 - protein, 8 aa, Homo sapiens
  Table A; Target 33431; HLA-B*37:01; KCNU1; ENSG00000215262; CTA
VDSVTAFL

SEQ ID NO: 33432 - protein, 10 aa, Homo sapiens
  Table A; Target 33432; HLA-A*30:01; KCNU1; ENSG00000215262; CTA
VDTEAIMATL

SEQ ID NO: 33433 - protein, 10 aa, Homo sapiens
  Table A; Target 33433; HLA-B*40:01; KCNU1; ENSG00000215262; CTA
VDTEAIMATL

SEQ ID NO: 33434 - protein, 9 aa, Homo sapiens
  Table A; Target 33434; HLA-B*40:01; KCNU1; ENSG00000215262; CTA
VENSGDPWL

SEQ ID NO: 33435 - protein, 10 aa, Homo sapiens
  Table A; Target 33435; HLA-A*03:02; KCNU1; ENSG00000215262; CTA
VENSGDPWLK

SEQ ID NO: 33436 - protein, 10 aa, Homo sapiens
  Table A; Target 33436; HLA-A*11:01; KCNU1; ENSG00000215262; CTA
VENSGDPWLK

SEQ ID NO: 33437 - protein, 10 aa, Homo sapiens
  Table A; Target 33437; HLA-B*27:02; KCNU1; ENSG00000215262; CTA
VENSGDPWLK

SEQ ID NO: 33438 - protein, 8 aa, Homo sapiens
  Table A; Target 33438; HLA-B*37:01; KCNU1; ENSG00000215262; CTA
VEQNKKVM

SEQ ID NO: 33439 - protein, 8 aa, Homo sapiens
  Table A; Target 33439; HLA-B*37:01; KCNU1; ENSG00000215262; CTA
VESAEACL

SEQ ID NO: 33440 - protein, 8 aa, Homo sapiens
  Table A; Target 33440; HLA-B*40:01; KCNU1; ENSG00000215262; CTA
VESAEACL

SEQ ID NO: 33441 - protein, 9 aa, Homo sapiens
  Table A; Target 33441; HLA-A*30:01; KCNU1; ENSG00000215262; CTA
VESAEACLI

SEQ ID NO: 33442 - protein, 9 aa, Homo sapiens
  Table A; Target 33442; HLA-B*40:01; KCNU1; ENSG00000215262; CTA
VESAEACLI

SEQ ID NO: 33443 - protein, 9 aa, Homo sapiens
  Table A; Target 33443; HLA-B*49:01; KCNU1; ENSG00000215262; CTA
VESAEACLI

SEQ ID NO: 33444 - protein, 10 aa, Homo sapiens
  Table A; Target 33444; HLA-B*49:01; KCNU1; ENSG00000215262; CTA
VESAEACLII

SEQ ID NO: 33445 - protein, 8 aa, Homo sapiens
  Table A; Target 33445; HLA-C*14:02; KCNU1; ENSG00000215262; CTA
VFGDAHSA

SEQ ID NO: 33446 - protein, 10 aa, Homo sapiens
  Table A; Target 33446; HLA-C*14:02; KCNU1; ENSG00000215262; CTA
VFGDAHSAPM

SEQ ID NO: 33447 - protein, 8 aa, Homo sapiens
  Table A; Target 33447; HLA-A*29:02; KCNU1; ENSG00000215262; CTA
VFIGSLDY

SEQ ID NO: 33448 - protein, 8 aa, Homo sapiens
  Table A; Target 33448; HLA-C*14:02; KCNU1; ENSG00000215262; CTA
VFIGSLDY

SEQ ID NO: 33449 - protein, 9 aa, Homo sapiens
  Table A; Target 33449; HLA-A*23:01; KCNU1; ENSG00000215262; CTA
VFIGSLDYL

SEQ ID NO: 33450 - protein, 9 aa, Homo sapiens
  Table A; Target 33450; HLA-A*24:02; KCNU1; ENSG00000215262; CTA
VFIGSLDYL

SEQ ID NO: 33451 - protein, 10 aa, Homo sapiens
  Table A; Target 33451; HLA-A*23:01; KCNU1; ENSG00000215262; CTA
VFLGETPPSL

SEQ ID NO: 33452 - protein, 10 aa, Homo sapiens
  Table A; Target 33452; HLA-A*24:02; KCNU1; ENSG00000215262; CTA
VFLGETPPSL

SEQ ID NO: 33453 - protein, 10 aa, Homo sapiens
  Table A; Target 33453; HLA-C*14:02; KCNU1; ENSG00000215262; CTA
VFLGETPPSL

SEQ ID NO: 33454 - protein, 9 aa, Homo sapiens
  Table A; Target 33454; HLA-A*29:02; KCNU1; ENSG00000215262; CTA
VFNAFFSFY

SEQ ID NO: 33455 - protein, 9 aa, Homo sapiens
  Table A; Target 33455; HLA-A*23:01; KCNU1; ENSG00000215262; CTA
VFVLSIGSL

SEQ ID NO: 33456 - protein, 9 aa, Homo sapiens
  Table A; Target 33456; HLA-C*14:02; KCNU1; ENSG00000215262; CTA
VFVLSIGSL

SEQ ID NO: 33457 - protein, 10 aa, Homo sapiens
  Table A; Target 33457; HLA-A*23:01; KCNU1; ENSG00000215262; CTA
VFVLSIGSLI

SEQ ID NO: 33458 - protein, 9 aa, Homo sapiens
  Table A; Target 33458; HLA-A*03:01; KCNU1; ENSG00000215262; CTA
VGFGDVVAK

SEQ ID NO: 33459 - protein, 9 aa, Homo sapiens
  Table A; Target 33459; HLA-A*03:02; KCNU1; ENSG00000215262; CTA
VGFGDVVAK

SEQ ID NO: 33460 - protein, 9 aa, Homo sapiens
  Table A; Target 33460; HLA-A*11:01; KCNU1; ENSG00000215262; CTA
VGFGDVVAK

SEQ ID NO: 33461 - protein, 9 aa, Homo sapiens
  Table A; Target 33461; HLA-A*31:01; KCNU1; ENSG00000215262; CTA
VGFGDVVAK

SEQ ID NO: 33462 - protein, 9 aa, Homo sapiens
  Table A; Target 33462; HLA-A*68:01; KCNU1; ENSG00000215262; CTA
VGFGDVVAK

SEQ ID NO: 33463 - protein, 9 aa, Homo sapiens
  Table A; Target 33463; HLA-B*27:02; KCNU1; ENSG00000215262; CTA
VGFGDVVAK

SEQ ID NO: 33464 - protein, 9 aa, Homo sapiens
  Table A; Target 33464; HLA-B*27:05; KCNU1; ENSG00000215262; CTA
VGFGDVVAK

SEQ ID NO: 33465 - protein, 9 aa, Homo sapiens
  Table A; Target 33465; HLA-C*02:02; KCNU1; ENSG00000215262; CTA
VGFGDVVAK

SEQ ID NO: 33466 - protein, 9 aa, Homo sapiens
  Table A; Target 33466; HLA-C*07:04; KCNU1; ENSG00000215262; CTA
VGFGDVVAK

SEQ ID NO: 33467 - protein, 9 aa, Homo sapiens
  Table A; Target 33467; HLA-C*07:06; KCNU1; ENSG00000215262; CTA
VGFGDVVAK

SEQ ID NO: 33468 - protein, 9 aa, Homo sapiens
  Table A; Target 33468; HLA-C*12:03; KCNU1; ENSG00000215262; CTA
VGFGDVVAK

SEQ ID NO: 33469 - protein, 9 aa, Homo sapiens
  Table A; Target 33469; HLA-A*23:01; KCNU1; ENSG00000215262; CTA
VITRPANEF

SEQ ID NO: 33470 - protein, 9 aa, Homo sapiens
  Table A; Target 33470; HLA-A*24:02; KCNU1; ENSG00000215262; CTA
VITRPANEF

SEQ ID NO: 33471 - protein, 9 aa, Homo sapiens
  Table A; Target 33471; HLA-A*32:01; KCNU1; ENSG00000215262; CTA
VITRPANEF

SEQ ID NO: 33472 - protein, 9 aa, Homo sapiens
  Table A; Target 33472; HLA-B*15:01; KCNU1; ENSG00000215262; CTA
VITRPANEF

SEQ ID NO: 33473 - protein, 9 aa, Homo sapiens
  Table A; Target 33473; HLA-B*15:03; KCNU1; ENSG00000215262; CTA
VITRPANEF

SEQ ID NO: 33474 - protein, 9 aa, Homo sapiens
  Table A; Target 33474; HLA-B*46:01; KCNU1; ENSG00000215262; CTA
VITRPANEF

SEQ ID NO: 33475 - protein, 9 aa, Homo sapiens
  Table A; Target 33475; HLA-B*57:01; KCNU1; ENSG00000215262; CTA
VITRPANEF

SEQ ID NO: 33476 - protein, 9 aa, Homo sapiens
  Table A; Target 33476; HLA-B*58:01; KCNU1; ENSG00000215262; CTA
VITRPANEF

SEQ ID NO: 33477 - protein, 9 aa, Homo sapiens
  Table A; Target 33477; HLA-C*01:02; KCNU1; ENSG00000215262; CTA
VITRPANEF

SEQ ID NO: 33478 - protein, 9 aa, Homo sapiens
  Table A; Target 33478; HLA-C*02:02; KCNU1; ENSG00000215262; CTA
VITRPANEF

SEQ ID NO: 33479 - protein, 9 aa, Homo sapiens
  Table A; Target 33479; HLA-C*03:03; KCNU1; ENSG00000215262; CTA
VITRPANEF

SEQ ID NO: 33480 - protein, 9 aa, Homo sapiens
  Table A; Target 33480; HLA-C*03:04; KCNU1; ENSG00000215262; CTA
VITRPANEF

SEQ ID NO: 33481 - protein, 9 aa, Homo sapiens
  Table A; Target 33481; HLA-C*07:04; KCNU1; ENSG00000215262; CTA
VITRPANEF

SEQ ID NO: 33482 - protein, 9 aa, Homo sapiens
  Table A; Target 33482; HLA-C*14:02; KCNU1; ENSG00000215262; CTA
VITRPANEF

SEQ ID NO: 33483 - protein, 9 aa, Homo sapiens
  Table A; Target 33483; HLA-C*16:01; KCNU1; ENSG00000215262; CTA
VITRPANEF

SEQ ID NO: 33484 - protein, 9 aa, Homo sapiens
  Table A; Target 33484; HLA-C*16:02; KCNU1; ENSG00000215262; CTA
VITRPANEF

SEQ ID NO: 33485 - protein, 9 aa, Homo sapiens
  Table A; Target 33485; HLA-A*01:01; KCNU1; ENSG00000215262; CTA
VLELLQMLV

SEQ ID NO: 33486 - protein, 9 aa, Homo sapiens
  Table A; Target 33486; HLA-A*03:02; KCNU1; ENSG00000215262; CTA
VLSPPPQPS

SEQ ID NO: 33487 - protein, 9 aa, Homo sapiens
  Table A; Target 33487; HLA-B*27:05; KCNU1; ENSG00000215262; CTA
VLSPPPQPS

SEQ ID NO: 33488 - protein, 9 aa, Homo sapiens
  Table A; Target 33488; HLA-B*39:01; KCNU1; ENSG00000215262; CTA
VLSPPPQPS

SEQ ID NO: 33489 - protein, 9 aa, Homo sapiens
  Table A; Target 33489; HLA-C*06:02; KCNU1; ENSG00000215262; CTA
VLSPPPQPS

SEQ ID NO: 33490 - protein, 10 aa, Homo sapiens
  Table A; Target 33490; HLA-B*27:05; KCNU1; ENSG00000215262; CTA
VLSPPPQPSS

SEQ ID NO: 33491 - protein, 9 aa, Homo sapiens
  Table A; Target 33491; HLA-A*02:04; KCNU1; ENSG00000215262; CTA
VLVILVFVL

SEQ ID NO: 33492 - protein, 8 aa, Homo sapiens
  Table A; Target 33492; HLA-A*02:03; KCNU1; ENSG00000215262; CTA
VMATTSTV

SEQ ID NO: 33493 - protein, 8 aa, Homo sapiens
  Table A; Target 33493; HLA-B*46:01; KCNU1; ENSG00000215262; CTA
VMATTSTV

SEQ ID NO: 33494 - protein, 8 aa, Homo sapiens
  Table A; Target 33494; HLA-B*51:01; KCNU1; ENSG00000215262; CTA
VMATTSTV

SEQ ID NO: 33495 - protein, 9 aa, Homo sapiens
  Table A; Target 33495; HLA-A*32:01; KCNU1; ENSG00000215262; CTA
VMATTSTVG

SEQ ID NO: 33496 - protein, 10 aa, Homo sapiens
  Table A; Target 33496; HLA-A*23:01; KCNU1; ENSG00000215262; CTA
VMATTSTVGF

SEQ ID NO: 33497 - protein, 10 aa, Homo sapiens
  Table A; Target 33497; HLA-A*24:02; KCNU1; ENSG00000215262; CTA
VMATTSTVGF

SEQ ID NO: 33498 - protein, 10 aa, Homo sapiens
  Table A; Target 33498; HLA-A*32:01; KCNU1; ENSG00000215262; CTA
VMATTSTVGF

SEQ ID NO: 33499 - protein, 10 aa, Homo sapiens
  Table A; Target 33499; HLA-B*15:01; KCNU1; ENSG00000215262; CTA
VMATTSTVGF

SEQ ID NO: 33500 - protein, 10 aa, Homo sapiens
  Table A; Target 33500; HLA-B*46:01; KCNU1; ENSG00000215262; CTA
VMATTSTVGF

SEQ ID NO: 33501 - protein, 10 aa, Homo sapiens
  Table A; Target 33501; HLA-C*07:04; KCNU1; ENSG00000215262; CTA
VMATTSTVGF

SEQ ID NO: 33502 - protein, 10 aa, Homo sapiens
  Table A; Target 33502; HLA-C*14:02; KCNU1; ENSG00000215262; CTA
VMATTSTVGF

SEQ ID NO: 33503 - protein, 9 aa, Homo sapiens
  Table A; Target 33503; HLA-A*32:01; KCNU1; ENSG00000215262; CTA
VMPLRASNY

SEQ ID NO: 33504 - protein, 9 aa, Homo sapiens
  Table A; Target 33504; HLA-B*15:01; KCNU1; ENSG00000215262; CTA
VMPLRASNY

SEQ ID NO: 33505 - protein, 9 aa, Homo sapiens
  Table A; Target 33505; HLA-B*15:03; KCNU1; ENSG00000215262; CTA
VMPLRASNY

SEQ ID NO: 33506 - protein, 9 aa, Homo sapiens
  Table A; Target 33506; HLA-B*46:01; KCNU1; ENSG00000215262; CTA
VMPLRASNY

SEQ ID NO: 33507 - protein, 9 aa, Homo sapiens
  Table A; Target 33507; HLA-C*01:02; KCNU1; ENSG00000215262; CTA
VMPLRASNY

SEQ ID NO: 33508 - protein, 11 aa, Homo sapiens
  Table A; Target 33508; HLA-A*24:02; KCNU1; ENSG00000215262; CTA
VNPRNTFGQLF

SEQ ID NO: 33509 - protein, 11 aa, Homo sapiens
  Table A; Target 33509; HLA-B*56:01; KCNU1; ENSG00000215262; CTA
VPILTELKNPS

SEQ ID NO: 33510 - protein, 8 aa, Homo sapiens
  Table A; Target 33510; HLA-A*01:01; KCNU1; ENSG00000215262; CTA
VSEETPGY

SEQ ID NO: 33511 - protein, 8 aa, Homo sapiens
  Table A; Target 33511; HLA-C*05:01; KCNU1; ENSG00000215262; CTA
VSEETPGY

SEQ ID NO: 33512 - protein, 9 aa, Homo sapiens
  Table A; Target 33512; HLA-B*58:01; KCNU1; ENSG00000215262; CTA
VSSQLEQHL

SEQ ID NO: 33513 - protein, 9 aa, Homo sapiens
  Table A; Target 33513; HLA-C*16:01; KCNU1; ENSG00000215262; CTA
VSSQLEQHL

SEQ ID NO: 33514 - protein, 9 aa, Homo sapiens
  Table A; Target 33514; HLA-C*16:02; KCNU1; ENSG00000215262; CTA
VSSQLEQHL

SEQ ID NO: 33515 - protein, 9 aa, Homo sapiens
  Table A; Target 33515; HLA-A*68:02; KCNU1; ENSG00000215262; CTA
VTAFLRNFL

SEQ ID NO: 33516 - protein, 9 aa, Homo sapiens
  Table A; Target 33516; HLA-A*01:01; KCNU1; ENSG00000215262; CTA
VTETLYSPV

SEQ ID NO: 33517 - protein, 10 aa, Homo sapiens
  Table A; Target 33517; HLA-A*01:01; KCNU1; ENSG00000215262; CTA
VTETLYSPVY

SEQ ID NO: 33518 - protein, 10 aa, Homo sapiens
  Table A; Target 33518; HLA-A*30:02; KCNU1; ENSG00000215262; CTA
VTETLYSPVY

SEQ ID NO: 33519 - protein, 9 aa, Homo sapiens
  Table A; Target 33519; HLA-A*03:01; KCNU1; ENSG00000215262; CTA
VTGGVSSQL

SEQ ID NO: 33520 - protein, 9 aa, Homo sapiens
  Table A; Target 33520; HLA-A*03:02; KCNU1; ENSG00000215262; CTA
VTGGVSSQL

SEQ ID NO: 33521 - protein, 9 aa, Homo sapiens
  Table A; Target 33521; HLA-A*32:01; KCNU1; ENSG00000215262; CTA
VTGGVSSQL

SEQ ID NO: 33522 - protein, 9 aa, Homo sapiens
  Table A; Target 33522; HLA-A*68:01; KCNU1; ENSG00000215262; CTA
VTGGVSSQL

SEQ ID NO: 33523 - protein, 9 aa, Homo sapiens
  Table A; Target 33523; HLA-B*27:05; KCNU1; ENSG00000215262; CTA
VTGGVSSQL

SEQ ID NO: 33524 - protein, 9 aa, Homo sapiens
  Table A; Target 33524; HLA-B*40:01; KCNU1; ENSG00000215262; CTA
VTGGVSSQL

SEQ ID NO: 33525 - protein, 9 aa, Homo sapiens
  Table A; Target 33525; HLA-B*58:01; KCNU1; ENSG00000215262; CTA
VTGGVSSQL

SEQ ID NO: 33526 - protein, 9 aa, Homo sapiens
  Table A; Target 33526; HLA-C*01:02; KCNU1; ENSG00000215262; CTA
VTGGVSSQL

SEQ ID NO: 33527 - protein, 9 aa, Homo sapiens
  Table A; Target 33527; HLA-C*03:03; KCNU1; ENSG00000215262; CTA
VTGGVSSQL

SEQ ID NO: 33528 - protein, 9 aa, Homo sapiens
  Table A; Target 33528; HLA-C*05:01; KCNU1; ENSG00000215262; CTA
VTGGVSSQL

SEQ ID NO: 33529 - protein, 9 aa, Homo sapiens
  Table A; Target 33529; HLA-C*16:02; KCNU1; ENSG00000215262; CTA
VTGGVSSQL

SEQ ID NO: 33530 - protein, 9 aa, Homo sapiens
  Table A; Target 33530; HLA-A*03:01; KCNU1; ENSG00000215262; CTA
VVAKTSLGR

SEQ ID NO: 33531 - protein, 9 aa, Homo sapiens
  Table A; Target 33531; HLA-C*07:06; KCNU1; ENSG00000215262; CTA
VVAKTSLGR

SEQ ID NO: 33532 - protein, 9 aa, Homo sapiens
  Table A; Target 33532; HLA-A*01:01; KCNU1; ENSG00000215262; CTA
VYDEDPFAY

SEQ ID NO: 33533 - protein, 9 aa, Homo sapiens
  Table A; Target 33533; HLA-A*23:01; KCNU1; ENSG00000215262; CTA
VYDEDPFAY

SEQ ID NO: 33534 - protein, 9 aa, Homo sapiens
  Table A; Target 33534; HLA-A*24:02; KCNU1; ENSG00000215262; CTA
VYDEDPFAY

SEQ ID NO: 33535 - protein, 9 aa, Homo sapiens
  Table A; Target 33535; HLA-A*29:02; KCNU1; ENSG00000215262; CTA
VYDEDPFAY

SEQ ID NO: 33536 - protein, 9 aa, Homo sapiens
  Table A; Target 33536; HLA-A*30:02; KCNU1; ENSG00000215262; CTA
VYDEDPFAY

SEQ ID NO: 33537 - protein, 9 aa, Homo sapiens
  Table A; Target 33537; HLA-B*35:01; KCNU1; ENSG00000215262; CTA
VYDEDPFAY

SEQ ID NO: 33538 - protein, 9 aa, Homo sapiens
  Table A; Target 33538; HLA-B*35:03; KCNU1; ENSG00000215262; CTA
VYDEDPFAY

SEQ ID NO: 33539 - protein, 9 aa, Homo sapiens
  Table A; Target 33539; HLA-B*55:01; KCNU1; ENSG00000215262; CTA
VYDEDPFAY

SEQ ID NO: 33540 - protein, 9 aa, Homo sapiens
  Table A; Target 33540; HLA-C*04:01; KCNU1; ENSG00000215262; CTA
VYDEDPFAY

SEQ ID NO: 33541 - protein, 9 aa, Homo sapiens
  Table A; Target 33541; HLA-C*05:01; KCNU1; ENSG00000215262; CTA
VYDEDPFAY

SEQ ID NO: 33542 - protein, 9 aa, Homo sapiens
  Table A; Target 33542; HLA-C*14:02; KCNU1; ENSG00000215262; CTA
VYDEDPFAY

SEQ ID NO: 33543 - protein, 8 aa, Homo sapiens
  Table A; Target 33543; HLA-C*14:02; KCNU1; ENSG00000215262; CTA
VYGVADSC

SEQ ID NO: 33544 - protein, 9 aa, Homo sapiens
  Table A; Target 33544; HLA-A*23:01; KCNU1; ENSG00000215262; CTA
VYLPKIPSW

SEQ ID NO: 33545 - protein, 9 aa, Homo sapiens
  Table A; Target 33545; HLA-A*24:02; KCNU1; ENSG00000215262; CTA
VYLPKIPSW

SEQ ID NO: 33546 - protein, 9 aa, Homo sapiens
  Table A; Target 33546; HLA-A*25:01; KCNU1; ENSG00000215262; CTA
VYLPKIPSW

SEQ ID NO: 33547 - protein, 9 aa, Homo sapiens
  Table A; Target 33547; HLA-A*29:02; KCNU1; ENSG00000215262; CTA
VYLPKIPSW

SEQ ID NO: 33548 - protein, 9 aa, Homo sapiens
  Table A; Target 33548; HLA-A*31:01; KCNU1; ENSG00000215262; CTA
VYLPKIPSW

SEQ ID NO: 33549 - protein, 9 aa, Homo sapiens
  Table A; Target 33549; HLA-A*32:01; KCNU1; ENSG00000215262; CTA
VYLPKIPSW

SEQ ID NO: 33550 - protein, 9 aa, Homo sapiens
  Table A; Target 33550; HLA-B*57:01; KCNU1; ENSG00000215262; CTA
VYLPKIPSW

SEQ ID NO: 33551 - protein, 9 aa, Homo sapiens
  Table A; Target 33551; HLA-B*58:01; KCNU1; ENSG00000215262; CTA
VYLPKIPSW

SEQ ID NO: 33552 - protein, 11 aa, Homo sapiens
  Table A; Target 33552; HLA-A*24:02; KCNU1; ENSG00000215262; CTA
VYLPKIPSWNW

SEQ ID NO: 33553 - protein, 11 aa, Homo sapiens
  Table A; Target 33553; HLA-A*24:02; KCNU1; ENSG00000215262; CTA
VYSYQPRTNSL

SEQ ID NO: 33554 - protein, 9 aa, Homo sapiens
  Table A; Target 33554; HLA-B*13:02; KCNU1; ENSG00000215262; CTA
WQIIKGTGI

SEQ ID NO: 33555 - protein, 8 aa, Homo sapiens
  Table A; Target 33555; HLA-B*18:01; KCNU1; ENSG00000215262; CTA
YDEDPFAY

SEQ ID NO: 33556 - protein, 8 aa, Homo sapiens
  Table A; Target 33556; HLA-B*37:01; KCNU1; ENSG00000215262; CTA
YDSTTRII

SEQ ID NO: 33557 - protein, 9 aa, Homo sapiens
  Table A; Target 33557; HLA-B*37:01; KCNU1; ENSG00000215262; CTA
YDSTTRIII

SEQ ID NO: 33558 - protein, 9 aa, Homo sapiens
  Table A; Target 33558; HLA-B*37:01; KCNU1; ENSG00000215262; CTA
YEALKGKKF

SEQ ID NO: 33559 - protein, 9 aa, Homo sapiens
  Table A; Target 33559; HLA-B*44:02; KCNU1; ENSG00000215262; CTA
YEALKGKKF

SEQ ID NO: 33560 - protein, 9 aa, Homo sapiens
  Table A; Target 33560; HLA-B*44:03; KCNU1; ENSG00000215262; CTA
YEALKGKKF

SEQ ID NO: 33561 - protein, 8 aa, Homo sapiens
  Table A; Target 33561; HLA-B*49:01; KCNU1; ENSG00000215262; CTA
YEDKTIPI

SEQ ID NO: 33562 - protein, 10 aa, Homo sapiens
  Table A; Target 33562; HLA-A*30:01; KCNU1; ENSG00000215262; CTA
YEDKTIPIDL

SEQ ID NO: 33563 - protein, 10 aa, Homo sapiens
  Table A; Target 33563; HLA-B*40:01; KCNU1; ENSG00000215262; CTA
YEDKTIPIDL

SEQ ID NO: 33564 - protein, 10 aa, Homo sapiens
  Table A; Target 33564; HLA-B*49:01; KCNU1; ENSG00000215262; CTA
YEDKTIPIDL

SEQ ID NO: 33565 - protein, 9 aa, Homo sapiens
  Table A; Target 33565; HLA-A*30:01; KCNU1; ENSG00000215262; CTA
YEIVNKASQ

SEQ ID NO: 33566 - protein, 9 aa, Homo sapiens
  Table A; Target 33566; HLA-B*18:01; KCNU1; ENSG00000215262; CTA
YEIVNKASQ

SEQ ID NO: 33567 - protein, 9 aa, Homo sapiens
  Table A; Target 33567; HLA-B*40:01; KCNU1; ENSG00000215262; CTA
YEIVNKASQ

SEQ ID NO: 33568 - protein, 9 aa, Homo sapiens
  Table A; Target 33568; HLA-B*40:02; KCNU1; ENSG00000215262; CTA
YEIVNKASQ

SEQ ID NO: 33569 - protein, 9 aa, Homo sapiens
  Table A; Target 33569; HLA-B*44:02; KCNU1; ENSG00000215262; CTA
YEIVNKASQ

SEQ ID NO: 33570 - protein, 9 aa, Homo sapiens
  Table A; Target 33570; HLA-B*49:01; KCNU1; ENSG00000215262; CTA
YEIVNKASQ

SEQ ID NO: 33571 - protein, 10 aa, Homo sapiens
  Table A; Target 33571; HLA-B*40:02; KCNU1; ENSG00000215262; CTA
YEIVNKASQT

SEQ ID NO: 33572 - protein, 10 aa, Homo sapiens
  Table A; Target 33572; HLA-B*49:01; KCNU1; ENSG00000215262; CTA
YEIVNKASQT

SEQ ID NO: 33573 - protein, 11 aa, Homo sapiens
  Table A; Target 33573; HLA-A*30:01; KCNU1; ENSG00000215262; CTA
YEIVNKASQTT

SEQ ID NO: 33574 - protein, 9 aa, Homo sapiens
  Table A; Target 33574; HLA-A*23:01; KCNU1; ENSG00000215262; CTA
YFESIYLVM

SEQ ID NO: 33575 - protein, 9 aa, Homo sapiens
  Table A; Target 33575; HLA-A*29:02; KCNU1; ENSG00000215262; CTA
YFESIYLVM

SEQ ID NO: 33576 - protein, 9 aa, Homo sapiens
  Table A; Target 33576; HLA-C*14:02; KCNU1; ENSG00000215262; CTA
YFINSADPV

SEQ ID NO: 33577 - protein, 10 aa, Homo sapiens
  Table A; Target 33577; HLA-C*03:03; KCNU1; ENSG00000215262; CTA
YGVADSCTSL

SEQ ID NO: 33578 - protein, 10 aa, Homo sapiens
  Table A; Target 33578; HLA-C*03:04; KCNU1; ENSG00000215262; CTA
YGVADSCTSL

SEQ ID NO: 33579 - protein, 8 aa, Homo sapiens
  Table A; Target 33579; HLA-B*08:01; KCNU1; ENSG00000215262; CTA
YILPGCAL

SEQ ID NO: 33580 - protein, 8 aa, Homo sapiens
  Table A; Target 33580; HLA-C*03:03; KCNU1; ENSG00000215262; CTA
YILPGCAL

SEQ ID NO: 33581 - protein, 8 aa, Homo sapiens
  Table A; Target 33581; HLA-C*03:04; KCNU1; ENSG00000215262; CTA
YILPGCAL

SEQ ID NO: 33582 - protein, 9 aa, Homo sapiens
  Table A; Target 33582; HLA-A*01:01; KCNU1; ENSG00000215262; CTA
YILPGCALY

SEQ ID NO: 33583 - protein, 9 aa, Homo sapiens
  Table A; Target 33583; HLA-A*29:02; KCNU1; ENSG00000215262; CTA
YILPGCALY

SEQ ID NO: 33584 - protein, 9 aa, Homo sapiens
  Table A; Target 33584; HLA-A*30:02; KCNU1; ENSG00000215262; CTA
YILPGCALY

SEQ ID NO: 33585 - protein, 8 aa, Homo sapiens
  Table A; Target 33585; HLA-A*02:07; KCNU1; ENSG00000215262; CTA
YIPEMVEL

SEQ ID NO: 33586 - protein, 8 aa, Homo sapiens
  Table A; Target 33586; HLA-C*01:02; KCNU1; ENSG00000215262; CTA
YIPEMVEL

SEQ ID NO: 33587 - protein, 8 aa, Homo sapiens
  Table A; Target 33587; HLA-C*05:01; KCNU1; ENSG00000215262; CTA
YIPEMVEL

SEQ ID NO: 33588 - protein, 9 aa, Homo sapiens
  Table A; Target 33588; HLA-A*02:07; KCNU1; ENSG00000215262; CTA
YIPEMVELF

SEQ ID NO: 33589 - protein, 9 aa, Homo sapiens
  Table A; Target 33589; HLA-A*24:02; KCNU1; ENSG00000215262; CTA
YIPEMVELF

SEQ ID NO: 33590 - protein, 9 aa, Homo sapiens
  Table A; Target 33590; HLA-A*26:01; KCNU1; ENSG00000215262; CTA
YIPEMVELF

SEQ ID NO: 33591 - protein, 9 aa, Homo sapiens
  Table A; Target 33591; HLA-A*29:02; KCNU1; ENSG00000215262; CTA
YIPEMVELF

SEQ ID NO: 33592 - protein, 10 aa, Homo sapiens
  Table A; Target 33592; HLA-A*02:07; KCNU1; ENSG00000215262; CTA
YIPEMVELFA

SEQ ID NO: 33593 - protein, 8 aa, Homo sapiens
  Table A; Target 33593; HLA-B*13:02; KCNU1; ENSG00000215262; CTA
YLAYTTFI

SEQ ID NO: 33594 - protein, 9 aa, Homo sapiens
  Table A; Target 33594; HLA-A*02:03; KCNU1; ENSG00000215262; CTA
YLKSNWLGL

SEQ ID NO: 33595 - protein, 9 aa, Homo sapiens
  Table A; Target 33595; HLA-A*02:04; KCNU1; ENSG00000215262; CTA
YLKSNWLGL

SEQ ID NO: 33596 - protein, 8 aa, Homo sapiens
  Table A; Target 33596; HLA-A*24:02; KCNU1; ENSG00000215262; CTA
YLPKIPSW

SEQ ID NO: 33597 - protein, 10 aa, Homo sapiens
  Table A; Target 33597; HLA-A*02:07; KCNU1; ENSG00000215262; CTA
YLPKIPSWNW

SEQ ID NO: 33598 - protein, 10 aa, Homo sapiens
  Table A; Target 33598; HLA-A*24:02; KCNU1; ENSG00000215262; CTA
YLPKIPSWNW

SEQ ID NO: 33599 - protein, 9 aa, Homo sapiens
  Table A; Target 33599; HLA-B*46:01; KCNU1; ENSG00000215262; CTA
YLVMATTST

SEQ ID NO: 33600 - protein, 10 aa, Homo sapiens
  Table A; Target 33600; HLA-A*02:03; KCNU1; ENSG00000215262; CTA
YLVMATTSTV

SEQ ID NO: 33601 - protein, 9 aa, Homo sapiens
  Table A; Target 33601; HLA-A*02:04; KCNU1; ENSG00000215262; CTA
YNYHVLELL

SEQ ID NO: 33602 - protein, 9 aa, Homo sapiens
  Table A; Target 33602; HLA-A*68:02; KCNU1; ENSG00000215262; CTA
YNYHVLELL

SEQ ID NO: 33603 - protein, 8 aa, Homo sapiens
  Table A; Target 33603; HLA-B*08:01; KCNU1; ENSG00000215262; CTA
YQPRTNSL

SEQ ID NO: 33604 - protein, 8 aa, Homo sapiens
  Table A; Target 33604; HLA-B*13:02; KCNU1; ENSG00000215262; CTA
YQPRTNSL

SEQ ID NO: 33605 - protein, 8 aa, Homo sapiens
  Table A; Target 33605; HLA-B*15:01; KCNU1; ENSG00000215262; CTA
YQPRTNSL

SEQ ID NO: 33606 - protein, 8 aa, Homo sapiens
  Table A; Target 33606; HLA-C*01:02; KCNU1; ENSG00000215262; CTA
YQPRTNSL

SEQ ID NO: 33607 - protein, 10 aa, Homo sapiens
  Table A; Target 33607; HLA-A*24:02; KCNU1; ENSG00000215262; CTA
YQPRTNSLSF

SEQ ID NO: 33608 - protein, 10 aa, Homo sapiens
  Table A; Target 33608; HLA-B*15:01; KCNU1; ENSG00000215262; CTA
YQPRTNSLSF

SEQ ID NO: 33609 - protein, 9 aa, Homo sapiens
  Table A; Target 33609; HLA-B*27:05; KCNU1; ENSG00000215262; CTA
YRIIDEEEL

SEQ ID NO: 33610 - protein, 9 aa, Homo sapiens
  Table A; Target 33610; HLA-B*38:01; KCNU1; ENSG00000215262; CTA
YRIIDEEEL

SEQ ID NO: 33611 - protein, 9 aa, Homo sapiens
  Table A; Target 33611; HLA-B*39:01; KCNU1; ENSG00000215262; CTA
YRIIDEEEL

SEQ ID NO: 33612 - protein, 9 aa, Homo sapiens
  Table A; Target 33612; HLA-B*40:01; KCNU1; ENSG00000215262; CTA
YRIIDEEEL

SEQ ID NO: 33613 - protein, 9 aa, Homo sapiens
  Table A; Target 33613; HLA-C*16:04; KCNU1; ENSG00000215262; CTA
YRIIDEEEL

SEQ ID NO: 33614 - protein, 8 aa, Homo sapiens
  Table A; Target 33614; HLA-B*54:01; KCNU1; ENSG00000215262; CTA
YSGDLHAA

SEQ ID NO: 33615 - protein, 10 aa, Homo sapiens
  Table A; Target 33615; HLA-A*25:01; KCNU1; ENSG00000215262; CTA
YSYQPRTNSL

SEQ ID NO: 33616 - protein, 10 aa, Homo sapiens
  Table A; Target 33616; HLA-A*30:01; KCNU1; ENSG00000215262; CTA
YSYQPRTNSL

SEQ ID NO: 33617 - protein, 10 aa, Homo sapiens
  Table A; Target 33617; HLA-B*08:01; KCNU1; ENSG00000215262; CTA
YSYQPRTNSL

SEQ ID NO: 33618 - protein, 10 aa, Homo sapiens
  Table A; Target 33618; HLA-B*40:02; KCNU1; ENSG00000215262; CTA
YSYQPRTNSL

SEQ ID NO: 33619 - protein, 10 aa, Homo sapiens
  Table A; Target 33619; HLA-B*46:01; KCNU1; ENSG00000215262; CTA
YSYQPRTNSL

SEQ ID NO: 33620 - protein, 10 aa, Homo sapiens
  Table A; Target 33620; HLA-B*58:01; KCNU1; ENSG00000215262; CTA
YSYQPRTNSL

SEQ ID NO: 33621 - protein, 10 aa, Homo sapiens
  Table A; Target 33621; HLA-C*01:02; KCNU1; ENSG00000215262; CTA
YSYQPRTNSL

SEQ ID NO: 33622 - protein, 10 aa, Homo sapiens
  Table A; Target 33622; HLA-C*02:02; KCNU1; ENSG00000215262; CTA
YSYQPRTNSL

SEQ ID NO: 33623 - protein, 10 aa, Homo sapiens
  Table A; Target 33623; HLA-C*03:03; KCNU1; ENSG00000215262; CTA
YSYQPRTNSL

SEQ ID NO: 33624 - protein, 10 aa, Homo sapiens
  Table A; Target 33624; HLA-C*03:04; KCNU1; ENSG00000215262; CTA
YSYQPRTNSL

SEQ ID NO: 33625 - protein, 10 aa, Homo sapiens
  Table A; Target 33625; HLA-C*12:03; KCNU1; ENSG00000215262; CTA
YSYQPRTNSL

SEQ ID NO: 33626 - protein, 10 aa, Homo sapiens
  Table A; Target 33626; HLA-C*14:02; KCNU1; ENSG00000215262; CTA
YSYQPRTNSL

SEQ ID NO: 33627 - protein, 10 aa, Homo sapiens
  Table A; Target 33627; HLA-C*16:01; KCNU1; ENSG00000215262; CTA
YSYQPRTNSL

SEQ ID NO: 33628 - protein, 10 aa, Homo sapiens
  Table A; Target 33628; HLA-C*16:02; KCNU1; ENSG00000215262; CTA
YSYQPRTNSL

SEQ ID NO: 33629 - protein, 8 aa, Homo sapiens
  Table A; Target 33629; HLA-C*03:03; KCNU1; ENSG00000215262; CTA
YTSSYEAL

SEQ ID NO: 33630 - protein, 8 aa, Homo sapiens
  Table A; Target 33630; HLA-C*03:04; KCNU1; ENSG00000215262; CTA
YTSSYEAL

SEQ ID NO: 33631 - protein, 8 aa, Homo sapiens
  Table A; Target 33631; HLA-C*14:02; KCNU1; ENSG00000215262; CTA
YTSSYEAL

SEQ ID NO: 33632 - protein, 9 aa, Homo sapiens
  Table A; Target 33632; HLA-A*01:01; KCNU1; ENSG00000215262; CTA
YTSSYEALK

SEQ ID NO: 33633 - protein, 9 aa, Homo sapiens
  Table A; Target 33633; HLA-A*03:02; KCNU1; ENSG00000215262; CTA
YTSSYEALK

SEQ ID NO: 33634 - protein, 9 aa, Homo sapiens
  Table A; Target 33634; HLA-A*11:01; KCNU1; ENSG00000215262; CTA
YTSSYEALK

SEQ ID NO: 33635 - protein, 9 aa, Homo sapiens
  Table A; Target 33635; HLA-A*68:01; KCNU1; ENSG00000215262; CTA
YTSSYEALK

SEQ ID NO: 33636 - protein, 9 aa, Homo sapiens
  Table A; Target 33636; HLA-A*68:02; KCNU1; ENSG00000215262; CTA
YTSSYEALK

SEQ ID NO: 33637 - protein, 9 aa, Homo sapiens
  Table A; Target 33637; HLA-B*27:02; KCNU1; ENSG00000215262; CTA
YTSSYEALK

SEQ ID NO: 33638 - protein, 9 aa, Homo sapiens
  Table A; Target 33638; HLA-C*07:06; KCNU1; ENSG00000215262; CTA
YTSSYEALK

SEQ ID NO: 33639 - protein, 11 aa, Homo sapiens
  Table A; Target 33639; HLA-A*03:01; KCNU1; ENSG00000215262; CTA
YTSSYEALKGK

SEQ ID NO: 33640 - protein, 11 aa, Homo sapiens
  Table A; Target 33640; HLA-A*03:02; KCNU1; ENSG00000215262; CTA
YTSSYEALKGK

SEQ ID NO: 33641 - protein, 11 aa, Homo sapiens
  Table A; Target 33641; HLA-A*11:01; KCNU1; ENSG00000215262; CTA
YTSSYEALKGK

SEQ ID NO: 33642 - protein, 11 aa, Homo sapiens
  Table A; Target 33642; HLA-A*68:01; KCNU1; ENSG00000215262; CTA
YTSSYEALKGK

SEQ ID NO: 33643 - protein, 11 aa, Homo sapiens
  Table A; Target 33643; HLA-A*68:02; KCNU1; ENSG00000215262; CTA
YTSSYEALKGK

SEQ ID NO: 33644 - protein, 11 aa, Homo sapiens
  Table A; Target 33644; HLA-B*27:02; KCNU1; ENSG00000215262; CTA
YTSSYEALKGK

SEQ ID NO: 33645 - protein, 9 aa, Homo sapiens
  Table A; Target 33645; HLA-B*54:01; KCNU1; ENSG00000215262; CTA
YTTFISGSA

SEQ ID NO: 33646 - protein, 9 aa, Homo sapiens
  Table A; Target 33646; HLA-B*56:01; KCNU1; ENSG00000215262; CTA
YTTFISGSA

SEQ ID NO: 33647 - protein, 10 aa, Homo sapiens
  Table A; Target 33647; HLA-A*01:01; KCNU1; ENSG00000215262; CTA
YTTFISGSAM

SEQ ID NO: 33648 - protein, 10 aa, Homo sapiens
  Table A; Target 33648; HLA-C*02:02; KCNU1; ENSG00000215262; CTA
YTTFISGSAM

SEQ ID NO: 33649 - protein, 10 aa, Homo sapiens
  Table A; Target 33649; HLA-C*03:03; KCNU1; ENSG00000215262; CTA
YTTFISGSAM

SEQ ID NO: 33650 - protein, 10 aa, Homo sapiens
  Table A; Target 33650; HLA-C*03:04; KCNU1; ENSG00000215262; CTA
YTTFISGSAM

SEQ ID NO: 33651 - protein, 9 aa, Homo sapiens
  Table A; Target 33651; HLA-B*15:03; KLK2; ENSG00000167751; TAA
AKITDVVKV

SEQ ID NO: 33652 - protein, 9 aa, Homo sapiens
  Table A; Target 33652; HLA-A*01:01; KLK2; ENSG00000167751; TAA
ALPEKPAVY

SEQ ID NO: 33653 - protein, 9 aa, Homo sapiens
  Table A; Target 33653; HLA-A*02:01; KLK2; ENSG00000167751; TAA
ALPEKPAVY

SEQ ID NO: 33654 - protein, 9 aa, Homo sapiens
  Table A; Target 33654; HLA-A*02:03; KLK2; ENSG00000167751; TAA
ALPEKPAVY

SEQ ID NO: 33655 - protein, 9 aa, Homo sapiens
  Table A; Target 33655; HLA-A*02:07; KLK2; ENSG00000167751; TAA
ALPEKPAVY

SEQ ID NO: 33656 - protein, 9 aa, Homo sapiens
  Table A; Target 33656; HLA-A*03:01; KLK2; ENSG00000167751; TAA
ALPEKPAVY

SEQ ID NO: 33657 - protein, 9 aa, Homo sapiens
  Table A; Target 33657; HLA-A*03:02; KLK2; ENSG00000167751; TAA
ALPEKPAVY

SEQ ID NO: 33658 - protein, 9 aa, Homo sapiens
  Table A; Target 33658; HLA-A*25:01; KLK2; ENSG00000167751; TAA
ALPEKPAVY

SEQ ID NO: 33659 - protein, 9 aa, Homo sapiens
  Table A; Target 33659; HLA-A*26:01; KLK2; ENSG00000167751; TAA
ALPEKPAVY

SEQ ID NO: 33660 - protein, 9 aa, Homo sapiens
  Table A; Target 33660; HLA-A*29:02; KLK2; ENSG00000167751; TAA
ALPEKPAVY

SEQ ID NO: 33661 - protein, 9 aa, Homo sapiens
  Table A; Target 33661; HLA-A*30:02; KLK2; ENSG00000167751; TAA
ALPEKPAVY

SEQ ID NO: 33662 - protein, 9 aa, Homo sapiens
  Table A; Target 33662; HLA-A*32:01; KLK2; ENSG00000167751; TAA
ALPEKPAVY

SEQ ID NO: 33663 - protein, 9 aa, Homo sapiens
  Table A; Target 33663; HLA-B*15:01; KLK2; ENSG00000167751; TAA
ALPEKPAVY

SEQ ID NO: 33664 - protein, 9 aa, Homo sapiens
  Table A; Target 33664; HLA-B*15:03; KLK2; ENSG00000167751; TAA
ALPEKPAVY

SEQ ID NO: 33665 - protein, 9 aa, Homo sapiens
  Table A; Target 33665; HLA-B*46:01; KLK2; ENSG00000167751; TAA
ALPEKPAVY

SEQ ID NO: 33666 - protein, 9 aa, Homo sapiens
  Table A; Target 33666; HLA-B*58:01; KLK2; ENSG00000167751; TAA
ALPEKPAVY

SEQ ID NO: 33667 - protein, 9 aa, Homo sapiens
  Table A; Target 33667; HLA-C*01:02; KLK2; ENSG00000167751; TAA
ALPEKPAVY

SEQ ID NO: 33668 - protein, 9 aa, Homo sapiens
  Table A; Target 33668; HLA-C*02:02; KLK2; ENSG00000167751; TAA
ALPEKPAVY

SEQ ID NO: 33669 - protein, 9 aa, Homo sapiens
  Table A; Target 33669; HLA-C*07:04; KLK2; ENSG00000167751; TAA
ALPEKPAVY

SEQ ID NO: 33670 - protein, 9 aa, Homo sapiens
  Table A; Target 33670; HLA-C*14:02; KLK2; ENSG00000167751; TAA
ALPEKPAVY

SEQ ID NO: 33671 - protein, 9 aa, Homo sapiens
  Table A; Target 33671; HLA-C*16:01; KLK2; ENSG00000167751; TAA
ALPEKPAVY

SEQ ID NO: 33672 - protein, 10 aa, Homo sapiens
  Table A; Target 33672; HLA-A*02:07; KLK2; ENSG00000167751; TAA
ALPEKPAVYT

SEQ ID NO: 33673 - protein, 11 aa, Homo sapiens
  Table A; Target 33673; HLA-A*03:01; KLK2; ENSG00000167751; TAA
ALPEKPAVYTK

SEQ ID NO: 33674 - protein, 11 aa, Homo sapiens
  Table A; Target 33674; HLA-A*03:02; KLK2; ENSG00000167751; TAA
ALPEKPAVYTK

SEQ ID NO: 33675 - protein, 9 aa, Homo sapiens
  Table A; Target 33675; HLA-A*02:07; KLK2; ENSG00000167751; TAA
AVPLIQSRI

SEQ ID NO: 33676 - protein, 9 aa, Homo sapiens
  Table A; Target 33676; HLA-B*13:02; KLK2; ENSG00000167751; TAA
AVPLIQSRI

SEQ ID NO: 33677 - protein, 9 aa, Homo sapiens
  Table A; Target 33677; HLA-A*03:01; KLK2; ENSG00000167751; TAA
AVYSHGWAH

SEQ ID NO: 33678 - protein, 9 aa, Homo sapiens
  Table A; Target 33678; HLA-A*11:01; KLK2; ENSG00000167751; TAA
AVYSHGWAH

SEQ ID NO: 33679 - protein, 8 aa, Homo sapiens
  Table A; Target 33679; HLA-B*08:01; KLK2; ENSG00000167751; TAA
AVYTKVVH

SEQ ID NO: 33680 - protein, 9 aa, Homo sapiens
  Table A; Target 33680; HLA-A*01:01; KLK2; ENSG00000167751; TAA
AVYTKVVHY

SEQ ID NO: 33681 - protein, 9 aa, Homo sapiens
  Table A; Target 33681; HLA-A*02:03; KLK2; ENSG00000167751; TAA
AVYTKVVHY

SEQ ID NO: 33682 - protein, 9 aa, Homo sapiens
  Table A; Target 33682; HLA-A*03:01; KLK2; ENSG00000167751; TAA
AVYTKVVHY

SEQ ID NO: 33683 - protein, 9 aa, Homo sapiens
  Table A; Target 33683; HLA-A*03:02; KLK2; ENSG00000167751; TAA
AVYTKVVHY

SEQ ID NO: 33684 - protein, 9 aa, Homo sapiens
  Table A; Target 33684; HLA-A*11:01; KLK2; ENSG00000167751; TAA
AVYTKVVHY

SEQ ID NO: 33685 - protein, 9 aa, Homo sapiens
  Table A; Target 33685; HLA-A*23:01; KLK2; ENSG00000167751; TAA
AVYTKVVHY

SEQ ID NO: 33686 - protein, 9 aa, Homo sapiens
  Table A; Target 33686; HLA-A*25:01; KLK2; ENSG00000167751; TAA
AVYTKVVHY

SEQ ID NO: 33687 - protein, 9 aa, Homo sapiens
  Table A; Target 33687; HLA-A*26:01; KLK2; ENSG00000167751; TAA
AVYTKVVHY

SEQ ID NO: 33688 - protein, 9 aa, Homo sapiens
  Table A; Target 33688; HLA-A*29:02; KLK2; ENSG00000167751; TAA
AVYTKVVHY

SEQ ID NO: 33689 - protein, 9 aa, Homo sapiens
  Table A; Target 33689; HLA-A*30:02; KLK2; ENSG00000167751; TAA
AVYTKVVHY

SEQ ID NO: 33690 - protein, 9 aa, Homo sapiens
  Table A; Target 33690; HLA-A*31:01; KLK2; ENSG00000167751; TAA
AVYTKVVHY

SEQ ID NO: 33691 - protein, 9 aa, Homo sapiens
  Table A; Target 33691; HLA-A*32:01; KLK2; ENSG00000167751; TAA
AVYTKVVHY

SEQ ID NO: 33692 - protein, 9 aa, Homo sapiens
  Table A; Target 33692; HLA-A*68:01; KLK2; ENSG00000167751; TAA
AVYTKVVHY

SEQ ID NO: 33693 - protein, 9 aa, Homo sapiens
  Table A; Target 33693; HLA-B*08:01; KLK2; ENSG00000167751; TAA
AVYTKVVHY

SEQ ID NO: 33694 - protein, 9 aa, Homo sapiens
  Table A; Target 33694; HLA-B*13:02; KLK2; ENSG00000167751; TAA
AVYTKVVHY

SEQ ID NO: 33695 - protein, 9 aa, Homo sapiens
  Table A; Target 33695; HLA-B*15:01; KLK2; ENSG00000167751; TAA
AVYTKVVHY

SEQ ID NO: 33696 - protein, 9 aa, Homo sapiens
  Table A; Target 33696; HLA-B*15:03; KLK2; ENSG00000167751; TAA
AVYTKVVHY

SEQ ID NO: 33697 - protein, 9 aa, Homo sapiens
  Table A; Target 33697; HLA-B*35:01; KLK2; ENSG00000167751; TAA
AVYTKVVHY

SEQ ID NO: 33698 - protein, 9 aa, Homo sapiens
  Table A; Target 33698; HLA-B*37:01; KLK2; ENSG00000167751; TAA
AVYTKVVHY

SEQ ID NO: 33699 - protein, 9 aa, Homo sapiens
  Table A; Target 33699; HLA-B*44:02; KLK2; ENSG00000167751; TAA
AVYTKVVHY

SEQ ID NO: 33700 - protein, 9 aa, Homo sapiens
  Table A; Target 33700; HLA-B*44:03; KLK2; ENSG00000167751; TAA
AVYTKVVHY

SEQ ID NO: 33701 - protein, 9 aa, Homo sapiens
  Table A; Target 33701; HLA-B*46:01; KLK2; ENSG00000167751; TAA
AVYTKVVHY

SEQ ID NO: 33702 - protein, 9 aa, Homo sapiens
  Table A; Target 33702; HLA-B*57:01; KLK2; ENSG00000167751; TAA
AVYTKVVHY

SEQ ID NO: 33703 - protein, 9 aa, Homo sapiens
  Table A; Target 33703; HLA-B*58:01; KLK2; ENSG00000167751; TAA
AVYTKVVHY

SEQ ID NO: 33704 - protein, 9 aa, Homo sapiens
  Table A; Target 33704; HLA-C*01:02; KLK2; ENSG00000167751; TAA
AVYTKVVHY

SEQ ID NO: 33705 - protein, 9 aa, Homo sapiens
  Table A; Target 33705; HLA-C*02:02; KLK2; ENSG00000167751; TAA
AVYTKVVHY

SEQ ID NO: 33706 - protein, 9 aa, Homo sapiens
  Table A; Target 33706; HLA-C*07:04; KLK2; ENSG00000167751; TAA
AVYTKVVHY

SEQ ID NO: 33707 - protein, 9 aa, Homo sapiens
  Table A; Target 33707; HLA-C*07:06; KLK2; ENSG00000167751; TAA
AVYTKVVHY

SEQ ID NO: 33708 - protein, 9 aa, Homo sapiens
  Table A; Target 33708; HLA-C*12:03; KLK2; ENSG00000167751; TAA
AVYTKVVHY

SEQ ID NO: 33709 - protein, 9 aa, Homo sapiens
  Table A; Target 33709; HLA-C*14:02; KLK2; ENSG00000167751; TAA
AVYTKVVHY

SEQ ID NO: 33710 - protein, 9 aa, Homo sapiens
  Table A; Target 33710; HLA-C*16:01; KLK2; ENSG00000167751; TAA
AVYTKVVHY

SEQ ID NO: 33711 - protein, 9 aa, Homo sapiens
  Table A; Target 33711; HLA-C*16:02; KLK2; ENSG00000167751; TAA
AVYTKVVHY

SEQ ID NO: 33712 - protein, 9 aa, Homo sapiens
  Table A; Target 33712; HLA-C*16:04; KLK2; ENSG00000167751; TAA
AVYTKVVHY

SEQ ID NO: 33713 - protein, 10 aa, Homo sapiens
  Table A; Target 33713; HLA-A*03:01; KLK2; ENSG00000167751; TAA
AVYTKVVHYR

SEQ ID NO: 33714 - protein, 10 aa, Homo sapiens
  Table A; Target 33714; HLA-A*31:01; KLK2; ENSG00000167751; TAA
AVYTKVVHYR

SEQ ID NO: 33715 - protein, 9 aa, Homo sapiens
  Table A; Target 33715; HLA-A*02:01; KLK2; ENSG00000167751; TAA
AYSEKVTEF

SEQ ID NO: 33716 - protein, 9 aa, Homo sapiens
  Table A; Target 33716; HLA-A*23:01; KLK2; ENSG00000167751; TAA
AYSEKVTEF

SEQ ID NO: 33717 - protein, 9 aa, Homo sapiens
  Table A; Target 33717; HLA-A*24:02; KLK2; ENSG00000167751; TAA
AYSEKVTEF

SEQ ID NO: 33718 - protein, 9 aa, Homo sapiens
  Table A; Target 33718; HLA-A*25:01; KLK2; ENSG00000167751; TAA
AYSEKVTEF

SEQ ID NO: 33719 - protein, 9 aa, Homo sapiens
  Table A; Target 33719; HLA-A*26:01; KLK2; ENSG00000167751; TAA
AYSEKVTEF

SEQ ID NO: 33720 - protein, 9 aa, Homo sapiens
  Table A; Target 33720; HLA-A*29:02; KLK2; ENSG00000167751; TAA
AYSEKVTEF

SEQ ID NO: 33721 - protein, 9 aa, Homo sapiens
  Table A; Target 33721; HLA-A*30:01; KLK2; ENSG00000167751; TAA
AYSEKVTEF

SEQ ID NO: 33722 - protein, 9 aa, Homo sapiens
  Table A; Target 33722; HLA-A*30:02; KLK2; ENSG00000167751; TAA
AYSEKVTEF

SEQ ID NO: 33723 - protein, 9 aa, Homo sapiens
  Table A; Target 33723; HLA-A*31:01; KLK2; ENSG00000167751; TAA
AYSEKVTEF

SEQ ID NO: 33724 - protein, 9 aa, Homo sapiens
  Table A; Target 33724; HLA-A*32:01; KLK2; ENSG00000167751; TAA
AYSEKVTEF

SEQ ID NO: 33725 - protein, 9 aa, Homo sapiens
  Table A; Target 33725; HLA-A*33:01; KLK2; ENSG00000167751; TAA
AYSEKVTEF

SEQ ID NO: 33726 - protein, 9 aa, Homo sapiens
  Table A; Target 33726; HLA-A*33:03; KLK2; ENSG00000167751; TAA
AYSEKVTEF

SEQ ID NO: 33727 - protein, 9 aa, Homo sapiens
  Table A; Target 33727; HLA-B*07:02; KLK2; ENSG00000167751; TAA
AYSEKVTEF

SEQ ID NO: 33728 - protein, 9 aa, Homo sapiens
  Table A; Target 33728; HLA-B*15:01; KLK2; ENSG00000167751; TAA
AYSEKVTEF

SEQ ID NO: 33729 - protein, 9 aa, Homo sapiens
  Table A; Target 33729; HLA-B*15:03; KLK2; ENSG00000167751; TAA
AYSEKVTEF

SEQ ID NO: 33730 - protein, 9 aa, Homo sapiens
  Table A; Target 33730; HLA-B*35:01; KLK2; ENSG00000167751; TAA
AYSEKVTEF

SEQ ID NO: 33731 - protein, 9 aa, Homo sapiens
  Table A; Target 33731; HLA-B*35:03; KLK2; ENSG00000167751; TAA
AYSEKVTEF

SEQ ID NO: 33732 - protein, 9 aa, Homo sapiens
  Table A; Target 33732; HLA-B*37:01; KLK2; ENSG00000167751; TAA
AYSEKVTEF

SEQ ID NO: 33733 - protein, 9 aa, Homo sapiens
  Table A; Target 33733; HLA-B*38:01; KLK2; ENSG00000167751; TAA
AYSEKVTEF

SEQ ID NO: 33734 - protein, 9 aa, Homo sapiens
  Table A; Target 33734; HLA-B*44:02; KLK2; ENSG00000167751; TAA
AYSEKVTEF

SEQ ID NO: 33735 - protein, 9 aa, Homo sapiens
  Table A; Target 33735; HLA-B*44:03; KLK2; ENSG00000167751; TAA
AYSEKVTEF

SEQ ID NO: 33736 - protein, 9 aa, Homo sapiens
  Table A; Target 33736; HLA-B*46:01; KLK2; ENSG00000167751; TAA
AYSEKVTEF

SEQ ID NO: 33737 - protein, 9 aa, Homo sapiens
  Table A; Target 33737; HLA-B*55:01; KLK2; ENSG00000167751; TAA
AYSEKVTEF

SEQ ID NO: 33738 - protein, 9 aa, Homo sapiens
  Table A; Target 33738; HLA-B*58:01; KLK2; ENSG00000167751; TAA
AYSEKVTEF

SEQ ID NO: 33739 - protein, 9 aa, Homo sapiens
  Table A; Target 33739; HLA-C*01:02; KLK2; ENSG00000167751; TAA
AYSEKVTEF

SEQ ID NO: 33740 - protein, 9 aa, Homo sapiens
  Table A; Target 33740; HLA-C*02:02; KLK2; ENSG00000167751; TAA
AYSEKVTEF

SEQ ID NO: 33741 - protein, 9 aa, Homo sapiens
  Table A; Target 33741; HLA-C*03:03; KLK2; ENSG00000167751; TAA
AYSEKVTEF

SEQ ID NO: 33742 - protein, 9 aa, Homo sapiens
  Table A; Target 33742; HLA-C*03:04; KLK2; ENSG00000167751; TAA
AYSEKVTEF

SEQ ID NO: 33743 - protein, 9 aa, Homo sapiens
  Table A; Target 33743; HLA-C*04:01; KLK2; ENSG00000167751; TAA
AYSEKVTEF

SEQ ID NO: 33744 - protein, 9 aa, Homo sapiens
  Table A; Target 33744; HLA-C*05:01; KLK2; ENSG00000167751; TAA
AYSEKVTEF

SEQ ID NO: 33745 - protein, 9 aa, Homo sapiens
  Table A; Target 33745; HLA-C*07:04; KLK2; ENSG00000167751; TAA
AYSEKVTEF

SEQ ID NO: 33746 - protein, 9 aa, Homo sapiens
  Table A; Target 33746; HLA-C*12:03; KLK2; ENSG00000167751; TAA
AYSEKVTEF

SEQ ID NO: 33747 - protein, 9 aa, Homo sapiens
  Table A; Target 33747; HLA-C*14:02; KLK2; ENSG00000167751; TAA
AYSEKVTEF

SEQ ID NO: 33748 - protein, 9 aa, Homo sapiens
  Table A; Target 33748; HLA-C*16:01; KLK2; ENSG00000167751; TAA
AYSEKVTEF

SEQ ID NO: 33749 - protein, 9 aa, Homo sapiens
  Table A; Target 33749; HLA-C*16:02; KLK2; ENSG00000167751; TAA
AYSEKVTEF

SEQ ID NO: 33750 - protein, 9 aa, Homo sapiens
  Table A; Target 33750; HLA-C*16:04; KLK2; ENSG00000167751; TAA
AYSEKVTEF

SEQ ID NO: 33751 - protein, 10 aa, Homo sapiens
  Table A; Target 33751; HLA-A*24:02; KLK2; ENSG00000167751; TAA
AYSEKVTEFM

SEQ ID NO: 33752 - protein, 9 aa, Homo sapiens
  Table A; Target 33752; HLA-B*51:01; KLK2; ENSG00000167751; TAA
CALPEKPAV

SEQ ID NO: 33753 - protein, 9 aa, Homo sapiens
  Table A; Target 33753; HLA-C*03:03; KLK2; ENSG00000167751; TAA
CALPEKPAV

SEQ ID NO: 33754 - protein, 9 aa, Homo sapiens
  Table A; Target 33754; HLA-C*03:04; KLK2; ENSG00000167751; TAA
CALPEKPAV

SEQ ID NO: 33755 - protein, 9 aa, Homo sapiens
  Table A; Target 33755; HLA-C*16:01; KLK2; ENSG00000167751; TAA
CALPEKPAV

SEQ ID NO: 33756 - protein, 9 aa, Homo sapiens
  Table A; Target 33756; HLA-C*16:02; KLK2; ENSG00000167751; TAA
CALPEKPAV

SEQ ID NO: 33757 - protein, 10 aa, Homo sapiens
  Table A; Target 33757; HLA-A*29:02; KLK2; ENSG00000167751; TAA
CALPEKPAVY

SEQ ID NO: 33758 - protein, 10 aa, Homo sapiens
  Table A; Target 33758; HLA-A*30:02; KLK2; ENSG00000167751; TAA
CALPEKPAVY

SEQ ID NO: 33759 - protein, 10 aa, Homo sapiens
  Table A; Target 33759; HLA-A*32:01; KLK2; ENSG00000167751; TAA
CALPEKPAVY

SEQ ID NO: 33760 - protein, 10 aa, Homo sapiens
  Table A; Target 33760; HLA-B*15:01; KLK2; ENSG00000167751; TAA
CALPEKPAVY

SEQ ID NO: 33761 - protein, 10 aa, Homo sapiens
  Table A; Target 33761; HLA-B*15:03; KLK2; ENSG00000167751; TAA
CALPEKPAVY

SEQ ID NO: 33762 - protein, 10 aa, Homo sapiens
  Table A; Target 33762; HLA-B*35:01; KLK2; ENSG00000167751; TAA
CALPEKPAVY

SEQ ID NO: 33763 - protein, 10 aa, Homo sapiens
  Table A; Target 33763; HLA-B*46:01; KLK2; ENSG00000167751; TAA
CALPEKPAVY

SEQ ID NO: 33764 - protein, 10 aa, Homo sapiens
  Table A; Target 33764; HLA-C*02:02; KLK2; ENSG00000167751; TAA
CALPEKPAVY

SEQ ID NO: 33765 - protein, 10 aa, Homo sapiens
  Table A; Target 33765; HLA-C*12:03; KLK2; ENSG00000167751; TAA
CALPEKPAVY

SEQ ID NO: 33766 - protein, 10 aa, Homo sapiens
  Table A; Target 33766; HLA-C*16:04; KLK2; ENSG00000167751; TAA
CALPEKPAVY

SEQ ID NO: 33767 - protein, 9 aa, Homo sapiens
  Table A; Target 33767; HLA-C*07:01; KLK2; ENSG00000167751; TAA
CTGAVPLIQ

SEQ ID NO: 33768 - protein, 11 aa, Homo sapiens
  Table A; Target 33768; HLA-A*33:03; KLK2; ENSG00000167751; TAA
CTGAVPLIQSR

SEQ ID NO: 33769 - protein, 8 aa, Homo sapiens
  Table A; Target 33769; HLA-B*18:01; KLK2; ENSG00000167751; TAA
DEDSSHDL

SEQ ID NO: 33770 - protein, 9 aa, Homo sapiens
  Table A; Target 33770; HLA-B*18:01; KLK2; ENSG00000167751; TAA
DEDSSHDLM

SEQ ID NO: 33771 - protein, 9 aa, Homo sapiens
  Table A; Target 33771; HLA-B*40:01; KLK2; ENSG00000167751; TAA
DEDSSHDLM

SEQ ID NO: 33772 - protein, 10 aa, Homo sapiens
  Table A; Target 33772; HLA-B*38:01; KLK2; ENSG00000167751; TAA
DEDSSHDLML

SEQ ID NO: 33773 - protein, 10 aa, Homo sapiens
  Table A; Target 33773; HLA-B*40:01; KLK2; ENSG00000167751; TAA
DEDSSHDLML

SEQ ID NO: 33774 - protein, 8 aa, Homo sapiens
  Table A; Target 33774; HLA-B*08:01; KLK2; ENSG00000167751; TAA
DLVLSIAL

SEQ ID NO: 33775 - protein, 8 aa, Homo sapiens
  Table A; Target 33775; HLA-B*18:01; KLK2; ENSG00000167751; TAA
DLVLSIAL

SEQ ID NO: 33776 - protein, 8 aa, Homo sapiens
  Table A; Target 33776; HLA-B*08:01; KLK2; ENSG00000167751; TAA
DTGQRVPV

SEQ ID NO: 33777 - protein, 8 aa, Homo sapiens
  Table A; Target 33777; HLA-A*25:01; KLK2; ENSG00000167751; TAA
DVVKVLGL

SEQ ID NO: 33778 - protein, 8 aa, Homo sapiens
  Table A; Target 33778; HLA-A*26:01; KLK2; ENSG00000167751; TAA
DVVKVLGL

SEQ ID NO: 33779 - protein, 8 aa, Homo sapiens
  Table A; Target 33779; HLA-B*08:01; KLK2; ENSG00000167751; TAA
DVVKVLGL

SEQ ID NO: 33780 - protein, 8 aa, Homo sapiens
  Table A; Target 33780; HLA-B*18:01; KLK2; ENSG00000167751; TAA
DVVKVLGL

SEQ ID NO: 33781 - protein, 8 aa, Homo sapiens
  Table A; Target 33781; HLA-B*51:01; KLK2; ENSG00000167751; TAA
DVVKVLGL

SEQ ID NO: 33782 - protein, 8 aa, Homo sapiens
  Table A; Target 33782; HLA-B*37:01; KLK2; ENSG00000167751; TAA
EDSSHDLM

SEQ ID NO: 33783 - protein, 9 aa, Homo sapiens
  Table A; Target 33783; HLA-B*38:01; KLK2; ENSG00000167751; TAA
EDSSHDLML

SEQ ID NO: 33784 - protein, 9 aa, Homo sapiens
  Table A; Target 33784; HLA-C*04:01; KLK2; ENSG00000167751; TAA
EDTGQRVPV

SEQ ID NO: 33785 - protein, 9 aa, Homo sapiens
  Table A; Target 33785; HLA-B*08:01; KLK2; ENSG00000167751; TAA
EEFLRPRSL

SEQ ID NO: 33786 - protein, 9 aa, Homo sapiens
  Table A; Target 33786; HLA-B*18:01; KLK2; ENSG00000167751; TAA
EEFLRPRSL

SEQ ID NO: 33787 - protein, 9 aa, Homo sapiens
  Table A; Target 33787; HLA-B*37:01; KLK2; ENSG00000167751; TAA
EEFLRPRSL

SEQ ID NO: 33788 - protein, 9 aa, Homo sapiens
  Table A; Target 33788; HLA-B*44:02; KLK2; ENSG00000167751; TAA
EEFLRPRSL

SEQ ID NO: 33789 - protein, 9 aa, Homo sapiens
  Table A; Target 33789; HLA-B*44:03; KLK2; ENSG00000167751; TAA
EEFLRPRSL

SEQ ID NO: 33790 - protein, 8 aa, Homo sapiens
  Table A; Target 33790; HLA-B*51:01; KLK2; ENSG00000167751; TAA
EPAKITDV

SEQ ID NO: 33791 - protein, 9 aa, Homo sapiens
  Table A; Target 33791; HLA-A*68:01; KLK2; ENSG00000167751; TAA
EPAKITDVV

SEQ ID NO: 33792 - protein, 9 aa, Homo sapiens
  Table A; Target 33792; HLA-A*68:02; KLK2; ENSG00000167751; TAA
EPAKITDVV

SEQ ID NO: 33793 - protein, 9 aa, Homo sapiens
  Table A; Target 33793; HLA-B*07:02; KLK2; ENSG00000167751; TAA
EPAKITDVV

SEQ ID NO: 33794 - protein, 9 aa, Homo sapiens
  Table A; Target 33794; HLA-B*35:01; KLK2; ENSG00000167751; TAA
EPAKITDVV

SEQ ID NO: 33795 - protein, 9 aa, Homo sapiens
  Table A; Target 33795; HLA-B*35:03; KLK2; ENSG00000167751; TAA
EPAKITDVV

SEQ ID NO: 33796 - protein, 9 aa, Homo sapiens
  Table A; Target 33796; HLA-B*51:01; KLK2; ENSG00000167751; TAA
EPAKITDVV

SEQ ID NO: 33797 - protein, 9 aa, Homo sapiens
  Table A; Target 33797; HLA-B*54:01; KLK2; ENSG00000167751; TAA
EPAKITDVV

SEQ ID NO: 33798 - protein, 9 aa, Homo sapiens
  Table A; Target 33798; HLA-B*55:01; KLK2; ENSG00000167751; TAA
EPAKITDVV

SEQ ID NO: 33799 - protein, 9 aa, Homo sapiens
  Table A; Target 33799; HLA-B*56:01; KLK2; ENSG00000167751; TAA
EPAKITDVV

SEQ ID NO: 33800 - protein, 9 aa, Homo sapiens
  Table A; Target 33800; HLA-C*07:02; KLK2; ENSG00000167751; TAA
EPAKITDVV

SEQ ID NO: 33801 - protein, 9 aa, Homo sapiens
  Table A; Target 33801; HLA-C*07:06; KLK2; ENSG00000167751; TAA
EPAKITDVV

SEQ ID NO: 33802 - protein, 10 aa, Homo sapiens
  Table A; Target 33802; HLA-A*33:03; KLK2; ENSG00000167751; TAA
EPAKITDVVK

SEQ ID NO: 33803 - protein, 10 aa, Homo sapiens
  Table A; Target 33803; HLA-A*68:01; KLK2; ENSG00000167751; TAA
EPAKITDVVK

SEQ ID NO: 33804 - protein, 10 aa, Homo sapiens
  Table A; Target 33804; HLA-A*68:02; KLK2; ENSG00000167751; TAA
EPAKITDVVK

SEQ ID NO: 33805 - protein, 10 aa, Homo sapiens
  Table A; Target 33805; HLA-B*35:01; KLK2; ENSG00000167751; TAA
EPAKITDVVK

SEQ ID NO: 33806 - protein, 10 aa, Homo sapiens
  Table A; Target 33806; HLA-B*35:03; KLK2; ENSG00000167751; TAA
EPAKITDVVK

SEQ ID NO: 33807 - protein, 10 aa, Homo sapiens
  Table A; Target 33807; HLA-B*55:01; KLK2; ENSG00000167751; TAA
EPAKITDVVK

SEQ ID NO: 33808 - protein, 10 aa, Homo sapiens
  Table A; Target 33808; HLA-C*07:06; KLK2; ENSG00000167751; TAA
EPAKITDVVK

SEQ ID NO: 33809 - protein, 11 aa, Homo sapiens
  Table A; Target 33809; HLA-A*68:01; KLK2; ENSG00000167751; TAA
EPAKITDVVKV

SEQ ID NO: 33810 - protein, 11 aa, Homo sapiens
  Table A; Target 33810; HLA-A*68:02; KLK2; ENSG00000167751; TAA
EPAKITDVVKV

SEQ ID NO: 33811 - protein, 9 aa, Homo sapiens
  Table A; Target 33811; HLA-A*33:01; KLK2; ENSG00000167751; TAA
EPEEFLRPR

SEQ ID NO: 33812 - protein, 9 aa, Homo sapiens
  Table A; Target 33812; HLA-A*33:03; KLK2; ENSG00000167751; TAA
EPEEFLRPR

SEQ ID NO: 33813 - protein, 10 aa, Homo sapiens
  Table A; Target 33813; HLA-A*02:07; KLK2; ENSG00000167751; TAA
FEPEDTGQRV

SEQ ID NO: 33814 - protein, 10 aa, Homo sapiens
  Table A; Target 33814; HLA-A*30:01; KLK2; ENSG00000167751; TAA
FEPEDTGQRV

SEQ ID NO: 33815 - protein, 10 aa, Homo sapiens
  Table A; Target 33815; HLA-B*40:01; KLK2; ENSG00000167751; TAA
FEPEDTGQRV

SEQ ID NO: 33816 - protein, 10 aa, Homo sapiens
  Table A; Target 33816; HLA-B*49:01; KLK2; ENSG00000167751; TAA
FEPEDTGQRV

SEQ ID NO: 33817 - protein, 11 aa, Homo sapiens
  Table A; Target 33817; HLA-A*30:01; KLK2; ENSG00000167751; TAA
FEPEDTGQRVP

SEQ ID NO: 33818 - protein, 10 aa, Homo sapiens
  Table A; Target 33818; HLA-A*02:03; KLK2; ENSG00000167751; TAA
FLRPRSLQCV

SEQ ID NO: 33819 - protein, 8 aa, Homo sapiens
  Table A; Target 33819; HLA-B*08:01; KLK2; ENSG00000167751; TAA
FPHPLYNM

SEQ ID NO: 33820 - protein, 8 aa, Homo sapiens
  Table A; Target 33820; HLA-B*35:01; KLK2; ENSG00000167751; TAA
FPHPLYNM

SEQ ID NO: 33821 - protein, 8 aa, Homo sapiens
  Table A; Target 33821; HLA-B*35:03; KLK2; ENSG00000167751; TAA
FPHPLYNM

SEQ ID NO: 33822 - protein, 8 aa, Homo sapiens
  Table A; Target 33822; HLA-B*51:01; KLK2; ENSG00000167751; TAA
FPHPLYNM

SEQ ID NO: 33823 - protein, 8 aa, Homo sapiens
  Table A; Target 33823; HLA-B*54:01; KLK2; ENSG00000167751; TAA
FPHPLYNM

SEQ ID NO: 33824 - protein, 8 aa, Homo sapiens
  Table A; Target 33824; HLA-B*56:01; KLK2; ENSG00000167751; TAA
FPHPLYNM

SEQ ID NO: 33825 - protein, 9 aa, Homo sapiens
  Table A; Target 33825; HLA-B*54:01; KLK2; ENSG00000167751; TAA
FPHPLYNMS

SEQ ID NO: 33826 - protein, 10 aa, Homo sapiens
  Table A; Target 33826; HLA-B*35:01; KLK2; ENSG00000167751; TAA
FPHPLYNMSL

SEQ ID NO: 33827 - protein, 10 aa, Homo sapiens
  Table A; Target 33827; HLA-B*35:03; KLK2; ENSG00000167751; TAA
FPHPLYNMSL

SEQ ID NO: 33828 - protein, 10 aa, Homo sapiens
  Table A; Target 33828; HLA-B*54:01; KLK2; ENSG00000167751; TAA
FPHPLYNMSL

SEQ ID NO: 33829 - protein, 10 aa, Homo sapiens
  Table A; Target 33829; HLA-B*56:01; KLK2; ENSG00000167751; TAA
FPHPLYNMSL

SEQ ID NO: 33830 - protein, 9 aa, Homo sapiens
  Table A; Target 33830; HLA-A*11:01; KLK2; ENSG00000167751; TAA
GAVPLIQSR

SEQ ID NO: 33831 - protein, 9 aa, Homo sapiens
  Table A; Target 33831; HLA-A*26:01; KLK2; ENSG00000167751; TAA
GAVPLIQSR

SEQ ID NO: 33832 - protein, 9 aa, Homo sapiens
  Table A; Target 33832; HLA-A*31:01; KLK2; ENSG00000167751; TAA
GAVPLIQSR

SEQ ID NO: 33833 - protein, 9 aa, Homo sapiens
  Table A; Target 33833; HLA-A*33:03; KLK2; ENSG00000167751; TAA
GAVPLIQSR

SEQ ID NO: 33834 - protein, 9 aa, Homo sapiens
  Table A; Target 33834; HLA-A*68:01; KLK2; ENSG00000167751; TAA
GAVPLIQSR

SEQ ID NO: 33835 - protein, 9 aa, Homo sapiens
  Table A; Target 33835; HLA-B*57:01; KLK2; ENSG00000167751; TAA
GAVPLIQSR

SEQ ID NO: 33836 - protein, 9 aa, Homo sapiens
  Table A; Target 33836; HLA-B*58:01; KLK2; ENSG00000167751; TAA
GAVPLIQSR

SEQ ID NO: 33837 - protein, 9 aa, Homo sapiens
  Table A; Target 33837; HLA-C*02:02; KLK2; ENSG00000167751; TAA
GAVPLIQSR

SEQ ID NO: 33838 - protein, 9 aa, Homo sapiens
  Table A; Target 33838; HLA-C*07:06; KLK2; ENSG00000167751; TAA
GAVPLIQSR

SEQ ID NO: 33839 - protein, 9 aa, Homo sapiens
  Table A; Target 33839; HLA-B*07:02; KLK2; ENSG00000167751; TAA
GCTGAVPLI

SEQ ID NO: 33840 - protein, 9 aa, Homo sapiens
  Table A; Target 33840; HLA-B*13:02; KLK2; ENSG00000167751; TAA
GCTGAVPLI

SEQ ID NO: 33841 - protein, 9 aa, Homo sapiens
  Table A; Target 33841; HLA-B*55:01; KLK2; ENSG00000167751; TAA
GCTGAVPLI

SEQ ID NO: 33842 - protein, 9 aa, Homo sapiens
  Table A; Target 33842; HLA-C*06:02; KLK2; ENSG00000167751; TAA
GCTGAVPLI

SEQ ID NO: 33843 - protein, 9 aa, Homo sapiens
  Table A; Target 33843; HLA-C*12:03; KLK2; ENSG00000167751; TAA
GCTGAVPLI

SEQ ID NO: 33844 - protein, 9 aa, Homo sapiens
  Table A; Target 33844; HLA-C*16:02; KLK2; ENSG00000167751; TAA
GCTGAVPLI

SEQ ID NO: 33845 - protein, 10 aa, Homo sapiens
  Table A; Target 33845; HLA-C*07:01; KLK2; ENSG00000167751; TAA
GCTGAVPLIQ

SEQ ID NO: 33846 - protein, 8 aa, Homo sapiens
  Table A; Target 33846; HLA-C*05:01; KLK2; ENSG00000167751; TAA
GGDSGGPL

SEQ ID NO: 33847 - protein, 9 aa, Homo sapiens
  Table A; Target 33847; HLA-B*39:01; KLK2; ENSG00000167751; TAA
GGDSGGPLV

SEQ ID NO: 33848 - protein, 9 aa, Homo sapiens
  Table A; Target 33848; HLA-C*05:01; KLK2; ENSG00000167751; TAA
GGDSGGPLV

SEQ ID NO: 33849 - protein, 9 aa, Homo sapiens
  Table A; Target 33849; HLA-A*02:01; KLK2; ENSG00000167751; TAA
GLPTQEPAL

SEQ ID NO: 33850 - protein, 9 aa, Homo sapiens
  Table A; Target 33850; HLA-A*02:03; KLK2; ENSG00000167751; TAA
GLPTQEPAL

SEQ ID NO: 33851 - protein, 9 aa, Homo sapiens
  Table A; Target 33851; HLA-A*02:04; KLK2; ENSG00000167751; TAA
GLPTQEPAL

SEQ ID NO: 33852 - protein, 9 aa, Homo sapiens
  Table A; Target 33852; HLA-A*02:07; KLK2; ENSG00000167751; TAA
GLPTQEPAL

SEQ ID NO: 33853 - protein, 9 aa, Homo sapiens
  Table A; Target 33853; HLA-A*23:01; KLK2; ENSG00000167751; TAA
GLPTQEPAL

SEQ ID NO: 33854 - protein, 9 aa, Homo sapiens
  Table A; Target 33854; HLA-A*24:02; KLK2; ENSG00000167751; TAA
GLPTQEPAL

SEQ ID NO: 33855 - protein, 9 aa, Homo sapiens
  Table A; Target 33855; HLA-B*13:02; KLK2; ENSG00000167751; TAA
GLPTQEPAL

SEQ ID NO: 33856 - protein, 9 aa, Homo sapiens
  Table A; Target 33856; HLA-B*15:01; KLK2; ENSG00000167751; TAA
GLPTQEPAL

SEQ ID NO: 33857 - protein, 9 aa, Homo sapiens
  Table A; Target 33857; HLA-B*15:03; KLK2; ENSG00000167751; TAA
GLPTQEPAL

SEQ ID NO: 33858 - protein, 9 aa, Homo sapiens
  Table A; Target 33858; HLA-B*39:01; KLK2; ENSG00000167751; TAA
GLPTQEPAL

SEQ ID NO: 33859 - protein, 9 aa, Homo sapiens
  Table A; Target 33859; HLA-B*40:01; KLK2; ENSG00000167751; TAA
GLPTQEPAL

SEQ ID NO: 33860 - protein, 9 aa, Homo sapiens
  Table A; Target 33860; HLA-B*55:01; KLK2; ENSG00000167751; TAA
GLPTQEPAL

SEQ ID NO: 33861 - protein, 9 aa, Homo sapiens
  Table A; Target 33861; HLA-C*01:02; KLK2; ENSG00000167751; TAA
GLPTQEPAL

SEQ ID NO: 33862 - protein, 9 aa, Homo sapiens
  Table A; Target 33862; HLA-C*14:02; KLK2; ENSG00000167751; TAA
GLPTQEPAL

SEQ ID NO: 33863 - protein, 10 aa, Homo sapiens
  Table A; Target 33863; HLA-A*02:01; KLK2; ENSG00000167751; TAA
GLWTGGKDTC

SEQ ID NO: 33864 - protein, 10 aa, Homo sapiens
  Table A; Target 33864; HLA-B*55:01; KLK2; ENSG00000167751; TAA
GLWTGGKDTC

SEQ ID NO: 33865 - protein, 8 aa, Homo sapiens
  Table A; Target 33865; HLA-B*15:01; KLK2; ENSG00000167751; TAA
GQRVPVSH

SEQ ID NO: 33866 - protein, 8 aa, Homo sapiens
  Table A; Target 33866; HLA-B*15:03; KLK2; ENSG00000167751; TAA
GQRVPVSH

SEQ ID NO: 33867 - protein, 10 aa, Homo sapiens
  Table A; Target 33867; HLA-A*30:02; KLK2; ENSG00000167751; TAA
GQRVPVSHSF

SEQ ID NO: 33868 - protein, 10 aa, Homo sapiens
  Table A; Target 33868; HLA-A*32:01; KLK2; ENSG00000167751; TAA
GQRVPVSHSF

SEQ ID NO: 33869 - protein, 10 aa, Homo sapiens
  Table A; Target 33869; HLA-B*15:01; KLK2; ENSG00000167751; TAA
GQRVPVSHSF

SEQ ID NO: 33870 - protein, 10 aa, Homo sapiens
  Table A; Target 33870; HLA-B*15:03; KLK2; ENSG00000167751; TAA
GQRVPVSHSF

SEQ ID NO: 33871 - protein, 10 aa, Homo sapiens
  Table A; Target 33871; HLA-A*11:01; KLK2; ENSG00000167751; TAA
GSIEPEEFLR

SEQ ID NO: 33872 - protein, 10 aa, Homo sapiens
  Table A; Target 33872; HLA-C*07:06; KLK2; ENSG00000167751; TAA
GSIEPEEFLR

SEQ ID NO: 33873 - protein, 10 aa, Homo sapiens
  Table A; Target 33873; HLA-B*57:01; KLK2; ENSG00000167751; TAA
HCLKKNSQVW

SEQ ID NO: 33874 - protein, 9 aa, Homo sapiens
  Table A; Target 33874; HLA-B*54:01; KLK2; ENSG00000167751; TAA
HLLSNDMCA

SEQ ID NO: 33875 - protein, 10 aa, Homo sapiens
  Table A; Target 33875; HLA-A*33:01; KLK2; ENSG00000167751; TAA
HLLSNDMCAR

SEQ ID NO: 33876 - protein, 8 aa, Homo sapiens
  Table A; Target 33876; HLA-B*35:03; KLK2; ENSG00000167751; TAA
HPLYNMSL

SEQ ID NO: 33877 - protein, 9 aa, Homo sapiens
  Table A; Target 33877; HLA-B*35:03; KLK2; ENSG00000167751; TAA
HPLYNMSLL

SEQ ID NO: 33878 - protein, 10 aa, Homo sapiens
  Table A; Target 33878; HLA-A*68:02; KLK2; ENSG00000167751; TAA
HSFPHPLYNM

SEQ ID NO: 33879 - protein, 10 aa, Homo sapiens
  Table A; Target 33879; HLA-B*57:01; KLK2; ENSG00000167751; TAA
HSFPHPLYNM

SEQ ID NO: 33880 - protein, 9 aa, Homo sapiens
  Table A; Target 33880; HLA-A*02:01; KLK2; ENSG00000167751; TAA
HSQPWQVAV

SEQ ID NO: 33881 - protein, 9 aa, Homo sapiens
  Table A; Target 33881; HLA-A*02:04; KLK2; ENSG00000167751; TAA
HSQPWQVAV

SEQ ID NO: 33882 - protein, 9 aa, Homo sapiens
  Table A; Target 33882; HLA-A*02:07; KLK2; ENSG00000167751; TAA
HSQPWQVAV

SEQ ID NO: 33883 - protein, 9 aa, Homo sapiens
  Table A; Target 33883; HLA-A*68:02; KLK2; ENSG00000167751; TAA
HSQPWQVAV

SEQ ID NO: 33884 - protein, 9 aa, Homo sapiens
  Table A; Target 33884; HLA-B*13:02; KLK2; ENSG00000167751; TAA
HSQPWQVAV

SEQ ID NO: 33885 - protein, 9 aa, Homo sapiens
  Table A; Target 33885; HLA-B*54:01; KLK2; ENSG00000167751; TAA
HSQPWQVAV

SEQ ID NO: 33886 - protein, 9 aa, Homo sapiens
  Table A; Target 33886; HLA-C*16:02; KLK2; ENSG00000167751; TAA
HSQPWQVAV

SEQ ID NO: 33887 - protein, 10 aa, Homo sapiens
  Table A; Target 33887; HLA-A*01:01; KLK2; ENSG00000167751; TAA
HSQPWQVAVY

SEQ ID NO: 33888 - protein, 10 aa, Homo sapiens
  Table A; Target 33888; HLA-A*25:01; KLK2; ENSG00000167751; TAA
HSQPWQVAVY

SEQ ID NO: 33889 - protein, 10 aa, Homo sapiens
  Table A; Target 33889; HLA-A*26:01; KLK2; ENSG00000167751; TAA
HSQPWQVAVY

SEQ ID NO: 33890 - protein, 10 aa, Homo sapiens
  Table A; Target 33890; HLA-A*29:02; KLK2; ENSG00000167751; TAA
HSQPWQVAVY

SEQ ID NO: 33891 - protein, 10 aa, Homo sapiens
  Table A; Target 33891; HLA-A*30:02; KLK2; ENSG00000167751; TAA
HSQPWQVAVY

SEQ ID NO: 33892 - protein, 10 aa, Homo sapiens
  Table A; Target 33892; HLA-B*57:01; KLK2; ENSG00000167751; TAA
HSQPWQVAVY

SEQ ID NO: 33893 - protein, 10 aa, Homo sapiens
  Table A; Target 33893; HLA-C*07:01; KLK2; ENSG00000167751; TAA
HSQPWQVAVY

SEQ ID NO: 33894 - protein, 10 aa, Homo sapiens
  Table A; Target 33894; HLA-C*07:04; KLK2; ENSG00000167751; TAA
HSQPWQVAVY

SEQ ID NO: 33895 - protein, 9 aa, Homo sapiens
  Table A; Target 33895; HLA-C*03:04; KLK2; ENSG00000167751; TAA
IALSVGCTG

SEQ ID NO: 33896 - protein, 9 aa, Homo sapiens
  Table A; Target 33896; HLA-B*49:01; KLK2; ENSG00000167751; TAA
IEPEEFLRP

SEQ ID NO: 33897 - protein, 9 aa, Homo sapiens
  Table A; Target 33897; HLA-A*25:01; KLK2; ENSG00000167751; TAA
IQSRIVGGW

SEQ ID NO: 33898 - protein, 9 aa, Homo sapiens
  Table A; Target 33898; HLA-A*32:01; KLK2; ENSG00000167751; TAA
IQSRIVGGW

SEQ ID NO: 33899 - protein, 9 aa, Homo sapiens
  Table A; Target 33899; HLA-B*44:02; KLK2; ENSG00000167751; TAA
IQSRIVGGW

SEQ ID NO: 33900 - protein, 9 aa, Homo sapiens
  Table A; Target 33900; HLA-B*44:03; KLK2; ENSG00000167751; TAA
IQSRIVGGW

SEQ ID NO: 33901 - protein, 9 aa, Homo sapiens
  Table A; Target 33901; HLA-B*57:01; KLK2; ENSG00000167751; TAA
IQSRIVGGW

SEQ ID NO: 33902 - protein, 9 aa, Homo sapiens
  Table A; Target 33902; HLA-B*58:01; KLK2; ENSG00000167751; TAA
IQSRIVGGW

SEQ ID NO: 33903 - protein, 9 aa, Homo sapiens
  Table A; Target 33903; HLA-C*16:04; KLK2; ENSG00000167751; TAA
IQSRIVGGW

SEQ ID NO: 33904 - protein, 8 aa, Homo sapiens
  Table A; Target 33904; HLA-A*01:01; KLK2; ENSG00000167751; TAA
ITDVVKVL

SEQ ID NO: 33905 - protein, 8 aa, Homo sapiens
  Table A; Target 33905; HLA-C*03:03; KLK2; ENSG00000167751; TAA
ITDVVKVL

SEQ ID NO: 33906 - protein, 8 aa, Homo sapiens
  Table A; Target 33906; HLA-C*03:04; KLK2; ENSG00000167751; TAA
ITDVVKVL

SEQ ID NO: 33907 - protein, 8 aa, Homo sapiens
  Table A; Target 33907; HLA-C*04:01; KLK2; ENSG00000167751; TAA
ITDVVKVL

SEQ ID NO: 33908 - protein, 8 aa, Homo sapiens
  Table A; Target 33908; HLA-C*05:01; KLK2; ENSG00000167751; TAA
ITDVVKVL

SEQ ID NO: 33909 - protein, 8 aa, Homo sapiens
  Table A; Target 33909; HLA-C*07:04; KLK2; ENSG00000167751; TAA
ITDVVKVL

SEQ ID NO: 33910 - protein, 8 aa, Homo sapiens
  Table A; Target 33910; HLA-C*12:03; KLK2; ENSG00000167751; TAA
ITDVVKVL

SEQ ID NO: 33911 - protein, 8 aa, Homo sapiens
  Table A; Target 33911; HLA-C*16:02; KLK2; ENSG00000167751; TAA
ITDVVKVL

SEQ ID NO: 33912 - protein, 10 aa, Homo sapiens
  Table A; Target 33912; HLA-A*02:07; KLK2; ENSG00000167751; TAA
ITDVVKVLGL

SEQ ID NO: 33913 - protein, 9 aa, Homo sapiens
  Table A; Target 33913; HLA-B*27:02; KLK2; ENSG00000167751; TAA
IVGGWECEK

SEQ ID NO: 33914 - protein, 8 aa, Homo sapiens
  Table A; Target 33914; HLA-A*02:01; KLK2; ENSG00000167751; TAA
KITDVVKV

SEQ ID NO: 33915 - protein, 8 aa, Homo sapiens
  Table A; Target 33915; HLA-A*02:03; KLK2; ENSG00000167751; TAA
KITDVVKV

SEQ ID NO: 33916 - protein, 8 aa, Homo sapiens
  Table A; Target 33916; HLA-A*02:04; KLK2; ENSG00000167751; TAA
KITDVVKV

SEQ ID NO: 33917 - protein, 8 aa, Homo sapiens
  Table A; Target 33917; HLA-B*13:02; KLK2; ENSG00000167751; TAA
KITDVVKV

SEQ ID NO: 33918 - protein, 8 aa, Homo sapiens
  Table A; Target 33918; HLA-B*37:01; KLK2; ENSG00000167751; TAA
KITDVVKV

SEQ ID NO: 33919 - protein, 8 aa, Homo sapiens
  Table A; Target 33919; HLA-B*55:01; KLK2; ENSG00000167751; TAA
KITDVVKV

SEQ ID NO: 33920 - protein, 8 aa, Homo sapiens
  Table A; Target 33920; HLA-C*16:02; KLK2; ENSG00000167751; TAA
KITDVVKV

SEQ ID NO: 33921 - protein, 9 aa, Homo sapiens
  Table A; Target 33921; HLA-A*02:01; KLK2; ENSG00000167751; TAA
KITDVVKVL

SEQ ID NO: 33922 - protein, 9 aa, Homo sapiens
  Table A; Target 33922; HLA-A*02:03; KLK2; ENSG00000167751; TAA
KITDVVKVL

SEQ ID NO: 33923 - protein, 9 aa, Homo sapiens
  Table A; Target 33923; HLA-A*02:04; KLK2; ENSG00000167751; TAA
KITDVVKVL

SEQ ID NO: 33924 - protein, 9 aa, Homo sapiens
  Table A; Target 33924; HLA-A*02:07; KLK2; ENSG00000167751; TAA
KITDVVKVL

SEQ ID NO: 33925 - protein, 9 aa, Homo sapiens
  Table A; Target 33925; HLA-A*03:01; KLK2; ENSG00000167751; TAA
KITDVVKVL

SEQ ID NO: 33926 - protein, 9 aa, Homo sapiens
  Table A; Target 33926; HLA-A*03:02; KLK2; ENSG00000167751; TAA
KITDVVKVL

SEQ ID NO: 33927 - protein, 9 aa, Homo sapiens
  Table A; Target 33927; HLA-A*23:01; KLK2; ENSG00000167751; TAA
KITDVVKVL

SEQ ID NO: 33928 - protein, 9 aa, Homo sapiens
  Table A; Target 33928; HLA-A*24:02; KLK2; ENSG00000167751; TAA
KITDVVKVL

SEQ ID NO: 33929 - protein, 9 aa, Homo sapiens
  Table A; Target 33929; HLA-A*25:01; KLK2; ENSG00000167751; TAA
KITDVVKVL

SEQ ID NO: 33930 - protein, 9 aa, Homo sapiens
  Table A; Target 33930; HLA-A*30:01; KLK2; ENSG00000167751; TAA
KITDVVKVL

SEQ ID NO: 33931 - protein, 9 aa, Homo sapiens
  Table A; Target 33931; HLA-A*31:01; KLK2; ENSG00000167751; TAA
KITDVVKVL

SEQ ID NO: 33932 - protein, 9 aa, Homo sapiens
  Table A; Target 33932; HLA-A*32:01; KLK2; ENSG00000167751; TAA
KITDVVKVL

SEQ ID NO: 33933 - protein, 9 aa, Homo sapiens
  Table A; Target 33933; HLA-A*68:02; KLK2; ENSG00000167751; TAA
KITDVVKVL

SEQ ID NO: 33934 - protein, 9 aa, Homo sapiens
  Table A; Target 33934; HLA-B*15:01; KLK2; ENSG00000167751; TAA
KITDVVKVL

SEQ ID NO: 33935 - protein, 9 aa, Homo sapiens
  Table A; Target 33935; HLA-B*15:03; KLK2; ENSG00000167751; TAA
KITDVVKVL

SEQ ID NO: 33936 - protein, 9 aa, Homo sapiens
  Table A; Target 33936; HLA-B*27:05; KLK2; ENSG00000167751; TAA
KITDVVKVL

SEQ ID NO: 33937 - protein, 9 aa, Homo sapiens
  Table A; Target 33937; HLA-B*40:01; KLK2; ENSG00000167751; TAA
KITDVVKVL

SEQ ID NO: 33938 - protein, 9 aa, Homo sapiens
  Table A; Target 33938; HLA-B*40:02; KLK2; ENSG00000167751; TAA
KITDVVKVL

SEQ ID NO: 33939 - protein, 9 aa, Homo sapiens
  Table A; Target 33939; HLA-B*44:03; KLK2; ENSG00000167751; TAA
KITDVVKVL

SEQ ID NO: 33940 - protein, 9 aa, Homo sapiens
  Table A; Target 33940; HLA-B*46:01; KLK2; ENSG00000167751; TAA
KITDVVKVL

SEQ ID NO: 33941 - protein, 9 aa, Homo sapiens
  Table A; Target 33941; HLA-B*55:01; KLK2; ENSG00000167751; TAA
KITDVVKVL

SEQ ID NO: 33942 - protein, 9 aa, Homo sapiens
  Table A; Target 33942; HLA-B*57:01; KLK2; ENSG00000167751; TAA
KITDVVKVL

SEQ ID NO: 33943 - protein, 9 aa, Homo sapiens
  Table A; Target 33943; HLA-B*58:01; KLK2; ENSG00000167751; TAA
KITDVVKVL

SEQ ID NO: 33944 - protein, 9 aa, Homo sapiens
  Table A; Target 33944; HLA-C*01:02; KLK2; ENSG00000167751; TAA
KITDVVKVL

SEQ ID NO: 33945 - protein, 9 aa, Homo sapiens
  Table A; Target 33945; HLA-C*02:02; KLK2; ENSG00000167751; TAA
KITDVVKVL

SEQ ID NO: 33946 - protein, 9 aa, Homo sapiens
  Table A; Target 33946; HLA-C*03:03; KLK2; ENSG00000167751; TAA
KITDVVKVL

SEQ ID NO: 33947 - protein, 9 aa, Homo sapiens
  Table A; Target 33947; HLA-C*03:04; KLK2; ENSG00000167751; TAA
KITDVVKVL

SEQ ID NO: 33948 - protein, 9 aa, Homo sapiens
  Table A; Target 33948; HLA-C*06:02; KLK2; ENSG00000167751; TAA
KITDVVKVL

SEQ ID NO: 33949 - protein, 9 aa, Homo sapiens
  Table A; Target 33949; HLA-C*07:04; KLK2; ENSG00000167751; TAA
KITDVVKVL

SEQ ID NO: 33950 - protein, 9 aa, Homo sapiens
  Table A; Target 33950; HLA-C*12:03; KLK2; ENSG00000167751; TAA
KITDVVKVL

SEQ ID NO: 33951 - protein, 9 aa, Homo sapiens
  Table A; Target 33951; HLA-C*16:01; KLK2; ENSG00000167751; TAA
KITDVVKVL

SEQ ID NO: 33952 - protein, 9 aa, Homo sapiens
  Table A; Target 33952; HLA-C*16:02; KLK2; ENSG00000167751; TAA
KITDVVKVL

SEQ ID NO: 33953 - protein, 9 aa, Homo sapiens
  Table A; Target 33953; HLA-C*16:04; KLK2; ENSG00000167751; TAA
KITDVVKVL

SEQ ID NO: 33954 - protein, 9 aa, Homo sapiens
  Table A; Target 33954; HLA-A*31:01; KLK2; ENSG00000167751; TAA
KNSQVWLGR

SEQ ID NO: 33955 - protein, 8 aa, Homo sapiens
  Table A; Target 33955; HLA-B*56:01; KLK2; ENSG00000167751; TAA
KPAVYTKV

SEQ ID NO: 33956 - protein, 9 aa, Homo sapiens
  Table A; Target 33956; HLA-B*07:02; KLK2; ENSG00000167751; TAA
KPAVYTKVV

SEQ ID NO: 33957 - protein, 9 aa, Homo sapiens
  Table A; Target 33957; HLA-B*55:01; KLK2; ENSG00000167751; TAA
KPAVYTKVV

SEQ ID NO: 33958 - protein, 9 aa, Homo sapiens
  Table A; Target 33958; HLA-B*56:01; KLK2; ENSG00000167751; TAA
KPAVYTKVV

SEQ ID NO: 33959 - protein, 9 aa, Homo sapiens
  Table A; Target 33959; HLA-C*07:02; KLK2; ENSG00000167751; TAA
KPAVYTKVV

SEQ ID NO: 33960 - protein, 9 aa, Homo sapiens
  Table A; Target 33960; HLA-B*13:02; KLK2; ENSG00000167751; TAA
KVTEFMLCA

SEQ ID NO: 33961 - protein, 9 aa, Homo sapiens
  Table A; Target 33961; HLA-B*54:01; KLK2; ENSG00000167751; TAA
KVTEFMLCA

SEQ ID NO: 33962 - protein, 9 aa, Homo sapiens
  Table A; Target 33962; HLA-B*56:01; KLK2; ENSG00000167751; TAA
KVTEFMLCA

SEQ ID NO: 33963 - protein, 9 aa, Homo sapiens
  Table A; Target 33963; HLA-B*54:01; KLK2; ENSG00000167751; TAA
LGLPTQEPA

SEQ ID NO: 33964 - protein, 10 aa, Homo sapiens
  Table A; Target 33964; HLA-C*03:03; KLK2; ENSG00000167751; TAA
LGLPTQEPAL

SEQ ID NO: 33965 - protein, 10 aa, Homo sapiens
  Table A; Target 33965; HLA-A*02:03; KLK2; ENSG00000167751; TAA
LLRLSEPAKI

SEQ ID NO: 33966 - protein, 8 aa, Homo sapiens
  Table A; Target 33966; HLA-A*01:01; KLK2; ENSG00000167751; TAA
LPEKPAVY

SEQ ID NO: 33967 - protein, 8 aa, Homo sapiens
  Table A; Target 33967; HLA-B*35:01; KLK2; ENSG00000167751; TAA
LPEKPAVY

SEQ ID NO: 33968 - protein, 8 aa, Homo sapiens
  Table A; Target 33968; HLA-B*35:03; KLK2; ENSG00000167751; TAA
LPEKPAVY

SEQ ID NO: 33969 - protein, 8 aa, Homo sapiens
  Table A; Target 33969; HLA-B*55:01; KLK2; ENSG00000167751; TAA
LPEKPAVY

SEQ ID NO: 33970 - protein, 8 aa, Homo sapiens
  Table A; Target 33970; HLA-C*03:03; KLK2; ENSG00000167751; TAA
LPEKPAVY

SEQ ID NO: 33971 - protein, 10 aa, Homo sapiens
  Table A; Target 33971; HLA-B*27:02; KLK2; ENSG00000167751; TAA
LPEKPAVYTK

SEQ ID NO: 33972 - protein, 10 aa, Homo sapiens
  Table A; Target 33972; HLA-A*30:02; KLK2; ENSG00000167751; TAA
LSNDMCARAY

SEQ ID NO: 33973 - protein, 10 aa, Homo sapiens
  Table A; Target 33973; HLA-B*07:02; KLK2; ENSG00000167751; TAA
LSNDMCARAY

SEQ ID NO: 33974 - protein, 10 aa, Homo sapiens
  Table A; Target 33974; HLA-B*46:01; KLK2; ENSG00000167751; TAA
LSNDMCARAY

SEQ ID NO: 33975 - protein, 10 aa, Homo sapiens
  Table A; Target 33975; HLA-C*07:01; KLK2; ENSG00000167751; TAA
LSNDMCARAY

SEQ ID NO: 33976 - protein, 10 aa, Homo sapiens
  Table A; Target 33976; HLA-C*16:01; KLK2; ENSG00000167751; TAA
LSNDMCARAY

SEQ ID NO: 33977 - protein, 10 aa, Homo sapiens
  Table A; Target 33977; HLA-C*16:02; KLK2; ENSG00000167751; TAA
LSNDMCARAY

SEQ ID NO: 33978 - protein, 9 aa, Homo sapiens
  Table A; Target 33978; HLA-A*02:01; KLK2; ENSG00000167751; TAA
LVLSIALSV

SEQ ID NO: 33979 - protein, 9 aa, Homo sapiens
  Table A; Target 33979; HLA-A*02:07; KLK2; ENSG00000167751; TAA
LVLSIALSV

SEQ ID NO: 33980 - protein, 9 aa, Homo sapiens
  Table A; Target 33980; HLA-A*68:02; KLK2; ENSG00000167751; TAA
LVLSIALSV

SEQ ID NO: 33981 - protein, 9 aa, Homo sapiens
  Table A; Target 33981; HLA-B*13:02; KLK2; ENSG00000167751; TAA
LVLSIALSV

SEQ ID NO: 33982 - protein, 9 aa, Homo sapiens
  Table A; Target 33982; HLA-B*08:01; KLK2; ENSG00000167751; TAA
MSLLKHQSL

SEQ ID NO: 33983 - protein, 9 aa, Homo sapiens
  Table A; Target 33983; HLA-C*16:01; KLK2; ENSG00000167751; TAA
MSLLKHQSL

SEQ ID NO: 33984 - protein, 8 aa, Homo sapiens
  Table A; Target 33984; HLA-B*18:01; KLK2; ENSG00000167751; TAA
NDMCARAY

SEQ ID NO: 33985 - protein, 8 aa, Homo sapiens
  Table A; Target 33985; HLA-B*37:01; KLK2; ENSG00000167751; TAA
NDMCARAY

SEQ ID NO: 33986 - protein, 8 aa, Homo sapiens
  Table A; Target 33986; HLA-C*07:01; KLK2; ENSG00000167751; TAA
NDMCARAY

SEQ ID NO: 33987 - protein, 11 aa, Homo sapiens
  Table A; Target 33987; HLA-A*29:02; KLK2; ENSG00000167751; TAA
NLFEPEDTGQR

SEQ ID NO: 33988 - protein, 11 aa, Homo sapiens
  Table A; Target 33988; HLA-A*33:01; KLK2; ENSG00000167751; TAA
NLFEPEDTGQR

SEQ ID NO: 33989 - protein, 11 aa, Homo sapiens
  Table A; Target 33989; HLA-A*33:03; KLK2; ENSG00000167751; TAA
NLFEPEDTGQR

SEQ ID NO: 33990 - protein, 11 aa, Homo sapiens
  Table A; Target 33990; HLA-A*68:01; KLK2; ENSG00000167751; TAA
NLFEPEDTGQR

SEQ ID NO: 33991 - protein, 11 aa, Homo sapiens
  Table A; Target 33991; HLA-A*68:02; KLK2; ENSG00000167751; TAA
NLFEPEDTGQR

SEQ ID NO: 33992 - protein, 11 aa, Homo sapiens
  Table A; Target 33992; HLA-B*27:05; KLK2; ENSG00000167751; TAA
NLFEPEDTGQR

SEQ ID NO: 33993 - protein, 11 aa, Homo sapiens
  Table A; Target 33993; HLA-C*07:06; KLK2; ENSG00000167751; TAA
NLFEPEDTGQR

SEQ ID NO: 33994 - protein, 10 aa, Homo sapiens
  Table A; Target 33994; HLA-B*08:01; KLK2; ENSG00000167751; TAA
NMSLLKHQSL

SEQ ID NO: 33995 - protein, 10 aa, Homo sapiens
  Table A; Target 33995; HLA-B*49:01; KLK2; ENSG00000167751; TAA
PEDTGQRVPV

SEQ ID NO: 33996 - protein, 10 aa, Homo sapiens
  Table A; Target 33996; HLA-C*04:01; KLK2; ENSG00000167751; TAA
PEDTGQRVPV

SEQ ID NO: 33997 - protein, 8 aa, Homo sapiens
  Table A; Target 33997; HLA-C*04:01; KLK2; ENSG00000167751; TAA
PEKPAVYT

SEQ ID NO: 33998 - protein, 9 aa, Homo sapiens
  Table A; Target 33998; HLA-C*07:02; KLK2; ENSG00000167751; TAA
PEKPAVYTK

SEQ ID NO: 33999 - protein, 8 aa, Homo sapiens
  Table A; Target 33999; HLA-B*15:03; KLK2; ENSG00000167751; TAA
QPWQVAVY

SEQ ID NO: 34000 - protein, 8 aa, Homo sapiens
  Table A; Target 34000; HLA-B*18:01; KLK2; ENSG00000167751; TAA
QPWQVAVY

SEQ ID NO: 34001 - protein, 8 aa, Homo sapiens
  Table A; Target 34001; HLA-B*35:01; KLK2; ENSG00000167751; TAA
QPWQVAVY

SEQ ID NO: 34002 - protein, 8 aa, Homo sapiens
  Table A; Target 34002; HLA-B*51:01; KLK2; ENSG00000167751; TAA
QPWQVAVY

SEQ ID NO: 34003 - protein, 8 aa, Homo sapiens
  Table A; Target 34003; HLA-B*55:01; KLK2; ENSG00000167751; TAA
QPWQVAVY

SEQ ID NO: 34004 - protein, 9 aa, Homo sapiens
  Table A; Target 34004; HLA-A*23:01; KLK2; ENSG00000167751; TAA
QRVPVSHSF

SEQ ID NO: 34005 - protein, 9 aa, Homo sapiens
  Table A; Target 34005; HLA-A*24:02; KLK2; ENSG00000167751; TAA
QRVPVSHSF

SEQ ID NO: 34006 - protein, 9 aa, Homo sapiens
  Table A; Target 34006; HLA-A*32:01; KLK2; ENSG00000167751; TAA
QRVPVSHSF

SEQ ID NO: 34007 - protein, 9 aa, Homo sapiens
  Table A; Target 34007; HLA-B*15:03; KLK2; ENSG00000167751; TAA
QRVPVSHSF

SEQ ID NO: 34008 - protein, 9 aa, Homo sapiens
  Table A; Target 34008; HLA-B*27:02; KLK2; ENSG00000167751; TAA
QRVPVSHSF

SEQ ID NO: 34009 - protein, 9 aa, Homo sapiens
  Table A; Target 34009; HLA-B*27:05; KLK2; ENSG00000167751; TAA
QRVPVSHSF

SEQ ID NO: 34010 - protein, 9 aa, Homo sapiens
  Table A; Target 34010; HLA-B*37:01; KLK2; ENSG00000167751; TAA
QRVPVSHSF

SEQ ID NO: 34011 - protein, 9 aa, Homo sapiens
  Table A; Target 34011; HLA-B*38:01; KLK2; ENSG00000167751; TAA
QRVPVSHSF

SEQ ID NO: 34012 - protein, 9 aa, Homo sapiens
  Table A; Target 34012; HLA-B*39:01; KLK2; ENSG00000167751; TAA
QRVPVSHSF

SEQ ID NO: 34013 - protein, 9 aa, Homo sapiens
  Table A; Target 34013; HLA-B*40:02; KLK2; ENSG00000167751; TAA
QRVPVSHSF

SEQ ID NO: 34014 - protein, 9 aa, Homo sapiens
  Table A; Target 34014; HLA-B*44:02; KLK2; ENSG00000167751; TAA
QRVPVSHSF

SEQ ID NO: 34015 - protein, 9 aa, Homo sapiens
  Table A; Target 34015; HLA-B*44:03; KLK2; ENSG00000167751; TAA
QRVPVSHSF

SEQ ID NO: 34016 - protein, 9 aa, Homo sapiens
  Table A; Target 34016; HLA-B*58:01; KLK2; ENSG00000167751; TAA
QRVPVSHSF

SEQ ID NO: 34017 - protein, 9 aa, Homo sapiens
  Table A; Target 34017; HLA-C*02:02; KLK2; ENSG00000167751; TAA
QRVPVSHSF

SEQ ID NO: 34018 - protein, 9 aa, Homo sapiens
  Table A; Target 34018; HLA-C*06:02; KLK2; ENSG00000167751; TAA
QRVPVSHSF

SEQ ID NO: 34019 - protein, 9 aa, Homo sapiens
  Table A; Target 34019; HLA-C*16:01; KLK2; ENSG00000167751; TAA
QRVPVSHSF

SEQ ID NO: 34020 - protein, 9 aa, Homo sapiens
  Table A; Target 34020; HLA-C*16:04; KLK2; ENSG00000167751; TAA
QRVPVSHSF

SEQ ID NO: 34021 - protein, 8 aa, Homo sapiens
  Table A; Target 34021; HLA-B*57:01; KLK2; ENSG00000167751; TAA
QSRIVGGW

SEQ ID NO: 34022 - protein, 9 aa, Homo sapiens
  Table A; Target 34022; HLA-A*25:01; KLK2; ENSG00000167751; TAA
QVAVYSHGW

SEQ ID NO: 34023 - protein, 9 aa, Homo sapiens
  Table A; Target 34023; HLA-A*32:01; KLK2; ENSG00000167751; TAA
QVAVYSHGW

SEQ ID NO: 34024 - protein, 9 aa, Homo sapiens
  Table A; Target 34024; HLA-B*44:02; KLK2; ENSG00000167751; TAA
QVAVYSHGW

SEQ ID NO: 34025 - protein, 9 aa, Homo sapiens
  Table A; Target 34025; HLA-B*44:03; KLK2; ENSG00000167751; TAA
QVAVYSHGW

SEQ ID NO: 34026 - protein, 9 aa, Homo sapiens
  Table A; Target 34026; HLA-B*57:01; KLK2; ENSG00000167751; TAA
QVAVYSHGW

SEQ ID NO: 34027 - protein, 9 aa, Homo sapiens
  Table A; Target 34027; HLA-B*58:01; KLK2; ENSG00000167751; TAA
QVAVYSHGW

SEQ ID NO: 34028 - protein, 10 aa, Homo sapiens
  Table A; Target 34028; HLA-A*03:01; KLK2; ENSG00000167751; TAA
RAYSEKVTEF

SEQ ID NO: 34029 - protein, 10 aa, Homo sapiens
  Table A; Target 34029; HLA-A*23:01; KLK2; ENSG00000167751; TAA
RAYSEKVTEF

SEQ ID NO: 34030 - protein, 10 aa, Homo sapiens
  Table A; Target 34030; HLA-A*24:02; KLK2; ENSG00000167751; TAA
RAYSEKVTEF

SEQ ID NO: 34031 - protein, 10 aa, Homo sapiens
  Table A; Target 34031; HLA-A*25:01; KLK2; ENSG00000167751; TAA
RAYSEKVTEF

SEQ ID NO: 34032 - protein, 10 aa, Homo sapiens
  Table A; Target 34032; HLA-A*26:01; KLK2; ENSG00000167751; TAA
RAYSEKVTEF

SEQ ID NO: 34033 - protein, 10 aa, Homo sapiens
  Table A; Target 34033; HLA-A*30:02; KLK2; ENSG00000167751; TAA
RAYSEKVTEF

SEQ ID NO: 34034 - protein, 10 aa, Homo sapiens
  Table A; Target 34034; HLA-A*32:01; KLK2; ENSG00000167751; TAA
RAYSEKVTEF

SEQ ID NO: 34035 - protein, 10 aa, Homo sapiens
  Table A; Target 34035; HLA-B*15:01; KLK2; ENSG00000167751; TAA
RAYSEKVTEF

SEQ ID NO: 34036 - protein, 10 aa, Homo sapiens
  Table A; Target 34036; HLA-B*15:03; KLK2; ENSG00000167751; TAA
RAYSEKVTEF

SEQ ID NO: 34037 - protein, 10 aa, Homo sapiens
  Table A; Target 34037; HLA-B*35:01; KLK2; ENSG00000167751; TAA
RAYSEKVTEF

SEQ ID NO: 34038 - protein, 10 aa, Homo sapiens
  Table A; Target 34038; HLA-B*46:01; KLK2; ENSG00000167751; TAA
RAYSEKVTEF

SEQ ID NO: 34039 - protein, 10 aa, Homo sapiens
  Table A; Target 34039; HLA-B*57:01; KLK2; ENSG00000167751; TAA
RAYSEKVTEF

SEQ ID NO: 34040 - protein, 10 aa, Homo sapiens
  Table A; Target 34040; HLA-B*58:01; KLK2; ENSG00000167751; TAA
RAYSEKVTEF

SEQ ID NO: 34041 - protein, 10 aa, Homo sapiens
  Table A; Target 34041; HLA-C*02:02; KLK2; ENSG00000167751; TAA
RAYSEKVTEF

SEQ ID NO: 34042 - protein, 10 aa, Homo sapiens
  Table A; Target 34042; HLA-C*03:04; KLK2; ENSG00000167751; TAA
RAYSEKVTEF

SEQ ID NO: 34043 - protein, 10 aa, Homo sapiens
  Table A; Target 34043; HLA-C*05:01; KLK2; ENSG00000167751; TAA
RAYSEKVTEF

SEQ ID NO: 34044 - protein, 10 aa, Homo sapiens
  Table A; Target 34044; HLA-C*12:03; KLK2; ENSG00000167751; TAA
RAYSEKVTEF

SEQ ID NO: 34045 - protein, 10 aa, Homo sapiens
  Table A; Target 34045; HLA-C*16:04; KLK2; ENSG00000167751; TAA
RAYSEKVTEF

SEQ ID NO: 34046 - protein, 11 aa, Homo sapiens
  Table A; Target 34046; HLA-A*02:01; KLK2; ENSG00000167751; TAA
RLSEPAKITDV

SEQ ID NO: 34047 - protein, 11 aa, Homo sapiens
  Table A; Target 34047; HLA-A*02:03; KLK2; ENSG00000167751; TAA
RLSEPAKITDV

SEQ ID NO: 34048 - protein, 11 aa, Homo sapiens
  Table A; Target 34048; HLA-A*02:04; KLK2; ENSG00000167751; TAA
RLSEPAKITDV

SEQ ID NO: 34049 - protein, 11 aa, Homo sapiens
  Table A; Target 34049; HLA-A*02:07; KLK2; ENSG00000167751; TAA
RLSEPAKITDV

SEQ ID NO: 34050 - protein, 10 aa, Homo sapiens
  Table A; Target 34050; HLA-B*07:02; KLK2; ENSG00000167751; TAA
RPDEDSSHDL

SEQ ID NO: 34051 - protein, 10 aa, Homo sapiens
  Table A; Target 34051; HLA-B*35:01; KLK2; ENSG00000167751; TAA
RPDEDSSHDL

SEQ ID NO: 34052 - protein, 10 aa, Homo sapiens
  Table A; Target 34052; HLA-B*35:03; KLK2; ENSG00000167751; TAA
RPDEDSSHDL

SEQ ID NO: 34053 - protein, 10 aa, Homo sapiens
  Table A; Target 34053; HLA-B*40:01; KLK2; ENSG00000167751; TAA
RPDEDSSHDL

SEQ ID NO: 34054 - protein, 10 aa, Homo sapiens
  Table A; Target 34054; HLA-B*55:01; KLK2; ENSG00000167751; TAA
RPDEDSSHDL

SEQ ID NO: 34055 - protein, 10 aa, Homo sapiens
  Table A; Target 34055; HLA-C*05:01; KLK2; ENSG00000167751; TAA
RPDEDSSHDL

SEQ ID NO: 34056 - protein, 10 aa, Homo sapiens
  Table A; Target 34056; HLA-C*07:02; KLK2; ENSG00000167751; TAA
RPDEDSSHDL

SEQ ID NO: 34057 - protein, 11 aa, Homo sapiens
  Table A; Target 34057; HLA-B*07:02; KLK2; ENSG00000167751; TAA
RPDEDSSHDLM

SEQ ID NO: 34058 - protein, 11 aa, Homo sapiens
  Table A; Target 34058; HLA-B*35:01; KLK2; ENSG00000167751; TAA
RPDEDSSHDLM

SEQ ID NO: 34059 - protein, 11 aa, Homo sapiens
  Table A; Target 34059; HLA-B*35:03; KLK2; ENSG00000167751; TAA
RPDEDSSHDLM

SEQ ID NO: 34060 - protein, 11 aa, Homo sapiens
  Table A; Target 34060; HLA-B*55:01; KLK2; ENSG00000167751; TAA
RPDEDSSHDLM

SEQ ID NO: 34061 - protein, 11 aa, Homo sapiens
  Table A; Target 34061; HLA-C*03:03; KLK2; ENSG00000167751; TAA
RPDEDSSHDLM

SEQ ID NO: 34062 - protein, 11 aa, Homo sapiens
  Table A; Target 34062; HLA-C*05:01; KLK2; ENSG00000167751; TAA
RPDEDSSHDLM

SEQ ID NO: 34063 - protein, 10 aa, Homo sapiens
  Table A; Target 34063; HLA-B*07:02; KLK2; ENSG00000167751; TAA
RPRSLQCVSL

SEQ ID NO: 34064 - protein, 10 aa, Homo sapiens
  Table A; Target 34064; HLA-C*07:02; KLK2; ENSG00000167751; TAA
RPRSLQCVSL

SEQ ID NO: 34065 - protein, 8 aa, Homo sapiens
  Table A; Target 34065; HLA-A*32:01; KLK2; ENSG00000167751; TAA
RVPVSHSF

SEQ ID NO: 34066 - protein, 8 aa, Homo sapiens
  Table A; Target 34066; HLA-B*37:01; KLK2; ENSG00000167751; TAA
RVPVSHSF

SEQ ID NO: 34067 - protein, 8 aa, Homo sapiens
  Table A; Target 34067; HLA-A*30:01; KLK2; ENSG00000167751; TAA
SEKVTEFM

SEQ ID NO: 34068 - protein, 8 aa, Homo sapiens
  Table A; Target 34068; HLA-B*18:01; KLK2; ENSG00000167751; TAA
SEKVTEFM

SEQ ID NO: 34069 - protein, 8 aa, Homo sapiens
  Table A; Target 34069; HLA-B*37:01; KLK2; ENSG00000167751; TAA
SEKVTEFM

SEQ ID NO: 34070 - protein, 8 aa, Homo sapiens
  Table A; Target 34070; HLA-B*40:02; KLK2; ENSG00000167751; TAA
SEKVTEFM

SEQ ID NO: 34071 - protein, 8 aa, Homo sapiens
  Table A; Target 34071; HLA-B*49:01; KLK2; ENSG00000167751; TAA
SEKVTEFM

SEQ ID NO: 34072 - protein, 9 aa, Homo sapiens
  Table A; Target 34072; HLA-A*30:01; KLK2; ENSG00000167751; TAA
SEKVTEFML

SEQ ID NO: 34073 - protein, 9 aa, Homo sapiens
  Table A; Target 34073; HLA-B*37:01; KLK2; ENSG00000167751; TAA
SEKVTEFML

SEQ ID NO: 34074 - protein, 9 aa, Homo sapiens
  Table A; Target 34074; HLA-B*40:01; KLK2; ENSG00000167751; TAA
SEKVTEFML

SEQ ID NO: 34075 - protein, 9 aa, Homo sapiens
  Table A; Target 34075; HLA-B*40:02; KLK2; ENSG00000167751; TAA
SEKVTEFML

SEQ ID NO: 34076 - protein, 9 aa, Homo sapiens
  Table A; Target 34076; HLA-B*44:02; KLK2; ENSG00000167751; TAA
SEKVTEFML

SEQ ID NO: 34077 - protein, 9 aa, Homo sapiens
  Table A; Target 34077; HLA-B*44:03; KLK2; ENSG00000167751; TAA
SEKVTEFML

SEQ ID NO: 34078 - protein, 9 aa, Homo sapiens
  Table A; Target 34078; HLA-A*30:01; KLK2; ENSG00000167751; TAA
SEPAKITDV

SEQ ID NO: 34079 - protein, 9 aa, Homo sapiens
  Table A; Target 34079; HLA-B*37:01; KLK2; ENSG00000167751; TAA
SEPAKITDV

SEQ ID NO: 34080 - protein, 9 aa, Homo sapiens
  Table A; Target 34080; HLA-B*40:01; KLK2; ENSG00000167751; TAA
SEPAKITDV

SEQ ID NO: 34081 - protein, 9 aa, Homo sapiens
  Table A; Target 34081; HLA-B*40:02; KLK2; ENSG00000167751; TAA
SEPAKITDV

SEQ ID NO: 34082 - protein, 9 aa, Homo sapiens
  Table A; Target 34082; HLA-B*49:01; KLK2; ENSG00000167751; TAA
SEPAKITDV

SEQ ID NO: 34083 - protein, 11 aa, Homo sapiens
  Table A; Target 34083; HLA-C*04:01; KLK2; ENSG00000167751; TAA
SEPAKITDVVK

SEQ ID NO: 34084 - protein, 9 aa, Homo sapiens
  Table A; Target 34084; HLA-A*23:01; KLK2; ENSG00000167751; TAA
SFPHPLYNM

SEQ ID NO: 34085 - protein, 9 aa, Homo sapiens
  Table A; Target 34085; HLA-A*24:02; KLK2; ENSG00000167751; TAA
SFPHPLYNM

SEQ ID NO: 34086 - protein, 9 aa, Homo sapiens
  Table A; Target 34086; HLA-A*29:02; KLK2; ENSG00000167751; TAA
SFPHPLYNM

SEQ ID NO: 34087 - protein, 11 aa, Homo sapiens
  Table A; Target 34087; HLA-A*31:01; KLK2; ENSG00000167751; TAA
SIEPEEFLRPR

SEQ ID NO: 34088 - protein, 8 aa, Homo sapiens
  Table A; Target 34088; HLA-B*08:01; KLK2; ENSG00000167751; TAA
SLLKHQSL

SEQ ID NO: 34089 - protein, 8 aa, Homo sapiens
  Table A; Target 34089; HLA-B*37:01; KLK2; ENSG00000167751; TAA
SLLKHQSL

SEQ ID NO: 34090 - protein, 9 aa, Homo sapiens
  Table A; Target 34090; HLA-A*03:01; KLK2; ENSG00000167751; TAA
SLLKHQSLR

SEQ ID NO: 34091 - protein, 10 aa, Homo sapiens
  Table A; Target 34091; HLA-A*02:04; KLK2; ENSG00000167751; TAA
SLQCVSLHLL

SEQ ID NO: 34092 - protein, 9 aa, Homo sapiens
  Table A; Target 34092; HLA-C*07:01; KLK2; ENSG00000167751; TAA
SNDMCARAY

SEQ ID NO: 34093 - protein, 9 aa, Homo sapiens
  Table A; Target 34093; HLA-C*16:01; KLK2; ENSG00000167751; TAA
SNDMCARAY

SEQ ID NO: 34094 - protein, 9 aa, Homo sapiens
  Table A; Target 34094; HLA-A*26:01; KLK2; ENSG00000167751; TAA
SQPWQVAVY

SEQ ID NO: 34095 - protein, 9 aa, Homo sapiens
  Table A; Target 34095; HLA-A*29:02; KLK2; ENSG00000167751; TAA
SQPWQVAVY

SEQ ID NO: 34096 - protein, 9 aa, Homo sapiens
  Table A; Target 34096; HLA-A*30:02; KLK2; ENSG00000167751; TAA
SQPWQVAVY

SEQ ID NO: 34097 - protein, 9 aa, Homo sapiens
  Table A; Target 34097; HLA-A*32:01; KLK2; ENSG00000167751; TAA
SQPWQVAVY

SEQ ID NO: 34098 - protein, 9 aa, Homo sapiens
  Table A; Target 34098; HLA-B*15:01; KLK2; ENSG00000167751; TAA
SQPWQVAVY

SEQ ID NO: 34099 - protein, 9 aa, Homo sapiens
  Table A; Target 34099; HLA-B*15:03; KLK2; ENSG00000167751; TAA
SQPWQVAVY

SEQ ID NO: 34100 - protein, 9 aa, Homo sapiens
  Table A; Target 34100; HLA-B*46:01; KLK2; ENSG00000167751; TAA
SQPWQVAVY

SEQ ID NO: 34101 - protein, 9 aa, Homo sapiens
  Table A; Target 34101; HLA-C*02:02; KLK2; ENSG00000167751; TAA
SQPWQVAVY

SEQ ID NO: 34102 - protein, 9 aa, Homo sapiens
  Table A; Target 34102; HLA-C*07:04; KLK2; ENSG00000167751; TAA
SQPWQVAVY

SEQ ID NO: 34103 - protein, 9 aa, Homo sapiens
  Table A; Target 34103; HLA-A*30:01; KLK2; ENSG00000167751; TAA
TDVVKVLGL

SEQ ID NO: 34104 - protein, 9 aa, Homo sapiens
  Table A; Target 34104; HLA-B*08:01; KLK2; ENSG00000167751; TAA
TDVVKVLGL

SEQ ID NO: 34105 - protein, 9 aa, Homo sapiens
  Table A; Target 34105; HLA-B*37:01; KLK2; ENSG00000167751; TAA
TDVVKVLGL

SEQ ID NO: 34106 - protein, 9 aa, Homo sapiens
  Table A; Target 34106; HLA-B*40:02; KLK2; ENSG00000167751; TAA
TDVVKVLGL

SEQ ID NO: 34107 - protein, 9 aa, Homo sapiens
  Table A; Target 34107; HLA-B*18:01; KLK2; ENSG00000167751; TAA
TEFMLCAGL

SEQ ID NO: 34108 - protein, 9 aa, Homo sapiens
  Table A; Target 34108; HLA-B*40:01; KLK2; ENSG00000167751; TAA
TEFMLCAGL

SEQ ID NO: 34109 - protein, 10 aa, Homo sapiens
  Table A; Target 34109; HLA-B*44:02; KLK2; ENSG00000167751; TAA
TEFMLCAGLW

SEQ ID NO: 34110 - protein, 10 aa, Homo sapiens
  Table A; Target 34110; HLA-B*44:03; KLK2; ENSG00000167751; TAA
TEFMLCAGLW

SEQ ID NO: 34111 - protein, 8 aa, Homo sapiens
  Table A; Target 34111; HLA-C*12:03; KLK2; ENSG00000167751; TAA
TGAVPLIQ

SEQ ID NO: 34112 - protein, 10 aa, Homo sapiens
  Table A; Target 34112; HLA-A*33:03; KLK2; ENSG00000167751; TAA
TGAVPLIQSR

SEQ ID NO: 34113 - protein, 10 aa, Homo sapiens
  Table A; Target 34113; HLA-A*68:01; KLK2; ENSG00000167751; TAA
TGAVPLIQSR

SEQ ID NO: 34114 - protein, 10 aa, Homo sapiens
  Table A; Target 34114; HLA-B*27:02; KLK2; ENSG00000167751; TAA
TGAVPLIQSR

SEQ ID NO: 34115 - protein, 10 aa, Homo sapiens
  Table A; Target 34115; HLA-C*07:06; KLK2; ENSG00000167751; TAA
TGAVPLIQSR

SEQ ID NO: 34116 - protein, 8 aa, Homo sapiens
  Table A; Target 34116; HLA-B*57:01; KLK2; ENSG00000167751; TAA
VAVYSHGW

SEQ ID NO: 34117 - protein, 8 aa, Homo sapiens
  Table A; Target 34117; HLA-B*58:01; KLK2; ENSG00000167751; TAA
VAVYSHGW

SEQ ID NO: 34118 - protein, 11 aa, Homo sapiens
  Table A; Target 34118; HLA-A*02:01; KLK2; ENSG00000167751; TAA
VLGLPTQEPAL

SEQ ID NO: 34119 - protein, 11 aa, Homo sapiens
  Table A; Target 34119; HLA-A*02:04; KLK2; ENSG00000167751; TAA
VLGLPTQEPAL

SEQ ID NO: 34120 - protein, 8 aa, Homo sapiens
  Table A; Target 34120; HLA-B*13:02; KLK2; ENSG00000167751; TAA
VLSIALSV

SEQ ID NO: 34121 - protein, 11 aa, Homo sapiens
  Table A; Target 34121; HLA-C*06:02; KLK2; ENSG00000167751; TAA
VLSIALSVGCT

SEQ ID NO: 34122 - protein, 9 aa, Homo sapiens
  Table A; Target 34122; HLA-A*03:01; KLK2; ENSG00000167751; TAA
VLTAAHCLK

SEQ ID NO: 34123 - protein, 9 aa, Homo sapiens
  Table A; Target 34123; HLA-A*03:02; KLK2; ENSG00000167751; TAA
VLTAAHCLK

SEQ ID NO: 34124 - protein, 9 aa, Homo sapiens
  Table A; Target 34124; HLA-C*06:02; KLK2; ENSG00000167751; TAA
VLTAAHCLK

SEQ ID NO: 34125 - protein, 8 aa, Homo sapiens
  Table A; Target 34125; HLA-B*08:01; KLK2; ENSG00000167751; TAA
VPLIQSRI

SEQ ID NO: 34126 - protein, 8 aa, Homo sapiens
  Table A; Target 34126; HLA-B*51:01; KLK2; ENSG00000167751; TAA
VPLIQSRI

SEQ ID NO: 34127 - protein, 9 aa, Homo sapiens
  Table A; Target 34127; HLA-B*07:02; KLK2; ENSG00000167751; TAA
VPLIQSRIV

SEQ ID NO: 34128 - protein, 9 aa, Homo sapiens
  Table A; Target 34128; HLA-B*51:01; KLK2; ENSG00000167751; TAA
VPLIQSRIV

SEQ ID NO: 34129 - protein, 9 aa, Homo sapiens
  Table A; Target 34129; HLA-B*54:01; KLK2; ENSG00000167751; TAA
VPLIQSRIV

SEQ ID NO: 34130 - protein, 9 aa, Homo sapiens
  Table A; Target 34130; HLA-B*56:01; KLK2; ENSG00000167751; TAA
VPLIQSRIV

SEQ ID NO: 34131 - protein, 9 aa, Homo sapiens
  Table A; Target 34131; HLA-A*24:02; KLK2; ENSG00000167751; TAA
VWLGRHNLF

SEQ ID NO: 34132 - protein, 10 aa, Homo sapiens
  Table A; Target 34132; HLA-A*24:02; KLK2; ENSG00000167751; TAA
VYSHGWAHCG

SEQ ID NO: 34133 - protein, 8 aa, Homo sapiens
  Table A; Target 34133; HLA-A*23:01; KLK2; ENSG00000167751; TAA
VYTKVVHY

SEQ ID NO: 34134 - protein, 8 aa, Homo sapiens
  Table A; Target 34134; HLA-A*24:02; KLK2; ENSG00000167751; TAA
VYTKVVHY

SEQ ID NO: 34135 - protein, 8 aa, Homo sapiens
  Table A; Target 34135; HLA-A*29:02; KLK2; ENSG00000167751; TAA
VYTKVVHY

SEQ ID NO: 34136 - protein, 8 aa, Homo sapiens
  Table A; Target 34136; HLA-A*30:02; KLK2; ENSG00000167751; TAA
VYTKVVHY

SEQ ID NO: 34137 - protein, 8 aa, Homo sapiens
  Table A; Target 34137; HLA-A*32:01; KLK2; ENSG00000167751; TAA
VYTKVVHY

SEQ ID NO: 34138 - protein, 8 aa, Homo sapiens
  Table A; Target 34138; HLA-B*15:03; KLK2; ENSG00000167751; TAA
VYTKVVHY

SEQ ID NO: 34139 - protein, 8 aa, Homo sapiens
  Table A; Target 34139; HLA-C*04:01; KLK2; ENSG00000167751; TAA
VYTKVVHY

SEQ ID NO: 34140 - protein, 8 aa, Homo sapiens
  Table A; Target 34140; HLA-C*07:01; KLK2; ENSG00000167751; TAA
VYTKVVHY

SEQ ID NO: 34141 - protein, 8 aa, Homo sapiens
  Table A; Target 34141; HLA-C*07:02; KLK2; ENSG00000167751; TAA
VYTKVVHY

SEQ ID NO: 34142 - protein, 8 aa, Homo sapiens
  Table A; Target 34142; HLA-C*07:04; KLK2; ENSG00000167751; TAA
VYTKVVHY

SEQ ID NO: 34143 - protein, 8 aa, Homo sapiens
  Table A; Target 34143; HLA-C*14:02; KLK2; ENSG00000167751; TAA
VYTKVVHY

SEQ ID NO: 34144 - protein, 8 aa, Homo sapiens
  Table A; Target 34144; HLA-C*16:01; KLK2; ENSG00000167751; TAA
VYTKVVHY

SEQ ID NO: 34145 - protein, 8 aa, Homo sapiens
  Table A; Target 34145; HLA-C*16:02; KLK2; ENSG00000167751; TAA
VYTKVVHY

SEQ ID NO: 34146 - protein, 9 aa, Homo sapiens
  Table A; Target 34146; HLA-A*23:01; KLK2; ENSG00000167751; TAA
VYTKVVHYR

SEQ ID NO: 34147 - protein, 9 aa, Homo sapiens
  Table A; Target 34147; HLA-A*24:02; KLK2; ENSG00000167751; TAA
VYTKVVHYR

SEQ ID NO: 34148 - protein, 9 aa, Homo sapiens
  Table A; Target 34148; HLA-A*31:01; KLK2; ENSG00000167751; TAA
VYTKVVHYR

SEQ ID NO: 34149 - protein, 9 aa, Homo sapiens
  Table A; Target 34149; HLA-A*33:01; KLK2; ENSG00000167751; TAA
VYTKVVHYR

SEQ ID NO: 34150 - protein, 9 aa, Homo sapiens
  Table A; Target 34150; HLA-A*33:03; KLK2; ENSG00000167751; TAA
VYTKVVHYR

SEQ ID NO: 34151 - protein, 8 aa, Homo sapiens
  Table A; Target 34151; HLA-A*01:01; KLK2; ENSG00000167751; TAA
YSEKVTEF

SEQ ID NO: 34152 - protein, 8 aa, Homo sapiens
  Table A; Target 34152; HLA-A*32:01; KLK2; ENSG00000167751; TAA
YSEKVTEF

SEQ ID NO: 34153 - protein, 8 aa, Homo sapiens
  Table A; Target 34153; HLA-B*15:01; KLK2; ENSG00000167751; TAA
YSEKVTEF

SEQ ID NO: 34154 - protein, 8 aa, Homo sapiens
  Table A; Target 34154; HLA-B*15:03; KLK2; ENSG00000167751; TAA
YSEKVTEF

SEQ ID NO: 34155 - protein, 8 aa, Homo sapiens
  Table A; Target 34155; HLA-B*18:01; KLK2; ENSG00000167751; TAA
YSEKVTEF

SEQ ID NO: 34156 - protein, 8 aa, Homo sapiens
  Table A; Target 34156; HLA-B*37:01; KLK2; ENSG00000167751; TAA
YSEKVTEF

SEQ ID NO: 34157 - protein, 8 aa, Homo sapiens
  Table A; Target 34157; HLA-B*39:01; KLK2; ENSG00000167751; TAA
YSEKVTEF

SEQ ID NO: 34158 - protein, 8 aa, Homo sapiens
  Table A; Target 34158; HLA-B*46:01; KLK2; ENSG00000167751; TAA
YSEKVTEF

SEQ ID NO: 34159 - protein, 8 aa, Homo sapiens
  Table A; Target 34159; HLA-B*57:01; KLK2; ENSG00000167751; TAA
YSEKVTEF

SEQ ID NO: 34160 - protein, 8 aa, Homo sapiens
  Table A; Target 34160; HLA-B*58:01; KLK2; ENSG00000167751; TAA
YSEKVTEF

SEQ ID NO: 34161 - protein, 8 aa, Homo sapiens
  Table A; Target 34161; HLA-C*02:02; KLK2; ENSG00000167751; TAA
YSEKVTEF

SEQ ID NO: 34162 - protein, 8 aa, Homo sapiens
  Table A; Target 34162; HLA-C*04:01; KLK2; ENSG00000167751; TAA
YSEKVTEF

SEQ ID NO: 34163 - protein, 8 aa, Homo sapiens
  Table A; Target 34163; HLA-C*05:01; KLK2; ENSG00000167751; TAA
YSEKVTEF

SEQ ID NO: 34164 - protein, 8 aa, Homo sapiens
  Table A; Target 34164; HLA-C*07:01; KLK2; ENSG00000167751; TAA
YSEKVTEF

SEQ ID NO: 34165 - protein, 8 aa, Homo sapiens
  Table A; Target 34165; HLA-C*07:04; KLK2; ENSG00000167751; TAA
YSEKVTEF

SEQ ID NO: 34166 - protein, 8 aa, Homo sapiens
  Table A; Target 34166; HLA-C*12:03; KLK2; ENSG00000167751; TAA
YSEKVTEF

SEQ ID NO: 34167 - protein, 8 aa, Homo sapiens
  Table A; Target 34167; HLA-C*16:01; KLK2; ENSG00000167751; TAA
YSEKVTEF

SEQ ID NO: 34168 - protein, 8 aa, Homo sapiens
  Table A; Target 34168; HLA-C*16:02; KLK2; ENSG00000167751; TAA
YSEKVTEF

SEQ ID NO: 34169 - protein, 9 aa, Homo sapiens
  Table A; Target 34169; HLA-A*01:01; KLK2; ENSG00000167751; TAA
YSEKVTEFM

SEQ ID NO: 34170 - protein, 9 aa, Homo sapiens
  Table A; Target 34170; HLA-B*58:01; KLK2; ENSG00000167751; TAA
YSEKVTEFM

SEQ ID NO: 34171 - protein, 9 aa, Homo sapiens
  Table A; Target 34171; HLA-C*05:01; KLK2; ENSG00000167751; TAA
YSEKVTEFM

SEQ ID NO: 34172 - protein, 9 aa, Homo sapiens
  Table A; Target 34172; HLA-A*02:07; KLK3; ENSG00000142515; TAA
AAPLILSRI

SEQ ID NO: 34173 - protein, 9 aa, Homo sapiens
  Table A; Target 34173; HLA-A*24:02; KLK3; ENSG00000142515; TAA
AAPLILSRI

SEQ ID NO: 34174 - protein, 9 aa, Homo sapiens
  Table A; Target 34174; HLA-A*68:02; KLK3; ENSG00000142515; TAA
AAPLILSRI

SEQ ID NO: 34175 - protein, 9 aa, Homo sapiens
  Table A; Target 34175; HLA-B*51:01; KLK3; ENSG00000142515; TAA
AAPLILSRI

SEQ ID NO: 34176 - protein, 9 aa, Homo sapiens
  Table A; Target 34176; HLA-C*01:02; KLK3; ENSG00000142515; TAA
AAPLILSRI

SEQ ID NO: 34177 - protein, 9 aa, Homo sapiens
  Table A; Target 34177; HLA-C*07:02; KLK3; ENSG00000142515; TAA
AAPLILSRI

SEQ ID NO: 34178 - protein, 9 aa, Homo sapiens
  Table A; Target 34178; HLA-A*30:01; KLK3; ENSG00000142515; TAA
AELTDAVKV

SEQ ID NO: 34179 - protein, 9 aa, Homo sapiens
  Table A; Target 34179; HLA-B*13:02; KLK3; ENSG00000142515; TAA
AELTDAVKV

SEQ ID NO: 34180 - protein, 9 aa, Homo sapiens
  Table A; Target 34180; HLA-B*37:01; KLK3; ENSG00000142515; TAA
AELTDAVKV

SEQ ID NO: 34181 - protein, 9 aa, Homo sapiens
  Table A; Target 34181; HLA-B*40:01; KLK3; ENSG00000142515; TAA
AELTDAVKV

SEQ ID NO: 34182 - protein, 9 aa, Homo sapiens
  Table A; Target 34182; HLA-B*40:02; KLK3; ENSG00000142515; TAA
AELTDAVKV

SEQ ID NO: 34183 - protein, 9 aa, Homo sapiens
  Table A; Target 34183; HLA-B*44:02; KLK3; ENSG00000142515; TAA
AELTDAVKV

SEQ ID NO: 34184 - protein, 9 aa, Homo sapiens
  Table A; Target 34184; HLA-B*44:03; KLK3; ENSG00000142515; TAA
AELTDAVKV

SEQ ID NO: 34185 - protein, 9 aa, Homo sapiens
  Table A; Target 34185; HLA-B*49:01; KLK3; ENSG00000142515; TAA
AELTDAVKV

SEQ ID NO: 34186 - protein, 9 aa, Homo sapiens
  Table A; Target 34186; HLA-C*02:02; KLK3; ENSG00000142515; TAA
AELTDAVKV

SEQ ID NO: 34187 - protein, 9 aa, Homo sapiens
  Table A; Target 34187; HLA-C*16:04; KLK3; ENSG00000142515; TAA
AELTDAVKV

SEQ ID NO: 34188 - protein, 10 aa, Homo sapiens
  Table A; Target 34188; HLA-A*30:01; KLK3; ENSG00000142515; TAA
AELTDAVKVM

SEQ ID NO: 34189 - protein, 10 aa, Homo sapiens
  Table A; Target 34189; HLA-B*40:01; KLK3; ENSG00000142515; TAA
AELTDAVKVM

SEQ ID NO: 34190 - protein, 10 aa, Homo sapiens
  Table A; Target 34190; HLA-B*40:02; KLK3; ENSG00000142515; TAA
AELTDAVKVM

SEQ ID NO: 34191 - protein, 10 aa, Homo sapiens
  Table A; Target 34191; HLA-B*44:02; KLK3; ENSG00000142515; TAA
AELTDAVKVM

SEQ ID NO: 34192 - protein, 10 aa, Homo sapiens
  Table A; Target 34192; HLA-B*44:03; KLK3; ENSG00000142515; TAA
AELTDAVKVM

SEQ ID NO: 34193 - protein, 10 aa, Homo sapiens
  Table A; Target 34193; HLA-B*49:01; KLK3; ENSG00000142515; TAA
AELTDAVKVM

SEQ ID NO: 34194 - protein, 10 aa, Homo sapiens
  Table A; Target 34194; HLA-C*16:04; KLK3; ENSG00000142515; TAA
AELTDAVKVM

SEQ ID NO: 34195 - protein, 8 aa, Homo sapiens
  Table A; Target 34195; HLA-A*02:01; KLK3; ENSG00000142515; TAA
ALGTTCYA

SEQ ID NO: 34196 - protein, 8 aa, Homo sapiens
  Table A; Target 34196; HLA-A*02:07; KLK3; ENSG00000142515; TAA
ALPERPSL

SEQ ID NO: 34197 - protein, 8 aa, Homo sapiens
  Table A; Target 34197; HLA-B*08:01; KLK3; ENSG00000142515; TAA
ALPERPSL

SEQ ID NO: 34198 - protein, 8 aa, Homo sapiens
  Table A; Target 34198; HLA-C*01:02; KLK3; ENSG00000142515; TAA
ALPERPSL

SEQ ID NO: 34199 - protein, 8 aa, Homo sapiens
  Table A; Target 34199; HLA-C*16:01; KLK3; ENSG00000142515; TAA
ALPERPSL

SEQ ID NO: 34200 - protein, 9 aa, Homo sapiens
  Table A; Target 34200; HLA-A*01:01; KLK3; ENSG00000142515; TAA
ALPERPSLY

SEQ ID NO: 34201 - protein, 9 aa, Homo sapiens
  Table A; Target 34201; HLA-A*02:01; KLK3; ENSG00000142515; TAA
ALPERPSLY

SEQ ID NO: 34202 - protein, 9 aa, Homo sapiens
  Table A; Target 34202; HLA-A*02:03; KLK3; ENSG00000142515; TAA
ALPERPSLY

SEQ ID NO: 34203 - protein, 9 aa, Homo sapiens
  Table A; Target 34203; HLA-A*02:07; KLK3; ENSG00000142515; TAA
ALPERPSLY

SEQ ID NO: 34204 - protein, 9 aa, Homo sapiens
  Table A; Target 34204; HLA-A*03:01; KLK3; ENSG00000142515; TAA
ALPERPSLY

SEQ ID NO: 34205 - protein, 9 aa, Homo sapiens
  Table A; Target 34205; HLA-A*24:02; KLK3; ENSG00000142515; TAA
ALPERPSLY

SEQ ID NO: 34206 - protein, 9 aa, Homo sapiens
  Table A; Target 34206; HLA-A*26:01; KLK3; ENSG00000142515; TAA
ALPERPSLY

SEQ ID NO: 34207 - protein, 9 aa, Homo sapiens
  Table A; Target 34207; HLA-A*29:02; KLK3; ENSG00000142515; TAA
ALPERPSLY

SEQ ID NO: 34208 - protein, 9 aa, Homo sapiens
  Table A; Target 34208; HLA-A*30:02; KLK3; ENSG00000142515; TAA
ALPERPSLY

SEQ ID NO: 34209 - protein, 9 aa, Homo sapiens
  Table A; Target 34209; HLA-A*32:01; KLK3; ENSG00000142515; TAA
ALPERPSLY

SEQ ID NO: 34210 - protein, 9 aa, Homo sapiens
  Table A; Target 34210; HLA-B*15:01; KLK3; ENSG00000142515; TAA
ALPERPSLY

SEQ ID NO: 34211 - protein, 9 aa, Homo sapiens
  Table A; Target 34211; HLA-B*15:03; KLK3; ENSG00000142515; TAA
ALPERPSLY

SEQ ID NO: 34212 - protein, 9 aa, Homo sapiens
  Table A; Target 34212; HLA-B*46:01; KLK3; ENSG00000142515; TAA
ALPERPSLY

SEQ ID NO: 34213 - protein, 9 aa, Homo sapiens
  Table A; Target 34213; HLA-C*01:02; KLK3; ENSG00000142515; TAA
ALPERPSLY

SEQ ID NO: 34214 - protein, 9 aa, Homo sapiens
  Table A; Target 34214; HLA-C*02:02; KLK3; ENSG00000142515; TAA
ALPERPSLY

SEQ ID NO: 34215 - protein, 9 aa, Homo sapiens
  Table A; Target 34215; HLA-C*07:04; KLK3; ENSG00000142515; TAA
ALPERPSLY

SEQ ID NO: 34216 - protein, 9 aa, Homo sapiens
  Table A; Target 34216; HLA-C*16:01; KLK3; ENSG00000142515; TAA
ALPERPSLY

SEQ ID NO: 34217 - protein, 9 aa, Homo sapiens
  Table A; Target 34217; HLA-C*16:02; KLK3; ENSG00000142515; TAA
ALPERPSLY

SEQ ID NO: 34218 - protein, 10 aa, Homo sapiens
  Table A; Target 34218; HLA-A*02:07; KLK3; ENSG00000142515; TAA
ALPERPSLYT

SEQ ID NO: 34219 - protein, 11 aa, Homo sapiens
  Table A; Target 34219; HLA-A*02:07; KLK3; ENSG00000142515; TAA
ALPERPSLYTK

SEQ ID NO: 34220 - protein, 11 aa, Homo sapiens
  Table A; Target 34220; HLA-A*03:01; KLK3; ENSG00000142515; TAA
ALPERPSLYTK

SEQ ID NO: 34221 - protein, 11 aa, Homo sapiens
  Table A; Target 34221; HLA-A*03:02; KLK3; ENSG00000142515; TAA
ALPERPSLYTK

SEQ ID NO: 34222 - protein, 8 aa, Homo sapiens
  Table A; Target 34222; HLA-B*51:01; KLK3; ENSG00000142515; TAA
APLILSRI

SEQ ID NO: 34223 - protein, 9 aa, Homo sapiens
  Table A; Target 34223; HLA-B*07:02; KLK3; ENSG00000142515; TAA
APLILSRIV

SEQ ID NO: 34224 - protein, 9 aa, Homo sapiens
  Table A; Target 34224; HLA-B*54:01; KLK3; ENSG00000142515; TAA
APLILSRIV

SEQ ID NO: 34225 - protein, 9 aa, Homo sapiens
  Table A; Target 34225; HLA-B*56:01; KLK3; ENSG00000142515; TAA
APLILSRIV

SEQ ID NO: 34226 - protein, 9 aa, Homo sapiens
  Table A; Target 34226; HLA-C*07:02; KLK3; ENSG00000142515; TAA
APLILSRIV

SEQ ID NO: 34227 - protein, 8 aa, Homo sapiens
  Table A; Target 34227; HLA-B*13:02; KLK3; ENSG00000142515; TAA
AQVHPQKV

SEQ ID NO: 34228 - protein, 10 aa, Homo sapiens
  Table A; Target 34228; HLA-A*03:01; KLK3; ENSG00000142515; TAA
AQVHPQKVTK

SEQ ID NO: 34229 - protein, 10 aa, Homo sapiens
  Table A; Target 34229; HLA-A*03:02; KLK3; ENSG00000142515; TAA
AQVHPQKVTK

SEQ ID NO: 34230 - protein, 10 aa, Homo sapiens
  Table A; Target 34230; HLA-A*11:01; KLK3; ENSG00000142515; TAA
AQVHPQKVTK

SEQ ID NO: 34231 - protein, 10 aa, Homo sapiens
  Table A; Target 34231; HLA-B*27:05; KLK3; ENSG00000142515; TAA
AQVHPQKVTK

SEQ ID NO: 34232 - protein, 11 aa, Homo sapiens
  Table A; Target 34232; HLA-A*32:01; KLK3; ENSG00000142515; TAA
AQVHPQKVTKF

SEQ ID NO: 34233 - protein, 11 aa, Homo sapiens
  Table A; Target 34233; HLA-B*15:01; KLK3; ENSG00000142515; TAA
AQVHPQKVTKF

SEQ ID NO: 34234 - protein, 11 aa, Homo sapiens
  Table A; Target 34234; HLA-C*02:02; KLK3; ENSG00000142515; TAA
AQVHPQKVTKF

SEQ ID NO: 34235 - protein, 8 aa, Homo sapiens
  Table A; Target 34235; HLA-C*04:01; KLK3; ENSG00000142515; TAA
AVCGGVLV

SEQ ID NO: 34236 - protein, 9 aa, Homo sapiens
  Table A; Target 34236; HLA-A*03:01; KLK3; ENSG00000142515; TAA
AVCGGVLVH

SEQ ID NO: 34237 - protein, 9 aa, Homo sapiens
  Table A; Target 34237; HLA-A*03:02; KLK3; ENSG00000142515; TAA
AVCGGVLVH

SEQ ID NO: 34238 - protein, 9 aa, Homo sapiens
  Table A; Target 34238; HLA-A*11:01; KLK3; ENSG00000142515; TAA
AVCGGVLVH

SEQ ID NO: 34239 - protein, 9 aa, Homo sapiens
  Table A; Target 34239; HLA-B*27:05; KLK3; ENSG00000142515; TAA
AVCGGVLVH

SEQ ID NO: 34240 - protein, 9 aa, Homo sapiens
  Table A; Target 34240; HLA-C*07:04; KLK3; ENSG00000142515; TAA
AVCGGVLVH

SEQ ID NO: 34241 - protein, 9 aa, Homo sapiens
  Table A; Target 34241; HLA-C*12:03; KLK3; ENSG00000142515; TAA
AVCGGVLVH

SEQ ID NO: 34242 - protein, 9 aa, Homo sapiens
  Table A; Target 34242; HLA-A*02:01; KLK3; ENSG00000142515; TAA
CALPERPSL

SEQ ID NO: 34243 - protein, 9 aa, Homo sapiens
  Table A; Target 34243; HLA-A*23:01; KLK3; ENSG00000142515; TAA
CALPERPSL

SEQ ID NO: 34244 - protein, 9 aa, Homo sapiens
  Table A; Target 34244; HLA-A*24:02; KLK3; ENSG00000142515; TAA
CALPERPSL

SEQ ID NO: 34245 - protein, 9 aa, Homo sapiens
  Table A; Target 34245; HLA-A*32:01; KLK3; ENSG00000142515; TAA
CALPERPSL

SEQ ID NO: 34246 - protein, 9 aa, Homo sapiens
  Table A; Target 34246; HLA-B*07:02; KLK3; ENSG00000142515; TAA
CALPERPSL

SEQ ID NO: 34247 - protein, 9 aa, Homo sapiens
  Table A; Target 34247; HLA-B*08:01; KLK3; ENSG00000142515; TAA
CALPERPSL

SEQ ID NO: 34248 - protein, 9 aa, Homo sapiens
  Table A; Target 34248; HLA-B*15:03; KLK3; ENSG00000142515; TAA
CALPERPSL

SEQ ID NO: 34249 - protein, 9 aa, Homo sapiens
  Table A; Target 34249; HLA-B*35:03; KLK3; ENSG00000142515; TAA
CALPERPSL

SEQ ID NO: 34250 - protein, 9 aa, Homo sapiens
  Table A; Target 34250; HLA-B*40:01; KLK3; ENSG00000142515; TAA
CALPERPSL

SEQ ID NO: 34251 - protein, 9 aa, Homo sapiens
  Table A; Target 34251; HLA-B*40:02; KLK3; ENSG00000142515; TAA
CALPERPSL

SEQ ID NO: 34252 - protein, 9 aa, Homo sapiens
  Table A; Target 34252; HLA-B*46:01; KLK3; ENSG00000142515; TAA
CALPERPSL

SEQ ID NO: 34253 - protein, 9 aa, Homo sapiens
  Table A; Target 34253; HLA-B*55:01; KLK3; ENSG00000142515; TAA
CALPERPSL

SEQ ID NO: 34254 - protein, 9 aa, Homo sapiens
  Table A; Target 34254; HLA-B*58:01; KLK3; ENSG00000142515; TAA
CALPERPSL

SEQ ID NO: 34255 - protein, 9 aa, Homo sapiens
  Table A; Target 34255; HLA-C*02:02; KLK3; ENSG00000142515; TAA
CALPERPSL

SEQ ID NO: 34256 - protein, 9 aa, Homo sapiens
  Table A; Target 34256; HLA-C*03:03; KLK3; ENSG00000142515; TAA
CALPERPSL

SEQ ID NO: 34257 - protein, 9 aa, Homo sapiens
  Table A; Target 34257; HLA-C*03:04; KLK3; ENSG00000142515; TAA
CALPERPSL

SEQ ID NO: 34258 - protein, 9 aa, Homo sapiens
  Table A; Target 34258; HLA-C*07:02; KLK3; ENSG00000142515; TAA
CALPERPSL

SEQ ID NO: 34259 - protein, 9 aa, Homo sapiens
  Table A; Target 34259; HLA-C*12:03; KLK3; ENSG00000142515; TAA
CALPERPSL

SEQ ID NO: 34260 - protein, 9 aa, Homo sapiens
  Table A; Target 34260; HLA-C*16:01; KLK3; ENSG00000142515; TAA
CALPERPSL

SEQ ID NO: 34261 - protein, 9 aa, Homo sapiens
  Table A; Target 34261; HLA-C*16:02; KLK3; ENSG00000142515; TAA
CALPERPSL

SEQ ID NO: 34262 - protein, 9 aa, Homo sapiens
  Table A; Target 34262; HLA-C*16:04; KLK3; ENSG00000142515; TAA
CALPERPSL

SEQ ID NO: 34263 - protein, 10 aa, Homo sapiens
  Table A; Target 34263; HLA-A*01:01; KLK3; ENSG00000142515; TAA
CALPERPSLY

SEQ ID NO: 34264 - protein, 10 aa, Homo sapiens
  Table A; Target 34264; HLA-A*29:02; KLK3; ENSG00000142515; TAA
CALPERPSLY

SEQ ID NO: 34265 - protein, 10 aa, Homo sapiens
  Table A; Target 34265; HLA-A*30:02; KLK3; ENSG00000142515; TAA
CALPERPSLY

SEQ ID NO: 34266 - protein, 10 aa, Homo sapiens
  Table A; Target 34266; HLA-B*57:01; KLK3; ENSG00000142515; TAA
CALPERPSLY

SEQ ID NO: 34267 - protein, 10 aa, Homo sapiens
  Table A; Target 34267; HLA-C*02:02; KLK3; ENSG00000142515; TAA
CALPERPSLY

SEQ ID NO: 34268 - protein, 10 aa, Homo sapiens
  Table A; Target 34268; HLA-C*12:03; KLK3; ENSG00000142515; TAA
CALPERPSLY

SEQ ID NO: 34269 - protein, 8 aa, Homo sapiens
  Table A; Target 34269; HLA-A*11:01; KLK3; ENSG00000142515; TAA
CAQVHPQK

SEQ ID NO: 34270 - protein, 8 aa, Homo sapiens
  Table A; Target 34270; HLA-C*16:01; KLK3; ENSG00000142515; TAA
CAQVHPQK

SEQ ID NO: 34271 - protein, 9 aa, Homo sapiens
  Table A; Target 34271; HLA-C*12:03; KLK3; ENSG00000142515; TAA
CAQVHPQKV

SEQ ID NO: 34272 - protein, 9 aa, Homo sapiens
  Table A; Target 34272; HLA-C*16:02; KLK3; ENSG00000142515; TAA
CAQVHPQKV

SEQ ID NO: 34273 - protein, 9 aa, Homo sapiens
  Table A; Target 34273; HLA-A*01:01; KLK3; ENSG00000142515; TAA
CVDLHVISN

SEQ ID NO: 34274 - protein, 9 aa, Homo sapiens
  Table A; Target 34274; HLA-A*24:02; KLK3; ENSG00000142515; TAA
CYASGWGSI

SEQ ID NO: 34275 - protein, 8 aa, Homo sapiens
  Table A; Target 34275; HLA-B*08:01; KLK3; ENSG00000142515; TAA
DAVKVMDL

SEQ ID NO: 34276 - protein, 8 aa, Homo sapiens
  Table A; Target 34276; HLA-B*18:01; KLK3; ENSG00000142515; TAA
DAVKVMDL

SEQ ID NO: 34277 - protein, 8 aa, Homo sapiens
  Table A; Target 34277; HLA-B*27:05; KLK3; ENSG00000142515; TAA
DAVKVMDL

SEQ ID NO: 34278 - protein, 8 aa, Homo sapiens
  Table A; Target 34278; HLA-B*35:01; KLK3; ENSG00000142515; TAA
DAVKVMDL

SEQ ID NO: 34279 - protein, 8 aa, Homo sapiens
  Table A; Target 34279; HLA-B*35:03; KLK3; ENSG00000142515; TAA
DAVKVMDL

SEQ ID NO: 34280 - protein, 8 aa, Homo sapiens
  Table A; Target 34280; HLA-B*40:02; KLK3; ENSG00000142515; TAA
DAVKVMDL

SEQ ID NO: 34281 - protein, 8 aa, Homo sapiens
  Table A; Target 34281; HLA-B*51:01; KLK3; ENSG00000142515; TAA
DAVKVMDL

SEQ ID NO: 34282 - protein, 8 aa, Homo sapiens
  Table A; Target 34282; HLA-C*07:01; KLK3; ENSG00000142515; TAA
DAVKVMDL

SEQ ID NO: 34283 - protein, 8 aa, Homo sapiens
  Table A; Target 34283; HLA-C*12:03; KLK3; ENSG00000142515; TAA
DAVKVMDL

SEQ ID NO: 34284 - protein, 8 aa, Homo sapiens
  Table A; Target 34284; HLA-B*37:01; KLK3; ENSG00000142515; TAA
DDSSHDLM

SEQ ID NO: 34285 - protein, 8 aa, Homo sapiens
  Table A; Target 34285; HLA-C*07:01; KLK3; ENSG00000142515; TAA
DDSSHDLM

SEQ ID NO: 34286 - protein, 9 aa, Homo sapiens
  Table A; Target 34286; HLA-B*38:01; KLK3; ENSG00000142515; TAA
DDSSHDLML

SEQ ID NO: 34287 - protein, 11 aa, Homo sapiens
  Table A; Target 34287; HLA-A*33:01; KLK3; ENSG00000142515; TAA
DDSSHDLMLLR

SEQ ID NO: 34288 - protein, 9 aa, Homo sapiens
  Table A; Target 34288; HLA-A*02:07; KLK3; ENSG00000142515; TAA
DLPTQEPAL

SEQ ID NO: 34289 - protein, 9 aa, Homo sapiens
  Table A; Target 34289; HLA-A*24:02; KLK3; ENSG00000142515; TAA
DLPTQEPAL

SEQ ID NO: 34290 - protein, 9 aa, Homo sapiens
  Table A; Target 34290; HLA-A*25:01; KLK3; ENSG00000142515; TAA
DLPTQEPAL

SEQ ID NO: 34291 - protein, 9 aa, Homo sapiens
  Table A; Target 34291; HLA-A*26:01; KLK3; ENSG00000142515; TAA
DLPTQEPAL

SEQ ID NO: 34292 - protein, 9 aa, Homo sapiens
  Table A; Target 34292; HLA-A*68:02; KLK3; ENSG00000142515; TAA
DLPTQEPAL

SEQ ID NO: 34293 - protein, 9 aa, Homo sapiens
  Table A; Target 34293; HLA-B*08:01; KLK3; ENSG00000142515; TAA
DLPTQEPAL

SEQ ID NO: 34294 - protein, 9 aa, Homo sapiens
  Table A; Target 34294; HLA-B*35:03; KLK3; ENSG00000142515; TAA
DLPTQEPAL

SEQ ID NO: 34295 - protein, 9 aa, Homo sapiens
  Table A; Target 34295; HLA-B*39:01; KLK3; ENSG00000142515; TAA
DLPTQEPAL

SEQ ID NO: 34296 - protein, 9 aa, Homo sapiens
  Table A; Target 34296; HLA-B*51:01; KLK3; ENSG00000142515; TAA
DLPTQEPAL

SEQ ID NO: 34297 - protein, 9 aa, Homo sapiens
  Table A; Target 34297; HLA-C*01:02; KLK3; ENSG00000142515; TAA
DLPTQEPAL

SEQ ID NO: 34298 - protein, 9 aa, Homo sapiens
  Table A; Target 34298; HLA-C*07:02; KLK3; ENSG00000142515; TAA
DLPTQEPAL

SEQ ID NO: 34299 - protein, 8 aa, Homo sapiens
  Table A; Target 34299; HLA-A*33:01; KLK3; ENSG00000142515; TAA
DMSLLKNR

SEQ ID NO: 34300 - protein, 8 aa, Homo sapiens
  Table A; Target 34300; HLA-A*33:03; KLK3; ENSG00000142515; TAA
DMSLLKNR

SEQ ID NO: 34301 - protein, 8 aa, Homo sapiens
  Table A; Target 34301; HLA-C*07:01; KLK3; ENSG00000142515; TAA
DSGGPLVC

SEQ ID NO: 34302 - protein, 9 aa, Homo sapiens
  Table A; Target 34302; HLA-A*33:01; KLK3; ENSG00000142515; TAA
DSSHDLMLL

SEQ ID NO: 34303 - protein, 10 aa, Homo sapiens
  Table A; Target 34303; HLA-A*33:01; KLK3; ENSG00000142515; TAA
DSSHDLMLLR

SEQ ID NO: 34304 - protein, 10 aa, Homo sapiens
  Table A; Target 34304; HLA-A*68:01; KLK3; ENSG00000142515; TAA
DSSHDLMLLR

SEQ ID NO: 34305 - protein, 8 aa, Homo sapiens
  Table A; Target 34305; HLA-A*68:02; KLK3; ENSG00000142515; TAA
DTGQVFQV

SEQ ID NO: 34306 - protein, 8 aa, Homo sapiens
  Table A; Target 34306; HLA-B*51:01; KLK3; ENSG00000142515; TAA
DTGQVFQV

SEQ ID NO: 34307 - protein, 9 aa, Homo sapiens
  Table A; Target 34307; HLA-A*33:01; KLK3; ENSG00000142515; TAA
DTGQVFQVS

SEQ ID NO: 34308 - protein, 10 aa, Homo sapiens
  Table A; Target 34308; HLA-A*68:01; KLK3; ENSG00000142515; TAA
DTGQVFQVSH

SEQ ID NO: 34309 - protein, 9 aa, Homo sapiens
  Table A; Target 34309; HLA-A*33:01; KLK3; ENSG00000142515; TAA
DVCAQVHPQ

SEQ ID NO: 34310 - protein, 9 aa, Homo sapiens
  Table A; Target 34310; HLA-C*07:01; KLK3; ENSG00000142515; TAA
DVCAQVHPQ

SEQ ID NO: 34311 - protein, 10 aa, Homo sapiens
  Table A; Target 34311; HLA-A*03:02; KLK3; ENSG00000142515; TAA
DVCAQVHPQK

SEQ ID NO: 34312 - protein, 10 aa, Homo sapiens
  Table A; Target 34312; HLA-A*11:01; KLK3; ENSG00000142515; TAA
DVCAQVHPQK

SEQ ID NO: 34313 - protein, 10 aa, Homo sapiens
  Table A; Target 34313; HLA-A*33:01; KLK3; ENSG00000142515; TAA
DVCAQVHPQK

SEQ ID NO: 34314 - protein, 10 aa, Homo sapiens
  Table A; Target 34314; HLA-A*33:03; KLK3; ENSG00000142515; TAA
DVCAQVHPQK

SEQ ID NO: 34315 - protein, 10 aa, Homo sapiens
  Table A; Target 34315; HLA-A*68:01; KLK3; ENSG00000142515; TAA
DVCAQVHPQK

SEQ ID NO: 34316 - protein, 9 aa, Homo sapiens
  Table A; Target 34316; HLA-A*68:02; KLK3; ENSG00000142515; TAA
EDTGQVFQV

SEQ ID NO: 34317 - protein, 9 aa, Homo sapiens
  Table A; Target 34317; HLA-C*16:02; KLK3; ENSG00000142515; TAA
EDTGQVFQV

SEQ ID NO: 34318 - protein, 10 aa, Homo sapiens
  Table A; Target 34318; HLA-C*07:01; KLK3; ENSG00000142515; TAA
EDTGQVFQVS

SEQ ID NO: 34319 - protein, 8 aa, Homo sapiens
  Table A; Target 34319; HLA-B*18:01; KLK3; ENSG00000142515; TAA
EEFLTPKK

SEQ ID NO: 34320 - protein, 9 aa, Homo sapiens
  Table A; Target 34320; HLA-A*30:01; KLK3; ENSG00000142515; TAA
EEFLTPKKL

SEQ ID NO: 34321 - protein, 9 aa, Homo sapiens
  Table A; Target 34321; HLA-B*18:01; KLK3; ENSG00000142515; TAA
EEFLTPKKL

SEQ ID NO: 34322 - protein, 9 aa, Homo sapiens
  Table A; Target 34322; HLA-B*40:01; KLK3; ENSG00000142515; TAA
EEFLTPKKL

SEQ ID NO: 34323 - protein, 9 aa, Homo sapiens
  Table A; Target 34323; HLA-B*40:02; KLK3; ENSG00000142515; TAA
EEFLTPKKL

SEQ ID NO: 34324 - protein, 9 aa, Homo sapiens
  Table A; Target 34324; HLA-B*44:02; KLK3; ENSG00000142515; TAA
EEFLTPKKL

SEQ ID NO: 34325 - protein, 9 aa, Homo sapiens
  Table A; Target 34325; HLA-B*44:03; KLK3; ENSG00000142515; TAA
EEFLTPKKL

SEQ ID NO: 34326 - protein, 9 aa, Homo sapiens
  Table A; Target 34326; HLA-B*49:01; KLK3; ENSG00000142515; TAA
EEFLTPKKL

SEQ ID NO: 34327 - protein, 9 aa, Homo sapiens
  Table A; Target 34327; HLA-C*16:04; KLK3; ENSG00000142515; TAA
EEFLTPKKL

SEQ ID NO: 34328 - protein, 9 aa, Homo sapiens
  Table A; Target 34328; HLA-A*25:01; KLK3; ENSG00000142515; TAA
ELTDAVKVM

SEQ ID NO: 34329 - protein, 9 aa, Homo sapiens
  Table A; Target 34329; HLA-A*26:01; KLK3; ENSG00000142515; TAA
ELTDAVKVM

SEQ ID NO: 34330 - protein, 9 aa, Homo sapiens
  Table A; Target 34330; HLA-B*35:01; KLK3; ENSG00000142515; TAA
ELTDAVKVM

SEQ ID NO: 34331 - protein, 9 aa, Homo sapiens
  Table A; Target 34331; HLA-B*39:01; KLK3; ENSG00000142515; TAA
ELTDAVKVM

SEQ ID NO: 34332 - protein, 9 aa, Homo sapiens
  Table A; Target 34332; HLA-B*44:03; KLK3; ENSG00000142515; TAA
ELTDAVKVM

SEQ ID NO: 34333 - protein, 9 aa, Homo sapiens
  Table A; Target 34333; HLA-B*55:01; KLK3; ENSG00000142515; TAA
ELTDAVKVM

SEQ ID NO: 34334 - protein, 9 aa, Homo sapiens
  Table A; Target 34334; HLA-C*07:04; KLK3; ENSG00000142515; TAA
ELTDAVKVM

SEQ ID NO: 34335 - protein, 9 aa, Homo sapiens
  Table A; Target 34335; HLA-C*12:03; KLK3; ENSG00000142515; TAA
ELTDAVKVM

SEQ ID NO: 34336 - protein, 9 aa, Homo sapiens
  Table A; Target 34336; HLA-C*16:01; KLK3; ENSG00000142515; TAA
ELTDAVKVM

SEQ ID NO: 34337 - protein, 9 aa, Homo sapiens
  Table A; Target 34337; HLA-C*16:02; KLK3; ENSG00000142515; TAA
ELTDAVKVM

SEQ ID NO: 34338 - protein, 9 aa, Homo sapiens
  Table A; Target 34338; HLA-A*68:02; KLK3; ENSG00000142515; TAA
EPAELTDAV

SEQ ID NO: 34339 - protein, 9 aa, Homo sapiens
  Table A; Target 34339; HLA-B*35:01; KLK3; ENSG00000142515; TAA
EPAELTDAV

SEQ ID NO: 34340 - protein, 9 aa, Homo sapiens
  Table A; Target 34340; HLA-B*35:03; KLK3; ENSG00000142515; TAA
EPAELTDAV

SEQ ID NO: 34341 - protein, 9 aa, Homo sapiens
  Table A; Target 34341; HLA-B*39:01; KLK3; ENSG00000142515; TAA
EPAELTDAV

SEQ ID NO: 34342 - protein, 9 aa, Homo sapiens
  Table A; Target 34342; HLA-B*51:01; KLK3; ENSG00000142515; TAA
EPAELTDAV

SEQ ID NO: 34343 - protein, 9 aa, Homo sapiens
  Table A; Target 34343; HLA-B*55:01; KLK3; ENSG00000142515; TAA
EPAELTDAV

SEQ ID NO: 34344 - protein, 9 aa, Homo sapiens
  Table A; Target 34344; HLA-B*56:01; KLK3; ENSG00000142515; TAA
EPAELTDAV

SEQ ID NO: 34345 - protein, 9 aa, Homo sapiens
  Table A; Target 34345; HLA-C*07:06; KLK3; ENSG00000142515; TAA
EPAELTDAV

SEQ ID NO: 34346 - protein, 10 aa, Homo sapiens
  Table A; Target 34346; HLA-A*33:03; KLK3; ENSG00000142515; TAA
EPAELTDAVK

SEQ ID NO: 34347 - protein, 10 aa, Homo sapiens
  Table A; Target 34347; HLA-A*68:01; KLK3; ENSG00000142515; TAA
EPAELTDAVK

SEQ ID NO: 34348 - protein, 10 aa, Homo sapiens
  Table A; Target 34348; HLA-B*27:02; KLK3; ENSG00000142515; TAA
EPAELTDAVK

SEQ ID NO: 34349 - protein, 10 aa, Homo sapiens
  Table A; Target 34349; HLA-B*35:01; KLK3; ENSG00000142515; TAA
EPAELTDAVK

SEQ ID NO: 34350 - protein, 10 aa, Homo sapiens
  Table A; Target 34350; HLA-B*35:03; KLK3; ENSG00000142515; TAA
EPAELTDAVK

SEQ ID NO: 34351 - protein, 10 aa, Homo sapiens
  Table A; Target 34351; HLA-C*07:06; KLK3; ENSG00000142515; TAA
EPAELTDAVK

SEQ ID NO: 34352 - protein, 11 aa, Homo sapiens
  Table A; Target 34352; HLA-A*26:01; KLK3; ENSG00000142515; TAA
EPAELTDAVKV

SEQ ID NO: 34353 - protein, 11 aa, Homo sapiens
  Table A; Target 34353; HLA-A*33:03; KLK3; ENSG00000142515; TAA
EPAELTDAVKV

SEQ ID NO: 34354 - protein, 11 aa, Homo sapiens
  Table A; Target 34354; HLA-A*68:01; KLK3; ENSG00000142515; TAA
EPAELTDAVKV

SEQ ID NO: 34355 - protein, 11 aa, Homo sapiens
  Table A; Target 34355; HLA-A*68:02; KLK3; ENSG00000142515; TAA
EPAELTDAVKV

SEQ ID NO: 34356 - protein, 11 aa, Homo sapiens
  Table A; Target 34356; HLA-B*35:01; KLK3; ENSG00000142515; TAA
EPAELTDAVKV

SEQ ID NO: 34357 - protein, 11 aa, Homo sapiens
  Table A; Target 34357; HLA-B*35:03; KLK3; ENSG00000142515; TAA
EPAELTDAVKV

SEQ ID NO: 34358 - protein, 11 aa, Homo sapiens
  Table A; Target 34358; HLA-B*51:01; KLK3; ENSG00000142515; TAA
EPAELTDAVKV

SEQ ID NO: 34359 - protein, 11 aa, Homo sapiens
  Table A; Target 34359; HLA-B*54:01; KLK3; ENSG00000142515; TAA
EPAELTDAVKV

SEQ ID NO: 34360 - protein, 11 aa, Homo sapiens
  Table A; Target 34360; HLA-B*55:01; KLK3; ENSG00000142515; TAA
EPAELTDAVKV

SEQ ID NO: 34361 - protein, 11 aa, Homo sapiens
  Table A; Target 34361; HLA-B*56:01; KLK3; ENSG00000142515; TAA
EPAELTDAVKV

SEQ ID NO: 34362 - protein, 11 aa, Homo sapiens
  Table A; Target 34362; HLA-C*07:06; KLK3; ENSG00000142515; TAA
EPAELTDAVKV

SEQ ID NO: 34363 - protein, 9 aa, Homo sapiens
  Table A; Target 34363; HLA-B*18:01; KLK3; ENSG00000142515; TAA
EPALGTTCY

SEQ ID NO: 34364 - protein, 9 aa, Homo sapiens
  Table A; Target 34364; HLA-B*35:03; KLK3; ENSG00000142515; TAA
EPALGTTCY

SEQ ID NO: 34365 - protein, 10 aa, Homo sapiens
  Table A; Target 34365; HLA-B*56:01; KLK3; ENSG00000142515; TAA
EPALGTTCYA

SEQ ID NO: 34366 - protein, 9 aa, Homo sapiens
  Table A; Target 34366; HLA-A*33:03; KLK3; ENSG00000142515; TAA
EPEEFLTPK

SEQ ID NO: 34367 - protein, 9 aa, Homo sapiens
  Table A; Target 34367; HLA-A*68:01; KLK3; ENSG00000142515; TAA
EPEEFLTPK

SEQ ID NO: 34368 - protein, 9 aa, Homo sapiens
  Table A; Target 34368; HLA-B*27:02; KLK3; ENSG00000142515; TAA
EPEEFLTPK

SEQ ID NO: 34369 - protein, 9 aa, Homo sapiens
  Table A; Target 34369; HLA-B*38:01; KLK3; ENSG00000142515; TAA
FHPEDTGQV

SEQ ID NO: 34370 - protein, 10 aa, Homo sapiens
  Table A; Target 34370; HLA-A*24:02; KLK3; ENSG00000142515; TAA
FHPEDTGQVF

SEQ ID NO: 34371 - protein, 10 aa, Homo sapiens
  Table A; Target 34371; HLA-B*15:03; KLK3; ENSG00000142515; TAA
FHPEDTGQVF

SEQ ID NO: 34372 - protein, 10 aa, Homo sapiens
  Table A; Target 34372; HLA-B*27:05; KLK3; ENSG00000142515; TAA
FHPEDTGQVF

SEQ ID NO: 34373 - protein, 10 aa, Homo sapiens
  Table A; Target 34373; HLA-B*38:01; KLK3; ENSG00000142515; TAA
FHPEDTGQVF

SEQ ID NO: 34374 - protein, 10 aa, Homo sapiens
  Table A; Target 34374; HLA-B*39:01; KLK3; ENSG00000142515; TAA
FHPEDTGQVF

SEQ ID NO: 34375 - protein, 10 aa, Homo sapiens
  Table A; Target 34375; HLA-C*01:02; KLK3; ENSG00000142515; TAA
FHPEDTGQVF

SEQ ID NO: 34376 - protein, 10 aa, Homo sapiens
  Table A; Target 34376; HLA-C*04:01; KLK3; ENSG00000142515; TAA
FHPEDTGQVF

SEQ ID NO: 34377 - protein, 10 aa, Homo sapiens
  Table A; Target 34377; HLA-C*05:01; KLK3; ENSG00000142515; TAA
FHPEDTGQVF

SEQ ID NO: 34378 - protein, 10 aa, Homo sapiens
  Table A; Target 34378; HLA-C*07:01; KLK3; ENSG00000142515; TAA
FHPEDTGQVF

SEQ ID NO: 34379 - protein, 10 aa, Homo sapiens
  Table A; Target 34379; HLA-C*07:04; KLK3; ENSG00000142515; TAA
FHPEDTGQVF

SEQ ID NO: 34380 - protein, 10 aa, Homo sapiens
  Table A; Target 34380; HLA-C*14:02; KLK3; ENSG00000142515; TAA
FHPEDTGQVF

SEQ ID NO: 34381 - protein, 8 aa, Homo sapiens
  Table A; Target 34381; HLA-B*35:01; KLK3; ENSG00000142515; TAA
FPHPLYDM

SEQ ID NO: 34382 - protein, 8 aa, Homo sapiens
  Table A; Target 34382; HLA-B*35:03; KLK3; ENSG00000142515; TAA
FPHPLYDM

SEQ ID NO: 34383 - protein, 8 aa, Homo sapiens
  Table A; Target 34383; HLA-B*51:01; KLK3; ENSG00000142515; TAA
FPHPLYDM

SEQ ID NO: 34384 - protein, 8 aa, Homo sapiens
  Table A; Target 34384; HLA-B*54:01; KLK3; ENSG00000142515; TAA
FPHPLYDM

SEQ ID NO: 34385 - protein, 8 aa, Homo sapiens
  Table A; Target 34385; HLA-B*55:01; KLK3; ENSG00000142515; TAA
FPHPLYDM

SEQ ID NO: 34386 - protein, 8 aa, Homo sapiens
  Table A; Target 34386; HLA-B*56:01; KLK3; ENSG00000142515; TAA
FPHPLYDM

SEQ ID NO: 34387 - protein, 10 aa, Homo sapiens
  Table A; Target 34387; HLA-B*35:01; KLK3; ENSG00000142515; TAA
FPHPLYDMSL

SEQ ID NO: 34388 - protein, 10 aa, Homo sapiens
  Table A; Target 34388; HLA-B*35:03; KLK3; ENSG00000142515; TAA
FPHPLYDMSL

SEQ ID NO: 34389 - protein, 10 aa, Homo sapiens
  Table A; Target 34389; HLA-B*54:01; KLK3; ENSG00000142515; TAA
FPHPLYDMSL

SEQ ID NO: 34390 - protein, 10 aa, Homo sapiens
  Table A; Target 34390; HLA-B*56:01; KLK3; ENSG00000142515; TAA
FPHPLYDMSL

SEQ ID NO: 34391 - protein, 9 aa, Homo sapiens
  Table A; Target 34391; HLA-A*03:01; KLK3; ENSG00000142515; TAA
GAAPLILSR

SEQ ID NO: 34392 - protein, 9 aa, Homo sapiens
  Table A; Target 34392; HLA-A*03:02; KLK3; ENSG00000142515; TAA
GAAPLILSR

SEQ ID NO: 34393 - protein, 9 aa, Homo sapiens
  Table A; Target 34393; HLA-A*11:01; KLK3; ENSG00000142515; TAA
GAAPLILSR

SEQ ID NO: 34394 - protein, 9 aa, Homo sapiens
  Table A; Target 34394; HLA-A*25:01; KLK3; ENSG00000142515; TAA
GAAPLILSR

SEQ ID NO: 34395 - protein, 9 aa, Homo sapiens
  Table A; Target 34395; HLA-A*26:01; KLK3; ENSG00000142515; TAA
GAAPLILSR

SEQ ID NO: 34396 - protein, 9 aa, Homo sapiens
  Table A; Target 34396; HLA-A*29:02; KLK3; ENSG00000142515; TAA
GAAPLILSR

SEQ ID NO: 34397 - protein, 9 aa, Homo sapiens
  Table A; Target 34397; HLA-A*31:01; KLK3; ENSG00000142515; TAA
GAAPLILSR

SEQ ID NO: 34398 - protein, 9 aa, Homo sapiens
  Table A; Target 34398; HLA-A*33:01; KLK3; ENSG00000142515; TAA
GAAPLILSR

SEQ ID NO: 34399 - protein, 9 aa, Homo sapiens
  Table A; Target 34399; HLA-A*33:03; KLK3; ENSG00000142515; TAA
GAAPLILSR

SEQ ID NO: 34400 - protein, 9 aa, Homo sapiens
  Table A; Target 34400; HLA-A*68:01; KLK3; ENSG00000142515; TAA
GAAPLILSR

SEQ ID NO: 34401 - protein, 9 aa, Homo sapiens
  Table A; Target 34401; HLA-B*13:02; KLK3; ENSG00000142515; TAA
GAAPLILSR

SEQ ID NO: 34402 - protein, 9 aa, Homo sapiens
  Table A; Target 34402; HLA-B*27:02; KLK3; ENSG00000142515; TAA
GAAPLILSR

SEQ ID NO: 34403 - protein, 9 aa, Homo sapiens
  Table A; Target 34403; HLA-B*27:05; KLK3; ENSG00000142515; TAA
GAAPLILSR

SEQ ID NO: 34404 - protein, 9 aa, Homo sapiens
  Table A; Target 34404; HLA-B*35:01; KLK3; ENSG00000142515; TAA
GAAPLILSR

SEQ ID NO: 34405 - protein, 9 aa, Homo sapiens
  Table A; Target 34405; HLA-B*56:01; KLK3; ENSG00000142515; TAA
GAAPLILSR

SEQ ID NO: 34406 - protein, 9 aa, Homo sapiens
  Table A; Target 34406; HLA-B*57:01; KLK3; ENSG00000142515; TAA
GAAPLILSR

SEQ ID NO: 34407 - protein, 9 aa, Homo sapiens
  Table A; Target 34407; HLA-C*02:02; KLK3; ENSG00000142515; TAA
GAAPLILSR

SEQ ID NO: 34408 - protein, 9 aa, Homo sapiens
  Table A; Target 34408; HLA-C*07:06; KLK3; ENSG00000142515; TAA
GAAPLILSR

SEQ ID NO: 34409 - protein, 9 aa, Homo sapiens
  Table A; Target 34409; HLA-C*12:03; KLK3; ENSG00000142515; TAA
GAAPLILSR

SEQ ID NO: 34410 - protein, 9 aa, Homo sapiens
  Table A; Target 34410; HLA-C*16:02; KLK3; ENSG00000142515; TAA
GAAPLILSR

SEQ ID NO: 34411 - protein, 9 aa, Homo sapiens
  Table A; Target 34411; HLA-C*16:04; KLK3; ENSG00000142515; TAA
GAAPLILSR

SEQ ID NO: 34412 - protein, 10 aa, Homo sapiens
  Table A; Target 34412; HLA-A*02:03; KLK3; ENSG00000142515; TAA
GAAPLILSRI

SEQ ID NO: 34413 - protein, 10 aa, Homo sapiens
  Table A; Target 34413; HLA-A*02:04; KLK3; ENSG00000142515; TAA
GAAPLILSRI

SEQ ID NO: 34414 - protein, 10 aa, Homo sapiens
  Table A; Target 34414; HLA-A*68:02; KLK3; ENSG00000142515; TAA
GAAPLILSRI

SEQ ID NO: 34415 - protein, 8 aa, Homo sapiens
  Table A; Target 34415; HLA-B*37:01; KLK3; ENSG00000142515; TAA
GDDSSHDL

SEQ ID NO: 34416 - protein, 10 aa, Homo sapiens
  Table A; Target 34416; HLA-B*38:01; KLK3; ENSG00000142515; TAA
GDDSSHDLML

SEQ ID NO: 34417 - protein, 10 aa, Homo sapiens
  Table A; Target 34417; HLA-B*40:01; KLK3; ENSG00000142515; TAA
GDDSSHDLML

SEQ ID NO: 34418 - protein, 8 aa, Homo sapiens
  Table A; Target 34418; HLA-B*39:01; KLK3; ENSG00000142515; TAA
GDSGGPLV

SEQ ID NO: 34419 - protein, 8 aa, Homo sapiens
  Table A; Target 34419; HLA-C*04:01; KLK3; ENSG00000142515; TAA
GDSGGPLV

SEQ ID NO: 34420 - protein, 8 aa, Homo sapiens
  Table A; Target 34420; HLA-C*06:02; KLK3; ENSG00000142515; TAA
GDSGGPLV

SEQ ID NO: 34421 - protein, 8 aa, Homo sapiens
  Table A; Target 34421; HLA-C*16:02; KLK3; ENSG00000142515; TAA
GDSGGPLV

SEQ ID NO: 34422 - protein, 9 aa, Homo sapiens
  Table A; Target 34422; HLA-C*07:04; KLK3; ENSG00000142515; TAA
GDSGGPLVC

SEQ ID NO: 34423 - protein, 10 aa, Homo sapiens
  Table A; Target 34423; HLA-C*07:01; KLK3; ENSG00000142515; TAA
GDSGGPLVCN

SEQ ID NO: 34424 - protein, 11 aa, Homo sapiens
  Table A; Target 34424; HLA-C*04:01; KLK3; ENSG00000142515; TAA
GDSGGPLVCNG

SEQ ID NO: 34425 - protein, 8 aa, Homo sapiens
  Table A; Target 34425; HLA-B*15:01; KLK3; ENSG00000142515; TAA
GQVFQVSH

SEQ ID NO: 34426 - protein, 10 aa, Homo sapiens
  Table A; Target 34426; HLA-A*30:02; KLK3; ENSG00000142515; TAA
GQVFQVSHSF

SEQ ID NO: 34427 - protein, 10 aa, Homo sapiens
  Table A; Target 34427; HLA-B*15:01; KLK3; ENSG00000142515; TAA
GQVFQVSHSF

SEQ ID NO: 34428 - protein, 10 aa, Homo sapiens
  Table A; Target 34428; HLA-B*15:03; KLK3; ENSG00000142515; TAA
GQVFQVSHSF

SEQ ID NO: 34429 - protein, 10 aa, Homo sapiens
  Table A; Target 34429; HLA-B*27:02; KLK3; ENSG00000142515; TAA
GQVFQVSHSF

SEQ ID NO: 34430 - protein, 10 aa, Homo sapiens
  Table A; Target 34430; HLA-B*44:03; KLK3; ENSG00000142515; TAA
GQVFQVSHSF

SEQ ID NO: 34431 - protein, 10 aa, Homo sapiens
  Table A; Target 34431; HLA-C*16:04; KLK3; ENSG00000142515; TAA
GQVFQVSHSF

SEQ ID NO: 34432 - protein, 9 aa, Homo sapiens
  Table A; Target 34432; HLA-B*27:05; KLK3; ENSG00000142515; TAA
GRAVCGGVL

SEQ ID NO: 34433 - protein, 9 aa, Homo sapiens
  Table A; Target 34433; HLA-C*06:02; KLK3; ENSG00000142515; TAA
GRAVCGGVL

SEQ ID NO: 34434 - protein, 10 aa, Homo sapiens
  Table A; Target 34434; HLA-B*27:05; KLK3; ENSG00000142515; TAA
GRWTGGKSTC

SEQ ID NO: 34435 - protein, 10 aa, Homo sapiens
  Table A; Target 34435; HLA-C*06:02; KLK3; ENSG00000142515; TAA
GRWTGGKSTC

SEQ ID NO: 34436 - protein, 9 aa, Homo sapiens
  Table A; Target 34436; HLA-B*58:01; KLK3; ENSG00000142515; TAA
GSIEPEEFL

SEQ ID NO: 34437 - protein, 9 aa, Homo sapiens
  Table A; Target 34437; HLA-B*57:01; KLK3; ENSG00000142515; TAA
GTTCYASGW

SEQ ID NO: 34438 - protein, 9 aa, Homo sapiens
  Table A; Target 34438; HLA-A*30:01; KLK3; ENSG00000142515; TAA
GVLQGITSW

SEQ ID NO: 34439 - protein, 9 aa, Homo sapiens
  Table A; Target 34439; HLA-B*13:02; KLK3; ENSG00000142515; TAA
GVLQGITSW

SEQ ID NO: 34440 - protein, 9 aa, Homo sapiens
  Table A; Target 34440; HLA-B*18:01; KLK3; ENSG00000142515; TAA
GVLQGITSW

SEQ ID NO: 34441 - protein, 9 aa, Homo sapiens
  Table A; Target 34441; HLA-B*40:02; KLK3; ENSG00000142515; TAA
GVLQGITSW

SEQ ID NO: 34442 - protein, 9 aa, Homo sapiens
  Table A; Target 34442; HLA-C*01:02; KLK3; ENSG00000142515; TAA
GVLQGITSW

SEQ ID NO: 34443 - protein, 9 aa, Homo sapiens
  Table A; Target 34443; HLA-C*02:02; KLK3; ENSG00000142515; TAA
GVLQGITSW

SEQ ID NO: 34444 - protein, 9 aa, Homo sapiens
  Table A; Target 34444; HLA-C*07:06; KLK3; ENSG00000142515; TAA
GVLQGITSW

SEQ ID NO: 34445 - protein, 9 aa, Homo sapiens
  Table A; Target 34445; HLA-A*32:01; KLK3; ENSG00000142515; TAA
HPEDTGQVF

SEQ ID NO: 34446 - protein, 9 aa, Homo sapiens
  Table A; Target 34446; HLA-A*33:03; KLK3; ENSG00000142515; TAA
HPEDTGQVF

SEQ ID NO: 34447 - protein, 9 aa, Homo sapiens
  Table A; Target 34447; HLA-A*68:01; KLK3; ENSG00000142515; TAA
HPEDTGQVF

SEQ ID NO: 34448 - protein, 9 aa, Homo sapiens
  Table A; Target 34448; HLA-B*07:02; KLK3; ENSG00000142515; TAA
HPEDTGQVF

SEQ ID NO: 34449 - protein, 9 aa, Homo sapiens
  Table A; Target 34449; HLA-B*15:01; KLK3; ENSG00000142515; TAA
HPEDTGQVF

SEQ ID NO: 34450 - protein, 9 aa, Homo sapiens
  Table A; Target 34450; HLA-B*15:03; KLK3; ENSG00000142515; TAA
HPEDTGQVF

SEQ ID NO: 34451 - protein, 9 aa, Homo sapiens
  Table A; Target 34451; HLA-B*18:01; KLK3; ENSG00000142515; TAA
HPEDTGQVF

SEQ ID NO: 34452 - protein, 9 aa, Homo sapiens
  Table A; Target 34452; HLA-B*35:01; KLK3; ENSG00000142515; TAA
HPEDTGQVF

SEQ ID NO: 34453 - protein, 9 aa, Homo sapiens
  Table A; Target 34453; HLA-B*35:03; KLK3; ENSG00000142515; TAA
HPEDTGQVF

SEQ ID NO: 34454 - protein, 9 aa, Homo sapiens
  Table A; Target 34454; HLA-B*38:01; KLK3; ENSG00000142515; TAA
HPEDTGQVF

SEQ ID NO: 34455 - protein, 9 aa, Homo sapiens
  Table A; Target 34455; HLA-B*39:01; KLK3; ENSG00000142515; TAA
HPEDTGQVF

SEQ ID NO: 34456 - protein, 9 aa, Homo sapiens
  Table A; Target 34456; HLA-B*55:01; KLK3; ENSG00000142515; TAA
HPEDTGQVF

SEQ ID NO: 34457 - protein, 9 aa, Homo sapiens
  Table A; Target 34457; HLA-C*01:02; KLK3; ENSG00000142515; TAA
HPEDTGQVF

SEQ ID NO: 34458 - protein, 9 aa, Homo sapiens
  Table A; Target 34458; HLA-C*03:03; KLK3; ENSG00000142515; TAA
HPEDTGQVF

SEQ ID NO: 34459 - protein, 9 aa, Homo sapiens
  Table A; Target 34459; HLA-C*03:04; KLK3; ENSG00000142515; TAA
HPEDTGQVF

SEQ ID NO: 34460 - protein, 9 aa, Homo sapiens
  Table A; Target 34460; HLA-C*04:01; KLK3; ENSG00000142515; TAA
HPEDTGQVF

SEQ ID NO: 34461 - protein, 9 aa, Homo sapiens
  Table A; Target 34461; HLA-C*05:01; KLK3; ENSG00000142515; TAA
HPEDTGQVF

SEQ ID NO: 34462 - protein, 9 aa, Homo sapiens
  Table A; Target 34462; HLA-C*07:01; KLK3; ENSG00000142515; TAA
HPEDTGQVF

SEQ ID NO: 34463 - protein, 9 aa, Homo sapiens
  Table A; Target 34463; HLA-C*07:02; KLK3; ENSG00000142515; TAA
HPEDTGQVF

SEQ ID NO: 34464 - protein, 9 aa, Homo sapiens
  Table A; Target 34464; HLA-C*07:04; KLK3; ENSG00000142515; TAA
HPEDTGQVF

SEQ ID NO: 34465 - protein, 9 aa, Homo sapiens
  Table A; Target 34465; HLA-C*07:06; KLK3; ENSG00000142515; TAA
HPEDTGQVF

SEQ ID NO: 34466 - protein, 9 aa, Homo sapiens
  Table A; Target 34466; HLA-C*12:03; KLK3; ENSG00000142515; TAA
HPEDTGQVF

SEQ ID NO: 34467 - protein, 9 aa, Homo sapiens
  Table A; Target 34467; HLA-C*14:02; KLK3; ENSG00000142515; TAA
HPEDTGQVF

SEQ ID NO: 34468 - protein, 11 aa, Homo sapiens
  Table A; Target 34468; HLA-A*68:01; KLK3; ENSG00000142515; TAA
HPEDTGQVFQV

SEQ ID NO: 34469 - protein, 11 aa, Homo sapiens
  Table A; Target 34469; HLA-A*68:02; KLK3; ENSG00000142515; TAA
HPEDTGQVFQV

SEQ ID NO: 34470 - protein, 11 aa, Homo sapiens
  Table A; Target 34470; HLA-B*35:03; KLK3; ENSG00000142515; TAA
HPEDTGQVFQV

SEQ ID NO: 34471 - protein, 11 aa, Homo sapiens
  Table A; Target 34471; HLA-B*54:01; KLK3; ENSG00000142515; TAA
HPEDTGQVFQV

SEQ ID NO: 34472 - protein, 11 aa, Homo sapiens
  Table A; Target 34472; HLA-B*55:01; KLK3; ENSG00000142515; TAA
HPEDTGQVFQV

SEQ ID NO: 34473 - protein, 11 aa, Homo sapiens
  Table A; Target 34473; HLA-B*56:01; KLK3; ENSG00000142515; TAA
HPEDTGQVFQV

SEQ ID NO: 34474 - protein, 8 aa, Homo sapiens
  Table A; Target 34474; HLA-B*35:03; KLK3; ENSG00000142515; TAA
HPLYDMSL

SEQ ID NO: 34475 - protein, 9 aa, Homo sapiens
  Table A; Target 34475; HLA-B*35:01; KLK3; ENSG00000142515; TAA
HPLYDMSLL

SEQ ID NO: 34476 - protein, 9 aa, Homo sapiens
  Table A; Target 34476; HLA-B*35:03; KLK3; ENSG00000142515; TAA
HPLYDMSLL

SEQ ID NO: 34477 - protein, 8 aa, Homo sapiens
  Table A; Target 34477; HLA-B*07:02; KLK3; ENSG00000142515; TAA
HPQKVTKF

SEQ ID NO: 34478 - protein, 8 aa, Homo sapiens
  Table A; Target 34478; HLA-B*08:01; KLK3; ENSG00000142515; TAA
HPQKVTKF

SEQ ID NO: 34479 - protein, 8 aa, Homo sapiens
  Table A; Target 34479; HLA-B*35:01; KLK3; ENSG00000142515; TAA
HPQKVTKF

SEQ ID NO: 34480 - protein, 8 aa, Homo sapiens
  Table A; Target 34480; HLA-B*37:01; KLK3; ENSG00000142515; TAA
HPQKVTKF

SEQ ID NO: 34481 - protein, 8 aa, Homo sapiens
  Table A; Target 34481; HLA-B*55:01; KLK3; ENSG00000142515; TAA
HPQKVTKF

SEQ ID NO: 34482 - protein, 9 aa, Homo sapiens
  Table A; Target 34482; HLA-B*07:02; KLK3; ENSG00000142515; TAA
HPQKVTKFM

SEQ ID NO: 34483 - protein, 8 aa, Homo sapiens
  Table A; Target 34483; HLA-B*55:01; KLK3; ENSG00000142515; TAA
HPQWVLTA

SEQ ID NO: 34484 - protein, 9 aa, Homo sapiens
  Table A; Target 34484; HLA-B*07:02; KLK3; ENSG00000142515; TAA
HPQWVLTAA

SEQ ID NO: 34485 - protein, 8 aa, Homo sapiens
  Table A; Target 34485; HLA-A*30:02; KLK3; ENSG00000142515; TAA
HSFPHPLY

SEQ ID NO: 34486 - protein, 8 aa, Homo sapiens
  Table A; Target 34486; HLA-A*32:01; KLK3; ENSG00000142515; TAA
HSFPHPLY

SEQ ID NO: 34487 - protein, 8 aa, Homo sapiens
  Table A; Target 34487; HLA-B*54:01; KLK3; ENSG00000142515; TAA
HSFPHPLY

SEQ ID NO: 34488 - protein, 8 aa, Homo sapiens
  Table A; Target 34488; HLA-C*04:01; KLK3; ENSG00000142515; TAA
HSFPHPLY

SEQ ID NO: 34489 - protein, 10 aa, Homo sapiens
  Table A; Target 34489; HLA-B*57:01; KLK3; ENSG00000142515; TAA
HSFPHPLYDM

SEQ ID NO: 34490 - protein, 9 aa, Homo sapiens
  Table A; Target 34490; HLA-A*02:04; KLK3; ENSG00000142515; TAA
HSQPWQVLV

SEQ ID NO: 34491 - protein, 9 aa, Homo sapiens
  Table A; Target 34491; HLA-A*02:07; KLK3; ENSG00000142515; TAA
HSQPWQVLV

SEQ ID NO: 34492 - protein, 9 aa, Homo sapiens
  Table A; Target 34492; HLA-A*68:02; KLK3; ENSG00000142515; TAA
HSQPWQVLV

SEQ ID NO: 34493 - protein, 9 aa, Homo sapiens
  Table A; Target 34493; HLA-B*13:02; KLK3; ENSG00000142515; TAA
HSQPWQVLV

SEQ ID NO: 34494 - protein, 10 aa, Homo sapiens
  Table A; Target 34494; HLA-B*54:01; KLK3; ENSG00000142515; TAA
HSQPWQVLVA

SEQ ID NO: 34495 - protein, 9 aa, Homo sapiens
  Table A; Target 34495; HLA-B*35:03; KLK3; ENSG00000142515; TAA
HVISNDVCA

SEQ ID NO: 34496 - protein, 9 aa, Homo sapiens
  Table A; Target 34496; HLA-B*54:01; KLK3; ENSG00000142515; TAA
HVISNDVCA

SEQ ID NO: 34497 - protein, 9 aa, Homo sapiens
  Table A; Target 34497; HLA-B*55:01; KLK3; ENSG00000142515; TAA
HVISNDVCA

SEQ ID NO: 34498 - protein, 9 aa, Homo sapiens
  Table A; Target 34498; HLA-B*56:01; KLK3; ENSG00000142515; TAA
HVISNDVCA

SEQ ID NO: 34499 - protein, 10 aa, Homo sapiens
  Table A; Target 34499; HLA-A*26:01; KLK3; ENSG00000142515; TAA
HVISNDVCAQ

SEQ ID NO: 34500 - protein, 10 aa, Homo sapiens
  Table A; Target 34500; HLA-C*07:01; KLK3; ENSG00000142515; TAA
HVISNDVCAQ

SEQ ID NO: 34501 - protein, 11 aa, Homo sapiens
  Table A; Target 34501; HLA-A*68:02; KLK3; ENSG00000142515; TAA
HVISNDVCAQV

SEQ ID NO: 34502 - protein, 9 aa, Homo sapiens
  Table A; Target 34502; HLA-B*49:01; KLK3; ENSG00000142515; TAA
IEPEEFLTP

SEQ ID NO: 34503 - protein, 10 aa, Homo sapiens
  Table A; Target 34503; HLA-A*11:01; KLK3; ENSG00000142515; TAA
IEPEEFLTPK

SEQ ID NO: 34504 - protein, 10 aa, Homo sapiens
  Table A; Target 34504; HLA-B*27:02; KLK3; ENSG00000142515; TAA
IEPEEFLTPK

SEQ ID NO: 34505 - protein, 8 aa, Homo sapiens
  Table A; Target 34505; HLA-C*03:03; KLK3; ENSG00000142515; TAA
IGAAPLIL

SEQ ID NO: 34506 - protein, 8 aa, Homo sapiens
  Table A; Target 34506; HLA-C*03:04; KLK3; ENSG00000142515; TAA
IGAAPLIL

SEQ ID NO: 34507 - protein, 8 aa, Homo sapiens
  Table A; Target 34507; HLA-C*07:01; KLK3; ENSG00000142515; TAA
IGAAPLIL

SEQ ID NO: 34508 - protein, 8 aa, Homo sapiens
  Table A; Target 34508; HLA-C*07:02; KLK3; ENSG00000142515; TAA
IGAAPLIL

SEQ ID NO: 34509 - protein, 8 aa, Homo sapiens
  Table A; Target 34509; HLA-C*12:03; KLK3; ENSG00000142515; TAA
IGAAPLIL

SEQ ID NO: 34510 - protein, 8 aa, Homo sapiens
  Table A; Target 34510; HLA-C*16:01; KLK3; ENSG00000142515; TAA
IGAAPLIL

SEQ ID NO: 34511 - protein, 9 aa, Homo sapiens
  Table A; Target 34511; HLA-B*27:05; KLK3; ENSG00000142515; TAA
IGAAPLILS

SEQ ID NO: 34512 - protein, 9 aa, Homo sapiens
  Table A; Target 34512; HLA-C*04:01; KLK3; ENSG00000142515; TAA
IGAAPLILS

SEQ ID NO: 34513 - protein, 9 aa, Homo sapiens
  Table A; Target 34513; HLA-C*07:02; KLK3; ENSG00000142515; TAA
IGAAPLILS

SEQ ID NO: 34514 - protein, 10 aa, Homo sapiens
  Table A; Target 34514; HLA-A*31:01; KLK3; ENSG00000142515; TAA
IGAAPLILSR

SEQ ID NO: 34515 - protein, 10 aa, Homo sapiens
  Table A; Target 34515; HLA-A*33:03; KLK3; ENSG00000142515; TAA
IGAAPLILSR

SEQ ID NO: 34516 - protein, 10 aa, Homo sapiens
  Table A; Target 34516; HLA-A*68:01; KLK3; ENSG00000142515; TAA
IGAAPLILSR

SEQ ID NO: 34517 - protein, 10 aa, Homo sapiens
  Table A; Target 34517; HLA-B*27:02; KLK3; ENSG00000142515; TAA
IGAAPLILSR

SEQ ID NO: 34518 - protein, 10 aa, Homo sapiens
  Table A; Target 34518; HLA-C*07:06; KLK3; ENSG00000142515; TAA
IGAAPLILSR

SEQ ID NO: 34519 - protein, 8 aa, Homo sapiens
  Table A; Target 34519; HLA-B*08:01; KLK3; ENSG00000142515; TAA
ILLGRHSL

SEQ ID NO: 34520 - protein, 9 aa, Homo sapiens
  Table A; Target 34520; HLA-A*24:02; KLK3; ENSG00000142515; TAA
ILLGRHSLF

SEQ ID NO: 34521 - protein, 9 aa, Homo sapiens
  Table A; Target 34521; HLA-A*25:01; KLK3; ENSG00000142515; TAA
ILSRIVGGW

SEQ ID NO: 34522 - protein, 9 aa, Homo sapiens
  Table A; Target 34522; HLA-A*32:01; KLK3; ENSG00000142515; TAA
ILSRIVGGW

SEQ ID NO: 34523 - protein, 9 aa, Homo sapiens
  Table A; Target 34523; HLA-B*57:01; KLK3; ENSG00000142515; TAA
ILSRIVGGW

SEQ ID NO: 34524 - protein, 9 aa, Homo sapiens
  Table A; Target 34524; HLA-B*27:05; KLK3; ENSG00000142515; TAA
IRNKSVILL

SEQ ID NO: 34525 - protein, 9 aa, Homo sapiens
  Table A; Target 34525; HLA-C*06:02; KLK3; ENSG00000142515; TAA
IRNKSVILL

SEQ ID NO: 34526 - protein, 9 aa, Homo sapiens
  Table A; Target 34526; HLA-C*07:01; KLK3; ENSG00000142515; TAA
IRNKSVILL

SEQ ID NO: 34527 - protein, 9 aa, Homo sapiens
  Table A; Target 34527; HLA-C*07:02; KLK3; ENSG00000142515; TAA
IRNKSVILL

SEQ ID NO: 34528 - protein, 9 aa, Homo sapiens
  Table A; Target 34528; HLA-A*02:01; KLK3; ENSG00000142515; TAA
ISNDVCAQV

SEQ ID NO: 34529 - protein, 9 aa, Homo sapiens
  Table A; Target 34529; HLA-A*02:03; KLK3; ENSG00000142515; TAA
ISNDVCAQV

SEQ ID NO: 34530 - protein, 9 aa, Homo sapiens
  Table A; Target 34530; HLA-A*32:01; KLK3; ENSG00000142515; TAA
ISNDVCAQV

SEQ ID NO: 34531 - protein, 9 aa, Homo sapiens
  Table A; Target 34531; HLA-A*68:02; KLK3; ENSG00000142515; TAA
ISNDVCAQV

SEQ ID NO: 34532 - protein, 9 aa, Homo sapiens
  Table A; Target 34532; HLA-B*13:02; KLK3; ENSG00000142515; TAA
ISNDVCAQV

SEQ ID NO: 34533 - protein, 9 aa, Homo sapiens
  Table A; Target 34533; HLA-B*55:01; KLK3; ENSG00000142515; TAA
ISNDVCAQV

SEQ ID NO: 34534 - protein, 9 aa, Homo sapiens
  Table A; Target 34534; HLA-C*06:02; KLK3; ENSG00000142515; TAA
ISNDVCAQV

SEQ ID NO: 34535 - protein, 9 aa, Homo sapiens
  Table A; Target 34535; HLA-C*12:03; KLK3; ENSG00000142515; TAA
ISNDVCAQV

SEQ ID NO: 34536 - protein, 9 aa, Homo sapiens
  Table A; Target 34536; HLA-C*16:02; KLK3; ENSG00000142515; TAA
ISNDVCAQV

SEQ ID NO: 34537 - protein, 8 aa, Homo sapiens
  Table A; Target 34537; HLA-B*37:01; KLK3; ENSG00000142515; TAA
KDTIVANP

SEQ ID NO: 34538 - protein, 8 aa, Homo sapiens
  Table A; Target 34538; HLA-C*06:02; KLK3; ENSG00000142515; TAA
KDTIVANP

SEQ ID NO: 34539 - protein, 8 aa, Homo sapiens
  Table A; Target 34539; HLA-C*07:04; KLK3; ENSG00000142515; TAA
KDTIVANP

SEQ ID NO: 34540 - protein, 8 aa, Homo sapiens
  Table A; Target 34540; HLA-C*16:02; KLK3; ENSG00000142515; TAA
KDTIVANP

SEQ ID NO: 34541 - protein, 9 aa, Homo sapiens
  Table A; Target 34541; HLA-B*38:01; KLK3; ENSG00000142515; TAA
KHSQPWQVL

SEQ ID NO: 34542 - protein, 8 aa, Homo sapiens
  Table A; Target 34542; HLA-A*31:01; KLK3; ENSG00000142515; TAA
KSVILLGR

SEQ ID NO: 34543 - protein, 9 aa, Homo sapiens
  Table A; Target 34543; HLA-A*31:01; KLK3; ENSG00000142515; TAA
KVMDLPTQE

SEQ ID NO: 34544 - protein, 9 aa, Homo sapiens
  Table A; Target 34544; HLA-A*32:01; KLK3; ENSG00000142515; TAA
KVMDLPTQE

SEQ ID NO: 34545 - protein, 10 aa, Homo sapiens
  Table A; Target 34545; HLA-A*32:01; KLK3; ENSG00000142515; TAA
KVMDLPTQEP

SEQ ID NO: 34546 - protein, 11 aa, Homo sapiens
  Table A; Target 34546; HLA-A*02:01; KLK3; ENSG00000142515; TAA
KVMDLPTQEPA

SEQ ID NO: 34547 - protein, 11 aa, Homo sapiens
  Table A; Target 34547; HLA-B*56:01; KLK3; ENSG00000142515; TAA
KVMDLPTQEPA

SEQ ID NO: 34548 - protein, 11 aa, Homo sapiens
  Table A; Target 34548; HLA-A*23:01; KLK3; ENSG00000142515; TAA
LFHPEDTGQVF

SEQ ID NO: 34549 - protein, 11 aa, Homo sapiens
  Table A; Target 34549; HLA-A*24:02; KLK3; ENSG00000142515; TAA
LFHPEDTGQVF

SEQ ID NO: 34550 - protein, 11 aa, Homo sapiens
  Table A; Target 34550; HLA-A*29:02; KLK3; ENSG00000142515; TAA
LFHPEDTGQVF

SEQ ID NO: 34551 - protein, 11 aa, Homo sapiens
  Table A; Target 34551; HLA-A*30:02; KLK3; ENSG00000142515; TAA
LFHPEDTGQVF

SEQ ID NO: 34552 - protein, 11 aa, Homo sapiens
  Table A; Target 34552; HLA-B*15:01; KLK3; ENSG00000142515; TAA
LFHPEDTGQVF

SEQ ID NO: 34553 - protein, 11 aa, Homo sapiens
  Table A; Target 34553; HLA-B*46:01; KLK3; ENSG00000142515; TAA
LFHPEDTGQVF

SEQ ID NO: 34554 - protein, 11 aa, Homo sapiens
  Table A; Target 34554; HLA-B*57:01; KLK3; ENSG00000142515; TAA
LFHPEDTGQVF

SEQ ID NO: 34555 - protein, 11 aa, Homo sapiens
  Table A; Target 34555; HLA-C*14:02; KLK3; ENSG00000142515; TAA
LFHPEDTGQVF

SEQ ID NO: 34556 - protein, 10 aa, Homo sapiens
  Table A; Target 34556; HLA-A*02:03; KLK3; ENSG00000142515; TAA
LLRLSEPAEL

SEQ ID NO: 34557 - protein, 10 aa, Homo sapiens
  Table A; Target 34557; HLA-A*02:04; KLK3; ENSG00000142515; TAA
LLRLSEPAEL

SEQ ID NO: 34558 - protein, 10 aa, Homo sapiens
  Table A; Target 34558; HLA-C*07:02; KLK3; ENSG00000142515; TAA
LLRLSEPAEL

SEQ ID NO: 34559 - protein, 8 aa, Homo sapiens
  Table A; Target 34559; HLA-A*01:01; KLK3; ENSG00000142515; TAA
LPERPSLY

SEQ ID NO: 34560 - protein, 8 aa, Homo sapiens
  Table A; Target 34560; HLA-B*35:01; KLK3; ENSG00000142515; TAA
LPERPSLY

SEQ ID NO: 34561 - protein, 8 aa, Homo sapiens
  Table A; Target 34561; HLA-B*55:01; KLK3; ENSG00000142515; TAA
LPERPSLY

SEQ ID NO: 34562 - protein, 8 aa, Homo sapiens
  Table A; Target 34562; HLA-C*03:03; KLK3; ENSG00000142515; TAA
LPERPSLY

SEQ ID NO: 34563 - protein, 8 aa, Homo sapiens
  Table A; Target 34563; HLA-C*04:01; KLK3; ENSG00000142515; TAA
LPERPSLY

SEQ ID NO: 34564 - protein, 8 aa, Homo sapiens
  Table A; Target 34564; HLA-C*05:01; KLK3; ENSG00000142515; TAA
LPERPSLY

SEQ ID NO: 34565 - protein, 8 aa, Homo sapiens
  Table A; Target 34565; HLA-C*07:01; KLK3; ENSG00000142515; TAA
LPERPSLY

SEQ ID NO: 34566 - protein, 11 aa, Homo sapiens
  Table A; Target 34566; HLA-B*51:01; KLK3; ENSG00000142515; TAA
LPERPSLYTKV

SEQ ID NO: 34567 - protein, 8 aa, Homo sapiens
  Table A; Target 34567; HLA-B*39:01; KLK3; ENSG00000142515; TAA
LPTQEPAL

SEQ ID NO: 34568 - protein, 9 aa, Homo sapiens
  Table A; Target 34568; HLA-B*13:02; KLK3; ENSG00000142515; TAA
LQCVDLHVI

SEQ ID NO: 34569 - protein, 9 aa, Homo sapiens
  Table A; Target 34569; HLA-B*27:02; KLK3; ENSG00000142515; TAA
LRLSEPAEL

SEQ ID NO: 34570 - protein, 9 aa, Homo sapiens
  Table A; Target 34570; HLA-B*27:05; KLK3; ENSG00000142515; TAA
LRLSEPAEL

SEQ ID NO: 34571 - protein, 9 aa, Homo sapiens
  Table A; Target 34571; HLA-B*38:01; KLK3; ENSG00000142515; TAA
LRLSEPAEL

SEQ ID NO: 34572 - protein, 9 aa, Homo sapiens
  Table A; Target 34572; HLA-B*39:01; KLK3; ENSG00000142515; TAA
LRLSEPAEL

SEQ ID NO: 34573 - protein, 9 aa, Homo sapiens
  Table A; Target 34573; HLA-C*06:02; KLK3; ENSG00000142515; TAA
LRLSEPAEL

SEQ ID NO: 34574 - protein, 9 aa, Homo sapiens
  Table A; Target 34574; HLA-C*07:02; KLK3; ENSG00000142515; TAA
LRLSEPAEL

SEQ ID NO: 34575 - protein, 9 aa, Homo sapiens
  Table A; Target 34575; HLA-C*16:04; KLK3; ENSG00000142515; TAA
LRLSEPAEL

SEQ ID NO: 34576 - protein, 11 aa, Homo sapiens
  Table A; Target 34576; HLA-C*07:02; KLK3; ENSG00000142515; TAA
LRPGDDSSHDL

SEQ ID NO: 34577 - protein, 11 aa, Homo sapiens
  Table A; Target 34577; HLA-A*01:01; KLK3; ENSG00000142515; TAA
LSEPAELTDAV

SEQ ID NO: 34578 - protein, 8 aa, Homo sapiens
  Table A; Target 34578; HLA-B*57:01; KLK3; ENSG00000142515; TAA
LSRIVGGW

SEQ ID NO: 34579 - protein, 8 aa, Homo sapiens
  Table A; Target 34579; HLA-A*01:01; KLK3; ENSG00000142515; TAA
LTDAVKVM

SEQ ID NO: 34580 - protein, 8 aa, Homo sapiens
  Table A; Target 34580; HLA-C*03:03; KLK3; ENSG00000142515; TAA
LTDAVKVM

SEQ ID NO: 34581 - protein, 8 aa, Homo sapiens
  Table A; Target 34581; HLA-C*03:04; KLK3; ENSG00000142515; TAA
LTDAVKVM

SEQ ID NO: 34582 - protein, 8 aa, Homo sapiens
  Table A; Target 34582; HLA-C*04:01; KLK3; ENSG00000142515; TAA
LTDAVKVM

SEQ ID NO: 34583 - protein, 8 aa, Homo sapiens
  Table A; Target 34583; HLA-C*05:01; KLK3; ENSG00000142515; TAA
LTDAVKVM

SEQ ID NO: 34584 - protein, 8 aa, Homo sapiens
  Table A; Target 34584; HLA-C*12:03; KLK3; ENSG00000142515; TAA
LTDAVKVM

SEQ ID NO: 34585 - protein, 10 aa, Homo sapiens
  Table A; Target 34585; HLA-A*01:01; KLK3; ENSG00000142515; TAA
LTDAVKVMDL

SEQ ID NO: 34586 - protein, 9 aa, Homo sapiens
  Table A; Target 34586; HLA-A*02:03; KLK3; ENSG00000142515; TAA
LVASRGRAV

SEQ ID NO: 34587 - protein, 9 aa, Homo sapiens
  Table A; Target 34587; HLA-C*16:01; KLK3; ENSG00000142515; TAA
LVASRGRAV

SEQ ID NO: 34588 - protein, 8 aa, Homo sapiens
  Table A; Target 34588; HLA-A*23:01; KLK3; ENSG00000142515; TAA
LYTKVVHY

SEQ ID NO: 34589 - protein, 8 aa, Homo sapiens
  Table A; Target 34589; HLA-A*24:02; KLK3; ENSG00000142515; TAA
LYTKVVHY

SEQ ID NO: 34590 - protein, 8 aa, Homo sapiens
  Table A; Target 34590; HLA-A*29:02; KLK3; ENSG00000142515; TAA
LYTKVVHY

SEQ ID NO: 34591 - protein, 8 aa, Homo sapiens
  Table A; Target 34591; HLA-B*15:03; KLK3; ENSG00000142515; TAA
LYTKVVHY

SEQ ID NO: 34592 - protein, 8 aa, Homo sapiens
  Table A; Target 34592; HLA-C*07:01; KLK3; ENSG00000142515; TAA
LYTKVVHY

SEQ ID NO: 34593 - protein, 8 aa, Homo sapiens
  Table A; Target 34593; HLA-C*07:04; KLK3; ENSG00000142515; TAA
LYTKVVHY

SEQ ID NO: 34594 - protein, 8 aa, Homo sapiens
  Table A; Target 34594; HLA-C*14:02; KLK3; ENSG00000142515; TAA
LYTKVVHY

SEQ ID NO: 34595 - protein, 9 aa, Homo sapiens
  Table A; Target 34595; HLA-A*24:02; KLK3; ENSG00000142515; TAA
LYTKVVHYR

SEQ ID NO: 34596 - protein, 9 aa, Homo sapiens
  Table A; Target 34596; HLA-A*31:01; KLK3; ENSG00000142515; TAA
LYTKVVHYR

SEQ ID NO: 34597 - protein, 9 aa, Homo sapiens
  Table A; Target 34597; HLA-A*33:01; KLK3; ENSG00000142515; TAA
LYTKVVHYR

SEQ ID NO: 34598 - protein, 9 aa, Homo sapiens
  Table A; Target 34598; HLA-A*33:03; KLK3; ENSG00000142515; TAA
LYTKVVHYR

SEQ ID NO: 34599 - protein, 8 aa, Homo sapiens
  Table A; Target 34599; HLA-C*06:02; KLK3; ENSG00000142515; TAA
MDLPTQEP

SEQ ID NO: 34600 - protein, 8 aa, Homo sapiens
  Table A; Target 34600; HLA-C*07:01; KLK3; ENSG00000142515; TAA
MDLPTQEP

SEQ ID NO: 34601 - protein, 9 aa, Homo sapiens
  Table A; Target 34601; HLA-B*40:02; KLK3; ENSG00000142515; TAA
MDLPTQEPA

SEQ ID NO: 34602 - protein, 9 aa, Homo sapiens
  Table A; Target 34602; HLA-B*54:01; KLK3; ENSG00000142515; TAA
MDLPTQEPA

SEQ ID NO: 34603 - protein, 10 aa, Homo sapiens
  Table A; Target 34603; HLA-A*02:01; KLK3; ENSG00000142515; TAA
MDLPTQEPAL

SEQ ID NO: 34604 - protein, 10 aa, Homo sapiens
  Table A; Target 34604; HLA-A*23:01; KLK3; ENSG00000142515; TAA
MDLPTQEPAL

SEQ ID NO: 34605 - protein, 10 aa, Homo sapiens
  Table A; Target 34605; HLA-A*30:01; KLK3; ENSG00000142515; TAA
MDLPTQEPAL

SEQ ID NO: 34606 - protein, 10 aa, Homo sapiens
  Table A; Target 34606; HLA-B*38:01; KLK3; ENSG00000142515; TAA
MDLPTQEPAL

SEQ ID NO: 34607 - protein, 10 aa, Homo sapiens
  Table A; Target 34607; HLA-B*40:01; KLK3; ENSG00000142515; TAA
MDLPTQEPAL

SEQ ID NO: 34608 - protein, 10 aa, Homo sapiens
  Table A; Target 34608; HLA-B*40:02; KLK3; ENSG00000142515; TAA
MDLPTQEPAL

SEQ ID NO: 34609 - protein, 10 aa, Homo sapiens
  Table A; Target 34609; HLA-C*04:01; KLK3; ENSG00000142515; TAA
MDLPTQEPAL

SEQ ID NO: 34610 - protein, 10 aa, Homo sapiens
  Table A; Target 34610; HLA-C*07:01; KLK3; ENSG00000142515; TAA
MDLPTQEPAL

SEQ ID NO: 34611 - protein, 10 aa, Homo sapiens
  Table A; Target 34611; HLA-C*07:02; KLK3; ENSG00000142515; TAA
MDLPTQEPAL

SEQ ID NO: 34612 - protein, 11 aa, Homo sapiens
  Table A; Target 34612; HLA-C*04:01; KLK3; ENSG00000142515; TAA
MDLPTQEPALG

SEQ ID NO: 34613 - protein, 11 aa, Homo sapiens
  Table A; Target 34613; HLA-A*02:01; KLK3; ENSG00000142515; TAA
MLLRLSEPAEL

SEQ ID NO: 34614 - protein, 11 aa, Homo sapiens
  Table A; Target 34614; HLA-A*02:04; KLK3; ENSG00000142515; TAA
MLLRLSEPAEL

SEQ ID NO: 34615 - protein, 11 aa, Homo sapiens
  Table A; Target 34615; HLA-A*02:07; KLK3; ENSG00000142515; TAA
MLLRLSEPAEL

SEQ ID NO: 34616 - protein, 10 aa, Homo sapiens
  Table A; Target 34616; HLA-A*23:01; KLK3; ENSG00000142515; TAA
MWVPVVFLTL

SEQ ID NO: 34617 - protein, 10 aa, Homo sapiens
  Table A; Target 34617; HLA-A*24:02; KLK3; ENSG00000142515; TAA
MWVPVVFLTL

SEQ ID NO: 34618 - protein, 10 aa, Homo sapiens
  Table A; Target 34618; HLA-B*44:03; KLK3; ENSG00000142515; TAA
NGVLQGITSW

SEQ ID NO: 34619 - protein, 10 aa, Homo sapiens
  Table A; Target 34619; HLA-B*57:01; KLK3; ENSG00000142515; TAA
NGVLQGITSW

SEQ ID NO: 34620 - protein, 9 aa, Homo sapiens
  Table A; Target 34620; HLA-B*27:02; KLK3; ENSG00000142515; TAA
PAELTDAVK

SEQ ID NO: 34621 - protein, 8 aa, Homo sapiens
  Table A; Target 34621; HLA-B*15:01; KLK3; ENSG00000142515; TAA
PALGTTCY

SEQ ID NO: 34622 - protein, 9 aa, Homo sapiens
  Table A; Target 34622; HLA-C*04:01; KLK3; ENSG00000142515; TAA
PALGTTCYA

SEQ ID NO: 34623 - protein, 9 aa, Homo sapiens
  Table A; Target 34623; HLA-C*07:02; KLK3; ENSG00000142515; TAA
PALGTTCYA

SEQ ID NO: 34624 - protein, 10 aa, Homo sapiens
  Table A; Target 34624; HLA-C*07:02; KLK3; ENSG00000142515; TAA
PCALPERPSL

SEQ ID NO: 34625 - protein, 8 aa, Homo sapiens
  Table A; Target 34625; HLA-B*18:01; KLK3; ENSG00000142515; TAA
PEDTGQVF

SEQ ID NO: 34626 - protein, 8 aa, Homo sapiens
  Table A; Target 34626; HLA-C*04:01; KLK3; ENSG00000142515; TAA
PEDTGQVF

SEQ ID NO: 34627 - protein, 8 aa, Homo sapiens
  Table A; Target 34627; HLA-C*05:01; KLK3; ENSG00000142515; TAA
PEDTGQVF

SEQ ID NO: 34628 - protein, 9 aa, Homo sapiens
  Table A; Target 34628; HLA-C*05:01; KLK3; ENSG00000142515; TAA
PGDDSSHDL

SEQ ID NO: 34629 - protein, 9 aa, Homo sapiens
  Table A; Target 34629; HLA-A*03:01; KLK3; ENSG00000142515; TAA
PLYDMSLLK

SEQ ID NO: 34630 - protein, 10 aa, Homo sapiens
  Table A; Target 34630; HLA-C*07:01; KLK3; ENSG00000142515; TAA
PSLYTKVVHY

SEQ ID NO: 34631 - protein, 10 aa, Homo sapiens
  Table A; Target 34631; HLA-C*07:01; KLK3; ENSG00000142515; TAA
QCVDLHVISN

SEQ ID NO: 34632 - protein, 9 aa, Homo sapiens
  Table A; Target 34632; HLA-B*40:02; KLK3; ENSG00000142515; TAA
QEPALGTTC

SEQ ID NO: 34633 - protein, 10 aa, Homo sapiens
  Table A; Target 34633; HLA-A*25:01; KLK3; ENSG00000142515; TAA
QEPALGTTCY

SEQ ID NO: 34634 - protein, 10 aa, Homo sapiens
  Table A; Target 34634; HLA-B*27:02; KLK3; ENSG00000142515; TAA
QEPALGTTCY

SEQ ID NO: 34635 - protein, 10 aa, Homo sapiens
  Table A; Target 34635; HLA-B*35:01; KLK3; ENSG00000142515; TAA
QEPALGTTCY

SEQ ID NO: 34636 - protein, 10 aa, Homo sapiens
  Table A; Target 34636; HLA-C*02:02; KLK3; ENSG00000142515; TAA
QEPALGTTCY

SEQ ID NO: 34637 - protein, 10 aa, Homo sapiens
  Table A; Target 34637; HLA-C*07:01; KLK3; ENSG00000142515; TAA
QEPALGTTCY

SEQ ID NO: 34638 - protein, 8 aa, Homo sapiens
  Table A; Target 34638; HLA-B*51:01; KLK3; ENSG00000142515; TAA
QPWQVLVA

SEQ ID NO: 34639 - protein, 8 aa, Homo sapiens
  Table A; Target 34639; HLA-B*54:01; KLK3; ENSG00000142515; TAA
QPWQVLVA

SEQ ID NO: 34640 - protein, 8 aa, Homo sapiens
  Table A; Target 34640; HLA-B*55:01; KLK3; ENSG00000142515; TAA
QPWQVLVA

SEQ ID NO: 34641 - protein, 8 aa, Homo sapiens
  Table A; Target 34641; HLA-B*56:01; KLK3; ENSG00000142515; TAA
QPWQVLVA

SEQ ID NO: 34642 - protein, 9 aa, Homo sapiens
  Table A; Target 34642; HLA-B*54:01; KLK3; ENSG00000142515; TAA
QPWQVLVAS

SEQ ID NO: 34643 - protein, 9 aa, Homo sapiens
  Table A; Target 34643; HLA-B*56:01; KLK3; ENSG00000142515; TAA
QPWQVLVAS

SEQ ID NO: 34644 - protein, 10 aa, Homo sapiens
  Table A; Target 34644; HLA-B*27:02; KLK3; ENSG00000142515; TAA
QPWQVLVASR

SEQ ID NO: 34645 - protein, 10 aa, Homo sapiens
  Table A; Target 34645; HLA-B*56:01; KLK3; ENSG00000142515; TAA
QPWQVLVASR

SEQ ID NO: 34646 - protein, 9 aa, Homo sapiens
  Table A; Target 34646; HLA-A*23:01; KLK3; ENSG00000142515; TAA
QVFQVSHSF

SEQ ID NO: 34647 - protein, 9 aa, Homo sapiens
  Table A; Target 34647; HLA-A*24:02; KLK3; ENSG00000142515; TAA
QVFQVSHSF

SEQ ID NO: 34648 - protein, 9 aa, Homo sapiens
  Table A; Target 34648; HLA-A*25:01; KLK3; ENSG00000142515; TAA
QVFQVSHSF

SEQ ID NO: 34649 - protein, 9 aa, Homo sapiens
  Table A; Target 34649; HLA-A*26:01; KLK3; ENSG00000142515; TAA
QVFQVSHSF

SEQ ID NO: 34650 - protein, 9 aa, Homo sapiens
  Table A; Target 34650; HLA-A*29:02; KLK3; ENSG00000142515; TAA
QVFQVSHSF

SEQ ID NO: 34651 - protein, 9 aa, Homo sapiens
  Table A; Target 34651; HLA-A*30:02; KLK3; ENSG00000142515; TAA
QVFQVSHSF

SEQ ID NO: 34652 - protein, 9 aa, Homo sapiens
  Table A; Target 34652; HLA-A*32:01; KLK3; ENSG00000142515; TAA
QVFQVSHSF

SEQ ID NO: 34653 - protein, 9 aa, Homo sapiens
  Table A; Target 34653; HLA-B*15:01; KLK3; ENSG00000142515; TAA
QVFQVSHSF

SEQ ID NO: 34654 - protein, 9 aa, Homo sapiens
  Table A; Target 34654; HLA-B*15:03; KLK3; ENSG00000142515; TAA
QVFQVSHSF

SEQ ID NO: 34655 - protein, 9 aa, Homo sapiens
  Table A; Target 34655; HLA-B*18:01; KLK3; ENSG00000142515; TAA
QVFQVSHSF

SEQ ID NO: 34656 - protein, 9 aa, Homo sapiens
  Table A; Target 34656; HLA-B*35:01; KLK3; ENSG00000142515; TAA
QVFQVSHSF

SEQ ID NO: 34657 - protein, 9 aa, Homo sapiens
  Table A; Target 34657; HLA-B*37:01; KLK3; ENSG00000142515; TAA
QVFQVSHSF

SEQ ID NO: 34658 - protein, 9 aa, Homo sapiens
  Table A; Target 34658; HLA-B*38:01; KLK3; ENSG00000142515; TAA
QVFQVSHSF

SEQ ID NO: 34659 - protein, 9 aa, Homo sapiens
  Table A; Target 34659; HLA-B*44:02; KLK3; ENSG00000142515; TAA
QVFQVSHSF

SEQ ID NO: 34660 - protein, 9 aa, Homo sapiens
  Table A; Target 34660; HLA-B*44:03; KLK3; ENSG00000142515; TAA
QVFQVSHSF

SEQ ID NO: 34661 - protein, 9 aa, Homo sapiens
  Table A; Target 34661; HLA-B*46:01; KLK3; ENSG00000142515; TAA
QVFQVSHSF

SEQ ID NO: 34662 - protein, 9 aa, Homo sapiens
  Table A; Target 34662; HLA-B*57:01; KLK3; ENSG00000142515; TAA
QVFQVSHSF

SEQ ID NO: 34663 - protein, 9 aa, Homo sapiens
  Table A; Target 34663; HLA-B*58:01; KLK3; ENSG00000142515; TAA
QVFQVSHSF

SEQ ID NO: 34664 - protein, 9 aa, Homo sapiens
  Table A; Target 34664; HLA-C*02:02; KLK3; ENSG00000142515; TAA
QVFQVSHSF

SEQ ID NO: 34665 - protein, 9 aa, Homo sapiens
  Table A; Target 34665; HLA-C*07:06; KLK3; ENSG00000142515; TAA
QVFQVSHSF

SEQ ID NO: 34666 - protein, 9 aa, Homo sapiens
  Table A; Target 34666; HLA-C*16:01; KLK3; ENSG00000142515; TAA
QVFQVSHSF

SEQ ID NO: 34667 - protein, 9 aa, Homo sapiens
  Table A; Target 34667; HLA-C*16:04; KLK3; ENSG00000142515; TAA
QVFQVSHSF

SEQ ID NO: 34668 - protein, 9 aa, Homo sapiens
  Table A; Target 34668; HLA-A*03:01; KLK3; ENSG00000142515; TAA
QVHPQKVTK

SEQ ID NO: 34669 - protein, 9 aa, Homo sapiens
  Table A; Target 34669; HLA-A*03:02; KLK3; ENSG00000142515; TAA
QVHPQKVTK

SEQ ID NO: 34670 - protein, 9 aa, Homo sapiens
  Table A; Target 34670; HLA-A*11:01; KLK3; ENSG00000142515; TAA
QVHPQKVTK

SEQ ID NO: 34671 - protein, 9 aa, Homo sapiens
  Table A; Target 34671; HLA-A*31:01; KLK3; ENSG00000142515; TAA
QVHPQKVTK

SEQ ID NO: 34672 - protein, 9 aa, Homo sapiens
  Table A; Target 34672; HLA-A*32:01; KLK3; ENSG00000142515; TAA
QVHPQKVTK

SEQ ID NO: 34673 - protein, 9 aa, Homo sapiens
  Table A; Target 34673; HLA-A*33:01; KLK3; ENSG00000142515; TAA
QVHPQKVTK

SEQ ID NO: 34674 - protein, 9 aa, Homo sapiens
  Table A; Target 34674; HLA-A*33:03; KLK3; ENSG00000142515; TAA
QVHPQKVTK

SEQ ID NO: 34675 - protein, 9 aa, Homo sapiens
  Table A; Target 34675; HLA-A*68:01; KLK3; ENSG00000142515; TAA
QVHPQKVTK

SEQ ID NO: 34676 - protein, 9 aa, Homo sapiens
  Table A; Target 34676; HLA-B*27:05; KLK3; ENSG00000142515; TAA
QVHPQKVTK

SEQ ID NO: 34677 - protein, 9 aa, Homo sapiens
  Table A; Target 34677; HLA-C*06:02; KLK3; ENSG00000142515; TAA
QVHPQKVTK

SEQ ID NO: 34678 - protein, 9 aa, Homo sapiens
  Table A; Target 34678; HLA-C*07:04; KLK3; ENSG00000142515; TAA
QVHPQKVTK

SEQ ID NO: 34679 - protein, 9 aa, Homo sapiens
  Table A; Target 34679; HLA-C*07:06; KLK3; ENSG00000142515; TAA
QVHPQKVTK

SEQ ID NO: 34680 - protein, 9 aa, Homo sapiens
  Table A; Target 34680; HLA-C*16:01; KLK3; ENSG00000142515; TAA
QVHPQKVTK

SEQ ID NO: 34681 - protein, 9 aa, Homo sapiens
  Table A; Target 34681; HLA-C*16:02; KLK3; ENSG00000142515; TAA
QVHPQKVTK

SEQ ID NO: 34682 - protein, 10 aa, Homo sapiens
  Table A; Target 34682; HLA-A*25:01; KLK3; ENSG00000142515; TAA
QVHPQKVTKF

SEQ ID NO: 34683 - protein, 10 aa, Homo sapiens
  Table A; Target 34683; HLA-A*26:01; KLK3; ENSG00000142515; TAA
QVHPQKVTKF

SEQ ID NO: 34684 - protein, 10 aa, Homo sapiens
  Table A; Target 34684; HLA-A*32:01; KLK3; ENSG00000142515; TAA
QVHPQKVTKF

SEQ ID NO: 34685 - protein, 10 aa, Homo sapiens
  Table A; Target 34685; HLA-A*33:03; KLK3; ENSG00000142515; TAA
QVHPQKVTKF

SEQ ID NO: 34686 - protein, 10 aa, Homo sapiens
  Table A; Target 34686; HLA-B*57:01; KLK3; ENSG00000142515; TAA
QVHPQKVTKF

SEQ ID NO: 34687 - protein, 11 aa, Homo sapiens
  Table A; Target 34687; HLA-A*29:02; KLK3; ENSG00000142515; TAA
QVSHSFPHPLY

SEQ ID NO: 34688 - protein, 8 aa, Homo sapiens
  Table A; Target 34688; HLA-C*03:04; KLK3; ENSG00000142515; TAA
RAVCGGVL

SEQ ID NO: 34689 - protein, 8 aa, Homo sapiens
  Table A; Target 34689; HLA-B*37:01; KLK3; ENSG00000142515; TAA
RLSEPAEL

SEQ ID NO: 34690 - protein, 8 aa, Homo sapiens
  Table A; Target 34690; HLA-C*05:01; KLK3; ENSG00000142515; TAA
RLSEPAEL

SEQ ID NO: 34691 - protein, 11 aa, Homo sapiens
  Table A; Target 34691; HLA-A*02:01; KLK3; ENSG00000142515; TAA
RLSEPAELTDA

SEQ ID NO: 34692 - protein, 11 aa, Homo sapiens
  Table A; Target 34692; HLA-A*02:03; KLK3; ENSG00000142515; TAA
RLSEPAELTDA

SEQ ID NO: 34693 - protein, 10 aa, Homo sapiens
  Table A; Target 34693; HLA-A*31:01; KLK3; ENSG00000142515; TAA
RNKSVILLGR

SEQ ID NO: 34694 - protein, 10 aa, Homo sapiens
  Table A; Target 34694; HLA-B*07:02; KLK3; ENSG00000142515; TAA
RPGDDSSHDL

SEQ ID NO: 34695 - protein, 10 aa, Homo sapiens
  Table A; Target 34695; HLA-B*35:03; KLK3; ENSG00000142515; TAA
RPGDDSSHDL

SEQ ID NO: 34696 - protein, 10 aa, Homo sapiens
  Table A; Target 34696; HLA-C*07:02; KLK3; ENSG00000142515; TAA
RPGDDSSHDL

SEQ ID NO: 34697 - protein, 11 aa, Homo sapiens
  Table A; Target 34697; HLA-B*55:01; KLK3; ENSG00000142515; TAA
RPGDDSSHDLM

SEQ ID NO: 34698 - protein, 11 aa, Homo sapiens
  Table A; Target 34698; HLA-C*03:03; KLK3; ENSG00000142515; TAA
RPGDDSSHDLM

SEQ ID NO: 34699 - protein, 8 aa, Homo sapiens
  Table A; Target 34699; HLA-B*07:02; KLK3; ENSG00000142515; TAA
RPSLYTKV

SEQ ID NO: 34700 - protein, 8 aa, Homo sapiens
  Table A; Target 34700; HLA-B*56:01; KLK3; ENSG00000142515; TAA
RPSLYTKV

SEQ ID NO: 34701 - protein, 9 aa, Homo sapiens
  Table A; Target 34701; HLA-B*07:02; KLK3; ENSG00000142515; TAA
RPSLYTKVV

SEQ ID NO: 34702 - protein, 9 aa, Homo sapiens
  Table A; Target 34702; HLA-B*56:01; KLK3; ENSG00000142515; TAA
RPSLYTKVV

SEQ ID NO: 34703 - protein, 9 aa, Homo sapiens
  Table A; Target 34703; HLA-C*07:02; KLK3; ENSG00000142515; TAA
RPSLYTKVV

SEQ ID NO: 34704 - protein, 10 aa, Homo sapiens
  Table A; Target 34704; HLA-A*30:01; KLK3; ENSG00000142515; TAA
SEPAELTDAV

SEQ ID NO: 34705 - protein, 10 aa, Homo sapiens
  Table A; Target 34705; HLA-B*40:01; KLK3; ENSG00000142515; TAA
SEPAELTDAV

SEQ ID NO: 34706 - protein, 10 aa, Homo sapiens
  Table A; Target 34706; HLA-B*49:01; KLK3; ENSG00000142515; TAA
SEPAELTDAV

SEQ ID NO: 34707 - protein, 11 aa, Homo sapiens
  Table A; Target 34707; HLA-B*27:02; KLK3; ENSG00000142515; TAA
SEPAELTDAVK

SEQ ID NO: 34708 - protein, 9 aa, Homo sapiens
  Table A; Target 34708; HLA-A*29:02; KLK3; ENSG00000142515; TAA
SFPHPLYDM

SEQ ID NO: 34709 - protein, 8 aa, Homo sapiens
  Table A; Target 34709; HLA-C*05:01; KLK3; ENSG00000142515; TAA
SGDSGGPL

SEQ ID NO: 34710 - protein, 9 aa, Homo sapiens
  Table A; Target 34710; HLA-A*02:01; KLK3; ENSG00000142515; TAA
SGDSGGPLV

SEQ ID NO: 34711 - protein, 9 aa, Homo sapiens
  Table A; Target 34711; HLA-B*38:01; KLK3; ENSG00000142515; TAA
SGDSGGPLV

SEQ ID NO: 34712 - protein, 9 aa, Homo sapiens
  Table A; Target 34712; HLA-B*39:01; KLK3; ENSG00000142515; TAA
SGDSGGPLV

SEQ ID NO: 34713 - protein, 9 aa, Homo sapiens
  Table A; Target 34713; HLA-C*05:01; KLK3; ENSG00000142515; TAA
SGDSGGPLV

SEQ ID NO: 34714 - protein, 10 aa, Homo sapiens
  Table A; Target 34714; HLA-C*03:03; KLK3; ENSG00000142515; TAA
SGDSGGPLVC

SEQ ID NO: 34715 - protein, 9 aa, Homo sapiens
  Table A; Target 34715; HLA-C*12:03; KLK3; ENSG00000142515; TAA
SGGPLVCNG

SEQ ID NO: 34716 - protein, 9 aa, Homo sapiens
  Table A; Target 34716; HLA-B*38:01; KLK3; ENSG00000142515; TAA
SHSFPHPLY

SEQ ID NO: 34717 - protein, 11 aa, Homo sapiens
  Table A; Target 34717; HLA-A*03:01; KLK3; ENSG00000142515; TAA
SIEPEEFLTPK

SEQ ID NO: 34718 - protein, 11 aa, Homo sapiens
  Table A; Target 34718; HLA-A*03:02; KLK3; ENSG00000142515; TAA
SIEPEEFLTPK

SEQ ID NO: 34719 - protein, 11 aa, Homo sapiens
  Table A; Target 34719; HLA-A*11:01; KLK3; ENSG00000142515; TAA
SIEPEEFLTPK

SEQ ID NO: 34720 - protein, 11 aa, Homo sapiens
  Table A; Target 34720; HLA-A*31:01; KLK3; ENSG00000142515; TAA
SIEPEEFLTPK

SEQ ID NO: 34721 - protein, 11 aa, Homo sapiens
  Table A; Target 34721; HLA-A*68:02; KLK3; ENSG00000142515; TAA
SIEPEEFLTPK

SEQ ID NO: 34722 - protein, 11 aa, Homo sapiens
  Table A; Target 34722; HLA-B*27:02; KLK3; ENSG00000142515; TAA
SIEPEEFLTPK

SEQ ID NO: 34723 - protein, 11 aa, Homo sapiens
  Table A; Target 34723; HLA-A*02:03; KLK3; ENSG00000142515; TAA
SLFHPEDTGQV

SEQ ID NO: 34724 - protein, 11 aa, Homo sapiens
  Table A; Target 34724; HLA-A*02:07; KLK3; ENSG00000142515; TAA
SLFHPEDTGQV

SEQ ID NO: 34725 - protein, 11 aa, Homo sapiens
  Table A; Target 34725; HLA-A*68:02; KLK3; ENSG00000142515; TAA
SLFHPEDTGQV

SEQ ID NO: 34726 - protein, 9 aa, Homo sapiens
  Table A; Target 34726; HLA-A*31:01; KLK3; ENSG00000142515; TAA
SLLKNRFLR

SEQ ID NO: 34727 - protein, 8 aa, Homo sapiens
  Table A; Target 34727; HLA-B*08:01; KLK3; ENSG00000142515; TAA
SLYTKVVH

SEQ ID NO: 34728 - protein, 9 aa, Homo sapiens
  Table A; Target 34728; HLA-A*01:01; KLK3; ENSG00000142515; TAA
SLYTKVVHY

SEQ ID NO: 34729 - protein, 9 aa, Homo sapiens
  Table A; Target 34729; HLA-A*02:01; KLK3; ENSG00000142515; TAA
SLYTKVVHY

SEQ ID NO: 34730 - protein, 9 aa, Homo sapiens
  Table A; Target 34730; HLA-A*02:03; KLK3; ENSG00000142515; TAA
SLYTKVVHY

SEQ ID NO: 34731 - protein, 9 aa, Homo sapiens
  Table A; Target 34731; HLA-A*02:04; KLK3; ENSG00000142515; TAA
SLYTKVVHY

SEQ ID NO: 34732 - protein, 9 aa, Homo sapiens
  Table A; Target 34732; HLA-A*03:01; KLK3; ENSG00000142515; TAA
SLYTKVVHY

SEQ ID NO: 34733 - protein, 9 aa, Homo sapiens
  Table A; Target 34733; HLA-A*03:02; KLK3; ENSG00000142515; TAA
SLYTKVVHY

SEQ ID NO: 34734 - protein, 9 aa, Homo sapiens
  Table A; Target 34734; HLA-A*11:01; KLK3; ENSG00000142515; TAA
SLYTKVVHY

SEQ ID NO: 34735 - protein, 9 aa, Homo sapiens
  Table A; Target 34735; HLA-A*25:01; KLK3; ENSG00000142515; TAA
SLYTKVVHY

SEQ ID NO: 34736 - protein, 9 aa, Homo sapiens
  Table A; Target 34736; HLA-A*26:01; KLK3; ENSG00000142515; TAA
SLYTKVVHY

SEQ ID NO: 34737 - protein, 9 aa, Homo sapiens
  Table A; Target 34737; HLA-A*29:02; KLK3; ENSG00000142515; TAA
SLYTKVVHY

SEQ ID NO: 34738 - protein, 9 aa, Homo sapiens
  Table A; Target 34738; HLA-A*30:02; KLK3; ENSG00000142515; TAA
SLYTKVVHY

SEQ ID NO: 34739 - protein, 9 aa, Homo sapiens
  Table A; Target 34739; HLA-A*31:01; KLK3; ENSG00000142515; TAA
SLYTKVVHY

SEQ ID NO: 34740 - protein, 9 aa, Homo sapiens
  Table A; Target 34740; HLA-A*32:01; KLK3; ENSG00000142515; TAA
SLYTKVVHY

SEQ ID NO: 34741 - protein, 9 aa, Homo sapiens
  Table A; Target 34741; HLA-B*08:01; KLK3; ENSG00000142515; TAA
SLYTKVVHY

SEQ ID NO: 34742 - protein, 9 aa, Homo sapiens
  Table A; Target 34742; HLA-B*13:02; KLK3; ENSG00000142515; TAA
SLYTKVVHY

SEQ ID NO: 34743 - protein, 9 aa, Homo sapiens
  Table A; Target 34743; HLA-B*15:01; KLK3; ENSG00000142515; TAA
SLYTKVVHY

SEQ ID NO: 34744 - protein, 9 aa, Homo sapiens
  Table A; Target 34744; HLA-B*15:03; KLK3; ENSG00000142515; TAA
SLYTKVVHY

SEQ ID NO: 34745 - protein, 9 aa, Homo sapiens
  Table A; Target 34745; HLA-B*18:01; KLK3; ENSG00000142515; TAA
SLYTKVVHY

SEQ ID NO: 34746 - protein, 9 aa, Homo sapiens
  Table A; Target 34746; HLA-B*35:01; KLK3; ENSG00000142515; TAA
SLYTKVVHY

SEQ ID NO: 34747 - protein, 9 aa, Homo sapiens
  Table A; Target 34747; HLA-B*37:01; KLK3; ENSG00000142515; TAA
SLYTKVVHY

SEQ ID NO: 34748 - protein, 9 aa, Homo sapiens
  Table A; Target 34748; HLA-B*44:03; KLK3; ENSG00000142515; TAA
SLYTKVVHY

SEQ ID NO: 34749 - protein, 9 aa, Homo sapiens
  Table A; Target 34749; HLA-B*46:01; KLK3; ENSG00000142515; TAA
SLYTKVVHY

SEQ ID NO: 34750 - protein, 9 aa, Homo sapiens
  Table A; Target 34750; HLA-C*02:02; KLK3; ENSG00000142515; TAA
SLYTKVVHY

SEQ ID NO: 34751 - protein, 9 aa, Homo sapiens
  Table A; Target 34751; HLA-C*07:01; KLK3; ENSG00000142515; TAA
SLYTKVVHY

SEQ ID NO: 34752 - protein, 9 aa, Homo sapiens
  Table A; Target 34752; HLA-C*07:04; KLK3; ENSG00000142515; TAA
SLYTKVVHY

SEQ ID NO: 34753 - protein, 9 aa, Homo sapiens
  Table A; Target 34753; HLA-C*12:03; KLK3; ENSG00000142515; TAA
SLYTKVVHY

SEQ ID NO: 34754 - protein, 9 aa, Homo sapiens
  Table A; Target 34754; HLA-C*14:02; KLK3; ENSG00000142515; TAA
SLYTKVVHY

SEQ ID NO: 34755 - protein, 9 aa, Homo sapiens
  Table A; Target 34755; HLA-C*16:01; KLK3; ENSG00000142515; TAA
SLYTKVVHY

SEQ ID NO: 34756 - protein, 9 aa, Homo sapiens
  Table A; Target 34756; HLA-C*16:02; KLK3; ENSG00000142515; TAA
SLYTKVVHY

SEQ ID NO: 34757 - protein, 9 aa, Homo sapiens
  Table A; Target 34757; HLA-C*16:04; KLK3; ENSG00000142515; TAA
SLYTKVVHY

SEQ ID NO: 34758 - protein, 10 aa, Homo sapiens
  Table A; Target 34758; HLA-A*03:01; KLK3; ENSG00000142515; TAA
SLYTKVVHYR

SEQ ID NO: 34759 - protein, 10 aa, Homo sapiens
  Table A; Target 34759; HLA-A*31:01; KLK3; ENSG00000142515; TAA
SLYTKVVHYR

SEQ ID NO: 34760 - protein, 9 aa, Homo sapiens
  Table A; Target 34760; HLA-B*13:02; KLK3; ENSG00000142515; TAA
SQPWQVLVA

SEQ ID NO: 34761 - protein, 11 aa, Homo sapiens
  Table A; Target 34761; HLA-A*31:01; KLK3; ENSG00000142515; TAA
SQPWQVLVASR

SEQ ID NO: 34762 - protein, 9 aa, Homo sapiens
  Table A; Target 34762; HLA-A*33:03; KLK3; ENSG00000142515; TAA
SSHDLMLLR

SEQ ID NO: 34763 - protein, 9 aa, Homo sapiens
  Table A; Target 34763; HLA-C*07:06; KLK3; ENSG00000142515; TAA
SSHDLMLLR

SEQ ID NO: 34764 - protein, 10 aa, Homo sapiens
  Table A; Target 34764; HLA-A*25:01; KLK3; ENSG00000142515; TAA
SVILLGRHSL

SEQ ID NO: 34765 - protein, 10 aa, Homo sapiens
  Table A; Target 34765; HLA-B*07:02; KLK3; ENSG00000142515; TAA
SVILLGRHSL

SEQ ID NO: 34766 - protein, 11 aa, Homo sapiens
  Table A; Target 34766; HLA-B*57:01; KLK3; ENSG00000142515; TAA
SVILLGRHSLF

SEQ ID NO: 34767 - protein, 9 aa, Homo sapiens
  Table A; Target 34767; HLA-A*03:02; KLK3; ENSG00000142515; TAA
TAAHCIRNK

SEQ ID NO: 34768 - protein, 9 aa, Homo sapiens
  Table A; Target 34768; HLA-A*68:01; KLK3; ENSG00000142515; TAA
TAAHCIRNK

SEQ ID NO: 34769 - protein, 9 aa, Homo sapiens
  Table A; Target 34769; HLA-C*06:02; KLK3; ENSG00000142515; TAA
TAAHCIRNK

SEQ ID NO: 34770 - protein, 10 aa, Homo sapiens
  Table A; Target 34770; HLA-C*04:01; KLK3; ENSG00000142515; TAA
TCSGDSGGPL

SEQ ID NO: 34771 - protein, 9 aa, Homo sapiens
  Table A; Target 34771; HLA-A*30:01; KLK3; ENSG00000142515; TAA
TDAVKVMDL

SEQ ID NO: 34772 - protein, 9 aa, Homo sapiens
  Table A; Target 34772; HLA-B*08:01; KLK3; ENSG00000142515; TAA
TDAVKVMDL

SEQ ID NO: 34773 - protein, 9 aa, Homo sapiens
  Table A; Target 34773; HLA-B*37:01; KLK3; ENSG00000142515; TAA
TDAVKVMDL

SEQ ID NO: 34774 - protein, 9 aa, Homo sapiens
  Table A; Target 34774; HLA-B*40:01; KLK3; ENSG00000142515; TAA
TDAVKVMDL

SEQ ID NO: 34775 - protein, 9 aa, Homo sapiens
  Table A; Target 34775; HLA-B*40:02; KLK3; ENSG00000142515; TAA
TDAVKVMDL

SEQ ID NO: 34776 - protein, 9 aa, Homo sapiens
  Table A; Target 34776; HLA-C*06:02; KLK3; ENSG00000142515; TAA
TDAVKVMDL

SEQ ID NO: 34777 - protein, 9 aa, Homo sapiens
  Table A; Target 34777; HLA-C*07:02; KLK3; ENSG00000142515; TAA
TDAVKVMDL

SEQ ID NO: 34778 - protein, 9 aa, Homo sapiens
  Table A; Target 34778; HLA-C*12:03; KLK3; ENSG00000142515; TAA
TDAVKVMDL

SEQ ID NO: 34779 - protein, 9 aa, Homo sapiens
  Table A; Target 34779; HLA-B*27:05; KLK3; ENSG00000142515; TAA
TGQVFQVSH

SEQ ID NO: 34780 - protein, 8 aa, Homo sapiens
  Table A; Target 34780; HLA-B*08:01; KLK3; ENSG00000142515; TAA
TPKKLQCV

SEQ ID NO: 34781 - protein, 11 aa, Homo sapiens
  Table A; Target 34781; HLA-C*07:01; KLK3; ENSG00000142515; TAA
TQEPALGTTCY

SEQ ID NO: 34782 - protein, 9 aa, Homo sapiens
  Table A; Target 34782; HLA-A*23:01; KLK3; ENSG00000142515; TAA
TWIGAAPLI

SEQ ID NO: 34783 - protein, 9 aa, Homo sapiens
  Table A; Target 34783; HLA-A*24:02; KLK3; ENSG00000142515; TAA
TWIGAAPLI

SEQ ID NO: 34784 - protein, 9 aa, Homo sapiens
  Table A; Target 34784; HLA-C*06:02; KLK3; ENSG00000142515; TAA
TWIGAAPLI

SEQ ID NO: 34785 - protein, 10 aa, Homo sapiens
  Table A; Target 34785; HLA-A*23:01; KLK3; ENSG00000142515; TAA
TWIGAAPLIL

SEQ ID NO: 34786 - protein, 10 aa, Homo sapiens
  Table A; Target 34786; HLA-A*24:02; KLK3; ENSG00000142515; TAA
TWIGAAPLIL

SEQ ID NO: 34787 - protein, 10 aa, Homo sapiens
  Table A; Target 34787; HLA-C*06:02; KLK3; ENSG00000142515; TAA
TWIGAAPLIL

SEQ ID NO: 34788 - protein, 8 aa, Homo sapiens
  Table A; Target 34788; HLA-B*07:02; KLK3; ENSG00000142515; TAA
VASRGRAV

SEQ ID NO: 34789 - protein, 8 aa, Homo sapiens
  Table A; Target 34789; HLA-C*03:03; KLK3; ENSG00000142515; TAA
VASRGRAV

SEQ ID NO: 34790 - protein, 8 aa, Homo sapiens
  Table A; Target 34790; HLA-C*03:04; KLK3; ENSG00000142515; TAA
VASRGRAV

SEQ ID NO: 34791 - protein, 8 aa, Homo sapiens
  Table A; Target 34791; HLA-C*16:01; KLK3; ENSG00000142515; TAA
VASRGRAV

SEQ ID NO: 34792 - protein, 8 aa, Homo sapiens
  Table A; Target 34792; HLA-C*16:02; KLK3; ENSG00000142515; TAA
VASRGRAV

SEQ ID NO: 34793 - protein, 9 aa, Homo sapiens
  Table A; Target 34793; HLA-A*03:01; KLK3; ENSG00000142515; TAA
VCAQVHPQK

SEQ ID NO: 34794 - protein, 9 aa, Homo sapiens
  Table A; Target 34794; HLA-A*03:02; KLK3; ENSG00000142515; TAA
VCAQVHPQK

SEQ ID NO: 34795 - protein, 9 aa, Homo sapiens
  Table A; Target 34795; HLA-A*11:01; KLK3; ENSG00000142515; TAA
VCAQVHPQK

SEQ ID NO: 34796 - protein, 9 aa, Homo sapiens
  Table A; Target 34796; HLA-A*68:01; KLK3; ENSG00000142515; TAA
VCAQVHPQK

SEQ ID NO: 34797 - protein, 9 aa, Homo sapiens
  Table A; Target 34797; HLA-B*27:02; KLK3; ENSG00000142515; TAA
VCAQVHPQK

SEQ ID NO: 34798 - protein, 9 aa, Homo sapiens
  Table A; Target 34798; HLA-C*06:02; KLK3; ENSG00000142515; TAA
VCAQVHPQK

SEQ ID NO: 34799 - protein, 9 aa, Homo sapiens
  Table A; Target 34799; HLA-C*12:03; KLK3; ENSG00000142515; TAA
VCAQVHPQK

SEQ ID NO: 34800 - protein, 9 aa, Homo sapiens
  Table A; Target 34800; HLA-C*16:01; KLK3; ENSG00000142515; TAA
VCAQVHPQK

SEQ ID NO: 34801 - protein, 8 aa, Homo sapiens
  Table A; Target 34801; HLA-C*07:01; KLK3; ENSG00000142515; TAA
VDLHVISN

SEQ ID NO: 34802 - protein, 9 aa, Homo sapiens
  Table A; Target 34802; HLA-A*23:01; KLK3; ENSG00000142515; TAA
VFLTLSVTW

SEQ ID NO: 34803 - protein, 9 aa, Homo sapiens
  Table A; Target 34803; HLA-A*24:02; KLK3; ENSG00000142515; TAA
VFLTLSVTW

SEQ ID NO: 34804 - protein, 9 aa, Homo sapiens
  Table A; Target 34804; HLA-B*57:01; KLK3; ENSG00000142515; TAA
VFLTLSVTW

SEQ ID NO: 34805 - protein, 8 aa, Homo sapiens
  Table A; Target 34805; HLA-A*23:01; KLK3; ENSG00000142515; TAA
VFQVSHSF

SEQ ID NO: 34806 - protein, 8 aa, Homo sapiens
  Table A; Target 34806; HLA-A*24:02; KLK3; ENSG00000142515; TAA
VFQVSHSF

SEQ ID NO: 34807 - protein, 8 aa, Homo sapiens
  Table A; Target 34807; HLA-A*32:01; KLK3; ENSG00000142515; TAA
VFQVSHSF

SEQ ID NO: 34808 - protein, 8 aa, Homo sapiens
  Table A; Target 34808; HLA-B*37:01; KLK3; ENSG00000142515; TAA
VFQVSHSF

SEQ ID NO: 34809 - protein, 8 aa, Homo sapiens
  Table A; Target 34809; HLA-C*04:01; KLK3; ENSG00000142515; TAA
VFQVSHSF

SEQ ID NO: 34810 - protein, 8 aa, Homo sapiens
  Table A; Target 34810; HLA-C*14:02; KLK3; ENSG00000142515; TAA
VFQVSHSF

SEQ ID NO: 34811 - protein, 9 aa, Homo sapiens
  Table A; Target 34811; HLA-A*24:02; KLK3; ENSG00000142515; TAA
VHPQKVTKF

SEQ ID NO: 34812 - protein, 9 aa, Homo sapiens
  Table A; Target 34812; HLA-B*08:01; KLK3; ENSG00000142515; TAA
VILLGRHSL

SEQ ID NO: 34813 - protein, 9 aa, Homo sapiens
  Table A; Target 34813; HLA-C*07:01; KLK3; ENSG00000142515; TAA
VKVMDLPTQ

SEQ ID NO: 34814 - protein, 8 aa, Homo sapiens
  Table A; Target 34814; HLA-B*13:02; KLK3; ENSG00000142515; TAA
VLTAAHCI

SEQ ID NO: 34815 - protein, 10 aa, Homo sapiens
  Table A; Target 34815; HLA-A*02:03; KLK3; ENSG00000142515; TAA
VLVASRGRAV

SEQ ID NO: 34816 - protein, 11 aa, Homo sapiens
  Table A; Target 34816; HLA-A*02:04; KLK3; ENSG00000142515; TAA
VLVHPQWVLTA

SEQ ID NO: 34817 - protein, 9 aa, Homo sapiens
  Table A; Target 34817; HLA-C*04:01; KLK3; ENSG00000142515; TAA
VMDLPTQEP

SEQ ID NO: 34818 - protein, 9 aa, Homo sapiens
  Table A; Target 34818; HLA-C*05:01; KLK3; ENSG00000142515; TAA
VMDLPTQEP

SEQ ID NO: 34819 - protein, 11 aa, Homo sapiens
  Table A; Target 34819; HLA-A*02:01; KLK3; ENSG00000142515; TAA
VMDLPTQEPAL

SEQ ID NO: 34820 - protein, 11 aa, Homo sapiens
  Table A; Target 34820; HLA-A*02:07; KLK3; ENSG00000142515; TAA
VMDLPTQEPAL

SEQ ID NO: 34821 - protein, 11 aa, Homo sapiens
  Table A; Target 34821; HLA-B*38:01; KLK3; ENSG00000142515; TAA
VMDLPTQEPAL

SEQ ID NO: 34822 - protein, 11 aa, Homo sapiens
  Table A; Target 34822; HLA-B*39:01; KLK3; ENSG00000142515; TAA
VMDLPTQEPAL

SEQ ID NO: 34823 - protein, 11 aa, Homo sapiens
  Table A; Target 34823; HLA-C*04:01; KLK3; ENSG00000142515; TAA
VMDLPTQEPAL

SEQ ID NO: 34824 - protein, 11 aa, Homo sapiens
  Table A; Target 34824; HLA-C*05:01; KLK3; ENSG00000142515; TAA
VMDLPTQEPAL

SEQ ID NO: 34825 - protein, 8 aa, Homo sapiens
  Table A; Target 34825; HLA-A*23:01; KLK3; ENSG00000142515; TAA
VPVVFLTL

SEQ ID NO: 34826 - protein, 8 aa, Homo sapiens
  Table A; Target 34826; HLA-B*07:02; KLK3; ENSG00000142515; TAA
VPVVFLTL

SEQ ID NO: 34827 - protein, 8 aa, Homo sapiens
  Table A; Target 34827; HLA-B*08:01; KLK3; ENSG00000142515; TAA
VPVVFLTL

SEQ ID NO: 34828 - protein, 8 aa, Homo sapiens
  Table A; Target 34828; HLA-B*35:01; KLK3; ENSG00000142515; TAA
VPVVFLTL

SEQ ID NO: 34829 - protein, 8 aa, Homo sapiens
  Table A; Target 34829; HLA-B*35:03; KLK3; ENSG00000142515; TAA
VPVVFLTL

SEQ ID NO: 34830 - protein, 8 aa, Homo sapiens
  Table A; Target 34830; HLA-B*51:01; KLK3; ENSG00000142515; TAA
VPVVFLTL

SEQ ID NO: 34831 - protein, 8 aa, Homo sapiens
  Table A; Target 34831; HLA-B*54:01; KLK3; ENSG00000142515; TAA
VPVVFLTL

SEQ ID NO: 34832 - protein, 8 aa, Homo sapiens
  Table A; Target 34832; HLA-B*56:01; KLK3; ENSG00000142515; TAA
VPVVFLTL

SEQ ID NO: 34833 - protein, 8 aa, Homo sapiens
  Table A; Target 34833; HLA-C*07:02; KLK3; ENSG00000142515; TAA
VPVVFLTL

SEQ ID NO: 34834 - protein, 10 aa, Homo sapiens
  Table A; Target 34834; HLA-B*54:01; KLK3; ENSG00000142515; TAA
VPVVFLTLSV

SEQ ID NO: 34835 - protein, 10 aa, Homo sapiens
  Table A; Target 34835; HLA-B*56:01; KLK3; ENSG00000142515; TAA
VPVVFLTLSV

SEQ ID NO: 34836 - protein, 9 aa, Homo sapiens
  Table A; Target 34836; HLA-A*31:01; KLK3; ENSG00000142515; TAA
VSHSFPHPL

SEQ ID NO: 34837 - protein, 9 aa, Homo sapiens
  Table A; Target 34837; HLA-A*33:01; KLK3; ENSG00000142515; TAA
VSHSFPHPL

SEQ ID NO: 34838 - protein, 9 aa, Homo sapiens
  Table A; Target 34838; HLA-A*68:02; KLK3; ENSG00000142515; TAA
VSHSFPHPL

SEQ ID NO: 34839 - protein, 9 aa, Homo sapiens
  Table A; Target 34839; HLA-B*07:02; KLK3; ENSG00000142515; TAA
VSHSFPHPL

SEQ ID NO: 34840 - protein, 9 aa, Homo sapiens
  Table A; Target 34840; HLA-B*40:02; KLK3; ENSG00000142515; TAA
VSHSFPHPL

SEQ ID NO: 34841 - protein, 9 aa, Homo sapiens
  Table A; Target 34841; HLA-B*46:01; KLK3; ENSG00000142515; TAA
VSHSFPHPL

SEQ ID NO: 34842 - protein, 9 aa, Homo sapiens
  Table A; Target 34842; HLA-B*54:01; KLK3; ENSG00000142515; TAA
VSHSFPHPL

SEQ ID NO: 34843 - protein, 9 aa, Homo sapiens
  Table A; Target 34843; HLA-B*57:01; KLK3; ENSG00000142515; TAA
VSHSFPHPL

SEQ ID NO: 34844 - protein, 9 aa, Homo sapiens
  Table A; Target 34844; HLA-C*02:02; KLK3; ENSG00000142515; TAA
VSHSFPHPL

SEQ ID NO: 34845 - protein, 9 aa, Homo sapiens
  Table A; Target 34845; HLA-C*03:03; KLK3; ENSG00000142515; TAA
VSHSFPHPL

SEQ ID NO: 34846 - protein, 9 aa, Homo sapiens
  Table A; Target 34846; HLA-C*06:02; KLK3; ENSG00000142515; TAA
VSHSFPHPL

SEQ ID NO: 34847 - protein, 9 aa, Homo sapiens
  Table A; Target 34847; HLA-C*07:01; KLK3; ENSG00000142515; TAA
VSHSFPHPL

SEQ ID NO: 34848 - protein, 9 aa, Homo sapiens
  Table A; Target 34848; HLA-C*07:02; KLK3; ENSG00000142515; TAA
VSHSFPHPL

SEQ ID NO: 34849 - protein, 9 aa, Homo sapiens
  Table A; Target 34849; HLA-C*12:03; KLK3; ENSG00000142515; TAA
VSHSFPHPL

SEQ ID NO: 34850 - protein, 9 aa, Homo sapiens
  Table A; Target 34850; HLA-C*16:01; KLK3; ENSG00000142515; TAA
VSHSFPHPL

SEQ ID NO: 34851 - protein, 9 aa, Homo sapiens
  Table A; Target 34851; HLA-C*16:02; KLK3; ENSG00000142515; TAA
VSHSFPHPL

SEQ ID NO: 34852 - protein, 10 aa, Homo sapiens
  Table A; Target 34852; HLA-A*29:02; KLK3; ENSG00000142515; TAA
VSHSFPHPLY

SEQ ID NO: 34853 - protein, 10 aa, Homo sapiens
  Table A; Target 34853; HLA-B*57:01; KLK3; ENSG00000142515; TAA
VSHSFPHPLY

SEQ ID NO: 34854 - protein, 9 aa, Homo sapiens
  Table A; Target 34854; HLA-A*31:01; KLK3; ENSG00000142515; TAA
VTWIGAAPL

SEQ ID NO: 34855 - protein, 9 aa, Homo sapiens
  Table A; Target 34855; HLA-B*40:02; KLK3; ENSG00000142515; TAA
VTWIGAAPL

SEQ ID NO: 34856 - protein, 9 aa, Homo sapiens
  Table A; Target 34856; HLA-C*01:02; KLK3; ENSG00000142515; TAA
VTWIGAAPL

SEQ ID NO: 34857 - protein, 9 aa, Homo sapiens
  Table A; Target 34857; HLA-C*03:03; KLK3; ENSG00000142515; TAA
VTWIGAAPL

SEQ ID NO: 34858 - protein, 9 aa, Homo sapiens
  Table A; Target 34858; HLA-C*03:04; KLK3; ENSG00000142515; TAA
VTWIGAAPL

SEQ ID NO: 34859 - protein, 9 aa, Homo sapiens
  Table A; Target 34859; HLA-C*04:01; KLK3; ENSG00000142515; TAA
VTWIGAAPL

SEQ ID NO: 34860 - protein, 9 aa, Homo sapiens
  Table A; Target 34860; HLA-C*06:02; KLK3; ENSG00000142515; TAA
VTWIGAAPL

SEQ ID NO: 34861 - protein, 8 aa, Homo sapiens
  Table A; Target 34861; HLA-B*51:01; KLK3; ENSG00000142515; TAA
VVFLTLSV

SEQ ID NO: 34862 - protein, 10 aa, Homo sapiens
  Table A; Target 34862; HLA-B*44:02; KLK3; ENSG00000142515; TAA
VVFLTLSVTW

SEQ ID NO: 34863 - protein, 10 aa, Homo sapiens
  Table A; Target 34863; HLA-B*57:01; KLK3; ENSG00000142515; TAA
VVFLTLSVTW

SEQ ID NO: 34864 - protein, 9 aa, Homo sapiens
  Table A; Target 34864; HLA-A*02:07; KLK3; ENSG00000142515; TAA
WVPVVFLTL

SEQ ID NO: 34865 - protein, 9 aa, Homo sapiens
  Table A; Target 34865; HLA-A*24:02; KLK3; ENSG00000142515; TAA
WVPVVFLTL

SEQ ID NO: 34866 - protein, 9 aa, Homo sapiens
  Table A; Target 34866; HLA-A*68:02; KLK3; ENSG00000142515; TAA
WVPVVFLTL

SEQ ID NO: 34867 - protein, 9 aa, Homo sapiens
  Table A; Target 34867; HLA-A*33:01; KLK3; ENSG00000142515; TAA
YDMSLLKNR

SEQ ID NO: 34868 - protein, 9 aa, Homo sapiens
  Table A; Target 34868; HLA-A*33:03; KLK3; ENSG00000142515; TAA
YDMSLLKNR

SEQ ID NO: 34869 - protein, 8 aa, Homo sapiens
  Table A; Target 34869; HLA-B*57:01; KLK3; ENSG00000142515; TAA
YTKVVHYR

SEQ ID NO: 34870 - protein, 8 aa, Homo sapiens
  Table A; Target 34870; HLA-C*04:01; KLK3; ENSG00000142515; TAA
YTKVVHYR

SEQ ID NO: 34871 - protein, 8 aa, Homo sapiens
  Table A; Target 34871; HLA-C*12:03; KLK3,KLK2; ENSG00000142515,ENSG00000167751; TAA,TAA
DSGGPLVC

SEQ ID NO: 34872 - protein, 9 aa, Homo sapiens
  Table A; Target 34872; HLA-A*68:02; KLK3,KLK2; ENSG00000142515,ENSG00000167751; TAA,TAA
DSSHDLMLL

SEQ ID NO: 34873 - protein, 10 aa, Homo sapiens
  Table A; Target 34873; HLA-C*07:06; KLK3,KLK2; ENSG00000142515,ENSG00000167751; TAA,TAA
DSSHDLMLLR

SEQ ID NO: 34874 - protein, 8 aa, Homo sapiens
  Table A; Target 34874; HLA-B*56:01; KLK3,KLK2; ENSG00000142515,ENSG00000167751; TAA,TAA
EPALGTTC

SEQ ID NO: 34875 - protein, 9 aa, Homo sapiens
  Table A; Target 34875; HLA-A*25:01; KLK3,KLK2; ENSG00000142515,ENSG00000167751; TAA,TAA
EPALGTTCY

SEQ ID NO: 34876 - protein, 9 aa, Homo sapiens
  Table A; Target 34876; HLA-A*26:01; KLK3,KLK2; ENSG00000142515,ENSG00000167751; TAA,TAA
EPALGTTCY

SEQ ID NO: 34877 - protein, 9 aa, Homo sapiens
  Table A; Target 34877; HLA-A*68:01; KLK3,KLK2; ENSG00000142515,ENSG00000167751; TAA,TAA
EPALGTTCY

SEQ ID NO: 34878 - protein, 9 aa, Homo sapiens
  Table A; Target 34878; HLA-B*35:01; KLK3,KLK2; ENSG00000142515,ENSG00000167751; TAA,TAA
EPALGTTCY

SEQ ID NO: 34879 - protein, 9 aa, Homo sapiens
  Table A; Target 34879; HLA-B*55:01; KLK3,KLK2; ENSG00000142515,ENSG00000167751; TAA,TAA
EPALGTTCY

SEQ ID NO: 34880 - protein, 8 aa, Homo sapiens
  Table A; Target 34880; HLA-B*37:01; KLK3,KLK2; ENSG00000142515,ENSG00000167751; TAA,TAA
GDSGGPLV

SEQ ID NO: 34881 - protein, 9 aa, Homo sapiens
  Table A; Target 34881; HLA-B*44:02; KLK3,KLK2; ENSG00000142515,ENSG00000167751; TAA,TAA
GGVLVHPQW

SEQ ID NO: 34882 - protein, 9 aa, Homo sapiens
  Table A; Target 34882; HLA-B*44:03; KLK3,KLK2; ENSG00000142515,ENSG00000167751; TAA,TAA
GGVLVHPQW

SEQ ID NO: 34883 - protein, 9 aa, Homo sapiens
  Table A; Target 34883; HLA-B*57:01; KLK3,KLK2; ENSG00000142515,ENSG00000167751; TAA,TAA
GGVLVHPQW

SEQ ID NO: 34884 - protein, 9 aa, Homo sapiens
  Table A; Target 34884; HLA-B*58:01; KLK3,KLK2; ENSG00000142515,ENSG00000167751; TAA,TAA
GGVLVHPQW

SEQ ID NO: 34885 - protein, 9 aa, Homo sapiens
  Table A; Target 34885; HLA-C*16:04; KLK3,KLK2; ENSG00000142515,ENSG00000167751; TAA,TAA
GGVLVHPQW

SEQ ID NO: 34886 - protein, 9 aa, Homo sapiens
  Table A; Target 34886; HLA-B*07:02; KLK3,KLK2; ENSG00000142515,ENSG00000167751; TAA,TAA
GPLVCNGVL

SEQ ID NO: 34887 - protein, 9 aa, Homo sapiens
  Table A; Target 34887; HLA-C*07:02; KLK3,KLK2; ENSG00000142515,ENSG00000167751; TAA,TAA
GPLVCNGVL

SEQ ID NO: 34888 - protein, 8 aa, Homo sapiens
  Table A; Target 34888; HLA-B*58:01; KLK3,KLK2; ENSG00000142515,ENSG00000167751; TAA,TAA
GSIEPEEF

SEQ ID NO: 34889 - protein, 8 aa, Homo sapiens
  Table A; Target 34889; HLA-C*05:01; KLK3,KLK2; ENSG00000142515,ENSG00000167751; TAA,TAA
GSIEPEEF

SEQ ID NO: 34890 - protein, 9 aa, Homo sapiens
  Table A; Target 34890; HLA-A*25:01; KLK3,KLK2; ENSG00000142515,ENSG00000167751; TAA,TAA
GTTCYASGW

SEQ ID NO: 34891 - protein, 9 aa, Homo sapiens
  Table A; Target 34891; HLA-B*58:01; KLK3,KLK2; ENSG00000142515,ENSG00000167751; TAA,TAA
GTTCYASGW

SEQ ID NO: 34892 - protein, 9 aa, Homo sapiens
  Table A; Target 34892; HLA-A*02:04; KLK3,KLK2; ENSG00000142515,ENSG00000167751; TAA,TAA
GVLQGITSW

SEQ ID NO: 34893 - protein, 9 aa, Homo sapiens
  Table A; Target 34893; HLA-A*23:01; KLK3,KLK2; ENSG00000142515,ENSG00000167751; TAA,TAA
GVLQGITSW

SEQ ID NO: 34894 - protein, 9 aa, Homo sapiens
  Table A; Target 34894; HLA-A*25:01; KLK3,KLK2; ENSG00000142515,ENSG00000167751; TAA,TAA
GVLQGITSW

SEQ ID NO: 34895 - protein, 9 aa, Homo sapiens
  Table A; Target 34895; HLA-A*26:01; KLK3,KLK2; ENSG00000142515,ENSG00000167751; TAA,TAA
GVLQGITSW

SEQ ID NO: 34896 - protein, 9 aa, Homo sapiens
  Table A; Target 34896; HLA-A*29:02; KLK3,KLK2; ENSG00000142515,ENSG00000167751; TAA,TAA
GVLQGITSW

SEQ ID NO: 34897 - protein, 9 aa, Homo sapiens
  Table A; Target 34897; HLA-A*30:02; KLK3,KLK2; ENSG00000142515,ENSG00000167751; TAA,TAA
GVLQGITSW

SEQ ID NO: 34898 - protein, 9 aa, Homo sapiens
  Table A; Target 34898; HLA-A*31:01; KLK3,KLK2; ENSG00000142515,ENSG00000167751; TAA,TAA
GVLQGITSW

SEQ ID NO: 34899 - protein, 9 aa, Homo sapiens
  Table A; Target 34899; HLA-A*32:01; KLK3,KLK2; ENSG00000142515,ENSG00000167751; TAA,TAA
GVLQGITSW

SEQ ID NO: 34900 - protein, 9 aa, Homo sapiens
  Table A; Target 34900; HLA-B*15:01; KLK3,KLK2; ENSG00000142515,ENSG00000167751; TAA,TAA
GVLQGITSW

SEQ ID NO: 34901 - protein, 9 aa, Homo sapiens
  Table A; Target 34901; HLA-B*15:03; KLK3,KLK2; ENSG00000142515,ENSG00000167751; TAA,TAA
GVLQGITSW

SEQ ID NO: 34902 - protein, 9 aa, Homo sapiens
  Table A; Target 34902; HLA-B*27:02; KLK3,KLK2; ENSG00000142515,ENSG00000167751; TAA,TAA
GVLQGITSW

SEQ ID NO: 34903 - protein, 9 aa, Homo sapiens
  Table A; Target 34903; HLA-B*44:02; KLK3,KLK2; ENSG00000142515,ENSG00000167751; TAA,TAA
GVLQGITSW

SEQ ID NO: 34904 - protein, 9 aa, Homo sapiens
  Table A; Target 34904; HLA-B*44:03; KLK3,KLK2; ENSG00000142515,ENSG00000167751; TAA,TAA
GVLQGITSW

SEQ ID NO: 34905 - protein, 9 aa, Homo sapiens
  Table A; Target 34905; HLA-B*46:01; KLK3,KLK2; ENSG00000142515,ENSG00000167751; TAA,TAA
GVLQGITSW

SEQ ID NO: 34906 - protein, 9 aa, Homo sapiens
  Table A; Target 34906; HLA-B*57:01; KLK3,KLK2; ENSG00000142515,ENSG00000167751; TAA,TAA
GVLQGITSW

SEQ ID NO: 34907 - protein, 9 aa, Homo sapiens
  Table A; Target 34907; HLA-B*58:01; KLK3,KLK2; ENSG00000142515,ENSG00000167751; TAA,TAA
GVLQGITSW

SEQ ID NO: 34908 - protein, 9 aa, Homo sapiens
  Table A; Target 34908; HLA-C*07:04; KLK3,KLK2; ENSG00000142515,ENSG00000167751; TAA,TAA
GVLQGITSW

SEQ ID NO: 34909 - protein, 9 aa, Homo sapiens
  Table A; Target 34909; HLA-C*16:04; KLK3,KLK2; ENSG00000142515,ENSG00000167751; TAA,TAA
GVLQGITSW

SEQ ID NO: 34910 - protein, 8 aa, Homo sapiens
  Table A; Target 34910; HLA-B*54:01; KLK3,KLK2; ENSG00000142515,ENSG00000167751; TAA,TAA
HPQWVLTA

SEQ ID NO: 34911 - protein, 8 aa, Homo sapiens
  Table A; Target 34911; HLA-B*56:01; KLK3,KLK2; ENSG00000142515,ENSG00000167751; TAA,TAA
HPQWVLTA

SEQ ID NO: 34912 - protein, 9 aa, Homo sapiens
  Table A; Target 34912; HLA-B*54:01; KLK3,KLK2; ENSG00000142515,ENSG00000167751; TAA,TAA
HPQWVLTAA

SEQ ID NO: 34913 - protein, 9 aa, Homo sapiens
  Table A; Target 34913; HLA-B*55:01; KLK3,KLK2; ENSG00000142515,ENSG00000167751; TAA,TAA
HPQWVLTAA

SEQ ID NO: 34914 - protein, 9 aa, Homo sapiens
  Table A; Target 34914; HLA-B*56:01; KLK3,KLK2; ENSG00000142515,ENSG00000167751; TAA,TAA
HPQWVLTAA

SEQ ID NO: 34915 - protein, 8 aa, Homo sapiens
  Table A; Target 34915; HLA-A*29:02; KLK3,KLK2; ENSG00000142515,ENSG00000167751; TAA,TAA
HSFPHPLY

SEQ ID NO: 34916 - protein, 8 aa, Homo sapiens
  Table A; Target 34916; HLA-B*57:01; KLK3,KLK2; ENSG00000142515,ENSG00000167751; TAA,TAA
HSFPHPLY

SEQ ID NO: 34917 - protein, 8 aa, Homo sapiens
  Table A; Target 34917; HLA-C*02:02; KLK3,KLK2; ENSG00000142515,ENSG00000167751; TAA,TAA
HSFPHPLY

SEQ ID NO: 34918 - protein, 8 aa, Homo sapiens
  Table A; Target 34918; HLA-C*07:01; KLK3,KLK2; ENSG00000142515,ENSG00000167751; TAA,TAA
HSFPHPLY

SEQ ID NO: 34919 - protein, 8 aa, Homo sapiens
  Table A; Target 34919; HLA-C*12:03; KLK3,KLK2; ENSG00000142515,ENSG00000167751; TAA,TAA
HSFPHPLY

SEQ ID NO: 34920 - protein, 9 aa, Homo sapiens
  Table A; Target 34920; HLA-A*03:02; KLK3,KLK2; ENSG00000142515,ENSG00000167751; TAA,TAA
IVGGWECEK

SEQ ID NO: 34921 - protein, 9 aa, Homo sapiens
  Table A; Target 34921; HLA-A*11:01; KLK3,KLK2; ENSG00000142515,ENSG00000167751; TAA,TAA
IVGGWECEK

SEQ ID NO: 34922 - protein, 8 aa, Homo sapiens
  Table A; Target 34922; HLA-B*07:02; KLK3,KLK2; ENSG00000142515,ENSG00000167751; TAA,TAA
LPTQEPAL

SEQ ID NO: 34923 - protein, 8 aa, Homo sapiens
  Table A; Target 34923; HLA-B*08:01; KLK3,KLK2; ENSG00000142515,ENSG00000167751; TAA,TAA
LPTQEPAL

SEQ ID NO: 34924 - protein, 8 aa, Homo sapiens
  Table A; Target 34924; HLA-B*35:01; KLK3,KLK2; ENSG00000142515,ENSG00000167751; TAA,TAA
LPTQEPAL

SEQ ID NO: 34925 - protein, 8 aa, Homo sapiens
  Table A; Target 34925; HLA-B*35:03; KLK3,KLK2; ENSG00000142515,ENSG00000167751; TAA,TAA
LPTQEPAL

SEQ ID NO: 34926 - protein, 8 aa, Homo sapiens
  Table A; Target 34926; HLA-B*51:01; KLK3,KLK2; ENSG00000142515,ENSG00000167751; TAA,TAA
LPTQEPAL

SEQ ID NO: 34927 - protein, 8 aa, Homo sapiens
  Table A; Target 34927; HLA-B*54:01; KLK3,KLK2; ENSG00000142515,ENSG00000167751; TAA,TAA
LPTQEPAL

SEQ ID NO: 34928 - protein, 8 aa, Homo sapiens
  Table A; Target 34928; HLA-B*55:01; KLK3,KLK2; ENSG00000142515,ENSG00000167751; TAA,TAA
LPTQEPAL

SEQ ID NO: 34929 - protein, 8 aa, Homo sapiens
  Table A; Target 34929; HLA-B*56:01; KLK3,KLK2; ENSG00000142515,ENSG00000167751; TAA,TAA
LPTQEPAL

SEQ ID NO: 34930 - protein, 8 aa, Homo sapiens
  Table A; Target 34930; HLA-C*03:03; KLK3,KLK2; ENSG00000142515,ENSG00000167751; TAA,TAA
LPTQEPAL

SEQ ID NO: 34931 - protein, 8 aa, Homo sapiens
  Table A; Target 34931; HLA-C*03:04; KLK3,KLK2; ENSG00000142515,ENSG00000167751; TAA,TAA
LPTQEPAL

SEQ ID NO: 34932 - protein, 8 aa, Homo sapiens
  Table A; Target 34932; HLA-C*05:01; KLK3,KLK2; ENSG00000142515,ENSG00000167751; TAA,TAA
LPTQEPAL

SEQ ID NO: 34933 - protein, 8 aa, Homo sapiens
  Table A; Target 34933; HLA-C*07:02; KLK3,KLK2; ENSG00000142515,ENSG00000167751; TAA,TAA
LPTQEPAL

SEQ ID NO: 34934 - protein, 8 aa, Homo sapiens
  Table A; Target 34934; HLA-C*16:01; KLK3,KLK2; ENSG00000142515,ENSG00000167751; TAA,TAA
LPTQEPAL

SEQ ID NO: 34935 - protein, 9 aa, Homo sapiens
  Table A; Target 34935; HLA-B*54:01; KLK3,KLK2; ENSG00000142515,ENSG00000167751; TAA,TAA
MLLRLSEPA

SEQ ID NO: 34936 - protein, 10 aa, Homo sapiens
  Table A; Target 34936; HLA-A*25:01; KLK3,KLK2; ENSG00000142515,ENSG00000167751; TAA,TAA
NGVLQGITSW

SEQ ID NO: 34937 - protein, 10 aa, Homo sapiens
  Table A; Target 34937; HLA-B*44:02; KLK3,KLK2; ENSG00000142515,ENSG00000167751; TAA,TAA
NGVLQGITSW

SEQ ID NO: 34938 - protein, 10 aa, Homo sapiens
  Table A; Target 34938; HLA-B*58:01; KLK3,KLK2; ENSG00000142515,ENSG00000167751; TAA,TAA
NGVLQGITSW

SEQ ID NO: 34939 - protein, 10 aa, Homo sapiens
  Table A; Target 34939; HLA-C*16:04; KLK3,KLK2; ENSG00000142515,ENSG00000167751; TAA,TAA
NGVLQGITSW

SEQ ID NO: 34940 - protein, 8 aa, Homo sapiens
  Table A; Target 34940; HLA-B*39:01; KLK3,KLK2; ENSG00000142515,ENSG00000167751; TAA,TAA
PALGTTCY

SEQ ID NO: 34941 - protein, 8 aa, Homo sapiens
  Table A; Target 34941; HLA-C*07:01; KLK3,KLK2; ENSG00000142515,ENSG00000167751; TAA,TAA
PALGTTCY

SEQ ID NO: 34942 - protein, 9 aa, Homo sapiens
  Table A; Target 34942; HLA-C*06:02; KLK3,KLK2; ENSG00000142515,ENSG00000167751; TAA,TAA
PALGTTCYA

SEQ ID NO: 34943 - protein, 9 aa, Homo sapiens
  Table A; Target 34943; HLA-C*07:01; KLK3,KLK2; ENSG00000142515,ENSG00000167751; TAA,TAA
PALGTTCYA

SEQ ID NO: 34944 - protein, 9 aa, Homo sapiens
  Table A; Target 34944; HLA-A*30:01; KLK3,KLK2; ENSG00000142515,ENSG00000167751; TAA,TAA
QEPALGTTC

SEQ ID NO: 34945 - protein, 9 aa, Homo sapiens
  Table A; Target 34945; HLA-B*49:01; KLK3,KLK2; ENSG00000142515,ENSG00000167751; TAA,TAA
QEPALGTTC

SEQ ID NO: 34946 - protein, 10 aa, Homo sapiens
  Table A; Target 34946; HLA-A*26:01; KLK3,KLK2; ENSG00000142515,ENSG00000167751; TAA,TAA
QEPALGTTCY

SEQ ID NO: 34947 - protein, 10 aa, Homo sapiens
  Table A; Target 34947; HLA-A*30:01; KLK3,KLK2; ENSG00000142515,ENSG00000167751; TAA,TAA
QEPALGTTCY

SEQ ID NO: 34948 - protein, 10 aa, Homo sapiens
  Table A; Target 34948; HLA-A*30:02; KLK3,KLK2; ENSG00000142515,ENSG00000167751; TAA,TAA
QEPALGTTCY

SEQ ID NO: 34949 - protein, 10 aa, Homo sapiens
  Table A; Target 34949; HLA-B*15:01; KLK3,KLK2; ENSG00000142515,ENSG00000167751; TAA,TAA
QEPALGTTCY

SEQ ID NO: 34950 - protein, 10 aa, Homo sapiens
  Table A; Target 34950; HLA-B*15:03; KLK3,KLK2; ENSG00000142515,ENSG00000167751; TAA,TAA
QEPALGTTCY

SEQ ID NO: 34951 - protein, 10 aa, Homo sapiens
  Table A; Target 34951; HLA-B*18:01; KLK3,KLK2; ENSG00000142515,ENSG00000167751; TAA,TAA
QEPALGTTCY

SEQ ID NO: 34952 - protein, 10 aa, Homo sapiens
  Table A; Target 34952; HLA-B*40:01; KLK3,KLK2; ENSG00000142515,ENSG00000167751; TAA,TAA
QEPALGTTCY

SEQ ID NO: 34953 - protein, 10 aa, Homo sapiens
  Table A; Target 34953; HLA-B*44:02; KLK3,KLK2; ENSG00000142515,ENSG00000167751; TAA,TAA
QEPALGTTCY

SEQ ID NO: 34954 - protein, 10 aa, Homo sapiens
  Table A; Target 34954; HLA-B*44:03; KLK3,KLK2; ENSG00000142515,ENSG00000167751; TAA,TAA
QEPALGTTCY

SEQ ID NO: 34955 - protein, 10 aa, Homo sapiens
  Table A; Target 34955; HLA-C*07:04; KLK3,KLK2; ENSG00000142515,ENSG00000167751; TAA,TAA
QEPALGTTCY

SEQ ID NO: 34956 - protein, 10 aa, Homo sapiens
  Table A; Target 34956; HLA-C*16:04; KLK3,KLK2; ENSG00000142515,ENSG00000167751; TAA,TAA
QEPALGTTCY

SEQ ID NO: 34957 - protein, 9 aa, Homo sapiens
  Table A; Target 34957; HLA-C*06:02; KLK3,KLK2; ENSG00000142515,ENSG00000167751; TAA,TAA
SGGPLVCNG

SEQ ID NO: 34958 - protein, 9 aa, Homo sapiens
  Table A; Target 34958; HLA-B*38:01; KLK3,KLK2; ENSG00000142515,ENSG00000167751; TAA,TAA
SHDLMLLRL

SEQ ID NO: 34959 - protein, 9 aa, Homo sapiens
  Table A; Target 34959; HLA-A*29:02; KLK3,KLK2; ENSG00000142515,ENSG00000167751; TAA,TAA
SHSFPHPLY

SEQ ID NO: 34960 - protein, 9 aa, Homo sapiens
  Table A; Target 34960; HLA-A*31:01; KLK3,KLK2; ENSG00000142515,ENSG00000167751; TAA,TAA
SSHDLMLLR

SEQ ID NO: 34961 - protein, 9 aa, Homo sapiens
  Table A; Target 34961; HLA-A*33:01; KLK3,KLK2; ENSG00000142515,ENSG00000167751; TAA,TAA
SSHDLMLLR

SEQ ID NO: 34962 - protein, 9 aa, Homo sapiens
  Table A; Target 34962; HLA-B*57:01; KLK3,KLK2; ENSG00000142515,ENSG00000167751; TAA,TAA
SSHDLMLLR

SEQ ID NO: 34963 - protein, 10 aa, Homo sapiens
  Table A; Target 34963; HLA-B*38:01; KLK3,KLK2; ENSG00000142515,ENSG00000167751; TAA,TAA
TQEPALGTTC

SEQ ID NO: 34964 - protein, 11 aa, Homo sapiens
  Table A; Target 34964; HLA-A*30:02; KLK3,KLK2; ENSG00000142515,ENSG00000167751; TAA,TAA
TQEPALGTTCY

SEQ ID NO: 34965 - protein, 11 aa, Homo sapiens
  Table A; Target 34965; HLA-B*15:01; KLK3,KLK2; ENSG00000142515,ENSG00000167751; TAA,TAA
TQEPALGTTCY

SEQ ID NO: 34966 - protein, 11 aa, Homo sapiens
  Table A; Target 34966; HLA-B*15:03; KLK3,KLK2; ENSG00000142515,ENSG00000167751; TAA,TAA
TQEPALGTTCY

SEQ ID NO: 34967 - protein, 11 aa, Homo sapiens
  Table A; Target 34967; HLA-B*27:05; KLK3,KLK2; ENSG00000142515,ENSG00000167751; TAA,TAA
TQEPALGTTCY

SEQ ID NO: 34968 - protein, 11 aa, Homo sapiens
  Table A; Target 34968; HLA-B*38:01; KLK3,KLK2; ENSG00000142515,ENSG00000167751; TAA,TAA
TQEPALGTTCY

SEQ ID NO: 34969 - protein, 11 aa, Homo sapiens
  Table A; Target 34969; HLA-B*39:01; KLK3,KLK2; ENSG00000142515,ENSG00000167751; TAA,TAA
TQEPALGTTCY

SEQ ID NO: 34970 - protein, 11 aa, Homo sapiens
  Table A; Target 34970; HLA-C*04:01; KLK3,KLK2; ENSG00000142515,ENSG00000167751; TAA,TAA
TQEPALGTTCY

SEQ ID NO: 34971 - protein, 11 aa, Homo sapiens
  Table A; Target 34971; HLA-C*07:04; KLK3,KLK2; ENSG00000142515,ENSG00000167751; TAA,TAA
TQEPALGTTCY

SEQ ID NO: 34972 - protein, 11 aa, Homo sapiens
  Table A; Target 34972; HLA-C*16:04; KLK3,KLK2; ENSG00000142515,ENSG00000167751; TAA,TAA
TQEPALGTTCY

SEQ ID NO: 34973 - protein, 8 aa, Homo sapiens
  Table A; Target 34973; HLA-A*23:01; KLK3,KLK2; ENSG00000142515,ENSG00000167751; TAA,TAA
VLQGITSW

SEQ ID NO: 34974 - protein, 8 aa, Homo sapiens
  Table A; Target 34974; HLA-A*32:01; KLK3,KLK2; ENSG00000142515,ENSG00000167751; TAA,TAA
VLQGITSW

SEQ ID NO: 34975 - protein, 8 aa, Homo sapiens
  Table A; Target 34975; HLA-B*15:01; KLK3,KLK2; ENSG00000142515,ENSG00000167751; TAA,TAA
VLQGITSW

SEQ ID NO: 34976 - protein, 8 aa, Homo sapiens
  Table A; Target 34976; HLA-B*58:01; KLK3,KLK2; ENSG00000142515,ENSG00000167751; TAA,TAA
VLQGITSW

SEQ ID NO: 34977 - protein, 9 aa, Homo sapiens
  Table A; Target 34977; HLA-C*03:04; KLK3,KLK2; ENSG00000142515,ENSG00000167751; TAA,TAA
VSHSFPHPL

SEQ ID NO: 34978 - protein, 10 aa, Homo sapiens
  Table A; Target 34978; HLA-A*01:01; KLK3,KLK2; ENSG00000142515,ENSG00000167751; TAA,TAA
VSHSFPHPLY

SEQ ID NO: 34979 - protein, 10 aa, Homo sapiens
  Table A; Target 34979; HLA-A*30:02; KLK3,KLK2; ENSG00000142515,ENSG00000167751; TAA,TAA
VSHSFPHPLY

SEQ ID NO: 34980 - protein, 8 aa, Homo sapiens
  Table A; Target 34980; HLA-A*31:01; KLK3,KLK2; ENSG00000142515,ENSG00000167751; TAA,TAA
YTKVVHYR

SEQ ID NO: 34981 - protein, 8 aa, Homo sapiens
  Table A; Target 34981; HLA-A*33:01; KLK3,KLK2; ENSG00000142515,ENSG00000167751; TAA,TAA
YTKVVHYR

SEQ ID NO: 34982 - protein, 8 aa, Homo sapiens
  Table A; Target 34982; HLA-A*33:03; KLK3,KLK2; ENSG00000142515,ENSG00000167751; TAA,TAA
YTKVVHYR

SEQ ID NO: 34983 - protein, 8 aa, Homo sapiens
  Table A; Target 34983; HLA-A*32:01; KLK3,KLK2,KLK4; ENSG00000142515,ENSG00000167751,ENSG00000167749; TAA,TAA,TAA
GVLVHPQW

SEQ ID NO: 34984 - protein, 8 aa, Homo sapiens
  Table A; Target 34984; HLA-B*57:01; KLK3,KLK2,KLK4; ENSG00000142515,ENSG00000167751,ENSG00000167749; TAA,TAA,TAA
GVLVHPQW

SEQ ID NO: 34985 - protein, 8 aa, Homo sapiens
  Table A; Target 34985; HLA-B*58:01; KLK3,KLK2,KLK4; ENSG00000142515,ENSG00000167751,ENSG00000167749; TAA,TAA,TAA
GVLVHPQW

SEQ ID NO: 34986 - protein, 9 aa, Homo sapiens
  Table A; Target 34986; HLA-A*02:01; KLK3,KLK2,KLK4; ENSG00000142515,ENSG00000167751,ENSG00000167749; TAA,TAA,TAA
VLVHPQWVL

SEQ ID NO: 34987 - protein, 9 aa, Homo sapiens
  Table A; Target 34987; HLA-A*02:04; KLK3,KLK2,KLK4; ENSG00000142515,ENSG00000167751,ENSG00000167749; TAA,TAA,TAA
VLVHPQWVL

SEQ ID NO: 34988 - protein, 9 aa, Homo sapiens
  Table A; Target 34988; HLA-A*02:07; KLK3,KLK2,KLK4; ENSG00000142515,ENSG00000167751,ENSG00000167749; TAA,TAA,TAA
VLVHPQWVL

SEQ ID NO: 34989 - protein, 9 aa, Homo sapiens
  Table A; Target 34989; HLA-A*24:02; KLK3,KLK2,KLK4; ENSG00000142515,ENSG00000167751,ENSG00000167749; TAA,TAA,TAA
VLVHPQWVL

SEQ ID NO: 34990 - protein, 9 aa, Homo sapiens
  Table A; Target 34990; HLA-A*23:01; KLK3,KLK4; ENSG00000142515,ENSG00000167749; TAA,TAA
VLVHPQWVL

SEQ ID NO: 34991 - protein, 9 aa, Homo sapiens
  Table A; Target 34991; HLA-A*30:02; KLK4; ENSG00000167749; TAA
AAHCFQNSY

SEQ ID NO: 34992 - protein, 9 aa, Homo sapiens
  Table A; Target 34992; HLA-A*32:01; KLK4; ENSG00000167749; TAA
AAHCFQNSY

SEQ ID NO: 34993 - protein, 9 aa, Homo sapiens
  Table A; Target 34993; HLA-B*15:01; KLK4; ENSG00000167749; TAA
AAHCFQNSY

SEQ ID NO: 34994 - protein, 9 aa, Homo sapiens
  Table A; Target 34994; HLA-B*15:03; KLK4; ENSG00000167749; TAA
AAHCFQNSY

SEQ ID NO: 34995 - protein, 9 aa, Homo sapiens
  Table A; Target 34995; HLA-B*46:01; KLK4; ENSG00000167749; TAA
AAHCFQNSY

SEQ ID NO: 34996 - protein, 9 aa, Homo sapiens
  Table A; Target 34996; HLA-B*58:01; KLK4; ENSG00000167749; TAA
AAHCFQNSY

SEQ ID NO: 34997 - protein, 9 aa, Homo sapiens
  Table A; Target 34997; HLA-C*02:02; KLK4; ENSG00000167749; TAA
AAHCFQNSY

SEQ ID NO: 34998 - protein, 9 aa, Homo sapiens
  Table A; Target 34998; HLA-C*16:01; KLK4; ENSG00000167749; TAA
AAHCFQNSY

SEQ ID NO: 34999 - protein, 9 aa, Homo sapiens
  Table A; Target 34999; HLA-C*16:02; KLK4; ENSG00000167749; TAA
AAHCFQNSY

SEQ ID NO: 35000 - protein, 9 aa, Homo sapiens
  Table A; Target 35000; HLA-C*16:04; KLK4; ENSG00000167749; TAA
AAHCFQNSY

SEQ ID NO: 35001 - protein, 9 aa, Homo sapiens
  Table A; Target 35001; HLA-B*35:03; KLK4; ENSG00000167749; TAA
AALVMENEL

SEQ ID NO: 35002 - protein, 9 aa, Homo sapiens
  Table A; Target 35002; HLA-B*40:01; KLK4; ENSG00000167749; TAA
AALVMENEL

SEQ ID NO: 35003 - protein, 9 aa, Homo sapiens
  Table A; Target 35003; HLA-B*46:01; KLK4; ENSG00000167749; TAA
AALVMENEL

SEQ ID NO: 35004 - protein, 9 aa, Homo sapiens
  Table A; Target 35004; HLA-B*58:01; KLK4; ENSG00000167749; TAA
AALVMENEL

SEQ ID NO: 35005 - protein, 9 aa, Homo sapiens
  Table A; Target 35005; HLA-C*01:02; KLK4; ENSG00000167749; TAA
AALVMENEL

SEQ ID NO: 35006 - protein, 9 aa, Homo sapiens
  Table A; Target 35006; HLA-C*03:03; KLK4; ENSG00000167749; TAA
AALVMENEL

SEQ ID NO: 35007 - protein, 9 aa, Homo sapiens
  Table A; Target 35007; HLA-C*03:04; KLK4; ENSG00000167749; TAA
AALVMENEL

SEQ ID NO: 35008 - protein, 9 aa, Homo sapiens
  Table A; Target 35008; HLA-C*05:01; KLK4; ENSG00000167749; TAA
AALVMENEL

SEQ ID NO: 35009 - protein, 9 aa, Homo sapiens
  Table A; Target 35009; HLA-C*14:02; KLK4; ENSG00000167749; TAA
AALVMENEL

SEQ ID NO: 35010 - protein, 9 aa, Homo sapiens
  Table A; Target 35010; HLA-C*16:01; KLK4; ENSG00000167749; TAA
AALVMENEL

SEQ ID NO: 35011 - protein, 9 aa, Homo sapiens
  Table A; Target 35011; HLA-C*16:02; KLK4; ENSG00000167749; TAA
AALVMENEL

SEQ ID NO: 35012 - protein, 9 aa, Homo sapiens
  Table A; Target 35012; HLA-C*16:04; KLK4; ENSG00000167749; TAA
AALVMENEL

SEQ ID NO: 35013 - protein, 9 aa, Homo sapiens
  Table A; Target 35013; HLA-B*37:01; KLK4; ENSG00000167749; TAA
ADQEPGSQM

SEQ ID NO: 35014 - protein, 9 aa, Homo sapiens
  Table A; Target 35014; HLA-C*01:02; KLK4; ENSG00000167749; TAA
ADQEPGSQM

SEQ ID NO: 35015 - protein, 9 aa, Homo sapiens
  Table A; Target 35015; HLA-C*05:01; KLK4; ENSG00000167749; TAA
ADQEPGSQM

SEQ ID NO: 35016 - protein, 9 aa, Homo sapiens
  Table A; Target 35016; HLA-C*07:02; KLK4; ENSG00000167749; TAA
ADQEPGSQM

SEQ ID NO: 35017 - protein, 9 aa, Homo sapiens
  Table A; Target 35017; HLA-C*14:02; KLK4; ENSG00000167749; TAA
ADQEPGSQM

SEQ ID NO: 35018 - protein, 9 aa, Homo sapiens
  Table A; Target 35018; HLA-A*02:04; KLK4; ENSG00000167749; TAA
AGNPWGWFL

SEQ ID NO: 35019 - protein, 9 aa, Homo sapiens
  Table A; Target 35019; HLA-A*31:01; KLK4; ENSG00000167749; TAA
AGNPWGWFL

SEQ ID NO: 35020 - protein, 8 aa, Homo sapiens
  Table A; Target 35020; HLA-C*07:01; KLK4; ENSG00000167749; TAA
AHCFQNSY

SEQ ID NO: 35021 - protein, 10 aa, Homo sapiens
  Table A; Target 35021; HLA-B*38:01; KLK4; ENSG00000167749; TAA
AHCFQNSYTI

SEQ ID NO: 35022 - protein, 9 aa, Homo sapiens
  Table A; Target 35022; HLA-A*23:01; KLK4; ENSG00000167749; TAA
ALVMENELF

SEQ ID NO: 35023 - protein, 9 aa, Homo sapiens
  Table A; Target 35023; HLA-B*15:01; KLK4; ENSG00000167749; TAA
ALVMENELF

SEQ ID NO: 35024 - protein, 9 aa, Homo sapiens
  Table A; Target 35024; HLA-C*07:02; KLK4; ENSG00000167749; TAA
ANGRMPTVL

SEQ ID NO: 35025 - protein, 10 aa, Homo sapiens
  Table A; Target 35025; HLA-C*04:01; KLK4; ENSG00000167749; TAA
APCGQVGVPG

SEQ ID NO: 35026 - protein, 10 aa, Homo sapiens
  Table A; Target 35026; HLA-A*29:02; KLK4; ENSG00000167749; TAA
ASLSVRHPEY

SEQ ID NO: 35027 - protein, 10 aa, Homo sapiens
  Table A; Target 35027; HLA-A*30:02; KLK4; ENSG00000167749; TAA
ASLSVRHPEY

SEQ ID NO: 35028 - protein, 10 aa, Homo sapiens
  Table A; Target 35028; HLA-C*16:01; KLK4; ENSG00000167749; TAA
ASLSVRHPEY

SEQ ID NO: 35029 - protein, 9 aa, Homo sapiens
  Table A; Target 35029; HLA-A*25:01; KLK4; ENSG00000167749; TAA
ATAGNPWGW

SEQ ID NO: 35030 - protein, 9 aa, Homo sapiens
  Table A; Target 35030; HLA-A*32:01; KLK4; ENSG00000167749; TAA
ATAGNPWGW

SEQ ID NO: 35031 - protein, 9 aa, Homo sapiens
  Table A; Target 35031; HLA-B*57:01; KLK4; ENSG00000167749; TAA
ATAGNPWGW

SEQ ID NO: 35032 - protein, 9 aa, Homo sapiens
  Table A; Target 35032; HLA-B*58:01; KLK4; ENSG00000167749; TAA
ATAGNPWGW

SEQ ID NO: 35033 - protein, 9 aa, Homo sapiens
  Table A; Target 35033; HLA-C*16:04; KLK4; ENSG00000167749; TAA
ATAGNPWGW

SEQ ID NO: 35034 - protein, 8 aa, Homo sapiens
  Table A; Target 35034; HLA-A*23:01; KLK4; ENSG00000167749; TAA
CFQNSYTI

SEQ ID NO: 35035 - protein, 10 aa, Homo sapiens
  Table A; Target 35035; HLA-A*30:02; KLK4; ENSG00000167749; TAA
CGQVGVPGVY

SEQ ID NO: 35036 - protein, 9 aa, Homo sapiens
  Table A; Target 35036; HLA-B*07:02; KLK4; ENSG00000167749; TAA
CPTAGNSCL

SEQ ID NO: 35037 - protein, 9 aa, Homo sapiens
  Table A; Target 35037; HLA-B*35:03; KLK4; ENSG00000167749; TAA
CPTAGNSCL

SEQ ID NO: 35038 - protein, 9 aa, Homo sapiens
  Table A; Target 35038; HLA-C*07:02; KLK4; ENSG00000167749; TAA
CPTAGNSCL

SEQ ID NO: 35039 - protein, 9 aa, Homo sapiens
  Table A; Target 35039; HLA-A*01:01; KLK4; ENSG00000167749; TAA
CSKLYDPLY

SEQ ID NO: 35040 - protein, 9 aa, Homo sapiens
  Table A; Target 35040; HLA-A*30:02; KLK4; ENSG00000167749; TAA
CSKLYDPLY

SEQ ID NO: 35041 - protein, 9 aa, Homo sapiens
  Table A; Target 35041; HLA-A*25:01; KLK4; ENSG00000167749; TAA
DCSPHSQPW

SEQ ID NO: 35042 - protein, 9 aa, Homo sapiens
  Table A; Target 35042; HLA-A*33:01; KLK4; ENSG00000167749; TAA
DCSPHSQPW

SEQ ID NO: 35043 - protein, 10 aa, Homo sapiens
  Table A; Target 35043; HLA-B*38:01; KLK4; ENSG00000167749; TAA
DESVSESDTI

SEQ ID NO: 35044 - protein, 10 aa, Homo sapiens
  Table A; Target 35044; HLA-B*39:01; KLK4; ENSG00000167749; TAA
DESVSESDTI

SEQ ID NO: 35045 - protein, 8 aa, Homo sapiens
  Table A; Target 35045; HLA-B*08:01; KLK4; ENSG00000167749; TAA
DPLYHPSM

SEQ ID NO: 35046 - protein, 8 aa, Homo sapiens
  Table A; Target 35046; HLA-B*35:01; KLK4; ENSG00000167749; TAA
DPLYHPSM

SEQ ID NO: 35047 - protein, 8 aa, Homo sapiens
  Table A; Target 35047; HLA-B*35:03; KLK4; ENSG00000167749; TAA
DPLYHPSM

SEQ ID NO: 35048 - protein, 8 aa, Homo sapiens
  Table A; Target 35048; HLA-B*51:01; KLK4; ENSG00000167749; TAA
DPLYHPSM

SEQ ID NO: 35049 - protein, 8 aa, Homo sapiens
  Table A; Target 35049; HLA-B*54:01; KLK4; ENSG00000167749; TAA
DPLYHPSM

SEQ ID NO: 35050 - protein, 8 aa, Homo sapiens
  Table A; Target 35050; HLA-B*55:01; KLK4; ENSG00000167749; TAA
DPLYHPSM

SEQ ID NO: 35051 - protein, 8 aa, Homo sapiens
  Table A; Target 35051; HLA-C*03:03; KLK4; ENSG00000167749; TAA
DPLYHPSM

SEQ ID NO: 35052 - protein, 8 aa, Homo sapiens
  Table A; Target 35052; HLA-C*07:01; KLK4; ENSG00000167749; TAA
DPLYHPSM

SEQ ID NO: 35053 - protein, 9 aa, Homo sapiens
  Table A; Target 35053; HLA-A*33:01; KLK4; ENSG00000167749; TAA
DPLYHPSMF

SEQ ID NO: 35054 - protein, 9 aa, Homo sapiens
  Table A; Target 35054; HLA-B*35:01; KLK4; ENSG00000167749; TAA
DPLYHPSMF

SEQ ID NO: 35055 - protein, 9 aa, Homo sapiens
  Table A; Target 35055; HLA-B*35:03; KLK4; ENSG00000167749; TAA
DPLYHPSMF

SEQ ID NO: 35056 - protein, 9 aa, Homo sapiens
  Table A; Target 35056; HLA-B*51:01; KLK4; ENSG00000167749; TAA
DPLYHPSMF

SEQ ID NO: 35057 - protein, 8 aa, Homo sapiens
  Table A; Target 35057; HLA-C*05:01; KLK4; ENSG00000167749; TAA
DQEPGSQM

SEQ ID NO: 35058 - protein, 9 aa, Homo sapiens
  Table A; Target 35058; HLA-B*27:05; KLK4; ENSG00000167749; TAA
DQEPGSQMV

SEQ ID NO: 35059 - protein, 9 aa, Homo sapiens
  Table A; Target 35059; HLA-B*38:01; KLK4; ENSG00000167749; TAA
DQEPGSQMV

SEQ ID NO: 35060 - protein, 9 aa, Homo sapiens
  Table A; Target 35060; HLA-B*39:01; KLK4; ENSG00000167749; TAA
DQEPGSQMV

SEQ ID NO: 35061 - protein, 9 aa, Homo sapiens
  Table A; Target 35061; HLA-C*05:01; KLK4; ENSG00000167749; TAA
DQEPGSQMV

SEQ ID NO: 35062 - protein, 10 aa, Homo sapiens
  Table A; Target 35062; HLA-B*39:01; KLK4; ENSG00000167749; TAA
DQEPGSQMVE

SEQ ID NO: 35063 - protein, 11 aa, Homo sapiens
  Table A; Target 35063; HLA-B*39:01; KLK4; ENSG00000167749; TAA
DQEPGSQMVEA

SEQ ID NO: 35064 - protein, 11 aa, Homo sapiens
  Table A; Target 35064; HLA-A*26:01; KLK4; ENSG00000167749; TAA
DSGGPLICNGY

SEQ ID NO: 35065 - protein, 8 aa, Homo sapiens
  Table A; Target 35065; HLA-A*25:01; KLK4; ENSG00000167749; TAA
DTIRSISI

SEQ ID NO: 35066 - protein, 8 aa, Homo sapiens
  Table A; Target 35066; HLA-B*08:01; KLK4; ENSG00000167749; TAA
DTIRSISI

SEQ ID NO: 35067 - protein, 8 aa, Homo sapiens
  Table A; Target 35067; HLA-B*18:01; KLK4; ENSG00000167749; TAA
DTIRSISI

SEQ ID NO: 35068 - protein, 8 aa, Homo sapiens
  Table A; Target 35068; HLA-B*51:01; KLK4; ENSG00000167749; TAA
DTIRSISI

SEQ ID NO: 35069 - protein, 8 aa, Homo sapiens
  Table A; Target 35069; HLA-C*03:03; KLK4; ENSG00000167749; TAA
DTIRSISI

SEQ ID NO: 35070 - protein, 9 aa, Homo sapiens
  Table A; Target 35070; HLA-A*25:01; KLK4; ENSG00000167749; TAA
DTIRSISIA

SEQ ID NO: 35071 - protein, 9 aa, Homo sapiens
  Table A; Target 35071; HLA-A*26:01; KLK4; ENSG00000167749; TAA
DTIRSISIA

SEQ ID NO: 35072 - protein, 11 aa, Homo sapiens
  Table A; Target 35072; HLA-A*25:01; KLK4; ENSG00000167749; TAA
DTIRSISIASQ

SEQ ID NO: 35073 - protein, 11 aa, Homo sapiens
  Table A; Target 35073; HLA-A*26:01; KLK4; ENSG00000167749; TAA
DTIRSISIASQ

SEQ ID NO: 35074 - protein, 11 aa, Homo sapiens
  Table A; Target 35074; HLA-A*33:01; KLK4; ENSG00000167749; TAA
DTIRSISIASQ

SEQ ID NO: 35075 - protein, 10 aa, Homo sapiens
  Table A; Target 35075; HLA-A*26:01; KLK4; ENSG00000167749; TAA
EADQEPGSQM

SEQ ID NO: 35076 - protein, 10 aa, Homo sapiens
  Table A; Target 35076; HLA-B*38:01; KLK4; ENSG00000167749; TAA
EADQEPGSQM

SEQ ID NO: 35077 - protein, 10 aa, Homo sapiens
  Table A; Target 35077; HLA-B*39:01; KLK4; ENSG00000167749; TAA
EADQEPGSQM

SEQ ID NO: 35078 - protein, 10 aa, Homo sapiens
  Table A; Target 35078; HLA-B*55:01; KLK4; ENSG00000167749; TAA
EADQEPGSQM

SEQ ID NO: 35079 - protein, 10 aa, Homo sapiens
  Table A; Target 35079; HLA-C*04:01; KLK4; ENSG00000167749; TAA
EADQEPGSQM

SEQ ID NO: 35080 - protein, 10 aa, Homo sapiens
  Table A; Target 35080; HLA-C*05:01; KLK4; ENSG00000167749; TAA
EADQEPGSQM

SEQ ID NO: 35081 - protein, 10 aa, Homo sapiens
  Table A; Target 35081; HLA-C*07:06; KLK4; ENSG00000167749; TAA
EADQEPGSQM

SEQ ID NO: 35082 - protein, 8 aa, Homo sapiens
  Table A; Target 35082; HLA-B*18:01; KLK4; ENSG00000167749; TAA
EEVCSKLY

SEQ ID NO: 35083 - protein, 8 aa, Homo sapiens
  Table A; Target 35083; HLA-B*44:03; KLK4; ENSG00000167749; TAA
EEVCSKLY

SEQ ID NO: 35084 - protein, 9 aa, Homo sapiens
  Table A; Target 35084; HLA-A*68:02; KLK4; ENSG00000167749; TAA
ELFCSGVLV

SEQ ID NO: 35085 - protein, 9 aa, Homo sapiens
  Table A; Target 35085; HLA-B*54:01; KLK4; ENSG00000167749; TAA
EPGSQMVEA

SEQ ID NO: 35086 - protein, 9 aa, Homo sapiens
  Table A; Target 35086; HLA-B*56:01; KLK4; ENSG00000167749; TAA
EPGSQMVEA

SEQ ID NO: 35087 - protein, 8 aa, Homo sapiens
  Table A; Target 35087; HLA-B*51:01; KLK4; ENSG00000167749; TAA
ESDTIRSI

SEQ ID NO: 35088 - protein, 8 aa, Homo sapiens
  Table A; Target 35088; HLA-C*05:01; KLK4; ENSG00000167749; TAA
ESDTIRSI

SEQ ID NO: 35089 - protein, 10 aa, Homo sapiens
  Table A; Target 35089; HLA-A*01:01; KLK4; ENSG00000167749; TAA
ESDTIRSISI

SEQ ID NO: 35090 - protein, 10 aa, Homo sapiens
  Table A; Target 35090; HLA-A*25:01; KLK4; ENSG00000167749; TAA
ESDTIRSISI

SEQ ID NO: 35091 - protein, 10 aa, Homo sapiens
  Table A; Target 35091; HLA-A*68:01; KLK4; ENSG00000167749; TAA
ESDTIRSISI

SEQ ID NO: 35092 - protein, 10 aa, Homo sapiens
  Table A; Target 35092; HLA-C*16:04; KLK4; ENSG00000167749; TAA
ESDTIRSISI

SEQ ID NO: 35093 - protein, 9 aa, Homo sapiens
  Table A; Target 35093; HLA-B*38:01; KLK4; ENSG00000167749; TAA
ESVSESDTI

SEQ ID NO: 35094 - protein, 10 aa, Homo sapiens
  Table A; Target 35094; HLA-A*33:03; KLK4; ENSG00000167749; TAA
ESVSESDTIR

SEQ ID NO: 35095 - protein, 10 aa, Homo sapiens
  Table A; Target 35095; HLA-A*68:01; KLK4; ENSG00000167749; TAA
ESVSESDTIR

SEQ ID NO: 35096 - protein, 10 aa, Homo sapiens
  Table A; Target 35096; HLA-C*07:06; KLK4; ENSG00000167749; TAA
ESVSESDTIR

SEQ ID NO: 35097 - protein, 11 aa, Homo sapiens
  Table A; Target 35097; HLA-A*24:02; KLK4; ENSG00000167749; TAA
EYNRPLLANDL

SEQ ID NO: 35098 - protein, 9 aa, Homo sapiens
  Table A; Target 35098; HLA-A*02:01; KLK4; ENSG00000167749; TAA
FLGYLILGV

SEQ ID NO: 35099 - protein, 9 aa, Homo sapiens
  Table A; Target 35099; HLA-A*02:03; KLK4; ENSG00000167749; TAA
FLGYLILGV

SEQ ID NO: 35100 - protein, 9 aa, Homo sapiens
  Table A; Target 35100; HLA-A*02:04; KLK4; ENSG00000167749; TAA
FLGYLILGV

SEQ ID NO: 35101 - protein, 9 aa, Homo sapiens
  Table A; Target 35101; HLA-A*02:07; KLK4; ENSG00000167749; TAA
FLGYLILGV

SEQ ID NO: 35102 - protein, 9 aa, Homo sapiens
  Table A; Target 35102; HLA-A*68:02; KLK4; ENSG00000167749; TAA
FLGYLILGV

SEQ ID NO: 35103 - protein, 9 aa, Homo sapiens
  Table A; Target 35103; HLA-B*13:02; KLK4; ENSG00000167749; TAA
FLGYLILGV

SEQ ID NO: 35104 - protein, 9 aa, Homo sapiens
  Table A; Target 35104; HLA-A*02:01; KLK4; ENSG00000167749; TAA
FQNSYTIGL

SEQ ID NO: 35105 - protein, 9 aa, Homo sapiens
  Table A; Target 35105; HLA-A*02:03; KLK4; ENSG00000167749; TAA
FQNSYTIGL

SEQ ID NO: 35106 - protein, 9 aa, Homo sapiens
  Table A; Target 35106; HLA-A*02:04; KLK4; ENSG00000167749; TAA
FQNSYTIGL

SEQ ID NO: 35107 - protein, 9 aa, Homo sapiens
  Table A; Target 35107; HLA-A*02:07; KLK4; ENSG00000167749; TAA
FQNSYTIGL

SEQ ID NO: 35108 - protein, 9 aa, Homo sapiens
  Table A; Target 35108; HLA-A*03:01; KLK4; ENSG00000167749; TAA
FQNSYTIGL

SEQ ID NO: 35109 - protein, 9 aa, Homo sapiens
  Table A; Target 35109; HLA-A*30:01; KLK4; ENSG00000167749; TAA
FQNSYTIGL

SEQ ID NO: 35110 - protein, 9 aa, Homo sapiens
  Table A; Target 35110; HLA-A*31:01; KLK4; ENSG00000167749; TAA
FQNSYTIGL

SEQ ID NO: 35111 - protein, 9 aa, Homo sapiens
  Table A; Target 35111; HLA-A*32:01; KLK4; ENSG00000167749; TAA
FQNSYTIGL

SEQ ID NO: 35112 - protein, 9 aa, Homo sapiens
  Table A; Target 35112; HLA-A*68:02; KLK4; ENSG00000167749; TAA
FQNSYTIGL

SEQ ID NO: 35113 - protein, 9 aa, Homo sapiens
  Table A; Target 35113; HLA-B*07:02; KLK4; ENSG00000167749; TAA
FQNSYTIGL

SEQ ID NO: 35114 - protein, 9 aa, Homo sapiens
  Table A; Target 35114; HLA-B*08:01; KLK4; ENSG00000167749; TAA
FQNSYTIGL

SEQ ID NO: 35115 - protein, 9 aa, Homo sapiens
  Table A; Target 35115; HLA-B*13:02; KLK4; ENSG00000167749; TAA
FQNSYTIGL

SEQ ID NO: 35116 - protein, 9 aa, Homo sapiens
  Table A; Target 35116; HLA-B*15:01; KLK4; ENSG00000167749; TAA
FQNSYTIGL

SEQ ID NO: 35117 - protein, 9 aa, Homo sapiens
  Table A; Target 35117; HLA-B*15:03; KLK4; ENSG00000167749; TAA
FQNSYTIGL

SEQ ID NO: 35118 - protein, 9 aa, Homo sapiens
  Table A; Target 35118; HLA-B*27:05; KLK4; ENSG00000167749; TAA
FQNSYTIGL

SEQ ID NO: 35119 - protein, 9 aa, Homo sapiens
  Table A; Target 35119; HLA-B*35:03; KLK4; ENSG00000167749; TAA
FQNSYTIGL

SEQ ID NO: 35120 - protein, 9 aa, Homo sapiens
  Table A; Target 35120; HLA-B*37:01; KLK4; ENSG00000167749; TAA
FQNSYTIGL

SEQ ID NO: 35121 - protein, 9 aa, Homo sapiens
  Table A; Target 35121; HLA-B*38:01; KLK4; ENSG00000167749; TAA
FQNSYTIGL

SEQ ID NO: 35122 - protein, 9 aa, Homo sapiens
  Table A; Target 35122; HLA-B*39:01; KLK4; ENSG00000167749; TAA
FQNSYTIGL

SEQ ID NO: 35123 - protein, 9 aa, Homo sapiens
  Table A; Target 35123; HLA-B*40:01; KLK4; ENSG00000167749; TAA
FQNSYTIGL

SEQ ID NO: 35124 - protein, 9 aa, Homo sapiens
  Table A; Target 35124; HLA-B*40:02; KLK4; ENSG00000167749; TAA
FQNSYTIGL

SEQ ID NO: 35125 - protein, 9 aa, Homo sapiens
  Table A; Target 35125; HLA-B*46:01; KLK4; ENSG00000167749; TAA
FQNSYTIGL

SEQ ID NO: 35126 - protein, 9 aa, Homo sapiens
  Table A; Target 35126; HLA-B*55:01; KLK4; ENSG00000167749; TAA
FQNSYTIGL

SEQ ID NO: 35127 - protein, 9 aa, Homo sapiens
  Table A; Target 35127; HLA-B*58:01; KLK4; ENSG00000167749; TAA
FQNSYTIGL

SEQ ID NO: 35128 - protein, 9 aa, Homo sapiens
  Table A; Target 35128; HLA-C*01:02; KLK4; ENSG00000167749; TAA
FQNSYTIGL

SEQ ID NO: 35129 - protein, 9 aa, Homo sapiens
  Table A; Target 35129; HLA-C*02:02; KLK4; ENSG00000167749; TAA
FQNSYTIGL

SEQ ID NO: 35130 - protein, 9 aa, Homo sapiens
  Table A; Target 35130; HLA-C*03:03; KLK4; ENSG00000167749; TAA
FQNSYTIGL

SEQ ID NO: 35131 - protein, 9 aa, Homo sapiens
  Table A; Target 35131; HLA-C*03:04; KLK4; ENSG00000167749; TAA
FQNSYTIGL

SEQ ID NO: 35132 - protein, 9 aa, Homo sapiens
  Table A; Target 35132; HLA-C*04:01; KLK4; ENSG00000167749; TAA
FQNSYTIGL

SEQ ID NO: 35133 - protein, 9 aa, Homo sapiens
  Table A; Target 35133; HLA-C*05:01; KLK4; ENSG00000167749; TAA
FQNSYTIGL

SEQ ID NO: 35134 - protein, 9 aa, Homo sapiens
  Table A; Target 35134; HLA-C*06:02; KLK4; ENSG00000167749; TAA
FQNSYTIGL

SEQ ID NO: 35135 - protein, 9 aa, Homo sapiens
  Table A; Target 35135; HLA-C*07:04; KLK4; ENSG00000167749; TAA
FQNSYTIGL

SEQ ID NO: 35136 - protein, 9 aa, Homo sapiens
  Table A; Target 35136; HLA-C*12:03; KLK4; ENSG00000167749; TAA
FQNSYTIGL

SEQ ID NO: 35137 - protein, 9 aa, Homo sapiens
  Table A; Target 35137; HLA-C*14:02; KLK4; ENSG00000167749; TAA
FQNSYTIGL

SEQ ID NO: 35138 - protein, 9 aa, Homo sapiens
  Table A; Target 35138; HLA-C*16:02; KLK4; ENSG00000167749; TAA
FQNSYTIGL

SEQ ID NO: 35139 - protein, 9 aa, Homo sapiens
  Table A; Target 35139; HLA-C*16:04; KLK4; ENSG00000167749; TAA
FQNSYTIGL

SEQ ID NO: 35140 - protein, 11 aa, Homo sapiens
  Table A; Target 35140; HLA-A*02:04; KLK4; ENSG00000167749; TAA
FQNSYTIGLGL

SEQ ID NO: 35141 - protein, 11 aa, Homo sapiens
  Table A; Target 35141; HLA-B*13:02; KLK4; ENSG00000167749; TAA
FQNSYTIGLGL

SEQ ID NO: 35142 - protein, 11 aa, Homo sapiens
  Table A; Target 35142; HLA-B*38:01; KLK4; ENSG00000167749; TAA
FQNSYTIGLGL

SEQ ID NO: 35143 - protein, 9 aa, Homo sapiens
  Table A; Target 35143; HLA-A*02:07; KLK4; ENSG00000167749; TAA
FTEWIEKTV

SEQ ID NO: 35144 - protein, 9 aa, Homo sapiens
  Table A; Target 35144; HLA-A*68:02; KLK4; ENSG00000167749; TAA
FTEWIEKTV

SEQ ID NO: 35145 - protein, 8 aa, Homo sapiens
  Table A; Target 35145; HLA-B*37:01; KLK4; ENSG00000167749; TAA
GDSGGPLI

SEQ ID NO: 35146 - protein, 11 aa, Homo sapiens
  Table A; Target 35146; HLA-B*44:02; KLK4; ENSG00000167749; TAA
GEDCSPHSQPW

SEQ ID NO: 35147 - protein, 9 aa, Homo sapiens
  Table A; Target 35147; HLA-A*30:02; KLK4; ENSG00000167749; TAA
GGPLICNGY

SEQ ID NO: 35148 - protein, 9 aa, Homo sapiens
  Table A; Target 35148; HLA-B*15:01; KLK4; ENSG00000167749; TAA
GGPLICNGY

SEQ ID NO: 35149 - protein, 9 aa, Homo sapiens
  Table A; Target 35149; HLA-B*15:03; KLK4; ENSG00000167749; TAA
GGPLICNGY

SEQ ID NO: 35150 - protein, 9 aa, Homo sapiens
  Table A; Target 35150; HLA-C*07:01; KLK4; ENSG00000167749; TAA
GGPLICNGY

SEQ ID NO: 35151 - protein, 11 aa, Homo sapiens
  Table A; Target 35151; HLA-A*02:01; KLK4; ENSG00000167749; TAA
GLLANGRMPTV

SEQ ID NO: 35152 - protein, 11 aa, Homo sapiens
  Table A; Target 35152; HLA-A*02:03; KLK4; ENSG00000167749; TAA
GLLANGRMPTV

SEQ ID NO: 35153 - protein, 11 aa, Homo sapiens
  Table A; Target 35153; HLA-A*02:04; KLK4; ENSG00000167749; TAA
GLLANGRMPTV

SEQ ID NO: 35154 - protein, 11 aa, Homo sapiens
  Table A; Target 35154; HLA-B*55:01; KLK4; ENSG00000167749; TAA
GLLANGRMPTV

SEQ ID NO: 35155 - protein, 10 aa, Homo sapiens
  Table A; Target 35155; HLA-A*29:02; KLK4; ENSG00000167749; TAA
GNPWGWFLGY

SEQ ID NO: 35156 - protein, 8 aa, Homo sapiens
  Table A; Target 35156; HLA-A*30:01; KLK4; ENSG00000167749; TAA
GQVGVPGV

SEQ ID NO: 35157 - protein, 8 aa, Homo sapiens
  Table A; Target 35157; HLA-B*13:02; KLK4; ENSG00000167749; TAA
GQVGVPGV

SEQ ID NO: 35158 - protein, 8 aa, Homo sapiens
  Table A; Target 35158; HLA-C*06:02; KLK4; ENSG00000167749; TAA
GQVGVPGV

SEQ ID NO: 35159 - protein, 9 aa, Homo sapiens
  Table A; Target 35159; HLA-A*25:01; KLK4; ENSG00000167749; TAA
GQVGVPGVY

SEQ ID NO: 35160 - protein, 9 aa, Homo sapiens
  Table A; Target 35160; HLA-A*26:01; KLK4; ENSG00000167749; TAA
GQVGVPGVY

SEQ ID NO: 35161 - protein, 9 aa, Homo sapiens
  Table A; Target 35161; HLA-A*29:02; KLK4; ENSG00000167749; TAA
GQVGVPGVY

SEQ ID NO: 35162 - protein, 9 aa, Homo sapiens
  Table A; Target 35162; HLA-A*30:02; KLK4; ENSG00000167749; TAA
GQVGVPGVY

SEQ ID NO: 35163 - protein, 9 aa, Homo sapiens
  Table A; Target 35163; HLA-A*32:01; KLK4; ENSG00000167749; TAA
GQVGVPGVY

SEQ ID NO: 35164 - protein, 9 aa, Homo sapiens
  Table A; Target 35164; HLA-B*13:02; KLK4; ENSG00000167749; TAA
GQVGVPGVY

SEQ ID NO: 35165 - protein, 9 aa, Homo sapiens
  Table A; Target 35165; HLA-B*15:01; KLK4; ENSG00000167749; TAA
GQVGVPGVY

SEQ ID NO: 35166 - protein, 9 aa, Homo sapiens
  Table A; Target 35166; HLA-B*15:03; KLK4; ENSG00000167749; TAA
GQVGVPGVY

SEQ ID NO: 35167 - protein, 9 aa, Homo sapiens
  Table A; Target 35167; HLA-B*18:01; KLK4; ENSG00000167749; TAA
GQVGVPGVY

SEQ ID NO: 35168 - protein, 9 aa, Homo sapiens
  Table A; Target 35168; HLA-B*27:02; KLK4; ENSG00000167749; TAA
GQVGVPGVY

SEQ ID NO: 35169 - protein, 9 aa, Homo sapiens
  Table A; Target 35169; HLA-B*27:05; KLK4; ENSG00000167749; TAA
GQVGVPGVY

SEQ ID NO: 35170 - protein, 9 aa, Homo sapiens
  Table A; Target 35170; HLA-B*39:01; KLK4; ENSG00000167749; TAA
GQVGVPGVY

SEQ ID NO: 35171 - protein, 9 aa, Homo sapiens
  Table A; Target 35171; HLA-B*40:01; KLK4; ENSG00000167749; TAA
GQVGVPGVY

SEQ ID NO: 35172 - protein, 9 aa, Homo sapiens
  Table A; Target 35172; HLA-B*44:02; KLK4; ENSG00000167749; TAA
GQVGVPGVY

SEQ ID NO: 35173 - protein, 9 aa, Homo sapiens
  Table A; Target 35173; HLA-B*44:03; KLK4; ENSG00000167749; TAA
GQVGVPGVY

SEQ ID NO: 35174 - protein, 9 aa, Homo sapiens
  Table A; Target 35174; HLA-B*46:01; KLK4; ENSG00000167749; TAA
GQVGVPGVY

SEQ ID NO: 35175 - protein, 9 aa, Homo sapiens
  Table A; Target 35175; HLA-B*58:01; KLK4; ENSG00000167749; TAA
GQVGVPGVY

SEQ ID NO: 35176 - protein, 9 aa, Homo sapiens
  Table A; Target 35176; HLA-C*02:02; KLK4; ENSG00000167749; TAA
GQVGVPGVY

SEQ ID NO: 35177 - protein, 9 aa, Homo sapiens
  Table A; Target 35177; HLA-C*07:04; KLK4; ENSG00000167749; TAA
GQVGVPGVY

SEQ ID NO: 35178 - protein, 9 aa, Homo sapiens
  Table A; Target 35178; HLA-C*12:03; KLK4; ENSG00000167749; TAA
GQVGVPGVY

SEQ ID NO: 35179 - protein, 9 aa, Homo sapiens
  Table A; Target 35179; HLA-C*16:02; KLK4; ENSG00000167749; TAA
GQVGVPGVY

SEQ ID NO: 35180 - protein, 9 aa, Homo sapiens
  Table A; Target 35180; HLA-C*16:04; KLK4; ENSG00000167749; TAA
GQVGVPGVY

SEQ ID NO: 35181 - protein, 10 aa, Homo sapiens
  Table A; Target 35181; HLA-B*13:02; KLK4; ENSG00000167749; TAA
GQVGVPGVYT

SEQ ID NO: 35182 - protein, 10 aa, Homo sapiens
  Table A; Target 35182; HLA-B*27:05; KLK4; ENSG00000167749; TAA
GQVGVPGVYT

SEQ ID NO: 35183 - protein, 10 aa, Homo sapiens
  Table A; Target 35183; HLA-C*04:01; KLK4; ENSG00000167749; TAA
GQVGVPGVYT

SEQ ID NO: 35184 - protein, 9 aa, Homo sapiens
  Table A; Target 35184; HLA-B*27:05; KLK4; ENSG00000167749; TAA
GRMPTVLQC

SEQ ID NO: 35185 - protein, 10 aa, Homo sapiens
  Table A; Target 35185; HLA-B*27:05; KLK4; ENSG00000167749; TAA
GRMPTVLQCV

SEQ ID NO: 35186 - protein, 9 aa, Homo sapiens
  Table A; Target 35186; HLA-A*02:07; KLK4; ENSG00000167749; TAA
GVPGVYTNL

SEQ ID NO: 35187 - protein, 9 aa, Homo sapiens
  Table A; Target 35187; HLA-A*25:01; KLK4; ENSG00000167749; TAA
GVPGVYTNL

SEQ ID NO: 35188 - protein, 9 aa, Homo sapiens
  Table A; Target 35188; HLA-A*26:01; KLK4; ENSG00000167749; TAA
GVPGVYTNL

SEQ ID NO: 35189 - protein, 9 aa, Homo sapiens
  Table A; Target 35189; HLA-A*29:02; KLK4; ENSG00000167749; TAA
GVPGVYTNL

SEQ ID NO: 35190 - protein, 9 aa, Homo sapiens
  Table A; Target 35190; HLA-A*68:02; KLK4; ENSG00000167749; TAA
GVPGVYTNL

SEQ ID NO: 35191 - protein, 9 aa, Homo sapiens
  Table A; Target 35191; HLA-C*01:02; KLK4; ENSG00000167749; TAA
GVPGVYTNL

SEQ ID NO: 35192 - protein, 9 aa, Homo sapiens
  Table A; Target 35192; HLA-A*25:01; KLK4; ENSG00000167749; TAA
GVYTNLCKF

SEQ ID NO: 35193 - protein, 11 aa, Homo sapiens
  Table A; Target 35193; HLA-A*23:01; KLK4; ENSG00000167749; TAA
GYLILGVAGSL

SEQ ID NO: 35194 - protein, 9 aa, Homo sapiens
  Table A; Target 35194; HLA-A*23:01; KLK4; ENSG00000167749; TAA
GYLQGLVSF

SEQ ID NO: 35195 - protein, 9 aa, Homo sapiens
  Table A; Target 35195; HLA-A*24:02; KLK4; ENSG00000167749; TAA
GYLQGLVSF

SEQ ID NO: 35196 - protein, 9 aa, Homo sapiens
  Table A; Target 35196; HLA-A*29:02; KLK4; ENSG00000167749; TAA
GYLQGLVSF

SEQ ID NO: 35197 - protein, 9 aa, Homo sapiens
  Table A; Target 35197; HLA-A*31:01; KLK4; ENSG00000167749; TAA
GYLQGLVSF

SEQ ID NO: 35198 - protein, 9 aa, Homo sapiens
  Table A; Target 35198; HLA-A*32:01; KLK4; ENSG00000167749; TAA
GYLQGLVSF

SEQ ID NO: 35199 - protein, 9 aa, Homo sapiens
  Table A; Target 35199; HLA-A*33:03; KLK4; ENSG00000167749; TAA
GYLQGLVSF

SEQ ID NO: 35200 - protein, 9 aa, Homo sapiens
  Table A; Target 35200; HLA-B*15:01; KLK4; ENSG00000167749; TAA
GYLQGLVSF

SEQ ID NO: 35201 - protein, 9 aa, Homo sapiens
  Table A; Target 35201; HLA-B*15:03; KLK4; ENSG00000167749; TAA
GYLQGLVSF

SEQ ID NO: 35202 - protein, 9 aa, Homo sapiens
  Table A; Target 35202; HLA-B*46:01; KLK4; ENSG00000167749; TAA
GYLQGLVSF

SEQ ID NO: 35203 - protein, 9 aa, Homo sapiens
  Table A; Target 35203; HLA-B*58:01; KLK4; ENSG00000167749; TAA
GYLQGLVSF

SEQ ID NO: 35204 - protein, 9 aa, Homo sapiens
  Table A; Target 35204; HLA-C*01:02; KLK4; ENSG00000167749; TAA
GYLQGLVSF

SEQ ID NO: 35205 - protein, 9 aa, Homo sapiens
  Table A; Target 35205; HLA-C*04:01; KLK4; ENSG00000167749; TAA
GYLQGLVSF

SEQ ID NO: 35206 - protein, 9 aa, Homo sapiens
  Table A; Target 35206; HLA-C*14:02; KLK4; ENSG00000167749; TAA
GYLQGLVSF

SEQ ID NO: 35207 - protein, 9 aa, Homo sapiens
  Table A; Target 35207; HLA-B*13:02; KLK4; ENSG00000167749; TAA
HCFQNSYTI

SEQ ID NO: 35208 - protein, 9 aa, Homo sapiens
  Table A; Target 35208; HLA-B*38:01; KLK4; ENSG00000167749; TAA
HCFQNSYTI

SEQ ID NO: 35209 - protein, 9 aa, Homo sapiens
  Table A; Target 35209; HLA-B*51:01; KLK4; ENSG00000167749; TAA
HCFQNSYTI

SEQ ID NO: 35210 - protein, 9 aa, Homo sapiens
  Table A; Target 35210; HLA-B*07:02; KLK4; ENSG00000167749; TAA
HPEYNRPLL

SEQ ID NO: 35211 - protein, 9 aa, Homo sapiens
  Table A; Target 35211; HLA-B*35:01; KLK4; ENSG00000167749; TAA
HPEYNRPLL

SEQ ID NO: 35212 - protein, 9 aa, Homo sapiens
  Table A; Target 35212; HLA-B*35:03; KLK4; ENSG00000167749; TAA
HPEYNRPLL

SEQ ID NO: 35213 - protein, 9 aa, Homo sapiens
  Table A; Target 35213; HLA-B*55:01; KLK4; ENSG00000167749; TAA
HPEYNRPLL

SEQ ID NO: 35214 - protein, 9 aa, Homo sapiens
  Table A; Target 35214; HLA-C*03:03; KLK4; ENSG00000167749; TAA
HPEYNRPLL

SEQ ID NO: 35215 - protein, 9 aa, Homo sapiens
  Table A; Target 35215; HLA-C*07:02; KLK4; ENSG00000167749; TAA
HPEYNRPLL

SEQ ID NO: 35216 - protein, 10 aa, Homo sapiens
  Table A; Target 35216; HLA-B*54:01; KLK4; ENSG00000167749; TAA
HPEYNRPLLA

SEQ ID NO: 35217 - protein, 8 aa, Homo sapiens
  Table A; Target 35217; HLA-B*54:01; KLK4; ENSG00000167749; TAA
HPQWVLSA

SEQ ID NO: 35218 - protein, 8 aa, Homo sapiens
  Table A; Target 35218; HLA-B*56:01; KLK4; ENSG00000167749; TAA
HPQWVLSA

SEQ ID NO: 35219 - protein, 9 aa, Homo sapiens
  Table A; Target 35219; HLA-B*54:01; KLK4; ENSG00000167749; TAA
HPQWVLSAA

SEQ ID NO: 35220 - protein, 9 aa, Homo sapiens
  Table A; Target 35220; HLA-B*55:01; KLK4; ENSG00000167749; TAA
HPQWVLSAA

SEQ ID NO: 35221 - protein, 9 aa, Homo sapiens
  Table A; Target 35221; HLA-B*56:01; KLK4; ENSG00000167749; TAA
HPQWVLSAA

SEQ ID NO: 35222 - protein, 9 aa, Homo sapiens
  Table A; Target 35222; HLA-A*02:04; KLK4; ENSG00000167749; TAA
HSQPWQAAL

SEQ ID NO: 35223 - protein, 9 aa, Homo sapiens
  Table A; Target 35223; HLA-C*03:03; KLK4; ENSG00000167749; TAA
HSQPWQAAL

SEQ ID NO: 35224 - protein, 9 aa, Homo sapiens
  Table A; Target 35224; HLA-C*03:04; KLK4; ENSG00000167749; TAA
HSQPWQAAL

SEQ ID NO: 35225 - protein, 8 aa, Homo sapiens
  Table A; Target 35225; HLA-B*08:01; KLK4; ENSG00000167749; TAA
IGLGLHSL

SEQ ID NO: 35226 - protein, 8 aa, Homo sapiens
  Table A; Target 35226; HLA-B*07:02; KLK4; ENSG00000167749; TAA
ILGVAGSL

SEQ ID NO: 35227 - protein, 8 aa, Homo sapiens
  Table A; Target 35227; HLA-B*08:01; KLK4; ENSG00000167749; TAA
ILGVAGSL

SEQ ID NO: 35228 - protein, 8 aa, Homo sapiens
  Table A; Target 35228; HLA-C*01:02; KLK4; ENSG00000167749; TAA
ILGVAGSL

SEQ ID NO: 35229 - protein, 8 aa, Homo sapiens
  Table A; Target 35229; HLA-C*03:03; KLK4; ENSG00000167749; TAA
ILGVAGSL

SEQ ID NO: 35230 - protein, 8 aa, Homo sapiens
  Table A; Target 35230; HLA-C*03:04; KLK4; ENSG00000167749; TAA
ILGVAGSL

SEQ ID NO: 35231 - protein, 8 aa, Homo sapiens
  Table A; Target 35231; HLA-C*07:02; KLK4; ENSG00000167749; TAA
ILGVAGSL

SEQ ID NO: 35232 - protein, 8 aa, Homo sapiens
  Table A; Target 35232; HLA-C*07:04; KLK4; ENSG00000167749; TAA
ILGVAGSL

SEQ ID NO: 35233 - protein, 8 aa, Homo sapiens
  Table A; Target 35233; HLA-C*14:02; KLK4; ENSG00000167749; TAA
ILGVAGSL

SEQ ID NO: 35234 - protein, 9 aa, Homo sapiens
  Table A; Target 35234; HLA-A*02:01; KLK4; ENSG00000167749; TAA
ILGVAGSLV

SEQ ID NO: 35235 - protein, 9 aa, Homo sapiens
  Table A; Target 35235; HLA-A*02:03; KLK4; ENSG00000167749; TAA
ILGVAGSLV

SEQ ID NO: 35236 - protein, 9 aa, Homo sapiens
  Table A; Target 35236; HLA-B*13:02; KLK4; ENSG00000167749; TAA
ILGVAGSLV

SEQ ID NO: 35237 - protein, 9 aa, Homo sapiens
  Table A; Target 35237; HLA-B*55:01; KLK4; ENSG00000167749; TAA
ILGVAGSLV

SEQ ID NO: 35238 - protein, 9 aa, Homo sapiens
  Table A; Target 35238; HLA-C*04:01; KLK4; ENSG00000167749; TAA
ILGVAGSLV

SEQ ID NO: 35239 - protein, 9 aa, Homo sapiens
  Table A; Target 35239; HLA-C*05:01; KLK4; ENSG00000167749; TAA
ILGVAGSLV

SEQ ID NO: 35240 - protein, 9 aa, Homo sapiens
  Table A; Target 35240; HLA-C*14:02; KLK4; ENSG00000167749; TAA
ILGVAGSLV

SEQ ID NO: 35241 - protein, 11 aa, Homo sapiens
  Table A; Target 35241; HLA-C*01:02; KLK4; ENSG00000167749; TAA
ILGVAGSLVSG

SEQ ID NO: 35242 - protein, 9 aa, Homo sapiens
  Table A; Target 35242; HLA-C*01:02; KLK4; ENSG00000167749; TAA
KAPCGQVGV

SEQ ID NO: 35243 - protein, 10 aa, Homo sapiens
  Table A; Target 35243; HLA-C*07:02; KLK4; ENSG00000167749; TAA
KAPCGQVGVP

SEQ ID NO: 35244 - protein, 8 aa, Homo sapiens
  Table A; Target 35244; HLA-A*03:01; KLK4; ENSG00000167749; TAA
KLYDPLYH

SEQ ID NO: 35245 - protein, 9 aa, Homo sapiens
  Table A; Target 35245; HLA-A*02:03; KLK4; ENSG00000167749; TAA
KLYDPLYHP

SEQ ID NO: 35246 - protein, 9 aa, Homo sapiens
  Table A; Target 35246; HLA-A*02:07; KLK4; ENSG00000167749; TAA
KLYDPLYHP

SEQ ID NO: 35247 - protein, 10 aa, Homo sapiens
  Table A; Target 35247; HLA-A*03:01; KLK4; ENSG00000167749; TAA
KLYDPLYHPS

SEQ ID NO: 35248 - protein, 11 aa, Homo sapiens
  Table A; Target 35248; HLA-A*02:01; KLK4; ENSG00000167749; TAA
KLYDPLYHPSM

SEQ ID NO: 35249 - protein, 11 aa, Homo sapiens
  Table A; Target 35249; HLA-A*02:04; KLK4; ENSG00000167749; TAA
KLYDPLYHPSM

SEQ ID NO: 35250 - protein, 11 aa, Homo sapiens
  Table A; Target 35250; HLA-A*02:07; KLK4; ENSG00000167749; TAA
KLYDPLYHPSM

SEQ ID NO: 35251 - protein, 11 aa, Homo sapiens
  Table A; Target 35251; HLA-A*03:01; KLK4; ENSG00000167749; TAA
KLYDPLYHPSM

SEQ ID NO: 35252 - protein, 8 aa, Homo sapiens
  Table A; Target 35252; HLA-B*51:01; KLK4; ENSG00000167749; TAA
LANDLMLI

SEQ ID NO: 35253 - protein, 9 aa, Homo sapiens
  Table A; Target 35253; HLA-B*27:02; KLK4; ENSG00000167749; TAA
LANDLMLIK

SEQ ID NO: 35254 - protein, 9 aa, Homo sapiens
  Table A; Target 35254; HLA-A*02:03; KLK4; ENSG00000167749; TAA
LANGRMPTV

SEQ ID NO: 35255 - protein, 9 aa, Homo sapiens
  Table A; Target 35255; HLA-B*08:01; KLK4; ENSG00000167749; TAA
LANGRMPTV

SEQ ID NO: 35256 - protein, 9 aa, Homo sapiens
  Table A; Target 35256; HLA-B*51:01; KLK4; ENSG00000167749; TAA
LANGRMPTV

SEQ ID NO: 35257 - protein, 9 aa, Homo sapiens
  Table A; Target 35257; HLA-B*54:01; KLK4; ENSG00000167749; TAA
LANGRMPTV

SEQ ID NO: 35258 - protein, 9 aa, Homo sapiens
  Table A; Target 35258; HLA-B*56:01; KLK4; ENSG00000167749; TAA
LANGRMPTV

SEQ ID NO: 35259 - protein, 9 aa, Homo sapiens
  Table A; Target 35259; HLA-C*02:02; KLK4; ENSG00000167749; TAA
LANGRMPTV

SEQ ID NO: 35260 - protein, 9 aa, Homo sapiens
  Table A; Target 35260; HLA-C*03:03; KLK4; ENSG00000167749; TAA
LANGRMPTV

SEQ ID NO: 35261 - protein, 9 aa, Homo sapiens
  Table A; Target 35261; HLA-C*03:04; KLK4; ENSG00000167749; TAA
LANGRMPTV

SEQ ID NO: 35262 - protein, 9 aa, Homo sapiens
  Table A; Target 35262; HLA-C*12:03; KLK4; ENSG00000167749; TAA
LANGRMPTV

SEQ ID NO: 35263 - protein, 9 aa, Homo sapiens
  Table A; Target 35263; HLA-C*16:01; KLK4; ENSG00000167749; TAA
LANGRMPTV

SEQ ID NO: 35264 - protein, 9 aa, Homo sapiens
  Table A; Target 35264; HLA-C*16:02; KLK4; ENSG00000167749; TAA
LANGRMPTV

SEQ ID NO: 35265 - protein, 11 aa, Homo sapiens
  Table A; Target 35265; HLA-B*38:01; KLK4; ENSG00000167749; TAA
LDESVSESDTI

SEQ ID NO: 35266 - protein, 11 aa, Homo sapiens
  Table A; Target 35266; HLA-A*26:01; KLK4; ENSG00000167749; TAA
LEADQEPGSQM

SEQ ID NO: 35267 - protein, 11 aa, Homo sapiens
  Table A; Target 35267; HLA-A*30:01; KLK4; ENSG00000167749; TAA
LEADQEPGSQM

SEQ ID NO: 35268 - protein, 11 aa, Homo sapiens
  Table A; Target 35268; HLA-B*27:05; KLK4; ENSG00000167749; TAA
LEADQEPGSQM

SEQ ID NO: 35269 - protein, 11 aa, Homo sapiens
  Table A; Target 35269; HLA-B*39:01; KLK4; ENSG00000167749; TAA
LEADQEPGSQM

SEQ ID NO: 35270 - protein, 11 aa, Homo sapiens
  Table A; Target 35270; HLA-B*40:01; KLK4; ENSG00000167749; TAA
LEADQEPGSQM

SEQ ID NO: 35271 - protein, 11 aa, Homo sapiens
  Table A; Target 35271; HLA-B*40:02; KLK4; ENSG00000167749; TAA
LEADQEPGSQM

SEQ ID NO: 35272 - protein, 11 aa, Homo sapiens
  Table A; Target 35272; HLA-B*49:01; KLK4; ENSG00000167749; TAA
LEADQEPGSQM

SEQ ID NO: 35273 - protein, 8 aa, Homo sapiens
  Table A; Target 35273; HLA-B*51:01; KLK4; ENSG00000167749; TAA
LGVAGSLV

SEQ ID NO: 35274 - protein, 8 aa, Homo sapiens
  Table A; Target 35274; HLA-B*51:01; KLK4; ENSG00000167749; TAA
LGYLILGV

SEQ ID NO: 35275 - protein, 9 aa, Homo sapiens
  Table A; Target 35275; HLA-B*07:02; KLK4; ENSG00000167749; TAA
LILGVAGSL

SEQ ID NO: 35276 - protein, 9 aa, Homo sapiens
  Table A; Target 35276; HLA-C*01:02; KLK4; ENSG00000167749; TAA
LILGVAGSL

SEQ ID NO: 35277 - protein, 9 aa, Homo sapiens
  Table A; Target 35277; HLA-C*03:03; KLK4; ENSG00000167749; TAA
LILGVAGSL

SEQ ID NO: 35278 - protein, 9 aa, Homo sapiens
  Table A; Target 35278; HLA-C*03:04; KLK4; ENSG00000167749; TAA
LILGVAGSL

SEQ ID NO: 35279 - protein, 9 aa, Homo sapiens
  Table A; Target 35279; HLA-C*14:02; KLK4; ENSG00000167749; TAA
LILGVAGSL

SEQ ID NO: 35280 - protein, 10 aa, Homo sapiens
  Table A; Target 35280; HLA-A*02:01; KLK4; ENSG00000167749; TAA
LILGVAGSLV

SEQ ID NO: 35281 - protein, 10 aa, Homo sapiens
  Table A; Target 35281; HLA-A*02:03; KLK4; ENSG00000167749; TAA
LILGVAGSLV

SEQ ID NO: 35282 - protein, 10 aa, Homo sapiens
  Table A; Target 35282; HLA-A*02:07; KLK4; ENSG00000167749; TAA
LILGVAGSLV

SEQ ID NO: 35283 - protein, 9 aa, Homo sapiens
  Table A; Target 35283; HLA-A*02:01; KLK4; ENSG00000167749; TAA
LLANDLMLI

SEQ ID NO: 35284 - protein, 9 aa, Homo sapiens
  Table A; Target 35284; HLA-A*02:03; KLK4; ENSG00000167749; TAA
LLANDLMLI

SEQ ID NO: 35285 - protein, 9 aa, Homo sapiens
  Table A; Target 35285; HLA-A*02:04; KLK4; ENSG00000167749; TAA
LLANDLMLI

SEQ ID NO: 35286 - protein, 11 aa, Homo sapiens
  Table A; Target 35286; HLA-A*02:04; KLK4; ENSG00000167749; TAA
LLANDLMLIKL

SEQ ID NO: 35287 - protein, 10 aa, Homo sapiens
  Table A; Target 35287; HLA-A*02:03; KLK4; ENSG00000167749; TAA
LLANGRMPTV

SEQ ID NO: 35288 - protein, 8 aa, Homo sapiens
  Table A; Target 35288; HLA-C*07:04; KLK4; ENSG00000167749; TAA
LQGLVSFG

SEQ ID NO: 35289 - protein, 9 aa, Homo sapiens
  Table A; Target 35289; HLA-A*03:02; KLK4; ENSG00000167749; TAA
LQGLVSFGK

SEQ ID NO: 35290 - protein, 8 aa, Homo sapiens
  Table A; Target 35290; HLA-B*46:01; KLK4; ENSG00000167749; TAA
LSVRHPEY

SEQ ID NO: 35291 - protein, 8 aa, Homo sapiens
  Table A; Target 35291; HLA-B*58:01; KLK4; ENSG00000167749; TAA
LSVRHPEY

SEQ ID NO: 35292 - protein, 8 aa, Homo sapiens
  Table A; Target 35292; HLA-C*12:03; KLK4; ENSG00000167749; TAA
LSVRHPEY

SEQ ID NO: 35293 - protein, 8 aa, Homo sapiens
  Table A; Target 35293; HLA-C*16:01; KLK4; ENSG00000167749; TAA
LSVRHPEY

SEQ ID NO: 35294 - protein, 9 aa, Homo sapiens
  Table A; Target 35294; HLA-C*06:02; KLK4; ENSG00000167749; TAA
LVSGSCSQI

SEQ ID NO: 35295 - protein, 10 aa, Homo sapiens
  Table A; Target 35295; HLA-A*24:02; KLK4; ENSG00000167749; TAA
LYDPLYHPSM

SEQ ID NO: 35296 - protein, 11 aa, Homo sapiens
  Table A; Target 35296; HLA-A*24:02; KLK4; ENSG00000167749; TAA
LYDPLYHPSMF

SEQ ID NO: 35297 - protein, 9 aa, Homo sapiens
  Table A; Target 35297; HLA-B*18:01; KLK4; ENSG00000167749; TAA
MENELFCSG

SEQ ID NO: 35298 - protein, 9 aa, Homo sapiens
  Table A; Target 35298; HLA-B*40:02; KLK4; ENSG00000167749; TAA
MENELFCSG

SEQ ID NO: 35299 - protein, 9 aa, Homo sapiens
  Table A; Target 35299; HLA-B*49:01; KLK4; ENSG00000167749; TAA
MENELFCSG

SEQ ID NO: 35300 - protein, 10 aa, Homo sapiens
  Table A; Target 35300; HLA-B*49:01; KLK4; ENSG00000167749; TAA
MENELFCSGV

SEQ ID NO: 35301 - protein, 9 aa, Homo sapiens
  Table A; Target 35301; HLA-A*02:01; KLK4; ENSG00000167749; TAA
MLIKLDESV

SEQ ID NO: 35302 - protein, 9 aa, Homo sapiens
  Table A; Target 35302; HLA-A*02:03; KLK4; ENSG00000167749; TAA
MLIKLDESV

SEQ ID NO: 35303 - protein, 9 aa, Homo sapiens
  Table A; Target 35303; HLA-A*02:04; KLK4; ENSG00000167749; TAA
MLIKLDESV

SEQ ID NO: 35304 - protein, 9 aa, Homo sapiens
  Table A; Target 35304; HLA-A*02:07; KLK4; ENSG00000167749; TAA
MLIKLDESV

SEQ ID NO: 35305 - protein, 9 aa, Homo sapiens
  Table A; Target 35305; HLA-A*68:02; KLK4; ENSG00000167749; TAA
MLIKLDESV

SEQ ID NO: 35306 - protein, 9 aa, Homo sapiens
  Table A; Target 35306; HLA-B*13:02; KLK4; ENSG00000167749; TAA
MLIKLDESV

SEQ ID NO: 35307 - protein, 9 aa, Homo sapiens
  Table A; Target 35307; HLA-B*35:03; KLK4; ENSG00000167749; TAA
MLIKLDESV

SEQ ID NO: 35308 - protein, 9 aa, Homo sapiens
  Table A; Target 35308; HLA-B*55:01; KLK4; ENSG00000167749; TAA
MLIKLDESV

SEQ ID NO: 35309 - protein, 8 aa, Homo sapiens
  Table A; Target 35309; HLA-B*07:02; KLK4; ENSG00000167749; TAA
MPTVLQCV

SEQ ID NO: 35310 - protein, 8 aa, Homo sapiens
  Table A; Target 35310; HLA-B*08:01; KLK4; ENSG00000167749; TAA
MPTVLQCV

SEQ ID NO: 35311 - protein, 8 aa, Homo sapiens
  Table A; Target 35311; HLA-B*35:01; KLK4; ENSG00000167749; TAA
MPTVLQCV

SEQ ID NO: 35312 - protein, 8 aa, Homo sapiens
  Table A; Target 35312; HLA-B*35:03; KLK4; ENSG00000167749; TAA
MPTVLQCV

SEQ ID NO: 35313 - protein, 8 aa, Homo sapiens
  Table A; Target 35313; HLA-B*51:01; KLK4; ENSG00000167749; TAA
MPTVLQCV

SEQ ID NO: 35314 - protein, 8 aa, Homo sapiens
  Table A; Target 35314; HLA-B*54:01; KLK4; ENSG00000167749; TAA
MPTVLQCV

SEQ ID NO: 35315 - protein, 8 aa, Homo sapiens
  Table A; Target 35315; HLA-B*55:01; KLK4; ENSG00000167749; TAA
MPTVLQCV

SEQ ID NO: 35316 - protein, 8 aa, Homo sapiens
  Table A; Target 35316; HLA-B*56:01; KLK4; ENSG00000167749; TAA
MPTVLQCV

SEQ ID NO: 35317 - protein, 8 aa, Homo sapiens
  Table A; Target 35317; HLA-C*04:01; KLK4; ENSG00000167749; TAA
MPTVLQCV

SEQ ID NO: 35318 - protein, 10 aa, Homo sapiens
  Table A; Target 35318; HLA-B*54:01; KLK4; ENSG00000167749; TAA
MPTVLQCVNV

SEQ ID NO: 35319 - protein, 10 aa, Homo sapiens
  Table A; Target 35319; HLA-C*04:01; KLK4; ENSG00000167749; TAA
MPTVLQCVNV

SEQ ID NO: 35320 - protein, 9 aa, Homo sapiens
  Table A; Target 35320; HLA-A*33:01; KLK4; ENSG00000167749; TAA
MVEASLSVR

SEQ ID NO: 35321 - protein, 9 aa, Homo sapiens
  Table A; Target 35321; HLA-A*33:03; KLK4; ENSG00000167749; TAA
MVEASLSVR

SEQ ID NO: 35322 - protein, 9 aa, Homo sapiens
  Table A; Target 35322; HLA-A*68:01; KLK4; ENSG00000167749; TAA
MVEASLSVR

SEQ ID NO: 35323 - protein, 9 aa, Homo sapiens
  Table A; Target 35323; HLA-C*07:06; KLK4; ENSG00000167749; TAA
MVEASLSVR

SEQ ID NO: 35324 - protein, 8 aa, Homo sapiens
  Table A; Target 35324; HLA-C*05:01; KLK4; ENSG00000167749; TAA
NGDSGGPL

SEQ ID NO: 35325 - protein, 9 aa, Homo sapiens
  Table A; Target 35325; HLA-B*35:03; KLK4; ENSG00000167749; TAA
NGDSGGPLI

SEQ ID NO: 35326 - protein, 9 aa, Homo sapiens
  Table A; Target 35326; HLA-B*38:01; KLK4; ENSG00000167749; TAA
NGDSGGPLI

SEQ ID NO: 35327 - protein, 9 aa, Homo sapiens
  Table A; Target 35327; HLA-B*39:01; KLK4; ENSG00000167749; TAA
NGDSGGPLI

SEQ ID NO: 35328 - protein, 9 aa, Homo sapiens
  Table A; Target 35328; HLA-B*51:01; KLK4; ENSG00000167749; TAA
NGDSGGPLI

SEQ ID NO: 35329 - protein, 9 aa, Homo sapiens
  Table A; Target 35329; HLA-C*05:01; KLK4; ENSG00000167749; TAA
NGDSGGPLI

SEQ ID NO: 35330 - protein, 8 aa, Homo sapiens
  Table A; Target 35330; HLA-B*51:01; KLK4; ENSG00000167749; TAA
NGYLQGLV

SEQ ID NO: 35331 - protein, 10 aa, Homo sapiens
  Table A; Target 35331; HLA-B*15:03; KLK4; ENSG00000167749; TAA
NGYLQGLVSF

SEQ ID NO: 35332 - protein, 10 aa, Homo sapiens
  Table A; Target 35332; HLA-B*18:01; KLK4; ENSG00000167749; TAA
NGYLQGLVSF

SEQ ID NO: 35333 - protein, 10 aa, Homo sapiens
  Table A; Target 35333; HLA-B*35:01; KLK4; ENSG00000167749; TAA
NGYLQGLVSF

SEQ ID NO: 35334 - protein, 10 aa, Homo sapiens
  Table A; Target 35334; HLA-B*39:01; KLK4; ENSG00000167749; TAA
NGYLQGLVSF

SEQ ID NO: 35335 - protein, 10 aa, Homo sapiens
  Table A; Target 35335; HLA-B*46:01; KLK4; ENSG00000167749; TAA
NGYLQGLVSF

SEQ ID NO: 35336 - protein, 10 aa, Homo sapiens
  Table A; Target 35336; HLA-C*04:01; KLK4; ENSG00000167749; TAA
NGYLQGLVSF

SEQ ID NO: 35337 - protein, 10 aa, Homo sapiens
  Table A; Target 35337; HLA-C*12:03; KLK4; ENSG00000167749; TAA
NGYLQGLVSF

SEQ ID NO: 35338 - protein, 9 aa, Homo sapiens
  Table A; Target 35338; HLA-A*29:02; KLK4; ENSG00000167749; TAA
NPWGWFLGY

SEQ ID NO: 35339 - protein, 9 aa, Homo sapiens
  Table A; Target 35339; HLA-C*01:02; KLK4; ENSG00000167749; TAA
NRPLLANDL

SEQ ID NO: 35340 - protein, 9 aa, Homo sapiens
  Table A; Target 35340; HLA-C*06:02; KLK4; ENSG00000167749; TAA
NRPLLANDL

SEQ ID NO: 35341 - protein, 9 aa, Homo sapiens
  Table A; Target 35341; HLA-C*07:02; KLK4; ENSG00000167749; TAA
NRPLLANDL

SEQ ID NO: 35342 - protein, 9 aa, Homo sapiens
  Table A; Target 35342; HLA-A*01:01; KLK4; ENSG00000167749; TAA
NSYTIGLGL

SEQ ID NO: 35343 - protein, 9 aa, Homo sapiens
  Table A; Target 35343; HLA-A*68:02; KLK4; ENSG00000167749; TAA
NSYTIGLGL

SEQ ID NO: 35344 - protein, 9 aa, Homo sapiens
  Table A; Target 35344; HLA-B*13:02; KLK4; ENSG00000167749; TAA
NSYTIGLGL

SEQ ID NO: 35345 - protein, 9 aa, Homo sapiens
  Table A; Target 35345; HLA-B*27:05; KLK4; ENSG00000167749; TAA
NSYTIGLGL

SEQ ID NO: 35346 - protein, 9 aa, Homo sapiens
  Table A; Target 35346; HLA-B*39:01; KLK4; ENSG00000167749; TAA
NSYTIGLGL

SEQ ID NO: 35347 - protein, 9 aa, Homo sapiens
  Table A; Target 35347; HLA-B*51:01; KLK4; ENSG00000167749; TAA
NSYTIGLGL

SEQ ID NO: 35348 - protein, 9 aa, Homo sapiens
  Table A; Target 35348; HLA-B*58:01; KLK4; ENSG00000167749; TAA
NSYTIGLGL

SEQ ID NO: 35349 - protein, 9 aa, Homo sapiens
  Table A; Target 35349; HLA-C*01:02; KLK4; ENSG00000167749; TAA
NSYTIGLGL

SEQ ID NO: 35350 - protein, 9 aa, Homo sapiens
  Table A; Target 35350; HLA-C*02:02; KLK4; ENSG00000167749; TAA
NSYTIGLGL

SEQ ID NO: 35351 - protein, 9 aa, Homo sapiens
  Table A; Target 35351; HLA-C*03:03; KLK4; ENSG00000167749; TAA
NSYTIGLGL

SEQ ID NO: 35352 - protein, 9 aa, Homo sapiens
  Table A; Target 35352; HLA-C*03:04; KLK4; ENSG00000167749; TAA
NSYTIGLGL

SEQ ID NO: 35353 - protein, 9 aa, Homo sapiens
  Table A; Target 35353; HLA-C*05:01; KLK4; ENSG00000167749; TAA
NSYTIGLGL

SEQ ID NO: 35354 - protein, 9 aa, Homo sapiens
  Table A; Target 35354; HLA-C*06:02; KLK4; ENSG00000167749; TAA
NSYTIGLGL

SEQ ID NO: 35355 - protein, 9 aa, Homo sapiens
  Table A; Target 35355; HLA-C*07:06; KLK4; ENSG00000167749; TAA
NSYTIGLGL

SEQ ID NO: 35356 - protein, 9 aa, Homo sapiens
  Table A; Target 35356; HLA-C*12:03; KLK4; ENSG00000167749; TAA
NSYTIGLGL

SEQ ID NO: 35357 - protein, 9 aa, Homo sapiens
  Table A; Target 35357; HLA-C*14:02; KLK4; ENSG00000167749; TAA
NSYTIGLGL

SEQ ID NO: 35358 - protein, 9 aa, Homo sapiens
  Table A; Target 35358; HLA-C*16:02; KLK4; ENSG00000167749; TAA
NSYTIGLGL

SEQ ID NO: 35359 - protein, 9 aa, Homo sapiens
  Table A; Target 35359; HLA-C*16:04; KLK4; ENSG00000167749; TAA
NSYTIGLGL

SEQ ID NO: 35360 - protein, 9 aa, Homo sapiens
  Table A; Target 35360; HLA-A*68:02; KLK4; ENSG00000167749; TAA
NVSVVSEEV

SEQ ID NO: 35361 - protein, 9 aa, Homo sapiens
  Table A; Target 35361; HLA-B*13:02; KLK4; ENSG00000167749; TAA
NVSVVSEEV

SEQ ID NO: 35362 - protein, 9 aa, Homo sapiens
  Table A; Target 35362; HLA-B*35:03; KLK4; ENSG00000167749; TAA
NVSVVSEEV

SEQ ID NO: 35363 - protein, 9 aa, Homo sapiens
  Table A; Target 35363; HLA-B*55:01; KLK4; ENSG00000167749; TAA
NVSVVSEEV

SEQ ID NO: 35364 - protein, 9 aa, Homo sapiens
  Table A; Target 35364; HLA-C*04:01; KLK4; ENSG00000167749; TAA
NVSVVSEEV

SEQ ID NO: 35365 - protein, 9 aa, Homo sapiens
  Table A; Target 35365; HLA-C*07:06; KLK4; ENSG00000167749; TAA
NVSVVSEEV

SEQ ID NO: 35366 - protein, 8 aa, Homo sapiens
  Table A; Target 35366; HLA-B*40:02; KLK4; ENSG00000167749; TAA
PEYNRPLL

SEQ ID NO: 35367 - protein, 10 aa, Homo sapiens
  Table A; Target 35367; HLA-B*07:02; KLK4; ENSG00000167749; TAA
PGSQMVEASL

SEQ ID NO: 35368 - protein, 9 aa, Homo sapiens
  Table A; Target 35368; HLA-C*06:02; KLK4; ENSG00000167749; TAA
PTAGNSCLV

SEQ ID NO: 35369 - protein, 10 aa, Homo sapiens
  Table A; Target 35369; HLA-B*35:03; KLK4; ENSG00000167749; TAA
QAALVMENEL

SEQ ID NO: 35370 - protein, 10 aa, Homo sapiens
  Table A; Target 35370; HLA-B*38:01; KLK4; ENSG00000167749; TAA
QAALVMENEL

SEQ ID NO: 35371 - protein, 10 aa, Homo sapiens
  Table A; Target 35371; HLA-B*39:01; KLK4; ENSG00000167749; TAA
QAALVMENEL

SEQ ID NO: 35372 - protein, 9 aa, Homo sapiens
  Table A; Target 35372; HLA-C*01:02; KLK4; ENSG00000167749; TAA
QCPTAGNSC

SEQ ID NO: 35373 - protein, 10 aa, Homo sapiens
  Table A; Target 35373; HLA-C*01:02; KLK4; ENSG00000167749; TAA
QCPTAGNSCL

SEQ ID NO: 35374 - protein, 10 aa, Homo sapiens
  Table A; Target 35374; HLA-A*30:01; KLK4; ENSG00000167749; TAA
QEPGSQMVEA

SEQ ID NO: 35375 - protein, 10 aa, Homo sapiens
  Table A; Target 35375; HLA-B*40:02; KLK4; ENSG00000167749; TAA
QEPGSQMVEA

SEQ ID NO: 35376 - protein, 8 aa, Homo sapiens
  Table A; Target 35376; HLA-B*27:02; KLK4; ENSG00000167749; TAA
QGLVSFGK

SEQ ID NO: 35377 - protein, 9 aa, Homo sapiens
  Table A; Target 35377; HLA-A*02:01; KLK4; ENSG00000167749; TAA
QMVEASLSV

SEQ ID NO: 35378 - protein, 9 aa, Homo sapiens
  Table A; Target 35378; HLA-A*02:03; KLK4; ENSG00000167749; TAA
QMVEASLSV

SEQ ID NO: 35379 - protein, 9 aa, Homo sapiens
  Table A; Target 35379; HLA-A*30:01; KLK4; ENSG00000167749; TAA
QMVEASLSV

SEQ ID NO: 35380 - protein, 9 aa, Homo sapiens
  Table A; Target 35380; HLA-B*13:02; KLK4; ENSG00000167749; TAA
QMVEASLSV

SEQ ID NO: 35381 - protein, 9 aa, Homo sapiens
  Table A; Target 35381; HLA-B*46:01; KLK4; ENSG00000167749; TAA
QMVEASLSV

SEQ ID NO: 35382 - protein, 9 aa, Homo sapiens
  Table A; Target 35382; HLA-B*55:01; KLK4; ENSG00000167749; TAA
QMVEASLSV

SEQ ID NO: 35383 - protein, 9 aa, Homo sapiens
  Table A; Target 35383; HLA-B*56:01; KLK4; ENSG00000167749; TAA
QMVEASLSV

SEQ ID NO: 35384 - protein, 10 aa, Homo sapiens
  Table A; Target 35384; HLA-A*31:01; KLK4; ENSG00000167749; TAA
QMVEASLSVR

SEQ ID NO: 35385 - protein, 10 aa, Homo sapiens
  Table A; Target 35385; HLA-A*33:03; KLK4; ENSG00000167749; TAA
QMVEASLSVR

SEQ ID NO: 35386 - protein, 10 aa, Homo sapiens
  Table A; Target 35386; HLA-A*68:01; KLK4; ENSG00000167749; TAA
QMVEASLSVR

SEQ ID NO: 35387 - protein, 10 aa, Homo sapiens
  Table A; Target 35387; HLA-C*07:06; KLK4; ENSG00000167749; TAA
QMVEASLSVR

SEQ ID NO: 35388 - protein, 8 aa, Homo sapiens
  Table A; Target 35388; HLA-B*51:01; KLK4; ENSG00000167749; TAA
QPWQAALV

SEQ ID NO: 35389 - protein, 8 aa, Homo sapiens
  Table A; Target 35389; HLA-B*56:01; KLK4; ENSG00000167749; TAA
QPWQAALV

SEQ ID NO: 35390 - protein, 9 aa, Homo sapiens
  Table A; Target 35390; HLA-B*07:02; KLK4; ENSG00000167749; TAA
QPWQAALVM

SEQ ID NO: 35391 - protein, 9 aa, Homo sapiens
  Table A; Target 35391; HLA-B*35:01; KLK4; ENSG00000167749; TAA
QPWQAALVM

SEQ ID NO: 35392 - protein, 9 aa, Homo sapiens
  Table A; Target 35392; HLA-B*35:03; KLK4; ENSG00000167749; TAA
QPWQAALVM

SEQ ID NO: 35393 - protein, 8 aa, Homo sapiens
  Table A; Target 35393; HLA-A*01:01; KLK4; ENSG00000167749; TAA
QVGVPGVY

SEQ ID NO: 35394 - protein, 8 aa, Homo sapiens
  Table A; Target 35394; HLA-A*30:02; KLK4; ENSG00000167749; TAA
QVGVPGVY

SEQ ID NO: 35395 - protein, 8 aa, Homo sapiens
  Table A; Target 35395; HLA-A*32:01; KLK4; ENSG00000167749; TAA
QVGVPGVY

SEQ ID NO: 35396 - protein, 8 aa, Homo sapiens
  Table A; Target 35396; HLA-B*15:01; KLK4; ENSG00000167749; TAA
QVGVPGVY

SEQ ID NO: 35397 - protein, 8 aa, Homo sapiens
  Table A; Target 35397; HLA-B*15:03; KLK4; ENSG00000167749; TAA
QVGVPGVY

SEQ ID NO: 35398 - protein, 8 aa, Homo sapiens
  Table A; Target 35398; HLA-B*39:01; KLK4; ENSG00000167749; TAA
QVGVPGVY

SEQ ID NO: 35399 - protein, 8 aa, Homo sapiens
  Table A; Target 35399; HLA-C*05:01; KLK4; ENSG00000167749; TAA
QVGVPGVY

SEQ ID NO: 35400 - protein, 8 aa, Homo sapiens
  Table A; Target 35400; HLA-C*07:01; KLK4; ENSG00000167749; TAA
QVGVPGVY

SEQ ID NO: 35401 - protein, 8 aa, Homo sapiens
  Table A; Target 35401; HLA-C*07:04; KLK4; ENSG00000167749; TAA
QVGVPGVY

SEQ ID NO: 35402 - protein, 8 aa, Homo sapiens
  Table A; Target 35402; HLA-C*12:03; KLK4; ENSG00000167749; TAA
QVGVPGVY

SEQ ID NO: 35403 - protein, 11 aa, Homo sapiens
  Table A; Target 35403; HLA-C*01:02; KLK4; ENSG00000167749; TAA
QVGVPGVYTNL

SEQ ID NO: 35404 - protein, 10 aa, Homo sapiens
  Table A; Target 35404; HLA-A*24:02; KLK4; ENSG00000167749; TAA
RHPEYNRPLL

SEQ ID NO: 35405 - protein, 9 aa, Homo sapiens
  Table A; Target 35405; HLA-A*02:01; KLK4; ENSG00000167749; TAA
RMPTVLQCV

SEQ ID NO: 35406 - protein, 9 aa, Homo sapiens
  Table A; Target 35406; HLA-A*02:03; KLK4; ENSG00000167749; TAA
RMPTVLQCV

SEQ ID NO: 35407 - protein, 9 aa, Homo sapiens
  Table A; Target 35407; HLA-A*02:07; KLK4; ENSG00000167749; TAA
RMPTVLQCV

SEQ ID NO: 35408 - protein, 9 aa, Homo sapiens
  Table A; Target 35408; HLA-A*24:02; KLK4; ENSG00000167749; TAA
RMPTVLQCV

SEQ ID NO: 35409 - protein, 9 aa, Homo sapiens
  Table A; Target 35409; HLA-B*13:02; KLK4; ENSG00000167749; TAA
RMPTVLQCV

SEQ ID NO: 35410 - protein, 9 aa, Homo sapiens
  Table A; Target 35410; HLA-B*55:01; KLK4; ENSG00000167749; TAA
RMPTVLQCV

SEQ ID NO: 35411 - protein, 8 aa, Homo sapiens
  Table A; Target 35411; HLA-B*07:02; KLK4; ENSG00000167749; TAA
RPLLANDL

SEQ ID NO: 35412 - protein, 8 aa, Homo sapiens
  Table A; Target 35412; HLA-B*08:01; KLK4; ENSG00000167749; TAA
RPLLANDL

SEQ ID NO: 35413 - protein, 8 aa, Homo sapiens
  Table A; Target 35413; HLA-C*07:02; KLK4; ENSG00000167749; TAA
RPLLANDL

SEQ ID NO: 35414 - protein, 9 aa, Homo sapiens
  Table A; Target 35414; HLA-B*58:01; KLK4; ENSG00000167749; TAA
RSISIASQC

SEQ ID NO: 35415 - protein, 9 aa, Homo sapiens
  Table A; Target 35415; HLA-A*30:01; KLK4; ENSG00000167749; TAA
SDTIRSISI

SEQ ID NO: 35416 - protein, 9 aa, Homo sapiens
  Table A; Target 35416; HLA-B*08:01; KLK4; ENSG00000167749; TAA
SDTIRSISI

SEQ ID NO: 35417 - protein, 9 aa, Homo sapiens
  Table A; Target 35417; HLA-B*37:01; KLK4; ENSG00000167749; TAA
SDTIRSISI

SEQ ID NO: 35418 - protein, 9 aa, Homo sapiens
  Table A; Target 35418; HLA-B*40:02; KLK4; ENSG00000167749; TAA
SDTIRSISI

SEQ ID NO: 35419 - protein, 9 aa, Homo sapiens
  Table A; Target 35419; HLA-B*44:02; KLK4; ENSG00000167749; TAA
SDTIRSISI

SEQ ID NO: 35420 - protein, 9 aa, Homo sapiens
  Table A; Target 35420; HLA-B*49:01; KLK4; ENSG00000167749; TAA
SDTIRSISI

SEQ ID NO: 35421 - protein, 9 aa, Homo sapiens
  Table A; Target 35421; HLA-C*06:02; KLK4; ENSG00000167749; TAA
SDTIRSISI

SEQ ID NO: 35422 - protein, 9 aa, Homo sapiens
  Table A; Target 35422; HLA-C*16:01; KLK4; ENSG00000167749; TAA
SDTIRSISI

SEQ ID NO: 35423 - protein, 9 aa, Homo sapiens
  Table A; Target 35423; HLA-C*16:02; KLK4; ENSG00000167749; TAA
SDTIRSISI

SEQ ID NO: 35424 - protein, 9 aa, Homo sapiens
  Table A; Target 35424; HLA-B*44:02; KLK4; ENSG00000167749; TAA
SEEVCSKLY

SEQ ID NO: 35425 - protein, 9 aa, Homo sapiens
  Table A; Target 35425; HLA-B*44:03; KLK4; ENSG00000167749; TAA
SEEVCSKLY

SEQ ID NO: 35426 - protein, 9 aa, Homo sapiens
  Table A; Target 35426; HLA-C*16:04; KLK4; ENSG00000167749; TAA
SEEVCSKLY

SEQ ID NO: 35427 - protein, 9 aa, Homo sapiens
  Table A; Target 35427; HLA-A*30:01; KLK4; ENSG00000167749; TAA
SESDTIRSI

SEQ ID NO: 35428 - protein, 9 aa, Homo sapiens
  Table A; Target 35428; HLA-B*13:02; KLK4; ENSG00000167749; TAA
SESDTIRSI

SEQ ID NO: 35429 - protein, 9 aa, Homo sapiens
  Table A; Target 35429; HLA-B*18:01; KLK4; ENSG00000167749; TAA
SESDTIRSI

SEQ ID NO: 35430 - protein, 9 aa, Homo sapiens
  Table A; Target 35430; HLA-B*27:02; KLK4; ENSG00000167749; TAA
SESDTIRSI

SEQ ID NO: 35431 - protein, 9 aa, Homo sapiens
  Table A; Target 35431; HLA-B*27:05; KLK4; ENSG00000167749; TAA
SESDTIRSI

SEQ ID NO: 35432 - protein, 9 aa, Homo sapiens
  Table A; Target 35432; HLA-B*37:01; KLK4; ENSG00000167749; TAA
SESDTIRSI

SEQ ID NO: 35433 - protein, 9 aa, Homo sapiens
  Table A; Target 35433; HLA-B*38:01; KLK4; ENSG00000167749; TAA
SESDTIRSI

SEQ ID NO: 35434 - protein, 9 aa, Homo sapiens
  Table A; Target 35434; HLA-B*40:01; KLK4; ENSG00000167749; TAA
SESDTIRSI

SEQ ID NO: 35435 - protein, 9 aa, Homo sapiens
  Table A; Target 35435; HLA-B*40:02; KLK4; ENSG00000167749; TAA
SESDTIRSI

SEQ ID NO: 35436 - protein, 9 aa, Homo sapiens
  Table A; Target 35436; HLA-B*44:02; KLK4; ENSG00000167749; TAA
SESDTIRSI

SEQ ID NO: 35437 - protein, 9 aa, Homo sapiens
  Table A; Target 35437; HLA-B*44:03; KLK4; ENSG00000167749; TAA
SESDTIRSI

SEQ ID NO: 35438 - protein, 9 aa, Homo sapiens
  Table A; Target 35438; HLA-B*49:01; KLK4; ENSG00000167749; TAA
SESDTIRSI

SEQ ID NO: 35439 - protein, 9 aa, Homo sapiens
  Table A; Target 35439; HLA-C*02:02; KLK4; ENSG00000167749; TAA
SESDTIRSI

SEQ ID NO: 35440 - protein, 9 aa, Homo sapiens
  Table A; Target 35440; HLA-C*06:02; KLK4; ENSG00000167749; TAA
SESDTIRSI

SEQ ID NO: 35441 - protein, 9 aa, Homo sapiens
  Table A; Target 35441; HLA-C*12:03; KLK4; ENSG00000167749; TAA
SESDTIRSI

SEQ ID NO: 35442 - protein, 9 aa, Homo sapiens
  Table A; Target 35442; HLA-C*16:01; KLK4; ENSG00000167749; TAA
SESDTIRSI

SEQ ID NO: 35443 - protein, 9 aa, Homo sapiens
  Table A; Target 35443; HLA-C*16:02; KLK4; ENSG00000167749; TAA
SESDTIRSI

SEQ ID NO: 35444 - protein, 9 aa, Homo sapiens
  Table A; Target 35444; HLA-C*16:04; KLK4; ENSG00000167749; TAA
SESDTIRSI

SEQ ID NO: 35445 - protein, 11 aa, Homo sapiens
  Table A; Target 35445; HLA-A*30:01; KLK4; ENSG00000167749; TAA
SESDTIRSISI

SEQ ID NO: 35446 - protein, 11 aa, Homo sapiens
  Table A; Target 35446; HLA-B*37:01; KLK4; ENSG00000167749; TAA
SESDTIRSISI

SEQ ID NO: 35447 - protein, 11 aa, Homo sapiens
  Table A; Target 35447; HLA-B*40:01; KLK4; ENSG00000167749; TAA
SESDTIRSISI

SEQ ID NO: 35448 - protein, 11 aa, Homo sapiens
  Table A; Target 35448; HLA-B*44:02; KLK4; ENSG00000167749; TAA
SESDTIRSISI

SEQ ID NO: 35449 - protein, 11 aa, Homo sapiens
  Table A; Target 35449; HLA-B*44:03; KLK4; ENSG00000167749; TAA
SESDTIRSISI

SEQ ID NO: 35450 - protein, 11 aa, Homo sapiens
  Table A; Target 35450; HLA-B*49:01; KLK4; ENSG00000167749; TAA
SESDTIRSISI

SEQ ID NO: 35451 - protein, 10 aa, Homo sapiens
  Table A; Target 35451; HLA-A*30:02; KLK4; ENSG00000167749; TAA
SGGPLICNGY

SEQ ID NO: 35452 - protein, 10 aa, Homo sapiens
  Table A; Target 35452; HLA-C*07:01; KLK4; ENSG00000167749; TAA
SGGPLICNGY

SEQ ID NO: 35453 - protein, 9 aa, Homo sapiens
  Table A; Target 35453; HLA-B*44:02; KLK4; ENSG00000167749; TAA
SGVLVHPQW

SEQ ID NO: 35454 - protein, 9 aa, Homo sapiens
  Table A; Target 35454; HLA-B*44:03; KLK4; ENSG00000167749; TAA
SGVLVHPQW

SEQ ID NO: 35455 - protein, 9 aa, Homo sapiens
  Table A; Target 35455; HLA-B*57:01; KLK4; ENSG00000167749; TAA
SGVLVHPQW

SEQ ID NO: 35456 - protein, 9 aa, Homo sapiens
  Table A; Target 35456; HLA-B*58:01; KLK4; ENSG00000167749; TAA
SGVLVHPQW

SEQ ID NO: 35457 - protein, 9 aa, Homo sapiens
  Table A; Target 35457; HLA-C*12:03; KLK4; ENSG00000167749; TAA
SGVLVHPQW

SEQ ID NO: 35458 - protein, 9 aa, Homo sapiens
  Table A; Target 35458; HLA-C*16:04; KLK4; ENSG00000167749; TAA
SGVLVHPQW

SEQ ID NO: 35459 - protein, 9 aa, Homo sapiens
  Table A; Target 35459; HLA-A*02:01; KLK4; ENSG00000167749; TAA
SIASQCPTA

SEQ ID NO: 35460 - protein, 9 aa, Homo sapiens
  Table A; Target 35460; HLA-B*55:01; KLK4; ENSG00000167749; TAA
SIASQCPTA

SEQ ID NO: 35461 - protein, 10 aa, Homo sapiens
  Table A; Target 35461; HLA-C*06:02; KLK4; ENSG00000167749; TAA
SISIASQCPT

SEQ ID NO: 35462 - protein, 9 aa, Homo sapiens
  Table A; Target 35462; HLA-A*01:01; KLK4; ENSG00000167749; TAA
SLSVRHPEY

SEQ ID NO: 35463 - protein, 9 aa, Homo sapiens
  Table A; Target 35463; HLA-A*29:02; KLK4; ENSG00000167749; TAA
SLSVRHPEY

SEQ ID NO: 35464 - protein, 9 aa, Homo sapiens
  Table A; Target 35464; HLA-A*30:02; KLK4; ENSG00000167749; TAA
SLSVRHPEY

SEQ ID NO: 35465 - protein, 9 aa, Homo sapiens
  Table A; Target 35465; HLA-A*32:01; KLK4; ENSG00000167749; TAA
SLSVRHPEY

SEQ ID NO: 35466 - protein, 9 aa, Homo sapiens
  Table A; Target 35466; HLA-B*15:01; KLK4; ENSG00000167749; TAA
SLSVRHPEY

SEQ ID NO: 35467 - protein, 9 aa, Homo sapiens
  Table A; Target 35467; HLA-C*16:01; KLK4; ENSG00000167749; TAA
SLSVRHPEY

SEQ ID NO: 35468 - protein, 9 aa, Homo sapiens
  Table A; Target 35468; HLA-B*54:01; KLK4; ENSG00000167749; TAA
SPHSQPWQA

SEQ ID NO: 35469 - protein, 9 aa, Homo sapiens
  Table A; Target 35469; HLA-B*55:01; KLK4; ENSG00000167749; TAA
SPHSQPWQA

SEQ ID NO: 35470 - protein, 9 aa, Homo sapiens
  Table A; Target 35470; HLA-B*56:01; KLK4; ENSG00000167749; TAA
SPHSQPWQA

SEQ ID NO: 35471 - protein, 10 aa, Homo sapiens
  Table A; Target 35471; HLA-B*56:01; KLK4; ENSG00000167749; TAA
SPHSQPWQAA

SEQ ID NO: 35472 - protein, 11 aa, Homo sapiens
  Table A; Target 35472; HLA-B*07:02; KLK4; ENSG00000167749; TAA
SPHSQPWQAAL

SEQ ID NO: 35473 - protein, 8 aa, Homo sapiens
  Table A; Target 35473; HLA-B*13:02; KLK4; ENSG00000167749; TAA
SQMVEASL

SEQ ID NO: 35474 - protein, 8 aa, Homo sapiens
  Table A; Target 35474; HLA-B*15:01; KLK4; ENSG00000167749; TAA
SQMVEASL

SEQ ID NO: 35475 - protein, 8 aa, Homo sapiens
  Table A; Target 35475; HLA-B*39:01; KLK4; ENSG00000167749; TAA
SQMVEASL

SEQ ID NO: 35476 - protein, 10 aa, Homo sapiens
  Table A; Target 35476; HLA-B*13:02; KLK4; ENSG00000167749; TAA
SQMVEASLSV

SEQ ID NO: 35477 - protein, 9 aa, Homo sapiens
  Table A; Target 35477; HLA-B*13:02; KLK4; ENSG00000167749; TAA
SQPWQAALV

SEQ ID NO: 35478 - protein, 9 aa, Homo sapiens
  Table A; Target 35478; HLA-A*31:01; KLK4; ENSG00000167749; TAA
SVRHPEYNR

SEQ ID NO: 35479 - protein, 9 aa, Homo sapiens
  Table A; Target 35479; HLA-A*33:01; KLK4; ENSG00000167749; TAA
SVRHPEYNR

SEQ ID NO: 35480 - protein, 9 aa, Homo sapiens
  Table A; Target 35480; HLA-A*33:03; KLK4; ENSG00000167749; TAA
SVRHPEYNR

SEQ ID NO: 35481 - protein, 9 aa, Homo sapiens
  Table A; Target 35481; HLA-B*57:01; KLK4; ENSG00000167749; TAA
SVRHPEYNR

SEQ ID NO: 35482 - protein, 8 aa, Homo sapiens
  Table A; Target 35482; HLA-C*05:01; KLK4; ENSG00000167749; TAA
SVSESDTI

SEQ ID NO: 35483 - protein, 9 aa, Homo sapiens
  Table A; Target 35483; HLA-A*68:01; KLK4; ENSG00000167749; TAA
SVSESDTIR

SEQ ID NO: 35484 - protein, 9 aa, Homo sapiens
  Table A; Target 35484; HLA-C*07:06; KLK4; ENSG00000167749; TAA
SVSESDTIR

SEQ ID NO: 35485 - protein, 11 aa, Homo sapiens
  Table A; Target 35485; HLA-A*25:01; KLK4; ENSG00000167749; TAA
SVSESDTIRSI

SEQ ID NO: 35486 - protein, 10 aa, Homo sapiens
  Table A; Target 35486; HLA-A*03:02; KLK4; ENSG00000167749; TAA
SVVSEEVCSK

SEQ ID NO: 35487 - protein, 10 aa, Homo sapiens
  Table A; Target 35487; HLA-A*11:01; KLK4; ENSG00000167749; TAA
SVVSEEVCSK

SEQ ID NO: 35488 - protein, 10 aa, Homo sapiens
  Table A; Target 35488; HLA-A*68:01; KLK4; ENSG00000167749; TAA
SVVSEEVCSK

SEQ ID NO: 35489 - protein, 10 aa, Homo sapiens
  Table A; Target 35489; HLA-C*07:06; KLK4; ENSG00000167749; TAA
SVVSEEVCSK

SEQ ID NO: 35490 - protein, 11 aa, Homo sapiens
  Table A; Target 35490; HLA-A*26:01; KLK4; ENSG00000167749; TAA
SVVSEEVCSKL

SEQ ID NO: 35491 - protein, 11 aa, Homo sapiens
  Table A; Target 35491; HLA-A*68:02; KLK4; ENSG00000167749; TAA
SVVSEEVCSKL

SEQ ID NO: 35492 - protein, 8 aa, Homo sapiens
  Table A; Target 35492; HLA-C*01:02; KLK4; ENSG00000167749; TAA
SYTIGLGL

SEQ ID NO: 35493 - protein, 8 aa, Homo sapiens
  Table A; Target 35493; HLA-C*14:02; KLK4; ENSG00000167749; TAA
SYTIGLGL

SEQ ID NO: 35494 - protein, 11 aa, Homo sapiens
  Table A; Target 35494; HLA-A*24:02; KLK4; ENSG00000167749; TAA
SYTIGLGLHSL

SEQ ID NO: 35495 - protein, 8 aa, Homo sapiens
  Table A; Target 35495; HLA-B*57:01; KLK4; ENSG00000167749; TAA
TAGNPWGW

SEQ ID NO: 35496 - protein, 8 aa, Homo sapiens
  Table A; Target 35496; HLA-B*51:01; KLK4; ENSG00000167749; TAA
TAGNSCLV

SEQ ID NO: 35497 - protein, 8 aa, Homo sapiens
  Table A; Target 35497; HLA-A*30:01; KLK4; ENSG00000167749; TAA
TEWIEKTV

SEQ ID NO: 35498 - protein, 8 aa, Homo sapiens
  Table A; Target 35498; HLA-B*18:01; KLK4; ENSG00000167749; TAA
TEWIEKTV

SEQ ID NO: 35499 - protein, 8 aa, Homo sapiens
  Table A; Target 35499; HLA-B*40:02; KLK4; ENSG00000167749; TAA
TEWIEKTV

SEQ ID NO: 35500 - protein, 8 aa, Homo sapiens
  Table A; Target 35500; HLA-B*44:03; KLK4; ENSG00000167749; TAA
TEWIEKTV

SEQ ID NO: 35501 - protein, 8 aa, Homo sapiens
  Table A; Target 35501; HLA-B*49:01; KLK4; ENSG00000167749; TAA
TEWIEKTV

SEQ ID NO: 35502 - protein, 8 aa, Homo sapiens
  Table A; Target 35502; HLA-C*16:04; KLK4; ENSG00000167749; TAA
TEWIEKTV

SEQ ID NO: 35503 - protein, 9 aa, Homo sapiens
  Table A; Target 35503; HLA-B*40:02; KLK4; ENSG00000167749; TAA
TEWIEKTVQ

SEQ ID NO: 35504 - protein, 10 aa, Homo sapiens
  Table A; Target 35504; HLA-A*30:01; KLK4; ENSG00000167749; TAA
TEWIEKTVQA

SEQ ID NO: 35505 - protein, 10 aa, Homo sapiens
  Table A; Target 35505; HLA-B*40:01; KLK4; ENSG00000167749; TAA
TEWIEKTVQA

SEQ ID NO: 35506 - protein, 10 aa, Homo sapiens
  Table A; Target 35506; HLA-B*40:02; KLK4; ENSG00000167749; TAA
TEWIEKTVQA

SEQ ID NO: 35507 - protein, 10 aa, Homo sapiens
  Table A; Target 35507; HLA-B*49:01; KLK4; ENSG00000167749; TAA
TEWIEKTVQA

SEQ ID NO: 35508 - protein, 11 aa, Homo sapiens
  Table A; Target 35508; HLA-C*06:02; KLK4; ENSG00000167749; TAA
TEWIEKTVQAS

SEQ ID NO: 35509 - protein, 9 aa, Homo sapiens
  Table A; Target 35509; HLA-A*02:04; KLK4; ENSG00000167749; TAA
TIGLGLHSL

SEQ ID NO: 35510 - protein, 9 aa, Homo sapiens
  Table A; Target 35510; HLA-B*08:01; KLK4; ENSG00000167749; TAA
TIGLGLHSL

SEQ ID NO: 35511 - protein, 9 aa, Homo sapiens
  Table A; Target 35511; HLA-B*40:02; KLK4; ENSG00000167749; TAA
TIGLGLHSL

SEQ ID NO: 35512 - protein, 9 aa, Homo sapiens
  Table A; Target 35512; HLA-C*01:02; KLK4; ENSG00000167749; TAA
TIGLGLHSL

SEQ ID NO: 35513 - protein, 9 aa, Homo sapiens
  Table A; Target 35513; HLA-C*07:04; KLK4; ENSG00000167749; TAA
TIGLGLHSL

SEQ ID NO: 35514 - protein, 9 aa, Homo sapiens
  Table A; Target 35514; HLA-B*18:01; KLK4; ENSG00000167749; TAA
VEASLSVRH

SEQ ID NO: 35515 - protein, 9 aa, Homo sapiens
  Table A; Target 35515; HLA-B*44:03; KLK4; ENSG00000167749; TAA
VEASLSVRH

SEQ ID NO: 35516 - protein, 10 aa, Homo sapiens
  Table A; Target 35516; HLA-A*23:01; KLK4; ENSG00000167749; TAA
VGVPGVYTNL

SEQ ID NO: 35517 - protein, 10 aa, Homo sapiens
  Table A; Target 35517; HLA-B*46:01; KLK4; ENSG00000167749; TAA
VGVPGVYTNL

SEQ ID NO: 35518 - protein, 10 aa, Homo sapiens
  Table A; Target 35518; HLA-C*02:02; KLK4; ENSG00000167749; TAA
VGVPGVYTNL

SEQ ID NO: 35519 - protein, 10 aa, Homo sapiens
  Table A; Target 35519; HLA-C*03:04; KLK4; ENSG00000167749; TAA
VGVPGVYTNL

SEQ ID NO: 35520 - protein, 9 aa, Homo sapiens
  Table A; Target 35520; HLA-A*02:01; KLK4; ENSG00000167749; TAA
VLQCVNVSV

SEQ ID NO: 35521 - protein, 9 aa, Homo sapiens
  Table A; Target 35521; HLA-B*13:02; KLK4; ENSG00000167749; TAA
VLQCVNVSV

SEQ ID NO: 35522 - protein, 8 aa, Homo sapiens
  Table A; Target 35522; HLA-B*37:01; KLK4; ENSG00000167749; TAA
VLSAAHCF

SEQ ID NO: 35523 - protein, 8 aa, Homo sapiens
  Table A; Target 35523; HLA-B*07:02; KLK4; ENSG00000167749; TAA
VPGVYTNL

SEQ ID NO: 35524 - protein, 8 aa, Homo sapiens
  Table A; Target 35524; HLA-B*08:01; KLK4; ENSG00000167749; TAA
VPGVYTNL

SEQ ID NO: 35525 - protein, 8 aa, Homo sapiens
  Table A; Target 35525; HLA-B*35:03; KLK4; ENSG00000167749; TAA
VPGVYTNL

SEQ ID NO: 35526 - protein, 8 aa, Homo sapiens
  Table A; Target 35526; HLA-C*07:02; KLK4; ENSG00000167749; TAA
VPGVYTNL

SEQ ID NO: 35527 - protein, 9 aa, Homo sapiens
  Table A; Target 35527; HLA-C*05:01; KLK4; ENSG00000167749; TAA
VSEEVCSKL

SEQ ID NO: 35528 - protein, 10 aa, Homo sapiens
  Table A; Target 35528; HLA-A*01:01; KLK4; ENSG00000167749; TAA
VSEEVCSKLY

SEQ ID NO: 35529 - protein, 9 aa, Homo sapiens
  Table A; Target 35529; HLA-C*06:02; KLK4; ENSG00000167749; TAA
VSFGKAPCG

SEQ ID NO: 35530 - protein, 9 aa, Homo sapiens
  Table A; Target 35530; HLA-C*12:03; KLK4; ENSG00000167749; TAA
VSFGKAPCG

SEQ ID NO: 35531 - protein, 8 aa, Homo sapiens
  Table A; Target 35531; HLA-B*46:01; KLK4; ENSG00000167749; TAA
VSVVSEEV

SEQ ID NO: 35532 - protein, 8 aa, Homo sapiens
  Table A; Target 35532; HLA-C*03:04; KLK4; ENSG00000167749; TAA
VSVVSEEV

SEQ ID NO: 35533 - protein, 11 aa, Homo sapiens
  Table A; Target 35533; HLA-C*07:06; KLK4; ENSG00000167749; TAA
VSVVSEEVCSK

SEQ ID NO: 35534 - protein, 9 aa, Homo sapiens
  Table A; Target 35534; HLA-A*03:01; KLK4; ENSG00000167749; TAA
VVSEEVCSK

SEQ ID NO: 35535 - protein, 9 aa, Homo sapiens
  Table A; Target 35535; HLA-A*03:02; KLK4; ENSG00000167749; TAA
VVSEEVCSK

SEQ ID NO: 35536 - protein, 9 aa, Homo sapiens
  Table A; Target 35536; HLA-A*11:01; KLK4; ENSG00000167749; TAA
VVSEEVCSK

SEQ ID NO: 35537 - protein, 9 aa, Homo sapiens
  Table A; Target 35537; HLA-A*68:01; KLK4; ENSG00000167749; TAA
VVSEEVCSK

SEQ ID NO: 35538 - protein, 9 aa, Homo sapiens
  Table A; Target 35538; HLA-B*27:05; KLK4; ENSG00000167749; TAA
VVSEEVCSK

SEQ ID NO: 35539 - protein, 9 aa, Homo sapiens
  Table A; Target 35539; HLA-C*07:06; KLK4; ENSG00000167749; TAA
VVSEEVCSK

SEQ ID NO: 35540 - protein, 10 aa, Homo sapiens
  Table A; Target 35540; HLA-A*25:01; KLK4; ENSG00000167749; TAA
VVSEEVCSKL

SEQ ID NO: 35541 - protein, 10 aa, Homo sapiens
  Table A; Target 35541; HLA-A*26:01; KLK4; ENSG00000167749; TAA
VVSEEVCSKL

SEQ ID NO: 35542 - protein, 10 aa, Homo sapiens
  Table A; Target 35542; HLA-A*68:02; KLK4; ENSG00000167749; TAA
VVSEEVCSKL

SEQ ID NO: 35543 - protein, 10 aa, Homo sapiens
  Table A; Target 35543; HLA-B*27:05; KLK4; ENSG00000167749; TAA
VVSEEVCSKL

SEQ ID NO: 35544 - protein, 11 aa, Homo sapiens
  Table A; Target 35544; HLA-A*30:02; KLK4; ENSG00000167749; TAA
VVSEEVCSKLY

SEQ ID NO: 35545 - protein, 11 aa, Homo sapiens
  Table A; Target 35545; HLA-C*16:02; KLK4; ENSG00000167749; TAA
VVSEEVCSKLY

SEQ ID NO: 35546 - protein, 8 aa, Homo sapiens
  Table A; Target 35546; HLA-A*23:01; KLK4; ENSG00000167749; TAA
VYTNLCKF

SEQ ID NO: 35547 - protein, 8 aa, Homo sapiens
  Table A; Target 35547; HLA-A*24:02; KLK4; ENSG00000167749; TAA
VYTNLCKF

SEQ ID NO: 35548 - protein, 8 aa, Homo sapiens
  Table A; Target 35548; HLA-C*14:02; KLK4; ENSG00000167749; TAA
VYTNLCKF

SEQ ID NO: 35549 - protein, 9 aa, Homo sapiens
  Table A; Target 35549; HLA-A*02:07; KLK4; ENSG00000167749; TAA
YDPLYHPSM

SEQ ID NO: 35550 - protein, 9 aa, Homo sapiens
  Table A; Target 35550; HLA-B*37:01; KLK4; ENSG00000167749; TAA
YDPLYHPSM

SEQ ID NO: 35551 - protein, 10 aa, Homo sapiens
  Table A; Target 35551; HLA-A*24:02; KLK4; ENSG00000167749; TAA
YDPLYHPSMF

SEQ ID NO: 35552 - protein, 10 aa, Homo sapiens
  Table A; Target 35552; HLA-B*07:02; KLK4; ENSG00000167749; TAA
YDPLYHPSMF

SEQ ID NO: 35553 - protein, 10 aa, Homo sapiens
  Table A; Target 35553; HLA-C*04:01; KLK4; ENSG00000167749; TAA
YDPLYHPSMF

SEQ ID NO: 35554 - protein, 10 aa, Homo sapiens
  Table A; Target 35554; HLA-C*07:01; KLK4; ENSG00000167749; TAA
YDPLYHPSMF

SEQ ID NO: 35555 - protein, 10 aa, Homo sapiens
  Table A; Target 35555; HLA-C*07:02; KLK4; ENSG00000167749; TAA
YDPLYHPSMF

SEQ ID NO: 35556 - protein, 10 aa, Homo sapiens
  Table A; Target 35556; HLA-B*15:03; KLK4; ENSG00000167749; TAA
YLILGVAGSL

SEQ ID NO: 35557 - protein, 10 aa, Homo sapiens
  Table A; Target 35557; HLA-B*40:01; KLK4; ENSG00000167749; TAA
YLILGVAGSL

SEQ ID NO: 35558 - protein, 10 aa, Homo sapiens
  Table A; Target 35558; HLA-C*14:02; KLK4; ENSG00000167749; TAA
YLILGVAGSL

SEQ ID NO: 35559 - protein, 11 aa, Homo sapiens
  Table A; Target 35559; HLA-A*02:01; KLK4; ENSG00000167749; TAA
YLILGVAGSLV

SEQ ID NO: 35560 - protein, 11 aa, Homo sapiens
  Table A; Target 35560; HLA-A*02:03; KLK4; ENSG00000167749; TAA
YLILGVAGSLV

SEQ ID NO: 35561 - protein, 8 aa, Homo sapiens
  Table A; Target 35561; HLA-A*02:04; KLK4; ENSG00000167749; TAA
YLQGLVSF

SEQ ID NO: 35562 - protein, 8 aa, Homo sapiens
  Table A; Target 35562; HLA-A*23:01; KLK4; ENSG00000167749; TAA
YLQGLVSF

SEQ ID NO: 35563 - protein, 8 aa, Homo sapiens
  Table A; Target 35563; HLA-B*08:01; KLK4; ENSG00000167749; TAA
YLQGLVSF

SEQ ID NO: 35564 - protein, 8 aa, Homo sapiens
  Table A; Target 35564; HLA-B*37:01; KLK4; ENSG00000167749; TAA
YLQGLVSF

SEQ ID NO: 35565 - protein, 8 aa, Homo sapiens
  Table A; Target 35565; HLA-B*46:01; KLK4; ENSG00000167749; TAA
YLQGLVSF

SEQ ID NO: 35566 - protein, 8 aa, Homo sapiens
  Table A; Target 35566; HLA-C*07:04; KLK4; ENSG00000167749; TAA
YLQGLVSF

SEQ ID NO: 35567 - protein, 9 aa, Homo sapiens
  Table A; Target 35567; HLA-A*02:03; KLK4; ENSG00000167749; TAA
YLQGLVSFG

SEQ ID NO: 35568 - protein, 9 aa, Homo sapiens
  Table A; Target 35568; HLA-C*07:01; KLK4; ENSG00000167749; TAA
YLQGLVSFG

SEQ ID NO: 35569 - protein, 9 aa, Homo sapiens
  Table A; Target 35569; HLA-C*07:04; KLK4; ENSG00000167749; TAA
YLQGLVSFG

SEQ ID NO: 35570 - protein, 9 aa, Homo sapiens
  Table A; Target 35570; HLA-C*12:03; KLK4; ENSG00000167749; TAA
YLQGLVSFG

SEQ ID NO: 35571 - protein, 10 aa, Homo sapiens
  Table A; Target 35571; HLA-A*03:02; KLK4; ENSG00000167749; TAA
YLQGLVSFGK

SEQ ID NO: 35572 - protein, 10 aa, Homo sapiens
  Table A; Target 35572; HLA-B*27:02; KLK4; ENSG00000167749; TAA
YLQGLVSFGK

SEQ ID NO: 35573 - protein, 8 aa, Homo sapiens
  Table A; Target 35573; HLA-C*04:01; KLK4; ENSG00000167749; TAA
YTIGLGLH

SEQ ID NO: 35574 - protein, 8 aa, Homo sapiens
  Table A; Target 35574; HLA-C*06:02; KLK4; ENSG00000167749; TAA
YTIGLGLH

SEQ ID NO: 35575 - protein, 8 aa, Homo sapiens
  Table A; Target 35575; HLA-C*07:01; KLK4; ENSG00000167749; TAA
YTIGLGLH

SEQ ID NO: 35576 - protein, 10 aa, Homo sapiens
  Table A; Target 35576; HLA-A*02:01; KLK4; ENSG00000167749; TAA
YTIGLGLHSL

SEQ ID NO: 35577 - protein, 10 aa, Homo sapiens
  Table A; Target 35577; HLA-A*02:03; KLK4; ENSG00000167749; TAA
YTIGLGLHSL

SEQ ID NO: 35578 - protein, 10 aa, Homo sapiens
  Table A; Target 35578; HLA-A*02:04; KLK4; ENSG00000167749; TAA
YTIGLGLHSL

SEQ ID NO: 35579 - protein, 10 aa, Homo sapiens
  Table A; Target 35579; HLA-A*02:07; KLK4; ENSG00000167749; TAA
YTIGLGLHSL

SEQ ID NO: 35580 - protein, 10 aa, Homo sapiens
  Table A; Target 35580; HLA-A*23:01; KLK4; ENSG00000167749; TAA
YTIGLGLHSL

SEQ ID NO: 35581 - protein, 10 aa, Homo sapiens
  Table A; Target 35581; HLA-A*24:02; KLK4; ENSG00000167749; TAA
YTIGLGLHSL

SEQ ID NO: 35582 - protein, 10 aa, Homo sapiens
  Table A; Target 35582; HLA-A*25:01; KLK4; ENSG00000167749; TAA
YTIGLGLHSL

SEQ ID NO: 35583 - protein, 10 aa, Homo sapiens
  Table A; Target 35583; HLA-A*26:01; KLK4; ENSG00000167749; TAA
YTIGLGLHSL

SEQ ID NO: 35584 - protein, 10 aa, Homo sapiens
  Table A; Target 35584; HLA-A*30:01; KLK4; ENSG00000167749; TAA
YTIGLGLHSL

SEQ ID NO: 35585 - protein, 10 aa, Homo sapiens
  Table A; Target 35585; HLA-A*31:01; KLK4; ENSG00000167749; TAA
YTIGLGLHSL

SEQ ID NO: 35586 - protein, 10 aa, Homo sapiens
  Table A; Target 35586; HLA-A*32:01; KLK4; ENSG00000167749; TAA
YTIGLGLHSL

SEQ ID NO: 35587 - protein, 10 aa, Homo sapiens
  Table A; Target 35587; HLA-A*33:01; KLK4; ENSG00000167749; TAA
YTIGLGLHSL

SEQ ID NO: 35588 - protein, 10 aa, Homo sapiens
  Table A; Target 35588; HLA-A*68:01; KLK4; ENSG00000167749; TAA
YTIGLGLHSL

SEQ ID NO: 35589 - protein, 10 aa, Homo sapiens
  Table A; Target 35589; HLA-A*68:02; KLK4; ENSG00000167749; TAA
YTIGLGLHSL

SEQ ID NO: 35590 - protein, 10 aa, Homo sapiens
  Table A; Target 35590; HLA-B*08:01; KLK4; ENSG00000167749; TAA
YTIGLGLHSL

SEQ ID NO: 35591 - protein, 10 aa, Homo sapiens
  Table A; Target 35591; HLA-B*13:02; KLK4; ENSG00000167749; TAA
YTIGLGLHSL

SEQ ID NO: 35592 - protein, 10 aa, Homo sapiens
  Table A; Target 35592; HLA-B*35:03; KLK4; ENSG00000167749; TAA
YTIGLGLHSL

SEQ ID NO: 35593 - protein, 10 aa, Homo sapiens
  Table A; Target 35593; HLA-B*40:01; KLK4; ENSG00000167749; TAA
YTIGLGLHSL

SEQ ID NO: 35594 - protein, 10 aa, Homo sapiens
  Table A; Target 35594; HLA-B*40:02; KLK4; ENSG00000167749; TAA
YTIGLGLHSL

SEQ ID NO: 35595 - protein, 10 aa, Homo sapiens
  Table A; Target 35595; HLA-B*44:02; KLK4; ENSG00000167749; TAA
YTIGLGLHSL

SEQ ID NO: 35596 - protein, 10 aa, Homo sapiens
  Table A; Target 35596; HLA-B*46:01; KLK4; ENSG00000167749; TAA
YTIGLGLHSL

SEQ ID NO: 35597 - protein, 10 aa, Homo sapiens
  Table A; Target 35597; HLA-B*54:01; KLK4; ENSG00000167749; TAA
YTIGLGLHSL

SEQ ID NO: 35598 - protein, 10 aa, Homo sapiens
  Table A; Target 35598; HLA-B*57:01; KLK4; ENSG00000167749; TAA
YTIGLGLHSL

SEQ ID NO: 35599 - protein, 10 aa, Homo sapiens
  Table A; Target 35599; HLA-B*58:01; KLK4; ENSG00000167749; TAA
YTIGLGLHSL

SEQ ID NO: 35600 - protein, 10 aa, Homo sapiens
  Table A; Target 35600; HLA-C*01:02; KLK4; ENSG00000167749; TAA
YTIGLGLHSL

SEQ ID NO: 35601 - protein, 10 aa, Homo sapiens
  Table A; Target 35601; HLA-C*02:02; KLK4; ENSG00000167749; TAA
YTIGLGLHSL

SEQ ID NO: 35602 - protein, 10 aa, Homo sapiens
  Table A; Target 35602; HLA-C*03:03; KLK4; ENSG00000167749; TAA
YTIGLGLHSL

SEQ ID NO: 35603 - protein, 10 aa, Homo sapiens
  Table A; Target 35603; HLA-C*03:04; KLK4; ENSG00000167749; TAA
YTIGLGLHSL

SEQ ID NO: 35604 - protein, 10 aa, Homo sapiens
  Table A; Target 35604; HLA-C*06:02; KLK4; ENSG00000167749; TAA
YTIGLGLHSL

SEQ ID NO: 35605 - protein, 10 aa, Homo sapiens
  Table A; Target 35605; HLA-C*07:04; KLK4; ENSG00000167749; TAA
YTIGLGLHSL

SEQ ID NO: 35606 - protein, 10 aa, Homo sapiens
  Table A; Target 35606; HLA-C*12:03; KLK4; ENSG00000167749; TAA
YTIGLGLHSL

SEQ ID NO: 35607 - protein, 10 aa, Homo sapiens
  Table A; Target 35607; HLA-C*14:02; KLK4; ENSG00000167749; TAA
YTIGLGLHSL

SEQ ID NO: 35608 - protein, 10 aa, Homo sapiens
  Table A; Target 35608; HLA-C*16:02; KLK4; ENSG00000167749; TAA
YTIGLGLHSL

SEQ ID NO: 35609 - protein, 8 aa, Homo sapiens
  Table A; Target 35609; HLA-A*01:01; LIN28A; ENSG00000131914; CTA
AADEPQLL

SEQ ID NO: 35610 - protein, 8 aa, Homo sapiens
  Table A; Target 35610; HLA-A*32:01; LIN28A; ENSG00000131914; CTA
AADEPQLL

SEQ ID NO: 35611 - protein, 8 aa, Homo sapiens
  Table A; Target 35611; HLA-B*35:03; LIN28A; ENSG00000131914; CTA
AADEPQLL

SEQ ID NO: 35612 - protein, 8 aa, Homo sapiens
  Table A; Target 35612; HLA-B*38:01; LIN28A; ENSG00000131914; CTA
AADEPQLL

SEQ ID NO: 35613 - protein, 8 aa, Homo sapiens
  Table A; Target 35613; HLA-B*39:01; LIN28A; ENSG00000131914; CTA
AADEPQLL

SEQ ID NO: 35614 - protein, 8 aa, Homo sapiens
  Table A; Target 35614; HLA-C*03:03; LIN28A; ENSG00000131914; CTA
AADEPQLL

SEQ ID NO: 35615 - protein, 8 aa, Homo sapiens
  Table A; Target 35615; HLA-C*03:04; LIN28A; ENSG00000131914; CTA
AADEPQLL

SEQ ID NO: 35616 - protein, 8 aa, Homo sapiens
  Table A; Target 35616; HLA-C*04:01; LIN28A; ENSG00000131914; CTA
AADEPQLL

SEQ ID NO: 35617 - protein, 8 aa, Homo sapiens
  Table A; Target 35617; HLA-C*07:04; LIN28A; ENSG00000131914; CTA
AADEPQLL

SEQ ID NO: 35618 - protein, 9 aa, Homo sapiens
  Table A; Target 35618; HLA-A*01:01; LIN28A; ENSG00000131914; CTA
AADEPQLLH

SEQ ID NO: 35619 - protein, 9 aa, Homo sapiens
  Table A; Target 35619; HLA-A*03:01; LIN28A; ENSG00000131914; CTA
AADEPQLLH

SEQ ID NO: 35620 - protein, 9 aa, Homo sapiens
  Table A; Target 35620; HLA-A*03:02; LIN28A; ENSG00000131914; CTA
AADEPQLLH

SEQ ID NO: 35621 - protein, 9 aa, Homo sapiens
  Table A; Target 35621; HLA-A*11:01; LIN28A; ENSG00000131914; CTA
AADEPQLLH

SEQ ID NO: 35622 - protein, 9 aa, Homo sapiens
  Table A; Target 35622; HLA-B*27:05; LIN28A; ENSG00000131914; CTA
AADEPQLLH

SEQ ID NO: 35623 - protein, 9 aa, Homo sapiens
  Table A; Target 35623; HLA-C*03:03; LIN28A; ENSG00000131914; CTA
AADEPQLLH

SEQ ID NO: 35624 - protein, 9 aa, Homo sapiens
  Table A; Target 35624; HLA-C*05:01; LIN28A; ENSG00000131914; CTA
AADEPQLLH

SEQ ID NO: 35625 - protein, 9 aa, Homo sapiens
  Table A; Target 35625; HLA-C*07:06; LIN28A; ENSG00000131914; CTA
AADEPQLLH

SEQ ID NO: 35626 - protein, 11 aa, Homo sapiens
  Table A; Target 35626; HLA-A*02:07; LIN28A; ENSG00000131914; CTA
AADEPQLLHGA

SEQ ID NO: 35627 - protein, 9 aa, Homo sapiens
  Table A; Target 35627; HLA-C*05:01; LIN28A; ENSG00000131914; CTA
AAEEAPEEA

SEQ ID NO: 35628 - protein, 10 aa, Homo sapiens
  Table A; Target 35628; HLA-B*07:02; LIN28A; ENSG00000131914; CTA
AARAADEPQL

SEQ ID NO: 35629 - protein, 11 aa, Homo sapiens
  Table A; Target 35629; HLA-B*57:01; LIN28A; ENSG00000131914; CTA
AARAADEPQLL

SEQ ID NO: 35630 - protein, 9 aa, Homo sapiens
  Table A; Target 35630; HLA-B*55:01; LIN28A; ENSG00000131914; CTA
AGVALDPPV

SEQ ID NO: 35631 - protein, 9 aa, Homo sapiens
  Table A; Target 35631; HLA-B*56:01; LIN28A; ENSG00000131914; CTA
AGVALDPPV

SEQ ID NO: 35632 - protein, 9 aa, Homo sapiens
  Table A; Target 35632; HLA-C*04:01; LIN28A; ENSG00000131914; CTA
AGVALDPPV

SEQ ID NO: 35633 - protein, 9 aa, Homo sapiens
  Table A; Target 35633; HLA-C*06:02; LIN28A; ENSG00000131914; CTA
AGVALDPPV

SEQ ID NO: 35634 - protein, 8 aa, Homo sapiens
  Table A; Target 35634; HLA-A*02:01; LIN28A; ENSG00000131914; CTA
ALDPPVDV

SEQ ID NO: 35635 - protein, 8 aa, Homo sapiens
  Table A; Target 35635; HLA-A*02:07; LIN28A; ENSG00000131914; CTA
ALDPPVDV

SEQ ID NO: 35636 - protein, 8 aa, Homo sapiens
  Table A; Target 35636; HLA-C*04:01; LIN28A; ENSG00000131914; CTA
ALDPPVDV

SEQ ID NO: 35637 - protein, 8 aa, Homo sapiens
  Table A; Target 35637; HLA-C*05:01; LIN28A; ENSG00000131914; CTA
ALDPPVDV

SEQ ID NO: 35638 - protein, 9 aa, Homo sapiens
  Table A; Target 35638; HLA-A*01:01; LIN28A; ENSG00000131914; CTA
ALDPPVDVF

SEQ ID NO: 35639 - protein, 9 aa, Homo sapiens
  Table A; Target 35639; HLA-A*02:01; LIN28A; ENSG00000131914; CTA
ALDPPVDVF

SEQ ID NO: 35640 - protein, 9 aa, Homo sapiens
  Table A; Target 35640; HLA-A*02:07; LIN28A; ENSG00000131914; CTA
ALDPPVDVF

SEQ ID NO: 35641 - protein, 9 aa, Homo sapiens
  Table A; Target 35641; HLA-A*03:02; LIN28A; ENSG00000131914; CTA
ALDPPVDVF

SEQ ID NO: 35642 - protein, 9 aa, Homo sapiens
  Table A; Target 35642; HLA-A*23:01; LIN28A; ENSG00000131914; CTA
ALDPPVDVF

SEQ ID NO: 35643 - protein, 9 aa, Homo sapiens
  Table A; Target 35643; HLA-A*24:02; LIN28A; ENSG00000131914; CTA
ALDPPVDVF

SEQ ID NO: 35644 - protein, 9 aa, Homo sapiens
  Table A; Target 35644; HLA-A*25:01; LIN28A; ENSG00000131914; CTA
ALDPPVDVF

SEQ ID NO: 35645 - protein, 9 aa, Homo sapiens
  Table A; Target 35645; HLA-A*29:02; LIN28A; ENSG00000131914; CTA
ALDPPVDVF

SEQ ID NO: 35646 - protein, 9 aa, Homo sapiens
  Table A; Target 35646; HLA-A*32:01; LIN28A; ENSG00000131914; CTA
ALDPPVDVF

SEQ ID NO: 35647 - protein, 9 aa, Homo sapiens
  Table A; Target 35647; HLA-B*13:02; LIN28A; ENSG00000131914; CTA
ALDPPVDVF

SEQ ID NO: 35648 - protein, 9 aa, Homo sapiens
  Table A; Target 35648; HLA-B*15:01; LIN28A; ENSG00000131914; CTA
ALDPPVDVF

SEQ ID NO: 35649 - protein, 9 aa, Homo sapiens
  Table A; Target 35649; HLA-B*15:03; LIN28A; ENSG00000131914; CTA
ALDPPVDVF

SEQ ID NO: 35650 - protein, 9 aa, Homo sapiens
  Table A; Target 35650; HLA-B*27:05; LIN28A; ENSG00000131914; CTA
ALDPPVDVF

SEQ ID NO: 35651 - protein, 9 aa, Homo sapiens
  Table A; Target 35651; HLA-B*35:01; LIN28A; ENSG00000131914; CTA
ALDPPVDVF

SEQ ID NO: 35652 - protein, 9 aa, Homo sapiens
  Table A; Target 35652; HLA-B*37:01; LIN28A; ENSG00000131914; CTA
ALDPPVDVF

SEQ ID NO: 35653 - protein, 9 aa, Homo sapiens
  Table A; Target 35653; HLA-B*38:01; LIN28A; ENSG00000131914; CTA
ALDPPVDVF

SEQ ID NO: 35654 - protein, 9 aa, Homo sapiens
  Table A; Target 35654; HLA-B*39:01; LIN28A; ENSG00000131914; CTA
ALDPPVDVF

SEQ ID NO: 35655 - protein, 9 aa, Homo sapiens
  Table A; Target 35655; HLA-B*44:02; LIN28A; ENSG00000131914; CTA
ALDPPVDVF

SEQ ID NO: 35656 - protein, 9 aa, Homo sapiens
  Table A; Target 35656; HLA-B*44:03; LIN28A; ENSG00000131914; CTA
ALDPPVDVF

SEQ ID NO: 35657 - protein, 9 aa, Homo sapiens
  Table A; Target 35657; HLA-B*55:01; LIN28A; ENSG00000131914; CTA
ALDPPVDVF

SEQ ID NO: 35658 - protein, 9 aa, Homo sapiens
  Table A; Target 35658; HLA-B*57:01; LIN28A; ENSG00000131914; CTA
ALDPPVDVF

SEQ ID NO: 35659 - protein, 9 aa, Homo sapiens
  Table A; Target 35659; HLA-B*58:01; LIN28A; ENSG00000131914; CTA
ALDPPVDVF

SEQ ID NO: 35660 - protein, 9 aa, Homo sapiens
  Table A; Target 35660; HLA-C*02:02; LIN28A; ENSG00000131914; CTA
ALDPPVDVF

SEQ ID NO: 35661 - protein, 9 aa, Homo sapiens
  Table A; Target 35661; HLA-C*03:03; LIN28A; ENSG00000131914; CTA
ALDPPVDVF

SEQ ID NO: 35662 - protein, 9 aa, Homo sapiens
  Table A; Target 35662; HLA-C*03:04; LIN28A; ENSG00000131914; CTA
ALDPPVDVF

SEQ ID NO: 35663 - protein, 9 aa, Homo sapiens
  Table A; Target 35663; HLA-C*04:01; LIN28A; ENSG00000131914; CTA
ALDPPVDVF

SEQ ID NO: 35664 - protein, 9 aa, Homo sapiens
  Table A; Target 35664; HLA-C*05:01; LIN28A; ENSG00000131914; CTA
ALDPPVDVF

SEQ ID NO: 35665 - protein, 9 aa, Homo sapiens
  Table A; Target 35665; HLA-C*07:04; LIN28A; ENSG00000131914; CTA
ALDPPVDVF

SEQ ID NO: 35666 - protein, 9 aa, Homo sapiens
  Table A; Target 35666; HLA-C*12:03; LIN28A; ENSG00000131914; CTA
ALDPPVDVF

SEQ ID NO: 35667 - protein, 10 aa, Homo sapiens
  Table A; Target 35667; HLA-A*01:01; LIN28A; ENSG00000131914; CTA
ALDPPVDVFV

SEQ ID NO: 35668 - protein, 10 aa, Homo sapiens
  Table A; Target 35668; HLA-A*02:04; LIN28A; ENSG00000131914; CTA
ALDPPVDVFV

SEQ ID NO: 35669 - protein, 10 aa, Homo sapiens
  Table A; Target 35669; HLA-A*02:07; LIN28A; ENSG00000131914; CTA
ALDPPVDVFV

SEQ ID NO: 35670 - protein, 10 aa, Homo sapiens
  Table A; Target 35670; HLA-A*68:02; LIN28A; ENSG00000131914; CTA
ALDPPVDVFV

SEQ ID NO: 35671 - protein, 10 aa, Homo sapiens
  Table A; Target 35671; HLA-B*13:02; LIN28A; ENSG00000131914; CTA
ALDPPVDVFV

SEQ ID NO: 35672 - protein, 10 aa, Homo sapiens
  Table A; Target 35672; HLA-B*38:01; LIN28A; ENSG00000131914; CTA
ALDPPVDVFV

SEQ ID NO: 35673 - protein, 10 aa, Homo sapiens
  Table A; Target 35673; HLA-B*55:01; LIN28A; ENSG00000131914; CTA
ALDPPVDVFV

SEQ ID NO: 35674 - protein, 10 aa, Homo sapiens
  Table A; Target 35674; HLA-C*05:01; LIN28A; ENSG00000131914; CTA
ALDPPVDVFV

SEQ ID NO: 35675 - protein, 9 aa, Homo sapiens
  Table A; Target 35675; HLA-B*07:02; LIN28A; ENSG00000131914; CTA
APEDAARAA

SEQ ID NO: 35676 - protein, 9 aa, Homo sapiens
  Table A; Target 35676; HLA-B*54:01; LIN28A; ENSG00000131914; CTA
APEDAARAA

SEQ ID NO: 35677 - protein, 9 aa, Homo sapiens
  Table A; Target 35677; HLA-B*55:01; LIN28A; ENSG00000131914; CTA
APEDAARAA

SEQ ID NO: 35678 - protein, 9 aa, Homo sapiens
  Table A; Target 35678; HLA-B*56:01; LIN28A; ENSG00000131914; CTA
APEDAARAA

SEQ ID NO: 35679 - protein, 8 aa, Homo sapiens
  Table A; Target 35679; HLA-A*32:01; LIN28A; ENSG00000131914; CTA
AQGKPTYF

SEQ ID NO: 35680 - protein, 8 aa, Homo sapiens
  Table A; Target 35680; HLA-B*15:01; LIN28A; ENSG00000131914; CTA
AQGKPTYF

SEQ ID NO: 35681 - protein, 8 aa, Homo sapiens
  Table A; Target 35681; HLA-B*15:03; LIN28A; ENSG00000131914; CTA
AQGKPTYF

SEQ ID NO: 35682 - protein, 8 aa, Homo sapiens
  Table A; Target 35682; HLA-B*37:01; LIN28A; ENSG00000131914; CTA
AQGKPTYF

SEQ ID NO: 35683 - protein, 8 aa, Homo sapiens
  Table A; Target 35683; HLA-B*38:01; LIN28A; ENSG00000131914; CTA
AQGKPTYF

SEQ ID NO: 35684 - protein, 10 aa, Homo sapiens
  Table A; Target 35684; HLA-A*03:02; LIN28A; ENSG00000131914; CTA
AQQGPSAQGK

SEQ ID NO: 35685 - protein, 10 aa, Homo sapiens
  Table A; Target 35685; HLA-A*11:01; LIN28A; ENSG00000131914; CTA
AQQGPSAQGK

SEQ ID NO: 35686 - protein, 9 aa, Homo sapiens
  Table A; Target 35686; HLA-B*27:02; LIN28A; ENSG00000131914; CTA
ARAADEPQL

SEQ ID NO: 35687 - protein, 9 aa, Homo sapiens
  Table A; Target 35687; HLA-B*27:05; LIN28A; ENSG00000131914; CTA
ARAADEPQL

SEQ ID NO: 35688 - protein, 9 aa, Homo sapiens
  Table A; Target 35688; HLA-B*38:01; LIN28A; ENSG00000131914; CTA
ARAADEPQL

SEQ ID NO: 35689 - protein, 9 aa, Homo sapiens
  Table A; Target 35689; HLA-B*39:01; LIN28A; ENSG00000131914; CTA
ARAADEPQL

SEQ ID NO: 35690 - protein, 9 aa, Homo sapiens
  Table A; Target 35690; HLA-B*40:01; LIN28A; ENSG00000131914; CTA
ARAADEPQL

SEQ ID NO: 35691 - protein, 9 aa, Homo sapiens
  Table A; Target 35691; HLA-C*06:02; LIN28A; ENSG00000131914; CTA
ARAADEPQL

SEQ ID NO: 35692 - protein, 9 aa, Homo sapiens
  Table A; Target 35692; HLA-C*16:04; LIN28A; ENSG00000131914; CTA
ARAADEPQL

SEQ ID NO: 35693 - protein, 10 aa, Homo sapiens
  Table A; Target 35693; HLA-B*27:05; LIN28A; ENSG00000131914; CTA
ARAADEPQLL

SEQ ID NO: 35694 - protein, 10 aa, Homo sapiens
  Table A; Target 35694; HLA-B*38:01; LIN28A; ENSG00000131914; CTA
ARAADEPQLL

SEQ ID NO: 35695 - protein, 10 aa, Homo sapiens
  Table A; Target 35695; HLA-B*39:01; LIN28A; ENSG00000131914; CTA
ARAADEPQLL

SEQ ID NO: 35696 - protein, 9 aa, Homo sapiens
  Table A; Target 35696; HLA-B*27:05; LIN28A; ENSG00000131914; CTA
ARAGVALDP

SEQ ID NO: 35697 - protein, 8 aa, Homo sapiens
  Table A; Target 35697; HLA-A*03:02; LIN28A; ENSG00000131914; CTA
AVEFTFKK

SEQ ID NO: 35698 - protein, 8 aa, Homo sapiens
  Table A; Target 35698; HLA-A*11:01; LIN28A; ENSG00000131914; CTA
AVEFTFKK

SEQ ID NO: 35699 - protein, 11 aa, Homo sapiens
  Table A; Target 35699; HLA-B*54:01; LIN28A; ENSG00000131914; CTA
CPLKAQQGPSA

SEQ ID NO: 35700 - protein, 11 aa, Homo sapiens
  Table A; Target 35700; HLA-B*55:01; LIN28A; ENSG00000131914; CTA
CPLKAQQGPSA

SEQ ID NO: 35701 - protein, 11 aa, Homo sapiens
  Table A; Target 35701; HLA-B*56:01; LIN28A; ENSG00000131914; CTA
CPLKAQQGPSA

SEQ ID NO: 35702 - protein, 8 aa, Homo sapiens
  Table A; Target 35702; HLA-B*13:02; LIN28A; ENSG00000131914; CTA
CQSISHMV

SEQ ID NO: 35703 - protein, 9 aa, Homo sapiens
  Table A; Target 35703; HLA-B*18:01; LIN28A; ENSG00000131914; CTA
DEPQLLHGA

SEQ ID NO: 35704 - protein, 8 aa, Homo sapiens
  Table A; Target 35704; HLA-B*51:01; LIN28A; ENSG00000131914; CTA
DPPVDVFV

SEQ ID NO: 35705 - protein, 9 aa, Homo sapiens
  Table A; Target 35705; HLA-A*25:01; LIN28A; ENSG00000131914; CTA
DVFVHQSKL

SEQ ID NO: 35706 - protein, 9 aa, Homo sapiens
  Table A; Target 35706; HLA-A*26:01; LIN28A; ENSG00000131914; CTA
DVFVHQSKL

SEQ ID NO: 35707 - protein, 9 aa, Homo sapiens
  Table A; Target 35707; HLA-A*33:01; LIN28A; ENSG00000131914; CTA
DVFVHQSKL

SEQ ID NO: 35708 - protein, 9 aa, Homo sapiens
  Table A; Target 35708; HLA-A*68:01; LIN28A; ENSG00000131914; CTA
DVFVHQSKL

SEQ ID NO: 35709 - protein, 9 aa, Homo sapiens
  Table A; Target 35709; HLA-A*68:02; LIN28A; ENSG00000131914; CTA
DVFVHQSKL

SEQ ID NO: 35710 - protein, 9 aa, Homo sapiens
  Table A; Target 35710; HLA-B*51:01; LIN28A; ENSG00000131914; CTA
DVFVHQSKL

SEQ ID NO: 35711 - protein, 9 aa, Homo sapiens
  Table A; Target 35711; HLA-A*26:01; LIN28A; ENSG00000131914; CTA
EAPEDAARA

SEQ ID NO: 35712 - protein, 8 aa, Homo sapiens
  Table A; Target 35712; HLA-A*33:01; LIN28A; ENSG00000131914; CTA
EAVEFTFK

SEQ ID NO: 35713 - protein, 8 aa, Homo sapiens
  Table A; Target 35713; HLA-A*33:03; LIN28A; ENSG00000131914; CTA
EAVEFTFK

SEQ ID NO: 35714 - protein, 8 aa, Homo sapiens
  Table A; Target 35714; HLA-A*68:01; LIN28A; ENSG00000131914; CTA
EAVEFTFK

SEQ ID NO: 35715 - protein, 8 aa, Homo sapiens
  Table A; Target 35715; HLA-B*27:02; LIN28A; ENSG00000131914; CTA
EAVEFTFK

SEQ ID NO: 35716 - protein, 8 aa, Homo sapiens
  Table A; Target 35716; HLA-B*51:01; LIN28A; ENSG00000131914; CTA
EAVEFTFK

SEQ ID NO: 35717 - protein, 8 aa, Homo sapiens
  Table A; Target 35717; HLA-C*07:01; LIN28A; ENSG00000131914; CTA
EAVEFTFK

SEQ ID NO: 35718 - protein, 9 aa, Homo sapiens
  Table A; Target 35718; HLA-A*11:01; LIN28A; ENSG00000131914; CTA
EAVEFTFKK

SEQ ID NO: 35719 - protein, 9 aa, Homo sapiens
  Table A; Target 35719; HLA-A*26:01; LIN28A; ENSG00000131914; CTA
EAVEFTFKK

SEQ ID NO: 35720 - protein, 9 aa, Homo sapiens
  Table A; Target 35720; HLA-A*33:01; LIN28A; ENSG00000131914; CTA
EAVEFTFKK

SEQ ID NO: 35721 - protein, 9 aa, Homo sapiens
  Table A; Target 35721; HLA-A*33:03; LIN28A; ENSG00000131914; CTA
EAVEFTFKK

SEQ ID NO: 35722 - protein, 9 aa, Homo sapiens
  Table A; Target 35722; HLA-A*68:01; LIN28A; ENSG00000131914; CTA
EAVEFTFKK

SEQ ID NO: 35723 - protein, 9 aa, Homo sapiens
  Table A; Target 35723; HLA-A*68:02; LIN28A; ENSG00000131914; CTA
EAVEFTFKK

SEQ ID NO: 35724 - protein, 9 aa, Homo sapiens
  Table A; Target 35724; HLA-C*07:06; LIN28A; ENSG00000131914; CTA
EAVEFTFKK

SEQ ID NO: 35725 - protein, 11 aa, Homo sapiens
  Table A; Target 35725; HLA-B*54:01; LIN28A; ENSG00000131914; CTA
EAVEFTFKKSA

SEQ ID NO: 35726 - protein, 9 aa, Homo sapiens
  Table A; Target 35726; HLA-A*33:01; LIN28A; ENSG00000131914; CTA
ECKLPPQPK

SEQ ID NO: 35727 - protein, 11 aa, Homo sapiens
  Table A; Target 35727; HLA-B*39:01; LIN28A; ENSG00000131914; CTA
EEAPEEAPEDA

SEQ ID NO: 35728 - protein, 11 aa, Homo sapiens
  Table A; Target 35728; HLA-A*30:01; LIN28A; ENSG00000131914; CTA
EEEEEIHSPTL

SEQ ID NO: 35729 - protein, 11 aa, Homo sapiens
  Table A; Target 35729; HLA-B*40:01; LIN28A; ENSG00000131914; CTA
EEEEEIHSPTL

SEQ ID NO: 35730 - protein, 11 aa, Homo sapiens
  Table A; Target 35730; HLA-B*44:02; LIN28A; ENSG00000131914; CTA
EEEEEIHSPTL

SEQ ID NO: 35731 - protein, 11 aa, Homo sapiens
  Table A; Target 35731; HLA-B*44:03; LIN28A; ENSG00000131914; CTA
EEEEEIHSPTL

SEQ ID NO: 35732 - protein, 10 aa, Homo sapiens
  Table A; Target 35732; HLA-A*30:01; LIN28A; ENSG00000131914; CTA
EEEEIHSPTL

SEQ ID NO: 35733 - protein, 10 aa, Homo sapiens
  Table A; Target 35733; HLA-B*18:01; LIN28A; ENSG00000131914; CTA
EEEEIHSPTL

SEQ ID NO: 35734 - protein, 10 aa, Homo sapiens
  Table A; Target 35734; HLA-B*38:01; LIN28A; ENSG00000131914; CTA
EEEEIHSPTL

SEQ ID NO: 35735 - protein, 10 aa, Homo sapiens
  Table A; Target 35735; HLA-B*40:01; LIN28A; ENSG00000131914; CTA
EEEEIHSPTL

SEQ ID NO: 35736 - protein, 10 aa, Homo sapiens
  Table A; Target 35736; HLA-B*40:02; LIN28A; ENSG00000131914; CTA
EEEEIHSPTL

SEQ ID NO: 35737 - protein, 10 aa, Homo sapiens
  Table A; Target 35737; HLA-B*44:02; LIN28A; ENSG00000131914; CTA
EEEEIHSPTL

SEQ ID NO: 35738 - protein, 10 aa, Homo sapiens
  Table A; Target 35738; HLA-B*44:03; LIN28A; ENSG00000131914; CTA
EEEEIHSPTL

SEQ ID NO: 35739 - protein, 10 aa, Homo sapiens
  Table A; Target 35739; HLA-B*49:01; LIN28A; ENSG00000131914; CTA
EEEEIHSPTL

SEQ ID NO: 35740 - protein, 11 aa, Homo sapiens
  Table A; Target 35740; HLA-B*40:01; LIN28A; ENSG00000131914; CTA
EEEEIHSPTLL

SEQ ID NO: 35741 - protein, 9 aa, Homo sapiens
  Table A; Target 35741; HLA-A*30:01; LIN28A; ENSG00000131914; CTA
EEEIHSPTL

SEQ ID NO: 35742 - protein, 9 aa, Homo sapiens
  Table A; Target 35742; HLA-B*18:01; LIN28A; ENSG00000131914; CTA
EEEIHSPTL

SEQ ID NO: 35743 - protein, 9 aa, Homo sapiens
  Table A; Target 35743; HLA-B*27:02; LIN28A; ENSG00000131914; CTA
EEEIHSPTL

SEQ ID NO: 35744 - protein, 9 aa, Homo sapiens
  Table A; Target 35744; HLA-B*37:01; LIN28A; ENSG00000131914; CTA
EEEIHSPTL

SEQ ID NO: 35745 - protein, 9 aa, Homo sapiens
  Table A; Target 35745; HLA-B*38:01; LIN28A; ENSG00000131914; CTA
EEEIHSPTL

SEQ ID NO: 35746 - protein, 9 aa, Homo sapiens
  Table A; Target 35746; HLA-B*39:01; LIN28A; ENSG00000131914; CTA
EEEIHSPTL

SEQ ID NO: 35747 - protein, 9 aa, Homo sapiens
  Table A; Target 35747; HLA-B*40:01; LIN28A; ENSG00000131914; CTA
EEEIHSPTL

SEQ ID NO: 35748 - protein, 9 aa, Homo sapiens
  Table A; Target 35748; HLA-B*40:02; LIN28A; ENSG00000131914; CTA
EEEIHSPTL

SEQ ID NO: 35749 - protein, 9 aa, Homo sapiens
  Table A; Target 35749; HLA-B*44:02; LIN28A; ENSG00000131914; CTA
EEEIHSPTL

SEQ ID NO: 35750 - protein, 9 aa, Homo sapiens
  Table A; Target 35750; HLA-B*44:03; LIN28A; ENSG00000131914; CTA
EEEIHSPTL

SEQ ID NO: 35751 - protein, 9 aa, Homo sapiens
  Table A; Target 35751; HLA-B*49:01; LIN28A; ENSG00000131914; CTA
EEEIHSPTL

SEQ ID NO: 35752 - protein, 9 aa, Homo sapiens
  Table A; Target 35752; HLA-C*16:04; LIN28A; ENSG00000131914; CTA
EEEIHSPTL

SEQ ID NO: 35753 - protein, 10 aa, Homo sapiens
  Table A; Target 35753; HLA-B*40:01; LIN28A; ENSG00000131914; CTA
EEEIHSPTLL

SEQ ID NO: 35754 - protein, 8 aa, Homo sapiens
  Table A; Target 35754; HLA-A*30:01; LIN28A; ENSG00000131914; CTA
EEIHSPTL

SEQ ID NO: 35755 - protein, 8 aa, Homo sapiens
  Table A; Target 35755; HLA-B*18:01; LIN28A; ENSG00000131914; CTA
EEIHSPTL

SEQ ID NO: 35756 - protein, 8 aa, Homo sapiens
  Table A; Target 35756; HLA-B*40:01; LIN28A; ENSG00000131914; CTA
EEIHSPTL

SEQ ID NO: 35757 - protein, 8 aa, Homo sapiens
  Table A; Target 35757; HLA-B*40:02; LIN28A; ENSG00000131914; CTA
EEIHSPTL

SEQ ID NO: 35758 - protein, 8 aa, Homo sapiens
  Table A; Target 35758; HLA-B*44:02; LIN28A; ENSG00000131914; CTA
EEIHSPTL

SEQ ID NO: 35759 - protein, 8 aa, Homo sapiens
  Table A; Target 35759; HLA-B*44:03; LIN28A; ENSG00000131914; CTA
EEIHSPTL

SEQ ID NO: 35760 - protein, 8 aa, Homo sapiens
  Table A; Target 35760; HLA-B*49:01; LIN28A; ENSG00000131914; CTA
EEIHSPTL

SEQ ID NO: 35761 - protein, 8 aa, Homo sapiens
  Table A; Target 35761; HLA-C*16:04; LIN28A; ENSG00000131914; CTA
EEIHSPTL

SEQ ID NO: 35762 - protein, 9 aa, Homo sapiens
  Table A; Target 35762; HLA-A*25:01; LIN28A; ENSG00000131914; CTA
EEIHSPTLL

SEQ ID NO: 35763 - protein, 9 aa, Homo sapiens
  Table A; Target 35763; HLA-A*26:01; LIN28A; ENSG00000131914; CTA
EEIHSPTLL

SEQ ID NO: 35764 - protein, 9 aa, Homo sapiens
  Table A; Target 35764; HLA-A*30:01; LIN28A; ENSG00000131914; CTA
EEIHSPTLL

SEQ ID NO: 35765 - protein, 9 aa, Homo sapiens
  Table A; Target 35765; HLA-B*18:01; LIN28A; ENSG00000131914; CTA
EEIHSPTLL

SEQ ID NO: 35766 - protein, 9 aa, Homo sapiens
  Table A; Target 35766; HLA-B*40:01; LIN28A; ENSG00000131914; CTA
EEIHSPTLL

SEQ ID NO: 35767 - protein, 9 aa, Homo sapiens
  Table A; Target 35767; HLA-B*40:02; LIN28A; ENSG00000131914; CTA
EEIHSPTLL

SEQ ID NO: 35768 - protein, 9 aa, Homo sapiens
  Table A; Target 35768; HLA-B*44:02; LIN28A; ENSG00000131914; CTA
EEIHSPTLL

SEQ ID NO: 35769 - protein, 9 aa, Homo sapiens
  Table A; Target 35769; HLA-B*44:03; LIN28A; ENSG00000131914; CTA
EEIHSPTLL

SEQ ID NO: 35770 - protein, 9 aa, Homo sapiens
  Table A; Target 35770; HLA-B*49:01; LIN28A; ENSG00000131914; CTA
EEIHSPTLL

SEQ ID NO: 35771 - protein, 9 aa, Homo sapiens
  Table A; Target 35771; HLA-A*33:01; LIN28A; ENSG00000131914; CTA
EFTFKKSAK

SEQ ID NO: 35772 - protein, 9 aa, Homo sapiens
  Table A; Target 35772; HLA-A*33:03; LIN28A; ENSG00000131914; CTA
EFTFKKSAK

SEQ ID NO: 35773 - protein, 9 aa, Homo sapiens
  Table A; Target 35773; HLA-A*23:01; LIN28A; ENSG00000131914; CTA
EGEAVEFTF

SEQ ID NO: 35774 - protein, 9 aa, Homo sapiens
  Table A; Target 35774; HLA-B*35:03; LIN28A; ENSG00000131914; CTA
EGEAVEFTF

SEQ ID NO: 35775 - protein, 9 aa, Homo sapiens
  Table A; Target 35775; HLA-B*38:01; LIN28A; ENSG00000131914; CTA
EGEAVEFTF

SEQ ID NO: 35776 - protein, 9 aa, Homo sapiens
  Table A; Target 35776; HLA-C*05:01; LIN28A; ENSG00000131914; CTA
EGEAVEFTF

SEQ ID NO: 35777 - protein, 10 aa, Homo sapiens
  Table A; Target 35777; HLA-B*27:02; LIN28A; ENSG00000131914; CTA
EGEAVEFTFK

SEQ ID NO: 35778 - protein, 8 aa, Homo sapiens
  Table A; Target 35778; HLA-B*54:01; LIN28A; ENSG00000131914; CTA
EPQLLHGA

SEQ ID NO: 35779 - protein, 8 aa, Homo sapiens
  Table A; Target 35779; HLA-B*55:01; LIN28A; ENSG00000131914; CTA
EPQLLHGA

SEQ ID NO: 35780 - protein, 8 aa, Homo sapiens
  Table A; Target 35780; HLA-B*56:01; LIN28A; ENSG00000131914; CTA
EPQLLHGA

SEQ ID NO: 35781 - protein, 9 aa, Homo sapiens
  Table A; Target 35781; HLA-C*03:03; LIN28A; ENSG00000131914; CTA
FAGGCAKAA

SEQ ID NO: 35782 - protein, 9 aa, Homo sapiens
  Table A; Target 35782; HLA-C*04:01; LIN28A; ENSG00000131914; CTA
FCQSISHMV

SEQ ID NO: 35783 - protein, 9 aa, Homo sapiens
  Table A; Target 35783; HLA-C*12:03; LIN28A; ENSG00000131914; CTA
FCQSISHMV

SEQ ID NO: 35784 - protein, 8 aa, Homo sapiens
  Table A; Target 35784; HLA-B*40:02; LIN28A; ENSG00000131914; CTA
FGFLSMTA

SEQ ID NO: 35785 - protein, 8 aa, Homo sapiens
  Table A; Target 35785; HLA-B*54:01; LIN28A; ENSG00000131914; CTA
FGFLSMTA

SEQ ID NO: 35786 - protein, 8 aa, Homo sapiens
  Table A; Target 35786; HLA-B*56:01; LIN28A; ENSG00000131914; CTA
FGFLSMTA

SEQ ID NO: 35787 - protein, 8 aa, Homo sapiens
  Table A; Target 35787; HLA-C*03:04; LIN28A; ENSG00000131914; CTA
FGFLSMTA

SEQ ID NO: 35788 - protein, 8 aa, Homo sapiens
  Table A; Target 35788; HLA-C*06:02; LIN28A; ENSG00000131914; CTA
FGFLSMTA

SEQ ID NO: 35789 - protein, 8 aa, Homo sapiens
  Table A; Target 35789; HLA-C*12:03; LIN28A; ENSG00000131914; CTA
FGFLSMTA

SEQ ID NO: 35790 - protein, 9 aa, Homo sapiens
  Table A; Target 35790; HLA-A*31:01; LIN28A; ENSG00000131914; CTA
FGFLSMTAR

SEQ ID NO: 35791 - protein, 9 aa, Homo sapiens
  Table A; Target 35791; HLA-A*33:01; LIN28A; ENSG00000131914; CTA
FGFLSMTAR

SEQ ID NO: 35792 - protein, 9 aa, Homo sapiens
  Table A; Target 35792; HLA-A*68:01; LIN28A; ENSG00000131914; CTA
FGFLSMTAR

SEQ ID NO: 35793 - protein, 9 aa, Homo sapiens
  Table A; Target 35793; HLA-B*27:02; LIN28A; ENSG00000131914; CTA
FGFLSMTAR

SEQ ID NO: 35794 - protein, 9 aa, Homo sapiens
  Table A; Target 35794; HLA-B*27:05; LIN28A; ENSG00000131914; CTA
FGFLSMTAR

SEQ ID NO: 35795 - protein, 9 aa, Homo sapiens
  Table A; Target 35795; HLA-B*46:01; LIN28A; ENSG00000131914; CTA
FGFLSMTAR

SEQ ID NO: 35796 - protein, 9 aa, Homo sapiens
  Table A; Target 35796; HLA-B*54:01; LIN28A; ENSG00000131914; CTA
FGFLSMTAR

SEQ ID NO: 35797 - protein, 9 aa, Homo sapiens
  Table A; Target 35797; HLA-C*07:06; LIN28A; ENSG00000131914; CTA
FGFLSMTAR

SEQ ID NO: 35798 - protein, 10 aa, Homo sapiens
  Table A; Target 35798; HLA-B*54:01; LIN28A; ENSG00000131914; CTA
FGFLSMTARA

SEQ ID NO: 35799 - protein, 10 aa, Homo sapiens
  Table A; Target 35799; HLA-A*02:03; LIN28A; ENSG00000131914; CTA
FLSMTARAGV

SEQ ID NO: 35800 - protein, 8 aa, Homo sapiens
  Table A; Target 35800; HLA-A*30:01; LIN28A; ENSG00000131914; CTA
GEAVEFTF

SEQ ID NO: 35801 - protein, 8 aa, Homo sapiens
  Table A; Target 35801; HLA-B*13:02; LIN28A; ENSG00000131914; CTA
GEAVEFTF

SEQ ID NO: 35802 - protein, 8 aa, Homo sapiens
  Table A; Target 35802; HLA-B*18:01; LIN28A; ENSG00000131914; CTA
GEAVEFTF

SEQ ID NO: 35803 - protein, 8 aa, Homo sapiens
  Table A; Target 35803; HLA-B*27:02; LIN28A; ENSG00000131914; CTA
GEAVEFTF

SEQ ID NO: 35804 - protein, 8 aa, Homo sapiens
  Table A; Target 35804; HLA-B*27:05; LIN28A; ENSG00000131914; CTA
GEAVEFTF

SEQ ID NO: 35805 - protein, 8 aa, Homo sapiens
  Table A; Target 35805; HLA-B*37:01; LIN28A; ENSG00000131914; CTA
GEAVEFTF

SEQ ID NO: 35806 - protein, 8 aa, Homo sapiens
  Table A; Target 35806; HLA-B*40:01; LIN28A; ENSG00000131914; CTA
GEAVEFTF

SEQ ID NO: 35807 - protein, 8 aa, Homo sapiens
  Table A; Target 35807; HLA-B*40:02; LIN28A; ENSG00000131914; CTA
GEAVEFTF

SEQ ID NO: 35808 - protein, 8 aa, Homo sapiens
  Table A; Target 35808; HLA-B*44:02; LIN28A; ENSG00000131914; CTA
GEAVEFTF

SEQ ID NO: 35809 - protein, 8 aa, Homo sapiens
  Table A; Target 35809; HLA-B*44:03; LIN28A; ENSG00000131914; CTA
GEAVEFTF

SEQ ID NO: 35810 - protein, 8 aa, Homo sapiens
  Table A; Target 35810; HLA-B*49:01; LIN28A; ENSG00000131914; CTA
GEAVEFTF

SEQ ID NO: 35811 - protein, 8 aa, Homo sapiens
  Table A; Target 35811; HLA-C*16:04; LIN28A; ENSG00000131914; CTA
GEAVEFTF

SEQ ID NO: 35812 - protein, 9 aa, Homo sapiens
  Table A; Target 35812; HLA-B*27:05; LIN28A; ENSG00000131914; CTA
GEAVEFTFK

SEQ ID NO: 35813 - protein, 9 aa, Homo sapiens
  Table A; Target 35813; HLA-B*49:01; LIN28A; ENSG00000131914; CTA
GEAVEFTFK

SEQ ID NO: 35814 - protein, 10 aa, Homo sapiens
  Table A; Target 35814; HLA-B*27:02; LIN28A; ENSG00000131914; CTA
GEAVEFTFKK

SEQ ID NO: 35815 - protein, 8 aa, Homo sapiens
  Table A; Target 35815; HLA-A*31:01; LIN28A; ENSG00000131914; CTA
GFLSMTAR

SEQ ID NO: 35816 - protein, 8 aa, Homo sapiens
  Table A; Target 35816; HLA-B*27:05; LIN28A; ENSG00000131914; CTA
GGLDHHAK

SEQ ID NO: 35817 - protein, 10 aa, Homo sapiens
  Table A; Target 35817; HLA-A*30:02; LIN28A; ENSG00000131914; CTA
GPSAQGKPTY

SEQ ID NO: 35818 - protein, 10 aa, Homo sapiens
  Table A; Target 35818; HLA-B*07:02; LIN28A; ENSG00000131914; CTA
GPSAQGKPTY

SEQ ID NO: 35819 - protein, 10 aa, Homo sapiens
  Table A; Target 35819; HLA-B*15:01; LIN28A; ENSG00000131914; CTA
GPSAQGKPTY

SEQ ID NO: 35820 - protein, 10 aa, Homo sapiens
  Table A; Target 35820; HLA-B*35:01; LIN28A; ENSG00000131914; CTA
GPSAQGKPTY

SEQ ID NO: 35821 - protein, 10 aa, Homo sapiens
  Table A; Target 35821; HLA-B*44:03; LIN28A; ENSG00000131914; CTA
GPSAQGKPTY

SEQ ID NO: 35822 - protein, 10 aa, Homo sapiens
  Table A; Target 35822; HLA-B*55:01; LIN28A; ENSG00000131914; CTA
GPSAQGKPTY

SEQ ID NO: 35823 - protein, 10 aa, Homo sapiens
  Table A; Target 35823; HLA-C*07:02; LIN28A; ENSG00000131914; CTA
GPSAQGKPTY

SEQ ID NO: 35824 - protein, 11 aa, Homo sapiens
  Table A; Target 35824; HLA-B*07:02; LIN28A; ENSG00000131914; CTA
GPSAQGKPTYF

SEQ ID NO: 35825 - protein, 11 aa, Homo sapiens
  Table A; Target 35825; HLA-C*04:01; LIN28A; ENSG00000131914; CTA
GPSAQGKPTYF

SEQ ID NO: 35826 - protein, 11 aa, Homo sapiens
  Table A; Target 35826; HLA-C*07:02; LIN28A; ENSG00000131914; CTA
GPSAQGKPTYF

SEQ ID NO: 35827 - protein, 11 aa, Homo sapiens
  Table A; Target 35827; HLA-C*12:03; LIN28A; ENSG00000131914; CTA
GPSAQGKPTYF

SEQ ID NO: 35828 - protein, 8 aa, Homo sapiens
  Table A; Target 35828; HLA-B*58:01; LIN28A; ENSG00000131914; CTA
GSVSNQQF

SEQ ID NO: 35829 - protein, 11 aa, Homo sapiens
  Table A; Target 35829; HLA-B*39:01; LIN28A; ENSG00000131914; CTA
GVALDPPVDVF

SEQ ID NO: 35830 - protein, 9 aa, Homo sapiens
  Table A; Target 35830; HLA-A*68:01; LIN28A; ENSG00000131914; CTA
GVFCIGSER

SEQ ID NO: 35831 - protein, 9 aa, Homo sapiens
  Table A; Target 35831; HLA-C*07:06; LIN28A; ENSG00000131914; CTA
GVFCIGSER

SEQ ID NO: 35832 - protein, 9 aa, Homo sapiens
  Table A; Target 35832; HLA-A*03:01; LIN28A; ENSG00000131914; CTA
HMEGFRSLK

SEQ ID NO: 35833 - protein, 9 aa, Homo sapiens
  Table A; Target 35833; HLA-A*03:01; LIN28A; ENSG00000131914; CTA
HMVASCPLK

SEQ ID NO: 35834 - protein, 9 aa, Homo sapiens
  Table A; Target 35834; HLA-A*03:02; LIN28A; ENSG00000131914; CTA
HMVASCPLK

SEQ ID NO: 35835 - protein, 9 aa, Homo sapiens
  Table A; Target 35835; HLA-C*04:01; LIN28A; ENSG00000131914; CTA
HMVASCPLK

SEQ ID NO: 35836 - protein, 9 aa, Homo sapiens
  Table A; Target 35836; HLA-C*06:02; LIN28A; ENSG00000131914; CTA
HMVASCPLK

SEQ ID NO: 35837 - protein, 9 aa, Homo sapiens
  Table A; Target 35837; HLA-C*07:01; LIN28A; ENSG00000131914; CTA
HMVASCPLK

SEQ ID NO: 35838 - protein, 9 aa, Homo sapiens
  Table A; Target 35838; HLA-A*02:07; LIN28A; ENSG00000131914; CTA
HSPTLLPEA

SEQ ID NO: 35839 - protein, 9 aa, Homo sapiens
  Table A; Target 35839; HLA-B*54:01; LIN28A; ENSG00000131914; CTA
HSPTLLPEA

SEQ ID NO: 35840 - protein, 8 aa, Homo sapiens
  Table A; Target 35840; HLA-C*16:01; LIN28A; ENSG00000131914; CTA
IGSERRPK

SEQ ID NO: 35841 - protein, 10 aa, Homo sapiens
  Table A; Target 35841; HLA-B*07:02; LIN28A; ENSG00000131914; CTA
IRVTGPGGVF

SEQ ID NO: 35842 - protein, 10 aa, Homo sapiens
  Table A; Target 35842; HLA-B*15:03; LIN28A; ENSG00000131914; CTA
IRVTGPGGVF

SEQ ID NO: 35843 - protein, 10 aa, Homo sapiens
  Table A; Target 35843; HLA-B*27:02; LIN28A; ENSG00000131914; CTA
IRVTGPGGVF

SEQ ID NO: 35844 - protein, 10 aa, Homo sapiens
  Table A; Target 35844; HLA-B*27:05; LIN28A; ENSG00000131914; CTA
IRVTGPGGVF

SEQ ID NO: 35845 - protein, 10 aa, Homo sapiens
  Table A; Target 35845; HLA-B*38:01; LIN28A; ENSG00000131914; CTA
IRVTGPGGVF

SEQ ID NO: 35846 - protein, 10 aa, Homo sapiens
  Table A; Target 35846; HLA-B*39:01; LIN28A; ENSG00000131914; CTA
IRVTGPGGVF

SEQ ID NO: 35847 - protein, 10 aa, Homo sapiens
  Table A; Target 35847; HLA-C*03:03; LIN28A; ENSG00000131914; CTA
IRVTGPGGVF

SEQ ID NO: 35848 - protein, 10 aa, Homo sapiens
  Table A; Target 35848; HLA-C*03:04; LIN28A; ENSG00000131914; CTA
IRVTGPGGVF

SEQ ID NO: 35849 - protein, 10 aa, Homo sapiens
  Table A; Target 35849; HLA-C*06:02; LIN28A; ENSG00000131914; CTA
IRVTGPGGVF

SEQ ID NO: 35850 - protein, 10 aa, Homo sapiens
  Table A; Target 35850; HLA-C*07:01; LIN28A; ENSG00000131914; CTA
IRVTGPGGVF

SEQ ID NO: 35851 - protein, 10 aa, Homo sapiens
  Table A; Target 35851; HLA-C*07:04; LIN28A; ENSG00000131914; CTA
IRVTGPGGVF

SEQ ID NO: 35852 - protein, 10 aa, Homo sapiens
  Table A; Target 35852; HLA-C*12:03; LIN28A; ENSG00000131914; CTA
IRVTGPGGVF

SEQ ID NO: 35853 - protein, 10 aa, Homo sapiens
  Table A; Target 35853; HLA-C*16:04; LIN28A; ENSG00000131914; CTA
IRVTGPGGVF

SEQ ID NO: 35854 - protein, 10 aa, Homo sapiens
  Table A; Target 35854; HLA-C*06:02; LIN28A; ENSG00000131914; CTA
ISHMVASCPL

SEQ ID NO: 35855 - protein, 10 aa, Homo sapiens
  Table A; Target 35855; HLA-C*07:01; LIN28A; ENSG00000131914; CTA
ISHMVASCPL

SEQ ID NO: 35856 - protein, 11 aa, Homo sapiens
  Table A; Target 35856; HLA-A*03:02; LIN28A; ENSG00000131914; CTA
KAQQGPSAQGK

SEQ ID NO: 35857 - protein, 8 aa, Homo sapiens
  Table A; Target 35857; HLA-A*30:01; LIN28A; ENSG00000131914; CTA
KEGEAVEF

SEQ ID NO: 35858 - protein, 8 aa, Homo sapiens
  Table A; Target 35858; HLA-A*32:01; LIN28A; ENSG00000131914; CTA
KEGEAVEF

SEQ ID NO: 35859 - protein, 8 aa, Homo sapiens
  Table A; Target 35859; HLA-B*15:03; LIN28A; ENSG00000131914; CTA
KEGEAVEF

SEQ ID NO: 35860 - protein, 8 aa, Homo sapiens
  Table A; Target 35860; HLA-B*18:01; LIN28A; ENSG00000131914; CTA
KEGEAVEF

SEQ ID NO: 35861 - protein, 8 aa, Homo sapiens
  Table A; Target 35861; HLA-B*27:02; LIN28A; ENSG00000131914; CTA
KEGEAVEF

SEQ ID NO: 35862 - protein, 8 aa, Homo sapiens
  Table A; Target 35862; HLA-B*37:01; LIN28A; ENSG00000131914; CTA
KEGEAVEF

SEQ ID NO: 35863 - protein, 8 aa, Homo sapiens
  Table A; Target 35863; HLA-B*40:01; LIN28A; ENSG00000131914; CTA
KEGEAVEF

SEQ ID NO: 35864 - protein, 8 aa, Homo sapiens
  Table A; Target 35864; HLA-B*40:02; LIN28A; ENSG00000131914; CTA
KEGEAVEF

SEQ ID NO: 35865 - protein, 8 aa, Homo sapiens
  Table A; Target 35865; HLA-B*44:02; LIN28A; ENSG00000131914; CTA
KEGEAVEF

SEQ ID NO: 35866 - protein, 8 aa, Homo sapiens
  Table A; Target 35866; HLA-B*44:03; LIN28A; ENSG00000131914; CTA
KEGEAVEF

SEQ ID NO: 35867 - protein, 8 aa, Homo sapiens
  Table A; Target 35867; HLA-B*57:01; LIN28A; ENSG00000131914; CTA
KEGEAVEF

SEQ ID NO: 35868 - protein, 8 aa, Homo sapiens
  Table A; Target 35868; HLA-B*58:01; LIN28A; ENSG00000131914; CTA
KEGEAVEF

SEQ ID NO: 35869 - protein, 8 aa, Homo sapiens
  Table A; Target 35869; HLA-C*12:03; LIN28A; ENSG00000131914; CTA
KEGEAVEF

SEQ ID NO: 35870 - protein, 8 aa, Homo sapiens
  Table A; Target 35870; HLA-C*16:01; LIN28A; ENSG00000131914; CTA
KEGEAVEF

SEQ ID NO: 35871 - protein, 8 aa, Homo sapiens
  Table A; Target 35871; HLA-C*16:02; LIN28A; ENSG00000131914; CTA
KEGEAVEF

SEQ ID NO: 35872 - protein, 8 aa, Homo sapiens
  Table A; Target 35872; HLA-C*16:04; LIN28A; ENSG00000131914; CTA
KEGEAVEF

SEQ ID NO: 35873 - protein, 10 aa, Homo sapiens
  Table A; Target 35873; HLA-A*23:01; LIN28A; ENSG00000131914; CTA
KEGEAVEFTF

SEQ ID NO: 35874 - protein, 10 aa, Homo sapiens
  Table A; Target 35874; HLA-A*24:02; LIN28A; ENSG00000131914; CTA
KEGEAVEFTF

SEQ ID NO: 35875 - protein, 10 aa, Homo sapiens
  Table A; Target 35875; HLA-A*30:01; LIN28A; ENSG00000131914; CTA
KEGEAVEFTF

SEQ ID NO: 35876 - protein, 10 aa, Homo sapiens
  Table A; Target 35876; HLA-B*18:01; LIN28A; ENSG00000131914; CTA
KEGEAVEFTF

SEQ ID NO: 35877 - protein, 10 aa, Homo sapiens
  Table A; Target 35877; HLA-B*27:02; LIN28A; ENSG00000131914; CTA
KEGEAVEFTF

SEQ ID NO: 35878 - protein, 10 aa, Homo sapiens
  Table A; Target 35878; HLA-B*37:01; LIN28A; ENSG00000131914; CTA
KEGEAVEFTF

SEQ ID NO: 35879 - protein, 10 aa, Homo sapiens
  Table A; Target 35879; HLA-B*38:01; LIN28A; ENSG00000131914; CTA
KEGEAVEFTF

SEQ ID NO: 35880 - protein, 10 aa, Homo sapiens
  Table A; Target 35880; HLA-B*40:01; LIN28A; ENSG00000131914; CTA
KEGEAVEFTF

SEQ ID NO: 35881 - protein, 10 aa, Homo sapiens
  Table A; Target 35881; HLA-B*40:02; LIN28A; ENSG00000131914; CTA
KEGEAVEFTF

SEQ ID NO: 35882 - protein, 10 aa, Homo sapiens
  Table A; Target 35882; HLA-B*44:02; LIN28A; ENSG00000131914; CTA
KEGEAVEFTF

SEQ ID NO: 35883 - protein, 10 aa, Homo sapiens
  Table A; Target 35883; HLA-B*44:03; LIN28A; ENSG00000131914; CTA
KEGEAVEFTF

SEQ ID NO: 35884 - protein, 10 aa, Homo sapiens
  Table A; Target 35884; HLA-B*49:01; LIN28A; ENSG00000131914; CTA
KEGEAVEFTF

SEQ ID NO: 35885 - protein, 10 aa, Homo sapiens
  Table A; Target 35885; HLA-B*57:01; LIN28A; ENSG00000131914; CTA
KEGEAVEFTF

SEQ ID NO: 35886 - protein, 10 aa, Homo sapiens
  Table A; Target 35886; HLA-B*58:01; LIN28A; ENSG00000131914; CTA
KEGEAVEFTF

SEQ ID NO: 35887 - protein, 10 aa, Homo sapiens
  Table A; Target 35887; HLA-C*16:04; LIN28A; ENSG00000131914; CTA
KEGEAVEFTF

SEQ ID NO: 35888 - protein, 11 aa, Homo sapiens
  Table A; Target 35888; HLA-A*03:02; LIN28A; ENSG00000131914; CTA
KEGEAVEFTFK

SEQ ID NO: 35889 - protein, 11 aa, Homo sapiens
  Table A; Target 35889; HLA-A*32:01; LIN28A; ENSG00000131914; CTA
KGLESIRVTGP

SEQ ID NO: 35890 - protein, 11 aa, Homo sapiens
  Table A; Target 35890; HLA-C*04:01; LIN28A; ENSG00000131914; CTA
KGLESIRVTGP

SEQ ID NO: 35891 - protein, 9 aa, Homo sapiens
  Table A; Target 35891; HLA-B*40:02; LIN28A; ENSG00000131914; CTA
KSAKGLESI

SEQ ID NO: 35892 - protein, 9 aa, Homo sapiens
  Table A; Target 35892; HLA-B*58:01; LIN28A; ENSG00000131914; CTA
KSAKGLESI

SEQ ID NO: 35893 - protein, 8 aa, Homo sapiens
  Table A; Target 35893; HLA-B*37:01; LIN28A; ENSG00000131914; CTA
LDPPVDVF

SEQ ID NO: 35894 - protein, 8 aa, Homo sapiens
  Table A; Target 35894; HLA-C*12:03; LIN28A; ENSG00000131914; CTA
LDPPVDVF

SEQ ID NO: 35895 - protein, 9 aa, Homo sapiens
  Table A; Target 35895; HLA-A*02:07; LIN28A; ENSG00000131914; CTA
LDPPVDVFV

SEQ ID NO: 35896 - protein, 9 aa, Homo sapiens
  Table A; Target 35896; HLA-A*68:02; LIN28A; ENSG00000131914; CTA
LDPPVDVFV

SEQ ID NO: 35897 - protein, 9 aa, Homo sapiens
  Table A; Target 35897; HLA-C*04:01; LIN28A; ENSG00000131914; CTA
LDPPVDVFV

SEQ ID NO: 35898 - protein, 9 aa, Homo sapiens
  Table A; Target 35898; HLA-B*37:01; LIN28A; ENSG00000131914; CTA
LESIRVTGP

SEQ ID NO: 35899 - protein, 9 aa, Homo sapiens
  Table A; Target 35899; HLA-B*40:02; LIN28A; ENSG00000131914; CTA
LESIRVTGP

SEQ ID NO: 35900 - protein, 9 aa, Homo sapiens
  Table A; Target 35900; HLA-B*49:01; LIN28A; ENSG00000131914; CTA
LESIRVTGP

SEQ ID NO: 35901 - protein, 9 aa, Homo sapiens
  Table A; Target 35901; HLA-C*07:04; LIN28A; ENSG00000131914; CTA
LESIRVTGP

SEQ ID NO: 35902 - protein, 9 aa, Homo sapiens
  Table A; Target 35902; HLA-B*38:01; LIN28A; ENSG00000131914; CTA
LHMEGFRSL

SEQ ID NO: 35903 - protein, 9 aa, Homo sapiens
  Table A; Target 35903; HLA-C*03:04; LIN28A; ENSG00000131914; CTA
LHMEGFRSL

SEQ ID NO: 35904 - protein, 9 aa, Homo sapiens
  Table A; Target 35904; HLA-B*15:03; LIN28A; ENSG00000131914; CTA
LKEGEAVEF

SEQ ID NO: 35905 - protein, 9 aa, Homo sapiens
  Table A; Target 35905; HLA-B*38:01; LIN28A; ENSG00000131914; CTA
LKEGEAVEF

SEQ ID NO: 35906 - protein, 11 aa, Homo sapiens
  Table A; Target 35906; HLA-B*07:02; LIN28A; ENSG00000131914; CTA
LSMTARAGVAL

SEQ ID NO: 35907 - protein, 11 aa, Homo sapiens
  Table A; Target 35907; HLA-C*03:03; LIN28A; ENSG00000131914; CTA
LSMTARAGVAL

SEQ ID NO: 35908 - protein, 11 aa, Homo sapiens
  Table A; Target 35908; HLA-C*03:04; LIN28A; ENSG00000131914; CTA
LSMTARAGVAL

SEQ ID NO: 35909 - protein, 8 aa, Homo sapiens
  Table A; Target 35909; HLA-B*51:01; LIN28A; ENSG00000131914; CTA
MGFGFLSM

SEQ ID NO: 35910 - protein, 8 aa, Homo sapiens
  Table A; Target 35910; HLA-B*54:01; LIN28A; ENSG00000131914; CTA
MGFGFLSM

SEQ ID NO: 35911 - protein, 9 aa, Homo sapiens
  Table A; Target 35911; HLA-B*54:01; LIN28A; ENSG00000131914; CTA
MGFGFLSMT

SEQ ID NO: 35912 - protein, 10 aa, Homo sapiens
  Table A; Target 35912; HLA-B*54:01; LIN28A; ENSG00000131914; CTA
MGFGFLSMTA

SEQ ID NO: 35913 - protein, 11 aa, Homo sapiens
  Table A; Target 35913; HLA-A*31:01; LIN28A; ENSG00000131914; CTA
MGFGFLSMTAR

SEQ ID NO: 35914 - protein, 9 aa, Homo sapiens
  Table A; Target 35914; HLA-B*15:01; LIN28A; ENSG00000131914; CTA
MGSVSNQQF

SEQ ID NO: 35915 - protein, 9 aa, Homo sapiens
  Table A; Target 35915; HLA-B*27:05; LIN28A; ENSG00000131914; CTA
MGSVSNQQF

SEQ ID NO: 35916 - protein, 9 aa, Homo sapiens
  Table A; Target 35916; HLA-B*38:01; LIN28A; ENSG00000131914; CTA
MGSVSNQQF

SEQ ID NO: 35917 - protein, 9 aa, Homo sapiens
  Table A; Target 35917; HLA-C*04:01; LIN28A; ENSG00000131914; CTA
MGSVSNQQF

SEQ ID NO: 35918 - protein, 9 aa, Homo sapiens
  Table A; Target 35918; HLA-C*07:04; LIN28A; ENSG00000131914; CTA
MGSVSNQQF

SEQ ID NO: 35919 - protein, 9 aa, Homo sapiens
  Table A; Target 35919; HLA-C*14:02; LIN28A; ENSG00000131914; CTA
MGSVSNQQF

SEQ ID NO: 35920 - protein, 9 aa, Homo sapiens
  Table A; Target 35920; HLA-C*16:01; LIN28A; ENSG00000131914; CTA
MGSVSNQQF

SEQ ID NO: 35921 - protein, 9 aa, Homo sapiens
  Table A; Target 35921; HLA-A*25:01; LIN28A; ENSG00000131914; CTA
MTARAGVAL

SEQ ID NO: 35922 - protein, 9 aa, Homo sapiens
  Table A; Target 35922; HLA-B*07:02; LIN28A; ENSG00000131914; CTA
MTARAGVAL

SEQ ID NO: 35923 - protein, 9 aa, Homo sapiens
  Table A; Target 35923; HLA-B*35:03; LIN28A; ENSG00000131914; CTA
MTARAGVAL

SEQ ID NO: 35924 - protein, 9 aa, Homo sapiens
  Table A; Target 35924; HLA-B*46:01; LIN28A; ENSG00000131914; CTA
MTARAGVAL

SEQ ID NO: 35925 - protein, 9 aa, Homo sapiens
  Table A; Target 35925; HLA-B*58:01; LIN28A; ENSG00000131914; CTA
MTARAGVAL

SEQ ID NO: 35926 - protein, 9 aa, Homo sapiens
  Table A; Target 35926; HLA-C*01:02; LIN28A; ENSG00000131914; CTA
MTARAGVAL

SEQ ID NO: 35927 - protein, 9 aa, Homo sapiens
  Table A; Target 35927; HLA-C*02:02; LIN28A; ENSG00000131914; CTA
MTARAGVAL

SEQ ID NO: 35928 - protein, 9 aa, Homo sapiens
  Table A; Target 35928; HLA-C*03:03; LIN28A; ENSG00000131914; CTA
MTARAGVAL

SEQ ID NO: 35929 - protein, 9 aa, Homo sapiens
  Table A; Target 35929; HLA-C*03:04; LIN28A; ENSG00000131914; CTA
MTARAGVAL

SEQ ID NO: 35930 - protein, 9 aa, Homo sapiens
  Table A; Target 35930; HLA-C*07:04; LIN28A; ENSG00000131914; CTA
MTARAGVAL

SEQ ID NO: 35931 - protein, 9 aa, Homo sapiens
  Table A; Target 35931; HLA-C*16:01; LIN28A; ENSG00000131914; CTA
MTARAGVAL

SEQ ID NO: 35932 - protein, 8 aa, Homo sapiens
  Table A; Target 35932; HLA-A*03:02; LIN28A; ENSG00000131914; CTA
MVASCPLK

SEQ ID NO: 35933 - protein, 9 aa, Homo sapiens
  Table A; Target 35933; HLA-B*13:02; LIN28A; ENSG00000131914; CTA
MVASCPLKA

SEQ ID NO: 35934 - protein, 9 aa, Homo sapiens
  Table A; Target 35934; HLA-B*54:01; LIN28A; ENSG00000131914; CTA
MVASCPLKA

SEQ ID NO: 35935 - protein, 9 aa, Homo sapiens
  Table A; Target 35935; HLA-C*06:02; LIN28A; ENSG00000131914; CTA
MVASCPLKA

SEQ ID NO: 35936 - protein, 10 aa, Homo sapiens
  Table A; Target 35936; HLA-B*27:05; LIN28A; ENSG00000131914; CTA
NQQFAGGCAK

SEQ ID NO: 35937 - protein, 10 aa, Homo sapiens
  Table A; Target 35937; HLA-B*27:02; LIN28A; ENSG00000131914; CTA
PEEAPEDAAR

SEQ ID NO: 35938 - protein, 9 aa, Homo sapiens
  Table A; Target 35938; HLA-A*01:01; LIN28A; ENSG00000131914; CTA
PSAQGKPTY

SEQ ID NO: 35939 - protein, 9 aa, Homo sapiens
  Table A; Target 35939; HLA-A*30:02; LIN28A; ENSG00000131914; CTA
PSAQGKPTY

SEQ ID NO: 35940 - protein, 9 aa, Homo sapiens
  Table A; Target 35940; HLA-A*32:01; LIN28A; ENSG00000131914; CTA
PSAQGKPTY

SEQ ID NO: 35941 - protein, 9 aa, Homo sapiens
  Table A; Target 35941; HLA-B*15:01; LIN28A; ENSG00000131914; CTA
PSAQGKPTY

SEQ ID NO: 35942 - protein, 9 aa, Homo sapiens
  Table A; Target 35942; HLA-B*58:01; LIN28A; ENSG00000131914; CTA
PSAQGKPTY

SEQ ID NO: 35943 - protein, 9 aa, Homo sapiens
  Table A; Target 35943; HLA-C*16:01; LIN28A; ENSG00000131914; CTA
PSAQGKPTY

SEQ ID NO: 35944 - protein, 9 aa, Homo sapiens
  Table A; Target 35944; HLA-C*16:02; LIN28A; ENSG00000131914; CTA
PSAQGKPTY

SEQ ID NO: 35945 - protein, 10 aa, Homo sapiens
  Table A; Target 35945; HLA-B*07:02; LIN28A; ENSG00000131914; CTA
PSAQGKPTYF

SEQ ID NO: 35946 - protein, 10 aa, Homo sapiens
  Table A; Target 35946; HLA-C*07:02; LIN28A; ENSG00000131914; CTA
PSAQGKPTYF

SEQ ID NO: 35947 - protein, 9 aa, Homo sapiens
  Table A; Target 35947; HLA-C*07:01; LIN28A; ENSG00000131914; CTA
PTLLPEAQN

SEQ ID NO: 35948 - protein, 8 aa, Homo sapiens
  Table A; Target 35948; HLA-A*31:01; LIN28A; ENSG00000131914; CTA
QGKPTYFR

SEQ ID NO: 35949 - protein, 11 aa, Homo sapiens
  Table A; Target 35949; HLA-A*30:02; LIN28A; ENSG00000131914; CTA
QGPSAQGKPTY

SEQ ID NO: 35950 - protein, 11 aa, Homo sapiens
  Table A; Target 35950; HLA-C*04:01; LIN28A; ENSG00000131914; CTA
QGPSAQGKPTY

SEQ ID NO: 35951 - protein, 11 aa, Homo sapiens
  Table A; Target 35951; HLA-C*07:01; LIN28A; ENSG00000131914; CTA
QGPSAQGKPTY

SEQ ID NO: 35952 - protein, 9 aa, Homo sapiens
  Table A; Target 35952; HLA-A*03:01; LIN28A; ENSG00000131914; CTA
QQFAGGCAK

SEQ ID NO: 35953 - protein, 9 aa, Homo sapiens
  Table A; Target 35953; HLA-A*03:02; LIN28A; ENSG00000131914; CTA
QQFAGGCAK

SEQ ID NO: 35954 - protein, 9 aa, Homo sapiens
  Table A; Target 35954; HLA-A*11:01; LIN28A; ENSG00000131914; CTA
QQFAGGCAK

SEQ ID NO: 35955 - protein, 9 aa, Homo sapiens
  Table A; Target 35955; HLA-A*30:02; LIN28A; ENSG00000131914; CTA
QQFAGGCAK

SEQ ID NO: 35956 - protein, 9 aa, Homo sapiens
  Table A; Target 35956; HLA-A*31:01; LIN28A; ENSG00000131914; CTA
QQFAGGCAK

SEQ ID NO: 35957 - protein, 9 aa, Homo sapiens
  Table A; Target 35957; HLA-B*13:02; LIN28A; ENSG00000131914; CTA
QQFAGGCAK

SEQ ID NO: 35958 - protein, 9 aa, Homo sapiens
  Table A; Target 35958; HLA-B*15:01; LIN28A; ENSG00000131914; CTA
QQFAGGCAK

SEQ ID NO: 35959 - protein, 9 aa, Homo sapiens
  Table A; Target 35959; HLA-B*15:03; LIN28A; ENSG00000131914; CTA
QQFAGGCAK

SEQ ID NO: 35960 - protein, 9 aa, Homo sapiens
  Table A; Target 35960; HLA-B*27:05; LIN28A; ENSG00000131914; CTA
QQFAGGCAK

SEQ ID NO: 35961 - protein, 9 aa, Homo sapiens
  Table A; Target 35961; HLA-B*39:01; LIN28A; ENSG00000131914; CTA
QQFAGGCAK

SEQ ID NO: 35962 - protein, 9 aa, Homo sapiens
  Table A; Target 35962; HLA-C*03:03; LIN28A; ENSG00000131914; CTA
QQFAGGCAK

SEQ ID NO: 35963 - protein, 9 aa, Homo sapiens
  Table A; Target 35963; HLA-C*03:04; LIN28A; ENSG00000131914; CTA
QQFAGGCAK

SEQ ID NO: 35964 - protein, 9 aa, Homo sapiens
  Table A; Target 35964; HLA-C*06:02; LIN28A; ENSG00000131914; CTA
QQFAGGCAK

SEQ ID NO: 35965 - protein, 9 aa, Homo sapiens
  Table A; Target 35965; HLA-C*07:04; LIN28A; ENSG00000131914; CTA
QQFAGGCAK

SEQ ID NO: 35966 - protein, 9 aa, Homo sapiens
  Table A; Target 35966; HLA-C*07:06; LIN28A; ENSG00000131914; CTA
QQFAGGCAK

SEQ ID NO: 35967 - protein, 10 aa, Homo sapiens
  Table A; Target 35967; HLA-B*13:02; LIN28A; ENSG00000131914; CTA
QQFAGGCAKA

SEQ ID NO: 35968 - protein, 9 aa, Homo sapiens
  Table A; Target 35968; HLA-A*03:02; LIN28A; ENSG00000131914; CTA
QQGPSAQGK

SEQ ID NO: 35969 - protein, 8 aa, Homo sapiens
  Table A; Target 35969; HLA-B*40:02; LIN28A; ENSG00000131914; CTA
QSISHMVA

SEQ ID NO: 35970 - protein, 8 aa, Homo sapiens
  Table A; Target 35970; HLA-C*12:03; LIN28A; ENSG00000131914; CTA
QSISHMVA

SEQ ID NO: 35971 - protein, 9 aa, Homo sapiens
  Table A; Target 35971; HLA-B*08:01; LIN28A; ENSG00000131914; CTA
QSKLHMEGF

SEQ ID NO: 35972 - protein, 9 aa, Homo sapiens
  Table A; Target 35972; HLA-B*57:01; LIN28A; ENSG00000131914; CTA
QSKLHMEGF

SEQ ID NO: 35973 - protein, 9 aa, Homo sapiens
  Table A; Target 35973; HLA-C*07:01; LIN28A; ENSG00000131914; CTA
QSKLHMEGF

SEQ ID NO: 35974 - protein, 9 aa, Homo sapiens
  Table A; Target 35974; HLA-B*38:01; LIN28A; ENSG00000131914; CTA
RAADEPQLL

SEQ ID NO: 35975 - protein, 9 aa, Homo sapiens
  Table A; Target 35975; HLA-B*40:01; LIN28A; ENSG00000131914; CTA
RAADEPQLL

SEQ ID NO: 35976 - protein, 9 aa, Homo sapiens
  Table A; Target 35976; HLA-B*58:01; LIN28A; ENSG00000131914; CTA
RAADEPQLL

SEQ ID NO: 35977 - protein, 9 aa, Homo sapiens
  Table A; Target 35977; HLA-C*03:03; LIN28A; ENSG00000131914; CTA
RAADEPQLL

SEQ ID NO: 35978 - protein, 9 aa, Homo sapiens
  Table A; Target 35978; HLA-C*03:04; LIN28A; ENSG00000131914; CTA
RAADEPQLL

SEQ ID NO: 35979 - protein, 9 aa, Homo sapiens
  Table A; Target 35979; HLA-C*05:01; LIN28A; ENSG00000131914; CTA
RAADEPQLL

SEQ ID NO: 35980 - protein, 10 aa, Homo sapiens
  Table A; Target 35980; HLA-A*03:01; LIN28A; ENSG00000131914; CTA
RAADEPQLLH

SEQ ID NO: 35981 - protein, 10 aa, Homo sapiens
  Table A; Target 35981; HLA-A*11:01; LIN28A; ENSG00000131914; CTA
RAADEPQLLH

SEQ ID NO: 35982 - protein, 11 aa, Homo sapiens
  Table A; Target 35982; HLA-B*57:01; LIN28A; ENSG00000131914; CTA
RSLKEGEAVEF

SEQ ID NO: 35983 - protein, 11 aa, Homo sapiens
  Table A; Target 35983; HLA-B*58:01; LIN28A; ENSG00000131914; CTA
RSLKEGEAVEF

SEQ ID NO: 35984 - protein, 9 aa, Homo sapiens
  Table A; Target 35984; HLA-A*03:01; LIN28A; ENSG00000131914; CTA
RVTGPGGVF

SEQ ID NO: 35985 - protein, 9 aa, Homo sapiens
  Table A; Target 35985; HLA-A*25:01; LIN28A; ENSG00000131914; CTA
RVTGPGGVF

SEQ ID NO: 35986 - protein, 9 aa, Homo sapiens
  Table A; Target 35986; HLA-A*26:01; LIN28A; ENSG00000131914; CTA
RVTGPGGVF

SEQ ID NO: 35987 - protein, 9 aa, Homo sapiens
  Table A; Target 35987; HLA-A*30:02; LIN28A; ENSG00000131914; CTA
RVTGPGGVF

SEQ ID NO: 35988 - protein, 9 aa, Homo sapiens
  Table A; Target 35988; HLA-A*32:01; LIN28A; ENSG00000131914; CTA
RVTGPGGVF

SEQ ID NO: 35989 - protein, 9 aa, Homo sapiens
  Table A; Target 35989; HLA-B*07:02; LIN28A; ENSG00000131914; CTA
RVTGPGGVF

SEQ ID NO: 35990 - protein, 9 aa, Homo sapiens
  Table A; Target 35990; HLA-B*15:03; LIN28A; ENSG00000131914; CTA
RVTGPGGVF

SEQ ID NO: 35991 - protein, 9 aa, Homo sapiens
  Table A; Target 35991; HLA-B*27:05; LIN28A; ENSG00000131914; CTA
RVTGPGGVF

SEQ ID NO: 35992 - protein, 9 aa, Homo sapiens
  Table A; Target 35992; HLA-B*39:01; LIN28A; ENSG00000131914; CTA
RVTGPGGVF

SEQ ID NO: 35993 - protein, 9 aa, Homo sapiens
  Table A; Target 35993; HLA-B*40:02; LIN28A; ENSG00000131914; CTA
RVTGPGGVF

SEQ ID NO: 35994 - protein, 9 aa, Homo sapiens
  Table A; Target 35994; HLA-B*46:01; LIN28A; ENSG00000131914; CTA
RVTGPGGVF

SEQ ID NO: 35995 - protein, 9 aa, Homo sapiens
  Table A; Target 35995; HLA-B*57:01; LIN28A; ENSG00000131914; CTA
RVTGPGGVF

SEQ ID NO: 35996 - protein, 9 aa, Homo sapiens
  Table A; Target 35996; HLA-B*58:01; LIN28A; ENSG00000131914; CTA
RVTGPGGVF

SEQ ID NO: 35997 - protein, 9 aa, Homo sapiens
  Table A; Target 35997; HLA-C*01:02; LIN28A; ENSG00000131914; CTA
RVTGPGGVF

SEQ ID NO: 35998 - protein, 9 aa, Homo sapiens
  Table A; Target 35998; HLA-C*02:02; LIN28A; ENSG00000131914; CTA
RVTGPGGVF

SEQ ID NO: 35999 - protein, 9 aa, Homo sapiens
  Table A; Target 35999; HLA-C*03:03; LIN28A; ENSG00000131914; CTA
RVTGPGGVF

SEQ ID NO: 36000 - protein, 9 aa, Homo sapiens
  Table A; Target 36000; HLA-C*03:04; LIN28A; ENSG00000131914; CTA
RVTGPGGVF

SEQ ID NO: 36001 - protein, 9 aa, Homo sapiens
  Table A; Target 36001; HLA-C*04:01; LIN28A; ENSG00000131914; CTA
RVTGPGGVF

SEQ ID NO: 36002 - protein, 9 aa, Homo sapiens
  Table A; Target 36002; HLA-C*05:01; LIN28A; ENSG00000131914; CTA
RVTGPGGVF

SEQ ID NO: 36003 - protein, 9 aa, Homo sapiens
  Table A; Target 36003; HLA-C*07:02; LIN28A; ENSG00000131914; CTA
RVTGPGGVF

SEQ ID NO: 36004 - protein, 9 aa, Homo sapiens
  Table A; Target 36004; HLA-C*07:04; LIN28A; ENSG00000131914; CTA
RVTGPGGVF

SEQ ID NO: 36005 - protein, 9 aa, Homo sapiens
  Table A; Target 36005; HLA-C*12:03; LIN28A; ENSG00000131914; CTA
RVTGPGGVF

SEQ ID NO: 36006 - protein, 9 aa, Homo sapiens
  Table A; Target 36006; HLA-C*14:02; LIN28A; ENSG00000131914; CTA
RVTGPGGVF

SEQ ID NO: 36007 - protein, 9 aa, Homo sapiens
  Table A; Target 36007; HLA-C*16:01; LIN28A; ENSG00000131914; CTA
RVTGPGGVF

SEQ ID NO: 36008 - protein, 9 aa, Homo sapiens
  Table A; Target 36008; HLA-C*16:04; LIN28A; ENSG00000131914; CTA
RVTGPGGVF

SEQ ID NO: 36009 - protein, 9 aa, Homo sapiens
  Table A; Target 36009; HLA-A*31:01; LIN28A; ENSG00000131914; CTA
SAKGLESIR

SEQ ID NO: 36010 - protein, 9 aa, Homo sapiens
  Table A; Target 36010; HLA-A*33:03; LIN28A; ENSG00000131914; CTA
SAKGLESIR

SEQ ID NO: 36011 - protein, 9 aa, Homo sapiens
  Table A; Target 36011; HLA-A*68:01; LIN28A; ENSG00000131914; CTA
SAKGLESIR

SEQ ID NO: 36012 - protein, 9 aa, Homo sapiens
  Table A; Target 36012; HLA-C*07:06; LIN28A; ENSG00000131914; CTA
SAKGLESIR

SEQ ID NO: 36013 - protein, 9 aa, Homo sapiens
  Table A; Target 36013; HLA-C*12:03; LIN28A; ENSG00000131914; CTA
SAKGLESIR

SEQ ID NO: 36014 - protein, 8 aa, Homo sapiens
  Table A; Target 36014; HLA-A*30:02; LIN28A; ENSG00000131914; CTA
SAQGKPTY

SEQ ID NO: 36015 - protein, 8 aa, Homo sapiens
  Table A; Target 36015; HLA-A*32:01; LIN28A; ENSG00000131914; CTA
SAQGKPTY

SEQ ID NO: 36016 - protein, 8 aa, Homo sapiens
  Table A; Target 36016; HLA-C*16:01; LIN28A; ENSG00000131914; CTA
SAQGKPTY

SEQ ID NO: 36017 - protein, 8 aa, Homo sapiens
  Table A; Target 36017; HLA-C*16:02; LIN28A; ENSG00000131914; CTA
SAQGKPTY

SEQ ID NO: 36018 - protein, 9 aa, Homo sapiens
  Table A; Target 36018; HLA-A*03:02; LIN28A; ENSG00000131914; CTA
SAQGKPTYF

SEQ ID NO: 36019 - protein, 9 aa, Homo sapiens
  Table A; Target 36019; HLA-A*11:01; LIN28A; ENSG00000131914; CTA
SAQGKPTYF

SEQ ID NO: 36020 - protein, 9 aa, Homo sapiens
  Table A; Target 36020; HLA-A*26:01; LIN28A; ENSG00000131914; CTA
SAQGKPTYF

SEQ ID NO: 36021 - protein, 9 aa, Homo sapiens
  Table A; Target 36021; HLA-A*30:02; LIN28A; ENSG00000131914; CTA
SAQGKPTYF

SEQ ID NO: 36022 - protein, 9 aa, Homo sapiens
  Table A; Target 36022; HLA-A*31:01; LIN28A; ENSG00000131914; CTA
SAQGKPTYF

SEQ ID NO: 36023 - protein, 9 aa, Homo sapiens
  Table A; Target 36023; HLA-A*32:01; LIN28A; ENSG00000131914; CTA
SAQGKPTYF

SEQ ID NO: 36024 - protein, 9 aa, Homo sapiens
  Table A; Target 36024; HLA-A*33:01; LIN28A; ENSG00000131914; CTA
SAQGKPTYF

SEQ ID NO: 36025 - protein, 9 aa, Homo sapiens
  Table A; Target 36025; HLA-A*33:03; LIN28A; ENSG00000131914; CTA
SAQGKPTYF

SEQ ID NO: 36026 - protein, 9 aa, Homo sapiens
  Table A; Target 36026; HLA-B*46:01; LIN28A; ENSG00000131914; CTA
SAQGKPTYF

SEQ ID NO: 36027 - protein, 9 aa, Homo sapiens
  Table A; Target 36027; HLA-B*57:01; LIN28A; ENSG00000131914; CTA
SAQGKPTYF

SEQ ID NO: 36028 - protein, 9 aa, Homo sapiens
  Table A; Target 36028; HLA-B*58:01; LIN28A; ENSG00000131914; CTA
SAQGKPTYF

SEQ ID NO: 36029 - protein, 9 aa, Homo sapiens
  Table A; Target 36029; HLA-C*02:02; LIN28A; ENSG00000131914; CTA
SAQGKPTYF

SEQ ID NO: 36030 - protein, 9 aa, Homo sapiens
  Table A; Target 36030; HLA-C*04:01; LIN28A; ENSG00000131914; CTA
SAQGKPTYF

SEQ ID NO: 36031 - protein, 9 aa, Homo sapiens
  Table A; Target 36031; HLA-C*05:01; LIN28A; ENSG00000131914; CTA
SAQGKPTYF

SEQ ID NO: 36032 - protein, 9 aa, Homo sapiens
  Table A; Target 36032; HLA-C*07:04; LIN28A; ENSG00000131914; CTA
SAQGKPTYF

SEQ ID NO: 36033 - protein, 9 aa, Homo sapiens
  Table A; Target 36033; HLA-C*12:03; LIN28A; ENSG00000131914; CTA
SAQGKPTYF

SEQ ID NO: 36034 - protein, 9 aa, Homo sapiens
  Table A; Target 36034; HLA-C*16:01; LIN28A; ENSG00000131914; CTA
SAQGKPTYF

SEQ ID NO: 36035 - protein, 9 aa, Homo sapiens
  Table A; Target 36035; HLA-C*16:02; LIN28A; ENSG00000131914; CTA
SAQGKPTYF

SEQ ID NO: 36036 - protein, 9 aa, Homo sapiens
  Table A; Target 36036; HLA-C*16:04; LIN28A; ENSG00000131914; CTA
SAQGKPTYF

SEQ ID NO: 36037 - protein, 10 aa, Homo sapiens
  Table A; Target 36037; HLA-A*31:01; LIN28A; ENSG00000131914; CTA
SAQGKPTYFR

SEQ ID NO: 36038 - protein, 10 aa, Homo sapiens
  Table A; Target 36038; HLA-A*33:01; LIN28A; ENSG00000131914; CTA
SAQGKPTYFR

SEQ ID NO: 36039 - protein, 9 aa, Homo sapiens
  Table A; Target 36039; HLA-B*39:01; LIN28A; ENSG00000131914; CTA
SHMVASCPL

SEQ ID NO: 36040 - protein, 11 aa, Homo sapiens
  Table A; Target 36040; HLA-B*07:02; LIN28A; ENSG00000131914; CTA
SIRVTGPGGVF

SEQ ID NO: 36041 - protein, 11 aa, Homo sapiens
  Table A; Target 36041; HLA-B*15:01; LIN28A; ENSG00000131914; CTA
SIRVTGPGGVF

SEQ ID NO: 36042 - protein, 11 aa, Homo sapiens
  Table A; Target 36042; HLA-B*46:01; LIN28A; ENSG00000131914; CTA
SIRVTGPGGVF

SEQ ID NO: 36043 - protein, 11 aa, Homo sapiens
  Table A; Target 36043; HLA-C*07:02; LIN28A; ENSG00000131914; CTA
SIRVTGPGGVF

SEQ ID NO: 36044 - protein, 10 aa, Homo sapiens
  Table A; Target 36044; HLA-A*02:03; LIN28A; ENSG00000131914; CTA
SLKEGEAVEF

SEQ ID NO: 36045 - protein, 10 aa, Homo sapiens
  Table A; Target 36045; HLA-A*25:01; LIN28A; ENSG00000131914; CTA
SLKEGEAVEF

SEQ ID NO: 36046 - protein, 10 aa, Homo sapiens
  Table A; Target 36046; HLA-A*26:01; LIN28A; ENSG00000131914; CTA
SLKEGEAVEF

SEQ ID NO: 36047 - protein, 10 aa, Homo sapiens
  Table A; Target 36047; HLA-A*30:02; LIN28A; ENSG00000131914; CTA
SLKEGEAVEF

SEQ ID NO: 36048 - protein, 10 aa, Homo sapiens
  Table A; Target 36048; HLA-A*32:01; LIN28A; ENSG00000131914; CTA
SLKEGEAVEF

SEQ ID NO: 36049 - protein, 10 aa, Homo sapiens
  Table A; Target 36049; HLA-B*15:01; LIN28A; ENSG00000131914; CTA
SLKEGEAVEF

SEQ ID NO: 36050 - protein, 10 aa, Homo sapiens
  Table A; Target 36050; HLA-B*15:03; LIN28A; ENSG00000131914; CTA
SLKEGEAVEF

SEQ ID NO: 36051 - protein, 10 aa, Homo sapiens
  Table A; Target 36051; HLA-B*46:01; LIN28A; ENSG00000131914; CTA
SLKEGEAVEF

SEQ ID NO: 36052 - protein, 10 aa, Homo sapiens
  Table A; Target 36052; HLA-B*57:01; LIN28A; ENSG00000131914; CTA
SLKEGEAVEF

SEQ ID NO: 36053 - protein, 10 aa, Homo sapiens
  Table A; Target 36053; HLA-C*07:04; LIN28A; ENSG00000131914; CTA
SLKEGEAVEF

SEQ ID NO: 36054 - protein, 10 aa, Homo sapiens
  Table A; Target 36054; HLA-C*14:02; LIN28A; ENSG00000131914; CTA
SLKEGEAVEF

SEQ ID NO: 36055 - protein, 9 aa, Homo sapiens
  Table A; Target 36055; HLA-B*55:01; LIN28A; ENSG00000131914; CTA
SMTARAGVA

SEQ ID NO: 36056 - protein, 8 aa, Homo sapiens
  Table A; Target 36056; HLA-B*51:01; LIN28A; ENSG00000131914; CTA
SPTLLPEA

SEQ ID NO: 36057 - protein, 8 aa, Homo sapiens
  Table A; Target 36057; HLA-B*54:01; LIN28A; ENSG00000131914; CTA
SPTLLPEA

SEQ ID NO: 36058 - protein, 8 aa, Homo sapiens
  Table A; Target 36058; HLA-B*55:01; LIN28A; ENSG00000131914; CTA
SPTLLPEA

SEQ ID NO: 36059 - protein, 8 aa, Homo sapiens
  Table A; Target 36059; HLA-B*56:01; LIN28A; ENSG00000131914; CTA
SPTLLPEA

SEQ ID NO: 36060 - protein, 8 aa, Homo sapiens
  Table A; Target 36060; HLA-B*07:02; LIN28A; ENSG00000131914; CTA
TARAGVAL

SEQ ID NO: 36061 - protein, 8 aa, Homo sapiens
  Table A; Target 36061; HLA-B*08:01; LIN28A; ENSG00000131914; CTA
TARAGVAL

SEQ ID NO: 36062 - protein, 8 aa, Homo sapiens
  Table A; Target 36062; HLA-B*40:02; LIN28A; ENSG00000131914; CTA
TARAGVAL

SEQ ID NO: 36063 - protein, 8 aa, Homo sapiens
  Table A; Target 36063; HLA-B*46:01; LIN28A; ENSG00000131914; CTA
TARAGVAL

SEQ ID NO: 36064 - protein, 8 aa, Homo sapiens
  Table A; Target 36064; HLA-C*01:02; LIN28A; ENSG00000131914; CTA
TARAGVAL

SEQ ID NO: 36065 - protein, 8 aa, Homo sapiens
  Table A; Target 36065; HLA-C*03:03; LIN28A; ENSG00000131914; CTA
TARAGVAL

SEQ ID NO: 36066 - protein, 8 aa, Homo sapiens
  Table A; Target 36066; HLA-C*03:04; LIN28A; ENSG00000131914; CTA
TARAGVAL

SEQ ID NO: 36067 - protein, 8 aa, Homo sapiens
  Table A; Target 36067; HLA-C*07:02; LIN28A; ENSG00000131914; CTA
TARAGVAL

SEQ ID NO: 36068 - protein, 8 aa, Homo sapiens
  Table A; Target 36068; HLA-C*07:04; LIN28A; ENSG00000131914; CTA
TARAGVAL

SEQ ID NO: 36069 - protein, 8 aa, Homo sapiens
  Table A; Target 36069; HLA-C*14:02; LIN28A; ENSG00000131914; CTA
TARAGVAL

SEQ ID NO: 36070 - protein, 8 aa, Homo sapiens
  Table A; Target 36070; HLA-C*16:01; LIN28A; ENSG00000131914; CTA
TARAGVAL

SEQ ID NO: 36071 - protein, 8 aa, Homo sapiens
  Table A; Target 36071; HLA-C*16:02; LIN28A; ENSG00000131914; CTA
TARAGVAL

SEQ ID NO: 36072 - protein, 11 aa, Homo sapiens
  Table A; Target 36072; HLA-C*06:02; LIN28A; ENSG00000131914; CTA
TARAGVALDPP

SEQ ID NO: 36073 - protein, 9 aa, Homo sapiens
  Table A; Target 36073; HLA-B*13:02; LIN28A; ENSG00000131914; CTA
TGPGGVFCI

SEQ ID NO: 36074 - protein, 9 aa, Homo sapiens
  Table A; Target 36074; HLA-C*06:02; LIN28A; ENSG00000131914; CTA
TGPGGVFCI

SEQ ID NO: 36075 - protein, 10 aa, Homo sapiens
  Table A; Target 36075; HLA-C*04:01; LIN28A; ENSG00000131914; CTA
TGPGGVFCIG

SEQ ID NO: 36076 - protein, 10 aa, Homo sapiens
  Table A; Target 36076; HLA-C*06:02; LIN28A; ENSG00000131914; CTA
TGPGGVFCIG

SEQ ID NO: 36077 - protein, 10 aa, Homo sapiens
  Table A; Target 36077; HLA-C*07:01; LIN28A; ENSG00000131914; CTA
TGPGGVFCIG

SEQ ID NO: 36078 - protein, 10 aa, Homo sapiens
  Table A; Target 36078; HLA-C*07:02; LIN28A; ENSG00000131914; CTA
TGPGGVFCIG

SEQ ID NO: 36079 - protein, 9 aa, Homo sapiens
  Table A; Target 36079; HLA-B*46:01; LIN28A; ENSG00000131914; CTA
VALDPPVDV

SEQ ID NO: 36080 - protein, 9 aa, Homo sapiens
  Table A; Target 36080; HLA-B*51:01; LIN28A; ENSG00000131914; CTA
VALDPPVDV

SEQ ID NO: 36081 - protein, 9 aa, Homo sapiens
  Table A; Target 36081; HLA-B*54:01; LIN28A; ENSG00000131914; CTA
VALDPPVDV

SEQ ID NO: 36082 - protein, 9 aa, Homo sapiens
  Table A; Target 36082; HLA-C*01:02; LIN28A; ENSG00000131914; CTA
VALDPPVDV

SEQ ID NO: 36083 - protein, 9 aa, Homo sapiens
  Table A; Target 36083; HLA-C*02:02; LIN28A; ENSG00000131914; CTA
VALDPPVDV

SEQ ID NO: 36084 - protein, 9 aa, Homo sapiens
  Table A; Target 36084; HLA-C*03:03; LIN28A; ENSG00000131914; CTA
VALDPPVDV

SEQ ID NO: 36085 - protein, 9 aa, Homo sapiens
  Table A; Target 36085; HLA-C*03:04; LIN28A; ENSG00000131914; CTA
VALDPPVDV

SEQ ID NO: 36086 - protein, 9 aa, Homo sapiens
  Table A; Target 36086; HLA-C*05:01; LIN28A; ENSG00000131914; CTA
VALDPPVDV

SEQ ID NO: 36087 - protein, 9 aa, Homo sapiens
  Table A; Target 36087; HLA-C*12:03; LIN28A; ENSG00000131914; CTA
VALDPPVDV

SEQ ID NO: 36088 - protein, 9 aa, Homo sapiens
  Table A; Target 36088; HLA-C*16:04; LIN28A; ENSG00000131914; CTA
VALDPPVDV

SEQ ID NO: 36089 - protein, 10 aa, Homo sapiens
  Table A; Target 36089; HLA-A*23:01; LIN28A; ENSG00000131914; CTA
VALDPPVDVF

SEQ ID NO: 36090 - protein, 10 aa, Homo sapiens
  Table A; Target 36090; HLA-A*24:02; LIN28A; ENSG00000131914; CTA
VALDPPVDVF

SEQ ID NO: 36091 - protein, 10 aa, Homo sapiens
  Table A; Target 36091; HLA-A*25:01; LIN28A; ENSG00000131914; CTA
VALDPPVDVF

SEQ ID NO: 36092 - protein, 10 aa, Homo sapiens
  Table A; Target 36092; HLA-A*29:02; LIN28A; ENSG00000131914; CTA
VALDPPVDVF

SEQ ID NO: 36093 - protein, 10 aa, Homo sapiens
  Table A; Target 36093; HLA-A*30:02; LIN28A; ENSG00000131914; CTA
VALDPPVDVF

SEQ ID NO: 36094 - protein, 10 aa, Homo sapiens
  Table A; Target 36094; HLA-B*27:02; LIN28A; ENSG00000131914; CTA
VALDPPVDVF

SEQ ID NO: 36095 - protein, 10 aa, Homo sapiens
  Table A; Target 36095; HLA-B*27:05; LIN28A; ENSG00000131914; CTA
VALDPPVDVF

SEQ ID NO: 36096 - protein, 10 aa, Homo sapiens
  Table A; Target 36096; HLA-B*35:01; LIN28A; ENSG00000131914; CTA
VALDPPVDVF

SEQ ID NO: 36097 - protein, 10 aa, Homo sapiens
  Table A; Target 36097; HLA-B*39:01; LIN28A; ENSG00000131914; CTA
VALDPPVDVF

SEQ ID NO: 36098 - protein, 10 aa, Homo sapiens
  Table A; Target 36098; HLA-B*46:01; LIN28A; ENSG00000131914; CTA
VALDPPVDVF

SEQ ID NO: 36099 - protein, 10 aa, Homo sapiens
  Table A; Target 36099; HLA-B*57:01; LIN28A; ENSG00000131914; CTA
VALDPPVDVF

SEQ ID NO: 36100 - protein, 10 aa, Homo sapiens
  Table A; Target 36100; HLA-C*02:02; LIN28A; ENSG00000131914; CTA
VALDPPVDVF

SEQ ID NO: 36101 - protein, 10 aa, Homo sapiens
  Table A; Target 36101; HLA-C*03:03; LIN28A; ENSG00000131914; CTA
VALDPPVDVF

SEQ ID NO: 36102 - protein, 10 aa, Homo sapiens
  Table A; Target 36102; HLA-C*03:04; LIN28A; ENSG00000131914; CTA
VALDPPVDVF

SEQ ID NO: 36103 - protein, 10 aa, Homo sapiens
  Table A; Target 36103; HLA-C*05:01; LIN28A; ENSG00000131914; CTA
VALDPPVDVF

SEQ ID NO: 36104 - protein, 10 aa, Homo sapiens
  Table A; Target 36104; HLA-C*07:06; LIN28A; ENSG00000131914; CTA
VALDPPVDVF

SEQ ID NO: 36105 - protein, 10 aa, Homo sapiens
  Table A; Target 36105; HLA-C*12:03; LIN28A; ENSG00000131914; CTA
VALDPPVDVF

SEQ ID NO: 36106 - protein, 10 aa, Homo sapiens
  Table A; Target 36106; HLA-C*16:04; LIN28A; ENSG00000131914; CTA
VALDPPVDVF

SEQ ID NO: 36107 - protein, 11 aa, Homo sapiens
  Table A; Target 36107; HLA-A*02:01; LIN28A; ENSG00000131914; CTA
VALDPPVDVFV

SEQ ID NO: 36108 - protein, 11 aa, Homo sapiens
  Table A; Target 36108; HLA-A*02:04; LIN28A; ENSG00000131914; CTA
VALDPPVDVFV

SEQ ID NO: 36109 - protein, 11 aa, Homo sapiens
  Table A; Target 36109; HLA-A*02:07; LIN28A; ENSG00000131914; CTA
VALDPPVDVFV

SEQ ID NO: 36110 - protein, 11 aa, Homo sapiens
  Table A; Target 36110; HLA-A*68:02; LIN28A; ENSG00000131914; CTA
VALDPPVDVFV

SEQ ID NO: 36111 - protein, 9 aa, Homo sapiens
  Table A; Target 36111; HLA-B*18:01; LIN28A; ENSG00000131914; CTA
VEFTFKKSA

SEQ ID NO: 36112 - protein, 9 aa, Homo sapiens
  Table A; Target 36112; HLA-B*40:02; LIN28A; ENSG00000131914; CTA
VEFTFKKSA

SEQ ID NO: 36113 - protein, 9 aa, Homo sapiens
  Table A; Target 36113; HLA-B*44:03; LIN28A; ENSG00000131914; CTA
VEFTFKKSA

SEQ ID NO: 36114 - protein, 9 aa, Homo sapiens
  Table A; Target 36114; HLA-B*49:01; LIN28A; ENSG00000131914; CTA
VEFTFKKSA

SEQ ID NO: 36115 - protein, 8 aa, Homo sapiens
  Table A; Target 36115; HLA-A*23:01; LIN28A; ENSG00000131914; CTA
VTGPGGVF

SEQ ID NO: 36116 - protein, 8 aa, Homo sapiens
  Table A; Target 36116; HLA-A*25:01; LIN28A; ENSG00000131914; CTA
VTGPGGVF

SEQ ID NO: 36117 - protein, 8 aa, Homo sapiens
  Table A; Target 36117; HLA-A*30:02; LIN28A; ENSG00000131914; CTA
VTGPGGVF

SEQ ID NO: 36118 - protein, 8 aa, Homo sapiens
  Table A; Target 36118; HLA-A*32:01; LIN28A; ENSG00000131914; CTA
VTGPGGVF

SEQ ID NO: 36119 - protein, 8 aa, Homo sapiens
  Table A; Target 36119; HLA-B*15:01; LIN28A; ENSG00000131914; CTA
VTGPGGVF

SEQ ID NO: 36120 - protein, 8 aa, Homo sapiens
  Table A; Target 36120; HLA-B*15:03; LIN28A; ENSG00000131914; CTA
VTGPGGVF

SEQ ID NO: 36121 - protein, 8 aa, Homo sapiens
  Table A; Target 36121; HLA-B*27:05; LIN28A; ENSG00000131914; CTA
VTGPGGVF

SEQ ID NO: 36122 - protein, 8 aa, Homo sapiens
  Table A; Target 36122; HLA-B*39:01; LIN28A; ENSG00000131914; CTA
VTGPGGVF

SEQ ID NO: 36123 - protein, 8 aa, Homo sapiens
  Table A; Target 36123; HLA-B*40:02; LIN28A; ENSG00000131914; CTA
VTGPGGVF

SEQ ID NO: 36124 - protein, 8 aa, Homo sapiens
  Table A; Target 36124; HLA-B*46:01; LIN28A; ENSG00000131914; CTA
VTGPGGVF

SEQ ID NO: 36125 - protein, 8 aa, Homo sapiens
  Table A; Target 36125; HLA-B*57:01; LIN28A; ENSG00000131914; CTA
VTGPGGVF

SEQ ID NO: 36126 - protein, 8 aa, Homo sapiens
  Table A; Target 36126; HLA-B*58:01; LIN28A; ENSG00000131914; CTA
VTGPGGVF

SEQ ID NO: 36127 - protein, 8 aa, Homo sapiens
  Table A; Target 36127; HLA-C*01:02; LIN28A; ENSG00000131914; CTA
VTGPGGVF

SEQ ID NO: 36128 - protein, 8 aa, Homo sapiens
  Table A; Target 36128; HLA-C*02:02; LIN28A; ENSG00000131914; CTA
VTGPGGVF

SEQ ID NO: 36129 - protein, 8 aa, Homo sapiens
  Table A; Target 36129; HLA-C*03:03; LIN28A; ENSG00000131914; CTA
VTGPGGVF

SEQ ID NO: 36130 - protein, 8 aa, Homo sapiens
  Table A; Target 36130; HLA-C*03:04; LIN28A; ENSG00000131914; CTA
VTGPGGVF

SEQ ID NO: 36131 - protein, 8 aa, Homo sapiens
  Table A; Target 36131; HLA-C*04:01; LIN28A; ENSG00000131914; CTA
VTGPGGVF

SEQ ID NO: 36132 - protein, 8 aa, Homo sapiens
  Table A; Target 36132; HLA-C*05:01; LIN28A; ENSG00000131914; CTA
VTGPGGVF

SEQ ID NO: 36133 - protein, 8 aa, Homo sapiens
  Table A; Target 36133; HLA-C*06:02; LIN28A; ENSG00000131914; CTA
VTGPGGVF

SEQ ID NO: 36134 - protein, 8 aa, Homo sapiens
  Table A; Target 36134; HLA-C*07:01; LIN28A; ENSG00000131914; CTA
VTGPGGVF

SEQ ID NO: 36135 - protein, 8 aa, Homo sapiens
  Table A; Target 36135; HLA-C*07:02; LIN28A; ENSG00000131914; CTA
VTGPGGVF

SEQ ID NO: 36136 - protein, 8 aa, Homo sapiens
  Table A; Target 36136; HLA-C*07:04; LIN28A; ENSG00000131914; CTA
VTGPGGVF

SEQ ID NO: 36137 - protein, 8 aa, Homo sapiens
  Table A; Target 36137; HLA-C*12:03; LIN28A; ENSG00000131914; CTA
VTGPGGVF

SEQ ID NO: 36138 - protein, 8 aa, Homo sapiens
  Table A; Target 36138; HLA-C*14:02; LIN28A; ENSG00000131914; CTA
VTGPGGVF

SEQ ID NO: 36139 - protein, 8 aa, Homo sapiens
  Table A; Target 36139; HLA-C*16:01; LIN28A; ENSG00000131914; CTA
VTGPGGVF

SEQ ID NO: 36140 - protein, 8 aa, Homo sapiens
  Table A; Target 36140; HLA-C*16:02; LIN28A; ENSG00000131914; CTA
VTGPGGVF

SEQ ID NO: 36141 - protein, 10 aa, Homo sapiens
  Table A; Target 36141; HLA-C*06:02; LIN28A; ENSG00000131914; CTA
VTGPGGVFCI

SEQ ID NO: 36142 - protein, 8 aa, Homo sapiens
  Table A; Target 36142; HLA-B*08:01; LUZP4; ENSG00000102021; CTA
ASFRKLTL

SEQ ID NO: 36143 - protein, 8 aa, Homo sapiens
  Table A; Target 36143; HLA-B*40:02; LUZP4; ENSG00000102021; CTA
ASFRKLTL

SEQ ID NO: 36144 - protein, 8 aa, Homo sapiens
  Table A; Target 36144; HLA-C*03:04; LUZP4; ENSG00000102021; CTA
ASFRKLTL

SEQ ID NO: 36145 - protein, 8 aa, Homo sapiens
  Table A; Target 36145; HLA-C*16:01; LUZP4; ENSG00000102021; CTA
ASFRKLTL

SEQ ID NO: 36146 - protein, 11 aa, Homo sapiens
  Table A; Target 36146; HLA-A*03:02; LUZP4; ENSG00000102021; CTA
ATQKDLIATQR

SEQ ID NO: 36147 - protein, 11 aa, Homo sapiens
  Table A; Target 36147; HLA-A*11:01; LUZP4; ENSG00000102021; CTA
ATQKDLIATQR

SEQ ID NO: 36148 - protein, 11 aa, Homo sapiens
  Table A; Target 36148; HLA-A*31:01; LUZP4; ENSG00000102021; CTA
ATQKDLIATQR

SEQ ID NO: 36149 - protein, 11 aa, Homo sapiens
  Table A; Target 36149; HLA-A*33:01; LUZP4; ENSG00000102021; CTA
ATQKDLIATQR

SEQ ID NO: 36150 - protein, 11 aa, Homo sapiens
  Table A; Target 36150; HLA-A*33:03; LUZP4; ENSG00000102021; CTA
ATQKDLIATQR

SEQ ID NO: 36151 - protein, 11 aa, Homo sapiens
  Table A; Target 36151; HLA-A*68:01; LUZP4; ENSG00000102021; CTA
ATQKDLIATQR

SEQ ID NO: 36152 - protein, 11 aa, Homo sapiens
  Table A; Target 36152; HLA-C*07:06; LUZP4; ENSG00000102021; CTA
ATQKDLIATQR

SEQ ID NO: 36153 - protein, 11 aa, Homo sapiens
  Table A; Target 36153; HLA-A*03:01; LUZP4; ENSG00000102021; CTA
ATQRDLIATQK

SEQ ID NO: 36154 - protein, 11 aa, Homo sapiens
  Table A; Target 36154; HLA-A*03:02; LUZP4; ENSG00000102021; CTA
ATQRDLIATQK

SEQ ID NO: 36155 - protein, 11 aa, Homo sapiens
  Table A; Target 36155; HLA-A*31:01; LUZP4; ENSG00000102021; CTA
ATQRDLIATQK

SEQ ID NO: 36156 - protein, 11 aa, Homo sapiens
  Table A; Target 36156; HLA-B*27:02; LUZP4; ENSG00000102021; CTA
ATQRDLIATQK

SEQ ID NO: 36157 - protein, 11 aa, Homo sapiens
  Table A; Target 36157; HLA-A*03:02; LUZP4; ENSG00000102021; CTA
ATQRDLIATQR

SEQ ID NO: 36158 - protein, 11 aa, Homo sapiens
  Table A; Target 36158; HLA-A*11:01; LUZP4; ENSG00000102021; CTA
ATQRDLIATQR

SEQ ID NO: 36159 - protein, 11 aa, Homo sapiens
  Table A; Target 36159; HLA-A*31:01; LUZP4; ENSG00000102021; CTA
ATQRDLIATQR

SEQ ID NO: 36160 - protein, 11 aa, Homo sapiens
  Table A; Target 36160; HLA-A*33:01; LUZP4; ENSG00000102021; CTA
ATQRDLIATQR

SEQ ID NO: 36161 - protein, 11 aa, Homo sapiens
  Table A; Target 36161; HLA-A*33:03; LUZP4; ENSG00000102021; CTA
ATQRDLIATQR

SEQ ID NO: 36162 - protein, 11 aa, Homo sapiens
  Table A; Target 36162; HLA-A*68:01; LUZP4; ENSG00000102021; CTA
ATQRDLIATQR

SEQ ID NO: 36163 - protein, 11 aa, Homo sapiens
  Table A; Target 36163; HLA-C*07:06; LUZP4; ENSG00000102021; CTA
ATQRDLIATQR

SEQ ID NO: 36164 - protein, 10 aa, Homo sapiens
  Table A; Target 36164; HLA-A*11:01; LUZP4; ENSG00000102021; CTA
ATQRDLIVTQ

SEQ ID NO: 36165 - protein, 11 aa, Homo sapiens
  Table A; Target 36165; HLA-A*03:02; LUZP4; ENSG00000102021; CTA
ATQRDLIVTQR

SEQ ID NO: 36166 - protein, 11 aa, Homo sapiens
  Table A; Target 36166; HLA-A*11:01; LUZP4; ENSG00000102021; CTA
ATQRDLIVTQR

SEQ ID NO: 36167 - protein, 11 aa, Homo sapiens
  Table A; Target 36167; HLA-A*31:01; LUZP4; ENSG00000102021; CTA
ATQRDLIVTQR

SEQ ID NO: 36168 - protein, 11 aa, Homo sapiens
  Table A; Target 36168; HLA-A*33:01; LUZP4; ENSG00000102021; CTA
ATQRDLIVTQR

SEQ ID NO: 36169 - protein, 11 aa, Homo sapiens
  Table A; Target 36169; HLA-A*33:03; LUZP4; ENSG00000102021; CTA
ATQRDLIVTQR

SEQ ID NO: 36170 - protein, 11 aa, Homo sapiens
  Table A; Target 36170; HLA-A*68:01; LUZP4; ENSG00000102021; CTA
ATQRDLIVTQR

SEQ ID NO: 36171 - protein, 11 aa, Homo sapiens
  Table A; Target 36171; HLA-C*07:06; LUZP4; ENSG00000102021; CTA
ATQRDLIVTQR

SEQ ID NO: 36172 - protein, 8 aa, Homo sapiens
  Table A; Target 36172; HLA-B*18:01; LUZP4; ENSG00000102021; CTA
DDIIIYKE

SEQ ID NO: 36173 - protein, 8 aa, Homo sapiens
  Table A; Target 36173; HLA-C*07:01; LUZP4; ENSG00000102021; CTA
DDIIIYKE

SEQ ID NO: 36174 - protein, 9 aa, Homo sapiens
  Table A; Target 36174; HLA-B*18:01; LUZP4; ENSG00000102021; CTA
DDIIIYKEL

SEQ ID NO: 36175 - protein, 9 aa, Homo sapiens
  Table A; Target 36175; HLA-B*40:02; LUZP4; ENSG00000102021; CTA
DDIIIYKEL

SEQ ID NO: 36176 - protein, 9 aa, Homo sapiens
  Table A; Target 36176; HLA-B*44:02; LUZP4; ENSG00000102021; CTA
DDIIIYKEL

SEQ ID NO: 36177 - protein, 9 aa, Homo sapiens
  Table A; Target 36177; HLA-B*44:03; LUZP4; ENSG00000102021; CTA
DDIIIYKEL

SEQ ID NO: 36178 - protein, 8 aa, Homo sapiens
  Table A; Target 36178; HLA-B*08:01; LUZP4; ENSG00000102021; CTA
DIIIYKEL

SEQ ID NO: 36179 - protein, 9 aa, Homo sapiens
  Table A; Target 36179; HLA-B*08:01; LUZP4; ENSG00000102021; CTA
DLIATQKDL

SEQ ID NO: 36180 - protein, 8 aa, Homo sapiens
  Table A; Target 36180; HLA-A*33:01; LUZP4; ENSG00000102021; CTA
DLINQSGR

SEQ ID NO: 36181 - protein, 8 aa, Homo sapiens
  Table A; Target 36181; HLA-A*33:03; LUZP4; ENSG00000102021; CTA
DLINQSGR

SEQ ID NO: 36182 - protein, 8 aa, Homo sapiens
  Table A; Target 36182; HLA-A*68:01; LUZP4; ENSG00000102021; CTA
DLINQSGR

SEQ ID NO: 36183 - protein, 10 aa, Homo sapiens
  Table A; Target 36183; HLA-A*25:01; LUZP4; ENSG00000102021; CTA
DLINQSGRSH

SEQ ID NO: 36184 - protein, 9 aa, Homo sapiens
  Table A; Target 36184; HLA-B*08:01; LUZP4; ENSG00000102021; CTA
DLIVTQRDL

SEQ ID NO: 36185 - protein, 9 aa, Homo sapiens
  Table A; Target 36185; HLA-A*26:01; LUZP4; ENSG00000102021; CTA
DLVDTQSDL

SEQ ID NO: 36186 - protein, 10 aa, Homo sapiens
  Table A; Target 36186; HLA-A*25:01; LUZP4; ENSG00000102021; CTA
DLVDTQSDLI

SEQ ID NO: 36187 - protein, 11 aa, Homo sapiens
  Table A; Target 36187; HLA-A*33:01; LUZP4; ENSG00000102021; CTA
DMSLDDIIIYK

SEQ ID NO: 36188 - protein, 11 aa, Homo sapiens
  Table A; Target 36188; HLA-B*27:02; LUZP4; ENSG00000102021; CTA
DMSLDDIIIYK

SEQ ID NO: 36189 - protein, 9 aa, Homo sapiens
  Table A; Target 36189; HLA-A*26:01; LUZP4; ENSG00000102021; CTA
DNYEAQAEK

SEQ ID NO: 36190 - protein, 9 aa, Homo sapiens
  Table A; Target 36190; HLA-A*33:01; LUZP4; ENSG00000102021; CTA
DNYEAQAEK

SEQ ID NO: 36191 - protein, 9 aa, Homo sapiens
  Table A; Target 36191; HLA-A*33:03; LUZP4; ENSG00000102021; CTA
DNYEAQAEK

SEQ ID NO: 36192 - protein, 9 aa, Homo sapiens
  Table A; Target 36192; HLA-A*68:01; LUZP4; ENSG00000102021; CTA
DNYEAQAEK

SEQ ID NO: 36193 - protein, 9 aa, Homo sapiens
  Table A; Target 36193; HLA-B*27:02; LUZP4; ENSG00000102021; CTA
DNYEAQAEK

SEQ ID NO: 36194 - protein, 9 aa, Homo sapiens
  Table A; Target 36194; HLA-C*07:06; LUZP4; ENSG00000102021; CTA
DNYEAQAEK

SEQ ID NO: 36195 - protein, 9 aa, Homo sapiens
  Table A; Target 36195; HLA-B*27:05; LUZP4; ENSG00000102021; CTA
DRSQGQLKR

SEQ ID NO: 36196 - protein, 10 aa, Homo sapiens
  Table A; Target 36196; HLA-A*25:01; LUZP4; ENSG00000102021; CTA
DTQSDLIATQ

SEQ ID NO: 36197 - protein, 10 aa, Homo sapiens
  Table A; Target 36197; HLA-A*26:01; LUZP4; ENSG00000102021; CTA
DTQSDLIATQ

SEQ ID NO: 36198 - protein, 10 aa, Homo sapiens
  Table A; Target 36198; HLA-A*33:01; LUZP4; ENSG00000102021; CTA
DTQSDLIATQ

SEQ ID NO: 36199 - protein, 11 aa, Homo sapiens
  Table A; Target 36199; HLA-A*03:02; LUZP4; ENSG00000102021; CTA
DTQSDLIATQR

SEQ ID NO: 36200 - protein, 11 aa, Homo sapiens
  Table A; Target 36200; HLA-A*11:01; LUZP4; ENSG00000102021; CTA
DTQSDLIATQR

SEQ ID NO: 36201 - protein, 11 aa, Homo sapiens
  Table A; Target 36201; HLA-A*31:01; LUZP4; ENSG00000102021; CTA
DTQSDLIATQR

SEQ ID NO: 36202 - protein, 11 aa, Homo sapiens
  Table A; Target 36202; HLA-A*33:01; LUZP4; ENSG00000102021; CTA
DTQSDLIATQR

SEQ ID NO: 36203 - protein, 11 aa, Homo sapiens
  Table A; Target 36203; HLA-A*33:03; LUZP4; ENSG00000102021; CTA
DTQSDLIATQR

SEQ ID NO: 36204 - protein, 11 aa, Homo sapiens
  Table A; Target 36204; HLA-A*68:01; LUZP4; ENSG00000102021; CTA
DTQSDLIATQR

SEQ ID NO: 36205 - protein, 11 aa, Homo sapiens
  Table A; Target 36205; HLA-B*27:02; LUZP4; ENSG00000102021; CTA
DTQSDLIATQR

SEQ ID NO: 36206 - protein, 11 aa, Homo sapiens
  Table A; Target 36206; HLA-C*07:06; LUZP4; ENSG00000102021; CTA
DTQSDLIATQR

SEQ ID NO: 36207 - protein, 8 aa, Homo sapiens
  Table A; Target 36207; HLA-A*33:01; LUZP4; ENSG00000102021; CTA
EENHHSER

SEQ ID NO: 36208 - protein, 9 aa, Homo sapiens
  Table A; Target 36208; HLA-B*39:01; LUZP4; ENSG00000102021; CTA
EESQGQPEE

SEQ ID NO: 36209 - protein, 11 aa, Homo sapiens
  Table A; Target 36209; HLA-B*27:02; LUZP4; ENSG00000102021; CTA
ELEGTNAEEEK

SEQ ID NO: 36210 - protein, 9 aa, Homo sapiens
  Table A; Target 36210; HLA-B*27:05; LUZP4; ENSG00000102021; CTA
ERDLINQSG

SEQ ID NO: 36211 - protein, 9 aa, Homo sapiens
  Table A; Target 36211; HLA-C*01:02; LUZP4; ENSG00000102021; CTA
ESPSRQQSK

SEQ ID NO: 36212 - protein, 9 aa, Homo sapiens
  Table A; Target 36212; HLA-A*02:07; LUZP4; ENSG00000102021; CTA
FLDMSLDDI

SEQ ID NO: 36213 - protein, 10 aa, Homo sapiens
  Table A; Target 36213; HLA-B*15:01; LUZP4; ENSG00000102021; CTA
GQHPLNGQPL

SEQ ID NO: 36214 - protein, 10 aa, Homo sapiens
  Table A; Target 36214; HLA-B*27:05; LUZP4; ENSG00000102021; CTA
GQHPLNGQPL

SEQ ID NO: 36215 - protein, 10 aa, Homo sapiens
  Table A; Target 36215; HLA-B*39:01; LUZP4; ENSG00000102021; CTA
GQHPLNGQPL

SEQ ID NO: 36216 - protein, 11 aa, Homo sapiens
  Table A; Target 36216; HLA-A*30:01; LUZP4; ENSG00000102021; CTA
GQHPLNGQPLI

SEQ ID NO: 36217 - protein, 11 aa, Homo sapiens
  Table A; Target 36217; HLA-B*13:02; LUZP4; ENSG00000102021; CTA
GQHPLNGQPLI

SEQ ID NO: 36218 - protein, 9 aa, Homo sapiens
  Table A; Target 36218; HLA-A*11:01; LUZP4; ENSG00000102021; CTA
GQPLIEQEK

SEQ ID NO: 36219 - protein, 9 aa, Homo sapiens
  Table A; Target 36219; HLA-B*13:02; LUZP4; ENSG00000102021; CTA
GQPLIEQEK

SEQ ID NO: 36220 - protein, 10 aa, Homo sapiens
  Table A; Target 36220; HLA-B*13:02; LUZP4; ENSG00000102021; CTA
GQSEGNQHQS

SEQ ID NO: 36221 - protein, 10 aa, Homo sapiens
  Table A; Target 36221; HLA-B*27:05; LUZP4; ENSG00000102021; CTA
GQSEGNQHQS

SEQ ID NO: 36222 - protein, 9 aa, Homo sapiens
  Table A; Target 36222; HLA-A*29:02; LUZP4; ENSG00000102021; CTA
GQSERHQRY

SEQ ID NO: 36223 - protein, 9 aa, Homo sapiens
  Table A; Target 36223; HLA-A*30:02; LUZP4; ENSG00000102021; CTA
GQSERHQRY

SEQ ID NO: 36224 - protein, 9 aa, Homo sapiens
  Table A; Target 36224; HLA-A*32:01; LUZP4; ENSG00000102021; CTA
GQSERHQRY

SEQ ID NO: 36225 - protein, 9 aa, Homo sapiens
  Table A; Target 36225; HLA-B*15:01; LUZP4; ENSG00000102021; CTA
GQSERHQRY

SEQ ID NO: 36226 - protein, 9 aa, Homo sapiens
  Table A; Target 36226; HLA-B*15:03; LUZP4; ENSG00000102021; CTA
GQSERHQRY

SEQ ID NO: 36227 - protein, 9 aa, Homo sapiens
  Table A; Target 36227; HLA-C*02:02; LUZP4; ENSG00000102021; CTA
GQSERHQRY

SEQ ID NO: 36228 - protein, 9 aa, Homo sapiens
  Table A; Target 36228; HLA-C*16:01; LUZP4; ENSG00000102021; CTA
GQSERHQRY

SEQ ID NO: 36229 - protein, 9 aa, Homo sapiens
  Table A; Target 36229; HLA-B*27:05; LUZP4; ENSG00000102021; CTA
GRSHGQSER

SEQ ID NO: 36230 - protein, 10 aa, Homo sapiens
  Table A; Target 36230; HLA-A*03:02; LUZP4; ENSG00000102021; CTA
GTNAEEEKNK

SEQ ID NO: 36231 - protein, 10 aa, Homo sapiens
  Table A; Target 36231; HLA-A*11:01; LUZP4; ENSG00000102021; CTA
GTNAEEEKNK

SEQ ID NO: 36232 - protein, 11 aa, Homo sapiens
  Table A; Target 36232; HLA-A*31:01; LUZP4; ENSG00000102021; CTA
GTNAEEEKNKR

SEQ ID NO: 36233 - protein, 11 aa, Homo sapiens
  Table A; Target 36233; HLA-A*33:03; LUZP4; ENSG00000102021; CTA
GTNAEEEKNKR

SEQ ID NO: 36234 - protein, 8 aa, Homo sapiens
  Table A; Target 36234; HLA-B*07:02; LUZP4; ENSG00000102021; CTA
HDKKPSQK

SEQ ID NO: 36235 - protein, 8 aa, Homo sapiens
  Table A; Target 36235; HLA-C*04:01; LUZP4; ENSG00000102021; CTA
HDKKPSQK

SEQ ID NO: 36236 - protein, 8 aa, Homo sapiens
  Table A; Target 36236; HLA-C*06:02; LUZP4; ENSG00000102021; CTA
HDKKPSQK

SEQ ID NO: 36237 - protein, 8 aa, Homo sapiens
  Table A; Target 36237; HLA-C*07:01; LUZP4; ENSG00000102021; CTA
HDKKPSQK

SEQ ID NO: 36238 - protein, 9 aa, Homo sapiens
  Table A; Target 36238; HLA-A*33:01; LUZP4; ENSG00000102021; CTA
HGQSERHQR

SEQ ID NO: 36239 - protein, 8 aa, Homo sapiens
  Table A; Target 36239; HLA-B*07:02; LUZP4; ENSG00000102021; CTA
HPLNGQPL

SEQ ID NO: 36240 - protein, 8 aa, Homo sapiens
  Table A; Target 36240; HLA-B*08:01; LUZP4; ENSG00000102021; CTA
HPLNGQPL

SEQ ID NO: 36241 - protein, 8 aa, Homo sapiens
  Table A; Target 36241; HLA-B*35:03; LUZP4; ENSG00000102021; CTA
HPLNGQPL

SEQ ID NO: 36242 - protein, 9 aa, Homo sapiens
  Table A; Target 36242; HLA-A*23:01; LUZP4; ENSG00000102021; CTA
HPLNGQPLI

SEQ ID NO: 36243 - protein, 9 aa, Homo sapiens
  Table A; Target 36243; HLA-B*13:02; LUZP4; ENSG00000102021; CTA
HPLNGQPLI

SEQ ID NO: 36244 - protein, 9 aa, Homo sapiens
  Table A; Target 36244; HLA-B*35:01; LUZP4; ENSG00000102021; CTA
HPLNGQPLI

SEQ ID NO: 36245 - protein, 9 aa, Homo sapiens
  Table A; Target 36245; HLA-B*35:03; LUZP4; ENSG00000102021; CTA
HPLNGQPLI

SEQ ID NO: 36246 - protein, 9 aa, Homo sapiens
  Table A; Target 36246; HLA-B*38:01; LUZP4; ENSG00000102021; CTA
HPLNGQPLI

SEQ ID NO: 36247 - protein, 9 aa, Homo sapiens
  Table A; Target 36247; HLA-B*51:01; LUZP4; ENSG00000102021; CTA
HPLNGQPLI

SEQ ID NO: 36248 - protein, 9 aa, Homo sapiens
  Table A; Target 36248; HLA-B*54:01; LUZP4; ENSG00000102021; CTA
HPLNGQPLI

SEQ ID NO: 36249 - protein, 9 aa, Homo sapiens
  Table A; Target 36249; HLA-B*55:01; LUZP4; ENSG00000102021; CTA
HPLNGQPLI

SEQ ID NO: 36250 - protein, 9 aa, Homo sapiens
  Table A; Target 36250; HLA-B*56:01; LUZP4; ENSG00000102021; CTA
HPLNGQPLI

SEQ ID NO: 36251 - protein, 11 aa, Homo sapiens
  Table A; Target 36251; HLA-B*35:01; LUZP4; ENSG00000102021; CTA
HPQYERSHGQY

SEQ ID NO: 36252 - protein, 9 aa, Homo sapiens
  Table A; Target 36252; HLA-B*39:01; LUZP4; ENSG00000102021; CTA
HQSEGNPDK

SEQ ID NO: 36253 - protein, 9 aa, Homo sapiens
  Table A; Target 36253; HLA-A*31:01; LUZP4; ENSG00000102021; CTA
HSKKESPSR

SEQ ID NO: 36254 - protein, 9 aa, Homo sapiens
  Table A; Target 36254; HLA-A*33:01; LUZP4; ENSG00000102021; CTA
HSKKESPSR

SEQ ID NO: 36255 - protein, 9 aa, Homo sapiens
  Table A; Target 36255; HLA-A*33:03; LUZP4; ENSG00000102021; CTA
HSKKESPSR

SEQ ID NO: 36256 - protein, 8 aa, Homo sapiens
  Table A; Target 36256; HLA-B*51:01; LUZP4; ENSG00000102021; CTA
IATQKDLI

SEQ ID NO: 36257 - protein, 8 aa, Homo sapiens
  Table A; Target 36257; HLA-C*16:01; LUZP4; ENSG00000102021; CTA
IATQKDLI

SEQ ID NO: 36258 - protein, 8 aa, Homo sapiens
  Table A; Target 36258; HLA-C*16:02; LUZP4; ENSG00000102021; CTA
IATQKDLI

SEQ ID NO: 36259 - protein, 9 aa, Homo sapiens
  Table A; Target 36259; HLA-B*54:01; LUZP4; ENSG00000102021; CTA
IATQKDLIA

SEQ ID NO: 36260 - protein, 9 aa, Homo sapiens
  Table A; Target 36260; HLA-B*51:01; LUZP4; ENSG00000102021; CTA
IATQRDLIV

SEQ ID NO: 36261 - protein, 9 aa, Homo sapiens
  Table A; Target 36261; HLA-C*03:04; LUZP4; ENSG00000102021; CTA
IATQRDLIV

SEQ ID NO: 36262 - protein, 9 aa, Homo sapiens
  Table A; Target 36262; HLA-C*12:03; LUZP4; ENSG00000102021; CTA
IATQRDLIV

SEQ ID NO: 36263 - protein, 9 aa, Homo sapiens
  Table A; Target 36263; HLA-C*16:01; LUZP4; ENSG00000102021; CTA
IATQRDLIV

SEQ ID NO: 36264 - protein, 9 aa, Homo sapiens
  Table A; Target 36264; HLA-C*16:02; LUZP4; ENSG00000102021; CTA
IATQRDLIV

SEQ ID NO: 36265 - protein, 10 aa, Homo sapiens
  Table A; Target 36265; HLA-A*30:02; LUZP4; ENSG00000102021; CTA
IEQEKCSDNY

SEQ ID NO: 36266 - protein, 9 aa, Homo sapiens
  Table A; Target 36266; HLA-B*08:01; LUZP4; ENSG00000102021; CTA
IVTQRDLVA

SEQ ID NO: 36267 - protein, 9 aa, Homo sapiens
  Table A; Target 36267; HLA-B*54:01; LUZP4; ENSG00000102021; CTA
IVTQRDLVA

SEQ ID NO: 36268 - protein, 9 aa, Homo sapiens
  Table A; Target 36268; HLA-C*16:01; LUZP4; ENSG00000102021; CTA
IVTQRDLVA

SEQ ID NO: 36269 - protein, 10 aa, Homo sapiens
  Table A; Target 36269; HLA-C*14:02; LUZP4; ENSG00000102021; CTA
IYKELEGTNA

SEQ ID NO: 36270 - protein, 8 aa, Homo sapiens
  Table A; Target 36270; HLA-A*31:01; LUZP4; ENSG00000102021; CTA
KDLIATQR

SEQ ID NO: 36271 - protein, 8 aa, Homo sapiens
  Table A; Target 36271; HLA-B*37:01; LUZP4; ENSG00000102021; CTA
KDLIATQR

SEQ ID NO: 36272 - protein, 10 aa, Homo sapiens
  Table A; Target 36272; HLA-B*37:01; LUZP4; ENSG00000102021; CTA
KESPSRQQSK

SEQ ID NO: 36273 - protein, 10 aa, Homo sapiens
  Table A; Target 36273; HLA-B*15:03; LUZP4; ENSG00000102021; CTA
KKPSQKPSGF

SEQ ID NO: 36274 - protein, 9 aa, Homo sapiens
  Table A; Target 36274; HLA-B*07:02; LUZP4; ENSG00000102021; CTA
KPSQKPSGF

SEQ ID NO: 36275 - protein, 9 aa, Homo sapiens
  Table A; Target 36275; HLA-B*08:01; LUZP4; ENSG00000102021; CTA
KPSQKPSGF

SEQ ID NO: 36276 - protein, 9 aa, Homo sapiens
  Table A; Target 36276; HLA-B*37:01; LUZP4; ENSG00000102021; CTA
KPSQKPSGF

SEQ ID NO: 36277 - protein, 9 aa, Homo sapiens
  Table A; Target 36277; HLA-C*07:02; LUZP4; ENSG00000102021; CTA
KPSQKPSGF

SEQ ID NO: 36278 - protein, 9 aa, Homo sapiens
  Table A; Target 36278; HLA-B*07:02; LUZP4; ENSG00000102021; CTA
KVNFLDMSL

SEQ ID NO: 36279 - protein, 9 aa, Homo sapiens
  Table A; Target 36279; HLA-A*02:07; LUZP4; ENSG00000102021; CTA
KVPPNHPSR

SEQ ID NO: 36280 - protein, 9 aa, Homo sapiens
  Table A; Target 36280; HLA-A*03:01; LUZP4; ENSG00000102021; CTA
KVPPNHPSR

SEQ ID NO: 36281 - protein, 9 aa, Homo sapiens
  Table A; Target 36281; HLA-A*03:02; LUZP4; ENSG00000102021; CTA
KVPPNHPSR

SEQ ID NO: 36282 - protein, 9 aa, Homo sapiens
  Table A; Target 36282; HLA-A*11:01; LUZP4; ENSG00000102021; CTA
KVPPNHPSR

SEQ ID NO: 36283 - protein, 9 aa, Homo sapiens
  Table A; Target 36283; HLA-A*31:01; LUZP4; ENSG00000102021; CTA
KVPPNHPSR

SEQ ID NO: 36284 - protein, 9 aa, Homo sapiens
  Table A; Target 36284; HLA-A*32:01; LUZP4; ENSG00000102021; CTA
KVPPNHPSR

SEQ ID NO: 36285 - protein, 10 aa, Homo sapiens
  Table A; Target 36285; HLA-A*03:01; LUZP4; ENSG00000102021; CTA
KVPPNHPSRK

SEQ ID NO: 36286 - protein, 10 aa, Homo sapiens
  Table A; Target 36286; HLA-A*03:02; LUZP4; ENSG00000102021; CTA
KVPPNHPSRK

SEQ ID NO: 36287 - protein, 10 aa, Homo sapiens
  Table A; Target 36287; HLA-A*11:01; LUZP4; ENSG00000102021; CTA
KVPPNHPSRK

SEQ ID NO: 36288 - protein, 8 aa, Homo sapiens
  Table A; Target 36288; HLA-B*27:02; LUZP4; ENSG00000102021; CTA
LDDIIIYK

SEQ ID NO: 36289 - protein, 8 aa, Homo sapiens
  Table A; Target 36289; HLA-C*03:04; LUZP4; ENSG00000102021; CTA
LVATERDL

SEQ ID NO: 36290 - protein, 8 aa, Homo sapiens
  Table A; Target 36290; HLA-C*16:01; LUZP4; ENSG00000102021; CTA
LVATERDL

SEQ ID NO: 36291 - protein, 8 aa, Homo sapiens
  Table A; Target 36291; HLA-C*05:01; LUZP4; ENSG00000102021; CTA
LVDTQSDL

SEQ ID NO: 36292 - protein, 9 aa, Homo sapiens
  Table A; Target 36292; HLA-A*01:01; LUZP4; ENSG00000102021; CTA
LVDTQSDLI

SEQ ID NO: 36293 - protein, 9 aa, Homo sapiens
  Table A; Target 36293; HLA-A*02:07; LUZP4; ENSG00000102021; CTA
LVDTQSDLI

SEQ ID NO: 36294 - protein, 9 aa, Homo sapiens
  Table A; Target 36294; HLA-B*27:05; LUZP4; ENSG00000102021; CTA
LVDTQSDLI

SEQ ID NO: 36295 - protein, 9 aa, Homo sapiens
  Table A; Target 36295; HLA-B*38:01; LUZP4; ENSG00000102021; CTA
LVDTQSDLI

SEQ ID NO: 36296 - protein, 9 aa, Homo sapiens
  Table A; Target 36296; HLA-C*05:01; LUZP4; ENSG00000102021; CTA
LVDTQSDLI

SEQ ID NO: 36297 - protein, 9 aa, Homo sapiens
  Table A; Target 36297; HLA-B*08:01; LUZP4; ENSG00000102021; CTA
MASFRKLTL

SEQ ID NO: 36298 - protein, 9 aa, Homo sapiens
  Table A; Target 36298; HLA-C*03:04; LUZP4; ENSG00000102021; CTA
MASFRKLTL

SEQ ID NO: 36299 - protein, 9 aa, Homo sapiens
  Table A; Target 36299; HLA-C*16:01; LUZP4; ENSG00000102021; CTA
MASFRKLTL

SEQ ID NO: 36300 - protein, 9 aa, Homo sapiens
  Table A; Target 36300; HLA-C*16:02; LUZP4; ENSG00000102021; CTA
MASFRKLTL

SEQ ID NO: 36301 - protein, 9 aa, Homo sapiens
  Table A; Target 36301; HLA-A*01:01; LUZP4; ENSG00000102021; CTA
MSLDDIIIY

SEQ ID NO: 36302 - protein, 9 aa, Homo sapiens
  Table A; Target 36302; HLA-A*29:02; LUZP4; ENSG00000102021; CTA
MSLDDIIIY

SEQ ID NO: 36303 - protein, 9 aa, Homo sapiens
  Table A; Target 36303; HLA-B*35:01; LUZP4; ENSG00000102021; CTA
MSLDDIIIY

SEQ ID NO: 36304 - protein, 9 aa, Homo sapiens
  Table A; Target 36304; HLA-B*55:01; LUZP4; ENSG00000102021; CTA
MSLDDIIIY

SEQ ID NO: 36305 - protein, 9 aa, Homo sapiens
  Table A; Target 36305; HLA-B*57:01; LUZP4; ENSG00000102021; CTA
MSLDDIIIY

SEQ ID NO: 36306 - protein, 9 aa, Homo sapiens
  Table A; Target 36306; HLA-B*58:01; LUZP4; ENSG00000102021; CTA
MSLDDIIIY

SEQ ID NO: 36307 - protein, 9 aa, Homo sapiens
  Table A; Target 36307; HLA-C*07:01; LUZP4; ENSG00000102021; CTA
MSLDDIIIY

SEQ ID NO: 36308 - protein, 9 aa, Homo sapiens
  Table A; Target 36308; HLA-C*12:03; LUZP4; ENSG00000102021; CTA
MSLDDIIIY

SEQ ID NO: 36309 - protein, 10 aa, Homo sapiens
  Table A; Target 36309; HLA-A*03:01; LUZP4; ENSG00000102021; CTA
MSLDDIIIYK

SEQ ID NO: 36310 - protein, 10 aa, Homo sapiens
  Table A; Target 36310; HLA-A*03:02; LUZP4; ENSG00000102021; CTA
MSLDDIIIYK

SEQ ID NO: 36311 - protein, 10 aa, Homo sapiens
  Table A; Target 36311; HLA-A*11:01; LUZP4; ENSG00000102021; CTA
MSLDDIIIYK

SEQ ID NO: 36312 - protein, 10 aa, Homo sapiens
  Table A; Target 36312; HLA-A*68:02; LUZP4; ENSG00000102021; CTA
MSLDDIIIYK

SEQ ID NO: 36313 - protein, 10 aa, Homo sapiens
  Table A; Target 36313; HLA-B*27:02; LUZP4; ENSG00000102021; CTA
MSLDDIIIYK

SEQ ID NO: 36314 - protein, 10 aa, Homo sapiens
  Table A; Target 36314; HLA-B*57:01; LUZP4; ENSG00000102021; CTA
MSLDDIIIYK

SEQ ID NO: 36315 - protein, 10 aa, Homo sapiens
  Table A; Target 36315; HLA-B*27:02; LUZP4; ENSG00000102021; CTA
NGQPLIEQEK

SEQ ID NO: 36316 - protein, 9 aa, Homo sapiens
  Table A; Target 36316; HLA-A*01:01; LUZP4; ENSG00000102021; CTA
NSEEGNHDK

SEQ ID NO: 36317 - protein, 10 aa, Homo sapiens
  Table A; Target 36317; HLA-A*30:02; LUZP4; ENSG00000102021; CTA
PQYERSHGQY

SEQ ID NO: 36318 - protein, 9 aa, Homo sapiens
  Table A; Target 36318; HLA-B*38:01; LUZP4; ENSG00000102021; CTA
QHPLNGQPL

SEQ ID NO: 36319 - protein, 9 aa, Homo sapiens
  Table A; Target 36319; HLA-B*39:01; LUZP4; ENSG00000102021; CTA
QHPLNGQPL

SEQ ID NO: 36320 - protein, 9 aa, Homo sapiens
  Table A; Target 36320; HLA-C*01:02; LUZP4; ENSG00000102021; CTA
QHPLNGQPL

SEQ ID NO: 36321 - protein, 10 aa, Homo sapiens
  Table A; Target 36321; HLA-B*38:01; LUZP4; ENSG00000102021; CTA
QHPLNGQPLI

SEQ ID NO: 36322 - protein, 10 aa, Homo sapiens
  Table A; Target 36322; HLA-B*39:01; LUZP4; ENSG00000102021; CTA
QHQSEGNPDK

SEQ ID NO: 36323 - protein, 9 aa, Homo sapiens
  Table A; Target 36323; HLA-B*55:01; LUZP4; ENSG00000102021; CTA
QPLIEQEKC

SEQ ID NO: 36324 - protein, 9 aa, Homo sapiens
  Table A; Target 36324; HLA-B*27:02; LUZP4; ENSG00000102021; CTA
QRDLIATQK

SEQ ID NO: 36325 - protein, 9 aa, Homo sapiens
  Table A; Target 36325; HLA-B*27:05; LUZP4; ENSG00000102021; CTA
QRDLIATQK

SEQ ID NO: 36326 - protein, 9 aa, Homo sapiens
  Table A; Target 36326; HLA-B*27:02; LUZP4; ENSG00000102021; CTA
QRDLIATQR

SEQ ID NO: 36327 - protein, 9 aa, Homo sapiens
  Table A; Target 36327; HLA-B*27:05; LUZP4; ENSG00000102021; CTA
QRDLIATQR

SEQ ID NO: 36328 - protein, 9 aa, Homo sapiens
  Table A; Target 36328; HLA-B*27:02; LUZP4; ENSG00000102021; CTA
QRDLIVTQR

SEQ ID NO: 36329 - protein, 9 aa, Homo sapiens
  Table A; Target 36329; HLA-B*27:05; LUZP4; ENSG00000102021; CTA
QRDLIVTQR

SEQ ID NO: 36330 - protein, 9 aa, Homo sapiens
  Table A; Target 36330; HLA-B*27:05; LUZP4; ENSG00000102021; CTA
QRDLVATER

SEQ ID NO: 36331 - protein, 10 aa, Homo sapiens
  Table A; Target 36331; HLA-B*38:01; LUZP4; ENSG00000102021; CTA
QRYSTGKNTI

SEQ ID NO: 36332 - protein, 10 aa, Homo sapiens
  Table A; Target 36332; HLA-C*06:02; LUZP4; ENSG00000102021; CTA
QRYSTGKNTI

SEQ ID NO: 36333 - protein, 10 aa, Homo sapiens
  Table A; Target 36333; HLA-C*07:01; LUZP4; ENSG00000102021; CTA
QRYSTGKNTI

SEQ ID NO: 36334 - protein, 9 aa, Homo sapiens
  Table A; Target 36334; HLA-A*01:01; LUZP4; ENSG00000102021; CTA
QSDLIATQR

SEQ ID NO: 36335 - protein, 9 aa, Homo sapiens
  Table A; Target 36335; HLA-A*11:01; LUZP4; ENSG00000102021; CTA
QSDLIATQR

SEQ ID NO: 36336 - protein, 9 aa, Homo sapiens
  Table A; Target 36336; HLA-A*31:01; LUZP4; ENSG00000102021; CTA
QSDLIATQR

SEQ ID NO: 36337 - protein, 9 aa, Homo sapiens
  Table A; Target 36337; HLA-A*33:01; LUZP4; ENSG00000102021; CTA
QSDLIATQR

SEQ ID NO: 36338 - protein, 9 aa, Homo sapiens
  Table A; Target 36338; HLA-A*33:03; LUZP4; ENSG00000102021; CTA
QSDLIATQR

SEQ ID NO: 36339 - protein, 9 aa, Homo sapiens
  Table A; Target 36339; HLA-A*68:01; LUZP4; ENSG00000102021; CTA
QSDLIATQR

SEQ ID NO: 36340 - protein, 9 aa, Homo sapiens
  Table A; Target 36340; HLA-C*07:06; LUZP4; ENSG00000102021; CTA
QSDLIATQR

SEQ ID NO: 36341 - protein, 9 aa, Homo sapiens
  Table A; Target 36341; HLA-A*01:01; LUZP4; ENSG00000102021; CTA
QSDRSQGQL

SEQ ID NO: 36342 - protein, 9 aa, Homo sapiens
  Table A; Target 36342; HLA-B*58:01; LUZP4; ENSG00000102021; CTA
QSDRSQGQL

SEQ ID NO: 36343 - protein, 9 aa, Homo sapiens
  Table A; Target 36343; HLA-C*05:01; LUZP4; ENSG00000102021; CTA
QSDRSQGQL

SEQ ID NO: 36344 - protein, 10 aa, Homo sapiens
  Table A; Target 36344; HLA-A*01:01; LUZP4; ENSG00000102021; CTA
QSDRSQGQLK

SEQ ID NO: 36345 - protein, 10 aa, Homo sapiens
  Table A; Target 36345; HLA-A*03:02; LUZP4; ENSG00000102021; CTA
QSDRSQGQLK

SEQ ID NO: 36346 - protein, 10 aa, Homo sapiens
  Table A; Target 36346; HLA-A*11:01; LUZP4; ENSG00000102021; CTA
QSDRSQGQLK

SEQ ID NO: 36347 - protein, 9 aa, Homo sapiens
  Table A; Target 36347; HLA-A*29:02; LUZP4; ENSG00000102021; CTA
QYERSHGQY

SEQ ID NO: 36348 - protein, 9 aa, Homo sapiens
  Table A; Target 36348; HLA-A*30:02; LUZP4; ENSG00000102021; CTA
QYERSHGQY

SEQ ID NO: 36349 - protein, 9 aa, Homo sapiens
  Table A; Target 36349; HLA-C*07:01; LUZP4; ENSG00000102021; CTA
QYERSHGQY

SEQ ID NO: 36350 - protein, 8 aa, Homo sapiens
  Table A; Target 36350; HLA-A*03:02; LUZP4; ENSG00000102021; CTA
RDLIATQK

SEQ ID NO: 36351 - protein, 8 aa, Homo sapiens
  Table A; Target 36351; HLA-A*11:01; LUZP4; ENSG00000102021; CTA
RDLIATQK

SEQ ID NO: 36352 - protein, 8 aa, Homo sapiens
  Table A; Target 36352; HLA-B*27:02; LUZP4; ENSG00000102021; CTA
RDLIATQK

SEQ ID NO: 36353 - protein, 8 aa, Homo sapiens
  Table A; Target 36353; HLA-B*37:01; LUZP4; ENSG00000102021; CTA
RDLIATQK

SEQ ID NO: 36354 - protein, 8 aa, Homo sapiens
  Table A; Target 36354; HLA-A*31:01; LUZP4; ENSG00000102021; CTA
RDLIATQR

SEQ ID NO: 36355 - protein, 8 aa, Homo sapiens
  Table A; Target 36355; HLA-B*37:01; LUZP4; ENSG00000102021; CTA
RDLIATQR

SEQ ID NO: 36356 - protein, 9 aa, Homo sapiens
  Table A; Target 36356; HLA-A*31:01; LUZP4; ENSG00000102021; CTA
RDLINQSGR

SEQ ID NO: 36357 - protein, 8 aa, Homo sapiens
  Table A; Target 36357; HLA-A*31:01; LUZP4; ENSG00000102021; CTA
RDLIVTQR

SEQ ID NO: 36358 - protein, 8 aa, Homo sapiens
  Table A; Target 36358; HLA-B*37:01; LUZP4; ENSG00000102021; CTA
RDLIVTQR

SEQ ID NO: 36359 - protein, 8 aa, Homo sapiens
  Table A; Target 36359; HLA-A*03:01; LUZP4; ENSG00000102021; CTA
RDLVATER

SEQ ID NO: 36360 - protein, 8 aa, Homo sapiens
  Table A; Target 36360; HLA-A*11:01; LUZP4; ENSG00000102021; CTA
RDLVATER

SEQ ID NO: 36361 - protein, 8 aa, Homo sapiens
  Table A; Target 36361; HLA-A*31:01; LUZP4; ENSG00000102021; CTA
RDLVATER

SEQ ID NO: 36362 - protein, 8 aa, Homo sapiens
  Table A; Target 36362; HLA-B*37:01; LUZP4; ENSG00000102021; CTA
RDLVATER

SEQ ID NO: 36363 - protein, 9 aa, Homo sapiens
  Table A; Target 36363; HLA-A*23:01; LUZP4; ENSG00000102021; CTA
RYSTGKNTI

SEQ ID NO: 36364 - protein, 9 aa, Homo sapiens
  Table A; Target 36364; HLA-A*24:02; LUZP4; ENSG00000102021; CTA
RYSTGKNTI

SEQ ID NO: 36365 - protein, 8 aa, Homo sapiens
  Table A; Target 36365; HLA-A*11:01; LUZP4; ENSG00000102021; CTA
SDLIATQR

SEQ ID NO: 36366 - protein, 8 aa, Homo sapiens
  Table A; Target 36366; HLA-B*37:01; LUZP4; ENSG00000102021; CTA
SDLIATQR

SEQ ID NO: 36367 - protein, 10 aa, Homo sapiens
  Table A; Target 36367; HLA-A*03:02; LUZP4; ENSG00000102021; CTA
SDNYEAQAEK

SEQ ID NO: 36368 - protein, 10 aa, Homo sapiens
  Table A; Target 36368; HLA-A*11:01; LUZP4; ENSG00000102021; CTA
SDNYEAQAEK

SEQ ID NO: 36369 - protein, 10 aa, Homo sapiens
  Table A; Target 36369; HLA-B*27:02; LUZP4; ENSG00000102021; CTA
SDNYEAQAEK

SEQ ID NO: 36370 - protein, 9 aa, Homo sapiens
  Table A; Target 36370; HLA-C*06:02; LUZP4; ENSG00000102021; CTA
SDRSQGQLK

SEQ ID NO: 36371 - protein, 9 aa, Homo sapiens
  Table A; Target 36371; HLA-B*40:02; LUZP4; ENSG00000102021; CTA
SEKVPPNHP

SEQ ID NO: 36372 - protein, 10 aa, Homo sapiens
  Table A; Target 36372; HLA-B*40:02; LUZP4; ENSG00000102021; CTA
SEKVPPNHPS

SEQ ID NO: 36373 - protein, 10 aa, Homo sapiens
  Table A; Target 36373; HLA-C*04:01; LUZP4; ENSG00000102021; CTA
SEKVPPNHPS

SEQ ID NO: 36374 - protein, 10 aa, Homo sapiens
  Table A; Target 36374; HLA-C*06:02; LUZP4; ENSG00000102021; CTA
SEKVPPNHPS

SEQ ID NO: 36375 - protein, 10 aa, Homo sapiens
  Table A; Target 36375; HLA-C*07:02; LUZP4; ENSG00000102021; CTA
SEKVPPNHPS

SEQ ID NO: 36376 - protein, 11 aa, Homo sapiens
  Table A; Target 36376; HLA-A*31:01; LUZP4; ENSG00000102021; CTA
SEKVPPNHPSR

SEQ ID NO: 36377 - protein, 8 aa, Homo sapiens
  Table A; Target 36377; HLA-A*01:01; LUZP4; ENSG00000102021; CTA
SLDDIIIY

SEQ ID NO: 36378 - protein, 8 aa, Homo sapiens
  Table A; Target 36378; HLA-C*04:01; LUZP4; ENSG00000102021; CTA
SLDDIIIY

SEQ ID NO: 36379 - protein, 8 aa, Homo sapiens
  Table A; Target 36379; HLA-C*05:01; LUZP4; ENSG00000102021; CTA
SLDDIIIY

SEQ ID NO: 36380 - protein, 8 aa, Homo sapiens
  Table A; Target 36380; HLA-C*12:03; LUZP4; ENSG00000102021; CTA
SLDDIIIY

SEQ ID NO: 36381 - protein, 9 aa, Homo sapiens
  Table A; Target 36381; HLA-A*01:01; LUZP4; ENSG00000102021; CTA
SLDDIIIYK

SEQ ID NO: 36382 - protein, 9 aa, Homo sapiens
  Table A; Target 36382; HLA-A*02:01; LUZP4; ENSG00000102021; CTA
SLDDIIIYK

SEQ ID NO: 36383 - protein, 9 aa, Homo sapiens
  Table A; Target 36383; HLA-A*02:04; LUZP4; ENSG00000102021; CTA
SLDDIIIYK

SEQ ID NO: 36384 - protein, 9 aa, Homo sapiens
  Table A; Target 36384; HLA-A*02:07; LUZP4; ENSG00000102021; CTA
SLDDIIIYK

SEQ ID NO: 36385 - protein, 9 aa, Homo sapiens
  Table A; Target 36385; HLA-A*03:01; LUZP4; ENSG00000102021; CTA
SLDDIIIYK

SEQ ID NO: 36386 - protein, 9 aa, Homo sapiens
  Table A; Target 36386; HLA-A*03:02; LUZP4; ENSG00000102021; CTA
SLDDIIIYK

SEQ ID NO: 36387 - protein, 9 aa, Homo sapiens
  Table A; Target 36387; HLA-A*11:01; LUZP4; ENSG00000102021; CTA
SLDDIIIYK

SEQ ID NO: 36388 - protein, 9 aa, Homo sapiens
  Table A; Target 36388; HLA-A*31:01; LUZP4; ENSG00000102021; CTA
SLDDIIIYK

SEQ ID NO: 36389 - protein, 9 aa, Homo sapiens
  Table A; Target 36389; HLA-A*68:01; LUZP4; ENSG00000102021; CTA
SLDDIIIYK

SEQ ID NO: 36390 - protein, 9 aa, Homo sapiens
  Table A; Target 36390; HLA-A*68:02; LUZP4; ENSG00000102021; CTA
SLDDIIIYK

SEQ ID NO: 36391 - protein, 10 aa, Homo sapiens
  Table A; Target 36391; HLA-A*02:07; LUZP4; ENSG00000102021; CTA
SLDDIIIYKE

SEQ ID NO: 36392 - protein, 11 aa, Homo sapiens
  Table A; Target 36392; HLA-A*02:07; LUZP4; ENSG00000102021; CTA
SLDDIIIYKEL

SEQ ID NO: 36393 - protein, 9 aa, Homo sapiens
  Table A; Target 36393; HLA-B*56:01; LUZP4; ENSG00000102021; CTA
SPSRQQSKA

SEQ ID NO: 36394 - protein, 10 aa, Homo sapiens
  Table A; Target 36394; HLA-B*27:05; LUZP4; ENSG00000102021; CTA
SQSDRSQGQL

SEQ ID NO: 36395 - protein, 10 aa, Homo sapiens
  Table A; Target 36395; HLA-B*39:01; LUZP4; ENSG00000102021; CTA
SQSDRSQGQL

SEQ ID NO: 36396 - protein, 11 aa, Homo sapiens
  Table A; Target 36396; HLA-A*03:02; LUZP4; ENSG00000102021; CTA
SQSDRSQGQLK

SEQ ID NO: 36397 - protein, 11 aa, Homo sapiens
  Table A; Target 36397; HLA-A*11:01; LUZP4; ENSG00000102021; CTA
SQSDRSQGQLK

SEQ ID NO: 36398 - protein, 11 aa, Homo sapiens
  Table A; Target 36398; HLA-A*31:01; LUZP4; ENSG00000102021; CTA
SQSDRSQGQLK

SEQ ID NO: 36399 - protein, 9 aa, Homo sapiens
  Table A; Target 36399; HLA-C*06:02; LUZP4; ENSG00000102021; CTA
SRNHLERSL

SEQ ID NO: 36400 - protein, 10 aa, Homo sapiens
  Table A; Target 36400; HLA-A*30:01; LUZP4; ENSG00000102021; CTA
TERDLINQSG

SEQ ID NO: 36401 - protein, 10 aa, Homo sapiens
  Table A; Target 36401; HLA-B*40:02; LUZP4; ENSG00000102021; CTA
TERDLINQSG

SEQ ID NO: 36402 - protein, 10 aa, Homo sapiens
  Table A; Target 36402; HLA-C*06:02; LUZP4; ENSG00000102021; CTA
TERDLINQSG

SEQ ID NO: 36403 - protein, 11 aa, Homo sapiens
  Table A; Target 36403; HLA-A*31:01; LUZP4; ENSG00000102021; CTA
TERDLINQSGR

SEQ ID NO: 36404 - protein, 8 aa, Homo sapiens
  Table A; Target 36404; HLA-C*04:01; LUZP4; ENSG00000102021; CTA
TGKNTITT

SEQ ID NO: 36405 - protein, 8 aa, Homo sapiens
  Table A; Target 36405; HLA-C*06:02; LUZP4; ENSG00000102021; CTA
TGKNTITT

SEQ ID NO: 36406 - protein, 8 aa, Homo sapiens
  Table A; Target 36406; HLA-C*07:01; LUZP4; ENSG00000102021; CTA
TGKNTITT

SEQ ID NO: 36407 - protein, 8 aa, Homo sapiens
  Table A; Target 36407; HLA-C*07:02; LUZP4; ENSG00000102021; CTA
TGKNTITT

SEQ ID NO: 36408 - protein, 8 aa, Homo sapiens
  Table A; Target 36408; HLA-C*07:04; LUZP4; ENSG00000102021; CTA
TGKNTITT

SEQ ID NO: 36409 - protein, 9 aa, Homo sapiens
  Table A; Target 36409; HLA-A*31:01; LUZP4; ENSG00000102021; CTA
TQKDLIATQ

SEQ ID NO: 36410 - protein, 9 aa, Homo sapiens
  Table A; Target 36410; HLA-B*27:05; LUZP4; ENSG00000102021; CTA
TQKDLIATQ

SEQ ID NO: 36411 - protein, 10 aa, Homo sapiens
  Table A; Target 36411; HLA-A*31:01; LUZP4; ENSG00000102021; CTA
TQKDLIATQR

SEQ ID NO: 36412 - protein, 10 aa, Homo sapiens
  Table A; Target 36412; HLA-A*33:01; LUZP4; ENSG00000102021; CTA
TQKDLIATQR

SEQ ID NO: 36413 - protein, 10 aa, Homo sapiens
  Table A; Target 36413; HLA-A*33:03; LUZP4; ENSG00000102021; CTA
TQKDLIATQR

SEQ ID NO: 36414 - protein, 10 aa, Homo sapiens
  Table A; Target 36414; HLA-A*68:01; LUZP4; ENSG00000102021; CTA
TQKDLIATQR

SEQ ID NO: 36415 - protein, 10 aa, Homo sapiens
  Table A; Target 36415; HLA-C*07:06; LUZP4; ENSG00000102021; CTA
TQKDLIATQR

SEQ ID NO: 36416 - protein, 10 aa, Homo sapiens
  Table A; Target 36416; HLA-A*03:01; LUZP4; ENSG00000102021; CTA
TQRDLIATQK

SEQ ID NO: 36417 - protein, 10 aa, Homo sapiens
  Table A; Target 36417; HLA-A*03:02; LUZP4; ENSG00000102021; CTA
TQRDLIATQK

SEQ ID NO: 36418 - protein, 10 aa, Homo sapiens
  Table A; Target 36418; HLA-A*31:01; LUZP4; ENSG00000102021; CTA
TQRDLIATQK

SEQ ID NO: 36419 - protein, 10 aa, Homo sapiens
  Table A; Target 36419; HLA-A*31:01; LUZP4; ENSG00000102021; CTA
TQRDLIATQR

SEQ ID NO: 36420 - protein, 10 aa, Homo sapiens
  Table A; Target 36420; HLA-A*33:03; LUZP4; ENSG00000102021; CTA
TQRDLIATQR

SEQ ID NO: 36421 - protein, 10 aa, Homo sapiens
  Table A; Target 36421; HLA-A*68:01; LUZP4; ENSG00000102021; CTA
TQRDLIATQR

SEQ ID NO: 36422 - protein, 10 aa, Homo sapiens
  Table A; Target 36422; HLA-C*07:06; LUZP4; ENSG00000102021; CTA
TQRDLIATQR

SEQ ID NO: 36423 - protein, 9 aa, Homo sapiens
  Table A; Target 36423; HLA-A*31:01; LUZP4; ENSG00000102021; CTA
TQRDLIVTQ

SEQ ID NO: 36424 - protein, 9 aa, Homo sapiens
  Table A; Target 36424; HLA-B*27:05; LUZP4; ENSG00000102021; CTA
TQRDLIVTQ

SEQ ID NO: 36425 - protein, 9 aa, Homo sapiens
  Table A; Target 36425; HLA-C*06:02; LUZP4; ENSG00000102021; CTA
TQRDLIVTQ

SEQ ID NO: 36426 - protein, 10 aa, Homo sapiens
  Table A; Target 36426; HLA-A*31:01; LUZP4; ENSG00000102021; CTA
TQRDLIVTQR

SEQ ID NO: 36427 - protein, 10 aa, Homo sapiens
  Table A; Target 36427; HLA-A*33:03; LUZP4; ENSG00000102021; CTA
TQRDLIVTQR

SEQ ID NO: 36428 - protein, 10 aa, Homo sapiens
  Table A; Target 36428; HLA-A*68:01; LUZP4; ENSG00000102021; CTA
TQRDLIVTQR

SEQ ID NO: 36429 - protein, 10 aa, Homo sapiens
  Table A; Target 36429; HLA-C*07:06; LUZP4; ENSG00000102021; CTA
TQRDLIVTQR

SEQ ID NO: 36430 - protein, 10 aa, Homo sapiens
  Table A; Target 36430; HLA-A*31:01; LUZP4; ENSG00000102021; CTA
TQRDLVATER

SEQ ID NO: 36431 - protein, 10 aa, Homo sapiens
  Table A; Target 36431; HLA-A*33:01; LUZP4; ENSG00000102021; CTA
TQRDLVATER

SEQ ID NO: 36432 - protein, 10 aa, Homo sapiens
  Table A; Target 36432; HLA-A*33:03; LUZP4; ENSG00000102021; CTA
TQRDLVATER

SEQ ID NO: 36433 - protein, 10 aa, Homo sapiens
  Table A; Target 36433; HLA-C*07:06; LUZP4; ENSG00000102021; CTA
TQRDLVATER

SEQ ID NO: 36434 - protein, 9 aa, Homo sapiens
  Table A; Target 36434; HLA-B*27:05; LUZP4; ENSG00000102021; CTA
TQSDLIATQ

SEQ ID NO: 36435 - protein, 9 aa, Homo sapiens
  Table A; Target 36435; HLA-B*38:01; LUZP4; ENSG00000102021; CTA
TQSDLIATQ

SEQ ID NO: 36436 - protein, 9 aa, Homo sapiens
  Table A; Target 36436; HLA-B*39:01; LUZP4; ENSG00000102021; CTA
TQSDLIATQ

SEQ ID NO: 36437 - protein, 10 aa, Homo sapiens
  Table A; Target 36437; HLA-A*11:01; LUZP4; ENSG00000102021; CTA
TQSDLIATQR

SEQ ID NO: 36438 - protein, 10 aa, Homo sapiens
  Table A; Target 36438; HLA-A*31:01; LUZP4; ENSG00000102021; CTA
TQSDLIATQR

SEQ ID NO: 36439 - protein, 10 aa, Homo sapiens
  Table A; Target 36439; HLA-A*33:03; LUZP4; ENSG00000102021; CTA
TQSDLIATQR

SEQ ID NO: 36440 - protein, 10 aa, Homo sapiens
  Table A; Target 36440; HLA-A*68:01; LUZP4; ENSG00000102021; CTA
TQSDLIATQR

SEQ ID NO: 36441 - protein, 10 aa, Homo sapiens
  Table A; Target 36441; HLA-A*68:02; LUZP4; ENSG00000102021; CTA
TQSDLIATQR

SEQ ID NO: 36442 - protein, 10 aa, Homo sapiens
  Table A; Target 36442; HLA-B*27:02; LUZP4; ENSG00000102021; CTA
TQSDLIATQR

SEQ ID NO: 36443 - protein, 10 aa, Homo sapiens
  Table A; Target 36443; HLA-B*27:05; LUZP4; ENSG00000102021; CTA
TQSDLIATQR

SEQ ID NO: 36444 - protein, 10 aa, Homo sapiens
  Table A; Target 36444; HLA-C*07:06; LUZP4; ENSG00000102021; CTA
TQSDLIATQR

SEQ ID NO: 36445 - protein, 8 aa, Homo sapiens
  Table A; Target 36445; HLA-B*51:01; LUZP4; ENSG00000102021; CTA
VATERDLI

SEQ ID NO: 36446 - protein, 8 aa, Homo sapiens
  Table A; Target 36446; HLA-C*16:01; LUZP4; ENSG00000102021; CTA
VATERDLI

SEQ ID NO: 36447 - protein, 8 aa, Homo sapiens
  Table A; Target 36447; HLA-C*16:02; LUZP4; ENSG00000102021; CTA
VATERDLI

SEQ ID NO: 36448 - protein, 8 aa, Homo sapiens
  Table A; Target 36448; HLA-B*51:01; LUZP4; ENSG00000102021; CTA
VPPNHPSR

SEQ ID NO: 36449 - protein, 8 aa, Homo sapiens
  Table A; Target 36449; HLA-C*16:01; LUZP4; ENSG00000102021; CTA
VPPNHPSR

SEQ ID NO: 36450 - protein, 11 aa, Homo sapiens
  Table A; Target 36450; HLA-A*31:01; LUZP4; ENSG00000102021; CTA
VTQRDLVATER

SEQ ID NO: 36451 - protein, 11 aa, Homo sapiens
  Table A; Target 36451; HLA-A*33:01; LUZP4; ENSG00000102021; CTA
VTQRDLVATER

SEQ ID NO: 36452 - protein, 11 aa, Homo sapiens
  Table A; Target 36452; HLA-A*68:01; LUZP4; ENSG00000102021; CTA
VTQRDLVATER

SEQ ID NO: 36453 - protein, 11 aa, Homo sapiens
  Table A; Target 36453; HLA-C*07:06; LUZP4; ENSG00000102021; CTA
VTQRDLVATER

SEQ ID NO: 36454 - protein, 8 aa, Homo sapiens
  Table A; Target 36454; HLA-C*07:04; LUZP4; ENSG00000102021; CTA
YEAQAEKN

SEQ ID NO: 36455 - protein, 9 aa, Homo sapiens
  Table A; Target 36455; HLA-B*07:02; LUZP4; ENSG00000102021; CTA
YEAQAEKNQ

SEQ ID NO: 36456 - protein, 9 aa, Homo sapiens
  Table A; Target 36456; HLA-B*44:02; LUZP4; ENSG00000102021; CTA
YEAQAEKNQ

SEQ ID NO: 36457 - protein, 9 aa, Homo sapiens
  Table A; Target 36457; HLA-B*44:03; LUZP4; ENSG00000102021; CTA
YEAQAEKNQ

SEQ ID NO: 36458 - protein, 9 aa, Homo sapiens
  Table A; Target 36458; HLA-C*06:02; LUZP4; ENSG00000102021; CTA
YEAQAEKNQ

SEQ ID NO: 36459 - protein, 9 aa, Homo sapiens
  Table A; Target 36459; HLA-C*07:01; LUZP4; ENSG00000102021; CTA
YEAQAEKNQ

SEQ ID NO: 36460 - protein, 9 aa, Homo sapiens
  Table A; Target 36460; HLA-C*12:03; LUZP4; ENSG00000102021; CTA
YEAQAEKNQ

SEQ ID NO: 36461 - protein, 9 aa, Homo sapiens
  Table A; Target 36461; HLA-C*16:02; LUZP4; ENSG00000102021; CTA
YEAQAEKNQ

SEQ ID NO: 36462 - protein, 10 aa, Homo sapiens
  Table A; Target 36462; HLA-B*40:02; LUZP4; ENSG00000102021; CTA
YEAQAEKNQG

SEQ ID NO: 36463 - protein, 10 aa, Homo sapiens
  Table A; Target 36463; HLA-B*49:01; LUZP4; ENSG00000102021; CTA
YEAQAEKNQG

SEQ ID NO: 36464 - protein, 11 aa, Homo sapiens
  Table A; Target 36464; HLA-C*06:02; LUZP4; ENSG00000102021; CTA
YEAQAEKNQGQ

SEQ ID NO: 36465 - protein, 8 aa, Homo sapiens
  Table A; Target 36465; HLA-B*18:01; LUZP4; ENSG00000102021; CTA
YERSHGQY

SEQ ID NO: 36466 - protein, 8 aa, Homo sapiens
  Table A; Target 36466; HLA-A*32:01; LUZP4; ENSG00000102021; CTA
YSTGKNTI

SEQ ID NO: 36467 - protein, 8 aa, Homo sapiens
  Table A; Target 36467; HLA-B*08:01; LUZP4; ENSG00000102021; CTA
YSTGKNTI

SEQ ID NO: 36468 - protein, 8 aa, Homo sapiens
  Table A; Target 36468; HLA-C*16:01; LUZP4; ENSG00000102021; CTA
YSTGKNTI

SEQ ID NO: 36469 - protein, 8 aa, Homo sapiens
  Table A; Target 36469; HLA-C*16:02; LUZP4; ENSG00000102021; CTA
YSTGKNTI

SEQ ID NO: 36470 - protein, 9 aa, Homo sapiens
  Table A; Target 36470; HLA-B*07:02; MAGEA1; ENSG00000198681; CTA
AATSSSSPL

SEQ ID NO: 36471 - protein, 9 aa, Homo sapiens
  Table A; Target 36471; HLA-B*35:03; MAGEA1; ENSG00000198681; CTA
AATSSSSPL

SEQ ID NO: 36472 - protein, 9 aa, Homo sapiens
  Table A; Target 36472; HLA-B*46:01; MAGEA1; ENSG00000198681; CTA
AATSSSSPL

SEQ ID NO: 36473 - protein, 9 aa, Homo sapiens
  Table A; Target 36473; HLA-C*01:02; MAGEA1; ENSG00000198681; CTA
AATSSSSPL

SEQ ID NO: 36474 - protein, 9 aa, Homo sapiens
  Table A; Target 36474; HLA-C*02:02; MAGEA1; ENSG00000198681; CTA
AATSSSSPL

SEQ ID NO: 36475 - protein, 9 aa, Homo sapiens
  Table A; Target 36475; HLA-C*03:03; MAGEA1; ENSG00000198681; CTA
AATSSSSPL

SEQ ID NO: 36476 - protein, 9 aa, Homo sapiens
  Table A; Target 36476; HLA-C*03:04; MAGEA1; ENSG00000198681; CTA
AATSSSSPL

SEQ ID NO: 36477 - protein, 9 aa, Homo sapiens
  Table A; Target 36477; HLA-C*07:02; MAGEA1; ENSG00000198681; CTA
AATSSSSPL

SEQ ID NO: 36478 - protein, 9 aa, Homo sapiens
  Table A; Target 36478; HLA-C*14:02; MAGEA1; ENSG00000198681; CTA
AATSSSSPL

SEQ ID NO: 36479 - protein, 9 aa, Homo sapiens
  Table A; Target 36479; HLA-C*16:01; MAGEA1; ENSG00000198681; CTA
AATSSSSPL

SEQ ID NO: 36480 - protein, 9 aa, Homo sapiens
  Table A; Target 36480; HLA-C*16:02; MAGEA1; ENSG00000198681; CTA
AATSSSSPL

SEQ ID NO: 36481 - protein, 11 aa, Homo sapiens
  Table A; Target 36481; HLA-C*03:03; MAGEA1; ENSG00000198681; CTA
AATSSSSPLVL

SEQ ID NO: 36482 - protein, 11 aa, Homo sapiens
  Table A; Target 36482; HLA-C*03:04; MAGEA1; ENSG00000198681; CTA
AATSSSSPLVL

SEQ ID NO: 36483 - protein, 8 aa, Homo sapiens
  Table A; Target 36483; HLA-B*37:01; MAGEA1; ENSG00000198681; CTA
ADLVGFLL

SEQ ID NO: 36484 - protein, 8 aa, Homo sapiens
  Table A; Target 36484; HLA-B*40:02; MAGEA1; ENSG00000198681; CTA
ADLVGFLL

SEQ ID NO: 36485 - protein, 9 aa, Homo sapiens
  Table A; Target 36485; HLA-B*37:01; MAGEA1; ENSG00000198681; CTA
ADLVGFLLL

SEQ ID NO: 36486 - protein, 9 aa, Homo sapiens
  Table A; Target 36486; HLA-B*44:02; MAGEA1; ENSG00000198681; CTA
ADLVGFLLL

SEQ ID NO: 36487 - protein, 8 aa, Homo sapiens
  Table A; Target 36487; HLA-A*30:02; MAGEA1; ENSG00000198681; CTA
ADPTGHSY

SEQ ID NO: 36488 - protein, 8 aa, Homo sapiens
  Table A; Target 36488; HLA-B*15:03; MAGEA1; ENSG00000198681; CTA
ADPTGHSY

SEQ ID NO: 36489 - protein, 8 aa, Homo sapiens
  Table A; Target 36489; HLA-B*37:01; MAGEA1; ENSG00000198681; CTA
ADPTGHSY

SEQ ID NO: 36490 - protein, 8 aa, Homo sapiens
  Table A; Target 36490; HLA-B*44:02; MAGEA1; ENSG00000198681; CTA
ADPTGHSY

SEQ ID NO: 36491 - protein, 8 aa, Homo sapiens
  Table A; Target 36491; HLA-B*44:03; MAGEA1; ENSG00000198681; CTA
ADPTGHSY

SEQ ID NO: 36492 - protein, 8 aa, Homo sapiens
  Table A; Target 36492; HLA-C*01:02; MAGEA1; ENSG00000198681; CTA
ADPTGHSY

SEQ ID NO: 36493 - protein, 8 aa, Homo sapiens
  Table A; Target 36493; HLA-C*14:02; MAGEA1; ENSG00000198681; CTA
ADPTGHSY

SEQ ID NO: 36494 - protein, 9 aa, Homo sapiens
  Table A; Target 36494; HLA-B*37:01; MAGEA1; ENSG00000198681; CTA
ADPTGHSYV

SEQ ID NO: 36495 - protein, 10 aa, Homo sapiens
  Table A; Target 36495; HLA-B*37:01; MAGEA1; ENSG00000198681; CTA
ADPTGHSYVL

SEQ ID NO: 36496 - protein, 11 aa, Homo sapiens
  Table A; Target 36496; HLA-A*30:02; MAGEA1; ENSG00000198681; CTA
AETSYVKVLEY

SEQ ID NO: 36497 - protein, 11 aa, Homo sapiens
  Table A; Target 36497; HLA-B*18:01; MAGEA1; ENSG00000198681; CTA
AETSYVKVLEY

SEQ ID NO: 36498 - protein, 11 aa, Homo sapiens
  Table A; Target 36498; HLA-B*27:02; MAGEA1; ENSG00000198681; CTA
AETSYVKVLEY

SEQ ID NO: 36499 - protein, 11 aa, Homo sapiens
  Table A; Target 36499; HLA-B*40:01; MAGEA1; ENSG00000198681; CTA
AETSYVKVLEY

SEQ ID NO: 36500 - protein, 11 aa, Homo sapiens
  Table A; Target 36500; HLA-B*44:02; MAGEA1; ENSG00000198681; CTA
AETSYVKVLEY

SEQ ID NO: 36501 - protein, 11 aa, Homo sapiens
  Table A; Target 36501; HLA-C*16:04; MAGEA1; ENSG00000198681; CTA
AETSYVKVLEY

SEQ ID NO: 36502 - protein, 8 aa, Homo sapiens
  Table A; Target 36502; HLA-A*23:01; MAGEA1; ENSG00000198681; CTA
AFPTTINF

SEQ ID NO: 36503 - protein, 8 aa, Homo sapiens
  Table A; Target 36503; HLA-C*01:02; MAGEA1; ENSG00000198681; CTA
AFPTTINF

SEQ ID NO: 36504 - protein, 8 aa, Homo sapiens
  Table A; Target 36504; HLA-C*14:02; MAGEA1; ENSG00000198681; CTA
AFPTTINF

SEQ ID NO: 36505 - protein, 9 aa, Homo sapiens
  Table A; Target 36505; HLA-C*01:02; MAGEA1; ENSG00000198681; CTA
ALEAQQEAL

SEQ ID NO: 36506 - protein, 9 aa, Homo sapiens
  Table A; Target 36506; HLA-A*02:01; MAGEA1; ENSG00000198681; CTA
ALGLVCVQA

SEQ ID NO: 36507 - protein, 9 aa, Homo sapiens
  Table A; Target 36507; HLA-B*55:01; MAGEA1; ENSG00000198681; CTA
ALGLVCVQA

SEQ ID NO: 36508 - protein, 9 aa, Homo sapiens
  Table A; Target 36508; HLA-A*02:03; MAGEA1; ENSG00000198681; CTA
ALREEEEGV

SEQ ID NO: 36509 - protein, 9 aa, Homo sapiens
  Table A; Target 36509; HLA-A*02:04; MAGEA1; ENSG00000198681; CTA
ALREEEEGV

SEQ ID NO: 36510 - protein, 9 aa, Homo sapiens
  Table A; Target 36510; HLA-A*02:07; MAGEA1; ENSG00000198681; CTA
ALREEEEGV

SEQ ID NO: 36511 - protein, 9 aa, Homo sapiens
  Table A; Target 36511; HLA-B*13:02; MAGEA1; ENSG00000198681; CTA
ALREEEEGV

SEQ ID NO: 36512 - protein, 9 aa, Homo sapiens
  Table A; Target 36512; HLA-B*15:01; MAGEA1; ENSG00000198681; CTA
ALREEEEGV

SEQ ID NO: 36513 - protein, 9 aa, Homo sapiens
  Table A; Target 36513; HLA-B*40:02; MAGEA1; ENSG00000198681; CTA
ALREEEEGV

SEQ ID NO: 36514 - protein, 9 aa, Homo sapiens
  Table A; Target 36514; HLA-C*06:02; MAGEA1; ENSG00000198681; CTA
ALREEEEGV

SEQ ID NO: 36515 - protein, 9 aa, Homo sapiens
  Table A; Target 36515; HLA-C*07:04; MAGEA1; ENSG00000198681; CTA
ALREEEEGV

SEQ ID NO: 36516 - protein, 9 aa, Homo sapiens
  Table A; Target 36516; HLA-A*02:03; MAGEA1; ENSG00000198681; CTA
AQQEALGLV

SEQ ID NO: 36517 - protein, 9 aa, Homo sapiens
  Table A; Target 36517; HLA-B*13:02; MAGEA1; ENSG00000198681; CTA
AQQEALGLV

SEQ ID NO: 36518 - protein, 11 aa, Homo sapiens
  Table A; Target 36518; HLA-A*02:01; MAGEA1; ENSG00000198681; CTA
AQQEALGLVCV

SEQ ID NO: 36519 - protein, 11 aa, Homo sapiens
  Table A; Target 36519; HLA-A*02:04; MAGEA1; ENSG00000198681; CTA
AQQEALGLVCV

SEQ ID NO: 36520 - protein, 11 aa, Homo sapiens
  Table A; Target 36520; HLA-A*30:01; MAGEA1; ENSG00000198681; CTA
AQQEALGLVCV

SEQ ID NO: 36521 - protein, 11 aa, Homo sapiens
  Table A; Target 36521; HLA-B*13:02; MAGEA1; ENSG00000198681; CTA
AQQEALGLVCV

SEQ ID NO: 36522 - protein, 11 aa, Homo sapiens
  Table A; Target 36522; HLA-B*15:01; MAGEA1; ENSG00000198681; CTA
AQQEALGLVCV

SEQ ID NO: 36523 - protein, 10 aa, Homo sapiens
  Table A; Target 36523; HLA-B*57:01; MAGEA1; ENSG00000198681; CTA
ASAFPTTINF

SEQ ID NO: 36524 - protein, 10 aa, Homo sapiens
  Table A; Target 36524; HLA-B*58:01; MAGEA1; ENSG00000198681; CTA
ASAFPTTINF

SEQ ID NO: 36525 - protein, 9 aa, Homo sapiens
  Table A; Target 36525; HLA-A*01:01; MAGEA1; ENSG00000198681; CTA
ASESLQLVF

SEQ ID NO: 36526 - protein, 9 aa, Homo sapiens
  Table A; Target 36526; HLA-A*29:02; MAGEA1; ENSG00000198681; CTA
ASESLQLVF

SEQ ID NO: 36527 - protein, 9 aa, Homo sapiens
  Table A; Target 36527; HLA-B*57:01; MAGEA1; ENSG00000198681; CTA
ASESLQLVF

SEQ ID NO: 36528 - protein, 9 aa, Homo sapiens
  Table A; Target 36528; HLA-B*58:01; MAGEA1; ENSG00000198681; CTA
ASESLQLVF

SEQ ID NO: 36529 - protein, 9 aa, Homo sapiens
  Table A; Target 36529; HLA-C*05:01; MAGEA1; ENSG00000198681; CTA
ASESLQLVF

SEQ ID NO: 36530 - protein, 9 aa, Homo sapiens
  Table A; Target 36530; HLA-A*01:01; MAGEA1; ENSG00000198681; CTA
ATSSSSPLV

SEQ ID NO: 36531 - protein, 9 aa, Homo sapiens
  Table A; Target 36531; HLA-A*02:01; MAGEA1; ENSG00000198681; CTA
ATSSSSPLV

SEQ ID NO: 36532 - protein, 9 aa, Homo sapiens
  Table A; Target 36532; HLA-A*03:02; MAGEA1; ENSG00000198681; CTA
ATSSSSPLV

SEQ ID NO: 36533 - protein, 9 aa, Homo sapiens
  Table A; Target 36533; HLA-A*11:01; MAGEA1; ENSG00000198681; CTA
ATSSSSPLV

SEQ ID NO: 36534 - protein, 9 aa, Homo sapiens
  Table A; Target 36534; HLA-B*13:02; MAGEA1; ENSG00000198681; CTA
ATSSSSPLV

SEQ ID NO: 36535 - protein, 9 aa, Homo sapiens
  Table A; Target 36535; HLA-B*27:05; MAGEA1; ENSG00000198681; CTA
ATSSSSPLV

SEQ ID NO: 36536 - protein, 9 aa, Homo sapiens
  Table A; Target 36536; HLA-B*39:01; MAGEA1; ENSG00000198681; CTA
ATSSSSPLV

SEQ ID NO: 36537 - protein, 9 aa, Homo sapiens
  Table A; Target 36537; HLA-C*02:02; MAGEA1; ENSG00000198681; CTA
ATSSSSPLV

SEQ ID NO: 36538 - protein, 9 aa, Homo sapiens
  Table A; Target 36538; HLA-C*16:02; MAGEA1; ENSG00000198681; CTA
ATSSSSPLV

SEQ ID NO: 36539 - protein, 10 aa, Homo sapiens
  Table A; Target 36539; HLA-A*03:01; MAGEA1; ENSG00000198681; CTA
ATSSSSPLVL

SEQ ID NO: 36540 - protein, 10 aa, Homo sapiens
  Table A; Target 36540; HLA-A*11:01; MAGEA1; ENSG00000198681; CTA
ATSSSSPLVL

SEQ ID NO: 36541 - protein, 10 aa, Homo sapiens
  Table A; Target 36541; HLA-C*07:04; MAGEA1; ENSG00000198681; CTA
ATSSSSPLVL

SEQ ID NO: 36542 - protein, 11 aa, Homo sapiens
  Table A; Target 36542; HLA-A*31:01; MAGEA1; ENSG00000198681; CTA
ATSSSSPLVLG

SEQ ID NO: 36543 - protein, 8 aa, Homo sapiens
  Table A; Target 36543; HLA-B*08:01; MAGEA1; ENSG00000198681; CTA
AVITKKVA

SEQ ID NO: 36544 - protein, 8 aa, Homo sapiens
  Table A; Target 36544; HLA-A*24:02; MAGEA1; ENSG00000198681; CTA
AYGEPRKL

SEQ ID NO: 36545 - protein, 8 aa, Homo sapiens
  Table A; Target 36545; HLA-C*16:01; MAGEA1; ENSG00000198681; CTA
AYGEPRKL

SEQ ID NO: 36546 - protein, 9 aa, Homo sapiens
  Table A; Target 36546; HLA-A*24:02; MAGEA1; ENSG00000198681; CTA
AYGEPRKLL

SEQ ID NO: 36547 - protein, 9 aa, Homo sapiens
  Table A; Target 36547; HLA-A*02:01; MAGEA1; ENSG00000198681; CTA
CILESLFRA

SEQ ID NO: 36548 - protein, 9 aa, Homo sapiens
  Table A; Target 36548; HLA-A*02:04; MAGEA1; ENSG00000198681; CTA
CILESLFRA

SEQ ID NO: 36549 - protein, 8 aa, Homo sapiens
  Table A; Target 36549; HLA-B*08:01; MAGEA1; ENSG00000198681; CTA
DGREHSAY

SEQ ID NO: 36550 - protein, 8 aa, Homo sapiens
  Table A; Target 36550; HLA-B*18:01; MAGEA1; ENSG00000198681; CTA
DGREHSAY

SEQ ID NO: 36551 - protein, 10 aa, Homo sapiens
  Table A; Target 36551; HLA-A*25:01; MAGEA1; ENSG00000198681; CTA
DLVGFLLLKY

SEQ ID NO: 36552 - protein, 10 aa, Homo sapiens
  Table A; Target 36552; HLA-A*26:01; MAGEA1; ENSG00000198681; CTA
DLVGFLLLKY

SEQ ID NO: 36553 - protein, 10 aa, Homo sapiens
  Table A; Target 36553; HLA-A*29:02; MAGEA1; ENSG00000198681; CTA
DLVGFLLLKY

SEQ ID NO: 36554 - protein, 11 aa, Homo sapiens
  Table A; Target 36554; HLA-A*33:01; MAGEA1; ENSG00000198681; CTA
DLVQEKYLEYR

SEQ ID NO: 36555 - protein, 8 aa, Homo sapiens
  Table A; Target 36555; HLA-B*51:01; MAGEA1; ENSG00000198681; CTA
DPTGHSYV

SEQ ID NO: 36556 - protein, 9 aa, Homo sapiens
  Table A; Target 36556; HLA-B*07:02; MAGEA1; ENSG00000198681; CTA
DPTGHSYVL

SEQ ID NO: 36557 - protein, 9 aa, Homo sapiens
  Table A; Target 36557; HLA-B*08:01; MAGEA1; ENSG00000198681; CTA
DPTGHSYVL

SEQ ID NO: 36558 - protein, 9 aa, Homo sapiens
  Table A; Target 36558; HLA-B*35:01; MAGEA1; ENSG00000198681; CTA
DPTGHSYVL

SEQ ID NO: 36559 - protein, 9 aa, Homo sapiens
  Table A; Target 36559; HLA-B*39:01; MAGEA1; ENSG00000198681; CTA
DPTGHSYVL

SEQ ID NO: 36560 - protein, 9 aa, Homo sapiens
  Table A; Target 36560; HLA-B*51:01; MAGEA1; ENSG00000198681; CTA
DPTGHSYVL

SEQ ID NO: 36561 - protein, 9 aa, Homo sapiens
  Table A; Target 36561; HLA-B*55:01; MAGEA1; ENSG00000198681; CTA
DPTGHSYVL

SEQ ID NO: 36562 - protein, 9 aa, Homo sapiens
  Table A; Target 36562; HLA-C*07:02; MAGEA1; ENSG00000198681; CTA
DPTGHSYVL

SEQ ID NO: 36563 - protein, 9 aa, Homo sapiens
  Table A; Target 36563; HLA-A*01:01; MAGEA1; ENSG00000198681; CTA
DSDPARYEF

SEQ ID NO: 36564 - protein, 9 aa, Homo sapiens
  Table A; Target 36564; HLA-A*25:01; MAGEA1; ENSG00000198681; CTA
DSDPARYEF

SEQ ID NO: 36565 - protein, 9 aa, Homo sapiens
  Table A; Target 36565; HLA-A*32:01; MAGEA1; ENSG00000198681; CTA
DSDPARYEF

SEQ ID NO: 36566 - protein, 9 aa, Homo sapiens
  Table A; Target 36566; HLA-A*33:01; MAGEA1; ENSG00000198681; CTA
DSDPARYEF

SEQ ID NO: 36567 - protein, 9 aa, Homo sapiens
  Table A; Target 36567; HLA-B*18:01; MAGEA1; ENSG00000198681; CTA
DSDPARYEF

SEQ ID NO: 36568 - protein, 9 aa, Homo sapiens
  Table A; Target 36568; HLA-B*35:01; MAGEA1; ENSG00000198681; CTA
DSDPARYEF

SEQ ID NO: 36569 - protein, 9 aa, Homo sapiens
  Table A; Target 36569; HLA-B*38:01; MAGEA1; ENSG00000198681; CTA
DSDPARYEF

SEQ ID NO: 36570 - protein, 9 aa, Homo sapiens
  Table A; Target 36570; HLA-B*39:01; MAGEA1; ENSG00000198681; CTA
DSDPARYEF

SEQ ID NO: 36571 - protein, 9 aa, Homo sapiens
  Table A; Target 36571; HLA-B*57:01; MAGEA1; ENSG00000198681; CTA
DSDPARYEF

SEQ ID NO: 36572 - protein, 9 aa, Homo sapiens
  Table A; Target 36572; HLA-B*58:01; MAGEA1; ENSG00000198681; CTA
DSDPARYEF

SEQ ID NO: 36573 - protein, 9 aa, Homo sapiens
  Table A; Target 36573; HLA-C*05:01; MAGEA1; ENSG00000198681; CTA
DSDPARYEF

SEQ ID NO: 36574 - protein, 9 aa, Homo sapiens
  Table A; Target 36574; HLA-C*16:01; MAGEA1; ENSG00000198681; CTA
DSDPARYEF

SEQ ID NO: 36575 - protein, 10 aa, Homo sapiens
  Table A; Target 36575; HLA-A*01:01; MAGEA1; ENSG00000198681; CTA
DSDPARYEFL

SEQ ID NO: 36576 - protein, 10 aa, Homo sapiens
  Table A; Target 36576; HLA-A*25:01; MAGEA1; ENSG00000198681; CTA
DVKEADPTGH

SEQ ID NO: 36577 - protein, 10 aa, Homo sapiens
  Table A; Target 36577; HLA-A*26:01; MAGEA1; ENSG00000198681; CTA
DVKEADPTGH

SEQ ID NO: 36578 - protein, 9 aa, Homo sapiens
  Table A; Target 36578; HLA-A*25:01; MAGEA1; ENSG00000198681; CTA
EADPTGHSY

SEQ ID NO: 36579 - protein, 9 aa, Homo sapiens
  Table A; Target 36579; HLA-A*26:01; MAGEA1; ENSG00000198681; CTA
EADPTGHSY

SEQ ID NO: 36580 - protein, 9 aa, Homo sapiens
  Table A; Target 36580; HLA-A*29:02; MAGEA1; ENSG00000198681; CTA
EADPTGHSY

SEQ ID NO: 36581 - protein, 9 aa, Homo sapiens
  Table A; Target 36581; HLA-A*30:02; MAGEA1; ENSG00000198681; CTA
EADPTGHSY

SEQ ID NO: 36582 - protein, 9 aa, Homo sapiens
  Table A; Target 36582; HLA-A*32:01; MAGEA1; ENSG00000198681; CTA
EADPTGHSY

SEQ ID NO: 36583 - protein, 9 aa, Homo sapiens
  Table A; Target 36583; HLA-A*33:01; MAGEA1; ENSG00000198681; CTA
EADPTGHSY

SEQ ID NO: 36584 - protein, 9 aa, Homo sapiens
  Table A; Target 36584; HLA-A*33:03; MAGEA1; ENSG00000198681; CTA
EADPTGHSY

SEQ ID NO: 36585 - protein, 9 aa, Homo sapiens
  Table A; Target 36585; HLA-A*68:01; MAGEA1; ENSG00000198681; CTA
EADPTGHSY

SEQ ID NO: 36586 - protein, 9 aa, Homo sapiens
  Table A; Target 36586; HLA-B*15:01; MAGEA1; ENSG00000198681; CTA
EADPTGHSY

SEQ ID NO: 36587 - protein, 9 aa, Homo sapiens
  Table A; Target 36587; HLA-B*15:03; MAGEA1; ENSG00000198681; CTA
EADPTGHSY

SEQ ID NO: 36588 - protein, 9 aa, Homo sapiens
  Table A; Target 36588; HLA-B*18:01; MAGEA1; ENSG00000198681; CTA
EADPTGHSY

SEQ ID NO: 36589 - protein, 9 aa, Homo sapiens
  Table A; Target 36589; HLA-B*35:03; MAGEA1; ENSG00000198681; CTA
EADPTGHSY

SEQ ID NO: 36590 - protein, 9 aa, Homo sapiens
  Table A; Target 36590; HLA-B*38:01; MAGEA1; ENSG00000198681; CTA
EADPTGHSY

SEQ ID NO: 36591 - protein, 9 aa, Homo sapiens
  Table A; Target 36591; HLA-B*39:01; MAGEA1; ENSG00000198681; CTA
EADPTGHSY

SEQ ID NO: 36592 - protein, 9 aa, Homo sapiens
  Table A; Target 36592; HLA-B*44:02; MAGEA1; ENSG00000198681; CTA
EADPTGHSY

SEQ ID NO: 36593 - protein, 9 aa, Homo sapiens
  Table A; Target 36593; HLA-B*44:03; MAGEA1; ENSG00000198681; CTA
EADPTGHSY

SEQ ID NO: 36594 - protein, 9 aa, Homo sapiens
  Table A; Target 36594; HLA-B*46:01; MAGEA1; ENSG00000198681; CTA
EADPTGHSY

SEQ ID NO: 36595 - protein, 9 aa, Homo sapiens
  Table A; Target 36595; HLA-B*58:01; MAGEA1; ENSG00000198681; CTA
EADPTGHSY

SEQ ID NO: 36596 - protein, 9 aa, Homo sapiens
  Table A; Target 36596; HLA-C*01:02; MAGEA1; ENSG00000198681; CTA
EADPTGHSY

SEQ ID NO: 36597 - protein, 9 aa, Homo sapiens
  Table A; Target 36597; HLA-C*02:02; MAGEA1; ENSG00000198681; CTA
EADPTGHSY

SEQ ID NO: 36598 - protein, 9 aa, Homo sapiens
  Table A; Target 36598; HLA-C*03:03; MAGEA1; ENSG00000198681; CTA
EADPTGHSY

SEQ ID NO: 36599 - protein, 9 aa, Homo sapiens
  Table A; Target 36599; HLA-C*03:04; MAGEA1; ENSG00000198681; CTA
EADPTGHSY

SEQ ID NO: 36600 - protein, 9 aa, Homo sapiens
  Table A; Target 36600; HLA-C*04:01; MAGEA1; ENSG00000198681; CTA
EADPTGHSY

SEQ ID NO: 36601 - protein, 9 aa, Homo sapiens
  Table A; Target 36601; HLA-C*05:01; MAGEA1; ENSG00000198681; CTA
EADPTGHSY

SEQ ID NO: 36602 - protein, 9 aa, Homo sapiens
  Table A; Target 36602; HLA-C*07:04; MAGEA1; ENSG00000198681; CTA
EADPTGHSY

SEQ ID NO: 36603 - protein, 9 aa, Homo sapiens
  Table A; Target 36603; HLA-C*07:06; MAGEA1; ENSG00000198681; CTA
EADPTGHSY

SEQ ID NO: 36604 - protein, 9 aa, Homo sapiens
  Table A; Target 36604; HLA-C*14:02; MAGEA1; ENSG00000198681; CTA
EADPTGHSY

SEQ ID NO: 36605 - protein, 9 aa, Homo sapiens
  Table A; Target 36605; HLA-C*16:01; MAGEA1; ENSG00000198681; CTA
EADPTGHSY

SEQ ID NO: 36606 - protein, 9 aa, Homo sapiens
  Table A; Target 36606; HLA-C*16:02; MAGEA1; ENSG00000198681; CTA
EADPTGHSY

SEQ ID NO: 36607 - protein, 9 aa, Homo sapiens
  Table A; Target 36607; HLA-C*16:04; MAGEA1; ENSG00000198681; CTA
EADPTGHSY

SEQ ID NO: 36608 - protein, 10 aa, Homo sapiens
  Table A; Target 36608; HLA-A*01:01; MAGEA1; ENSG00000198681; CTA
EADPTGHSYV

SEQ ID NO: 36609 - protein, 10 aa, Homo sapiens
  Table A; Target 36609; HLA-A*68:02; MAGEA1; ENSG00000198681; CTA
EADPTGHSYV

SEQ ID NO: 36610 - protein, 10 aa, Homo sapiens
  Table A; Target 36610; HLA-B*38:01; MAGEA1; ENSG00000198681; CTA
EADPTGHSYV

SEQ ID NO: 36611 - protein, 10 aa, Homo sapiens
  Table A; Target 36611; HLA-B*51:01; MAGEA1; ENSG00000198681; CTA
EADPTGHSYV

SEQ ID NO: 36612 - protein, 10 aa, Homo sapiens
  Table A; Target 36612; HLA-C*05:01; MAGEA1; ENSG00000198681; CTA
EADPTGHSYV

SEQ ID NO: 36613 - protein, 10 aa, Homo sapiens
  Table A; Target 36613; HLA-C*16:02; MAGEA1; ENSG00000198681; CTA
EADPTGHSYV

SEQ ID NO: 36614 - protein, 11 aa, Homo sapiens
  Table A; Target 36614; HLA-A*01:01; MAGEA1; ENSG00000198681; CTA
EADPTGHSYVL

SEQ ID NO: 36615 - protein, 11 aa, Homo sapiens
  Table A; Target 36615; HLA-B*27:05; MAGEA1; ENSG00000198681; CTA
EADPTGHSYVL

SEQ ID NO: 36616 - protein, 11 aa, Homo sapiens
  Table A; Target 36616; HLA-B*35:01; MAGEA1; ENSG00000198681; CTA
EADPTGHSYVL

SEQ ID NO: 36617 - protein, 11 aa, Homo sapiens
  Table A; Target 36617; HLA-B*35:03; MAGEA1; ENSG00000198681; CTA
EADPTGHSYVL

SEQ ID NO: 36618 - protein, 11 aa, Homo sapiens
  Table A; Target 36618; HLA-B*38:01; MAGEA1; ENSG00000198681; CTA
EADPTGHSYVL

SEQ ID NO: 36619 - protein, 11 aa, Homo sapiens
  Table A; Target 36619; HLA-B*39:01; MAGEA1; ENSG00000198681; CTA
EADPTGHSYVL

SEQ ID NO: 36620 - protein, 11 aa, Homo sapiens
  Table A; Target 36620; HLA-B*40:01; MAGEA1; ENSG00000198681; CTA
EADPTGHSYVL

SEQ ID NO: 36621 - protein, 11 aa, Homo sapiens
  Table A; Target 36621; HLA-B*55:01; MAGEA1; ENSG00000198681; CTA
EADPTGHSYVL

SEQ ID NO: 36622 - protein, 11 aa, Homo sapiens
  Table A; Target 36622; HLA-C*03:03; MAGEA1; ENSG00000198681; CTA
EADPTGHSYVL

SEQ ID NO: 36623 - protein, 11 aa, Homo sapiens
  Table A; Target 36623; HLA-C*03:04; MAGEA1; ENSG00000198681; CTA
EADPTGHSYVL

SEQ ID NO: 36624 - protein, 11 aa, Homo sapiens
  Table A; Target 36624; HLA-C*05:01; MAGEA1; ENSG00000198681; CTA
EADPTGHSYVL

SEQ ID NO: 36625 - protein, 11 aa, Homo sapiens
  Table A; Target 36625; HLA-C*16:02; MAGEA1; ENSG00000198681; CTA
EADPTGHSYVL

SEQ ID NO: 36626 - protein, 9 aa, Homo sapiens
  Table A; Target 36626; HLA-B*54:01; MAGEA1; ENSG00000198681; CTA
EALEAQQEA

SEQ ID NO: 36627 - protein, 9 aa, Homo sapiens
  Table A; Target 36627; HLA-C*07:06; MAGEA1; ENSG00000198681; CTA
EALEAQQEA

SEQ ID NO: 36628 - protein, 10 aa, Homo sapiens
  Table A; Target 36628; HLA-A*68:01; MAGEA1; ENSG00000198681; CTA
EALEAQQEAL

SEQ ID NO: 36629 - protein, 10 aa, Homo sapiens
  Table A; Target 36629; HLA-B*35:03; MAGEA1; ENSG00000198681; CTA
EALEAQQEAL

SEQ ID NO: 36630 - protein, 10 aa, Homo sapiens
  Table A; Target 36630; HLA-C*07:06; MAGEA1; ENSG00000198681; CTA
EALEAQQEAL

SEQ ID NO: 36631 - protein, 8 aa, Homo sapiens
  Table A; Target 36631; HLA-B*51:01; MAGEA1; ENSG00000198681; CTA
EALGLVCV

SEQ ID NO: 36632 - protein, 9 aa, Homo sapiens
  Table A; Target 36632; HLA-C*07:01; MAGEA1; ENSG00000198681; CTA
EALGLVCVQ

SEQ ID NO: 36633 - protein, 9 aa, Homo sapiens
  Table A; Target 36633; HLA-C*12:03; MAGEA1; ENSG00000198681; CTA
EALGLVCVQ

SEQ ID NO: 36634 - protein, 10 aa, Homo sapiens
  Table A; Target 36634; HLA-A*33:03; MAGEA1; ENSG00000198681; CTA
EALGLVCVQA

SEQ ID NO: 36635 - protein, 10 aa, Homo sapiens
  Table A; Target 36635; HLA-A*68:02; MAGEA1; ENSG00000198681; CTA
EALGLVCVQA

SEQ ID NO: 36636 - protein, 10 aa, Homo sapiens
  Table A; Target 36636; HLA-B*54:01; MAGEA1; ENSG00000198681; CTA
EALGLVCVQA

SEQ ID NO: 36637 - protein, 9 aa, Homo sapiens
  Table A; Target 36637; HLA-C*07:06; MAGEA1; ENSG00000198681; CTA
EAQQEALGL

SEQ ID NO: 36638 - protein, 11 aa, Homo sapiens
  Table A; Target 36638; HLA-A*30:01; MAGEA1; ENSG00000198681; CTA
EEALEAQQEAL

SEQ ID NO: 36639 - protein, 11 aa, Homo sapiens
  Table A; Target 36639; HLA-B*40:01; MAGEA1; ENSG00000198681; CTA
EEALEAQQEAL

SEQ ID NO: 36640 - protein, 11 aa, Homo sapiens
  Table A; Target 36640; HLA-B*44:02; MAGEA1; ENSG00000198681; CTA
EEALEAQQEAL

SEQ ID NO: 36641 - protein, 11 aa, Homo sapiens
  Table A; Target 36641; HLA-B*44:03; MAGEA1; ENSG00000198681; CTA
EEALEAQQEAL

SEQ ID NO: 36642 - protein, 9 aa, Homo sapiens
  Table A; Target 36642; HLA-B*39:01; MAGEA1; ENSG00000198681; CTA
EEEGPSTSC

SEQ ID NO: 36643 - protein, 10 aa, Homo sapiens
  Table A; Target 36643; HLA-B*40:01; MAGEA1; ENSG00000198681; CTA
EEEGPSTSCI

SEQ ID NO: 36644 - protein, 10 aa, Homo sapiens
  Table A; Target 36644; HLA-B*49:01; MAGEA1; ENSG00000198681; CTA
EEEGPSTSCI

SEQ ID NO: 36645 - protein, 11 aa, Homo sapiens
  Table A; Target 36645; HLA-B*40:01; MAGEA1; ENSG00000198681; CTA
EEEGPSTSCIL

SEQ ID NO: 36646 - protein, 9 aa, Homo sapiens
  Table A; Target 36646; HLA-B*40:01; MAGEA1; ENSG00000198681; CTA
EEGPSTSCI

SEQ ID NO: 36647 - protein, 9 aa, Homo sapiens
  Table A; Target 36647; HLA-B*44:02; MAGEA1; ENSG00000198681; CTA
EEGPSTSCI

SEQ ID NO: 36648 - protein, 9 aa, Homo sapiens
  Table A; Target 36648; HLA-B*44:03; MAGEA1; ENSG00000198681; CTA
EEGPSTSCI

SEQ ID NO: 36649 - protein, 9 aa, Homo sapiens
  Table A; Target 36649; HLA-B*49:01; MAGEA1; ENSG00000198681; CTA
EEGPSTSCI

SEQ ID NO: 36650 - protein, 10 aa, Homo sapiens
  Table A; Target 36650; HLA-B*40:01; MAGEA1; ENSG00000198681; CTA
EEGPSTSCIL

SEQ ID NO: 36651 - protein, 10 aa, Homo sapiens
  Table A; Target 36651; HLA-B*44:03; MAGEA1; ENSG00000198681; CTA
EEGPSTSCIL

SEQ ID NO: 36652 - protein, 9 aa, Homo sapiens
  Table A; Target 36652; HLA-B*49:01; MAGEA1; ENSG00000198681; CTA
EEIWEELSV

SEQ ID NO: 36653 - protein, 8 aa, Homo sapiens
  Table A; Target 36653; HLA-B*18:01; MAGEA1; ENSG00000198681; CTA
EELSVMEV

SEQ ID NO: 36654 - protein, 8 aa, Homo sapiens
  Table A; Target 36654; HLA-B*40:02; MAGEA1; ENSG00000198681; CTA
EELSVMEV

SEQ ID NO: 36655 - protein, 8 aa, Homo sapiens
  Table A; Target 36655; HLA-B*49:01; MAGEA1; ENSG00000198681; CTA
EELSVMEV

SEQ ID NO: 36656 - protein, 9 aa, Homo sapiens
  Table A; Target 36656; HLA-A*25:01; MAGEA1; ENSG00000198681; CTA
EELSVMEVY

SEQ ID NO: 36657 - protein, 9 aa, Homo sapiens
  Table A; Target 36657; HLA-A*26:01; MAGEA1; ENSG00000198681; CTA
EELSVMEVY

SEQ ID NO: 36658 - protein, 9 aa, Homo sapiens
  Table A; Target 36658; HLA-A*30:01; MAGEA1; ENSG00000198681; CTA
EELSVMEVY

SEQ ID NO: 36659 - protein, 9 aa, Homo sapiens
  Table A; Target 36659; HLA-B*15:03; MAGEA1; ENSG00000198681; CTA
EELSVMEVY

SEQ ID NO: 36660 - protein, 9 aa, Homo sapiens
  Table A; Target 36660; HLA-B*27:02; MAGEA1; ENSG00000198681; CTA
EELSVMEVY

SEQ ID NO: 36661 - protein, 9 aa, Homo sapiens
  Table A; Target 36661; HLA-B*35:01; MAGEA1; ENSG00000198681; CTA
EELSVMEVY

SEQ ID NO: 36662 - protein, 9 aa, Homo sapiens
  Table A; Target 36662; HLA-B*40:01; MAGEA1; ENSG00000198681; CTA
EELSVMEVY

SEQ ID NO: 36663 - protein, 9 aa, Homo sapiens
  Table A; Target 36663; HLA-B*44:02; MAGEA1; ENSG00000198681; CTA
EELSVMEVY

SEQ ID NO: 36664 - protein, 9 aa, Homo sapiens
  Table A; Target 36664; HLA-C*16:04; MAGEA1; ENSG00000198681; CTA
EELSVMEVY

SEQ ID NO: 36665 - protein, 8 aa, Homo sapiens
  Table A; Target 36665; HLA-B*51:01; MAGEA1; ENSG00000198681; CTA
EGPSTSCI

SEQ ID NO: 36666 - protein, 9 aa, Homo sapiens
  Table A; Target 36666; HLA-A*33:03; MAGEA1; ENSG00000198681; CTA
EHSAYGEPR

SEQ ID NO: 36667 - protein, 10 aa, Homo sapiens
  Table A; Target 36667; HLA-A*25:01; MAGEA1; ENSG00000198681; CTA
EIFGKASESL

SEQ ID NO: 36668 - protein, 10 aa, Homo sapiens
  Table A; Target 36668; HLA-A*26:01; MAGEA1; ENSG00000198681; CTA
EIFGKASESL

SEQ ID NO: 36669 - protein, 8 aa, Homo sapiens
  Table A; Target 36669; HLA-B*18:01; MAGEA1; ENSG00000198681; CTA
ELSVMEVY

SEQ ID NO: 36670 - protein, 8 aa, Homo sapiens
  Table A; Target 36670; HLA-C*07:01; MAGEA1; ENSG00000198681; CTA
ELSVMEVY

SEQ ID NO: 36671 - protein, 8 aa, Homo sapiens
  Table A; Target 36671; HLA-B*08:01; MAGEA1; ENSG00000198681; CTA
ESLFRAVI

SEQ ID NO: 36672 - protein, 10 aa, Homo sapiens
  Table A; Target 36672; HLA-A*33:03; MAGEA1; ENSG00000198681; CTA
ESLFRAVITK

SEQ ID NO: 36673 - protein, 9 aa, Homo sapiens
  Table A; Target 36673; HLA-A*33:01; MAGEA1; ENSG00000198681; CTA
ESLQLVFGI

SEQ ID NO: 36674 - protein, 9 aa, Homo sapiens
  Table A; Target 36674; HLA-A*68:02; MAGEA1; ENSG00000198681; CTA
ESLQLVFGI

SEQ ID NO: 36675 - protein, 9 aa, Homo sapiens
  Table A; Target 36675; HLA-B*44:02; MAGEA1; ENSG00000198681; CTA
ESLQLVFGI

SEQ ID NO: 36676 - protein, 9 aa, Homo sapiens
  Table A; Target 36676; HLA-C*07:01; MAGEA1; ENSG00000198681; CTA
ESLQLVFGI

SEQ ID NO: 36677 - protein, 11 aa, Homo sapiens
  Table A; Target 36677; HLA-A*68:02; MAGEA1; ENSG00000198681; CTA
ESLQLVFGIDV

SEQ ID NO: 36678 - protein, 10 aa, Homo sapiens
  Table A; Target 36678; HLA-A*01:01; MAGEA1; ENSG00000198681; CTA
ETSYVKVLEY

SEQ ID NO: 36679 - protein, 10 aa, Homo sapiens
  Table A; Target 36679; HLA-A*25:01; MAGEA1; ENSG00000198681; CTA
ETSYVKVLEY

SEQ ID NO: 36680 - protein, 10 aa, Homo sapiens
  Table A; Target 36680; HLA-A*29:02; MAGEA1; ENSG00000198681; CTA
ETSYVKVLEY

SEQ ID NO: 36681 - protein, 10 aa, Homo sapiens
  Table A; Target 36681; HLA-A*33:03; MAGEA1; ENSG00000198681; CTA
ETSYVKVLEY

SEQ ID NO: 36682 - protein, 10 aa, Homo sapiens
  Table A; Target 36682; HLA-A*68:01; MAGEA1; ENSG00000198681; CTA
ETSYVKVLEY

SEQ ID NO: 36683 - protein, 10 aa, Homo sapiens
  Table A; Target 36683; HLA-A*68:02; MAGEA1; ENSG00000198681; CTA
ETSYVKVLEY

SEQ ID NO: 36684 - protein, 10 aa, Homo sapiens
  Table A; Target 36684; HLA-B*44:03; MAGEA1; ENSG00000198681; CTA
ETSYVKVLEY

SEQ ID NO: 36685 - protein, 11 aa, Homo sapiens
  Table A; Target 36685; HLA-A*68:02; MAGEA1; ENSG00000198681; CTA
ETSYVKVLEYV

SEQ ID NO: 36686 - protein, 10 aa, Homo sapiens
  Table A; Target 36686; HLA-A*25:01; MAGEA1; ENSG00000198681; CTA
EVYDGREHSA

SEQ ID NO: 36687 - protein, 10 aa, Homo sapiens
  Table A; Target 36687; HLA-A*26:01; MAGEA1; ENSG00000198681; CTA
EVYDGREHSA

SEQ ID NO: 36688 - protein, 10 aa, Homo sapiens
  Table A; Target 36688; HLA-A*32:01; MAGEA1; ENSG00000198681; CTA
EVYDGREHSA

SEQ ID NO: 36689 - protein, 10 aa, Homo sapiens
  Table A; Target 36689; HLA-A*33:01; MAGEA1; ENSG00000198681; CTA
EVYDGREHSA

SEQ ID NO: 36690 - protein, 10 aa, Homo sapiens
  Table A; Target 36690; HLA-A*33:03; MAGEA1; ENSG00000198681; CTA
EVYDGREHSA

SEQ ID NO: 36691 - protein, 10 aa, Homo sapiens
  Table A; Target 36691; HLA-A*68:01; MAGEA1; ENSG00000198681; CTA
EVYDGREHSA

SEQ ID NO: 36692 - protein, 10 aa, Homo sapiens
  Table A; Target 36692; HLA-A*68:02; MAGEA1; ENSG00000198681; CTA
EVYDGREHSA

SEQ ID NO: 36693 - protein, 10 aa, Homo sapiens
  Table A; Target 36693; HLA-B*08:01; MAGEA1; ENSG00000198681; CTA
EVYDGREHSA

SEQ ID NO: 36694 - protein, 10 aa, Homo sapiens
  Table A; Target 36694; HLA-B*54:01; MAGEA1; ENSG00000198681; CTA
EVYDGREHSA

SEQ ID NO: 36695 - protein, 10 aa, Homo sapiens
  Table A; Target 36695; HLA-B*55:01; MAGEA1; ENSG00000198681; CTA
EVYDGREHSA

SEQ ID NO: 36696 - protein, 10 aa, Homo sapiens
  Table A; Target 36696; HLA-B*56:01; MAGEA1; ENSG00000198681; CTA
EVYDGREHSA

SEQ ID NO: 36697 - protein, 10 aa, Homo sapiens
  Table A; Target 36697; HLA-C*12:03; MAGEA1; ENSG00000198681; CTA
EVYDGREHSA

SEQ ID NO: 36698 - protein, 11 aa, Homo sapiens
  Table A; Target 36698; HLA-A*01:01; MAGEA1; ENSG00000198681; CTA
EVYDGREHSAY

SEQ ID NO: 36699 - protein, 11 aa, Homo sapiens
  Table A; Target 36699; HLA-A*25:01; MAGEA1; ENSG00000198681; CTA
EVYDGREHSAY

SEQ ID NO: 36700 - protein, 11 aa, Homo sapiens
  Table A; Target 36700; HLA-A*29:02; MAGEA1; ENSG00000198681; CTA
EVYDGREHSAY

SEQ ID NO: 36701 - protein, 11 aa, Homo sapiens
  Table A; Target 36701; HLA-A*30:02; MAGEA1; ENSG00000198681; CTA
EVYDGREHSAY

SEQ ID NO: 36702 - protein, 11 aa, Homo sapiens
  Table A; Target 36702; HLA-A*32:01; MAGEA1; ENSG00000198681; CTA
EVYDGREHSAY

SEQ ID NO: 36703 - protein, 11 aa, Homo sapiens
  Table A; Target 36703; HLA-A*33:01; MAGEA1; ENSG00000198681; CTA
EVYDGREHSAY

SEQ ID NO: 36704 - protein, 11 aa, Homo sapiens
  Table A; Target 36704; HLA-A*33:03; MAGEA1; ENSG00000198681; CTA
EVYDGREHSAY

SEQ ID NO: 36705 - protein, 11 aa, Homo sapiens
  Table A; Target 36705; HLA-A*68:01; MAGEA1; ENSG00000198681; CTA
EVYDGREHSAY

SEQ ID NO: 36706 - protein, 11 aa, Homo sapiens
  Table A; Target 36706; HLA-B*15:01; MAGEA1; ENSG00000198681; CTA
EVYDGREHSAY

SEQ ID NO: 36707 - protein, 11 aa, Homo sapiens
  Table A; Target 36707; HLA-B*35:01; MAGEA1; ENSG00000198681; CTA
EVYDGREHSAY

SEQ ID NO: 36708 - protein, 11 aa, Homo sapiens
  Table A; Target 36708; HLA-C*07:04; MAGEA1; ENSG00000198681; CTA
EVYDGREHSAY

SEQ ID NO: 36709 - protein, 11 aa, Homo sapiens
  Table A; Target 36709; HLA-C*12:03; MAGEA1; ENSG00000198681; CTA
EVYDGREHSAY

SEQ ID NO: 36710 - protein, 8 aa, Homo sapiens
  Table A; Target 36710; HLA-B*08:01; MAGEA1; ENSG00000198681; CTA
EYVIKVSA

SEQ ID NO: 36711 - protein, 9 aa, Homo sapiens
  Table A; Target 36711; HLA-A*26:01; MAGEA1; ENSG00000198681; CTA
EYVIKVSAR

SEQ ID NO: 36712 - protein, 9 aa, Homo sapiens
  Table A; Target 36712; HLA-A*31:01; MAGEA1; ENSG00000198681; CTA
EYVIKVSAR

SEQ ID NO: 36713 - protein, 9 aa, Homo sapiens
  Table A; Target 36713; HLA-A*33:01; MAGEA1; ENSG00000198681; CTA
EYVIKVSAR

SEQ ID NO: 36714 - protein, 9 aa, Homo sapiens
  Table A; Target 36714; HLA-A*68:01; MAGEA1; ENSG00000198681; CTA
EYVIKVSAR

SEQ ID NO: 36715 - protein, 9 aa, Homo sapiens
  Table A; Target 36715; HLA-C*07:06; MAGEA1; ENSG00000198681; CTA
EYVIKVSAR

SEQ ID NO: 36716 - protein, 9 aa, Homo sapiens
  Table A; Target 36716; HLA-A*02:03; MAGEA1; ENSG00000198681; CTA
FFFPSLREA

SEQ ID NO: 36717 - protein, 9 aa, Homo sapiens
  Table A; Target 36717; HLA-B*54:01; MAGEA1; ENSG00000198681; CTA
FFFPSLREA

SEQ ID NO: 36718 - protein, 11 aa, Homo sapiens
  Table A; Target 36718; HLA-A*29:02; MAGEA1; ENSG00000198681; CTA
FFFPSLREAAL

SEQ ID NO: 36719 - protein, 8 aa, Homo sapiens
  Table A; Target 36719; HLA-B*46:01; MAGEA1; ENSG00000198681; CTA
FGKASESL

SEQ ID NO: 36720 - protein, 8 aa, Homo sapiens
  Table A; Target 36720; HLA-C*03:04; MAGEA1; ENSG00000198681; CTA
FGKASESL

SEQ ID NO: 36721 - protein, 8 aa, Homo sapiens
  Table A; Target 36721; HLA-C*14:02; MAGEA1; ENSG00000198681; CTA
FGKASESL

SEQ ID NO: 36722 - protein, 9 aa, Homo sapiens
  Table A; Target 36722; HLA-A*02:01; MAGEA1; ENSG00000198681; CTA
FLIIVLVMI

SEQ ID NO: 36723 - protein, 9 aa, Homo sapiens
  Table A; Target 36723; HLA-A*02:03; MAGEA1; ENSG00000198681; CTA
FLIIVLVMI

SEQ ID NO: 36724 - protein, 9 aa, Homo sapiens
  Table A; Target 36724; HLA-A*02:04; MAGEA1; ENSG00000198681; CTA
FLIIVLVMI

SEQ ID NO: 36725 - protein, 9 aa, Homo sapiens
  Table A; Target 36725; HLA-A*02:07; MAGEA1; ENSG00000198681; CTA
FLIIVLVMI

SEQ ID NO: 36726 - protein, 8 aa, Homo sapiens
  Table A; Target 36726; HLA-B*54:01; MAGEA1; ENSG00000198681; CTA
FPEIFGKA

SEQ ID NO: 36727 - protein, 8 aa, Homo sapiens
  Table A; Target 36727; HLA-B*56:01; MAGEA1; ENSG00000198681; CTA
FPEIFGKA

SEQ ID NO: 36728 - protein, 8 aa, Homo sapiens
  Table A; Target 36728; HLA-B*54:01; MAGEA1; ENSG00000198681; CTA
FPSLREAA

SEQ ID NO: 36729 - protein, 8 aa, Homo sapiens
  Table A; Target 36729; HLA-B*56:01; MAGEA1; ENSG00000198681; CTA
FPSLREAA

SEQ ID NO: 36730 - protein, 9 aa, Homo sapiens
  Table A; Target 36730; HLA-B*35:01; MAGEA1; ENSG00000198681; CTA
FPSLREAAL

SEQ ID NO: 36731 - protein, 9 aa, Homo sapiens
  Table A; Target 36731; HLA-B*37:01; MAGEA1; ENSG00000198681; CTA
FPSLREAAL

SEQ ID NO: 36732 - protein, 9 aa, Homo sapiens
  Table A; Target 36732; HLA-B*39:01; MAGEA1; ENSG00000198681; CTA
FPSLREAAL

SEQ ID NO: 36733 - protein, 9 aa, Homo sapiens
  Table A; Target 36733; HLA-B*40:01; MAGEA1; ENSG00000198681; CTA
FPSLREAAL

SEQ ID NO: 36734 - protein, 9 aa, Homo sapiens
  Table A; Target 36734; HLA-B*51:01; MAGEA1; ENSG00000198681; CTA
FPSLREAAL

SEQ ID NO: 36735 - protein, 9 aa, Homo sapiens
  Table A; Target 36735; HLA-B*54:01; MAGEA1; ENSG00000198681; CTA
FPSLREAAL

SEQ ID NO: 36736 - protein, 9 aa, Homo sapiens
  Table A; Target 36736; HLA-B*55:01; MAGEA1; ENSG00000198681; CTA
FPSLREAAL

SEQ ID NO: 36737 - protein, 9 aa, Homo sapiens
  Table A; Target 36737; HLA-B*56:01; MAGEA1; ENSG00000198681; CTA
FPSLREAAL

SEQ ID NO: 36738 - protein, 9 aa, Homo sapiens
  Table A; Target 36738; HLA-C*01:02; MAGEA1; ENSG00000198681; CTA
FPSLREAAL

SEQ ID NO: 36739 - protein, 9 aa, Homo sapiens
  Table A; Target 36739; HLA-C*03:03; MAGEA1; ENSG00000198681; CTA
FPSLREAAL

SEQ ID NO: 36740 - protein, 9 aa, Homo sapiens
  Table A; Target 36740; HLA-C*03:04; MAGEA1; ENSG00000198681; CTA
FPSLREAAL

SEQ ID NO: 36741 - protein, 9 aa, Homo sapiens
  Table A; Target 36741; HLA-C*07:02; MAGEA1; ENSG00000198681; CTA
FPSLREAAL

SEQ ID NO: 36742 - protein, 9 aa, Homo sapiens
  Table A; Target 36742; HLA-C*12:03; MAGEA1; ENSG00000198681; CTA
FPSLREAAL

SEQ ID NO: 36743 - protein, 9 aa, Homo sapiens
  Table A; Target 36743; HLA-C*14:02; MAGEA1; ENSG00000198681; CTA
FPSLREAAL

SEQ ID NO: 36744 - protein, 9 aa, Homo sapiens
  Table A; Target 36744; HLA-C*16:01; MAGEA1; ENSG00000198681; CTA
FPSLREAAL

SEQ ID NO: 36745 - protein, 8 aa, Homo sapiens
  Table A; Target 36745; HLA-B*54:01; MAGEA1; ENSG00000198681; CTA
FPTTINFT

SEQ ID NO: 36746 - protein, 8 aa, Homo sapiens
  Table A; Target 36746; HLA-B*56:01; MAGEA1; ENSG00000198681; CTA
FPTTINFT

SEQ ID NO: 36747 - protein, 9 aa, Homo sapiens
  Table A; Target 36747; HLA-A*33:03; MAGEA1; ENSG00000198681; CTA
FPTTINFTR

SEQ ID NO: 36748 - protein, 9 aa, Homo sapiens
  Table A; Target 36748; HLA-A*68:01; MAGEA1; ENSG00000198681; CTA
FPTTINFTR

SEQ ID NO: 36749 - protein, 9 aa, Homo sapiens
  Table A; Target 36749; HLA-A*68:02; MAGEA1; ENSG00000198681; CTA
FPTTINFTR

SEQ ID NO: 36750 - protein, 9 aa, Homo sapiens
  Table A; Target 36750; HLA-B*27:02; MAGEA1; ENSG00000198681; CTA
FPTTINFTR

SEQ ID NO: 36751 - protein, 9 aa, Homo sapiens
  Table A; Target 36751; HLA-B*35:01; MAGEA1; ENSG00000198681; CTA
FPTTINFTR

SEQ ID NO: 36752 - protein, 9 aa, Homo sapiens
  Table A; Target 36752; HLA-B*35:03; MAGEA1; ENSG00000198681; CTA
FPTTINFTR

SEQ ID NO: 36753 - protein, 9 aa, Homo sapiens
  Table A; Target 36753; HLA-B*54:01; MAGEA1; ENSG00000198681; CTA
FPTTINFTR

SEQ ID NO: 36754 - protein, 9 aa, Homo sapiens
  Table A; Target 36754; HLA-B*55:01; MAGEA1; ENSG00000198681; CTA
FPTTINFTR

SEQ ID NO: 36755 - protein, 9 aa, Homo sapiens
  Table A; Target 36755; HLA-B*56:01; MAGEA1; ENSG00000198681; CTA
FPTTINFTR

SEQ ID NO: 36756 - protein, 9 aa, Homo sapiens
  Table A; Target 36756; HLA-C*07:06; MAGEA1; ENSG00000198681; CTA
FPTTINFTR

SEQ ID NO: 36757 - protein, 10 aa, Homo sapiens
  Table A; Target 36757; HLA-B*54:01; MAGEA1; ENSG00000198681; CTA
FPTTINFTRQ

SEQ ID NO: 36758 - protein, 8 aa, Homo sapiens
  Table A; Target 36758; HLA-B*27:05; MAGEA1; ENSG00000198681; CTA
FRAVITKK

SEQ ID NO: 36759 - protein, 9 aa, Homo sapiens
  Table A; Target 36759; HLA-A*68:02; MAGEA1; ENSG00000198681; CTA
FRAVITKKV

SEQ ID NO: 36760 - protein, 9 aa, Homo sapiens
  Table A; Target 36760; HLA-C*02:02; MAGEA1; ENSG00000198681; CTA
FRAVITKKV

SEQ ID NO: 36761 - protein, 9 aa, Homo sapiens
  Table A; Target 36761; HLA-C*06:02; MAGEA1; ENSG00000198681; CTA
FRAVITKKV

SEQ ID NO: 36762 - protein, 9 aa, Homo sapiens
  Table A; Target 36762; HLA-B*13:02; MAGEA1; ENSG00000198681; CTA
GASAFPTTI

SEQ ID NO: 36763 - protein, 9 aa, Homo sapiens
  Table A; Target 36763; HLA-B*49:01; MAGEA1; ENSG00000198681; CTA
GASAFPTTI

SEQ ID NO: 36764 - protein, 9 aa, Homo sapiens
  Table A; Target 36764; HLA-B*51:01; MAGEA1; ENSG00000198681; CTA
GASAFPTTI

SEQ ID NO: 36765 - protein, 9 aa, Homo sapiens
  Table A; Target 36765; HLA-C*02:02; MAGEA1; ENSG00000198681; CTA
GASAFPTTI

SEQ ID NO: 36766 - protein, 9 aa, Homo sapiens
  Table A; Target 36766; HLA-C*12:03; MAGEA1; ENSG00000198681; CTA
GASAFPTTI

SEQ ID NO: 36767 - protein, 9 aa, Homo sapiens
  Table A; Target 36767; HLA-C*16:02; MAGEA1; ENSG00000198681; CTA
GASAFPTTI

SEQ ID NO: 36768 - protein, 9 aa, Homo sapiens
  Table A; Target 36768; HLA-C*16:04; MAGEA1; ENSG00000198681; CTA
GASAFPTTI

SEQ ID NO: 36769 - protein, 8 aa, Homo sapiens
  Table A; Target 36769; HLA-B*38:01; MAGEA1; ENSG00000198681; CTA
GHAPEEEI

SEQ ID NO: 36770 - protein, 9 aa, Homo sapiens
  Table A; Target 36770; HLA-B*38:01; MAGEA1; ENSG00000198681; CTA
GHAPEEEIW

SEQ ID NO: 36771 - protein, 10 aa, Homo sapiens
  Table A; Target 36771; HLA-B*38:01; MAGEA1; ENSG00000198681; CTA
GHSYVLVTCL

SEQ ID NO: 36772 - protein, 9 aa, Homo sapiens
  Table A; Target 36772; HLA-B*15:03; MAGEA1; ENSG00000198681; CTA
GKASESLQL

SEQ ID NO: 36773 - protein, 11 aa, Homo sapiens
  Table A; Target 36773; HLA-B*15:03; MAGEA1; ENSG00000198681; CTA
GKASESLQLVF

SEQ ID NO: 36774 - protein, 9 aa, Homo sapiens
  Table A; Target 36774; HLA-A*02:01; MAGEA1; ENSG00000198681; CTA
GTLEEVPTA

SEQ ID NO: 36775 - protein, 9 aa, Homo sapiens
  Table A; Target 36775; HLA-B*55:01; MAGEA1; ENSG00000198681; CTA
GTLEEVPTA

SEQ ID NO: 36776 - protein, 9 aa, Homo sapiens
  Table A; Target 36776; HLA-A*03:01; MAGEA1; ENSG00000198681; CTA
HCFPEIFGK

SEQ ID NO: 36777 - protein, 9 aa, Homo sapiens
  Table A; Target 36777; HLA-A*03:02; MAGEA1; ENSG00000198681; CTA
HCFPEIFGK

SEQ ID NO: 36778 - protein, 9 aa, Homo sapiens
  Table A; Target 36778; HLA-A*11:01; MAGEA1; ENSG00000198681; CTA
HCFPEIFGK

SEQ ID NO: 36779 - protein, 8 aa, Homo sapiens
  Table A; Target 36779; HLA-A*68:01; MAGEA1; ENSG00000198681; CTA
HSAYGEPR

SEQ ID NO: 36780 - protein, 9 aa, Homo sapiens
  Table A; Target 36780; HLA-B*46:01; MAGEA1; ENSG00000198681; CTA
IAMEGGHAP

SEQ ID NO: 36781 - protein, 9 aa, Homo sapiens
  Table A; Target 36781; HLA-C*03:03; MAGEA1; ENSG00000198681; CTA
IAMEGGHAP

SEQ ID NO: 36782 - protein, 9 aa, Homo sapiens
  Table A; Target 36782; HLA-C*03:04; MAGEA1; ENSG00000198681; CTA
IAMEGGHAP

SEQ ID NO: 36783 - protein, 9 aa, Homo sapiens
  Table A; Target 36783; HLA-C*16:01; MAGEA1; ENSG00000198681; CTA
IAMEGGHAP

SEQ ID NO: 36784 - protein, 9 aa, Homo sapiens
  Table A; Target 36784; HLA-C*16:02; MAGEA1; ENSG00000198681; CTA
IAMEGGHAP

SEQ ID NO: 36785 - protein, 9 aa, Homo sapiens
  Table A; Target 36785; HLA-C*14:02; MAGEA1; ENSG00000198681; CTA
IFGKASESL

SEQ ID NO: 36786 - protein, 9 aa, Homo sapiens
  Table A; Target 36786; HLA-A*02:03; MAGEA1; ENSG00000198681; CTA
ILESLFRAV

SEQ ID NO: 36787 - protein, 9 aa, Homo sapiens
  Table A; Target 36787; HLA-A*02:04; MAGEA1; ENSG00000198681; CTA
ILESLFRAV

SEQ ID NO: 36788 - protein, 9 aa, Homo sapiens
  Table A; Target 36788; HLA-A*02:07; MAGEA1; ENSG00000198681; CTA
ILESLFRAV

SEQ ID NO: 36789 - protein, 8 aa, Homo sapiens
  Table A; Target 36789; HLA-B*08:01; MAGEA1; ENSG00000198681; CTA
ITKKVADL

SEQ ID NO: 36790 - protein, 11 aa, Homo sapiens
  Table A; Target 36790; HLA-B*57:01; MAGEA1; ENSG00000198681; CTA
ITKKVADLVGF

SEQ ID NO: 36791 - protein, 8 aa, Homo sapiens
  Table A; Target 36791; HLA-C*03:04; MAGEA1; ENSG00000198681; CTA
KASESLQL

SEQ ID NO: 36792 - protein, 8 aa, Homo sapiens
  Table A; Target 36792; HLA-C*16:01; MAGEA1; ENSG00000198681; CTA
KASESLQL

SEQ ID NO: 36793 - protein, 9 aa, Homo sapiens
  Table A; Target 36793; HLA-B*58:01; MAGEA1; ENSG00000198681; CTA
KASESLQLV

SEQ ID NO: 36794 - protein, 9 aa, Homo sapiens
  Table A; Target 36794; HLA-C*02:02; MAGEA1; ENSG00000198681; CTA
KASESLQLV

SEQ ID NO: 36795 - protein, 9 aa, Homo sapiens
  Table A; Target 36795; HLA-C*12:03; MAGEA1; ENSG00000198681; CTA
KASESLQLV

SEQ ID NO: 36796 - protein, 9 aa, Homo sapiens
  Table A; Target 36796; HLA-C*16:02; MAGEA1; ENSG00000198681; CTA
KASESLQLV

SEQ ID NO: 36797 - protein, 10 aa, Homo sapiens
  Table A; Target 36797; HLA-A*23:01; MAGEA1; ENSG00000198681; CTA
KASESLQLVF

SEQ ID NO: 36798 - protein, 10 aa, Homo sapiens
  Table A; Target 36798; HLA-A*29:02; MAGEA1; ENSG00000198681; CTA
KASESLQLVF

SEQ ID NO: 36799 - protein, 10 aa, Homo sapiens
  Table A; Target 36799; HLA-B*27:02; MAGEA1; ENSG00000198681; CTA
KASESLQLVF

SEQ ID NO: 36800 - protein, 10 aa, Homo sapiens
  Table A; Target 36800; HLA-B*57:01; MAGEA1; ENSG00000198681; CTA
KASESLQLVF

SEQ ID NO: 36801 - protein, 10 aa, Homo sapiens
  Table A; Target 36801; HLA-B*58:01; MAGEA1; ENSG00000198681; CTA
KASESLQLVF

SEQ ID NO: 36802 - protein, 10 aa, Homo sapiens
  Table A; Target 36802; HLA-C*02:02; MAGEA1; ENSG00000198681; CTA
KASESLQLVF

SEQ ID NO: 36803 - protein, 10 aa, Homo sapiens
  Table A; Target 36803; HLA-C*16:04; MAGEA1; ENSG00000198681; CTA
KASESLQLVF

SEQ ID NO: 36804 - protein, 10 aa, Homo sapiens
  Table A; Target 36804; HLA-A*01:01; MAGEA1; ENSG00000198681; CTA
KEADPTGHSY

SEQ ID NO: 36805 - protein, 10 aa, Homo sapiens
  Table A; Target 36805; HLA-A*03:02; MAGEA1; ENSG00000198681; CTA
KEADPTGHSY

SEQ ID NO: 36806 - protein, 10 aa, Homo sapiens
  Table A; Target 36806; HLA-A*25:01; MAGEA1; ENSG00000198681; CTA
KEADPTGHSY

SEQ ID NO: 36807 - protein, 10 aa, Homo sapiens
  Table A; Target 36807; HLA-A*26:01; MAGEA1; ENSG00000198681; CTA
KEADPTGHSY

SEQ ID NO: 36808 - protein, 10 aa, Homo sapiens
  Table A; Target 36808; HLA-A*29:02; MAGEA1; ENSG00000198681; CTA
KEADPTGHSY

SEQ ID NO: 36809 - protein, 10 aa, Homo sapiens
  Table A; Target 36809; HLA-A*30:01; MAGEA1; ENSG00000198681; CTA
KEADPTGHSY

SEQ ID NO: 36810 - protein, 10 aa, Homo sapiens
  Table A; Target 36810; HLA-A*30:02; MAGEA1; ENSG00000198681; CTA
KEADPTGHSY

SEQ ID NO: 36811 - protein, 10 aa, Homo sapiens
  Table A; Target 36811; HLA-A*32:01; MAGEA1; ENSG00000198681; CTA
KEADPTGHSY

SEQ ID NO: 36812 - protein, 10 aa, Homo sapiens
  Table A; Target 36812; HLA-B*15:01; MAGEA1; ENSG00000198681; CTA
KEADPTGHSY

SEQ ID NO: 36813 - protein, 10 aa, Homo sapiens
  Table A; Target 36813; HLA-B*15:03; MAGEA1; ENSG00000198681; CTA
KEADPTGHSY

SEQ ID NO: 36814 - protein, 10 aa, Homo sapiens
  Table A; Target 36814; HLA-B*18:01; MAGEA1; ENSG00000198681; CTA
KEADPTGHSY

SEQ ID NO: 36815 - protein, 10 aa, Homo sapiens
  Table A; Target 36815; HLA-B*27:02; MAGEA1; ENSG00000198681; CTA
KEADPTGHSY

SEQ ID NO: 36816 - protein, 10 aa, Homo sapiens
  Table A; Target 36816; HLA-B*27:05; MAGEA1; ENSG00000198681; CTA
KEADPTGHSY

SEQ ID NO: 36817 - protein, 10 aa, Homo sapiens
  Table A; Target 36817; HLA-B*37:01; MAGEA1; ENSG00000198681; CTA
KEADPTGHSY

SEQ ID NO: 36818 - protein, 10 aa, Homo sapiens
  Table A; Target 36818; HLA-B*40:01; MAGEA1; ENSG00000198681; CTA
KEADPTGHSY

SEQ ID NO: 36819 - protein, 10 aa, Homo sapiens
  Table A; Target 36819; HLA-B*46:01; MAGEA1; ENSG00000198681; CTA
KEADPTGHSY

SEQ ID NO: 36820 - protein, 10 aa, Homo sapiens
  Table A; Target 36820; HLA-B*49:01; MAGEA1; ENSG00000198681; CTA
KEADPTGHSY

SEQ ID NO: 36821 - protein, 10 aa, Homo sapiens
  Table A; Target 36821; HLA-B*57:01; MAGEA1; ENSG00000198681; CTA
KEADPTGHSY

SEQ ID NO: 36822 - protein, 10 aa, Homo sapiens
  Table A; Target 36822; HLA-B*58:01; MAGEA1; ENSG00000198681; CTA
KEADPTGHSY

SEQ ID NO: 36823 - protein, 10 aa, Homo sapiens
  Table A; Target 36823; HLA-C*02:02; MAGEA1; ENSG00000198681; CTA
KEADPTGHSY

SEQ ID NO: 36824 - protein, 10 aa, Homo sapiens
  Table A; Target 36824; HLA-C*07:04; MAGEA1; ENSG00000198681; CTA
KEADPTGHSY

SEQ ID NO: 36825 - protein, 10 aa, Homo sapiens
  Table A; Target 36825; HLA-C*14:02; MAGEA1; ENSG00000198681; CTA
KEADPTGHSY

SEQ ID NO: 36826 - protein, 10 aa, Homo sapiens
  Table A; Target 36826; HLA-C*16:01; MAGEA1; ENSG00000198681; CTA
KEADPTGHSY

SEQ ID NO: 36827 - protein, 10 aa, Homo sapiens
  Table A; Target 36827; HLA-C*16:02; MAGEA1; ENSG00000198681; CTA
KEADPTGHSY

SEQ ID NO: 36828 - protein, 10 aa, Homo sapiens
  Table A; Target 36828; HLA-C*16:04; MAGEA1; ENSG00000198681; CTA
KEADPTGHSY

SEQ ID NO: 36829 - protein, 11 aa, Homo sapiens
  Table A; Target 36829; HLA-B*40:01; MAGEA1; ENSG00000198681; CTA
KEADPTGHSYV

SEQ ID NO: 36830 - protein, 11 aa, Homo sapiens
  Table A; Target 36830; HLA-B*49:01; MAGEA1; ENSG00000198681; CTA
KEADPTGHSYV

SEQ ID NO: 36831 - protein, 9 aa, Homo sapiens
  Table A; Target 36831; HLA-B*15:03; MAGEA1; ENSG00000198681; CTA
KKVADLVGF

SEQ ID NO: 36832 - protein, 11 aa, Homo sapiens
  Table A; Target 36832; HLA-A*03:01; MAGEA1; ENSG00000198681; CTA
KLLTQDLVQEK

SEQ ID NO: 36833 - protein, 11 aa, Homo sapiens
  Table A; Target 36833; HLA-A*03:02; MAGEA1; ENSG00000198681; CTA
KLLTQDLVQEK

SEQ ID NO: 36834 - protein, 11 aa, Homo sapiens
  Table A; Target 36834; HLA-A*11:01; MAGEA1; ENSG00000198681; CTA
KLLTQDLVQEK

SEQ ID NO: 36835 - protein, 11 aa, Homo sapiens
  Table A; Target 36835; HLA-A*31:01; MAGEA1; ENSG00000198681; CTA
KLLTQDLVQEK

SEQ ID NO: 36836 - protein, 9 aa, Homo sapiens
  Table A; Target 36836; HLA-A*02:03; MAGEA1; ENSG00000198681; CTA
KVADLVGFL

SEQ ID NO: 36837 - protein, 9 aa, Homo sapiens
  Table A; Target 36837; HLA-A*02:04; MAGEA1; ENSG00000198681; CTA
KVADLVGFL

SEQ ID NO: 36838 - protein, 9 aa, Homo sapiens
  Table A; Target 36838; HLA-A*03:01; MAGEA1; ENSG00000198681; CTA
KVADLVGFL

SEQ ID NO: 36839 - protein, 9 aa, Homo sapiens
  Table A; Target 36839; HLA-A*25:01; MAGEA1; ENSG00000198681; CTA
KVADLVGFL

SEQ ID NO: 36840 - protein, 9 aa, Homo sapiens
  Table A; Target 36840; HLA-A*32:01; MAGEA1; ENSG00000198681; CTA
KVADLVGFL

SEQ ID NO: 36841 - protein, 9 aa, Homo sapiens
  Table A; Target 36841; HLA-A*68:02; MAGEA1; ENSG00000198681; CTA
KVADLVGFL

SEQ ID NO: 36842 - protein, 9 aa, Homo sapiens
  Table A; Target 36842; HLA-B*27:05; MAGEA1; ENSG00000198681; CTA
KVADLVGFL

SEQ ID NO: 36843 - protein, 9 aa, Homo sapiens
  Table A; Target 36843; HLA-B*58:01; MAGEA1; ENSG00000198681; CTA
KVADLVGFL

SEQ ID NO: 36844 - protein, 10 aa, Homo sapiens
  Table A; Target 36844; HLA-A*02:01; MAGEA1; ENSG00000198681; CTA
KVADLVGFLL

SEQ ID NO: 36845 - protein, 10 aa, Homo sapiens
  Table A; Target 36845; HLA-A*02:04; MAGEA1; ENSG00000198681; CTA
KVADLVGFLL

SEQ ID NO: 36846 - protein, 10 aa, Homo sapiens
  Table A; Target 36846; HLA-A*02:07; MAGEA1; ENSG00000198681; CTA
KVADLVGFLL

SEQ ID NO: 36847 - protein, 10 aa, Homo sapiens
  Table A; Target 36847; HLA-A*03:01; MAGEA1; ENSG00000198681; CTA
KVADLVGFLL

SEQ ID NO: 36848 - protein, 10 aa, Homo sapiens
  Table A; Target 36848; HLA-A*31:01; MAGEA1; ENSG00000198681; CTA
KVADLVGFLL

SEQ ID NO: 36849 - protein, 10 aa, Homo sapiens
  Table A; Target 36849; HLA-A*68:02; MAGEA1; ENSG00000198681; CTA
KVADLVGFLL

SEQ ID NO: 36850 - protein, 10 aa, Homo sapiens
  Table A; Target 36850; HLA-B*57:01; MAGEA1; ENSG00000198681; CTA
KVADLVGFLL

SEQ ID NO: 36851 - protein, 11 aa, Homo sapiens
  Table A; Target 36851; HLA-A*02:01; MAGEA1; ENSG00000198681; CTA
KVADLVGFLLL

SEQ ID NO: 36852 - protein, 11 aa, Homo sapiens
  Table A; Target 36852; HLA-A*02:04; MAGEA1; ENSG00000198681; CTA
KVADLVGFLLL

SEQ ID NO: 36853 - protein, 11 aa, Homo sapiens
  Table A; Target 36853; HLA-A*02:07; MAGEA1; ENSG00000198681; CTA
KVADLVGFLLL

SEQ ID NO: 36854 - protein, 11 aa, Homo sapiens
  Table A; Target 36854; HLA-A*03:01; MAGEA1; ENSG00000198681; CTA
KVADLVGFLLL

SEQ ID NO: 36855 - protein, 9 aa, Homo sapiens
  Table A; Target 36855; HLA-A*02:03; MAGEA1; ENSG00000198681; CTA
KVLEYVIKV

SEQ ID NO: 36856 - protein, 9 aa, Homo sapiens
  Table A; Target 36856; HLA-A*02:04; MAGEA1; ENSG00000198681; CTA
KVLEYVIKV

SEQ ID NO: 36857 - protein, 9 aa, Homo sapiens
  Table A; Target 36857; HLA-A*02:07; MAGEA1; ENSG00000198681; CTA
KVLEYVIKV

SEQ ID NO: 36858 - protein, 9 aa, Homo sapiens
  Table A; Target 36858; HLA-A*03:01; MAGEA1; ENSG00000198681; CTA
KVLEYVIKV

SEQ ID NO: 36859 - protein, 9 aa, Homo sapiens
  Table A; Target 36859; HLA-A*03:02; MAGEA1; ENSG00000198681; CTA
KVLEYVIKV

SEQ ID NO: 36860 - protein, 9 aa, Homo sapiens
  Table A; Target 36860; HLA-A*11:01; MAGEA1; ENSG00000198681; CTA
KVLEYVIKV

SEQ ID NO: 36861 - protein, 9 aa, Homo sapiens
  Table A; Target 36861; HLA-A*31:01; MAGEA1; ENSG00000198681; CTA
KVLEYVIKV

SEQ ID NO: 36862 - protein, 9 aa, Homo sapiens
  Table A; Target 36862; HLA-A*32:01; MAGEA1; ENSG00000198681; CTA
KVLEYVIKV

SEQ ID NO: 36863 - protein, 9 aa, Homo sapiens
  Table A; Target 36863; HLA-A*68:02; MAGEA1; ENSG00000198681; CTA
KVLEYVIKV

SEQ ID NO: 36864 - protein, 9 aa, Homo sapiens
  Table A; Target 36864; HLA-B*13:02; MAGEA1; ENSG00000198681; CTA
KVLEYVIKV

SEQ ID NO: 36865 - protein, 9 aa, Homo sapiens
  Table A; Target 36865; HLA-B*40:02; MAGEA1; ENSG00000198681; CTA
KVLEYVIKV

SEQ ID NO: 36866 - protein, 9 aa, Homo sapiens
  Table A; Target 36866; HLA-B*57:01; MAGEA1; ENSG00000198681; CTA
KVLEYVIKV

SEQ ID NO: 36867 - protein, 9 aa, Homo sapiens
  Table A; Target 36867; HLA-B*58:01; MAGEA1; ENSG00000198681; CTA
KVLEYVIKV

SEQ ID NO: 36868 - protein, 9 aa, Homo sapiens
  Table A; Target 36868; HLA-C*02:02; MAGEA1; ENSG00000198681; CTA
KVLEYVIKV

SEQ ID NO: 36869 - protein, 9 aa, Homo sapiens
  Table A; Target 36869; HLA-C*06:02; MAGEA1; ENSG00000198681; CTA
KVLEYVIKV

SEQ ID NO: 36870 - protein, 9 aa, Homo sapiens
  Table A; Target 36870; HLA-C*12:03; MAGEA1; ENSG00000198681; CTA
KVLEYVIKV

SEQ ID NO: 36871 - protein, 9 aa, Homo sapiens
  Table A; Target 36871; HLA-C*16:02; MAGEA1; ENSG00000198681; CTA
KVLEYVIKV

SEQ ID NO: 36872 - protein, 11 aa, Homo sapiens
  Table A; Target 36872; HLA-A*02:01; MAGEA1; ENSG00000198681; CTA
KVLEYVIKVSA

SEQ ID NO: 36873 - protein, 11 aa, Homo sapiens
  Table A; Target 36873; HLA-B*54:01; MAGEA1; ENSG00000198681; CTA
KVLEYVIKVSA

SEQ ID NO: 36874 - protein, 11 aa, Homo sapiens
  Table A; Target 36874; HLA-B*56:01; MAGEA1; ENSG00000198681; CTA
KVLEYVIKVSA

SEQ ID NO: 36875 - protein, 8 aa, Homo sapiens
  Table A; Target 36875; HLA-A*30:01; MAGEA1; ENSG00000198681; CTA
LEAQQEAL

SEQ ID NO: 36876 - protein, 8 aa, Homo sapiens
  Table A; Target 36876; HLA-B*18:01; MAGEA1; ENSG00000198681; CTA
LEAQQEAL

SEQ ID NO: 36877 - protein, 8 aa, Homo sapiens
  Table A; Target 36877; HLA-B*40:01; MAGEA1; ENSG00000198681; CTA
LEAQQEAL

SEQ ID NO: 36878 - protein, 8 aa, Homo sapiens
  Table A; Target 36878; HLA-B*49:01; MAGEA1; ENSG00000198681; CTA
LEAQQEAL

SEQ ID NO: 36879 - protein, 10 aa, Homo sapiens
  Table A; Target 36879; HLA-A*30:01; MAGEA1; ENSG00000198681; CTA
LEAQQEALGL

SEQ ID NO: 36880 - protein, 10 aa, Homo sapiens
  Table A; Target 36880; HLA-B*40:01; MAGEA1; ENSG00000198681; CTA
LEAQQEALGL

SEQ ID NO: 36881 - protein, 11 aa, Homo sapiens
  Table A; Target 36881; HLA-B*49:01; MAGEA1; ENSG00000198681; CTA
LEAQQEALGLV

SEQ ID NO: 36882 - protein, 9 aa, Homo sapiens
  Table A; Target 36882; HLA-B*49:01; MAGEA1; ENSG00000198681; CTA
LEEVPTAGS

SEQ ID NO: 36883 - protein, 8 aa, Homo sapiens
  Table A; Target 36883; HLA-B*18:01; MAGEA1; ENSG00000198681; CTA
LESLFRAV

SEQ ID NO: 36884 - protein, 8 aa, Homo sapiens
  Table A; Target 36884; HLA-B*37:01; MAGEA1; ENSG00000198681; CTA
LESLFRAV

SEQ ID NO: 36885 - protein, 8 aa, Homo sapiens
  Table A; Target 36885; HLA-B*49:01; MAGEA1; ENSG00000198681; CTA
LESLFRAV

SEQ ID NO: 36886 - protein, 9 aa, Homo sapiens
  Table A; Target 36886; HLA-B*44:02; MAGEA1; ENSG00000198681; CTA
LESLFRAVI

SEQ ID NO: 36887 - protein, 9 aa, Homo sapiens
  Table A; Target 36887; HLA-B*49:01; MAGEA1; ENSG00000198681; CTA
LESLFRAVI

SEQ ID NO: 36888 - protein, 9 aa, Homo sapiens
  Table A; Target 36888; HLA-A*30:01; MAGEA1; ENSG00000198681; CTA
LEYVIKVSA

SEQ ID NO: 36889 - protein, 9 aa, Homo sapiens
  Table A; Target 36889; HLA-B*18:01; MAGEA1; ENSG00000198681; CTA
LEYVIKVSA

SEQ ID NO: 36890 - protein, 9 aa, Homo sapiens
  Table A; Target 36890; HLA-B*37:01; MAGEA1; ENSG00000198681; CTA
LEYVIKVSA

SEQ ID NO: 36891 - protein, 9 aa, Homo sapiens
  Table A; Target 36891; HLA-B*40:01; MAGEA1; ENSG00000198681; CTA
LEYVIKVSA

SEQ ID NO: 36892 - protein, 9 aa, Homo sapiens
  Table A; Target 36892; HLA-B*40:02; MAGEA1; ENSG00000198681; CTA
LEYVIKVSA

SEQ ID NO: 36893 - protein, 9 aa, Homo sapiens
  Table A; Target 36893; HLA-B*49:01; MAGEA1; ENSG00000198681; CTA
LEYVIKVSA

SEQ ID NO: 36894 - protein, 9 aa, Homo sapiens
  Table A; Target 36894; HLA-B*54:01; MAGEA1; ENSG00000198681; CTA
LEYVIKVSA

SEQ ID NO: 36895 - protein, 9 aa, Homo sapiens
  Table A; Target 36895; HLA-B*56:01; MAGEA1; ENSG00000198681; CTA
LEYVIKVSA

SEQ ID NO: 36896 - protein, 9 aa, Homo sapiens
  Table A; Target 36896; HLA-B*38:01; MAGEA1; ENSG00000198681; CTA
LHCKPEEAL

SEQ ID NO: 36897 - protein, 10 aa, Homo sapiens
  Table A; Target 36897; HLA-B*27:02; MAGEA1; ENSG00000198681; CTA
LLTQDLVQEK

SEQ ID NO: 36898 - protein, 9 aa, Homo sapiens
  Table A; Target 36898; HLA-B*13:02; MAGEA1; ENSG00000198681; CTA
LQLVFGIDV

SEQ ID NO: 36899 - protein, 10 aa, Homo sapiens
  Table A; Target 36899; HLA-B*27:02; MAGEA1; ENSG00000198681; CTA
LSVMEVYDGR

SEQ ID NO: 36900 - protein, 9 aa, Homo sapiens
  Table A; Target 36900; HLA-A*01:01; MAGEA1; ENSG00000198681; CTA
LTQDLVQEK

SEQ ID NO: 36901 - protein, 9 aa, Homo sapiens
  Table A; Target 36901; HLA-A*03:02; MAGEA1; ENSG00000198681; CTA
LTQDLVQEK

SEQ ID NO: 36902 - protein, 9 aa, Homo sapiens
  Table A; Target 36902; HLA-A*31:01; MAGEA1; ENSG00000198681; CTA
LTQDLVQEK

SEQ ID NO: 36903 - protein, 9 aa, Homo sapiens
  Table A; Target 36903; HLA-A*33:01; MAGEA1; ENSG00000198681; CTA
LTQDLVQEK

SEQ ID NO: 36904 - protein, 9 aa, Homo sapiens
  Table A; Target 36904; HLA-A*33:03; MAGEA1; ENSG00000198681; CTA
LTQDLVQEK

SEQ ID NO: 36905 - protein, 9 aa, Homo sapiens
  Table A; Target 36905; HLA-A*68:01; MAGEA1; ENSG00000198681; CTA
LTQDLVQEK

SEQ ID NO: 36906 - protein, 9 aa, Homo sapiens
  Table A; Target 36906; HLA-B*27:02; MAGEA1; ENSG00000198681; CTA
LTQDLVQEK

SEQ ID NO: 36907 - protein, 9 aa, Homo sapiens
  Table A; Target 36907; HLA-B*27:05; MAGEA1; ENSG00000198681; CTA
LTQDLVQEK

SEQ ID NO: 36908 - protein, 9 aa, Homo sapiens
  Table A; Target 36908; HLA-C*07:06; MAGEA1; ENSG00000198681; CTA
LTQDLVQEK

SEQ ID NO: 36909 - protein, 10 aa, Homo sapiens
  Table A; Target 36909; HLA-A*01:01; MAGEA1; ENSG00000198681; CTA
LTQDLVQEKY

SEQ ID NO: 36910 - protein, 10 aa, Homo sapiens
  Table A; Target 36910; HLA-A*25:01; MAGEA1; ENSG00000198681; CTA
LTQDLVQEKY

SEQ ID NO: 36911 - protein, 10 aa, Homo sapiens
  Table A; Target 36911; HLA-A*26:01; MAGEA1; ENSG00000198681; CTA
LTQDLVQEKY

SEQ ID NO: 36912 - protein, 10 aa, Homo sapiens
  Table A; Target 36912; HLA-A*29:02; MAGEA1; ENSG00000198681; CTA
LTQDLVQEKY

SEQ ID NO: 36913 - protein, 10 aa, Homo sapiens
  Table A; Target 36913; HLA-A*30:02; MAGEA1; ENSG00000198681; CTA
LTQDLVQEKY

SEQ ID NO: 36914 - protein, 10 aa, Homo sapiens
  Table A; Target 36914; HLA-A*32:01; MAGEA1; ENSG00000198681; CTA
LTQDLVQEKY

SEQ ID NO: 36915 - protein, 10 aa, Homo sapiens
  Table A; Target 36915; HLA-B*57:01; MAGEA1; ENSG00000198681; CTA
LTQDLVQEKY

SEQ ID NO: 36916 - protein, 10 aa, Homo sapiens
  Table A; Target 36916; HLA-B*58:01; MAGEA1; ENSG00000198681; CTA
LTQDLVQEKY

SEQ ID NO: 36917 - protein, 10 aa, Homo sapiens
  Table A; Target 36917; HLA-C*07:01; MAGEA1; ENSG00000198681; CTA
LTQDLVQEKY

SEQ ID NO: 36918 - protein, 10 aa, Homo sapiens
  Table A; Target 36918; HLA-C*16:01; MAGEA1; ENSG00000198681; CTA
LTQDLVQEKY

SEQ ID NO: 36919 - protein, 10 aa, Homo sapiens
  Table A; Target 36919; HLA-C*16:02; MAGEA1; ENSG00000198681; CTA
LTQDLVQEKY

SEQ ID NO: 36920 - protein, 10 aa, Homo sapiens
  Table A; Target 36920; HLA-C*16:04; MAGEA1; ENSG00000198681; CTA
LTQDLVQEKY

SEQ ID NO: 36921 - protein, 8 aa, Homo sapiens
  Table A; Target 36921; HLA-B*27:02; MAGEA1; ENSG00000198681; CTA
LVFGIDVK

SEQ ID NO: 36922 - protein, 9 aa, Homo sapiens
  Table A; Target 36922; HLA-A*01:01; MAGEA1; ENSG00000198681; CTA
LVGFLLLKY

SEQ ID NO: 36923 - protein, 9 aa, Homo sapiens
  Table A; Target 36923; HLA-A*29:02; MAGEA1; ENSG00000198681; CTA
LVGFLLLKY

SEQ ID NO: 36924 - protein, 9 aa, Homo sapiens
  Table A; Target 36924; HLA-C*07:01; MAGEA1; ENSG00000198681; CTA
LVGFLLLKY

SEQ ID NO: 36925 - protein, 9 aa, Homo sapiens
  Table A; Target 36925; HLA-A*02:01; MAGEA1; ENSG00000198681; CTA
LVLGTLEEV

SEQ ID NO: 36926 - protein, 9 aa, Homo sapiens
  Table A; Target 36926; HLA-A*02:03; MAGEA1; ENSG00000198681; CTA
LVLGTLEEV

SEQ ID NO: 36927 - protein, 9 aa, Homo sapiens
  Table A; Target 36927; HLA-A*02:04; MAGEA1; ENSG00000198681; CTA
LVLGTLEEV

SEQ ID NO: 36928 - protein, 9 aa, Homo sapiens
  Table A; Target 36928; HLA-A*02:07; MAGEA1; ENSG00000198681; CTA
LVLGTLEEV

SEQ ID NO: 36929 - protein, 9 aa, Homo sapiens
  Table A; Target 36929; HLA-B*55:01; MAGEA1; ENSG00000198681; CTA
LVLGTLEEV

SEQ ID NO: 36930 - protein, 9 aa, Homo sapiens
  Table A; Target 36930; HLA-A*02:07; MAGEA1; ENSG00000198681; CTA
LVQEKYLEY

SEQ ID NO: 36931 - protein, 9 aa, Homo sapiens
  Table A; Target 36931; HLA-B*08:01; MAGEA1; ENSG00000198681; CTA
LVQEKYLEY

SEQ ID NO: 36932 - protein, 9 aa, Homo sapiens
  Table A; Target 36932; HLA-B*15:03; MAGEA1; ENSG00000198681; CTA
LVQEKYLEY

SEQ ID NO: 36933 - protein, 10 aa, Homo sapiens
  Table A; Target 36933; HLA-A*31:01; MAGEA1; ENSG00000198681; CTA
LVQEKYLEYR

SEQ ID NO: 36934 - protein, 10 aa, Homo sapiens
  Table A; Target 36934; HLA-A*33:01; MAGEA1; ENSG00000198681; CTA
LVQEKYLEYR

SEQ ID NO: 36935 - protein, 11 aa, Homo sapiens
  Table A; Target 36935; HLA-A*30:01; MAGEA1; ENSG00000198681; CTA
MEVYDGREHSA

SEQ ID NO: 36936 - protein, 11 aa, Homo sapiens
  Table A; Target 36936; HLA-B*40:02; MAGEA1; ENSG00000198681; CTA
MEVYDGREHSA

SEQ ID NO: 36937 - protein, 11 aa, Homo sapiens
  Table A; Target 36937; HLA-B*54:01; MAGEA1; ENSG00000198681; CTA
MEVYDGREHSA

SEQ ID NO: 36938 - protein, 10 aa, Homo sapiens
  Table A; Target 36938; HLA-B*54:01; MAGEA1; ENSG00000198681; CTA
MPKTGFLIIV

SEQ ID NO: 36939 - protein, 8 aa, Homo sapiens
  Table A; Target 36939; HLA-C*03:04; MAGEA1; ENSG00000198681; CTA
MSLEQRSL

SEQ ID NO: 36940 - protein, 8 aa, Homo sapiens
  Table A; Target 36940; HLA-C*16:01; MAGEA1; ENSG00000198681; CTA
MSLEQRSL

SEQ ID NO: 36941 - protein, 9 aa, Homo sapiens
  Table A; Target 36941; HLA-A*24:02; MAGEA1; ENSG00000198681; CTA
NYKHCFPEI

SEQ ID NO: 36942 - protein, 10 aa, Homo sapiens
  Table A; Target 36942; HLA-B*15:01; MAGEA1; ENSG00000198681; CTA
PQSPQGASAF

SEQ ID NO: 36943 - protein, 8 aa, Homo sapiens
  Table A; Target 36943; HLA-B*07:02; MAGEA1; ENSG00000198681; CTA
PTGHSYVL

SEQ ID NO: 36944 - protein, 8 aa, Homo sapiens
  Table A; Target 36944; HLA-C*07:01; MAGEA1; ENSG00000198681; CTA
PTGHSYVL

SEQ ID NO: 36945 - protein, 8 aa, Homo sapiens
  Table A; Target 36945; HLA-C*07:02; MAGEA1; ENSG00000198681; CTA
PTGHSYVL

SEQ ID NO: 36946 - protein, 8 aa, Homo sapiens
  Table A; Target 36946; HLA-B*27:02; MAGEA1; ENSG00000198681; CTA
PTTINFTR

SEQ ID NO: 36947 - protein, 10 aa, Homo sapiens
  Table A; Target 36947; HLA-B*35:03; MAGEA1; ENSG00000198681; CTA
QAATSSSSPL

SEQ ID NO: 36948 - protein, 10 aa, Homo sapiens
  Table A; Target 36948; HLA-C*03:03; MAGEA1; ENSG00000198681; CTA
QAATSSSSPL

SEQ ID NO: 36949 - protein, 10 aa, Homo sapiens
  Table A; Target 36949; HLA-C*03:04; MAGEA1; ENSG00000198681; CTA
QAATSSSSPL

SEQ ID NO: 36950 - protein, 8 aa, Homo sapiens
  Table A; Target 36950; HLA-B*44:03; MAGEA1; ENSG00000198681; CTA
QDLVQEKY

SEQ ID NO: 36951 - protein, 9 aa, Homo sapiens
  Table A; Target 36951; HLA-A*30:01; MAGEA1; ENSG00000198681; CTA
QEALGLVCV

SEQ ID NO: 36952 - protein, 9 aa, Homo sapiens
  Table A; Target 36952; HLA-B*13:02; MAGEA1; ENSG00000198681; CTA
QEALGLVCV

SEQ ID NO: 36953 - protein, 9 aa, Homo sapiens
  Table A; Target 36953; HLA-B*40:01; MAGEA1; ENSG00000198681; CTA
QEALGLVCV

SEQ ID NO: 36954 - protein, 9 aa, Homo sapiens
  Table A; Target 36954; HLA-B*40:02; MAGEA1; ENSG00000198681; CTA
QEALGLVCV

SEQ ID NO: 36955 - protein, 9 aa, Homo sapiens
  Table A; Target 36955; HLA-B*44:03; MAGEA1; ENSG00000198681; CTA
QEALGLVCV

SEQ ID NO: 36956 - protein, 9 aa, Homo sapiens
  Table A; Target 36956; HLA-A*03:02; MAGEA1; ENSG00000198681; CTA
QLVFGIDVK

SEQ ID NO: 36957 - protein, 9 aa, Homo sapiens
  Table A; Target 36957; HLA-A*68:01; MAGEA1; ENSG00000198681; CTA
QPSEGSSSR

SEQ ID NO: 36958 - protein, 9 aa, Homo sapiens
  Table A; Target 36958; HLA-C*07:06; MAGEA1; ENSG00000198681; CTA
QPSEGSSSR

SEQ ID NO: 36959 - protein, 10 aa, Homo sapiens
  Table A; Target 36959; HLA-A*02:01; MAGEA1; ENSG00000198681; CTA
QQEALGLVCV

SEQ ID NO: 36960 - protein, 10 aa, Homo sapiens
  Table A; Target 36960; HLA-B*13:02; MAGEA1; ENSG00000198681; CTA
QQEALGLVCV

SEQ ID NO: 36961 - protein, 10 aa, Homo sapiens
  Table A; Target 36961; HLA-C*04:01; MAGEA1; ENSG00000198681; CTA
QQEALGLVCV

SEQ ID NO: 36962 - protein, 11 aa, Homo sapiens
  Table A; Target 36962; HLA-B*27:05; MAGEA1; ENSG00000198681; CTA
QRQPSEGSSSR

SEQ ID NO: 36963 - protein, 9 aa, Homo sapiens
  Table A; Target 36963; HLA-B*46:01; MAGEA1; ENSG00000198681; CTA
QSPQGASAF

SEQ ID NO: 36964 - protein, 9 aa, Homo sapiens
  Table A; Target 36964; HLA-C*01:02; MAGEA1; ENSG00000198681; CTA
QSPQGASAF

SEQ ID NO: 36965 - protein, 9 aa, Homo sapiens
  Table A; Target 36965; HLA-C*14:02; MAGEA1; ENSG00000198681; CTA
QSPQGASAF

SEQ ID NO: 36966 - protein, 9 aa, Homo sapiens
  Table A; Target 36966; HLA-A*68:01; MAGEA1; ENSG00000198681; CTA
QVPDSDPAR

SEQ ID NO: 36967 - protein, 10 aa, Homo sapiens
  Table A; Target 36967; HLA-A*01:01; MAGEA1; ENSG00000198681; CTA
QVPDSDPARY

SEQ ID NO: 36968 - protein, 10 aa, Homo sapiens
  Table A; Target 36968; HLA-A*25:01; MAGEA1; ENSG00000198681; CTA
QVPDSDPARY

SEQ ID NO: 36969 - protein, 10 aa, Homo sapiens
  Table A; Target 36969; HLA-A*26:01; MAGEA1; ENSG00000198681; CTA
QVPDSDPARY

SEQ ID NO: 36970 - protein, 10 aa, Homo sapiens
  Table A; Target 36970; HLA-A*29:02; MAGEA1; ENSG00000198681; CTA
QVPDSDPARY

SEQ ID NO: 36971 - protein, 10 aa, Homo sapiens
  Table A; Target 36971; HLA-A*30:02; MAGEA1; ENSG00000198681; CTA
QVPDSDPARY

SEQ ID NO: 36972 - protein, 10 aa, Homo sapiens
  Table A; Target 36972; HLA-C*07:04; MAGEA1; ENSG00000198681; CTA
QVPDSDPARY

SEQ ID NO: 36973 - protein, 10 aa, Homo sapiens
  Table A; Target 36973; HLA-A*30:01; MAGEA1; ENSG00000198681; CTA
REEEGPSTSC

SEQ ID NO: 36974 - protein, 10 aa, Homo sapiens
  Table A; Target 36974; HLA-B*40:01; MAGEA1; ENSG00000198681; CTA
REEEGPSTSC

SEQ ID NO: 36975 - protein, 10 aa, Homo sapiens
  Table A; Target 36975; HLA-B*49:01; MAGEA1; ENSG00000198681; CTA
REEEGPSTSC

SEQ ID NO: 36976 - protein, 11 aa, Homo sapiens
  Table A; Target 36976; HLA-B*40:01; MAGEA1; ENSG00000198681; CTA
REEEGPSTSCI

SEQ ID NO: 36977 - protein, 11 aa, Homo sapiens
  Table A; Target 36977; HLA-B*49:01; MAGEA1; ENSG00000198681; CTA
REEEGPSTSCI

SEQ ID NO: 36978 - protein, 11 aa, Homo sapiens
  Table A; Target 36978; HLA-A*29:02; MAGEA1; ENSG00000198681; CTA
RQVPDSDPARY

SEQ ID NO: 36979 - protein, 11 aa, Homo sapiens
  Table A; Target 36979; HLA-A*32:01; MAGEA1; ENSG00000198681; CTA
RQVPDSDPARY

SEQ ID NO: 36980 - protein, 11 aa, Homo sapiens
  Table A; Target 36980; HLA-B*15:03; MAGEA1; ENSG00000198681; CTA
RQVPDSDPARY

SEQ ID NO: 36981 - protein, 11 aa, Homo sapiens
  Table A; Target 36981; HLA-B*57:01; MAGEA1; ENSG00000198681; CTA
RQVPDSDPARY

SEQ ID NO: 36982 - protein, 11 aa, Homo sapiens
  Table A; Target 36982; HLA-B*58:01; MAGEA1; ENSG00000198681; CTA
RQVPDSDPARY

SEQ ID NO: 36983 - protein, 9 aa, Homo sapiens
  Table A; Target 36983; HLA-A*02:04; MAGEA1; ENSG00000198681; CTA
RVRFFFPSL

SEQ ID NO: 36984 - protein, 10 aa, Homo sapiens
  Table A; Target 36984; HLA-A*31:01; MAGEA1; ENSG00000198681; CTA
RVRFFFPSLR

SEQ ID NO: 36985 - protein, 9 aa, Homo sapiens
  Table A; Target 36985; HLA-A*02:04; MAGEA1; ENSG00000198681; CTA
SAFPTTINF

SEQ ID NO: 36986 - protein, 9 aa, Homo sapiens
  Table A; Target 36986; HLA-A*02:07; MAGEA1; ENSG00000198681; CTA
SAFPTTINF

SEQ ID NO: 36987 - protein, 9 aa, Homo sapiens
  Table A; Target 36987; HLA-A*03:01; MAGEA1; ENSG00000198681; CTA
SAFPTTINF

SEQ ID NO: 36988 - protein, 9 aa, Homo sapiens
  Table A; Target 36988; HLA-A*03:02; MAGEA1; ENSG00000198681; CTA
SAFPTTINF

SEQ ID NO: 36989 - protein, 9 aa, Homo sapiens
  Table A; Target 36989; HLA-A*11:01; MAGEA1; ENSG00000198681; CTA
SAFPTTINF

SEQ ID NO: 36990 - protein, 9 aa, Homo sapiens
  Table A; Target 36990; HLA-A*23:01; MAGEA1; ENSG00000198681; CTA
SAFPTTINF

SEQ ID NO: 36991 - protein, 9 aa, Homo sapiens
  Table A; Target 36991; HLA-A*24:02; MAGEA1; ENSG00000198681; CTA
SAFPTTINF

SEQ ID NO: 36992 - protein, 9 aa, Homo sapiens
  Table A; Target 36992; HLA-A*25:01; MAGEA1; ENSG00000198681; CTA
SAFPTTINF

SEQ ID NO: 36993 - protein, 9 aa, Homo sapiens
  Table A; Target 36993; HLA-A*26:01; MAGEA1; ENSG00000198681; CTA
SAFPTTINF

SEQ ID NO: 36994 - protein, 9 aa, Homo sapiens
  Table A; Target 36994; HLA-A*29:02; MAGEA1; ENSG00000198681; CTA
SAFPTTINF

SEQ ID NO: 36995 - protein, 9 aa, Homo sapiens
  Table A; Target 36995; HLA-A*30:01; MAGEA1; ENSG00000198681; CTA
SAFPTTINF

SEQ ID NO: 36996 - protein, 9 aa, Homo sapiens
  Table A; Target 36996; HLA-A*30:02; MAGEA1; ENSG00000198681; CTA
SAFPTTINF

SEQ ID NO: 36997 - protein, 9 aa, Homo sapiens
  Table A; Target 36997; HLA-A*31:01; MAGEA1; ENSG00000198681; CTA
SAFPTTINF

SEQ ID NO: 36998 - protein, 9 aa, Homo sapiens
  Table A; Target 36998; HLA-A*32:01; MAGEA1; ENSG00000198681; CTA
SAFPTTINF

SEQ ID NO: 36999 - protein, 9 aa, Homo sapiens
  Table A; Target 36999; HLA-A*33:01; MAGEA1; ENSG00000198681; CTA
SAFPTTINF

SEQ ID NO: 37000 - protein, 9 aa, Homo sapiens
  Table A; Target 37000; HLA-A*33:03; MAGEA1; ENSG00000198681; CTA
SAFPTTINF

SEQ ID NO: 37001 - protein, 9 aa, Homo sapiens
  Table A; Target 37001; HLA-A*68:01; MAGEA1; ENSG00000198681; CTA
SAFPTTINF

SEQ ID NO: 37002 - protein, 9 aa, Homo sapiens
  Table A; Target 37002; HLA-A*68:02; MAGEA1; ENSG00000198681; CTA
SAFPTTINF

SEQ ID NO: 37003 - protein, 9 aa, Homo sapiens
  Table A; Target 37003; HLA-B*07:02; MAGEA1; ENSG00000198681; CTA
SAFPTTINF

SEQ ID NO: 37004 - protein, 9 aa, Homo sapiens
  Table A; Target 37004; HLA-B*13:02; MAGEA1; ENSG00000198681; CTA
SAFPTTINF

SEQ ID NO: 37005 - protein, 9 aa, Homo sapiens
  Table A; Target 37005; HLA-B*15:03; MAGEA1; ENSG00000198681; CTA
SAFPTTINF

SEQ ID NO: 37006 - protein, 9 aa, Homo sapiens
  Table A; Target 37006; HLA-B*18:01; MAGEA1; ENSG00000198681; CTA
SAFPTTINF

SEQ ID NO: 37007 - protein, 9 aa, Homo sapiens
  Table A; Target 37007; HLA-B*27:02; MAGEA1; ENSG00000198681; CTA
SAFPTTINF

SEQ ID NO: 37008 - protein, 9 aa, Homo sapiens
  Table A; Target 37008; HLA-B*27:05; MAGEA1; ENSG00000198681; CTA
SAFPTTINF

SEQ ID NO: 37009 - protein, 9 aa, Homo sapiens
  Table A; Target 37009; HLA-B*35:03; MAGEA1; ENSG00000198681; CTA
SAFPTTINF

SEQ ID NO: 37010 - protein, 9 aa, Homo sapiens
  Table A; Target 37010; HLA-B*37:01; MAGEA1; ENSG00000198681; CTA
SAFPTTINF

SEQ ID NO: 37011 - protein, 9 aa, Homo sapiens
  Table A; Target 37011; HLA-B*38:01; MAGEA1; ENSG00000198681; CTA
SAFPTTINF

SEQ ID NO: 37012 - protein, 9 aa, Homo sapiens
  Table A; Target 37012; HLA-B*39:01; MAGEA1; ENSG00000198681; CTA
SAFPTTINF

SEQ ID NO: 37013 - protein, 9 aa, Homo sapiens
  Table A; Target 37013; HLA-B*40:02; MAGEA1; ENSG00000198681; CTA
SAFPTTINF

SEQ ID NO: 37014 - protein, 9 aa, Homo sapiens
  Table A; Target 37014; HLA-B*44:02; MAGEA1; ENSG00000198681; CTA
SAFPTTINF

SEQ ID NO: 37015 - protein, 9 aa, Homo sapiens
  Table A; Target 37015; HLA-B*44:03; MAGEA1; ENSG00000198681; CTA
SAFPTTINF

SEQ ID NO: 37016 - protein, 9 aa, Homo sapiens
  Table A; Target 37016; HLA-B*46:01; MAGEA1; ENSG00000198681; CTA
SAFPTTINF

SEQ ID NO: 37017 - protein, 9 aa, Homo sapiens
  Table A; Target 37017; HLA-B*51:01; MAGEA1; ENSG00000198681; CTA
SAFPTTINF

SEQ ID NO: 37018 - protein, 9 aa, Homo sapiens
  Table A; Target 37018; HLA-B*54:01; MAGEA1; ENSG00000198681; CTA
SAFPTTINF

SEQ ID NO: 37019 - protein, 9 aa, Homo sapiens
  Table A; Target 37019; HLA-B*55:01; MAGEA1; ENSG00000198681; CTA
SAFPTTINF

SEQ ID NO: 37020 - protein, 9 aa, Homo sapiens
  Table A; Target 37020; HLA-B*56:01; MAGEA1; ENSG00000198681; CTA
SAFPTTINF

SEQ ID NO: 37021 - protein, 9 aa, Homo sapiens
  Table A; Target 37021; HLA-C*01:02; MAGEA1; ENSG00000198681; CTA
SAFPTTINF

SEQ ID NO: 37022 - protein, 9 aa, Homo sapiens
  Table A; Target 37022; HLA-C*03:03; MAGEA1; ENSG00000198681; CTA
SAFPTTINF

SEQ ID NO: 37023 - protein, 9 aa, Homo sapiens
  Table A; Target 37023; HLA-C*03:04; MAGEA1; ENSG00000198681; CTA
SAFPTTINF

SEQ ID NO: 37024 - protein, 9 aa, Homo sapiens
  Table A; Target 37024; HLA-C*04:01; MAGEA1; ENSG00000198681; CTA
SAFPTTINF

SEQ ID NO: 37025 - protein, 9 aa, Homo sapiens
  Table A; Target 37025; HLA-C*05:01; MAGEA1; ENSG00000198681; CTA
SAFPTTINF

SEQ ID NO: 37026 - protein, 9 aa, Homo sapiens
  Table A; Target 37026; HLA-C*06:02; MAGEA1; ENSG00000198681; CTA
SAFPTTINF

SEQ ID NO: 37027 - protein, 9 aa, Homo sapiens
  Table A; Target 37027; HLA-C*07:04; MAGEA1; ENSG00000198681; CTA
SAFPTTINF

SEQ ID NO: 37028 - protein, 9 aa, Homo sapiens
  Table A; Target 37028; HLA-C*07:06; MAGEA1; ENSG00000198681; CTA
SAFPTTINF

SEQ ID NO: 37029 - protein, 9 aa, Homo sapiens
  Table A; Target 37029; HLA-C*14:02; MAGEA1; ENSG00000198681; CTA
SAFPTTINF

SEQ ID NO: 37030 - protein, 9 aa, Homo sapiens
  Table A; Target 37030; HLA-C*16:01; MAGEA1; ENSG00000198681; CTA
SAFPTTINF

SEQ ID NO: 37031 - protein, 9 aa, Homo sapiens
  Table A; Target 37031; HLA-C*16:02; MAGEA1; ENSG00000198681; CTA
SAFPTTINF

SEQ ID NO: 37032 - protein, 9 aa, Homo sapiens
  Table A; Target 37032; HLA-C*16:04; MAGEA1; ENSG00000198681; CTA
SAFPTTINF

SEQ ID NO: 37033 - protein, 11 aa, Homo sapiens
  Table A; Target 37033; HLA-A*03:02; MAGEA1; ENSG00000198681; CTA
SAFPTTINFTR

SEQ ID NO: 37034 - protein, 11 aa, Homo sapiens
  Table A; Target 37034; HLA-A*11:01; MAGEA1; ENSG00000198681; CTA
SAFPTTINFTR

SEQ ID NO: 37035 - protein, 11 aa, Homo sapiens
  Table A; Target 37035; HLA-A*31:01; MAGEA1; ENSG00000198681; CTA
SAFPTTINFTR

SEQ ID NO: 37036 - protein, 11 aa, Homo sapiens
  Table A; Target 37036; HLA-A*33:01; MAGEA1; ENSG00000198681; CTA
SAFPTTINFTR

SEQ ID NO: 37037 - protein, 11 aa, Homo sapiens
  Table A; Target 37037; HLA-A*33:03; MAGEA1; ENSG00000198681; CTA
SAFPTTINFTR

SEQ ID NO: 37038 - protein, 11 aa, Homo sapiens
  Table A; Target 37038; HLA-A*68:01; MAGEA1; ENSG00000198681; CTA
SAFPTTINFTR

SEQ ID NO: 37039 - protein, 11 aa, Homo sapiens
  Table A; Target 37039; HLA-A*68:02; MAGEA1; ENSG00000198681; CTA
SAFPTTINFTR

SEQ ID NO: 37040 - protein, 11 aa, Homo sapiens
  Table A; Target 37040; HLA-B*57:01; MAGEA1; ENSG00000198681; CTA
SAFPTTINFTR

SEQ ID NO: 37041 - protein, 11 aa, Homo sapiens
  Table A; Target 37041; HLA-C*02:02; MAGEA1; ENSG00000198681; CTA
SAFPTTINFTR

SEQ ID NO: 37042 - protein, 11 aa, Homo sapiens
  Table A; Target 37042; HLA-C*07:06; MAGEA1; ENSG00000198681; CTA
SAFPTTINFTR

SEQ ID NO: 37043 - protein, 9 aa, Homo sapiens
  Table A; Target 37043; HLA-A*03:01; MAGEA1; ENSG00000198681; CTA
SAYGEPRKL

SEQ ID NO: 37044 - protein, 9 aa, Homo sapiens
  Table A; Target 37044; HLA-B*15:03; MAGEA1; ENSG00000198681; CTA
SAYGEPRKL

SEQ ID NO: 37045 - protein, 9 aa, Homo sapiens
  Table A; Target 37045; HLA-B*51:01; MAGEA1; ENSG00000198681; CTA
SAYGEPRKL

SEQ ID NO: 37046 - protein, 9 aa, Homo sapiens
  Table A; Target 37046; HLA-B*58:01; MAGEA1; ENSG00000198681; CTA
SAYGEPRKL

SEQ ID NO: 37047 - protein, 9 aa, Homo sapiens
  Table A; Target 37047; HLA-C*02:02; MAGEA1; ENSG00000198681; CTA
SAYGEPRKL

SEQ ID NO: 37048 - protein, 9 aa, Homo sapiens
  Table A; Target 37048; HLA-C*03:03; MAGEA1; ENSG00000198681; CTA
SAYGEPRKL

SEQ ID NO: 37049 - protein, 9 aa, Homo sapiens
  Table A; Target 37049; HLA-C*03:04; MAGEA1; ENSG00000198681; CTA
SAYGEPRKL

SEQ ID NO: 37050 - protein, 9 aa, Homo sapiens
  Table A; Target 37050; HLA-C*06:02; MAGEA1; ENSG00000198681; CTA
SAYGEPRKL

SEQ ID NO: 37051 - protein, 9 aa, Homo sapiens
  Table A; Target 37051; HLA-C*12:03; MAGEA1; ENSG00000198681; CTA
SAYGEPRKL

SEQ ID NO: 37052 - protein, 9 aa, Homo sapiens
  Table A; Target 37052; HLA-C*16:01; MAGEA1; ENSG00000198681; CTA
SAYGEPRKL

SEQ ID NO: 37053 - protein, 9 aa, Homo sapiens
  Table A; Target 37053; HLA-C*16:02; MAGEA1; ENSG00000198681; CTA
SAYGEPRKL

SEQ ID NO: 37054 - protein, 9 aa, Homo sapiens
  Table A; Target 37054; HLA-C*16:04; MAGEA1; ENSG00000198681; CTA
SAYGEPRKL

SEQ ID NO: 37055 - protein, 8 aa, Homo sapiens
  Table A; Target 37055; HLA-B*37:01; MAGEA1; ENSG00000198681; CTA
SDPARYEF

SEQ ID NO: 37056 - protein, 8 aa, Homo sapiens
  Table A; Target 37056; HLA-A*30:01; MAGEA1; ENSG00000198681; CTA
SESLQLVF

SEQ ID NO: 37057 - protein, 8 aa, Homo sapiens
  Table A; Target 37057; HLA-B*18:01; MAGEA1; ENSG00000198681; CTA
SESLQLVF

SEQ ID NO: 37058 - protein, 8 aa, Homo sapiens
  Table A; Target 37058; HLA-B*37:01; MAGEA1; ENSG00000198681; CTA
SESLQLVF

SEQ ID NO: 37059 - protein, 8 aa, Homo sapiens
  Table A; Target 37059; HLA-B*44:02; MAGEA1; ENSG00000198681; CTA
SESLQLVF

SEQ ID NO: 37060 - protein, 8 aa, Homo sapiens
  Table A; Target 37060; HLA-B*44:03; MAGEA1; ENSG00000198681; CTA
SESLQLVF

SEQ ID NO: 37061 - protein, 8 aa, Homo sapiens
  Table A; Target 37061; HLA-B*49:01; MAGEA1; ENSG00000198681; CTA
SESLQLVF

SEQ ID NO: 37062 - protein, 9 aa, Homo sapiens
  Table A; Target 37062; HLA-A*02:03; MAGEA1; ENSG00000198681; CTA
SLFRAVITK

SEQ ID NO: 37063 - protein, 9 aa, Homo sapiens
  Table A; Target 37063; HLA-A*02:04; MAGEA1; ENSG00000198681; CTA
SLFRAVITK

SEQ ID NO: 37064 - protein, 9 aa, Homo sapiens
  Table A; Target 37064; HLA-A*03:01; MAGEA1; ENSG00000198681; CTA
SLFRAVITK

SEQ ID NO: 37065 - protein, 9 aa, Homo sapiens
  Table A; Target 37065; HLA-A*03:02; MAGEA1; ENSG00000198681; CTA
SLFRAVITK

SEQ ID NO: 37066 - protein, 9 aa, Homo sapiens
  Table A; Target 37066; HLA-A*11:01; MAGEA1; ENSG00000198681; CTA
SLFRAVITK

SEQ ID NO: 37067 - protein, 10 aa, Homo sapiens
  Table A; Target 37067; HLA-A*03:01; MAGEA1; ENSG00000198681; CTA
SLFRAVITKK

SEQ ID NO: 37068 - protein, 10 aa, Homo sapiens
  Table A; Target 37068; HLA-A*03:02; MAGEA1; ENSG00000198681; CTA
SLFRAVITKK

SEQ ID NO: 37069 - protein, 8 aa, Homo sapiens
  Table A; Target 37069; HLA-B*07:02; MAGEA1; ENSG00000198681; CTA
SPLVLGTL

SEQ ID NO: 37070 - protein, 8 aa, Homo sapiens
  Table A; Target 37070; HLA-B*08:01; MAGEA1; ENSG00000198681; CTA
SPLVLGTL

SEQ ID NO: 37071 - protein, 8 aa, Homo sapiens
  Table A; Target 37071; HLA-B*56:01; MAGEA1; ENSG00000198681; CTA
SPLVLGTL

SEQ ID NO: 37072 - protein, 8 aa, Homo sapiens
  Table A; Target 37072; HLA-C*07:02; MAGEA1; ENSG00000198681; CTA
SPLVLGTL

SEQ ID NO: 37073 - protein, 11 aa, Homo sapiens
  Table A; Target 37073; HLA-B*56:01; MAGEA1; ENSG00000198681; CTA
SPLVLGTLEEV

SEQ ID NO: 37074 - protein, 8 aa, Homo sapiens
  Table A; Target 37074; HLA-B*07:02; MAGEA1; ENSG00000198681; CTA
SPQGASAF

SEQ ID NO: 37075 - protein, 9 aa, Homo sapiens
  Table A; Target 37075; HLA-A*02:07; MAGEA1; ENSG00000198681; CTA
SSPLVLGTL

SEQ ID NO: 37076 - protein, 9 aa, Homo sapiens
  Table A; Target 37076; HLA-B*46:01; MAGEA1; ENSG00000198681; CTA
SSPLVLGTL

SEQ ID NO: 37077 - protein, 9 aa, Homo sapiens
  Table A; Target 37077; HLA-C*01:02; MAGEA1; ENSG00000198681; CTA
SSPLVLGTL

SEQ ID NO: 37078 - protein, 9 aa, Homo sapiens
  Table A; Target 37078; HLA-C*07:02; MAGEA1; ENSG00000198681; CTA
SSPLVLGTL

SEQ ID NO: 37079 - protein, 10 aa, Homo sapiens
  Table A; Target 37079; HLA-A*25:01; MAGEA1; ENSG00000198681; CTA
SSSPLVLGTL

SEQ ID NO: 37080 - protein, 10 aa, Homo sapiens
  Table A; Target 37080; HLA-C*16:02; MAGEA1; ENSG00000198681; CTA
SSSPLVLGTL

SEQ ID NO: 37081 - protein, 8 aa, Homo sapiens
  Table A; Target 37081; HLA-C*02:02; MAGEA1; ENSG00000198681; CTA
SSSSPLVL

SEQ ID NO: 37082 - protein, 8 aa, Homo sapiens
  Table A; Target 37082; HLA-C*03:03; MAGEA1; ENSG00000198681; CTA
SSSSPLVL

SEQ ID NO: 37083 - protein, 8 aa, Homo sapiens
  Table A; Target 37083; HLA-C*03:04; MAGEA1; ENSG00000198681; CTA
SSSSPLVL

SEQ ID NO: 37084 - protein, 8 aa, Homo sapiens
  Table A; Target 37084; HLA-C*05:01; MAGEA1; ENSG00000198681; CTA
SSSSPLVL

SEQ ID NO: 37085 - protein, 8 aa, Homo sapiens
  Table A; Target 37085; HLA-C*07:04; MAGEA1; ENSG00000198681; CTA
SSSSPLVL

SEQ ID NO: 37086 - protein, 8 aa, Homo sapiens
  Table A; Target 37086; HLA-C*12:03; MAGEA1; ENSG00000198681; CTA
SSSSPLVL

SEQ ID NO: 37087 - protein, 8 aa, Homo sapiens
  Table A; Target 37087; HLA-C*16:01; MAGEA1; ENSG00000198681; CTA
SSSSPLVL

SEQ ID NO: 37088 - protein, 9 aa, Homo sapiens
  Table A; Target 37088; HLA-A*01:01; MAGEA1; ENSG00000198681; CTA
STDPPQSPQ

SEQ ID NO: 37089 - protein, 9 aa, Homo sapiens
  Table A; Target 37089; HLA-A*11:01; MAGEA1; ENSG00000198681; CTA
STDPPQSPQ

SEQ ID NO: 37090 - protein, 10 aa, Homo sapiens
  Table A; Target 37090; HLA-A*01:01; MAGEA1; ENSG00000198681; CTA
STDPPQSPQG

SEQ ID NO: 37091 - protein, 9 aa, Homo sapiens
  Table A; Target 37091; HLA-A*68:02; MAGEA1; ENSG00000198681; CTA
STSCILESL

SEQ ID NO: 37092 - protein, 9 aa, Homo sapiens
  Table A; Target 37092; HLA-A*03:02; MAGEA1; ENSG00000198681; CTA
SVMEVYDGR

SEQ ID NO: 37093 - protein, 9 aa, Homo sapiens
  Table A; Target 37093; HLA-A*11:01; MAGEA1; ENSG00000198681; CTA
SVMEVYDGR

SEQ ID NO: 37094 - protein, 9 aa, Homo sapiens
  Table A; Target 37094; HLA-A*25:01; MAGEA1; ENSG00000198681; CTA
SVMEVYDGR

SEQ ID NO: 37095 - protein, 9 aa, Homo sapiens
  Table A; Target 37095; HLA-A*26:01; MAGEA1; ENSG00000198681; CTA
SVMEVYDGR

SEQ ID NO: 37096 - protein, 9 aa, Homo sapiens
  Table A; Target 37096; HLA-A*31:01; MAGEA1; ENSG00000198681; CTA
SVMEVYDGR

SEQ ID NO: 37097 - protein, 9 aa, Homo sapiens
  Table A; Target 37097; HLA-A*33:01; MAGEA1; ENSG00000198681; CTA
SVMEVYDGR

SEQ ID NO: 37098 - protein, 9 aa, Homo sapiens
  Table A; Target 37098; HLA-A*33:03; MAGEA1; ENSG00000198681; CTA
SVMEVYDGR

SEQ ID NO: 37099 - protein, 9 aa, Homo sapiens
  Table A; Target 37099; HLA-A*68:02; MAGEA1; ENSG00000198681; CTA
SVMEVYDGR

SEQ ID NO: 37100 - protein, 9 aa, Homo sapiens
  Table A; Target 37100; HLA-C*07:06; MAGEA1; ENSG00000198681; CTA
SVMEVYDGR

SEQ ID NO: 37101 - protein, 8 aa, Homo sapiens
  Table A; Target 37101; HLA-A*23:01; MAGEA1; ENSG00000198681; CTA
SYVKVLEY

SEQ ID NO: 37102 - protein, 8 aa, Homo sapiens
  Table A; Target 37102; HLA-A*24:02; MAGEA1; ENSG00000198681; CTA
SYVKVLEY

SEQ ID NO: 37103 - protein, 8 aa, Homo sapiens
  Table A; Target 37103; HLA-A*29:02; MAGEA1; ENSG00000198681; CTA
SYVKVLEY

SEQ ID NO: 37104 - protein, 8 aa, Homo sapiens
  Table A; Target 37104; HLA-A*30:02; MAGEA1; ENSG00000198681; CTA
SYVKVLEY

SEQ ID NO: 37105 - protein, 8 aa, Homo sapiens
  Table A; Target 37105; HLA-B*15:01; MAGEA1; ENSG00000198681; CTA
SYVKVLEY

SEQ ID NO: 37106 - protein, 8 aa, Homo sapiens
  Table A; Target 37106; HLA-B*15:03; MAGEA1; ENSG00000198681; CTA
SYVKVLEY

SEQ ID NO: 37107 - protein, 8 aa, Homo sapiens
  Table A; Target 37107; HLA-B*18:01; MAGEA1; ENSG00000198681; CTA
SYVKVLEY

SEQ ID NO: 37108 - protein, 8 aa, Homo sapiens
  Table A; Target 37108; HLA-B*46:01; MAGEA1; ENSG00000198681; CTA
SYVKVLEY

SEQ ID NO: 37109 - protein, 8 aa, Homo sapiens
  Table A; Target 37109; HLA-C*07:01; MAGEA1; ENSG00000198681; CTA
SYVKVLEY

SEQ ID NO: 37110 - protein, 8 aa, Homo sapiens
  Table A; Target 37110; HLA-C*14:02; MAGEA1; ENSG00000198681; CTA
SYVKVLEY

SEQ ID NO: 37111 - protein, 9 aa, Homo sapiens
  Table A; Target 37111; HLA-A*24:02; MAGEA1; ENSG00000198681; CTA
SYVKVLEYV

SEQ ID NO: 37112 - protein, 10 aa, Homo sapiens
  Table A; Target 37112; HLA-A*23:01; MAGEA1; ENSG00000198681; CTA
SYVKVLEYVI

SEQ ID NO: 37113 - protein, 10 aa, Homo sapiens
  Table A; Target 37113; HLA-A*24:02; MAGEA1; ENSG00000198681; CTA
SYVKVLEYVI

SEQ ID NO: 37114 - protein, 8 aa, Homo sapiens
  Table A; Target 37114; HLA-A*23:01; MAGEA1; ENSG00000198681; CTA
SYVLVTCL

SEQ ID NO: 37115 - protein, 8 aa, Homo sapiens
  Table A; Target 37115; HLA-A*24:02; MAGEA1; ENSG00000198681; CTA
SYVLVTCL

SEQ ID NO: 37116 - protein, 8 aa, Homo sapiens
  Table A; Target 37116; HLA-C*14:02; MAGEA1; ENSG00000198681; CTA
SYVLVTCL

SEQ ID NO: 37117 - protein, 9 aa, Homo sapiens
  Table A; Target 37117; HLA-A*68:02; MAGEA1; ENSG00000198681; CTA
TGFLIIVLV

SEQ ID NO: 37118 - protein, 9 aa, Homo sapiens
  Table A; Target 37118; HLA-B*51:01; MAGEA1; ENSG00000198681; CTA
TGFLIIVLV

SEQ ID NO: 37119 - protein, 9 aa, Homo sapiens
  Table A; Target 37119; HLA-C*16:01; MAGEA1; ENSG00000198681; CTA
TQDLVQEKY

SEQ ID NO: 37120 - protein, 8 aa, Homo sapiens
  Table A; Target 37120; HLA-C*06:02; MAGEA1; ENSG00000198681; CTA
TSSSSPLV

SEQ ID NO: 37121 - protein, 9 aa, Homo sapiens
  Table A; Target 37121; HLA-A*01:01; MAGEA1; ENSG00000198681; CTA
TSSSSPLVL

SEQ ID NO: 37122 - protein, 9 aa, Homo sapiens
  Table A; Target 37122; HLA-A*23:01; MAGEA1; ENSG00000198681; CTA
TSSSSPLVL

SEQ ID NO: 37123 - protein, 9 aa, Homo sapiens
  Table A; Target 37123; HLA-A*25:01; MAGEA1; ENSG00000198681; CTA
TSSSSPLVL

SEQ ID NO: 37124 - protein, 9 aa, Homo sapiens
  Table A; Target 37124; HLA-A*30:01; MAGEA1; ENSG00000198681; CTA
TSSSSPLVL

SEQ ID NO: 37125 - protein, 9 aa, Homo sapiens
  Table A; Target 37125; HLA-A*68:01; MAGEA1; ENSG00000198681; CTA
TSSSSPLVL

SEQ ID NO: 37126 - protein, 9 aa, Homo sapiens
  Table A; Target 37126; HLA-A*68:02; MAGEA1; ENSG00000198681; CTA
TSSSSPLVL

SEQ ID NO: 37127 - protein, 9 aa, Homo sapiens
  Table A; Target 37127; HLA-B*07:02; MAGEA1; ENSG00000198681; CTA
TSSSSPLVL

SEQ ID NO: 37128 - protein, 9 aa, Homo sapiens
  Table A; Target 37128; HLA-B*13:02; MAGEA1; ENSG00000198681; CTA
TSSSSPLVL

SEQ ID NO: 37129 - protein, 9 aa, Homo sapiens
  Table A; Target 37129; HLA-B*27:05; MAGEA1; ENSG00000198681; CTA
TSSSSPLVL

SEQ ID NO: 37130 - protein, 9 aa, Homo sapiens
  Table A; Target 37130; HLA-B*35:01; MAGEA1; ENSG00000198681; CTA
TSSSSPLVL

SEQ ID NO: 37131 - protein, 9 aa, Homo sapiens
  Table A; Target 37131; HLA-B*35:03; MAGEA1; ENSG00000198681; CTA
TSSSSPLVL

SEQ ID NO: 37132 - protein, 9 aa, Homo sapiens
  Table A; Target 37132; HLA-B*38:01; MAGEA1; ENSG00000198681; CTA
TSSSSPLVL

SEQ ID NO: 37133 - protein, 9 aa, Homo sapiens
  Table A; Target 37133; HLA-B*39:01; MAGEA1; ENSG00000198681; CTA
TSSSSPLVL

SEQ ID NO: 37134 - protein, 9 aa, Homo sapiens
  Table A; Target 37134; HLA-B*40:01; MAGEA1; ENSG00000198681; CTA
TSSSSPLVL

SEQ ID NO: 37135 - protein, 9 aa, Homo sapiens
  Table A; Target 37135; HLA-B*58:01; MAGEA1; ENSG00000198681; CTA
TSSSSPLVL

SEQ ID NO: 37136 - protein, 9 aa, Homo sapiens
  Table A; Target 37136; HLA-C*01:02; MAGEA1; ENSG00000198681; CTA
TSSSSPLVL

SEQ ID NO: 37137 - protein, 9 aa, Homo sapiens
  Table A; Target 37137; HLA-C*02:02; MAGEA1; ENSG00000198681; CTA
TSSSSPLVL

SEQ ID NO: 37138 - protein, 9 aa, Homo sapiens
  Table A; Target 37138; HLA-C*03:03; MAGEA1; ENSG00000198681; CTA
TSSSSPLVL

SEQ ID NO: 37139 - protein, 9 aa, Homo sapiens
  Table A; Target 37139; HLA-C*03:04; MAGEA1; ENSG00000198681; CTA
TSSSSPLVL

SEQ ID NO: 37140 - protein, 9 aa, Homo sapiens
  Table A; Target 37140; HLA-C*04:01; MAGEA1; ENSG00000198681; CTA
TSSSSPLVL

SEQ ID NO: 37141 - protein, 9 aa, Homo sapiens
  Table A; Target 37141; HLA-C*05:01; MAGEA1; ENSG00000198681; CTA
TSSSSPLVL

SEQ ID NO: 37142 - protein, 9 aa, Homo sapiens
  Table A; Target 37142; HLA-C*06:02; MAGEA1; ENSG00000198681; CTA
TSSSSPLVL

SEQ ID NO: 37143 - protein, 9 aa, Homo sapiens
  Table A; Target 37143; HLA-C*07:04; MAGEA1; ENSG00000198681; CTA
TSSSSPLVL

SEQ ID NO: 37144 - protein, 9 aa, Homo sapiens
  Table A; Target 37144; HLA-C*07:06; MAGEA1; ENSG00000198681; CTA
TSSSSPLVL

SEQ ID NO: 37145 - protein, 9 aa, Homo sapiens
  Table A; Target 37145; HLA-C*12:03; MAGEA1; ENSG00000198681; CTA
TSSSSPLVL

SEQ ID NO: 37146 - protein, 9 aa, Homo sapiens
  Table A; Target 37146; HLA-C*14:02; MAGEA1; ENSG00000198681; CTA
TSSSSPLVL

SEQ ID NO: 37147 - protein, 9 aa, Homo sapiens
  Table A; Target 37147; HLA-C*16:01; MAGEA1; ENSG00000198681; CTA
TSSSSPLVL

SEQ ID NO: 37148 - protein, 9 aa, Homo sapiens
  Table A; Target 37148; HLA-C*16:02; MAGEA1; ENSG00000198681; CTA
TSSSSPLVL

SEQ ID NO: 37149 - protein, 9 aa, Homo sapiens
  Table A; Target 37149; HLA-C*16:04; MAGEA1; ENSG00000198681; CTA
TSSSSPLVL

SEQ ID NO: 37150 - protein, 9 aa, Homo sapiens
  Table A; Target 37150; HLA-A*01:01; MAGEA1; ENSG00000198681; CTA
TSYVKVLEY

SEQ ID NO: 37151 - protein, 9 aa, Homo sapiens
  Table A; Target 37151; HLA-A*03:01; MAGEA1; ENSG00000198681; CTA
TSYVKVLEY

SEQ ID NO: 37152 - protein, 9 aa, Homo sapiens
  Table A; Target 37152; HLA-A*11:01; MAGEA1; ENSG00000198681; CTA
TSYVKVLEY

SEQ ID NO: 37153 - protein, 9 aa, Homo sapiens
  Table A; Target 37153; HLA-A*23:01; MAGEA1; ENSG00000198681; CTA
TSYVKVLEY

SEQ ID NO: 37154 - protein, 9 aa, Homo sapiens
  Table A; Target 37154; HLA-A*25:01; MAGEA1; ENSG00000198681; CTA
TSYVKVLEY

SEQ ID NO: 37155 - protein, 9 aa, Homo sapiens
  Table A; Target 37155; HLA-A*26:01; MAGEA1; ENSG00000198681; CTA
TSYVKVLEY

SEQ ID NO: 37156 - protein, 9 aa, Homo sapiens
  Table A; Target 37156; HLA-A*29:02; MAGEA1; ENSG00000198681; CTA
TSYVKVLEY

SEQ ID NO: 37157 - protein, 9 aa, Homo sapiens
  Table A; Target 37157; HLA-A*30:02; MAGEA1; ENSG00000198681; CTA
TSYVKVLEY

SEQ ID NO: 37158 - protein, 9 aa, Homo sapiens
  Table A; Target 37158; HLA-A*32:01; MAGEA1; ENSG00000198681; CTA
TSYVKVLEY

SEQ ID NO: 37159 - protein, 9 aa, Homo sapiens
  Table A; Target 37159; HLA-A*33:01; MAGEA1; ENSG00000198681; CTA
TSYVKVLEY

SEQ ID NO: 37160 - protein, 9 aa, Homo sapiens
  Table A; Target 37160; HLA-B*08:01; MAGEA1; ENSG00000198681; CTA
TSYVKVLEY

SEQ ID NO: 37161 - protein, 9 aa, Homo sapiens
  Table A; Target 37161; HLA-B*13:02; MAGEA1; ENSG00000198681; CTA
TSYVKVLEY

SEQ ID NO: 37162 - protein, 9 aa, Homo sapiens
  Table A; Target 37162; HLA-B*15:01; MAGEA1; ENSG00000198681; CTA
TSYVKVLEY

SEQ ID NO: 37163 - protein, 9 aa, Homo sapiens
  Table A; Target 37163; HLA-B*15:03; MAGEA1; ENSG00000198681; CTA
TSYVKVLEY

SEQ ID NO: 37164 - protein, 9 aa, Homo sapiens
  Table A; Target 37164; HLA-B*18:01; MAGEA1; ENSG00000198681; CTA
TSYVKVLEY

SEQ ID NO: 37165 - protein, 9 aa, Homo sapiens
  Table A; Target 37165; HLA-B*27:02; MAGEA1; ENSG00000198681; CTA
TSYVKVLEY

SEQ ID NO: 37166 - protein, 9 aa, Homo sapiens
  Table A; Target 37166; HLA-B*35:01; MAGEA1; ENSG00000198681; CTA
TSYVKVLEY

SEQ ID NO: 37167 - protein, 9 aa, Homo sapiens
  Table A; Target 37167; HLA-B*39:01; MAGEA1; ENSG00000198681; CTA
TSYVKVLEY

SEQ ID NO: 37168 - protein, 9 aa, Homo sapiens
  Table A; Target 37168; HLA-B*44:02; MAGEA1; ENSG00000198681; CTA
TSYVKVLEY

SEQ ID NO: 37169 - protein, 9 aa, Homo sapiens
  Table A; Target 37169; HLA-B*44:03; MAGEA1; ENSG00000198681; CTA
TSYVKVLEY

SEQ ID NO: 37170 - protein, 9 aa, Homo sapiens
  Table A; Target 37170; HLA-B*46:01; MAGEA1; ENSG00000198681; CTA
TSYVKVLEY

SEQ ID NO: 37171 - protein, 9 aa, Homo sapiens
  Table A; Target 37171; HLA-B*51:01; MAGEA1; ENSG00000198681; CTA
TSYVKVLEY

SEQ ID NO: 37172 - protein, 9 aa, Homo sapiens
  Table A; Target 37172; HLA-B*57:01; MAGEA1; ENSG00000198681; CTA
TSYVKVLEY

SEQ ID NO: 37173 - protein, 9 aa, Homo sapiens
  Table A; Target 37173; HLA-B*58:01; MAGEA1; ENSG00000198681; CTA
TSYVKVLEY

SEQ ID NO: 37174 - protein, 9 aa, Homo sapiens
  Table A; Target 37174; HLA-C*01:02; MAGEA1; ENSG00000198681; CTA
TSYVKVLEY

SEQ ID NO: 37175 - protein, 9 aa, Homo sapiens
  Table A; Target 37175; HLA-C*02:02; MAGEA1; ENSG00000198681; CTA
TSYVKVLEY

SEQ ID NO: 37176 - protein, 9 aa, Homo sapiens
  Table A; Target 37176; HLA-C*03:03; MAGEA1; ENSG00000198681; CTA
TSYVKVLEY

SEQ ID NO: 37177 - protein, 9 aa, Homo sapiens
  Table A; Target 37177; HLA-C*03:04; MAGEA1; ENSG00000198681; CTA
TSYVKVLEY

SEQ ID NO: 37178 - protein, 9 aa, Homo sapiens
  Table A; Target 37178; HLA-C*07:01; MAGEA1; ENSG00000198681; CTA
TSYVKVLEY

SEQ ID NO: 37179 - protein, 9 aa, Homo sapiens
  Table A; Target 37179; HLA-C*07:04; MAGEA1; ENSG00000198681; CTA
TSYVKVLEY

SEQ ID NO: 37180 - protein, 9 aa, Homo sapiens
  Table A; Target 37180; HLA-C*07:06; MAGEA1; ENSG00000198681; CTA
TSYVKVLEY

SEQ ID NO: 37181 - protein, 9 aa, Homo sapiens
  Table A; Target 37181; HLA-C*12:03; MAGEA1; ENSG00000198681; CTA
TSYVKVLEY

SEQ ID NO: 37182 - protein, 9 aa, Homo sapiens
  Table A; Target 37182; HLA-C*14:02; MAGEA1; ENSG00000198681; CTA
TSYVKVLEY

SEQ ID NO: 37183 - protein, 9 aa, Homo sapiens
  Table A; Target 37183; HLA-C*16:01; MAGEA1; ENSG00000198681; CTA
TSYVKVLEY

SEQ ID NO: 37184 - protein, 9 aa, Homo sapiens
  Table A; Target 37184; HLA-C*16:02; MAGEA1; ENSG00000198681; CTA
TSYVKVLEY

SEQ ID NO: 37185 - protein, 9 aa, Homo sapiens
  Table A; Target 37185; HLA-C*16:04; MAGEA1; ENSG00000198681; CTA
TSYVKVLEY

SEQ ID NO: 37186 - protein, 10 aa, Homo sapiens
  Table A; Target 37186; HLA-A*68:02; MAGEA1; ENSG00000198681; CTA
TSYVKVLEYV

SEQ ID NO: 37187 - protein, 9 aa, Homo sapiens
  Table A; Target 37187; HLA-A*11:01; MAGEA1; ENSG00000198681; CTA
TTINFTRQR

SEQ ID NO: 37188 - protein, 9 aa, Homo sapiens
  Table A; Target 37188; HLA-A*31:01; MAGEA1; ENSG00000198681; CTA
TTINFTRQR

SEQ ID NO: 37189 - protein, 9 aa, Homo sapiens
  Table A; Target 37189; HLA-A*33:01; MAGEA1; ENSG00000198681; CTA
TTINFTRQR

SEQ ID NO: 37190 - protein, 9 aa, Homo sapiens
  Table A; Target 37190; HLA-A*33:03; MAGEA1; ENSG00000198681; CTA
TTINFTRQR

SEQ ID NO: 37191 - protein, 9 aa, Homo sapiens
  Table A; Target 37191; HLA-A*68:01; MAGEA1; ENSG00000198681; CTA
TTINFTRQR

SEQ ID NO: 37192 - protein, 9 aa, Homo sapiens
  Table A; Target 37192; HLA-C*07:06; MAGEA1; ENSG00000198681; CTA
TTINFTRQR

SEQ ID NO: 37193 - protein, 8 aa, Homo sapiens
  Table A; Target 37193; HLA-C*04:01; MAGEA1; ENSG00000198681; CTA
VADLVGFL

SEQ ID NO: 37194 - protein, 8 aa, Homo sapiens
  Table A; Target 37194; HLA-C*05:01; MAGEA1; ENSG00000198681; CTA
VADLVGFL

SEQ ID NO: 37195 - protein, 9 aa, Homo sapiens
  Table A; Target 37195; HLA-A*01:01; MAGEA1; ENSG00000198681; CTA
VADLVGFLL

SEQ ID NO: 37196 - protein, 9 aa, Homo sapiens
  Table A; Target 37196; HLA-A*02:07; MAGEA1; ENSG00000198681; CTA
VADLVGFLL

SEQ ID NO: 37197 - protein, 9 aa, Homo sapiens
  Table A; Target 37197; HLA-B*38:01; MAGEA1; ENSG00000198681; CTA
VADLVGFLL

SEQ ID NO: 37198 - protein, 9 aa, Homo sapiens
  Table A; Target 37198; HLA-C*03:03; MAGEA1; ENSG00000198681; CTA
VADLVGFLL

SEQ ID NO: 37199 - protein, 9 aa, Homo sapiens
  Table A; Target 37199; HLA-C*03:04; MAGEA1; ENSG00000198681; CTA
VADLVGFLL

SEQ ID NO: 37200 - protein, 9 aa, Homo sapiens
  Table A; Target 37200; HLA-C*04:01; MAGEA1; ENSG00000198681; CTA
VADLVGFLL

SEQ ID NO: 37201 - protein, 9 aa, Homo sapiens
  Table A; Target 37201; HLA-C*05:01; MAGEA1; ENSG00000198681; CTA
VADLVGFLL

SEQ ID NO: 37202 - protein, 10 aa, Homo sapiens
  Table A; Target 37202; HLA-A*01:01; MAGEA1; ENSG00000198681; CTA
VADLVGFLLL

SEQ ID NO: 37203 - protein, 10 aa, Homo sapiens
  Table A; Target 37203; HLA-A*02:07; MAGEA1; ENSG00000198681; CTA
VADLVGFLLL

SEQ ID NO: 37204 - protein, 10 aa, Homo sapiens
  Table A; Target 37204; HLA-C*03:04; MAGEA1; ENSG00000198681; CTA
VADLVGFLLL

SEQ ID NO: 37205 - protein, 10 aa, Homo sapiens
  Table A; Target 37205; HLA-C*05:01; MAGEA1; ENSG00000198681; CTA
VADLVGFLLL

SEQ ID NO: 37206 - protein, 8 aa, Homo sapiens
  Table A; Target 37206; HLA-C*07:01; MAGEA1; ENSG00000198681; CTA
VGFLLLKY

SEQ ID NO: 37207 - protein, 8 aa, Homo sapiens
  Table A; Target 37207; HLA-C*12:03; MAGEA1; ENSG00000198681; CTA
VGFLLLKY

SEQ ID NO: 37208 - protein, 8 aa, Homo sapiens
  Table A; Target 37208; HLA-B*08:01; MAGEA1; ENSG00000198681; CTA
VIKVSARV

SEQ ID NO: 37209 - protein, 9 aa, Homo sapiens
  Table A; Target 37209; HLA-B*08:01; MAGEA1; ENSG00000198681; CTA
VITKKVADL

SEQ ID NO: 37210 - protein, 11 aa, Homo sapiens
  Table A; Target 37210; HLA-B*15:03; MAGEA1; ENSG00000198681; CTA
VKEADPTGHSY

SEQ ID NO: 37211 - protein, 8 aa, Homo sapiens
  Table A; Target 37211; HLA-A*02:01; MAGEA1; ENSG00000198681; CTA
VLGTLEEV

SEQ ID NO: 37212 - protein, 8 aa, Homo sapiens
  Table A; Target 37212; HLA-A*02:03; MAGEA1; ENSG00000198681; CTA
VLGTLEEV

SEQ ID NO: 37213 - protein, 10 aa, Homo sapiens
  Table A; Target 37213; HLA-A*29:02; MAGEA1; ENSG00000198681; CTA
VLVTCLGLSY

SEQ ID NO: 37214 - protein, 9 aa, Homo sapiens
  Table A; Target 37214; HLA-A*01:01; MAGEA1; ENSG00000198681; CTA
VPDSDPARY

SEQ ID NO: 37215 - protein, 9 aa, Homo sapiens
  Table A; Target 37215; HLA-A*30:02; MAGEA1; ENSG00000198681; CTA
VPDSDPARY

SEQ ID NO: 37216 - protein, 9 aa, Homo sapiens
  Table A; Target 37216; HLA-B*35:01; MAGEA1; ENSG00000198681; CTA
VPDSDPARY

SEQ ID NO: 37217 - protein, 9 aa, Homo sapiens
  Table A; Target 37217; HLA-B*35:03; MAGEA1; ENSG00000198681; CTA
VPDSDPARY

SEQ ID NO: 37218 - protein, 9 aa, Homo sapiens
  Table A; Target 37218; HLA-C*03:03; MAGEA1; ENSG00000198681; CTA
VPDSDPARY

SEQ ID NO: 37219 - protein, 9 aa, Homo sapiens
  Table A; Target 37219; HLA-C*05:01; MAGEA1; ENSG00000198681; CTA
VPDSDPARY

SEQ ID NO: 37220 - protein, 9 aa, Homo sapiens
  Table A; Target 37220; HLA-C*16:02; MAGEA1; ENSG00000198681; CTA
VPDSDPARY

SEQ ID NO: 37221 - protein, 11 aa, Homo sapiens
  Table A; Target 37221; HLA-A*24:02; MAGEA1; ENSG00000198681; CTA
VPDSDPARYEF

SEQ ID NO: 37222 - protein, 11 aa, Homo sapiens
  Table A; Target 37222; HLA-B*07:02; MAGEA1; ENSG00000198681; CTA
VPDSDPARYEF

SEQ ID NO: 37223 - protein, 11 aa, Homo sapiens
  Table A; Target 37223; HLA-B*35:03; MAGEA1; ENSG00000198681; CTA
VPDSDPARYEF

SEQ ID NO: 37224 - protein, 11 aa, Homo sapiens
  Table A; Target 37224; HLA-C*03:03; MAGEA1; ENSG00000198681; CTA
VPDSDPARYEF

SEQ ID NO: 37225 - protein, 11 aa, Homo sapiens
  Table A; Target 37225; HLA-C*04:01; MAGEA1; ENSG00000198681; CTA
VPDSDPARYEF

SEQ ID NO: 37226 - protein, 11 aa, Homo sapiens
  Table A; Target 37226; HLA-C*05:01; MAGEA1; ENSG00000198681; CTA
VPDSDPARYEF

SEQ ID NO: 37227 - protein, 11 aa, Homo sapiens
  Table A; Target 37227; HLA-C*07:02; MAGEA1; ENSG00000198681; CTA
VPDSDPARYEF

SEQ ID NO: 37228 - protein, 11 aa, Homo sapiens
  Table A; Target 37228; HLA-B*27:05; MAGEA1; ENSG00000198681; CTA
VQAATSSSSPL

SEQ ID NO: 37229 - protein, 11 aa, Homo sapiens
  Table A; Target 37229; HLA-C*07:02; MAGEA1; ENSG00000198681; CTA
VQAATSSSSPL

SEQ ID NO: 37230 - protein, 11 aa, Homo sapiens
  Table A; Target 37230; HLA-C*07:04; MAGEA1; ENSG00000198681; CTA
VQAATSSSSPL

SEQ ID NO: 37231 - protein, 8 aa, Homo sapiens
  Table A; Target 37231; HLA-C*07:04; MAGEA1; ENSG00000198681; CTA
VQEKYLEY

SEQ ID NO: 37232 - protein, 8 aa, Homo sapiens
  Table A; Target 37232; HLA-C*16:02; MAGEA1; ENSG00000198681; CTA
VQEKYLEY

SEQ ID NO: 37233 - protein, 9 aa, Homo sapiens
  Table A; Target 37233; HLA-B*57:01; MAGEA1; ENSG00000198681; CTA
VSARVRFFF

SEQ ID NO: 37234 - protein, 9 aa, Homo sapiens
  Table A; Target 37234; HLA-C*04:01; MAGEA1; ENSG00000198681; CTA
VYDGREHSA

SEQ ID NO: 37235 - protein, 10 aa, Homo sapiens
  Table A; Target 37235; HLA-A*01:01; MAGEA1; ENSG00000198681; CTA
VYDGREHSAY

SEQ ID NO: 37236 - protein, 10 aa, Homo sapiens
  Table A; Target 37236; HLA-A*29:02; MAGEA1; ENSG00000198681; CTA
VYDGREHSAY

SEQ ID NO: 37237 - protein, 10 aa, Homo sapiens
  Table A; Target 37237; HLA-A*30:02; MAGEA1; ENSG00000198681; CTA
VYDGREHSAY

SEQ ID NO: 37238 - protein, 10 aa, Homo sapiens
  Table A; Target 37238; HLA-C*04:01; MAGEA1; ENSG00000198681; CTA
VYDGREHSAY

SEQ ID NO: 37239 - protein, 10 aa, Homo sapiens
  Table A; Target 37239; HLA-C*07:01; MAGEA1; ENSG00000198681; CTA
VYDGREHSAY

SEQ ID NO: 37240 - protein, 10 aa, Homo sapiens
  Table A; Target 37240; HLA-C*14:02; MAGEA1; ENSG00000198681; CTA
VYDGREHSAY

SEQ ID NO: 37241 - protein, 9 aa, Homo sapiens
  Table A; Target 37241; HLA-B*49:01; MAGEA1; ENSG00000198681; CTA
WEELSVMEV

SEQ ID NO: 37242 - protein, 9 aa, Homo sapiens
  Table A; Target 37242; HLA-A*01:01; MAGEA1; ENSG00000198681; CTA
YDGREHSAY

SEQ ID NO: 37243 - protein, 9 aa, Homo sapiens
  Table A; Target 37243; HLA-A*29:02; MAGEA1; ENSG00000198681; CTA
YDGREHSAY

SEQ ID NO: 37244 - protein, 9 aa, Homo sapiens
  Table A; Target 37244; HLA-C*07:01; MAGEA1; ENSG00000198681; CTA
YDGREHSAY

SEQ ID NO: 37245 - protein, 8 aa, Homo sapiens
  Table A; Target 37245; HLA-A*26:01; MAGEA1; ENSG00000198681; CTA
YVIKVSAR

SEQ ID NO: 37246 - protein, 8 aa, Homo sapiens
  Table A; Target 37246; HLA-A*31:01; MAGEA1; ENSG00000198681; CTA
YVIKVSAR

SEQ ID NO: 37247 - protein, 8 aa, Homo sapiens
  Table A; Target 37247; HLA-A*33:03; MAGEA1; ENSG00000198681; CTA
YVIKVSAR

SEQ ID NO: 37248 - protein, 8 aa, Homo sapiens
  Table A; Target 37248; HLA-A*68:01; MAGEA1; ENSG00000198681; CTA
YVIKVSAR

SEQ ID NO: 37249 - protein, 8 aa, Homo sapiens
  Table A; Target 37249; HLA-B*08:01; MAGEA1; ENSG00000198681; CTA
YVIKVSAR

SEQ ID NO: 37250 - protein, 8 aa, Homo sapiens
  Table A; Target 37250; HLA-B*18:01; MAGEA1; ENSG00000198681; CTA
YVIKVSAR

SEQ ID NO: 37251 - protein, 8 aa, Homo sapiens
  Table A; Target 37251; HLA-B*40:02; MAGEA1; ENSG00000198681; CTA
YVIKVSAR

SEQ ID NO: 37252 - protein, 8 aa, Homo sapiens
  Table A; Target 37252; HLA-C*04:01; MAGEA1; ENSG00000198681; CTA
YVIKVSAR

SEQ ID NO: 37253 - protein, 9 aa, Homo sapiens
  Table A; Target 37253; HLA-A*02:01; MAGEA1; ENSG00000198681; CTA
YVIKVSARV

SEQ ID NO: 37254 - protein, 9 aa, Homo sapiens
  Table A; Target 37254; HLA-A*02:03; MAGEA1; ENSG00000198681; CTA
YVIKVSARV

SEQ ID NO: 37255 - protein, 9 aa, Homo sapiens
  Table A; Target 37255; HLA-A*02:04; MAGEA1; ENSG00000198681; CTA
YVIKVSARV

SEQ ID NO: 37256 - protein, 9 aa, Homo sapiens
  Table A; Target 37256; HLA-A*02:07; MAGEA1; ENSG00000198681; CTA
YVIKVSARV

SEQ ID NO: 37257 - protein, 9 aa, Homo sapiens
  Table A; Target 37257; HLA-B*13:02; MAGEA1; ENSG00000198681; CTA
YVIKVSARV

SEQ ID NO: 37258 - protein, 9 aa, Homo sapiens
  Table A; Target 37258; HLA-B*27:05; MAGEA1; ENSG00000198681; CTA
YVIKVSARV

SEQ ID NO: 37259 - protein, 9 aa, Homo sapiens
  Table A; Target 37259; HLA-A*02:04; MAGEA1; ENSG00000198681; CTA
YVKVLEYVI

SEQ ID NO: 37260 - protein, 9 aa, Homo sapiens
  Table A; Target 37260; HLA-A*24:02; MAGEA1; ENSG00000198681; CTA
YVKVLEYVI

SEQ ID NO: 37261 - protein, 9 aa, Homo sapiens
  Table A; Target 37261; HLA-A*68:02; MAGEA1; ENSG00000198681; CTA
YVKVLEYVI

SEQ ID NO: 37262 - protein, 9 aa, Homo sapiens
  Table A; Target 37262; HLA-B*08:01; MAGEA1; ENSG00000198681; CTA
YVKVLEYVI

SEQ ID NO: 37263 - protein, 9 aa, Homo sapiens
  Table A; Target 37263; HLA-B*13:02; MAGEA1; ENSG00000198681; CTA
YVKVLEYVI

SEQ ID NO: 37264 - protein, 9 aa, Homo sapiens
  Table A; Target 37264; HLA-B*40:02; MAGEA1; ENSG00000198681; CTA
YVKVLEYVI

SEQ ID NO: 37265 - protein, 9 aa, Homo sapiens
  Table A; Target 37265; HLA-B*51:01; MAGEA1; ENSG00000198681; CTA
YVKVLEYVI

SEQ ID NO: 37266 - protein, 9 aa, Homo sapiens
  Table A; Target 37266; HLA-B*57:01; MAGEA1; ENSG00000198681; CTA
YVKVLEYVI

SEQ ID NO: 37267 - protein, 9 aa, Homo sapiens
  Table A; Target 37267; HLA-B*27:05; MAGEA1,MAGEA10; ENSG00000198681,ENSG00000124260; CTA,CTA
LVFGIDVKE

SEQ ID NO: 37268 - protein, 9 aa, Homo sapiens
  Table A; Target 37268; HLA-A*02:04; MAGEA1,MAGEA11,MAGEA3,MAGEA6; ENSG00000198681,ENSG00000185247,ENSG00000221867,ENSG00000197172; CTA,TAA,CTA,CTA
YEFLWGPRA

SEQ ID NO: 37269 - protein, 10 aa, Homo sapiens
  Table A; Target 37269; HLA-B*27:02; MAGEA1,MAGEA3,MAGEA6; ENSG00000198681,ENSG00000221867,ENSG00000197172; CTA,CTA,CTA
AREPVTKAEM

SEQ ID NO: 37270 - protein, 10 aa, Homo sapiens
  Table A; Target 37270; HLA-B*27:05; MAGEA1,MAGEA3,MAGEA6; ENSG00000198681,ENSG00000221867,ENSG00000197172; CTA,CTA,CTA
AREPVTKAEM

SEQ ID NO: 37271 - protein, 10 aa, Homo sapiens
  Table A; Target 37271; HLA-B*38:01; MAGEA1,MAGEA3,MAGEA6; ENSG00000198681,ENSG00000221867,ENSG00000197172; CTA,CTA,CTA
AREPVTKAEM

SEQ ID NO: 37272 - protein, 10 aa, Homo sapiens
  Table A; Target 37272; HLA-C*16:04; MAGEA1,MAGEA3,MAGEA6; ENSG00000198681,ENSG00000221867,ENSG00000197172; CTA,CTA,CTA
AREPVTKAEM

SEQ ID NO: 37273 - protein, 9 aa, Homo sapiens
  Table A; Target 37273; HLA-B*38:01; MAGEA1,MAGEA3,MAGEA6; ENSG00000198681,ENSG00000221867,ENSG00000197172; CTA,CTA,CTA
DGLLGDNQI

SEQ ID NO: 37274 - protein, 9 aa, Homo sapiens
  Table A; Target 37274; HLA-B*51:01; MAGEA1,MAGEA3,MAGEA6; ENSG00000198681,ENSG00000221867,ENSG00000197172; CTA,CTA,CTA
DGLLGDNQI

SEQ ID NO: 37275 - protein, 8 aa, Homo sapiens
  Table A; Target 37275; HLA-B*51:01; MAGEA1,MAGEA3,MAGEA6; ENSG00000198681,ENSG00000221867,ENSG00000197172; CTA,CTA,CTA
DPPQSPQG

SEQ ID NO: 37276 - protein, 8 aa, Homo sapiens
  Table A; Target 37276; HLA-B*07:02; MAGEA1,MAGEA3,MAGEA6; ENSG00000198681,ENSG00000221867,ENSG00000197172; CTA,CTA,CTA
EPVTKAEM

SEQ ID NO: 37277 - protein, 8 aa, Homo sapiens
  Table A; Target 37277; HLA-B*35:01; MAGEA1,MAGEA3,MAGEA6; ENSG00000198681,ENSG00000221867,ENSG00000197172; CTA,CTA,CTA
EPVTKAEM

SEQ ID NO: 37278 - protein, 8 aa, Homo sapiens
  Table A; Target 37278; HLA-B*55:01; MAGEA1,MAGEA3,MAGEA6; ENSG00000198681,ENSG00000221867,ENSG00000197172; CTA,CTA,CTA
EPVTKAEM

SEQ ID NO: 37279 - protein, 8 aa, Homo sapiens
  Table A; Target 37279; HLA-A*11:01; MAGEA1,MAGEA3,MAGEA6; ENSG00000198681,ENSG00000221867,ENSG00000197172; CTA,CTA,CTA
GDNQIMPK

SEQ ID NO: 37280 - protein, 8 aa, Homo sapiens
  Table A; Target 37280; HLA-B*27:02; MAGEA1,MAGEA3,MAGEA6; ENSG00000198681,ENSG00000221867,ENSG00000197172; CTA,CTA,CTA
GDNQIMPK

SEQ ID NO: 37281 - protein, 11 aa, Homo sapiens
  Table A; Target 37281; HLA-A*02:01; MAGEA1,MAGEA3,MAGEA6; ENSG00000198681,ENSG00000221867,ENSG00000197172; CTA,CTA,CTA
GLLGDNQIMPK

SEQ ID NO: 37282 - protein, 11 aa, Homo sapiens
  Table A; Target 37282; HLA-A*03:01; MAGEA1,MAGEA3,MAGEA6; ENSG00000198681,ENSG00000221867,ENSG00000197172; CTA,CTA,CTA
GLLGDNQIMPK

SEQ ID NO: 37283 - protein, 11 aa, Homo sapiens
  Table A; Target 37283; HLA-A*03:02; MAGEA1,MAGEA3,MAGEA6; ENSG00000198681,ENSG00000221867,ENSG00000197172; CTA,CTA,CTA
GLLGDNQIMPK

SEQ ID NO: 37284 - protein, 11 aa, Homo sapiens
  Table A; Target 37284; HLA-A*11:01; MAGEA1,MAGEA3,MAGEA6; ENSG00000198681,ENSG00000221867,ENSG00000197172; CTA,CTA,CTA
GLLGDNQIMPK

SEQ ID NO: 37285 - protein, 11 aa, Homo sapiens
  Table A; Target 37285; HLA-A*31:01; MAGEA1,MAGEA3,MAGEA6; ENSG00000198681,ENSG00000221867,ENSG00000197172; CTA,CTA,CTA
GLLGDNQIMPK

SEQ ID NO: 37286 - protein, 11 aa, Homo sapiens
  Table A; Target 37286; HLA-B*27:02; MAGEA1,MAGEA3,MAGEA6; ENSG00000198681,ENSG00000221867,ENSG00000197172; CTA,CTA,CTA
GLLGDNQIMPK

SEQ ID NO: 37287 - protein, 11 aa, Homo sapiens
  Table A; Target 37287; HLA-B*27:05; MAGEA1,MAGEA3,MAGEA6; ENSG00000198681,ENSG00000221867,ENSG00000197172; CTA,CTA,CTA
GLLGDNQIMPK

SEQ ID NO: 37288 - protein, 11 aa, Homo sapiens
  Table A; Target 37288; HLA-C*04:01; MAGEA1,MAGEA3,MAGEA6; ENSG00000198681,ENSG00000221867,ENSG00000197172; CTA,CTA,CTA
GLLGDNQIMPK

SEQ ID NO: 37289 - protein, 9 aa, Homo sapiens
  Table A; Target 37289; HLA-A*03:01; MAGEA1,MAGEA3,MAGEA6; ENSG00000198681,ENSG00000221867,ENSG00000197172; CTA,CTA,CTA
LGDNQIMPK

SEQ ID NO: 37290 - protein, 9 aa, Homo sapiens
  Table A; Target 37290; HLA-A*03:02; MAGEA1,MAGEA3,MAGEA6; ENSG00000198681,ENSG00000221867,ENSG00000197172; CTA,CTA,CTA
LGDNQIMPK

SEQ ID NO: 37291 - protein, 9 aa, Homo sapiens
  Table A; Target 37291; HLA-A*11:01; MAGEA1,MAGEA3,MAGEA6; ENSG00000198681,ENSG00000221867,ENSG00000197172; CTA,CTA,CTA
LGDNQIMPK

SEQ ID NO: 37292 - protein, 9 aa, Homo sapiens
  Table A; Target 37292; HLA-B*27:02; MAGEA1,MAGEA3,MAGEA6; ENSG00000198681,ENSG00000221867,ENSG00000197172; CTA,CTA,CTA
LGDNQIMPK

SEQ ID NO: 37293 - protein, 10 aa, Homo sapiens
  Table A; Target 37293; HLA-A*03:01; MAGEA1,MAGEA3,MAGEA6; ENSG00000198681,ENSG00000221867,ENSG00000197172; CTA,CTA,CTA
LLGDNQIMPK

SEQ ID NO: 37294 - protein, 10 aa, Homo sapiens
  Table A; Target 37294; HLA-A*03:02; MAGEA1,MAGEA3,MAGEA6; ENSG00000198681,ENSG00000221867,ENSG00000197172; CTA,CTA,CTA
LLGDNQIMPK

SEQ ID NO: 37295 - protein, 10 aa, Homo sapiens
  Table A; Target 37295; HLA-A*11:01; MAGEA1,MAGEA3,MAGEA6; ENSG00000198681,ENSG00000221867,ENSG00000197172; CTA,CTA,CTA
LLGDNQIMPK

SEQ ID NO: 37296 - protein, 10 aa, Homo sapiens
  Table A; Target 37296; HLA-B*27:02; MAGEA1,MAGEA3,MAGEA6; ENSG00000198681,ENSG00000221867,ENSG00000197172; CTA,CTA,CTA
LLGDNQIMPK

SEQ ID NO: 37297 - protein, 8 aa, Homo sapiens
  Table A; Target 37297; HLA-A*03:01; MAGEA1,MAGEA3,MAGEA6; ENSG00000198681,ENSG00000221867,ENSG00000197172; CTA,CTA,CTA
RAREPVTK

SEQ ID NO: 37298 - protein, 8 aa, Homo sapiens
  Table A; Target 37298; HLA-B*57:01; MAGEA1,MAGEA3,MAGEA6; ENSG00000198681,ENSG00000221867,ENSG00000197172; CTA,CTA,CTA
RAREPVTK

SEQ ID NO: 37299 - protein, 9 aa, Homo sapiens
  Table A; Target 37299; HLA-A*32:01; MAGEA1,MAGEA3,MAGEA6; ENSG00000198681,ENSG00000221867,ENSG00000197172; CTA,CTA,CTA
RAREPVTKA

SEQ ID NO: 37300 - protein, 9 aa, Homo sapiens
  Table A; Target 37300; HLA-B*07:02; MAGEA1,MAGEA3,MAGEA6; ENSG00000198681,ENSG00000221867,ENSG00000197172; CTA,CTA,CTA
RAREPVTKA

SEQ ID NO: 37301 - protein, 9 aa, Homo sapiens
  Table A; Target 37301; HLA-B*54:01; MAGEA1,MAGEA3,MAGEA6; ENSG00000198681,ENSG00000221867,ENSG00000197172; CTA,CTA,CTA
RAREPVTKA

SEQ ID NO: 37302 - protein, 9 aa, Homo sapiens
  Table A; Target 37302; HLA-B*56:01; MAGEA1,MAGEA3,MAGEA6; ENSG00000198681,ENSG00000221867,ENSG00000197172; CTA,CTA,CTA
RAREPVTKA

SEQ ID NO: 37303 - protein, 9 aa, Homo sapiens
  Table A; Target 37303; HLA-A*30:01; MAGEA1,MAGEA3,MAGEA6; ENSG00000198681,ENSG00000221867,ENSG00000197172; CTA,CTA,CTA
REPVTKAEM

SEQ ID NO: 37304 - protein, 9 aa, Homo sapiens
  Table A; Target 37304; HLA-B*37:01; MAGEA1,MAGEA3,MAGEA6; ENSG00000198681,ENSG00000221867,ENSG00000197172; CTA,CTA,CTA
REPVTKAEM

SEQ ID NO: 37305 - protein, 9 aa, Homo sapiens
  Table A; Target 37305; HLA-B*40:01; MAGEA1,MAGEA3,MAGEA6; ENSG00000198681,ENSG00000221867,ENSG00000197172; CTA,CTA,CTA
REPVTKAEM

SEQ ID NO: 37306 - protein, 9 aa, Homo sapiens
  Table A; Target 37306; HLA-B*40:02; MAGEA1,MAGEA3,MAGEA6; ENSG00000198681,ENSG00000221867,ENSG00000197172; CTA,CTA,CTA
REPVTKAEM

SEQ ID NO: 37307 - protein, 9 aa, Homo sapiens
  Table A; Target 37307; HLA-B*44:02; MAGEA1,MAGEA3,MAGEA6; ENSG00000198681,ENSG00000221867,ENSG00000197172; CTA,CTA,CTA
REPVTKAEM

SEQ ID NO: 37308 - protein, 9 aa, Homo sapiens
  Table A; Target 37308; HLA-B*44:03; MAGEA1,MAGEA3,MAGEA6; ENSG00000198681,ENSG00000221867,ENSG00000197172; CTA,CTA,CTA
REPVTKAEM

SEQ ID NO: 37309 - protein, 9 aa, Homo sapiens
  Table A; Target 37309; HLA-C*01:02; MAGEA1,MAGEA3,MAGEA6; ENSG00000198681,ENSG00000221867,ENSG00000197172; CTA,CTA,CTA
REPVTKAEM

SEQ ID NO: 37310 - protein, 10 aa, Homo sapiens
  Table A; Target 37310; HLA-A*30:01; MAGEA1,MAGEA3,MAGEA6; ENSG00000198681,ENSG00000221867,ENSG00000197172; CTA,CTA,CTA
REPVTKAEML

SEQ ID NO: 37311 - protein, 10 aa, Homo sapiens
  Table A; Target 37311; HLA-B*40:01; MAGEA1,MAGEA3,MAGEA6; ENSG00000198681,ENSG00000221867,ENSG00000197172; CTA,CTA,CTA
REPVTKAEML

SEQ ID NO: 37312 - protein, 10 aa, Homo sapiens
  Table A; Target 37312; HLA-B*40:02; MAGEA1,MAGEA3,MAGEA6; ENSG00000198681,ENSG00000221867,ENSG00000197172; CTA,CTA,CTA
REPVTKAEML

SEQ ID NO: 37313 - protein, 8 aa, Homo sapiens
  Table A; Target 37313; HLA-A*02:04; MAGEA1,MAGEA3,MAGEA6; ENSG00000198681,ENSG00000221867,ENSG00000197172; CTA,CTA,CTA
SLQLVFGI

SEQ ID NO: 37314 - protein, 8 aa, Homo sapiens
  Table A; Target 37314; HLA-B*37:01; MAGEA1,MAGEA3,MAGEA6; ENSG00000198681,ENSG00000221867,ENSG00000197172; CTA,CTA,CTA
SLQLVFGI

SEQ ID NO: 37315 - protein, 11 aa, Homo sapiens
  Table A; Target 37315; HLA-B*35:03; MAGEA1,MAGEA3,MAGEA6; ENSG00000198681,ENSG00000221867,ENSG00000197172; CTA,CTA,CTA
SYDGLLGDNQI

SEQ ID NO: 37316 - protein, 11 aa, Homo sapiens
  Table A; Target 37316; HLA-B*38:01; MAGEA1,MAGEA3,MAGEA6; ENSG00000198681,ENSG00000221867,ENSG00000197172; CTA,CTA,CTA
SYDGLLGDNQI

SEQ ID NO: 37317 - protein, 11 aa, Homo sapiens
  Table A; Target 37317; HLA-C*04:01; MAGEA1,MAGEA3,MAGEA6; ENSG00000198681,ENSG00000221867,ENSG00000197172; CTA,CTA,CTA
SYDGLLGDNQI

SEQ ID NO: 37318 - protein, 9 aa, Homo sapiens
  Table A; Target 37318; HLA-B*27:02; MAGEA1,MAGEA3,MAGEA6; ENSG00000198681,ENSG00000221867,ENSG00000197172; CTA,CTA,CTA
YRAREPVTK

SEQ ID NO: 37319 - protein, 9 aa, Homo sapiens
  Table A; Target 37319; HLA-B*27:05; MAGEA1,MAGEA3,MAGEA6; ENSG00000198681,ENSG00000221867,ENSG00000197172; CTA,CTA,CTA
YRAREPVTK

SEQ ID NO: 37320 - protein, 9 aa, Homo sapiens
  Table A; Target 37320; HLA-B*39:01; MAGEA1,MAGEA3,MAGEA6; ENSG00000198681,ENSG00000221867,ENSG00000197172; CTA,CTA,CTA
YRAREPVTK

SEQ ID NO: 37321 - protein, 8 aa, Homo sapiens
  Table A; Target 37321; HLA-C*07:02; MAGEA1,MAGEA3,MAGEA6,MAGEA8; ENSG00000198681,ENSG00000221867,ENSG00000197172,ENSG00000156009; CTA,CTA,CTA,TAA
EPVTKAEM

SEQ ID NO: 37322 - protein, 9 aa, Homo sapiens
  Table A; Target 37322; HLA-B*07:02; MAGEA1,MAGEA3,MAGEA6,MAGEA8; ENSG00000198681,ENSG00000221867,ENSG00000197172,ENSG00000156009; CTA,CTA,CTA,TAA
EPVTKAEML

SEQ ID NO: 37323 - protein, 9 aa, Homo sapiens
  Table A; Target 37323; HLA-B*35:01; MAGEA1,MAGEA3,MAGEA6,MAGEA8; ENSG00000198681,ENSG00000221867,ENSG00000197172,ENSG00000156009; CTA,CTA,CTA,TAA
EPVTKAEML

SEQ ID NO: 37324 - protein, 8 aa, Homo sapiens
  Table A; Target 37324; HLA-B*35:03; MAGEA1,MAGEA3,MAGEA6,MAGEA8,MAGEA9; ENSG00000198681,ENSG00000221867,ENSG00000197172, ENSG00000156009,ENSG00000123584; CTA,CTA,CTA,TAA,CTA
EPVTKAEM

SEQ ID NO: 37325 - protein, 9 aa, Homo sapiens
  Table A; Target 37325; HLA-B*08:01; MAGEA1,MAGEA3,MAGEA6,MAGEA8,MAGEA9; ENSG00000198681,ENSG00000221867,ENSG00000197172, ENSG00000156009,ENSG00000123584; CTA,CTA,CTA,TAA,CTA
EPVTKAEML

SEQ ID NO: 37326 - protein, 9 aa, Homo sapiens
  Table A; Target 37326; HLA-C*07:02; MAGEA1,MAGEA3,MAGEA6,MAGEA8,MAGEA9; ENSG00000198681,ENSG00000221867,ENSG00000197172, ENSG00000156009,ENSG00000123584; CTA,CTA,CTA,TAA,CTA
EPVTKAEML

SEQ ID NO: 37327 - protein, 8 aa, Homo sapiens
  Table A; Target 37327; HLA-A*02:04; MAGEA1,MAGEA3,MAGEA8; ENSG00000198681,ENSG00000221867,ENSG00000156009; CTA,CTA,TAA
FLWGPRAL

SEQ ID NO: 37328 - protein, 8 aa, Homo sapiens
  Table A; Target 37328; HLA-B*08:01; MAGEA1,MAGEA4; ENSG00000198681,ENSG00000147381; CTA,TAA
FGKASESL

SEQ ID NO: 37329 - protein, 11 aa, Homo sapiens
  Table A; Target 37329; HLA-A*02:04; MAGEA1,MAGEA6; ENSG00000198681,ENSG00000197172; CTA,CTA
GLLGDNQIMPK

SEQ ID NO: 37330 - protein, 9 aa, Homo sapiens
  Table A; Target 37330; HLA-A*02:07; MAGEA1,MAGEA6; ENSG00000198681,ENSG00000197172; CTA,CTA
IMPKTGFLI

SEQ ID NO: 37331 - protein, 9 aa, Homo sapiens
  Table A; Target 37331; HLA-A*24:02; MAGEA1,MAGEA6; ENSG00000198681,ENSG00000197172; CTA,CTA
IMPKTGFLI

SEQ ID NO: 37332 - protein, 10 aa, Homo sapiens
  Table A; Target 37332; HLA-A*24:02; MAGEA1,MAGEA6; ENSG00000198681,ENSG00000197172; CTA,CTA
IMPKTGFLII

SEQ ID NO: 37333 - protein, 8 aa, Homo sapiens
  Table A; Target 37333; HLA-B*08:01; MAGEA1,MAGEA6; ENSG00000198681,ENSG00000197172; CTA,CTA
MPKTGFLI

SEQ ID NO: 37334 - protein, 8 aa, Homo sapiens
  Table A; Target 37334; HLA-B*51:01; MAGEA1,MAGEA6; ENSG00000198681,ENSG00000197172; CTA,CTA
MPKTGFLI

SEQ ID NO: 37335 - protein, 9 aa, Homo sapiens
  Table A; Target 37335; HLA-B*51:01; MAGEA1,MAGEA6; ENSG00000198681,ENSG00000197172; CTA,CTA
MPKTGFLII

SEQ ID NO: 37336 - protein, 9 aa, Homo sapiens
  Table A; Target 37336; HLA-B*54:01; MAGEA1,MAGEA6; ENSG00000198681,ENSG00000197172; CTA,CTA
MPKTGFLII

SEQ ID NO: 37337 - protein, 9 aa, Homo sapiens
  Table A; Target 37337; HLA-A*25:01; MAGEA1,MAGEA6; ENSG00000198681,ENSG00000197172; CTA,CTA
NQIMPKTGF

SEQ ID NO: 37338 - protein, 9 aa, Homo sapiens
  Table A; Target 37338; HLA-A*26:01; MAGEA1,MAGEA6; ENSG00000198681,ENSG00000197172; CTA,CTA
NQIMPKTGF

SEQ ID NO: 37339 - protein, 9 aa, Homo sapiens
  Table A; Target 37339; HLA-A*32:01; MAGEA1,MAGEA6; ENSG00000198681,ENSG00000197172; CTA,CTA
NQIMPKTGF

SEQ ID NO: 37340 - protein, 9 aa, Homo sapiens
  Table A; Target 37340; HLA-B*15:03; MAGEA1,MAGEA6; ENSG00000198681,ENSG00000197172; CTA,CTA
NQIMPKTGF

SEQ ID NO: 37341 - protein, 9 aa, Homo sapiens
  Table A; Target 37341; HLA-B*18:01; MAGEA1,MAGEA6; ENSG00000198681,ENSG00000197172; CTA,CTA
NQIMPKTGF

SEQ ID NO: 37342 - protein, 9 aa, Homo sapiens
  Table A; Target 37342; HLA-B*37:01; MAGEA1,MAGEA6; ENSG00000198681,ENSG00000197172; CTA,CTA
NQIMPKTGF

SEQ ID NO: 37343 - protein, 9 aa, Homo sapiens
  Table A; Target 37343; HLA-B*38:01; MAGEA1,MAGEA6; ENSG00000198681,ENSG00000197172; CTA,CTA
NQIMPKTGF

SEQ ID NO: 37344 - protein, 9 aa, Homo sapiens
  Table A; Target 37344; HLA-B*44:02; MAGEA1,MAGEA6; ENSG00000198681,ENSG00000197172; CTA,CTA
NQIMPKTGF

SEQ ID NO: 37345 - protein, 9 aa, Homo sapiens
  Table A; Target 37345; HLA-B*44:03; MAGEA1,MAGEA6; ENSG00000198681,ENSG00000197172; CTA,CTA
NQIMPKTGF

SEQ ID NO: 37346 - protein, 9 aa, Homo sapiens
  Table A; Target 37346; HLA-B*46:01; MAGEA1,MAGEA6; ENSG00000198681,ENSG00000197172; CTA,CTA
NQIMPKTGF

SEQ ID NO: 37347 - protein, 9 aa, Homo sapiens
  Table A; Target 37347; HLA-C*07:04; MAGEA1,MAGEA6; ENSG00000198681,ENSG00000197172; CTA,CTA
NQIMPKTGF

SEQ ID NO: 37348 - protein, 9 aa, Homo sapiens
  Table A; Target 37348; HLA-C*14:02; MAGEA1,MAGEA6; ENSG00000198681,ENSG00000197172; CTA,CTA
NQIMPKTGF

SEQ ID NO: 37349 - protein, 9 aa, Homo sapiens
  Table A; Target 37349; HLA-C*16:04; MAGEA1,MAGEA6; ENSG00000198681,ENSG00000197172; CTA,CTA
NQIMPKTGF

SEQ ID NO: 37350 - protein, 8 aa, Homo sapiens
  Table A; Target 37350; HLA-B*08:01; MAGEA1,MAGEA6; ENSG00000198681,ENSG00000197172; CTA,CTA
QIMPKTGF

SEQ ID NO: 37351 - protein, 8 aa, Homo sapiens
  Table A; Target 37351; HLA-B*15:01; MAGEA1,MAGEA6; ENSG00000198681,ENSG00000197172; CTA,CTA
QIMPKTGF

SEQ ID NO: 37352 - protein, 8 aa, Homo sapiens
  Table A; Target 37352; HLA-B*37:01; MAGEA1,MAGEA6; ENSG00000198681,ENSG00000197172; CTA,CTA
QIMPKTGF

SEQ ID NO: 37353 - protein, 8 aa, Homo sapiens
  Table A; Target 37353; HLA-A*30:01; MAGEA1,MAGEA8; ENSG00000198681,ENSG00000156009; CTA,TAA
AEMLESVI

SEQ ID NO: 37354 - protein, 8 aa, Homo sapiens
  Table A; Target 37354; HLA-B*13:02; MAGEA1,MAGEA8; ENSG00000198681,ENSG00000156009; CTA,TAA
AEMLESVI

SEQ ID NO: 37355 - protein, 8 aa, Homo sapiens
  Table A; Target 37355; HLA-B*18:01; MAGEA1,MAGEA8; ENSG00000198681,ENSG00000156009; CTA,TAA
AEMLESVI

SEQ ID NO: 37356 - protein, 8 aa, Homo sapiens
  Table A; Target 37356; HLA-B*40:02; MAGEA1,MAGEA8; ENSG00000198681,ENSG00000156009; CTA,TAA
AEMLESVI

SEQ ID NO: 37357 - protein, 10 aa, Homo sapiens
  Table A; Target 37357; HLA-B*44:03; MAGEA1,MAGEA8; ENSG00000198681,ENSG00000156009; CTA,TAA
AEMLESVIKN

SEQ ID NO: 37358 - protein, 11 aa, Homo sapiens
  Table A; Target 37358; HLA-B*18:01; MAGEA1,MAGEA8; ENSG00000198681,ENSG00000156009; CTA,TAA
AEMLESVIKNY

SEQ ID NO: 37359 - protein, 8 aa, Homo sapiens
  Table A; Target 37359; HLA-A*30:01; MAGEA1,MAGEA8; ENSG00000198681,ENSG00000156009; CTA,TAA
AETSYVKV

SEQ ID NO: 37360 - protein, 8 aa, Homo sapiens
  Table A; Target 37360; HLA-B*37:01; MAGEA1,MAGEA8; ENSG00000198681,ENSG00000156009; CTA,TAA
AETSYVKV

SEQ ID NO: 37361 - protein, 8 aa, Homo sapiens
  Table A; Target 37361; HLA-B*49:01; MAGEA1,MAGEA8; ENSG00000198681,ENSG00000156009; CTA,TAA
AETSYVKV

SEQ ID NO: 37362 - protein, 9 aa, Homo sapiens
  Table A; Target 37362; HLA-B*18:01; MAGEA1,MAGEA8; ENSG00000198681,ENSG00000156009; CTA,TAA
AETSYVKVL

SEQ ID NO: 37363 - protein, 9 aa, Homo sapiens
  Table A; Target 37363; HLA-B*27:02; MAGEA1,MAGEA8; ENSG00000198681,ENSG00000156009; CTA,TAA
AETSYVKVL

SEQ ID NO: 37364 - protein, 9 aa, Homo sapiens
  Table A; Target 37364; HLA-B*27:05; MAGEA1,MAGEA8; ENSG00000198681,ENSG00000156009; CTA,TAA
AETSYVKVL

SEQ ID NO: 37365 - protein, 9 aa, Homo sapiens
  Table A; Target 37365; HLA-B*37:01; MAGEA1,MAGEA8; ENSG00000198681,ENSG00000156009; CTA,TAA
AETSYVKVL

SEQ ID NO: 37366 - protein, 9 aa, Homo sapiens
  Table A; Target 37366; HLA-B*40:02; MAGEA1,MAGEA8; ENSG00000198681,ENSG00000156009; CTA,TAA
AETSYVKVL

SEQ ID NO: 37367 - protein, 9 aa, Homo sapiens
  Table A; Target 37367; HLA-B*49:01; MAGEA1,MAGEA8; ENSG00000198681,ENSG00000156009; CTA,TAA
AETSYVKVL

SEQ ID NO: 37368 - protein, 9 aa, Homo sapiens
  Table A; Target 37368; HLA-C*02:02; MAGEA1,MAGEA8; ENSG00000198681,ENSG00000156009; CTA,TAA
AETSYVKVL

SEQ ID NO: 37369 - protein, 9 aa, Homo sapiens
  Table A; Target 37369; HLA-C*07:04; MAGEA1,MAGEA8; ENSG00000198681,ENSG00000156009; CTA,TAA
AETSYVKVL

SEQ ID NO: 37370 - protein, 9 aa, Homo sapiens
  Table A; Target 37370; HLA-C*12:03; MAGEA1,MAGEA8; ENSG00000198681,ENSG00000156009; CTA,TAA
AETSYVKVL

SEQ ID NO: 37371 - protein, 9 aa, Homo sapiens
  Table A; Target 37371; HLA-C*16:01; MAGEA1,MAGEA8; ENSG00000198681,ENSG00000156009; CTA,TAA
AETSYVKVL

SEQ ID NO: 37372 - protein, 9 aa, Homo sapiens
  Table A; Target 37372; HLA-C*16:02; MAGEA1,MAGEA8; ENSG00000198681,ENSG00000156009; CTA,TAA
AETSYVKVL

SEQ ID NO: 37373 - protein, 9 aa, Homo sapiens
  Table A; Target 37373; HLA-C*16:04; MAGEA1,MAGEA8; ENSG00000198681,ENSG00000156009; CTA,TAA
AETSYVKVL

SEQ ID NO: 37374 - protein, 8 aa, Homo sapiens
  Table A; Target 37374; HLA-A*02:01; MAGEA1,MAGEA8; ENSG00000198681,ENSG00000156009; CTA,TAA
ALAETSYV

SEQ ID NO: 37375 - protein, 8 aa, Homo sapiens
  Table A; Target 37375; HLA-A*02:03; MAGEA1,MAGEA8; ENSG00000198681,ENSG00000156009; CTA,TAA
ALAETSYV

SEQ ID NO: 37376 - protein, 8 aa, Homo sapiens
  Table A; Target 37376; HLA-B*55:01; MAGEA1,MAGEA8; ENSG00000198681,ENSG00000156009; CTA,TAA
ALAETSYV

SEQ ID NO: 37377 - protein, 9 aa, Homo sapiens
  Table A; Target 37377; HLA-A*01:01; MAGEA1,MAGEA8; ENSG00000198681,ENSG00000156009; CTA,TAA
ALAETSYVK

SEQ ID NO: 37378 - protein, 9 aa, Homo sapiens
  Table A; Target 37378; HLA-A*03:01; MAGEA1,MAGEA8; ENSG00000198681,ENSG00000156009; CTA,TAA
ALAETSYVK

SEQ ID NO: 37379 - protein, 9 aa, Homo sapiens
  Table A; Target 37379; HLA-A*03:02; MAGEA1,MAGEA8; ENSG00000198681,ENSG00000156009; CTA,TAA
ALAETSYVK

SEQ ID NO: 37380 - protein, 9 aa, Homo sapiens
  Table A; Target 37380; HLA-A*29:02; MAGEA1,MAGEA8; ENSG00000198681,ENSG00000156009; CTA,TAA
ALAETSYVK

SEQ ID NO: 37381 - protein, 9 aa, Homo sapiens
  Table A; Target 37381; HLA-B*13:02; MAGEA1,MAGEA8; ENSG00000198681,ENSG00000156009; CTA,TAA
ALAETSYVK

SEQ ID NO: 37382 - protein, 9 aa, Homo sapiens
  Table A; Target 37382; HLA-B*27:05; MAGEA1,MAGEA8; ENSG00000198681,ENSG00000156009; CTA,TAA
ALAETSYVK

SEQ ID NO: 37383 - protein, 9 aa, Homo sapiens
  Table A; Target 37383; HLA-C*07:06; MAGEA1,MAGEA8; ENSG00000198681,ENSG00000156009; CTA,TAA
ALAETSYVK

SEQ ID NO: 37384 - protein, 10 aa, Homo sapiens
  Table A; Target 37384; HLA-A*02:01; MAGEA1,MAGEA8; ENSG00000198681,ENSG00000156009; CTA,TAA
ALAETSYVKV

SEQ ID NO: 37385 - protein, 10 aa, Homo sapiens
  Table A; Target 37385; HLA-A*02:03; MAGEA1,MAGEA8; ENSG00000198681,ENSG00000156009; CTA,TAA
ALAETSYVKV

SEQ ID NO: 37386 - protein, 10 aa, Homo sapiens
  Table A; Target 37386; HLA-A*02:04; MAGEA1,MAGEA8; ENSG00000198681,ENSG00000156009; CTA,TAA
ALAETSYVKV

SEQ ID NO: 37387 - protein, 10 aa, Homo sapiens
  Table A; Target 37387; HLA-A*02:07; MAGEA1,MAGEA8; ENSG00000198681,ENSG00000156009; CTA,TAA
ALAETSYVKV

SEQ ID NO: 37388 - protein, 10 aa, Homo sapiens
  Table A; Target 37388; HLA-B*55:01; MAGEA1,MAGEA8; ENSG00000198681,ENSG00000156009; CTA,TAA
ALAETSYVKV

SEQ ID NO: 37389 - protein, 11 aa, Homo sapiens
  Table A; Target 37389; HLA-A*02:03; MAGEA1,MAGEA8; ENSG00000198681,ENSG00000156009; CTA,TAA
ALAETSYVKVL

SEQ ID NO: 37390 - protein, 11 aa, Homo sapiens
  Table A; Target 37390; HLA-A*02:04; MAGEA1,MAGEA8; ENSG00000198681,ENSG00000156009; CTA,TAA
ALAETSYVKVL

SEQ ID NO: 37391 - protein, 10 aa, Homo sapiens
  Table A; Target 37391; HLA-B*18:01; MAGEA1,MAGEA8; ENSG00000198681,ENSG00000156009; CTA,TAA
EMLESVIKNY

SEQ ID NO: 37392 - protein, 11 aa, Homo sapiens
  Table A; Target 37392; HLA-A*33:03; MAGEA1,MAGEA8; ENSG00000198681,ENSG00000156009; CTA,TAA
EMLESVIKNYK

SEQ ID NO: 37393 - protein, 9 aa, Homo sapiens
  Table A; Target 37393; HLA-A*02:01; MAGEA1,MAGEA8; ENSG00000198681,ENSG00000156009; CTA,TAA
FLWGPRALA

SEQ ID NO: 37394 - protein, 11 aa, Homo sapiens
  Table A; Target 37394; HLA-A*02:01; MAGEA1,MAGEA8; ENSG00000198681,ENSG00000156009; CTA,TAA
FLWGPRALAET

SEQ ID NO: 37395 - protein, 11 aa, Homo sapiens
  Table A; Target 37395; HLA-A*02:03; MAGEA1,MAGEA8; ENSG00000198681,ENSG00000156009; CTA,TAA
FLWGPRALAET

SEQ ID NO: 37396 - protein, 11 aa, Homo sapiens
  Table A; Target 37396; HLA-A*02:04; MAGEA1,MAGEA8; ENSG00000198681,ENSG00000156009; CTA,TAA
FLWGPRALAET

SEQ ID NO: 37397 - protein, 11 aa, Homo sapiens
  Table A; Target 37397; HLA-A*02:07; MAGEA1,MAGEA8; ENSG00000198681,ENSG00000156009; CTA,TAA
FLWGPRALAET

SEQ ID NO: 37398 - protein, 10 aa, Homo sapiens
  Table A; Target 37398; HLA-A*30:02; MAGEA1,MAGEA8; ENSG00000198681,ENSG00000156009; CTA,TAA
GPRALAETSY

SEQ ID NO: 37399 - protein, 10 aa, Homo sapiens
  Table A; Target 37399; HLA-B*07:02; MAGEA1,MAGEA8; ENSG00000198681,ENSG00000156009; CTA,TAA
GPRALAETSY

SEQ ID NO: 37400 - protein, 10 aa, Homo sapiens
  Table A; Target 37400; HLA-B*15:01; MAGEA1,MAGEA8; ENSG00000198681,ENSG00000156009; CTA,TAA
GPRALAETSY

SEQ ID NO: 37401 - protein, 10 aa, Homo sapiens
  Table A; Target 37401; HLA-B*15:03; MAGEA1,MAGEA8; ENSG00000198681,ENSG00000156009; CTA,TAA
GPRALAETSY

SEQ ID NO: 37402 - protein, 10 aa, Homo sapiens
  Table A; Target 37402; HLA-B*35:01; MAGEA1,MAGEA8; ENSG00000198681,ENSG00000156009; CTA,TAA
GPRALAETSY

SEQ ID NO: 37403 - protein, 10 aa, Homo sapiens
  Table A; Target 37403; HLA-B*55:01; MAGEA1,MAGEA8; ENSG00000198681,ENSG00000156009; CTA,TAA
GPRALAETSY

SEQ ID NO: 37404 - protein, 11 aa, Homo sapiens
  Table A; Target 37404; HLA-C*07:02; MAGEA1,MAGEA8; ENSG00000198681,ENSG00000156009; CTA,TAA
GPRALAETSYV

SEQ ID NO: 37405 - protein, 10 aa, Homo sapiens
  Table A; Target 37405; HLA-B*27:02; MAGEA1,MAGEA8; ENSG00000198681,ENSG00000156009; CTA,TAA
KAEMLESVIK

SEQ ID NO: 37406 - protein, 8 aa, Homo sapiens
  Table A; Target 37406; HLA-B*27:02; MAGEA1,MAGEA8; ENSG00000198681,ENSG00000156009; CTA,TAA
LAETSYVK

SEQ ID NO: 37407 - protein, 9 aa, Homo sapiens
  Table A; Target 37407; HLA-C*05:01; MAGEA1,MAGEA8; ENSG00000198681,ENSG00000156009; CTA,TAA
LAETSYVKV

SEQ ID NO: 37408 - protein, 8 aa, Homo sapiens
  Table A; Target 37408; HLA-C*12:03; MAGEA1,MAGEA8; ENSG00000198681,ENSG00000156009; CTA,TAA
LESVIKNY

SEQ ID NO: 37409 - protein, 8 aa, Homo sapiens
  Table A; Target 37409; HLA-C*16:02; MAGEA1,MAGEA8; ENSG00000198681,ENSG00000156009; CTA,TAA
LESVIKNY

SEQ ID NO: 37410 - protein, 9 aa, Homo sapiens
  Table A; Target 37410; HLA-A*01:01; MAGEA1,MAGEA8; ENSG00000198681,ENSG00000156009; CTA,TAA
LVTCLGLSY

SEQ ID NO: 37411 - protein, 9 aa, Homo sapiens
  Table A; Target 37411; HLA-A*26:01; MAGEA1,MAGEA8; ENSG00000198681,ENSG00000156009; CTA,TAA
LVTCLGLSY

SEQ ID NO: 37412 - protein, 9 aa, Homo sapiens
  Table A; Target 37412; HLA-A*29:02; MAGEA1,MAGEA8; ENSG00000198681,ENSG00000156009; CTA,TAA
LVTCLGLSY

SEQ ID NO: 37413 - protein, 9 aa, Homo sapiens
  Table A; Target 37413; HLA-A*30:02; MAGEA1,MAGEA8; ENSG00000198681,ENSG00000156009; CTA,TAA
LVTCLGLSY

SEQ ID NO: 37414 - protein, 9 aa, Homo sapiens
  Table A; Target 37414; HLA-A*02:07; MAGEA1,MAGEA8; ENSG00000198681,ENSG00000156009; CTA,TAA
MLESVIKNY

SEQ ID NO: 37415 - protein, 9 aa, Homo sapiens
  Table A; Target 37415; HLA-A*03:01; MAGEA1,MAGEA8; ENSG00000198681,ENSG00000156009; CTA,TAA
MLESVIKNY

SEQ ID NO: 37416 - protein, 9 aa, Homo sapiens
  Table A; Target 37416; HLA-A*03:02; MAGEA1,MAGEA8; ENSG00000198681,ENSG00000156009; CTA,TAA
MLESVIKNY

SEQ ID NO: 37417 - protein, 9 aa, Homo sapiens
  Table A; Target 37417; HLA-A*26:01; MAGEA1,MAGEA8; ENSG00000198681,ENSG00000156009; CTA,TAA
MLESVIKNY

SEQ ID NO: 37418 - protein, 9 aa, Homo sapiens
  Table A; Target 37418; HLA-B*18:01; MAGEA1,MAGEA8; ENSG00000198681,ENSG00000156009; CTA,TAA
MLESVIKNY

SEQ ID NO: 37419 - protein, 9 aa, Homo sapiens
  Table A; Target 37419; HLA-C*03:03; MAGEA1,MAGEA8; ENSG00000198681,ENSG00000156009; CTA,TAA
MLESVIKNY

SEQ ID NO: 37420 - protein, 9 aa, Homo sapiens
  Table A; Target 37420; HLA-C*07:01; MAGEA1,MAGEA8; ENSG00000198681,ENSG00000156009; CTA,TAA
MLESVIKNY

SEQ ID NO: 37421 - protein, 9 aa, Homo sapiens
  Table A; Target 37421; HLA-C*12:03; MAGEA1,MAGEA8; ENSG00000198681,ENSG00000156009; CTA,TAA
MLESVIKNY

SEQ ID NO: 37422 - protein, 10 aa, Homo sapiens
  Table A; Target 37422; HLA-A*01:01; MAGEA1,MAGEA8; ENSG00000198681,ENSG00000156009; CTA,TAA
MLESVIKNYK

SEQ ID NO: 37423 - protein, 9 aa, Homo sapiens
  Table A; Target 37423; HLA-B*15:03; MAGEA1,MAGEA8; ENSG00000198681,ENSG00000156009; CTA,TAA
PRALAETSY

SEQ ID NO: 37424 - protein, 9 aa, Homo sapiens
  Table A; Target 37424; HLA-B*27:02; MAGEA1,MAGEA8; ENSG00000198681,ENSG00000156009; CTA,TAA
PRALAETSY

SEQ ID NO: 37425 - protein, 9 aa, Homo sapiens
  Table A; Target 37425; HLA-C*07:01; MAGEA1,MAGEA8; ENSG00000198681,ENSG00000156009; CTA,TAA
PRALAETSY

SEQ ID NO: 37426 - protein, 9 aa, Homo sapiens
  Table A; Target 37426; HLA-C*07:04; MAGEA1,MAGEA8; ENSG00000198681,ENSG00000156009; CTA,TAA
PRALAETSY

SEQ ID NO: 37427 - protein, 10 aa, Homo sapiens
  Table A; Target 37427; HLA-A*03:02; MAGEA1,MAGEA8; ENSG00000198681,ENSG00000156009; CTA,TAA
RALAETSYVK

SEQ ID NO: 37428 - protein, 10 aa, Homo sapiens
  Table A; Target 37428; HLA-B*27:02; MAGEA1,MAGEA8; ENSG00000198681,ENSG00000156009; CTA,TAA
RALAETSYVK

SEQ ID NO: 37429 - protein, 8 aa, Homo sapiens
  Table A; Target 37429; HLA-A*01:01; MAGEA1,MAGEA8; ENSG00000198681,ENSG00000156009; CTA,TAA
VTCLGLSY

SEQ ID NO: 37430 - protein, 8 aa, Homo sapiens
  Table A; Target 37430; HLA-B*37:01; MAGEA1,MAGEA8,MAGEA9; ENSG00000198681,ENSG00000156009,ENSG00000123584; CTA,TAA,CTA
AEMLESVI

SEQ ID NO: 37431 - protein, 8 aa, Homo sapiens
  Table A; Target 37431; HLA-B*40:01; MAGEA1,MAGEA8,MAGEA9; ENSG00000198681,ENSG00000156009,ENSG00000123584; CTA,TAA,CTA
AEMLESVI

SEQ ID NO: 37432 - protein, 8 aa, Homo sapiens
  Table A; Target 37432; HLA-B*44:02; MAGEA1,MAGEA8,MAGEA9; ENSG00000198681,ENSG00000156009,ENSG00000123584; CTA,TAA,CTA
AEMLESVI

SEQ ID NO: 37433 - protein, 8 aa, Homo sapiens
  Table A; Target 37433; HLA-B*44:03; MAGEA1,MAGEA8,MAGEA9; ENSG00000198681,ENSG00000156009,ENSG00000123584; CTA,TAA,CTA
AEMLESVI

SEQ ID NO: 37434 - protein, 8 aa, Homo sapiens
  Table A; Target 37434; HLA-B*49:01; MAGEA1,MAGEA8,MAGEA9; ENSG00000198681,ENSG00000156009,ENSG00000123584; CTA,TAA,CTA
AEMLESVI

SEQ ID NO: 37435 - protein, 10 aa, Homo sapiens
  Table A; Target 37435; HLA-B*44:02; MAGEA1,MAGEA8,MAGEA9; ENSG00000198681,ENSG00000156009,ENSG00000123584; CTA,TAA,CTA
AEMLESVIKN

SEQ ID NO: 37436 - protein, 10 aa, Homo sapiens
  Table A; Target 37436; HLA-B*49:01; MAGEA1,MAGEA8,MAGEA9; ENSG00000198681,ENSG00000156009,ENSG00000123584; CTA,TAA,CTA
AEMLESVIKN

SEQ ID NO: 37437 - protein, 11 aa, Homo sapiens
  Table A; Target 37437; HLA-A*30:01; MAGEA1,MAGEA8,MAGEA9; ENSG00000198681,ENSG00000156009,ENSG00000123584; CTA,TAA,CTA
AEMLESVIKNY

SEQ ID NO: 37438 - protein, 11 aa, Homo sapiens
  Table A; Target 37438; HLA-A*30:02; MAGEA1,MAGEA8,MAGEA9; ENSG00000198681,ENSG00000156009,ENSG00000123584; CTA,TAA,CTA
AEMLESVIKNY

SEQ ID NO: 37439 - protein, 11 aa, Homo sapiens
  Table A; Target 37439; HLA-B*27:02; MAGEA1,MAGEA8,MAGEA9; ENSG00000198681,ENSG00000156009,ENSG00000123584; CTA,TAA,CTA
AEMLESVIKNY

SEQ ID NO: 37440 - protein, 11 aa, Homo sapiens
  Table A; Target 37440; HLA-B*40:01; MAGEA1,MAGEA8,MAGEA9; ENSG00000198681,ENSG00000156009,ENSG00000123584; CTA,TAA,CTA
AEMLESVIKNY

SEQ ID NO: 37441 - protein, 11 aa, Homo sapiens
  Table A; Target 37441; HLA-B*49:01; MAGEA1,MAGEA8,MAGEA9; ENSG00000198681,ENSG00000156009,ENSG00000123584; CTA,TAA,CTA
AEMLESVIKNY

SEQ ID NO: 37442 - protein, 11 aa, Homo sapiens
  Table A; Target 37442; HLA-C*16:04; MAGEA1,MAGEA8,MAGEA9; ENSG00000198681,ENSG00000156009,ENSG00000123584; CTA,TAA,CTA
AEMLESVIKNY

SEQ ID NO: 37443 - protein, 10 aa, Homo sapiens
  Table A; Target 37443; HLA-A*25:01; MAGEA1,MAGEA8,MAGEA9; ENSG00000198681,ENSG00000156009,ENSG00000123584; CTA,TAA,CTA
EMLESVIKNY

SEQ ID NO: 37444 - protein, 10 aa, Homo sapiens
  Table A; Target 37444; HLA-A*26:01; MAGEA1,MAGEA8,MAGEA9; ENSG00000198681,ENSG00000156009,ENSG00000123584; CTA,TAA,CTA
EMLESVIKNY

SEQ ID NO: 37445 - protein, 10 aa, Homo sapiens
  Table A; Target 37445; HLA-A*29:02; MAGEA1,MAGEA8,MAGEA9; ENSG00000198681,ENSG00000156009,ENSG00000123584; CTA,TAA,CTA
EMLESVIKNY

SEQ ID NO: 37446 - protein, 10 aa, Homo sapiens
  Table A; Target 37446; HLA-A*30:02; MAGEA1,MAGEA8,MAGEA9; ENSG00000198681,ENSG00000156009,ENSG00000123584; CTA,TAA,CTA
EMLESVIKNY

SEQ ID NO: 37447 - protein, 10 aa, Homo sapiens
  Table A; Target 37447; HLA-A*33:01; MAGEA1,MAGEA8,MAGEA9; ENSG00000198681,ENSG00000156009,ENSG00000123584; CTA,TAA,CTA
EMLESVIKNY

SEQ ID NO: 37448 - protein, 10 aa, Homo sapiens
  Table A; Target 37448; HLA-A*33:03; MAGEA1,MAGEA8,MAGEA9; ENSG00000198681,ENSG00000156009,ENSG00000123584; CTA,TAA,CTA
EMLESVIKNY

SEQ ID NO: 37449 - protein, 10 aa, Homo sapiens
  Table A; Target 37449; HLA-B*44:02; MAGEA1,MAGEA8,MAGEA9; ENSG00000198681,ENSG00000156009,ENSG00000123584; CTA,TAA,CTA
EMLESVIKNY

SEQ ID NO: 37450 - protein, 10 aa, Homo sapiens
  Table A; Target 37450; HLA-B*44:03; MAGEA1,MAGEA8,MAGEA9; ENSG00000198681,ENSG00000156009,ENSG00000123584; CTA,TAA,CTA
EMLESVIKNY

SEQ ID NO: 37451 - protein, 10 aa, Homo sapiens
  Table A; Target 37451; HLA-C*07:06; MAGEA1,MAGEA8,MAGEA9; ENSG00000198681,ENSG00000156009,ENSG00000123584; CTA,TAA,CTA
EMLESVIKNY

SEQ ID NO: 37452 - protein, 8 aa, Homo sapiens
  Table A; Target 37452; HLA-B*08:01; MAGEA1,MAGEA8,MAGEA9; ENSG00000198681,ENSG00000156009,ENSG00000123584; CTA,TAA,CTA
EPVTKAEM

SEQ ID NO: 37453 - protein, 9 aa, Homo sapiens
  Table A; Target 37453; HLA-B*35:03; MAGEA1,MAGEA8,MAGEA9; ENSG00000198681,ENSG00000156009,ENSG00000123584; CTA,TAA,CTA
EPVTKAEML

SEQ ID NO: 37454 - protein, 8 aa, Homo sapiens
  Table A; Target 37454; HLA-B*37:01; MAGEA1,MAGEA8,MAGEA9; ENSG00000198681,ENSG00000156009,ENSG00000123584; CTA,TAA,CTA
LESVIKNY

SEQ ID NO: 37455 - protein, 8 aa, Homo sapiens
  Table A; Target 37455; HLA-B*44:02; MAGEA1,MAGEA8,MAGEA9; ENSG00000198681,ENSG00000156009,ENSG00000123584; CTA,TAA,CTA
LESVIKNY

SEQ ID NO: 37456 - protein, 8 aa, Homo sapiens
  Table A; Target 37456; HLA-B*44:03; MAGEA1,MAGEA8,MAGEA9; ENSG00000198681,ENSG00000156009,ENSG00000123584; CTA,TAA,CTA
LESVIKNY

SEQ ID NO: 37457 - protein, 8 aa, Homo sapiens
  Table A; Target 37457; HLA-C*02:02; MAGEA1,MAGEA8,MAGEA9; ENSG00000198681,ENSG00000156009,ENSG00000123584; CTA,TAA,CTA
LESVIKNY

SEQ ID NO: 37458 - protein, 8 aa, Homo sapiens
  Table A; Target 37458; HLA-C*16:04; MAGEA1,MAGEA8,MAGEA9; ENSG00000198681,ENSG00000156009,ENSG00000123584; CTA,TAA,CTA
LESVIKNY

SEQ ID NO: 37459 - protein, 9 aa, Homo sapiens
  Table A; Target 37459; HLA-A*01:01; MAGEA1,MAGEA8,MAGEA9; ENSG00000198681,ENSG00000156009,ENSG00000123584; CTA,TAA,CTA
MLESVIKNY

SEQ ID NO: 37460 - protein, 9 aa, Homo sapiens
  Table A; Target 37460; HLA-A*29:02; MAGEA1,MAGEA8,MAGEA9; ENSG00000198681,ENSG00000156009,ENSG00000123584; CTA,TAA,CTA
MLESVIKNY

SEQ ID NO: 37461 - protein, 9 aa, Homo sapiens
  Table A; Target 37461; HLA-A*30:02; MAGEA1,MAGEA8,MAGEA9; ENSG00000198681,ENSG00000156009,ENSG00000123584; CTA,TAA,CTA
MLESVIKNY

SEQ ID NO: 37462 - protein, 9 aa, Homo sapiens
  Table A; Target 37462; HLA-A*32:01; MAGEA1,MAGEA8,MAGEA9; ENSG00000198681,ENSG00000156009,ENSG00000123584; CTA,TAA,CTA
MLESVIKNY

SEQ ID NO: 37463 - protein, 9 aa, Homo sapiens
  Table A; Target 37463; HLA-B*15:01; MAGEA1,MAGEA8,MAGEA9; ENSG00000198681,ENSG00000156009,ENSG00000123584; CTA,TAA,CTA
MLESVIKNY

SEQ ID NO: 37464 - protein, 9 aa, Homo sapiens
  Table A; Target 37464; HLA-B*15:03; MAGEA1,MAGEA8,MAGEA9; ENSG00000198681,ENSG00000156009,ENSG00000123584; CTA,TAA,CTA
MLESVIKNY

SEQ ID NO: 37465 - protein, 9 aa, Homo sapiens
  Table A; Target 37465; HLA-B*27:02; MAGEA1,MAGEA8,MAGEA9; ENSG00000198681,ENSG00000156009,ENSG00000123584; CTA,TAA,CTA
MLESVIKNY

SEQ ID NO: 37466 - protein, 9 aa, Homo sapiens
  Table A; Target 37466; HLA-B*27:05; MAGEA1,MAGEA8,MAGEA9; ENSG00000198681,ENSG00000156009,ENSG00000123584; CTA,TAA,CTA
MLESVIKNY

SEQ ID NO: 37467 - protein, 9 aa, Homo sapiens
  Table A; Target 37467; HLA-B*35:01; MAGEA1,MAGEA8,MAGEA9; ENSG00000198681,ENSG00000156009,ENSG00000123584; CTA,TAA,CTA
MLESVIKNY

SEQ ID NO: 37468 - protein, 9 aa, Homo sapiens
  Table A; Target 37468; HLA-B*44:02; MAGEA1,MAGEA8,MAGEA9; ENSG00000198681,ENSG00000156009,ENSG00000123584; CTA,TAA,CTA
MLESVIKNY

SEQ ID NO: 37469 - protein, 9 aa, Homo sapiens
  Table A; Target 37469; HLA-B*44:03; MAGEA1,MAGEA8,MAGEA9; ENSG00000198681,ENSG00000156009,ENSG00000123584; CTA,TAA,CTA
MLESVIKNY

SEQ ID NO: 37470 - protein, 9 aa, Homo sapiens
  Table A; Target 37470; HLA-C*06:02; MAGEA1,MAGEA8,MAGEA9; ENSG00000198681,ENSG00000156009,ENSG00000123584; CTA,TAA,CTA
MLESVIKNY

SEQ ID NO: 37471 - protein, 9 aa, Homo sapiens
  Table A; Target 37471; HLA-C*07:04; MAGEA1,MAGEA8,MAGEA9; ENSG00000198681,ENSG00000156009,ENSG00000123584; CTA,TAA,CTA
MLESVIKNY

SEQ ID NO: 37472 - protein, 9 aa, Homo sapiens
  Table A; Target 37472; HLA-C*16:01; MAGEA1,MAGEA8,MAGEA9; ENSG00000198681,ENSG00000156009,ENSG00000123584; CTA,TAA,CTA
MLESVIKNY

SEQ ID NO: 37473 - protein, 9 aa, Homo sapiens
  Table A; Target 37473; HLA-C*16:02; MAGEA1,MAGEA8,MAGEA9; ENSG00000198681,ENSG00000156009,ENSG00000123584; CTA,TAA,CTA
MLESVIKNY

SEQ ID NO: 37474 - protein, 9 aa, Homo sapiens
  Table A; Target 37474; HLA-C*16:04; MAGEA1,MAGEA8,MAGEA9; ENSG00000198681,ENSG00000156009,ENSG00000123584; CTA,TAA,CTA
MLESVIKNY

SEQ ID NO: 37475 - protein, 10 aa, Homo sapiens
  Table A; Target 37475; HLA-A*03:01; MAGEA1,MAGEA8,MAGEA9; ENSG00000198681,ENSG00000156009,ENSG00000123584; CTA,TAA,CTA
MLESVIKNYK

SEQ ID NO: 37476 - protein, 10 aa, Homo sapiens
  Table A; Target 37476; HLA-A*03:02; MAGEA1,MAGEA8,MAGEA9; ENSG00000198681,ENSG00000156009,ENSG00000123584; CTA,TAA,CTA
MLESVIKNYK

SEQ ID NO: 37477 - protein, 8 aa, Homo sapiens
  Table A; Target 37477; HLA-B*15:03; MAGEA1,MAGEB1; ENSG00000198681,ENSG00000214107; CTA,CTA
QDLVQEKY

SEQ ID NO: 37478 - protein, 8 aa, Homo sapiens
  Table A; Target 37478; HLA-C*05:01; MAGEA1,MAGEB1; ENSG00000198681,ENSG00000214107; CTA,CTA
TQDLVQEK

SEQ ID NO: 37479 - protein, 9 aa, Homo sapiens
  Table A; Target 37479; HLA-A*29:02; MAGEA1,MAGEB1; ENSG00000198681,ENSG00000214107; CTA,CTA
TQDLVQEKY

SEQ ID NO: 37480 - protein, 9 aa, Homo sapiens
  Table A; Target 37480; HLA-B*44:02; MAGEA1,MAGEB1; ENSG00000198681,ENSG00000214107; CTA,CTA
TQDLVQEKY

SEQ ID NO: 37481 - protein, 9 aa, Homo sapiens
  Table A; Target 37481; HLA-B*58:01; MAGEA1,MAGEB1; ENSG00000198681,ENSG00000214107; CTA,CTA
TQDLVQEKY

SEQ ID NO: 37482 - protein, 9 aa, Homo sapiens
  Table A; Target 37482; HLA-C*04:01; MAGEA1,MAGEB1; ENSG00000198681,ENSG00000214107; CTA,CTA
TQDLVQEKY

SEQ ID NO: 37483 - protein, 9 aa, Homo sapiens
  Table A; Target 37483; HLA-C*07:04; MAGEA1,MAGEB1; ENSG00000198681,ENSG00000214107; CTA,CTA
TQDLVQEKY

SEQ ID NO: 37484 - protein, 8 aa, Homo sapiens
  Table A; Target 37484; HLA-B*18:01; MAGEA1,MAGEB1,MAGEB4; ENSG00000198681,ENSG00000214107,ENSG00000120289; CTA,CTA,CTA
QDLVQEKY

SEQ ID NO: 37485 - protein, 8 aa, Homo sapiens
  Table A; Target 37485; HLA-B*37:01; MAGEA1,MAGEB1,MAGEB4; ENSG00000198681,ENSG00000214107,ENSG00000120289; CTA,CTA,CTA
QDLVQEKY

SEQ ID NO: 37486 - protein, 8 aa, Homo sapiens
  Table A; Target 37486; HLA-C*07:01; MAGEA1,MAGEB1,MAGEB4; ENSG00000198681,ENSG00000214107,ENSG00000120289; CTA,CTA,CTA
QDLVQEKY

SEQ ID NO: 37487 - protein, 9 aa, Homo sapiens
  Table A; Target 37487; HLA-A*01:01; MAGEA1,MAGEB1,MAGEB4; ENSG00000198681,ENSG00000214107,ENSG00000120289; CTA,CTA,CTA
TQDLVQEKY

SEQ ID NO: 37488 - protein, 9 aa, Homo sapiens
  Table A; Target 37488; HLA-A*30:02; MAGEA1,MAGEB1,MAGEB4; ENSG00000198681,ENSG00000214107,ENSG00000120289; CTA,CTA,CTA
TQDLVQEKY

SEQ ID NO: 37489 - protein, 9 aa, Homo sapiens
  Table A; Target 37489; HLA-A*32:01; MAGEA1,MAGEB1,MAGEB4; ENSG00000198681,ENSG00000214107,ENSG00000120289; CTA,CTA,CTA
TQDLVQEKY

SEQ ID NO: 37490 - protein, 9 aa, Homo sapiens
  Table A; Target 37490; HLA-B*15:01; MAGEA1,MAGEB1,MAGEB4; ENSG00000198681,ENSG00000214107,ENSG00000120289; CTA,CTA,CTA
TQDLVQEKY

SEQ ID NO: 37491 - protein, 9 aa, Homo sapiens
  Table A; Target 37491; HLA-B*15:03; MAGEA1,MAGEB1,MAGEB4; ENSG00000198681,ENSG00000214107,ENSG00000120289; CTA,CTA,CTA
TQDLVQEKY

SEQ ID NO: 37492 - protein, 9 aa, Homo sapiens
  Table A; Target 37492; HLA-B*18:01; MAGEA1,MAGEB1,MAGEB4; ENSG00000198681,ENSG00000214107,ENSG00000120289; CTA,CTA,CTA
TQDLVQEKY

SEQ ID NO: 37493 - protein, 9 aa, Homo sapiens
  Table A; Target 37493; HLA-B*35:01; MAGEA1,MAGEB1,MAGEB4; ENSG00000198681,ENSG00000214107,ENSG00000120289; CTA,CTA,CTA
TQDLVQEKY

SEQ ID NO: 37494 - protein, 9 aa, Homo sapiens
  Table A; Target 37494; HLA-B*38:01; MAGEA1,MAGEB1,MAGEB4; ENSG00000198681,ENSG00000214107,ENSG00000120289; CTA,CTA,CTA
TQDLVQEKY

SEQ ID NO: 37495 - protein, 9 aa, Homo sapiens
  Table A; Target 37495; HLA-B*39:01; MAGEA1,MAGEB1,MAGEB4; ENSG00000198681,ENSG00000214107,ENSG00000120289; CTA,CTA,CTA
TQDLVQEKY

SEQ ID NO: 37496 - protein, 9 aa, Homo sapiens
  Table A; Target 37496; HLA-B*44:03; MAGEA1,MAGEB1,MAGEB4; ENSG00000198681,ENSG00000214107,ENSG00000120289; CTA,CTA,CTA
TQDLVQEKY

SEQ ID NO: 37497 - protein, 9 aa, Homo sapiens
  Table A; Target 37497; HLA-C*05:01; MAGEA1,MAGEB1,MAGEB4; ENSG00000198681,ENSG00000214107,ENSG00000120289; CTA,CTA,CTA
TQDLVQEKY

SEQ ID NO: 37498 - protein, 9 aa, Homo sapiens
  Table A; Target 37498; HLA-C*16:04; MAGEA1,MAGEB1,MAGEB4; ENSG00000198681,ENSG00000214107,ENSG00000120289; CTA,CTA,CTA
TQDLVQEKY

SEQ ID NO: 37499 - protein, 10 aa, Homo sapiens
  Table A; Target 37499; HLA-B*38:01; MAGEA1,MAGEB1,MAGEB4; ENSG00000198681,ENSG00000214107,ENSG00000120289; CTA,CTA,CTA
TQDLVQEKYL

SEQ ID NO: 37500 - protein, 10 aa, Homo sapiens
  Table A; Target 37500; HLA-B*35:01; MAGEA1,MAGEB2; ENSG00000198681,ENSG00000099399; CTA,CTA
DLVQEKYLEY

SEQ ID NO: 37501 - protein, 9 aa, Homo sapiens
  Table A; Target 37501; HLA-A*33:01; MAGEA1,MAGEB2; ENSG00000198681,ENSG00000099399; CTA,CTA
LVQEKYLEY

SEQ ID NO: 37502 - protein, 9 aa, Homo sapiens
  Table A; Target 37502; HLA-B*18:01; MAGEA1,MAGEB2; ENSG00000198681,ENSG00000099399; CTA,CTA
LVQEKYLEY

SEQ ID NO: 37503 - protein, 9 aa, Homo sapiens
  Table A; Target 37503; HLA-C*07:01; MAGEA1,MAGEB2; ENSG00000198681,ENSG00000099399; CTA,CTA
LVQEKYLEY

SEQ ID NO: 37504 - protein, 9 aa, Homo sapiens
  Table A; Target 37504; HLA-C*16:04; MAGEA1,MAGEB2; ENSG00000198681,ENSG00000099399; CTA,CTA
LVQEKYLEY

SEQ ID NO: 37505 - protein, 8 aa, Homo sapiens
  Table A; Target 37505; HLA-A*30:02; MAGEA1,MAGEB2; ENSG00000198681,ENSG00000099399; CTA,CTA
VQEKYLEY

SEQ ID NO: 37506 - protein, 8 aa, Homo sapiens
  Table A; Target 37506; HLA-C*07:01; MAGEA1,MAGEB2; ENSG00000198681,ENSG00000099399; CTA,CTA
VQEKYLEY

SEQ ID NO: 37507 - protein, 10 aa, Homo sapiens
  Table A; Target 37507; HLA-A*01:01; MAGEA1,MAGEB2,MAGEB4; ENSG00000198681,ENSG00000099399,ENSG00000120289; CTA,CTA,CTA
DLVQEKYLEY

SEQ ID NO: 37508 - protein, 10 aa, Homo sapiens
  Table A; Target 37508; HLA-A*25:01; MAGEA1,MAGEB2,MAGEB4; ENSG00000198681,ENSG00000099399,ENSG00000120289; CTA,CTA,CTA
DLVQEKYLEY

SEQ ID NO: 37509 - protein, 10 aa, Homo sapiens
  Table A; Target 37509; HLA-A*26:01; MAGEA1,MAGEB2,MAGEB4; ENSG00000198681,ENSG00000099399,ENSG00000120289; CTA,CTA,CTA
DLVQEKYLEY

SEQ ID NO: 37510 - protein, 10 aa, Homo sapiens
  Table A; Target 37510; HLA-A*29:02; MAGEA1,MAGEB2,MAGEB4; ENSG00000198681,ENSG00000099399,ENSG00000120289; CTA,CTA,CTA
DLVQEKYLEY

SEQ ID NO: 37511 - protein, 9 aa, Homo sapiens
  Table A; Target 37511; HLA-A*01:01; MAGEA1,MAGEB2,MAGEB4; ENSG00000198681,ENSG00000099399,ENSG00000120289; CTA,CTA,CTA
LVQEKYLEY

SEQ ID NO: 37512 - protein, 9 aa, Homo sapiens
  Table A; Target 37512; HLA-A*03:01; MAGEA1,MAGEB2,MAGEB4; ENSG00000198681,ENSG00000099399,ENSG00000120289; CTA,CTA,CTA
LVQEKYLEY

SEQ ID NO: 37513 - protein, 9 aa, Homo sapiens
  Table A; Target 37513; HLA-A*03:02; MAGEA1,MAGEB2,MAGEB4; ENSG00000198681,ENSG00000099399,ENSG00000120289; CTA,CTA,CTA
LVQEKYLEY

SEQ ID NO: 37514 - protein, 9 aa, Homo sapiens
  Table A; Target 37514; HLA-A*11:01; MAGEA1,MAGEB2,MAGEB4; ENSG00000198681,ENSG00000099399,ENSG00000120289; CTA,CTA,CTA
LVQEKYLEY

SEQ ID NO: 37515 - protein, 9 aa, Homo sapiens
  Table A; Target 37515; HLA-A*25:01; MAGEA1,MAGEB2,MAGEB4; ENSG00000198681,ENSG00000099399,ENSG00000120289; CTA,CTA,CTA
LVQEKYLEY

SEQ ID NO: 37516 - protein, 9 aa, Homo sapiens
  Table A; Target 37516; HLA-A*26:01; MAGEA1,MAGEB2,MAGEB4; ENSG00000198681,ENSG00000099399,ENSG00000120289; CTA,CTA,CTA
LVQEKYLEY

SEQ ID NO: 37517 - protein, 9 aa, Homo sapiens
  Table A; Target 37517; HLA-A*30:02; MAGEA1,MAGEB2,MAGEB4; ENSG00000198681,ENSG00000099399,ENSG00000120289; CTA,CTA,CTA
LVQEKYLEY

SEQ ID NO: 37518 - protein, 9 aa, Homo sapiens
  Table A; Target 37518; HLA-A*32:01; MAGEA1,MAGEB2,MAGEB4; ENSG00000198681,ENSG00000099399,ENSG00000120289; CTA,CTA,CTA
LVQEKYLEY

SEQ ID NO: 37519 - protein, 9 aa, Homo sapiens
  Table A; Target 37519; HLA-B*15:01; MAGEA1,MAGEB2,MAGEB4; ENSG00000198681,ENSG00000099399,ENSG00000120289; CTA,CTA,CTA
LVQEKYLEY

SEQ ID NO: 37520 - protein, 9 aa, Homo sapiens
  Table A; Target 37520; HLA-B*35:01; MAGEA1,MAGEB2,MAGEB4; ENSG00000198681,ENSG00000099399,ENSG00000120289; CTA,CTA,CTA
LVQEKYLEY

SEQ ID NO: 37521 - protein, 9 aa, Homo sapiens
  Table A; Target 37521; HLA-B*46:01; MAGEA1,MAGEB2,MAGEB4; ENSG00000198681,ENSG00000099399,ENSG00000120289; CTA,CTA,CTA
LVQEKYLEY

SEQ ID NO: 37522 - protein, 9 aa, Homo sapiens
  Table A; Target 37522; HLA-B*57:01; MAGEA1,MAGEB2,MAGEB4; ENSG00000198681,ENSG00000099399,ENSG00000120289; CTA,CTA,CTA
LVQEKYLEY

SEQ ID NO: 37523 - protein, 9 aa, Homo sapiens
  Table A; Target 37523; HLA-B*58:01; MAGEA1,MAGEB2,MAGEB4; ENSG00000198681,ENSG00000099399,ENSG00000120289; CTA,CTA,CTA
LVQEKYLEY

SEQ ID NO: 37524 - protein, 9 aa, Homo sapiens
  Table A; Target 37524; HLA-C*01:02; MAGEA1,MAGEB2,MAGEB4; ENSG00000198681,ENSG00000099399,ENSG00000120289; CTA,CTA,CTA
LVQEKYLEY

SEQ ID NO: 37525 - protein, 9 aa, Homo sapiens
  Table A; Target 37525; HLA-C*02:02; MAGEA1,MAGEB2,MAGEB4; ENSG00000198681,ENSG00000099399,ENSG00000120289; CTA,CTA,CTA
LVQEKYLEY

SEQ ID NO: 37526 - protein, 9 aa, Homo sapiens
  Table A; Target 37526; HLA-C*03:03; MAGEA1,MAGEB2,MAGEB4; ENSG00000198681,ENSG00000099399,ENSG00000120289; CTA,CTA,CTA
LVQEKYLEY

SEQ ID NO: 37527 - protein, 9 aa, Homo sapiens
  Table A; Target 37527; HLA-C*03:04; MAGEA1,MAGEB2,MAGEB4; ENSG00000198681,ENSG00000099399,ENSG00000120289; CTA,CTA,CTA
LVQEKYLEY

SEQ ID NO: 37528 - protein, 9 aa, Homo sapiens
  Table A; Target 37528; HLA-C*07:04; MAGEA1,MAGEB2,MAGEB4; ENSG00000198681,ENSG00000099399,ENSG00000120289; CTA,CTA,CTA
LVQEKYLEY

SEQ ID NO: 37529 - protein, 9 aa, Homo sapiens
  Table A; Target 37529; HLA-C*12:03; MAGEA1,MAGEB2,MAGEB4; ENSG00000198681,ENSG00000099399,ENSG00000120289; CTA,CTA,CTA
LVQEKYLEY

SEQ ID NO: 37530 - protein, 9 aa, Homo sapiens
  Table A; Target 37530; HLA-C*14:02; MAGEA1,MAGEB2,MAGEB4; ENSG00000198681,ENSG00000099399,ENSG00000120289; CTA,CTA,CTA
LVQEKYLEY

SEQ ID NO: 37531 - protein, 9 aa, Homo sapiens
  Table A; Target 37531; HLA-C*16:01; MAGEA1,MAGEB2,MAGEB4; ENSG00000198681,ENSG00000099399,ENSG00000120289; CTA,CTA,CTA
LVQEKYLEY

SEQ ID NO: 37532 - protein, 9 aa, Homo sapiens
  Table A; Target 37532; HLA-C*16:02; MAGEA1,MAGEB2,MAGEB4; ENSG00000198681,ENSG00000099399,ENSG00000120289; CTA,CTA,CTA
LVQEKYLEY

SEQ ID NO: 37533 - protein, 8 aa, Homo sapiens
  Table A; Target 37533; HLA-A*01:01; MAGEA1,MAGEB2,MAGEB4; ENSG00000198681,ENSG00000099399,ENSG00000120289; CTA,CTA,CTA
VQEKYLEY

SEQ ID NO: 37534 - protein, 8 aa, Homo sapiens
  Table A; Target 37534; HLA-B*15:01; MAGEA1,MAGEB2,MAGEB4; ENSG00000198681,ENSG00000099399,ENSG00000120289; CTA,CTA,CTA
VQEKYLEY

SEQ ID NO: 37535 - protein, 8 aa, Homo sapiens
  Table A; Target 37535; HLA-B*15:03; MAGEA1,MAGEB2,MAGEB4; ENSG00000198681,ENSG00000099399,ENSG00000120289; CTA,CTA,CTA
VQEKYLEY

SEQ ID NO: 37536 - protein, 9 aa, Homo sapiens
  Table A; Target 37536; HLA-B*15:01; MAGEA10; ENSG00000124260; CTA
AQAPLAVEE

SEQ ID NO: 37537 - protein, 11 aa, Homo sapiens
  Table A; Target 37537; HLA-C*03:04; MAGEA10; ENSG00000124260; CTA
ASASSSATGSF

SEQ ID NO: 37538 - protein, 9 aa, Homo sapiens
  Table A; Target 37538; HLA-B*39:01; MAGEA10; ENSG00000124260; CTA
ASSSATGSF

SEQ ID NO: 37539 - protein, 11 aa, Homo sapiens
  Table A; Target 37539; HLA-B*15:01; MAGEA10; ENSG00000124260; CTA
ASSSATGSFSY

SEQ ID NO: 37540 - protein, 11 aa, Homo sapiens
  Table A; Target 37540; HLA-B*57:01; MAGEA10; ENSG00000124260; CTA
ASSSATGSFSY

SEQ ID NO: 37541 - protein, 9 aa, Homo sapiens
  Table A; Target 37541; HLA-A*03:02; MAGEA10; ENSG00000124260; CTA
ATGSFSYPE

SEQ ID NO: 37542 - protein, 9 aa, Homo sapiens
  Table A; Target 37542; HLA-B*15:03; MAGEA10; ENSG00000124260; CTA
ATTDDTTAM

SEQ ID NO: 37543 - protein, 9 aa, Homo sapiens
  Table A; Target 37543; HLA-B*40:01; MAGEA10; ENSG00000124260; CTA
ATTDDTTAM

SEQ ID NO: 37544 - protein, 9 aa, Homo sapiens
  Table A; Target 37544; HLA-B*55:01; MAGEA10; ENSG00000124260; CTA
ATTDDTTAM

SEQ ID NO: 37545 - protein, 10 aa, Homo sapiens
  Table A; Target 37545; HLA-A*30:01; MAGEA10; ENSG00000124260; CTA
DETPNPPQSA

SEQ ID NO: 37546 - protein, 10 aa, Homo sapiens
  Table A; Target 37546; HLA-B*51:01; MAGEA10; ENSG00000124260; CTA
DPTGHSFVLV

SEQ ID NO: 37547 - protein, 10 aa, Homo sapiens
  Table A; Target 37547; HLA-C*07:06; MAGEA10; ENSG00000124260; CTA
DVKEVDPTGH

SEQ ID NO: 37548 - protein, 9 aa, Homo sapiens
  Table A; Target 37548; HLA-A*33:03; MAGEA10; ENSG00000124260; CTA
EALKDEEER

SEQ ID NO: 37549 - protein, 9 aa, Homo sapiens
  Table A; Target 37549; HLA-C*07:01; MAGEA10; ENSG00000124260; CTA
EALNMMGLY

SEQ ID NO: 37550 - protein, 10 aa, Homo sapiens
  Table A; Target 37550; HLA-B*18:01; MAGEA10; ENSG00000124260; CTA
EESPSTLQVL

SEQ ID NO: 37551 - protein, 10 aa, Homo sapiens
  Table A; Target 37551; HLA-B*18:01; MAGEA10; ENSG00000124260; CTA
EILESVIRNY

SEQ ID NO: 37552 - protein, 10 aa, Homo sapiens
  Table A; Target 37552; HLA-B*57:01; MAGEA10; ENSG00000124260; CTA
EILESVIRNY

SEQ ID NO: 37553 - protein, 8 aa, Homo sapiens
  Table A; Target 37553; HLA-B*08:01; MAGEA10; ENSG00000124260; CTA
EIRKMSLL

SEQ ID NO: 37554 - protein, 9 aa, Homo sapiens
  Table A; Target 37554; HLA-A*26:01; MAGEA10; ENSG00000124260; CTA
ESPSTLQVL

SEQ ID NO: 37555 - protein, 9 aa, Homo sapiens
  Table A; Target 37555; HLA-C*01:02; MAGEA10; ENSG00000124260; CTA
EVDPTGHSF

SEQ ID NO: 37556 - protein, 9 aa, Homo sapiens
  Table A; Target 37556; HLA-C*16:01; MAGEA10; ENSG00000124260; CTA
EVDPTGHSF

SEQ ID NO: 37557 - protein, 9 aa, Homo sapiens
  Table A; Target 37557; HLA-B*56:01; MAGEA10; ENSG00000124260; CTA
FPLLFSEAS

SEQ ID NO: 37558 - protein, 8 aa, Homo sapiens
  Table A; Target 37558; HLA-B*56:01; MAGEA10; ENSG00000124260; CTA
FPSSFPSS

SEQ ID NO: 37559 - protein, 10 aa, Homo sapiens
  Table A; Target 37559; HLA-B*27:05; MAGEA10; ENSG00000124260; CTA
FPSSFPSSSS

SEQ ID NO: 37560 - protein, 10 aa, Homo sapiens
  Table A; Target 37560; HLA-C*07:02; MAGEA10; ENSG00000124260; CTA
FPSSFPSSSS

SEQ ID NO: 37561 - protein, 9 aa, Homo sapiens
  Table A; Target 37561; HLA-C*03:03; MAGEA10; ENSG00000124260; CTA
FVLVTSLGL

SEQ ID NO: 37562 - protein, 9 aa, Homo sapiens
  Table A; Target 37562; HLA-C*03:04; MAGEA10; ENSG00000124260; CTA
FVLVTSLGL

SEQ ID NO: 37563 - protein, 11 aa, Homo sapiens
  Table A; Target 37563; HLA-A*01:01; MAGEA10; ENSG00000124260; CTA
FVLVTSLGLTY

SEQ ID NO: 37564 - protein, 11 aa, Homo sapiens
  Table A; Target 37564; HLA-B*13:02; MAGEA10; ENSG00000124260; CTA
GLEGAQAPLAV

SEQ ID NO: 37565 - protein, 8 aa, Homo sapiens
  Table A; Target 37565; HLA-A*03:01; MAGEA10; ENSG00000124260; CTA
GLYDGMEH

SEQ ID NO: 37566 - protein, 9 aa, Homo sapiens
  Table A; Target 37566; HLA-B*27:05; MAGEA10; ENSG00000124260; CTA
GLYDGMEHL

SEQ ID NO: 37567 - protein, 9 aa, Homo sapiens
  Table A; Target 37567; HLA-B*40:02; MAGEA10; ENSG00000124260; CTA
GLYDGMEHL

SEQ ID NO: 37568 - protein, 9 aa, Homo sapiens
  Table A; Target 37568; HLA-C*01:02; MAGEA10; ENSG00000124260; CTA
GLYDGMEHL

SEQ ID NO: 37569 - protein, 10 aa, Homo sapiens
  Table A; Target 37569; HLA-B*38:01; MAGEA10; ENSG00000124260; CTA
GLYDGMEHLI

SEQ ID NO: 37570 - protein, 10 aa, Homo sapiens
  Table A; Target 37570; HLA-B*49:01; MAGEA10; ENSG00000124260; CTA
GLYDGMEHLI

SEQ ID NO: 37571 - protein, 9 aa, Homo sapiens
  Table A; Target 37571; HLA-C*04:01; MAGEA10; ENSG00000124260; CTA
GMLSDVQSM

SEQ ID NO: 37572 - protein, 9 aa, Homo sapiens
  Table A; Target 37572; HLA-B*15:03; MAGEA10; ENSG00000124260; CTA
GSDPARYEF

SEQ ID NO: 37573 - protein, 9 aa, Homo sapiens
  Table A; Target 37573; HLA-B*27:05; MAGEA10; ENSG00000124260; CTA
GSDPARYEF

SEQ ID NO: 37574 - protein, 10 aa, Homo sapiens
  Table A; Target 37574; HLA-A*01:01; MAGEA10; ENSG00000124260; CTA
GSDPRSFPLW

SEQ ID NO: 37575 - protein, 9 aa, Homo sapiens
  Table A; Target 37575; HLA-A*30:01; MAGEA10; ENSG00000124260; CTA
HSFVLVTSL

SEQ ID NO: 37576 - protein, 9 aa, Homo sapiens
  Table A; Target 37576; HLA-C*01:02; MAGEA10; ENSG00000124260; CTA
HSFVLVTSL

SEQ ID NO: 37577 - protein, 9 aa, Homo sapiens
  Table A; Target 37577; HLA-C*05:01; MAGEA10; ENSG00000124260; CTA
HSFVLVTSL

SEQ ID NO: 37578 - protein, 9 aa, Homo sapiens
  Table A; Target 37578; HLA-C*16:04; MAGEA10; ENSG00000124260; CTA
HSFVLVTSL

SEQ ID NO: 37579 - protein, 10 aa, Homo sapiens
  Table A; Target 37579; HLA-C*02:02; MAGEA10; ENSG00000124260; CTA
IATTDDTTAM

SEQ ID NO: 37580 - protein, 9 aa, Homo sapiens
  Table A; Target 37580; HLA-C*12:03; MAGEA10; ENSG00000124260; CTA
ILESVIRNY

SEQ ID NO: 37581 - protein, 9 aa, Homo sapiens
  Table A; Target 37581; HLA-C*16:04; MAGEA10; ENSG00000124260; CTA
ILESVIRNY

SEQ ID NO: 37582 - protein, 8 aa, Homo sapiens
  Table A; Target 37582; HLA-B*56:01; MAGEA10; ENSG00000124260; CTA
IPSTPEEV

SEQ ID NO: 37583 - protein, 8 aa, Homo sapiens
  Table A; Target 37583; HLA-C*16:02; MAGEA10; ENSG00000124260; CTA
IYGEPRKL

SEQ ID NO: 37584 - protein, 11 aa, Homo sapiens
  Table A; Target 37584; HLA-B*38:01; MAGEA10; ENSG00000124260; CTA
KEESPSTLQVL

SEQ ID NO: 37585 - protein, 11 aa, Homo sapiens
  Table A; Target 37585; HLA-B*44:02; MAGEA10; ENSG00000124260; CTA
KEESPSTLQVL

SEQ ID NO: 37586 - protein, 10 aa, Homo sapiens
  Table A; Target 37586; HLA-B*15:01; MAGEA10; ENSG00000124260; CTA
KVNGSDPRSF

SEQ ID NO: 37587 - protein, 9 aa, Homo sapiens
  Table A; Target 37587; HLA-C*06:02; MAGEA10; ENSG00000124260; CTA
KVTDLVQFL

SEQ ID NO: 37588 - protein, 10 aa, Homo sapiens
  Table A; Target 37588; HLA-A*30:01; MAGEA10; ENSG00000124260; CTA
LEGAQAPLAV

SEQ ID NO: 37589 - protein, 8 aa, Homo sapiens
  Table A; Target 37589; HLA-A*30:02; MAGEA10; ENSG00000124260; CTA
LESVIRNY

SEQ ID NO: 37590 - protein, 9 aa, Homo sapiens
  Table A; Target 37590; HLA-A*02:03; MAGEA10; ENSG00000124260; CTA
LIYGEPRKL

SEQ ID NO: 37591 - protein, 9 aa, Homo sapiens
  Table A; Target 37591; HLA-B*27:02; MAGEA10; ENSG00000124260; CTA
LPDSESLPR

SEQ ID NO: 37592 - protein, 9 aa, Homo sapiens
  Table A; Target 37592; HLA-B*35:03; MAGEA10; ENSG00000124260; CTA
LPLDQSDEG

SEQ ID NO: 37593 - protein, 9 aa, Homo sapiens
  Table A; Target 37593; HLA-B*54:01; MAGEA10; ENSG00000124260; CTA
LPLDQSDEG

SEQ ID NO: 37594 - protein, 10 aa, Homo sapiens
  Table A; Target 37594; HLA-B*38:01; MAGEA10; ENSG00000124260; CTA
LQVLPDSESL

SEQ ID NO: 37595 - protein, 9 aa, Homo sapiens
  Table A; Target 37595; HLA-B*15:01; MAGEA10; ENSG00000124260; CTA
LSIVFIEGY

SEQ ID NO: 37596 - protein, 9 aa, Homo sapiens
  Table A; Target 37596; HLA-B*58:01; MAGEA10; ENSG00000124260; CTA
LSIVFIEGY

SEQ ID NO: 37597 - protein, 10 aa, Homo sapiens
  Table A; Target 37597; HLA-A*02:04; MAGEA10; ENSG00000124260; CTA
LVFGIDVKEV

SEQ ID NO: 37598 - protein, 10 aa, Homo sapiens
  Table A; Target 37598; HLA-A*02:07; MAGEA10; ENSG00000124260; CTA
LVFGIDVKEV

SEQ ID NO: 37599 - protein, 9 aa, Homo sapiens
  Table A; Target 37599; HLA-C*07:04; MAGEA10; ENSG00000124260; CTA
LYDGMEHLI

SEQ ID NO: 37600 - protein, 9 aa, Homo sapiens
  Table A; Target 37600; HLA-C*03:03; MAGEA10; ENSG00000124260; CTA
MASASSSAT

SEQ ID NO: 37601 - protein, 10 aa, Homo sapiens
  Table A; Target 37601; HLA-C*07:02; MAGEA10; ENSG00000124260; CTA
MLSDVQSMPK

SEQ ID NO: 37602 - protein, 8 aa, Homo sapiens
  Table A; Target 37602; HLA-B*56:01; MAGEA10; ENSG00000124260; CTA
MPKTGILI

SEQ ID NO: 37603 - protein, 9 aa, Homo sapiens
  Table A; Target 37603; HLA-A*03:01; MAGEA10; ENSG00000124260; CTA
MSLLKFLAK

SEQ ID NO: 37604 - protein, 9 aa, Homo sapiens
  Table A; Target 37604; HLA-B*37:01; MAGEA10; ENSG00000124260; CTA
QDWVQENYL

SEQ ID NO: 37605 - protein, 9 aa, Homo sapiens
  Table A; Target 37605; HLA-B*13:02; MAGEA10; ENSG00000124260; CTA
QIACSSPSV

SEQ ID NO: 37606 - protein, 9 aa, Homo sapiens
  Table A; Target 37606; HLA-B*38:01; MAGEA10; ENSG00000124260; CTA
QKEESPSTL

SEQ ID NO: 37607 - protein, 8 aa, Homo sapiens
  Table A; Target 37607; HLA-A*03:01; MAGEA10; ENSG00000124260; CTA
QMKEPITK

SEQ ID NO: 37608 - protein, 8 aa, Homo sapiens
  Table A; Target 37608; HLA-A*03:02; MAGEA10; ENSG00000124260; CTA
QMKEPITK

SEQ ID NO: 37609 - protein, 9 aa, Homo sapiens
  Table A; Target 37609; HLA-B*37:01; MAGEA10; ENSG00000124260; CTA
QSMPKTGIL

SEQ ID NO: 37610 - protein, 9 aa, Homo sapiens
  Table A; Target 37610; HLA-C*03:04; MAGEA10; ENSG00000124260; CTA
QSMPKTGIL

SEQ ID NO: 37611 - protein, 9 aa, Homo sapiens
  Table A; Target 37611; HLA-B*58:01; MAGEA10; ENSG00000124260; CTA
QVLPDSESL

SEQ ID NO: 37612 - protein, 11 aa, Homo sapiens
  Table A; Target 37612; HLA-A*03:02; MAGEA10; ENSG00000124260; CTA
QVLPDSESLPR

SEQ ID NO: 37613 - protein, 10 aa, Homo sapiens
  Table A; Target 37613; HLA-C*05:01; MAGEA10; ENSG00000124260; CTA
SASSSATGSF

SEQ ID NO: 37614 - protein, 9 aa, Homo sapiens
  Table A; Target 37614; HLA-B*49:01; MAGEA10; ENSG00000124260; CTA
SETQGLEGA

SEQ ID NO: 37615 - protein, 9 aa, Homo sapiens
  Table A; Target 37615; HLA-C*14:02; MAGEA10; ENSG00000124260; CTA
SFPSSSSSS

SEQ ID NO: 37616 - protein, 8 aa, Homo sapiens
  Table A; Target 37616; HLA-B*35:03; MAGEA10; ENSG00000124260; CTA
SPSTLQVL

SEQ ID NO: 37617 - protein, 8 aa, Homo sapiens
  Table A; Target 37617; HLA-B*56:01; MAGEA10; ENSG00000124260; CTA
SPSTLQVL

SEQ ID NO: 37618 - protein, 9 aa, Homo sapiens
  Table A; Target 37618; HLA-A*68:02; MAGEA10; ENSG00000124260; CTA
SSPSVVASL

SEQ ID NO: 37619 - protein, 9 aa, Homo sapiens
  Table A; Target 37619; HLA-B*07:02; MAGEA10; ENSG00000124260; CTA
SSPSVVASL

SEQ ID NO: 37620 - protein, 9 aa, Homo sapiens
  Table A; Target 37620; HLA-C*05:01; MAGEA10; ENSG00000124260; CTA
SSPSVVASL

SEQ ID NO: 37621 - protein, 9 aa, Homo sapiens
  Table A; Target 37621; HLA-C*07:02; MAGEA10; ENSG00000124260; CTA
SSPSVVASL

SEQ ID NO: 37622 - protein, 8 aa, Homo sapiens
  Table A; Target 37622; HLA-A*32:01; MAGEA10; ENSG00000124260; CTA
SSSATGSF

SEQ ID NO: 37623 - protein, 9 aa, Homo sapiens
  Table A; Target 37623; HLA-C*06:02; MAGEA10; ENSG00000124260; CTA
SSSFPSSFP

SEQ ID NO: 37624 - protein, 9 aa, Homo sapiens
  Table A; Target 37624; HLA-A*32:01; MAGEA10; ENSG00000124260; CTA
SSSSSSSCY

SEQ ID NO: 37625 - protein, 9 aa, Homo sapiens
  Table A; Target 37625; HLA-B*35:01; MAGEA10; ENSG00000124260; CTA
SSTSTSSSF

SEQ ID NO: 37626 - protein, 9 aa, Homo sapiens
  Table A; Target 37626; HLA-B*57:01; MAGEA10; ENSG00000124260; CTA
SSTSTSSSF

SEQ ID NO: 37627 - protein, 10 aa, Homo sapiens
  Table A; Target 37627; HLA-A*30:02; MAGEA10; ENSG00000124260; CTA
STSSSFPSSF

SEQ ID NO: 37628 - protein, 8 aa, Homo sapiens
  Table A; Target 37628; HLA-A*32:01; MAGEA10; ENSG00000124260; CTA
STSTSSSF

SEQ ID NO: 37629 - protein, 8 aa, Homo sapiens
  Table A; Target 37629; HLA-B*37:01; MAGEA10; ENSG00000124260; CTA
STSTSSSF

SEQ ID NO: 37630 - protein, 8 aa, Homo sapiens
  Table A; Target 37630; HLA-C*14:02; MAGEA10; ENSG00000124260; CTA
STSTSSSF

SEQ ID NO: 37631 - protein, 10 aa, Homo sapiens
  Table A; Target 37631; HLA-A*11:01; MAGEA10; ENSG00000124260; CTA
STSTSSSFPS

SEQ ID NO: 37632 - protein, 10 aa, Homo sapiens
  Table A; Target 37632; HLA-C*16:02; MAGEA10; ENSG00000124260; CTA
TPNPPQSAQI

SEQ ID NO: 37633 - protein, 9 aa, Homo sapiens
  Table A; Target 37633; HLA-B*15:03; MAGEA10; ENSG00000124260; CTA
TQDWVQENY

SEQ ID NO: 37634 - protein, 9 aa, Homo sapiens
  Table A; Target 37634; HLA-B*15:03; MAGEA10; ENSG00000124260; CTA
TSSSFPSSF

SEQ ID NO: 37635 - protein, 9 aa, Homo sapiens
  Table A; Target 37635; HLA-B*18:01; MAGEA10; ENSG00000124260; CTA
TSSSFPSSF

SEQ ID NO: 37636 - protein, 9 aa, Homo sapiens
  Table A; Target 37636; HLA-B*57:01; MAGEA10; ENSG00000124260; CTA
TSSSFPSSF

SEQ ID NO: 37637 - protein, 9 aa, Homo sapiens
  Table A; Target 37637; HLA-C*12:03; MAGEA10; ENSG00000124260; CTA
TSSSFPSSF

SEQ ID NO: 37638 - protein, 8 aa, Homo sapiens
  Table A; Target 37638; HLA-A*32:01; MAGEA10; ENSG00000124260; CTA
TTDDTTAM

SEQ ID NO: 37639 - protein, 8 aa, Homo sapiens
  Table A; Target 37639; HLA-B*39:01; MAGEA10; ENSG00000124260; CTA
TTDDTTAM

SEQ ID NO: 37640 - protein, 11 aa, Homo sapiens
  Table A; Target 37640; HLA-B*39:01; MAGEA10; ENSG00000124260; CTA
TTDDTTAMASA

SEQ ID NO: 37641 - protein, 8 aa, Homo sapiens
  Table A; Target 37641; HLA-A*32:01; MAGEA10; ENSG00000124260; CTA
VDPTGHSF

SEQ ID NO: 37642 - protein, 8 aa, Homo sapiens
  Table A; Target 37642; HLA-B*58:01; MAGEA10; ENSG00000124260; CTA
VDPTGHSF

SEQ ID NO: 37643 - protein, 11 aa, Homo sapiens
  Table A; Target 37643; HLA-B*40:01; MAGEA10; ENSG00000124260; CTA
VEEDASSSTST

SEQ ID NO: 37644 - protein, 8 aa, Homo sapiens
  Table A; Target 37644; HLA-C*05:01; MAGEA10; ENSG00000124260; CTA
VLPDSESL

SEQ ID NO: 37645 - protein, 10 aa, Homo sapiens
  Table A; Target 37645; HLA-B*44:02; MAGEA10; ENSG00000124260; CTA
VLVTSLGLTY

SEQ ID NO: 37646 - protein, 10 aa, Homo sapiens
  Table A; Target 37646; HLA-C*14:02; MAGEA10; ENSG00000124260; CTA
VLVTSLGLTY

SEQ ID NO: 37647 - protein, 10 aa, Homo sapiens
  Table A; Target 37647; HLA-C*16:04; MAGEA10; ENSG00000124260; CTA
VLVTSLGLTY

SEQ ID NO: 37648 - protein, 9 aa, Homo sapiens
  Table A; Target 37648; HLA-C*07:01; MAGEA10; ENSG00000124260; CTA
VNGSDPRSF

SEQ ID NO: 37649 - protein, 9 aa, Homo sapiens
  Table A; Target 37649; HLA-A*01:01; MAGEA10; ENSG00000124260; CTA
VPGSDPARY

SEQ ID NO: 37650 - protein, 8 aa, Homo sapiens
  Table A; Target 37650; HLA-B*15:01; MAGEA10; ENSG00000124260; CTA
VQFLLFKY

SEQ ID NO: 37651 - protein, 8 aa, Homo sapiens
  Table A; Target 37651; HLA-B*15:03; MAGEA10; ENSG00000124260; CTA
VQFLLFKY

SEQ ID NO: 37652 - protein, 8 aa, Homo sapiens
  Table A; Target 37652; HLA-A*30:02; MAGEA10; ENSG00000124260; CTA
VTSLGLTY

SEQ ID NO: 37653 - protein, 8 aa, Homo sapiens
  Table A; Target 37653; HLA-C*01:02; MAGEA10; ENSG00000124260; CTA
VTSLGLTY

SEQ ID NO: 37654 - protein, 8 aa, Homo sapiens
  Table A; Target 37654; HLA-A*02:07; MAGEA10; ENSG00000124260; CTA
YEDHFPLL

SEQ ID NO: 37655 - protein, 8 aa, Homo sapiens
  Table A; Target 37655; HLA-B*54:01; MAGEA10; ENSG00000124260; CTA
YPLIPSTP

SEQ ID NO: 37656 - protein, 9 aa, Homo sapiens
  Table A; Target 37656; HLA-A*01:01; MAGEA10; ENSG00000124260; CTA
YQMKEPITK

SEQ ID NO: 37657 - protein, 9 aa, Homo sapiens
  Table A; Target 37657; HLA-A*02:01; MAGEA10; ENSG00000124260; CTA
YQMKEPITK

SEQ ID NO: 37658 - protein, 9 aa, Homo sapiens
  Table A; Target 37658; HLA-A*31:01; MAGEA10; ENSG00000124260; CTA
YQMKEPITK

SEQ ID NO: 37659 - protein, 9 aa, Homo sapiens
  Table A; Target 37659; HLA-B*15:03; MAGEA10; ENSG00000124260; CTA
YQMKEPITK

SEQ ID NO: 37660 - protein, 9 aa, Homo sapiens
  Table A; Target 37660; HLA-C*16:04; MAGEA10; ENSG00000124260; CTA
YQMKEPITK

SEQ ID NO: 37661 - protein, 8 aa, Homo sapiens
  Table A; Target 37661; HLA-B*49:01; MAGEA10,MAGEA11,MAGEA8; ENSG00000124260,ENSG00000185247,ENSG00000156009; CTA,TAA,TAA
FGIDVKEV

SEQ ID NO: 37662 - protein, 8 aa, Homo sapiens
  Table A; Target 37662; HLA-B*15:01; MAGEA10,MAGEA3,MAGEA6,MAGEA8; ENSG00000124260,ENSG00000221867,ENSG00000197172,ENSG00000156009; CTA,CTA,CTA,TAA
VQENYLEY

SEQ ID NO: 37663 - protein, 8 aa, Homo sapiens
  Table A; Target 37663; HLA-C*07:01; MAGEA10,MAGEA3,MAGEA6,MAGEA8; ENSG00000124260,ENSG00000221867,ENSG00000197172,ENSG00000156009; CTA,CTA,CTA,TAA
VQENYLEY

SEQ ID NO: 37664 - protein, 9 aa, Homo sapiens
  Table A; Target 37664; HLA-A*03:01; MAGEA10,MAGEA8; ENSG00000124260,ENSG00000156009; CTA,TAA
WVQENYLEY

SEQ ID NO: 37665 - protein, 8 aa, Homo sapiens
  Table A; Target 37665; HLA-B*08:01; MAGEA11; ENSG00000185247; TAA
AAFFSSTL

SEQ ID NO: 37666 - protein, 8 aa, Homo sapiens
  Table A; Target 37666; HLA-B*15:01; MAGEA11; ENSG00000185247; TAA
AAFFSSTL

SEQ ID NO: 37667 - protein, 8 aa, Homo sapiens
  Table A; Target 37667; HLA-B*15:03; MAGEA11; ENSG00000185247; TAA
AAFFSSTL

SEQ ID NO: 37668 - protein, 8 aa, Homo sapiens
  Table A; Target 37668; HLA-B*46:01; MAGEA11; ENSG00000185247; TAA
AAFFSSTL

SEQ ID NO: 37669 - protein, 8 aa, Homo sapiens
  Table A; Target 37669; HLA-B*58:01; MAGEA11; ENSG00000185247; TAA
AAFFSSTL

SEQ ID NO: 37670 - protein, 8 aa, Homo sapiens
  Table A; Target 37670; HLA-C*01:02; MAGEA11; ENSG00000185247; TAA
AAFFSSTL

SEQ ID NO: 37671 - protein, 8 aa, Homo sapiens
  Table A; Target 37671; HLA-C*02:02; MAGEA11; ENSG00000185247; TAA
AAFFSSTL

SEQ ID NO: 37672 - protein, 8 aa, Homo sapiens
  Table A; Target 37672; HLA-C*03:03; MAGEA11; ENSG00000185247; TAA
AAFFSSTL

SEQ ID NO: 37673 - protein, 8 aa, Homo sapiens
  Table A; Target 37673; HLA-C*03:04; MAGEA11; ENSG00000185247; TAA
AAFFSSTL

SEQ ID NO: 37674 - protein, 8 aa, Homo sapiens
  Table A; Target 37674; HLA-C*05:01; MAGEA11; ENSG00000185247; TAA
AAFFSSTL

SEQ ID NO: 37675 - protein, 8 aa, Homo sapiens
  Table A; Target 37675; HLA-C*12:03; MAGEA11; ENSG00000185247; TAA
AAFFSSTL

SEQ ID NO: 37676 - protein, 8 aa, Homo sapiens
  Table A; Target 37676; HLA-C*16:04; MAGEA11; ENSG00000185247; TAA
AAFFSSTL

SEQ ID NO: 37677 - protein, 8 aa, Homo sapiens
  Table A; Target 37677; HLA-B*37:01; MAGEA11; ENSG00000185247; TAA
ADLTRVIM

SEQ ID NO: 37678 - protein, 9 aa, Homo sapiens
  Table A; Target 37678; HLA-B*37:01; MAGEA11; ENSG00000185247; TAA
ADLTRVIMP

SEQ ID NO: 37679 - protein, 9 aa, Homo sapiens
  Table A; Target 37679; HLA-A*30:01; MAGEA11; ENSG00000185247; TAA
AEEQEAAFF

SEQ ID NO: 37680 - protein, 9 aa, Homo sapiens
  Table A; Target 37680; HLA-B*27:02; MAGEA11; ENSG00000185247; TAA
AEEQEAAFF

SEQ ID NO: 37681 - protein, 9 aa, Homo sapiens
  Table A; Target 37681; HLA-B*37:01; MAGEA11; ENSG00000185247; TAA
AEEQEAAFF

SEQ ID NO: 37682 - protein, 9 aa, Homo sapiens
  Table A; Target 37682; HLA-B*38:01; MAGEA11; ENSG00000185247; TAA
AEEQEAAFF

SEQ ID NO: 37683 - protein, 9 aa, Homo sapiens
  Table A; Target 37683; HLA-B*40:01; MAGEA11; ENSG00000185247; TAA
AEEQEAAFF

SEQ ID NO: 37684 - protein, 9 aa, Homo sapiens
  Table A; Target 37684; HLA-B*44:02; MAGEA11; ENSG00000185247; TAA
AEEQEAAFF

SEQ ID NO: 37685 - protein, 9 aa, Homo sapiens
  Table A; Target 37685; HLA-B*44:03; MAGEA11; ENSG00000185247; TAA
AEEQEAAFF

SEQ ID NO: 37686 - protein, 9 aa, Homo sapiens
  Table A; Target 37686; HLA-B*49:01; MAGEA11; ENSG00000185247; TAA
AEEQEAAFF

SEQ ID NO: 37687 - protein, 9 aa, Homo sapiens
  Table A; Target 37687; HLA-C*16:04; MAGEA11; ENSG00000185247; TAA
AEEQEAAFF

SEQ ID NO: 37688 - protein, 8 aa, Homo sapiens
  Table A; Target 37688; HLA-A*30:01; MAGEA11; ENSG00000185247; TAA
AEMLGSVI

SEQ ID NO: 37689 - protein, 8 aa, Homo sapiens
  Table A; Target 37689; HLA-B*13:02; MAGEA11; ENSG00000185247; TAA
AEMLGSVI

SEQ ID NO: 37690 - protein, 8 aa, Homo sapiens
  Table A; Target 37690; HLA-B*18:01; MAGEA11; ENSG00000185247; TAA
AEMLGSVI

SEQ ID NO: 37691 - protein, 8 aa, Homo sapiens
  Table A; Target 37691; HLA-B*27:02; MAGEA11; ENSG00000185247; TAA
AEMLGSVI

SEQ ID NO: 37692 - protein, 8 aa, Homo sapiens
  Table A; Target 37692; HLA-B*37:01; MAGEA11; ENSG00000185247; TAA
AEMLGSVI

SEQ ID NO: 37693 - protein, 8 aa, Homo sapiens
  Table A; Target 37693; HLA-B*40:01; MAGEA11; ENSG00000185247; TAA
AEMLGSVI

SEQ ID NO: 37694 - protein, 8 aa, Homo sapiens
  Table A; Target 37694; HLA-B*40:02; MAGEA11; ENSG00000185247; TAA
AEMLGSVI

SEQ ID NO: 37695 - protein, 8 aa, Homo sapiens
  Table A; Target 37695; HLA-B*44:02; MAGEA11; ENSG00000185247; TAA
AEMLGSVI

SEQ ID NO: 37696 - protein, 8 aa, Homo sapiens
  Table A; Target 37696; HLA-B*44:03; MAGEA11; ENSG00000185247; TAA
AEMLGSVI

SEQ ID NO: 37697 - protein, 8 aa, Homo sapiens
  Table A; Target 37697; HLA-B*49:01; MAGEA11; ENSG00000185247; TAA
AEMLGSVI

SEQ ID NO: 37698 - protein, 10 aa, Homo sapiens
  Table A; Target 37698; HLA-B*44:02; MAGEA11; ENSG00000185247; TAA
AEMLGSVIKN

SEQ ID NO: 37699 - protein, 11 aa, Homo sapiens
  Table A; Target 37699; HLA-A*30:01; MAGEA11; ENSG00000185247; TAA
AEMLGSVIKNY

SEQ ID NO: 37700 - protein, 11 aa, Homo sapiens
  Table A; Target 37700; HLA-A*30:02; MAGEA11; ENSG00000185247; TAA
AEMLGSVIKNY

SEQ ID NO: 37701 - protein, 11 aa, Homo sapiens
  Table A; Target 37701; HLA-B*27:02; MAGEA11; ENSG00000185247; TAA
AEMLGSVIKNY

SEQ ID NO: 37702 - protein, 11 aa, Homo sapiens
  Table A; Target 37702; HLA-B*44:02; MAGEA11; ENSG00000185247; TAA
AEMLGSVIKNY

SEQ ID NO: 37703 - protein, 11 aa, Homo sapiens
  Table A; Target 37703; HLA-B*44:03; MAGEA11; ENSG00000185247; TAA
AEMLGSVIKNY

SEQ ID NO: 37704 - protein, 11 aa, Homo sapiens
  Table A; Target 37704; HLA-C*16:04; MAGEA11; ENSG00000185247; TAA
AEMLGSVIKNY

SEQ ID NO: 37705 - protein, 8 aa, Homo sapiens
  Table A; Target 37705; HLA-B*37:01; MAGEA11; ENSG00000185247; TAA
AESPSPPQ

SEQ ID NO: 37706 - protein, 10 aa, Homo sapiens
  Table A; Target 37706; HLA-A*30:01; MAGEA11; ENSG00000185247; TAA
AESPSPPQSP

SEQ ID NO: 37707 - protein, 10 aa, Homo sapiens
  Table A; Target 37707; HLA-B*49:01; MAGEA11; ENSG00000185247; TAA
AESPSPPQSP

SEQ ID NO: 37708 - protein, 11 aa, Homo sapiens
  Table A; Target 37708; HLA-B*44:02; MAGEA11; ENSG00000185247; TAA
AETSKMKVLEY

SEQ ID NO: 37709 - protein, 11 aa, Homo sapiens
  Table A; Target 37709; HLA-B*44:03; MAGEA11; ENSG00000185247; TAA
AETSKMKVLEY

SEQ ID NO: 37710 - protein, 9 aa, Homo sapiens
  Table A; Target 37710; HLA-B*13:02; MAGEA11; ENSG00000185247; TAA
AFFSSTLNV

SEQ ID NO: 37711 - protein, 9 aa, Homo sapiens
  Table A; Target 37711; HLA-C*14:02; MAGEA11; ENSG00000185247; TAA
AFFSSTLNV

SEQ ID NO: 37712 - protein, 11 aa, Homo sapiens
  Table A; Target 37712; HLA-A*30:02; MAGEA11; ENSG00000185247; TAA
ALQAEEQEAAF

SEQ ID NO: 37713 - protein, 11 aa, Homo sapiens
  Table A; Target 37713; HLA-B*15:01; MAGEA11; ENSG00000185247; TAA
ALQAEEQEAAF

SEQ ID NO: 37714 - protein, 9 aa, Homo sapiens
  Table A; Target 37714; HLA-A*02:01; MAGEA11; ENSG00000185247; TAA
ALREEGEGV

SEQ ID NO: 37715 - protein, 9 aa, Homo sapiens
  Table A; Target 37715; HLA-A*02:03; MAGEA11; ENSG00000185247; TAA
ALREEGEGV

SEQ ID NO: 37716 - protein, 9 aa, Homo sapiens
  Table A; Target 37716; HLA-A*02:04; MAGEA11; ENSG00000185247; TAA
ALREEGEGV

SEQ ID NO: 37717 - protein, 9 aa, Homo sapiens
  Table A; Target 37717; HLA-A*02:07; MAGEA11; ENSG00000185247; TAA
ALREEGEGV

SEQ ID NO: 37718 - protein, 9 aa, Homo sapiens
  Table A; Target 37718; HLA-B*07:02; MAGEA11; ENSG00000185247; TAA
ALREEGEGV

SEQ ID NO: 37719 - protein, 9 aa, Homo sapiens
  Table A; Target 37719; HLA-B*13:02; MAGEA11; ENSG00000185247; TAA
ALREEGEGV

SEQ ID NO: 37720 - protein, 9 aa, Homo sapiens
  Table A; Target 37720; HLA-B*15:01; MAGEA11; ENSG00000185247; TAA
ALREEGEGV

SEQ ID NO: 37721 - protein, 9 aa, Homo sapiens
  Table A; Target 37721; HLA-B*40:02; MAGEA11; ENSG00000185247; TAA
ALREEGEGV

SEQ ID NO: 37722 - protein, 9 aa, Homo sapiens
  Table A; Target 37722; HLA-B*46:01; MAGEA11; ENSG00000185247; TAA
ALREEGEGV

SEQ ID NO: 37723 - protein, 9 aa, Homo sapiens
  Table A; Target 37723; HLA-B*55:01; MAGEA11; ENSG00000185247; TAA
ALREEGEGV

SEQ ID NO: 37724 - protein, 9 aa, Homo sapiens
  Table A; Target 37724; HLA-C*01:02; MAGEA11; ENSG00000185247; TAA
ALREEGEGV

SEQ ID NO: 37725 - protein, 9 aa, Homo sapiens
  Table A; Target 37725; HLA-C*06:02; MAGEA11; ENSG00000185247; TAA
ALREEGEGV

SEQ ID NO: 37726 - protein, 9 aa, Homo sapiens
  Table A; Target 37726; HLA-C*07:02; MAGEA11; ENSG00000185247; TAA
ALREEGEGV

SEQ ID NO: 37727 - protein, 9 aa, Homo sapiens
  Table A; Target 37727; HLA-C*14:02; MAGEA11; ENSG00000185247; TAA
ALREEGEGV

SEQ ID NO: 37728 - protein, 9 aa, Homo sapiens
  Table A; Target 37728; HLA-A*01:01; MAGEA11; ENSG00000185247; TAA
AMDAIFGSL

SEQ ID NO: 37729 - protein, 9 aa, Homo sapiens
  Table A; Target 37729; HLA-A*02:07; MAGEA11; ENSG00000185247; TAA
AMDAIFGSL

SEQ ID NO: 37730 - protein, 9 aa, Homo sapiens
  Table A; Target 37730; HLA-A*32:01; MAGEA11; ENSG00000185247; TAA
AMDAIFGSL

SEQ ID NO: 37731 - protein, 9 aa, Homo sapiens
  Table A; Target 37731; HLA-B*40:01; MAGEA11; ENSG00000185247; TAA
AMDAIFGSL

SEQ ID NO: 37732 - protein, 9 aa, Homo sapiens
  Table A; Target 37732; HLA-C*01:02; MAGEA11; ENSG00000185247; TAA
AMDAIFGSL

SEQ ID NO: 37733 - protein, 9 aa, Homo sapiens
  Table A; Target 37733; HLA-C*02:02; MAGEA11; ENSG00000185247; TAA
AMDAIFGSL

SEQ ID NO: 37734 - protein, 9 aa, Homo sapiens
  Table A; Target 37734; HLA-C*04:01; MAGEA11; ENSG00000185247; TAA
AMDAIFGSL

SEQ ID NO: 37735 - protein, 9 aa, Homo sapiens
  Table A; Target 37735; HLA-C*05:01; MAGEA11; ENSG00000185247; TAA
AMDAIFGSL

SEQ ID NO: 37736 - protein, 11 aa, Homo sapiens
  Table A; Target 37736; HLA-A*30:02; MAGEA11; ENSG00000185247; TAA
ANANGRDPTSY

SEQ ID NO: 37737 - protein, 11 aa, Homo sapiens
  Table A; Target 37737; HLA-C*12:03; MAGEA11; ENSG00000185247; TAA
ANANGRDPTSY

SEQ ID NO: 37738 - protein, 9 aa, Homo sapiens
  Table A; Target 37738; HLA-A*30:02; MAGEA11; ENSG00000185247; TAA
ANGRDPTSY

SEQ ID NO: 37739 - protein, 9 aa, Homo sapiens
  Table A; Target 37739; HLA-A*33:01; MAGEA11; ENSG00000185247; TAA
ANLEDRSPR

SEQ ID NO: 37740 - protein, 9 aa, Homo sapiens
  Table A; Target 37740; HLA-A*33:03; MAGEA11; ENSG00000185247; TAA
ANLEDRSPR

SEQ ID NO: 37741 - protein, 9 aa, Homo sapiens
  Table A; Target 37741; HLA-A*25:01; MAGEA11; ENSG00000185247; TAA
APYGPQLQW

SEQ ID NO: 37742 - protein, 9 aa, Homo sapiens
  Table A; Target 37742; HLA-B*07:02; MAGEA11; ENSG00000185247; TAA
APYGPQLQW

SEQ ID NO: 37743 - protein, 9 aa, Homo sapiens
  Table A; Target 37743; HLA-B*35:01; MAGEA11; ENSG00000185247; TAA
APYGPQLQW

SEQ ID NO: 37744 - protein, 9 aa, Homo sapiens
  Table A; Target 37744; HLA-B*44:02; MAGEA11; ENSG00000185247; TAA
APYGPQLQW

SEQ ID NO: 37745 - protein, 9 aa, Homo sapiens
  Table A; Target 37745; HLA-B*44:03; MAGEA11; ENSG00000185247; TAA
APYGPQLQW

SEQ ID NO: 37746 - protein, 9 aa, Homo sapiens
  Table A; Target 37746; HLA-B*51:01; MAGEA11; ENSG00000185247; TAA
APYGPQLQW

SEQ ID NO: 37747 - protein, 9 aa, Homo sapiens
  Table A; Target 37747; HLA-B*54:01; MAGEA11; ENSG00000185247; TAA
APYGPQLQW

SEQ ID NO: 37748 - protein, 9 aa, Homo sapiens
  Table A; Target 37748; HLA-B*56:01; MAGEA11; ENSG00000185247; TAA
APYGPQLQW

SEQ ID NO: 37749 - protein, 9 aa, Homo sapiens
  Table A; Target 37749; HLA-B*57:01; MAGEA11; ENSG00000185247; TAA
APYGPQLQW

SEQ ID NO: 37750 - protein, 9 aa, Homo sapiens
  Table A; Target 37750; HLA-B*58:01; MAGEA11; ENSG00000185247; TAA
APYGPQLQW

SEQ ID NO: 37751 - protein, 9 aa, Homo sapiens
  Table A; Target 37751; HLA-C*02:02; MAGEA11; ENSG00000185247; TAA
APYGPQLQW

SEQ ID NO: 37752 - protein, 9 aa, Homo sapiens
  Table A; Target 37752; HLA-C*07:02; MAGEA11; ENSG00000185247; TAA
APYGPQLQW

SEQ ID NO: 37753 - protein, 10 aa, Homo sapiens
  Table A; Target 37753; HLA-A*02:07; MAGEA11; ENSG00000185247; TAA
CIPEEVMWEV

SEQ ID NO: 37754 - protein, 8 aa, Homo sapiens
  Table A; Target 37754; HLA-A*33:01; MAGEA11; ENSG00000185247; TAA
DDFQSTER

SEQ ID NO: 37755 - protein, 8 aa, Homo sapiens
  Table A; Target 37755; HLA-A*33:03; MAGEA11; ENSG00000185247; TAA
DDFQSTER

SEQ ID NO: 37756 - protein, 8 aa, Homo sapiens
  Table A; Target 37756; HLA-A*68:01; MAGEA11; ENSG00000185247; TAA
DDFQSTER

SEQ ID NO: 37757 - protein, 11 aa, Homo sapiens
  Table A; Target 37757; HLA-B*18:01; MAGEA11; ENSG00000185247; TAA
DDFQSTERAPY

SEQ ID NO: 37758 - protein, 10 aa, Homo sapiens
  Table A; Target 37758; HLA-A*23:01; MAGEA11; ENSG00000185247; TAA
DFGLQVSTMF

SEQ ID NO: 37759 - protein, 10 aa, Homo sapiens
  Table A; Target 37759; HLA-C*04:01; MAGEA11; ENSG00000185247; TAA
DFGLQVSTMF

SEQ ID NO: 37760 - protein, 10 aa, Homo sapiens
  Table A; Target 37760; HLA-A*30:02; MAGEA11; ENSG00000185247; TAA
DFQSTERAPY

SEQ ID NO: 37761 - protein, 10 aa, Homo sapiens
  Table A; Target 37761; HLA-C*07:02; MAGEA11; ENSG00000185247; TAA
DLGLVGAQAL

SEQ ID NO: 37762 - protein, 8 aa, Homo sapiens
  Table A; Target 37762; HLA-A*25:01; MAGEA11; ENSG00000185247; TAA
DLIDPESF

SEQ ID NO: 37763 - protein, 8 aa, Homo sapiens
  Table A; Target 37763; HLA-B*08:01; MAGEA11; ENSG00000185247; TAA
DLPRVQVF

SEQ ID NO: 37764 - protein, 8 aa, Homo sapiens
  Table A; Target 37764; HLA-B*51:01; MAGEA11; ENSG00000185247; TAA
DLPRVQVF

SEQ ID NO: 37765 - protein, 8 aa, Homo sapiens
  Table A; Target 37765; HLA-C*07:01; MAGEA11; ENSG00000185247; TAA
DLPRVQVF

SEQ ID NO: 37766 - protein, 9 aa, Homo sapiens
  Table A; Target 37766; HLA-A*33:01; MAGEA11; ENSG00000185247; TAA
DLPRVQVFR

SEQ ID NO: 37767 - protein, 9 aa, Homo sapiens
  Table A; Target 37767; HLA-A*33:03; MAGEA11; ENSG00000185247; TAA
DLPRVQVFR

SEQ ID NO: 37768 - protein, 10 aa, Homo sapiens
  Table A; Target 37768; HLA-B*35:03; MAGEA11; ENSG00000185247; TAA
DPESFSQDIL

SEQ ID NO: 37769 - protein, 8 aa, Homo sapiens
  Table A; Target 37769; HLA-B*51:01; MAGEA11; ENSG00000185247; TAA
DPTSHSYV

SEQ ID NO: 37770 - protein, 9 aa, Homo sapiens
  Table A; Target 37770; HLA-B*07:02; MAGEA11; ENSG00000185247; TAA
DPTSHSYVL

SEQ ID NO: 37771 - protein, 9 aa, Homo sapiens
  Table A; Target 37771; HLA-B*08:01; MAGEA11; ENSG00000185247; TAA
DPTSHSYVL

SEQ ID NO: 37772 - protein, 9 aa, Homo sapiens
  Table A; Target 37772; HLA-B*35:01; MAGEA11; ENSG00000185247; TAA
DPTSHSYVL

SEQ ID NO: 37773 - protein, 9 aa, Homo sapiens
  Table A; Target 37773; HLA-B*35:03; MAGEA11; ENSG00000185247; TAA
DPTSHSYVL

SEQ ID NO: 37774 - protein, 9 aa, Homo sapiens
  Table A; Target 37774; HLA-B*39:01; MAGEA11; ENSG00000185247; TAA
DPTSHSYVL

SEQ ID NO: 37775 - protein, 9 aa, Homo sapiens
  Table A; Target 37775; HLA-B*51:01; MAGEA11; ENSG00000185247; TAA
DPTSHSYVL

SEQ ID NO: 37776 - protein, 9 aa, Homo sapiens
  Table A; Target 37776; HLA-B*55:01; MAGEA11; ENSG00000185247; TAA
DPTSHSYVL

SEQ ID NO: 37777 - protein, 9 aa, Homo sapiens
  Table A; Target 37777; HLA-C*07:02; MAGEA11; ENSG00000185247; TAA
DPTSHSYVL

SEQ ID NO: 37778 - protein, 8 aa, Homo sapiens
  Table A; Target 37778; HLA-B*07:02; MAGEA11; ENSG00000185247; TAA
DPTSYPSL

SEQ ID NO: 37779 - protein, 8 aa, Homo sapiens
  Table A; Target 37779; HLA-B*35:01; MAGEA11; ENSG00000185247; TAA
DPTSYPSL

SEQ ID NO: 37780 - protein, 8 aa, Homo sapiens
  Table A; Target 37780; HLA-B*35:03; MAGEA11; ENSG00000185247; TAA
DPTSYPSL

SEQ ID NO: 37781 - protein, 8 aa, Homo sapiens
  Table A; Target 37781; HLA-B*51:01; MAGEA11; ENSG00000185247; TAA
DPTSYPSL

SEQ ID NO: 37782 - protein, 9 aa, Homo sapiens
  Table A; Target 37782; HLA-A*01:01; MAGEA11; ENSG00000185247; TAA
DPTSYPSLY

SEQ ID NO: 37783 - protein, 9 aa, Homo sapiens
  Table A; Target 37783; HLA-A*26:01; MAGEA11; ENSG00000185247; TAA
DPTSYPSLY

SEQ ID NO: 37784 - protein, 9 aa, Homo sapiens
  Table A; Target 37784; HLA-B*18:01; MAGEA11; ENSG00000185247; TAA
DPTSYPSLY

SEQ ID NO: 37785 - protein, 9 aa, Homo sapiens
  Table A; Target 37785; HLA-B*35:01; MAGEA11; ENSG00000185247; TAA
DPTSYPSLY

SEQ ID NO: 37786 - protein, 9 aa, Homo sapiens
  Table A; Target 37786; HLA-B*55:01; MAGEA11; ENSG00000185247; TAA
DPTSYPSLY

SEQ ID NO: 37787 - protein, 9 aa, Homo sapiens
  Table A; Target 37787; HLA-A*26:01; MAGEA11; ENSG00000185247; TAA
DSGDFGLQV

SEQ ID NO: 37788 - protein, 9 aa, Homo sapiens
  Table A; Target 37788; HLA-A*68:01; MAGEA11; ENSG00000185247; TAA
DSGDFGLQV

SEQ ID NO: 37789 - protein, 9 aa, Homo sapiens
  Table A; Target 37789; HLA-A*68:02; MAGEA11; ENSG00000185247; TAA
DSGDFGLQV

SEQ ID NO: 37790 - protein, 9 aa, Homo sapiens
  Table A; Target 37790; HLA-B*51:01; MAGEA11; ENSG00000185247; TAA
DSGDFGLQV

SEQ ID NO: 37791 - protein, 10 aa, Homo sapiens
  Table A; Target 37791; HLA-A*25:01; MAGEA11; ENSG00000185247; TAA
DVKEVDPTSH

SEQ ID NO: 37792 - protein, 10 aa, Homo sapiens
  Table A; Target 37792; HLA-A*26:01; MAGEA11; ENSG00000185247; TAA
DVKEVDPTSH

SEQ ID NO: 37793 - protein, 10 aa, Homo sapiens
  Table A; Target 37793; HLA-A*33:01; MAGEA11; ENSG00000185247; TAA
DVKEVDPTSH

SEQ ID NO: 37794 - protein, 10 aa, Homo sapiens
  Table A; Target 37794; HLA-A*68:01; MAGEA11; ENSG00000185247; TAA
DVKEVDPTSH

SEQ ID NO: 37795 - protein, 10 aa, Homo sapiens
  Table A; Target 37795; HLA-C*07:06; MAGEA11; ENSG00000185247; TAA
DVKEVDPTSH

SEQ ID NO: 37796 - protein, 10 aa, Homo sapiens
  Table A; Target 37796; HLA-B*54:01; MAGEA11; ENSG00000185247; TAA
DYFPEIFREA

SEQ ID NO: 37797 - protein, 9 aa, Homo sapiens
  Table A; Target 37797; HLA-A*25:01; MAGEA11; ENSG00000185247; TAA
EAAFFSSTL

SEQ ID NO: 37798 - protein, 9 aa, Homo sapiens
  Table A; Target 37798; HLA-A*26:01; MAGEA11; ENSG00000185247; TAA
EAAFFSSTL

SEQ ID NO: 37799 - protein, 9 aa, Homo sapiens
  Table A; Target 37799; HLA-A*33:01; MAGEA11; ENSG00000185247; TAA
EAAFFSSTL

SEQ ID NO: 37800 - protein, 9 aa, Homo sapiens
  Table A; Target 37800; HLA-A*33:03; MAGEA11; ENSG00000185247; TAA
EAAFFSSTL

SEQ ID NO: 37801 - protein, 9 aa, Homo sapiens
  Table A; Target 37801; HLA-A*68:01; MAGEA11; ENSG00000185247; TAA
EAAFFSSTL

SEQ ID NO: 37802 - protein, 9 aa, Homo sapiens
  Table A; Target 37802; HLA-A*68:02; MAGEA11; ENSG00000185247; TAA
EAAFFSSTL

SEQ ID NO: 37803 - protein, 9 aa, Homo sapiens
  Table A; Target 37803; HLA-B*07:02; MAGEA11; ENSG00000185247; TAA
EAAFFSSTL

SEQ ID NO: 37804 - protein, 9 aa, Homo sapiens
  Table A; Target 37804; HLA-B*08:01; MAGEA11; ENSG00000185247; TAA
EAAFFSSTL

SEQ ID NO: 37805 - protein, 9 aa, Homo sapiens
  Table A; Target 37805; HLA-B*27:05; MAGEA11; ENSG00000185247; TAA
EAAFFSSTL

SEQ ID NO: 37806 - protein, 9 aa, Homo sapiens
  Table A; Target 37806; HLA-B*35:01; MAGEA11; ENSG00000185247; TAA
EAAFFSSTL

SEQ ID NO: 37807 - protein, 9 aa, Homo sapiens
  Table A; Target 37807; HLA-B*35:03; MAGEA11; ENSG00000185247; TAA
EAAFFSSTL

SEQ ID NO: 37808 - protein, 9 aa, Homo sapiens
  Table A; Target 37808; HLA-B*38:01; MAGEA11; ENSG00000185247; TAA
EAAFFSSTL

SEQ ID NO: 37809 - protein, 9 aa, Homo sapiens
  Table A; Target 37809; HLA-B*39:01; MAGEA11; ENSG00000185247; TAA
EAAFFSSTL

SEQ ID NO: 37810 - protein, 9 aa, Homo sapiens
  Table A; Target 37810; HLA-B*40:02; MAGEA11; ENSG00000185247; TAA
EAAFFSSTL

SEQ ID NO: 37811 - protein, 9 aa, Homo sapiens
  Table A; Target 37811; HLA-B*51:01; MAGEA11; ENSG00000185247; TAA
EAAFFSSTL

SEQ ID NO: 37812 - protein, 9 aa, Homo sapiens
  Table A; Target 37812; HLA-C*01:02; MAGEA11; ENSG00000185247; TAA
EAAFFSSTL

SEQ ID NO: 37813 - protein, 9 aa, Homo sapiens
  Table A; Target 37813; HLA-C*02:02; MAGEA11; ENSG00000185247; TAA
EAAFFSSTL

SEQ ID NO: 37814 - protein, 9 aa, Homo sapiens
  Table A; Target 37814; HLA-C*03:03; MAGEA11; ENSG00000185247; TAA
EAAFFSSTL

SEQ ID NO: 37815 - protein, 9 aa, Homo sapiens
  Table A; Target 37815; HLA-C*03:04; MAGEA11; ENSG00000185247; TAA
EAAFFSSTL

SEQ ID NO: 37816 - protein, 9 aa, Homo sapiens
  Table A; Target 37816; HLA-C*05:01; MAGEA11; ENSG00000185247; TAA
EAAFFSSTL

SEQ ID NO: 37817 - protein, 9 aa, Homo sapiens
  Table A; Target 37817; HLA-C*07:02; MAGEA11; ENSG00000185247; TAA
EAAFFSSTL

SEQ ID NO: 37818 - protein, 9 aa, Homo sapiens
  Table A; Target 37818; HLA-C*07:06; MAGEA11; ENSG00000185247; TAA
EAAFFSSTL

SEQ ID NO: 37819 - protein, 9 aa, Homo sapiens
  Table A; Target 37819; HLA-C*12:03; MAGEA11; ENSG00000185247; TAA
EAAFFSSTL

SEQ ID NO: 37820 - protein, 9 aa, Homo sapiens
  Table A; Target 37820; HLA-C*16:04; MAGEA11; ENSG00000185247; TAA
EAAFFSSTL

SEQ ID NO: 37821 - protein, 9 aa, Homo sapiens
  Table A; Target 37821; HLA-A*33:03; MAGEA11; ENSG00000185247; TAA
EDDFQSTER

SEQ ID NO: 37822 - protein, 9 aa, Homo sapiens
  Table A; Target 37822; HLA-A*68:01; MAGEA11; ENSG00000185247; TAA
EDDFQSTER

SEQ ID NO: 37823 - protein, 9 aa, Homo sapiens
  Table A; Target 37823; HLA-C*07:06; MAGEA11; ENSG00000185247; TAA
EDDFQSTER

SEQ ID NO: 37824 - protein, 11 aa, Homo sapiens
  Table A; Target 37824; HLA-A*30:01; MAGEA11; ENSG00000185247; TAA
EDLGLVGAQAL

SEQ ID NO: 37825 - protein, 11 aa, Homo sapiens
  Table A; Target 37825; HLA-B*44:02; MAGEA11; ENSG00000185247; TAA
EDLGLVGAQAL

SEQ ID NO: 37826 - protein, 11 aa, Homo sapiens
  Table A; Target 37826; HLA-B*44:03; MAGEA11; ENSG00000185247; TAA
EDLGLVGAQAL

SEQ ID NO: 37827 - protein, 11 aa, Homo sapiens
  Table A; Target 37827; HLA-C*07:01; MAGEA11; ENSG00000185247; TAA
EDLGLVGAQAL

SEQ ID NO: 37828 - protein, 10 aa, Homo sapiens
  Table A; Target 37828; HLA-A*68:02; MAGEA11; ENSG00000185247; TAA
EDSGDFGLQV

SEQ ID NO: 37829 - protein, 9 aa, Homo sapiens
  Table A; Target 37829; HLA-A*33:01; MAGEA11; ENSG00000185247; TAA
EDYFPEIFR

SEQ ID NO: 37830 - protein, 9 aa, Homo sapiens
  Table A; Target 37830; HLA-A*68:02; MAGEA11; ENSG00000185247; TAA
EDYFPEIFR

SEQ ID NO: 37831 - protein, 9 aa, Homo sapiens
  Table A; Target 37831; HLA-B*49:01; MAGEA11; ENSG00000185247; TAA
EEDLGLVGA

SEQ ID NO: 37832 - protein, 9 aa, Homo sapiens
  Table A; Target 37832; HLA-B*40:02; MAGEA11; ENSG00000185247; TAA
EELPAAESP

SEQ ID NO: 37833 - protein, 8 aa, Homo sapiens
  Table A; Target 37833; HLA-B*18:01; MAGEA11; ENSG00000185247; TAA
EEQEAAFF

SEQ ID NO: 37834 - protein, 8 aa, Homo sapiens
  Table A; Target 37834; HLA-B*37:01; MAGEA11; ENSG00000185247; TAA
EEQEAAFF

SEQ ID NO: 37835 - protein, 8 aa, Homo sapiens
  Table A; Target 37835; HLA-B*44:02; MAGEA11; ENSG00000185247; TAA
EEQEAAFF

SEQ ID NO: 37836 - protein, 8 aa, Homo sapiens
  Table A; Target 37836; HLA-B*44:03; MAGEA11; ENSG00000185247; TAA
EEQEAAFF

SEQ ID NO: 37837 - protein, 8 aa, Homo sapiens
  Table A; Target 37837; HLA-B*18:01; MAGEA11; ENSG00000185247; TAA
EESFSPTA

SEQ ID NO: 37838 - protein, 9 aa, Homo sapiens
  Table A; Target 37838; HLA-A*30:01; MAGEA11; ENSG00000185247; TAA
EESFSPTAM

SEQ ID NO: 37839 - protein, 9 aa, Homo sapiens
  Table A; Target 37839; HLA-B*18:01; MAGEA11; ENSG00000185247; TAA
EESFSPTAM

SEQ ID NO: 37840 - protein, 9 aa, Homo sapiens
  Table A; Target 37840; HLA-B*37:01; MAGEA11; ENSG00000185247; TAA
EESFSPTAM

SEQ ID NO: 37841 - protein, 9 aa, Homo sapiens
  Table A; Target 37841; HLA-B*39:01; MAGEA11; ENSG00000185247; TAA
EESFSPTAM

SEQ ID NO: 37842 - protein, 9 aa, Homo sapiens
  Table A; Target 37842; HLA-B*40:01; MAGEA11; ENSG00000185247; TAA
EESFSPTAM

SEQ ID NO: 37843 - protein, 9 aa, Homo sapiens
  Table A; Target 37843; HLA-B*44:03; MAGEA11; ENSG00000185247; TAA
EESFSPTAM

SEQ ID NO: 37844 - protein, 9 aa, Homo sapiens
  Table A; Target 37844; HLA-C*16:04; MAGEA11; ENSG00000185247; TAA
EESFSPTAM

SEQ ID NO: 37845 - protein, 10 aa, Homo sapiens
  Table A; Target 37845; HLA-A*26:01; MAGEA11; ENSG00000185247; TAA
EIFREASVCM

SEQ ID NO: 37846 - protein, 10 aa, Homo sapiens
  Table A; Target 37846; HLA-A*25:01; MAGEA11; ENSG00000185247; TAA
EMLGSVIKNY

SEQ ID NO: 37847 - protein, 10 aa, Homo sapiens
  Table A; Target 37847; HLA-A*26:01; MAGEA11; ENSG00000185247; TAA
EMLGSVIKNY

SEQ ID NO: 37848 - protein, 10 aa, Homo sapiens
  Table A; Target 37848; HLA-A*29:02; MAGEA11; ENSG00000185247; TAA
EMLGSVIKNY

SEQ ID NO: 37849 - protein, 10 aa, Homo sapiens
  Table A; Target 37849; HLA-A*30:02; MAGEA11; ENSG00000185247; TAA
EMLGSVIKNY

SEQ ID NO: 37850 - protein, 10 aa, Homo sapiens
  Table A; Target 37850; HLA-A*33:01; MAGEA11; ENSG00000185247; TAA
EMLGSVIKNY

SEQ ID NO: 37851 - protein, 10 aa, Homo sapiens
  Table A; Target 37851; HLA-A*33:03; MAGEA11; ENSG00000185247; TAA
EMLGSVIKNY

SEQ ID NO: 37852 - protein, 10 aa, Homo sapiens
  Table A; Target 37852; HLA-B*44:02; MAGEA11; ENSG00000185247; TAA
EMLGSVIKNY

SEQ ID NO: 37853 - protein, 10 aa, Homo sapiens
  Table A; Target 37853; HLA-B*44:03; MAGEA11; ENSG00000185247; TAA
EMLGSVIKNY

SEQ ID NO: 37854 - protein, 10 aa, Homo sapiens
  Table A; Target 37854; HLA-C*07:06; MAGEA11; ENSG00000185247; TAA
EMLGSVIKNY

SEQ ID NO: 37855 - protein, 11 aa, Homo sapiens
  Table A; Target 37855; HLA-B*38:01; MAGEA11; ENSG00000185247; TAA
EQEAAFFSSTL

SEQ ID NO: 37856 - protein, 9 aa, Homo sapiens
  Table A; Target 37856; HLA-B*38:01; MAGEA11; ENSG00000185247; TAA
EQSMPKSGL

SEQ ID NO: 37857 - protein, 9 aa, Homo sapiens
  Table A; Target 37857; HLA-B*39:01; MAGEA11; ENSG00000185247; TAA
EQSMPKSGL

SEQ ID NO: 37858 - protein, 9 aa, Homo sapiens
  Table A; Target 37858; HLA-B*27:02; MAGEA11; ENSG00000185247; TAA
ERAPYGPQL

SEQ ID NO: 37859 - protein, 9 aa, Homo sapiens
  Table A; Target 37859; HLA-B*27:05; MAGEA11; ENSG00000185247; TAA
ERAPYGPQL

SEQ ID NO: 37860 - protein, 9 aa, Homo sapiens
  Table A; Target 37860; HLA-B*38:01; MAGEA11; ENSG00000185247; TAA
ERAPYGPQL

SEQ ID NO: 37861 - protein, 9 aa, Homo sapiens
  Table A; Target 37861; HLA-B*39:01; MAGEA11; ENSG00000185247; TAA
ERAPYGPQL

SEQ ID NO: 37862 - protein, 9 aa, Homo sapiens
  Table A; Target 37862; HLA-C*06:02; MAGEA11; ENSG00000185247; TAA
ERAPYGPQL

SEQ ID NO: 37863 - protein, 9 aa, Homo sapiens
  Table A; Target 37863; HLA-C*07:04; MAGEA11; ENSG00000185247; TAA
ERAPYGPQL

SEQ ID NO: 37864 - protein, 9 aa, Homo sapiens
  Table A; Target 37864; HLA-C*16:04; MAGEA11; ENSG00000185247; TAA
ERAPYGPQL

SEQ ID NO: 37865 - protein, 11 aa, Homo sapiens
  Table A; Target 37865; HLA-B*44:02; MAGEA11; ENSG00000185247; TAA
ERAPYGPQLQW

SEQ ID NO: 37866 - protein, 8 aa, Homo sapiens
  Table A; Target 37866; HLA-A*26:01; MAGEA11; ENSG00000185247; TAA
ESFSPTAM

SEQ ID NO: 37867 - protein, 8 aa, Homo sapiens
  Table A; Target 37867; HLA-C*05:01; MAGEA11; ENSG00000185247; TAA
ESFSPTAM

SEQ ID NO: 37868 - protein, 11 aa, Homo sapiens
  Table A; Target 37868; HLA-A*68:01; MAGEA11; ENSG00000185247; TAA
ESFSQDILHDK

SEQ ID NO: 37869 - protein, 10 aa, Homo sapiens
  Table A; Target 37869; HLA-A*01:01; MAGEA11; ENSG00000185247; TAA
ETSKMKVLEY

SEQ ID NO: 37870 - protein, 10 aa, Homo sapiens
  Table A; Target 37870; HLA-A*25:01; MAGEA11; ENSG00000185247; TAA
ETSKMKVLEY

SEQ ID NO: 37871 - protein, 10 aa, Homo sapiens
  Table A; Target 37871; HLA-A*26:01; MAGEA11; ENSG00000185247; TAA
ETSKMKVLEY

SEQ ID NO: 37872 - protein, 9 aa, Homo sapiens
  Table A; Target 37872; HLA-A*01:01; MAGEA11; ENSG00000185247; TAA
EVDPTSHSY

SEQ ID NO: 37873 - protein, 9 aa, Homo sapiens
  Table A; Target 37873; HLA-A*11:01; MAGEA11; ENSG00000185247; TAA
EVDPTSHSY

SEQ ID NO: 37874 - protein, 9 aa, Homo sapiens
  Table A; Target 37874; HLA-A*25:01; MAGEA11; ENSG00000185247; TAA
EVDPTSHSY

SEQ ID NO: 37875 - protein, 9 aa, Homo sapiens
  Table A; Target 37875; HLA-A*26:01; MAGEA11; ENSG00000185247; TAA
EVDPTSHSY

SEQ ID NO: 37876 - protein, 9 aa, Homo sapiens
  Table A; Target 37876; HLA-A*29:02; MAGEA11; ENSG00000185247; TAA
EVDPTSHSY

SEQ ID NO: 37877 - protein, 9 aa, Homo sapiens
  Table A; Target 37877; HLA-A*30:02; MAGEA11; ENSG00000185247; TAA
EVDPTSHSY

SEQ ID NO: 37878 - protein, 9 aa, Homo sapiens
  Table A; Target 37878; HLA-A*32:01; MAGEA11; ENSG00000185247; TAA
EVDPTSHSY

SEQ ID NO: 37879 - protein, 9 aa, Homo sapiens
  Table A; Target 37879; HLA-A*33:03; MAGEA11; ENSG00000185247; TAA
EVDPTSHSY

SEQ ID NO: 37880 - protein, 9 aa, Homo sapiens
  Table A; Target 37880; HLA-A*68:01; MAGEA11; ENSG00000185247; TAA
EVDPTSHSY

SEQ ID NO: 37881 - protein, 9 aa, Homo sapiens
  Table A; Target 37881; HLA-B*15:01; MAGEA11; ENSG00000185247; TAA
EVDPTSHSY

SEQ ID NO: 37882 - protein, 9 aa, Homo sapiens
  Table A; Target 37882; HLA-B*15:03; MAGEA11; ENSG00000185247; TAA
EVDPTSHSY

SEQ ID NO: 37883 - protein, 9 aa, Homo sapiens
  Table A; Target 37883; HLA-B*18:01; MAGEA11; ENSG00000185247; TAA
EVDPTSHSY

SEQ ID NO: 37884 - protein, 9 aa, Homo sapiens
  Table A; Target 37884; HLA-B*27:05; MAGEA11; ENSG00000185247; TAA
EVDPTSHSY

SEQ ID NO: 37885 - protein, 9 aa, Homo sapiens
  Table A; Target 37885; HLA-B*35:01; MAGEA11; ENSG00000185247; TAA
EVDPTSHSY

SEQ ID NO: 37886 - protein, 9 aa, Homo sapiens
  Table A; Target 37886; HLA-B*38:01; MAGEA11; ENSG00000185247; TAA
EVDPTSHSY

SEQ ID NO: 37887 - protein, 9 aa, Homo sapiens
  Table A; Target 37887; HLA-B*39:01; MAGEA11; ENSG00000185247; TAA
EVDPTSHSY

SEQ ID NO: 37888 - protein, 9 aa, Homo sapiens
  Table A; Target 37888; HLA-B*44:02; MAGEA11; ENSG00000185247; TAA
EVDPTSHSY

SEQ ID NO: 37889 - protein, 9 aa, Homo sapiens
  Table A; Target 37889; HLA-B*44:03; MAGEA11; ENSG00000185247; TAA
EVDPTSHSY

SEQ ID NO: 37890 - protein, 9 aa, Homo sapiens
  Table A; Target 37890; HLA-B*46:01; MAGEA11; ENSG00000185247; TAA
EVDPTSHSY

SEQ ID NO: 37891 - protein, 9 aa, Homo sapiens
  Table A; Target 37891; HLA-B*55:01; MAGEA11; ENSG00000185247; TAA
EVDPTSHSY

SEQ ID NO: 37892 - protein, 9 aa, Homo sapiens
  Table A; Target 37892; HLA-B*58:01; MAGEA11; ENSG00000185247; TAA
EVDPTSHSY

SEQ ID NO: 37893 - protein, 9 aa, Homo sapiens
  Table A; Target 37893; HLA-C*02:02; MAGEA11; ENSG00000185247; TAA
EVDPTSHSY

SEQ ID NO: 37894 - protein, 9 aa, Homo sapiens
  Table A; Target 37894; HLA-C*03:03; MAGEA11; ENSG00000185247; TAA
EVDPTSHSY

SEQ ID NO: 37895 - protein, 9 aa, Homo sapiens
  Table A; Target 37895; HLA-C*05:01; MAGEA11; ENSG00000185247; TAA
EVDPTSHSY

SEQ ID NO: 37896 - protein, 9 aa, Homo sapiens
  Table A; Target 37896; HLA-C*07:04; MAGEA11; ENSG00000185247; TAA
EVDPTSHSY

SEQ ID NO: 37897 - protein, 9 aa, Homo sapiens
  Table A; Target 37897; HLA-C*07:06; MAGEA11; ENSG00000185247; TAA
EVDPTSHSY

SEQ ID NO: 37898 - protein, 9 aa, Homo sapiens
  Table A; Target 37898; HLA-C*16:01; MAGEA11; ENSG00000185247; TAA
EVDPTSHSY

SEQ ID NO: 37899 - protein, 9 aa, Homo sapiens
  Table A; Target 37899; HLA-C*16:02; MAGEA11; ENSG00000185247; TAA
EVDPTSHSY

SEQ ID NO: 37900 - protein, 9 aa, Homo sapiens
  Table A; Target 37900; HLA-C*16:04; MAGEA11; ENSG00000185247; TAA
EVDPTSHSY

SEQ ID NO: 37901 - protein, 10 aa, Homo sapiens
  Table A; Target 37901; HLA-A*01:01; MAGEA11; ENSG00000185247; TAA
EVDPTSHSYV

SEQ ID NO: 37902 - protein, 10 aa, Homo sapiens
  Table A; Target 37902; HLA-A*26:01; MAGEA11; ENSG00000185247; TAA
EVDPTSHSYV

SEQ ID NO: 37903 - protein, 10 aa, Homo sapiens
  Table A; Target 37903; HLA-A*68:02; MAGEA11; ENSG00000185247; TAA
EVDPTSHSYV

SEQ ID NO: 37904 - protein, 10 aa, Homo sapiens
  Table A; Target 37904; HLA-C*05:01; MAGEA11; ENSG00000185247; TAA
EVDPTSHSYV

SEQ ID NO: 37905 - protein, 11 aa, Homo sapiens
  Table A; Target 37905; HLA-A*01:01; MAGEA11; ENSG00000185247; TAA
EVDPTSHSYVL

SEQ ID NO: 37906 - protein, 11 aa, Homo sapiens
  Table A; Target 37906; HLA-A*02:07; MAGEA11; ENSG00000185247; TAA
EVDPTSHSYVL

SEQ ID NO: 37907 - protein, 11 aa, Homo sapiens
  Table A; Target 37907; HLA-A*68:02; MAGEA11; ENSG00000185247; TAA
EVDPTSHSYVL

SEQ ID NO: 37908 - protein, 11 aa, Homo sapiens
  Table A; Target 37908; HLA-B*35:03; MAGEA11; ENSG00000185247; TAA
EVDPTSHSYVL

SEQ ID NO: 37909 - protein, 11 aa, Homo sapiens
  Table A; Target 37909; HLA-B*38:01; MAGEA11; ENSG00000185247; TAA
EVDPTSHSYVL

SEQ ID NO: 37910 - protein, 11 aa, Homo sapiens
  Table A; Target 37910; HLA-B*39:01; MAGEA11; ENSG00000185247; TAA
EVDPTSHSYVL

SEQ ID NO: 37911 - protein, 11 aa, Homo sapiens
  Table A; Target 37911; HLA-C*05:01; MAGEA11; ENSG00000185247; TAA
EVDPTSHSYVL

SEQ ID NO: 37912 - protein, 8 aa, Homo sapiens
  Table A; Target 37912; HLA-A*26:01; MAGEA11; ENSG00000185247; TAA
EVLSIMGV

SEQ ID NO: 37913 - protein, 9 aa, Homo sapiens
  Table A; Target 37913; HLA-A*25:01; MAGEA11; ENSG00000185247; TAA
EVLSIMGVY

SEQ ID NO: 37914 - protein, 9 aa, Homo sapiens
  Table A; Target 37914; HLA-A*26:01; MAGEA11; ENSG00000185247; TAA
EVLSIMGVY

SEQ ID NO: 37915 - protein, 9 aa, Homo sapiens
  Table A; Target 37915; HLA-A*29:02; MAGEA11; ENSG00000185247; TAA
EVLSIMGVY

SEQ ID NO: 37916 - protein, 9 aa, Homo sapiens
  Table A; Target 37916; HLA-A*30:02; MAGEA11; ENSG00000185247; TAA
EVLSIMGVY

SEQ ID NO: 37917 - protein, 9 aa, Homo sapiens
  Table A; Target 37917; HLA-A*33:01; MAGEA11; ENSG00000185247; TAA
EVLSIMGVY

SEQ ID NO: 37918 - protein, 9 aa, Homo sapiens
  Table A; Target 37918; HLA-A*33:03; MAGEA11; ENSG00000185247; TAA
EVLSIMGVY

SEQ ID NO: 37919 - protein, 9 aa, Homo sapiens
  Table A; Target 37919; HLA-B*18:01; MAGEA11; ENSG00000185247; TAA
EVLSIMGVY

SEQ ID NO: 37920 - protein, 9 aa, Homo sapiens
  Table A; Target 37920; HLA-B*35:01; MAGEA11; ENSG00000185247; TAA
EVLSIMGVY

SEQ ID NO: 37921 - protein, 9 aa, Homo sapiens
  Table A; Target 37921; HLA-B*44:03; MAGEA11; ENSG00000185247; TAA
EVLSIMGVY

SEQ ID NO: 37922 - protein, 9 aa, Homo sapiens
  Table A; Target 37922; HLA-C*07:06; MAGEA11; ENSG00000185247; TAA
EVLSIMGVY

SEQ ID NO: 37923 - protein, 10 aa, Homo sapiens
  Table A; Target 37923; HLA-A*26:01; MAGEA11; ENSG00000185247; TAA
EVLSIMGVYA

SEQ ID NO: 37924 - protein, 10 aa, Homo sapiens
  Table A; Target 37924; HLA-A*68:02; MAGEA11; ENSG00000185247; TAA
EVLSIMGVYA

SEQ ID NO: 37925 - protein, 10 aa, Homo sapiens
  Table A; Target 37925; HLA-B*54:01; MAGEA11; ENSG00000185247; TAA
EVLSIMGVYA

SEQ ID NO: 37926 - protein, 9 aa, Homo sapiens
  Table A; Target 37926; HLA-A*25:01; MAGEA11; ENSG00000185247; TAA
EVMWEVLSI

SEQ ID NO: 37927 - protein, 9 aa, Homo sapiens
  Table A; Target 37927; HLA-A*26:01; MAGEA11; ENSG00000185247; TAA
EVMWEVLSI

SEQ ID NO: 37928 - protein, 9 aa, Homo sapiens
  Table A; Target 37928; HLA-A*68:02; MAGEA11; ENSG00000185247; TAA
EVMWEVLSI

SEQ ID NO: 37929 - protein, 10 aa, Homo sapiens
  Table A; Target 37929; HLA-A*26:01; MAGEA11; ENSG00000185247; TAA
EVMWEVLSIM

SEQ ID NO: 37930 - protein, 9 aa, Homo sapiens
  Table A; Target 37930; HLA-A*33:01; MAGEA11; ENSG00000185247; TAA
EYIANANGR

SEQ ID NO: 37931 - protein, 9 aa, Homo sapiens
  Table A; Target 37931; HLA-A*33:03; MAGEA11; ENSG00000185247; TAA
EYIANANGR

SEQ ID NO: 37932 - protein, 9 aa, Homo sapiens
  Table A; Target 37932; HLA-A*68:01; MAGEA11; ENSG00000185247; TAA
EYIANANGR

SEQ ID NO: 37933 - protein, 9 aa, Homo sapiens
  Table A; Target 37933; HLA-C*07:06; MAGEA11; ENSG00000185247; TAA
EYIANANGR

SEQ ID NO: 37934 - protein, 8 aa, Homo sapiens
  Table A; Target 37934; HLA-C*03:04; MAGEA11; ENSG00000185247; TAA
FGIDVKEV

SEQ ID NO: 37935 - protein, 8 aa, Homo sapiens
  Table A; Target 37935; HLA-B*08:01; MAGEA11; ENSG00000185247; TAA
FGLQVSTM

SEQ ID NO: 37936 - protein, 8 aa, Homo sapiens
  Table A; Target 37936; HLA-B*46:01; MAGEA11; ENSG00000185247; TAA
FGLQVSTM

SEQ ID NO: 37937 - protein, 8 aa, Homo sapiens
  Table A; Target 37937; HLA-B*51:01; MAGEA11; ENSG00000185247; TAA
FGLQVSTM

SEQ ID NO: 37938 - protein, 8 aa, Homo sapiens
  Table A; Target 37938; HLA-C*03:03; MAGEA11; ENSG00000185247; TAA
FGLQVSTM

SEQ ID NO: 37939 - protein, 8 aa, Homo sapiens
  Table A; Target 37939; HLA-C*03:04; MAGEA11; ENSG00000185247; TAA
FGLQVSTM

SEQ ID NO: 37940 - protein, 8 aa, Homo sapiens
  Table A; Target 37940; HLA-C*14:02; MAGEA11; ENSG00000185247; TAA
FGLQVSTM

SEQ ID NO: 37941 - protein, 9 aa, Homo sapiens
  Table A; Target 37941; HLA-A*23:01; MAGEA11; ENSG00000185247; TAA
FGLQVSTMF

SEQ ID NO: 37942 - protein, 9 aa, Homo sapiens
  Table A; Target 37942; HLA-B*46:01; MAGEA11; ENSG00000185247; TAA
FGLQVSTMF

SEQ ID NO: 37943 - protein, 9 aa, Homo sapiens
  Table A; Target 37943; HLA-C*02:02; MAGEA11; ENSG00000185247; TAA
FGLQVSTMF

SEQ ID NO: 37944 - protein, 9 aa, Homo sapiens
  Table A; Target 37944; HLA-C*04:01; MAGEA11; ENSG00000185247; TAA
FGLQVSTMF

SEQ ID NO: 37945 - protein, 9 aa, Homo sapiens
  Table A; Target 37945; HLA-C*14:02; MAGEA11; ENSG00000185247; TAA
FGLQVSTMF

SEQ ID NO: 37946 - protein, 9 aa, Homo sapiens
  Table A; Target 37946; HLA-C*16:04; MAGEA11; ENSG00000185247; TAA
FGLQVSTMF

SEQ ID NO: 37947 - protein, 9 aa, Homo sapiens
  Table A; Target 37947; HLA-A*02:01; MAGEA11; ENSG00000185247; TAA
FLFGEPKRL

SEQ ID NO: 37948 - protein, 9 aa, Homo sapiens
  Table A; Target 37948; HLA-A*02:03; MAGEA11; ENSG00000185247; TAA
FLFGEPKRL

SEQ ID NO: 37949 - protein, 9 aa, Homo sapiens
  Table A; Target 37949; HLA-A*02:04; MAGEA11; ENSG00000185247; TAA
FLFGEPKRL

SEQ ID NO: 37950 - protein, 9 aa, Homo sapiens
  Table A; Target 37950; HLA-A*02:07; MAGEA11; ENSG00000185247; TAA
FLFGEPKRL

SEQ ID NO: 37951 - protein, 10 aa, Homo sapiens
  Table A; Target 37951; HLA-A*02:01; MAGEA11; ENSG00000185247; TAA
FLFGEPKRLL

SEQ ID NO: 37952 - protein, 10 aa, Homo sapiens
  Table A; Target 37952; HLA-A*02:03; MAGEA11; ENSG00000185247; TAA
FLFGEPKRLL

SEQ ID NO: 37953 - protein, 10 aa, Homo sapiens
  Table A; Target 37953; HLA-A*02:04; MAGEA11; ENSG00000185247; TAA
FLFGEPKRLL

SEQ ID NO: 37954 - protein, 11 aa, Homo sapiens
  Table A; Target 37954; HLA-A*02:01; MAGEA11; ENSG00000185247; TAA
FLFGEPKRLLT

SEQ ID NO: 37955 - protein, 8 aa, Homo sapiens
  Table A; Target 37955; HLA-B*54:01; MAGEA11; ENSG00000185247; TAA
FPEIFREA

SEQ ID NO: 37956 - protein, 8 aa, Homo sapiens
  Table A; Target 37956; HLA-B*55:01; MAGEA11; ENSG00000185247; TAA
FPEIFREA

SEQ ID NO: 37957 - protein, 8 aa, Homo sapiens
  Table A; Target 37957; HLA-B*56:01; MAGEA11; ENSG00000185247; TAA
FPEIFREA

SEQ ID NO: 37958 - protein, 10 aa, Homo sapiens
  Table A; Target 37958; HLA-B*51:01; MAGEA11; ENSG00000185247; TAA
FPEIFREASV

SEQ ID NO: 37959 - protein, 10 aa, Homo sapiens
  Table A; Target 37959; HLA-B*54:01; MAGEA11; ENSG00000185247; TAA
FPEIFREASV

SEQ ID NO: 37960 - protein, 10 aa, Homo sapiens
  Table A; Target 37960; HLA-B*56:01; MAGEA11; ENSG00000185247; TAA
FPEIFREASV

SEQ ID NO: 37961 - protein, 9 aa, Homo sapiens
  Table A; Target 37961; HLA-B*07:02; MAGEA11; ENSG00000185247; TAA
FPTVRPADL

SEQ ID NO: 37962 - protein, 9 aa, Homo sapiens
  Table A; Target 37962; HLA-B*08:01; MAGEA11; ENSG00000185247; TAA
FPTVRPADL

SEQ ID NO: 37963 - protein, 9 aa, Homo sapiens
  Table A; Target 37963; HLA-B*35:01; MAGEA11; ENSG00000185247; TAA
FPTVRPADL

SEQ ID NO: 37964 - protein, 9 aa, Homo sapiens
  Table A; Target 37964; HLA-B*35:03; MAGEA11; ENSG00000185247; TAA
FPTVRPADL

SEQ ID NO: 37965 - protein, 9 aa, Homo sapiens
  Table A; Target 37965; HLA-C*07:02; MAGEA11; ENSG00000185247; TAA
FPTVRPADL

SEQ ID NO: 37966 - protein, 9 aa, Homo sapiens
  Table A; Target 37966; HLA-A*01:01; MAGEA11; ENSG00000185247; TAA
FQSTERAPY

SEQ ID NO: 37967 - protein, 9 aa, Homo sapiens
  Table A; Target 37967; HLA-A*29:02; MAGEA11; ENSG00000185247; TAA
FQSTERAPY

SEQ ID NO: 37968 - protein, 9 aa, Homo sapiens
  Table A; Target 37968; HLA-A*30:02; MAGEA11; ENSG00000185247; TAA
FQSTERAPY

SEQ ID NO: 37969 - protein, 9 aa, Homo sapiens
  Table A; Target 37969; HLA-A*32:01; MAGEA11; ENSG00000185247; TAA
FQSTERAPY

SEQ ID NO: 37970 - protein, 9 aa, Homo sapiens
  Table A; Target 37970; HLA-B*15:01; MAGEA11; ENSG00000185247; TAA
FQSTERAPY

SEQ ID NO: 37971 - protein, 9 aa, Homo sapiens
  Table A; Target 37971; HLA-B*15:03; MAGEA11; ENSG00000185247; TAA
FQSTERAPY

SEQ ID NO: 37972 - protein, 9 aa, Homo sapiens
  Table A; Target 37972; HLA-B*46:01; MAGEA11; ENSG00000185247; TAA
FQSTERAPY

SEQ ID NO: 37973 - protein, 9 aa, Homo sapiens
  Table A; Target 37973; HLA-C*02:02; MAGEA11; ENSG00000185247; TAA
FQSTERAPY

SEQ ID NO: 37974 - protein, 9 aa, Homo sapiens
  Table A; Target 37974; HLA-C*03:03; MAGEA11; ENSG00000185247; TAA
FQSTERAPY

SEQ ID NO: 37975 - protein, 9 aa, Homo sapiens
  Table A; Target 37975; HLA-C*07:04; MAGEA11; ENSG00000185247; TAA
FQSTERAPY

SEQ ID NO: 37976 - protein, 9 aa, Homo sapiens
  Table A; Target 37976; HLA-C*16:01; MAGEA11; ENSG00000185247; TAA
FQSTERAPY

SEQ ID NO: 37977 - protein, 9 aa, Homo sapiens
  Table A; Target 37977; HLA-C*01:02; MAGEA11; ENSG00000185247; TAA
FSPTAMDAI

SEQ ID NO: 37978 - protein, 9 aa, Homo sapiens
  Table A; Target 37978; HLA-A*11:01; MAGEA11; ENSG00000185247; TAA
FSQDILHDK

SEQ ID NO: 37979 - protein, 9 aa, Homo sapiens
  Table A; Target 37979; HLA-A*33:01; MAGEA11; ENSG00000185247; TAA
FSQDILHDK

SEQ ID NO: 37980 - protein, 9 aa, Homo sapiens
  Table A; Target 37980; HLA-A*03:01; MAGEA11; ENSG00000185247; TAA
GCSPASIKR

SEQ ID NO: 37981 - protein, 9 aa, Homo sapiens
  Table A; Target 37981; HLA-A*03:02; MAGEA11; ENSG00000185247; TAA
GCSPASIKR

SEQ ID NO: 37982 - protein, 9 aa, Homo sapiens
  Table A; Target 37982; HLA-A*11:01; MAGEA11; ENSG00000185247; TAA
GCSPASIKR

SEQ ID NO: 37983 - protein, 9 aa, Homo sapiens
  Table A; Target 37983; HLA-A*31:01; MAGEA11; ENSG00000185247; TAA
GCSPASIKR

SEQ ID NO: 37984 - protein, 9 aa, Homo sapiens
  Table A; Target 37984; HLA-A*68:01; MAGEA11; ENSG00000185247; TAA
GCSPASIKR

SEQ ID NO: 37985 - protein, 9 aa, Homo sapiens
  Table A; Target 37985; HLA-B*27:05; MAGEA11; ENSG00000185247; TAA
GCSPASIKR

SEQ ID NO: 37986 - protein, 9 aa, Homo sapiens
  Table A; Target 37986; HLA-C*07:06; MAGEA11; ENSG00000185247; TAA
GCSPASIKR

SEQ ID NO: 37987 - protein, 10 aa, Homo sapiens
  Table A; Target 37987; HLA-A*03:01; MAGEA11; ENSG00000185247; TAA
GCSPASIKRK

SEQ ID NO: 37988 - protein, 10 aa, Homo sapiens
  Table A; Target 37988; HLA-A*03:02; MAGEA11; ENSG00000185247; TAA
GCSPASIKRK

SEQ ID NO: 37989 - protein, 10 aa, Homo sapiens
  Table A; Target 37989; HLA-A*11:01; MAGEA11; ENSG00000185247; TAA
GCSPASIKRK

SEQ ID NO: 37990 - protein, 10 aa, Homo sapiens
  Table A; Target 37990; HLA-A*30:01; MAGEA11; ENSG00000185247; TAA
GDFGLQVSTM

SEQ ID NO: 37991 - protein, 10 aa, Homo sapiens
  Table A; Target 37991; HLA-B*37:01; MAGEA11; ENSG00000185247; TAA
GDFGLQVSTM

SEQ ID NO: 37992 - protein, 10 aa, Homo sapiens
  Table A; Target 37992; HLA-B*40:02; MAGEA11; ENSG00000185247; TAA
GDFGLQVSTM

SEQ ID NO: 37993 - protein, 10 aa, Homo sapiens
  Table A; Target 37993; HLA-C*07:04; MAGEA11; ENSG00000185247; TAA
GDFGLQVSTM

SEQ ID NO: 37994 - protein, 11 aa, Homo sapiens
  Table A; Target 37994; HLA-B*44:02; MAGEA11; ENSG00000185247; TAA
GEPKRLLTQNW

SEQ ID NO: 37995 - protein, 9 aa, Homo sapiens
  Table A; Target 37995; HLA-B*49:01; MAGEA11; ENSG00000185247; TAA
GEQVLWGPI

SEQ ID NO: 37996 - protein, 11 aa, Homo sapiens
  Table A; Target 37996; HLA-A*03:01; MAGEA11; ENSG00000185247; TAA
GIQCNEQSMPK

SEQ ID NO: 37997 - protein, 11 aa, Homo sapiens
  Table A; Target 37997; HLA-A*03:02; MAGEA11; ENSG00000185247; TAA
GIQCNEQSMPK

SEQ ID NO: 37998 - protein, 11 aa, Homo sapiens
  Table A; Target 37998; HLA-A*11:01; MAGEA11; ENSG00000185247; TAA
GIQCNEQSMPK

SEQ ID NO: 37999 - protein, 9 aa, Homo sapiens
  Table A; Target 37999; HLA-A*02:01; MAGEA11; ENSG00000185247; TAA
GLGCSPASI

SEQ ID NO: 38000 - protein, 9 aa, Homo sapiens
  Table A; Target 38000; HLA-A*02:03; MAGEA11; ENSG00000185247; TAA
GLGCSPASI

SEQ ID NO: 38001 - protein, 10 aa, Homo sapiens
  Table A; Target 38001; HLA-A*03:01; MAGEA11; ENSG00000185247; TAA
GLGCSPASIK

SEQ ID NO: 38002 - protein, 10 aa, Homo sapiens
  Table A; Target 38002; HLA-A*03:02; MAGEA11; ENSG00000185247; TAA
GLGCSPASIK

SEQ ID NO: 38003 - protein, 8 aa, Homo sapiens
  Table A; Target 38003; HLA-B*08:01; MAGEA11; ENSG00000185247; TAA
GLITKAEM

SEQ ID NO: 38004 - protein, 9 aa, Homo sapiens
  Table A; Target 38004; HLA-A*02:01; MAGEA11; ENSG00000185247; TAA
GLITKAEML

SEQ ID NO: 38005 - protein, 9 aa, Homo sapiens
  Table A; Target 38005; HLA-A*02:03; MAGEA11; ENSG00000185247; TAA
GLITKAEML

SEQ ID NO: 38006 - protein, 9 aa, Homo sapiens
  Table A; Target 38006; HLA-A*02:04; MAGEA11; ENSG00000185247; TAA
GLITKAEML

SEQ ID NO: 38007 - protein, 9 aa, Homo sapiens
  Table A; Target 38007; HLA-A*02:07; MAGEA11; ENSG00000185247; TAA
GLITKAEML

SEQ ID NO: 38008 - protein, 9 aa, Homo sapiens
  Table A; Target 38008; HLA-B*08:01; MAGEA11; ENSG00000185247; TAA
GLITKAEML

SEQ ID NO: 38009 - protein, 9 aa, Homo sapiens
  Table A; Target 38009; HLA-A*02:01; MAGEA11; ENSG00000185247; TAA
GLLIIVLGV

SEQ ID NO: 38010 - protein, 9 aa, Homo sapiens
  Table A; Target 38010; HLA-A*02:03; MAGEA11; ENSG00000185247; TAA
GLLIIVLGV

SEQ ID NO: 38011 - protein, 9 aa, Homo sapiens
  Table A; Target 38011; HLA-A*02:04; MAGEA11; ENSG00000185247; TAA
GLLIIVLGV

SEQ ID NO: 38012 - protein, 9 aa, Homo sapiens
  Table A; Target 38012; HLA-A*02:07; MAGEA11; ENSG00000185247; TAA
GLLIIVLGV

SEQ ID NO: 38013 - protein, 9 aa, Homo sapiens
  Table A; Target 38013; HLA-B*13:02; MAGEA11; ENSG00000185247; TAA
GLLIIVLGV

SEQ ID NO: 38014 - protein, 8 aa, Homo sapiens
  Table A; Target 38014; HLA-B*15:01; MAGEA11; ENSG00000185247; TAA
GLQVSTMF

SEQ ID NO: 38015 - protein, 10 aa, Homo sapiens
  Table A; Target 38015; HLA-B*54:01; MAGEA11; ENSG00000185247; TAA
GPITQIFPTV

SEQ ID NO: 38016 - protein, 10 aa, Homo sapiens
  Table A; Target 38016; HLA-B*55:01; MAGEA11; ENSG00000185247; TAA
GPITQIFPTV

SEQ ID NO: 38017 - protein, 10 aa, Homo sapiens
  Table A; Target 38017; HLA-B*56:01; MAGEA11; ENSG00000185247; TAA
GPITQIFPTV

SEQ ID NO: 38018 - protein, 8 aa, Homo sapiens
  Table A; Target 38018; HLA-B*07:02; MAGEA11; ENSG00000185247; TAA
GPSTSPDL

SEQ ID NO: 38019 - protein, 9 aa, Homo sapiens
  Table A; Target 38019; HLA-B*27:05; MAGEA11; ENSG00000185247; TAA
GRDPTSYPS

SEQ ID NO: 38020 - protein, 10 aa, Homo sapiens
  Table A; Target 38020; HLA-B*27:02; MAGEA11; ENSG00000185247; TAA
GRDPTSYPSL

SEQ ID NO: 38021 - protein, 10 aa, Homo sapiens
  Table A; Target 38021; HLA-B*27:05; MAGEA11; ENSG00000185247; TAA
GRDPTSYPSL

SEQ ID NO: 38022 - protein, 10 aa, Homo sapiens
  Table A; Target 38022; HLA-B*38:01; MAGEA11; ENSG00000185247; TAA
GRDPTSYPSL

SEQ ID NO: 38023 - protein, 10 aa, Homo sapiens
  Table A; Target 38023; HLA-B*39:01; MAGEA11; ENSG00000185247; TAA
GRDPTSYPSL

SEQ ID NO: 38024 - protein, 11 aa, Homo sapiens
  Table A; Target 38024; HLA-A*01:01; MAGEA11; ENSG00000185247; TAA
GRDPTSYPSLY

SEQ ID NO: 38025 - protein, 9 aa, Homo sapiens
  Table A; Target 38025; HLA-A*01:01; MAGEA11; ENSG00000185247; TAA
GTDPACYEF

SEQ ID NO: 38026 - protein, 9 aa, Homo sapiens
  Table A; Target 38026; HLA-A*32:01; MAGEA11; ENSG00000185247; TAA
GTDPACYEF

SEQ ID NO: 38027 - protein, 9 aa, Homo sapiens
  Table A; Target 38027; HLA-B*57:01; MAGEA11; ENSG00000185247; TAA
GTDPACYEF

SEQ ID NO: 38028 - protein, 9 aa, Homo sapiens
  Table A; Target 38028; HLA-B*58:01; MAGEA11; ENSG00000185247; TAA
GTDPACYEF

SEQ ID NO: 38029 - protein, 9 aa, Homo sapiens
  Table A; Target 38029; HLA-C*04:01; MAGEA11; ENSG00000185247; TAA
GTDPACYEF

SEQ ID NO: 38030 - protein, 9 aa, Homo sapiens
  Table A; Target 38030; HLA-C*05:01; MAGEA11; ENSG00000185247; TAA
GTDPACYEF

SEQ ID NO: 38031 - protein, 9 aa, Homo sapiens
  Table A; Target 38031; HLA-A*02:01; MAGEA11; ENSG00000185247; TAA
GTLEELPAA

SEQ ID NO: 38032 - protein, 10 aa, Homo sapiens
  Table A; Target 38032; HLA-A*02:01; MAGEA11; ENSG00000185247; TAA
GVYAGREHFL

SEQ ID NO: 38033 - protein, 10 aa, Homo sapiens
  Table A; Target 38033; HLA-A*02:03; MAGEA11; ENSG00000185247; TAA
GVYAGREHFL

SEQ ID NO: 38034 - protein, 10 aa, Homo sapiens
  Table A; Target 38034; HLA-A*02:04; MAGEA11; ENSG00000185247; TAA
GVYAGREHFL

SEQ ID NO: 38035 - protein, 10 aa, Homo sapiens
  Table A; Target 38035; HLA-A*03:01; MAGEA11; ENSG00000185247; TAA
GVYAGREHFL

SEQ ID NO: 38036 - protein, 11 aa, Homo sapiens
  Table A; Target 38036; HLA-A*29:02; MAGEA11; ENSG00000185247; TAA
GVYAGREHFLF

SEQ ID NO: 38037 - protein, 8 aa, Homo sapiens
  Table A; Target 38037; HLA-B*37:01; MAGEA11; ENSG00000185247; TAA
HDKIIDLV

SEQ ID NO: 38038 - protein, 8 aa, Homo sapiens
  Table A; Target 38038; HLA-B*40:02; MAGEA11; ENSG00000185247; TAA
HDKIIDLV

SEQ ID NO: 38039 - protein, 9 aa, Homo sapiens
  Table A; Target 38039; HLA-A*25:01; MAGEA11; ENSG00000185247; TAA
HSYVLVTSL

SEQ ID NO: 38040 - protein, 9 aa, Homo sapiens
  Table A; Target 38040; HLA-A*30:01; MAGEA11; ENSG00000185247; TAA
HSYVLVTSL

SEQ ID NO: 38041 - protein, 9 aa, Homo sapiens
  Table A; Target 38041; HLA-A*32:01; MAGEA11; ENSG00000185247; TAA
HSYVLVTSL

SEQ ID NO: 38042 - protein, 9 aa, Homo sapiens
  Table A; Target 38042; HLA-A*68:02; MAGEA11; ENSG00000185247; TAA
HSYVLVTSL

SEQ ID NO: 38043 - protein, 9 aa, Homo sapiens
  Table A; Target 38043; HLA-B*08:01; MAGEA11; ENSG00000185247; TAA
HSYVLVTSL

SEQ ID NO: 38044 - protein, 9 aa, Homo sapiens
  Table A; Target 38044; HLA-B*13:02; MAGEA11; ENSG00000185247; TAA
HSYVLVTSL

SEQ ID NO: 38045 - protein, 9 aa, Homo sapiens
  Table A; Target 38045; HLA-B*15:03; MAGEA11; ENSG00000185247; TAA
HSYVLVTSL

SEQ ID NO: 38046 - protein, 9 aa, Homo sapiens
  Table A; Target 38046; HLA-B*18:01; MAGEA11; ENSG00000185247; TAA
HSYVLVTSL

SEQ ID NO: 38047 - protein, 9 aa, Homo sapiens
  Table A; Target 38047; HLA-B*35:01; MAGEA11; ENSG00000185247; TAA
HSYVLVTSL

SEQ ID NO: 38048 - protein, 9 aa, Homo sapiens
  Table A; Target 38048; HLA-B*39:01; MAGEA11; ENSG00000185247; TAA
HSYVLVTSL

SEQ ID NO: 38049 - protein, 9 aa, Homo sapiens
  Table A; Target 38049; HLA-B*40:01; MAGEA11; ENSG00000185247; TAA
HSYVLVTSL

SEQ ID NO: 38050 - protein, 9 aa, Homo sapiens
  Table A; Target 38050; HLA-B*40:02; MAGEA11; ENSG00000185247; TAA
HSYVLVTSL

SEQ ID NO: 38051 - protein, 9 aa, Homo sapiens
  Table A; Target 38051; HLA-B*46:01; MAGEA11; ENSG00000185247; TAA
HSYVLVTSL

SEQ ID NO: 38052 - protein, 9 aa, Homo sapiens
  Table A; Target 38052; HLA-B*51:01; MAGEA11; ENSG00000185247; TAA
HSYVLVTSL

SEQ ID NO: 38053 - protein, 9 aa, Homo sapiens
  Table A; Target 38053; HLA-B*54:01; MAGEA11; ENSG00000185247; TAA
HSYVLVTSL

SEQ ID NO: 38054 - protein, 9 aa, Homo sapiens
  Table A; Target 38054; HLA-B*58:01; MAGEA11; ENSG00000185247; TAA
HSYVLVTSL

SEQ ID NO: 38055 - protein, 9 aa, Homo sapiens
  Table A; Target 38055; HLA-C*01:02; MAGEA11; ENSG00000185247; TAA
HSYVLVTSL

SEQ ID NO: 38056 - protein, 9 aa, Homo sapiens
  Table A; Target 38056; HLA-C*02:02; MAGEA11; ENSG00000185247; TAA
HSYVLVTSL

SEQ ID NO: 38057 - protein, 9 aa, Homo sapiens
  Table A; Target 38057; HLA-C*03:03; MAGEA11; ENSG00000185247; TAA
HSYVLVTSL

SEQ ID NO: 38058 - protein, 9 aa, Homo sapiens
  Table A; Target 38058; HLA-C*03:04; MAGEA11; ENSG00000185247; TAA
HSYVLVTSL

SEQ ID NO: 38059 - protein, 9 aa, Homo sapiens
  Table A; Target 38059; HLA-C*05:01; MAGEA11; ENSG00000185247; TAA
HSYVLVTSL

SEQ ID NO: 38060 - protein, 9 aa, Homo sapiens
  Table A; Target 38060; HLA-C*07:06; MAGEA11; ENSG00000185247; TAA
HSYVLVTSL

SEQ ID NO: 38061 - protein, 9 aa, Homo sapiens
  Table A; Target 38061; HLA-C*12:03; MAGEA11; ENSG00000185247; TAA
HSYVLVTSL

SEQ ID NO: 38062 - protein, 9 aa, Homo sapiens
  Table A; Target 38062; HLA-C*16:04; MAGEA11; ENSG00000185247; TAA
HSYVLVTSL

SEQ ID NO: 38063 - protein, 9 aa, Homo sapiens
  Table A; Target 38063; HLA-C*16:02; MAGEA11; ENSG00000185247; TAA
IANANGRDP

SEQ ID NO: 38064 - protein, 8 aa, Homo sapiens
  Table A; Target 38064; HLA-B*37:01; MAGEA11; ENSG00000185247; TAA
IDLVHLLL

SEQ ID NO: 38065 - protein, 8 aa, Homo sapiens
  Table A; Target 38065; HLA-C*14:02; MAGEA11; ENSG00000185247; TAA
IFMEGNCI

SEQ ID NO: 38066 - protein, 9 aa, Homo sapiens
  Table A; Target 38066; HLA-C*14:02; MAGEA11; ENSG00000185247; TAA
IFREASVCM

SEQ ID NO: 38067 - protein, 8 aa, Homo sapiens
  Table A; Target 38067; HLA-A*02:07; MAGEA11; ENSG00000185247; TAA
IIDLVHLL

SEQ ID NO: 38068 - protein, 8 aa, Homo sapiens
  Table A; Target 38068; HLA-C*04:01; MAGEA11; ENSG00000185247; TAA
IIDLVHLL

SEQ ID NO: 38069 - protein, 8 aa, Homo sapiens
  Table A; Target 38069; HLA-C*05:01; MAGEA11; ENSG00000185247; TAA
IIDLVHLL

SEQ ID NO: 38070 - protein, 9 aa, Homo sapiens
  Table A; Target 38070; HLA-A*01:01; MAGEA11; ENSG00000185247; TAA
IIDLVHLLL

SEQ ID NO: 38071 - protein, 9 aa, Homo sapiens
  Table A; Target 38071; HLA-A*02:07; MAGEA11; ENSG00000185247; TAA
IIDLVHLLL

SEQ ID NO: 38072 - protein, 9 aa, Homo sapiens
  Table A; Target 38072; HLA-C*05:01; MAGEA11; ENSG00000185247; TAA
IIDLVHLLL

SEQ ID NO: 38073 - protein, 9 aa, Homo sapiens
  Table A; Target 38073; HLA-A*02:01; MAGEA11; ENSG00000185247; TAA
ILHDKIIDL

SEQ ID NO: 38074 - protein, 9 aa, Homo sapiens
  Table A; Target 38074; HLA-A*02:03; MAGEA11; ENSG00000185247; TAA
ILHDKIIDL

SEQ ID NO: 38075 - protein, 9 aa, Homo sapiens
  Table A; Target 38075; HLA-A*02:04; MAGEA11; ENSG00000185247; TAA
ILHDKIIDL

SEQ ID NO: 38076 - protein, 9 aa, Homo sapiens
  Table A; Target 38076; HLA-A*02:07; MAGEA11; ENSG00000185247; TAA
ILHDKIIDL

SEQ ID NO: 38077 - protein, 9 aa, Homo sapiens
  Table A; Target 38077; HLA-A*03:01; MAGEA11; ENSG00000185247; TAA
ILHDKIIDL

SEQ ID NO: 38078 - protein, 9 aa, Homo sapiens
  Table A; Target 38078; HLA-B*08:01; MAGEA11; ENSG00000185247; TAA
ILHDKIIDL

SEQ ID NO: 38079 - protein, 10 aa, Homo sapiens
  Table A; Target 38079; HLA-A*02:01; MAGEA11; ENSG00000185247; TAA
ILHDKIIDLV

SEQ ID NO: 38080 - protein, 10 aa, Homo sapiens
  Table A; Target 38080; HLA-A*02:03; MAGEA11; ENSG00000185247; TAA
ILHDKIIDLV

SEQ ID NO: 38081 - protein, 10 aa, Homo sapiens
  Table A; Target 38081; HLA-A*02:04; MAGEA11; ENSG00000185247; TAA
ILHDKIIDLV

SEQ ID NO: 38082 - protein, 10 aa, Homo sapiens
  Table A; Target 38082; HLA-A*02:07; MAGEA11; ENSG00000185247; TAA
ILHDKIIDLV

SEQ ID NO: 38083 - protein, 9 aa, Homo sapiens
  Table A; Target 38083; HLA-B*35:03; MAGEA11; ENSG00000185247; TAA
IPEEVMWEV

SEQ ID NO: 38084 - protein, 9 aa, Homo sapiens
  Table A; Target 38084; HLA-B*51:01; MAGEA11; ENSG00000185247; TAA
IPEEVMWEV

SEQ ID NO: 38085 - protein, 9 aa, Homo sapiens
  Table A; Target 38085; HLA-B*54:01; MAGEA11; ENSG00000185247; TAA
IPEEVMWEV

SEQ ID NO: 38086 - protein, 10 aa, Homo sapiens
  Table A; Target 38086; HLA-B*35:03; MAGEA11; ENSG00000185247; TAA
IPEEVMWEVL

SEQ ID NO: 38087 - protein, 10 aa, Homo sapiens
  Table A; Target 38087; HLA-A*03:02; MAGEA11; ENSG00000185247; TAA
IQCNEQSMPK

SEQ ID NO: 38088 - protein, 10 aa, Homo sapiens
  Table A; Target 38088; HLA-A*11:01; MAGEA11; ENSG00000185247; TAA
IQCNEQSMPK

SEQ ID NO: 38089 - protein, 10 aa, Homo sapiens
  Table A; Target 38089; HLA-B*27:02; MAGEA11; ENSG00000185247; TAA
IQCNEQSMPK

SEQ ID NO: 38090 - protein, 9 aa, Homo sapiens
  Table A; Target 38090; HLA-B*57:01; MAGEA11; ENSG00000185247; TAA
ITGGEQVLW

SEQ ID NO: 38091 - protein, 9 aa, Homo sapiens
  Table A; Target 38091; HLA-B*58:01; MAGEA11; ENSG00000185247; TAA
ITGGEQVLW

SEQ ID NO: 38092 - protein, 9 aa, Homo sapiens
  Table A; Target 38092; HLA-A*11:01; MAGEA11; ENSG00000185247; TAA
ITQIFPTVR

SEQ ID NO: 38093 - protein, 9 aa, Homo sapiens
  Table A; Target 38093; HLA-A*31:01; MAGEA11; ENSG00000185247; TAA
ITQIFPTVR

SEQ ID NO: 38094 - protein, 9 aa, Homo sapiens
  Table A; Target 38094; HLA-A*33:01; MAGEA11; ENSG00000185247; TAA
ITQIFPTVR

SEQ ID NO: 38095 - protein, 9 aa, Homo sapiens
  Table A; Target 38095; HLA-A*33:03; MAGEA11; ENSG00000185247; TAA
ITQIFPTVR

SEQ ID NO: 38096 - protein, 9 aa, Homo sapiens
  Table A; Target 38096; HLA-A*68:01; MAGEA11; ENSG00000185247; TAA
ITQIFPTVR

SEQ ID NO: 38097 - protein, 9 aa, Homo sapiens
  Table A; Target 38097; HLA-C*07:06; MAGEA11; ENSG00000185247; TAA
ITQIFPTVR

SEQ ID NO: 38098 - protein, 10 aa, Homo sapiens
  Table A; Target 38098; HLA-A*30:01; MAGEA11; ENSG00000185247; TAA
KEGPSTSPDL

SEQ ID NO: 38099 - protein, 10 aa, Homo sapiens
  Table A; Target 38099; HLA-B*40:01; MAGEA11; ENSG00000185247; TAA
KEGPSTSPDL

SEQ ID NO: 38100 - protein, 11 aa, Homo sapiens
  Table A; Target 38100; HLA-B*40:01; MAGEA11; ENSG00000185247; TAA
KEGPSTSPDLI

SEQ ID NO: 38101 - protein, 11 aa, Homo sapiens
  Table A; Target 38101; HLA-B*40:02; MAGEA11; ENSG00000185247; TAA
KEGPSTSPDLI

SEQ ID NO: 38102 - protein, 11 aa, Homo sapiens
  Table A; Target 38102; HLA-B*49:01; MAGEA11; ENSG00000185247; TAA
KEGPSTSPDLI

SEQ ID NO: 38103 - protein, 10 aa, Homo sapiens
  Table A; Target 38103; HLA-A*25:01; MAGEA11; ENSG00000185247; TAA
KEVDPTSHSY

SEQ ID NO: 38104 - protein, 10 aa, Homo sapiens
  Table A; Target 38104; HLA-A*26:01; MAGEA11; ENSG00000185247; TAA
KEVDPTSHSY

SEQ ID NO: 38105 - protein, 10 aa, Homo sapiens
  Table A; Target 38105; HLA-A*29:02; MAGEA11; ENSG00000185247; TAA
KEVDPTSHSY

SEQ ID NO: 38106 - protein, 10 aa, Homo sapiens
  Table A; Target 38106; HLA-A*30:01; MAGEA11; ENSG00000185247; TAA
KEVDPTSHSY

SEQ ID NO: 38107 - protein, 10 aa, Homo sapiens
  Table A; Target 38107; HLA-A*30:02; MAGEA11; ENSG00000185247; TAA
KEVDPTSHSY

SEQ ID NO: 38108 - protein, 10 aa, Homo sapiens
  Table A; Target 38108; HLA-A*32:01; MAGEA11; ENSG00000185247; TAA
KEVDPTSHSY

SEQ ID NO: 38109 - protein, 10 aa, Homo sapiens
  Table A; Target 38109; HLA-B*15:01; MAGEA11; ENSG00000185247; TAA
KEVDPTSHSY

SEQ ID NO: 38110 - protein, 10 aa, Homo sapiens
  Table A; Target 38110; HLA-B*15:03; MAGEA11; ENSG00000185247; TAA
KEVDPTSHSY

SEQ ID NO: 38111 - protein, 10 aa, Homo sapiens
  Table A; Target 38111; HLA-B*18:01; MAGEA11; ENSG00000185247; TAA
KEVDPTSHSY

SEQ ID NO: 38112 - protein, 10 aa, Homo sapiens
  Table A; Target 38112; HLA-B*27:02; MAGEA11; ENSG00000185247; TAA
KEVDPTSHSY

SEQ ID NO: 38113 - protein, 10 aa, Homo sapiens
  Table A; Target 38113; HLA-B*27:05; MAGEA11; ENSG00000185247; TAA
KEVDPTSHSY

SEQ ID NO: 38114 - protein, 10 aa, Homo sapiens
  Table A; Target 38114; HLA-B*37:01; MAGEA11; ENSG00000185247; TAA
KEVDPTSHSY

SEQ ID NO: 38115 - protein, 10 aa, Homo sapiens
  Table A; Target 38115; HLA-B*40:01; MAGEA11; ENSG00000185247; TAA
KEVDPTSHSY

SEQ ID NO: 38116 - protein, 10 aa, Homo sapiens
  Table A; Target 38116; HLA-B*40:02; MAGEA11; ENSG00000185247; TAA
KEVDPTSHSY

SEQ ID NO: 38117 - protein, 10 aa, Homo sapiens
  Table A; Target 38117; HLA-B*44:02; MAGEA11; ENSG00000185247; TAA
KEVDPTSHSY

SEQ ID NO: 38118 - protein, 10 aa, Homo sapiens
  Table A; Target 38118; HLA-B*44:03; MAGEA11; ENSG00000185247; TAA
KEVDPTSHSY

SEQ ID NO: 38119 - protein, 10 aa, Homo sapiens
  Table A; Target 38119; HLA-B*49:01; MAGEA11; ENSG00000185247; TAA
KEVDPTSHSY

SEQ ID NO: 38120 - protein, 10 aa, Homo sapiens
  Table A; Target 38120; HLA-B*57:01; MAGEA11; ENSG00000185247; TAA
KEVDPTSHSY

SEQ ID NO: 38121 - protein, 10 aa, Homo sapiens
  Table A; Target 38121; HLA-B*58:01; MAGEA11; ENSG00000185247; TAA
KEVDPTSHSY

SEQ ID NO: 38122 - protein, 10 aa, Homo sapiens
  Table A; Target 38122; HLA-C*02:02; MAGEA11; ENSG00000185247; TAA
KEVDPTSHSY

SEQ ID NO: 38123 - protein, 10 aa, Homo sapiens
  Table A; Target 38123; HLA-C*16:01; MAGEA11; ENSG00000185247; TAA
KEVDPTSHSY

SEQ ID NO: 38124 - protein, 10 aa, Homo sapiens
  Table A; Target 38124; HLA-C*16:02; MAGEA11; ENSG00000185247; TAA
KEVDPTSHSY

SEQ ID NO: 38125 - protein, 10 aa, Homo sapiens
  Table A; Target 38125; HLA-C*16:04; MAGEA11; ENSG00000185247; TAA
KEVDPTSHSY

SEQ ID NO: 38126 - protein, 11 aa, Homo sapiens
  Table A; Target 38126; HLA-B*40:01; MAGEA11; ENSG00000185247; TAA
KEVDPTSHSYV

SEQ ID NO: 38127 - protein, 11 aa, Homo sapiens
  Table A; Target 38127; HLA-B*49:01; MAGEA11; ENSG00000185247; TAA
KEVDPTSHSYV

SEQ ID NO: 38128 - protein, 8 aa, Homo sapiens
  Table A; Target 38128; HLA-A*02:04; MAGEA11; ENSG00000185247; TAA
KIIDLVHL

SEQ ID NO: 38129 - protein, 8 aa, Homo sapiens
  Table A; Target 38129; HLA-A*02:07; MAGEA11; ENSG00000185247; TAA
KIIDLVHL

SEQ ID NO: 38130 - protein, 9 aa, Homo sapiens
  Table A; Target 38130; HLA-A*02:01; MAGEA11; ENSG00000185247; TAA
KIIDLVHLL

SEQ ID NO: 38131 - protein, 9 aa, Homo sapiens
  Table A; Target 38131; HLA-A*02:03; MAGEA11; ENSG00000185247; TAA
KIIDLVHLL

SEQ ID NO: 38132 - protein, 9 aa, Homo sapiens
  Table A; Target 38132; HLA-A*02:04; MAGEA11; ENSG00000185247; TAA
KIIDLVHLL

SEQ ID NO: 38133 - protein, 9 aa, Homo sapiens
  Table A; Target 38133; HLA-A*02:07; MAGEA11; ENSG00000185247; TAA
KIIDLVHLL

SEQ ID NO: 38134 - protein, 9 aa, Homo sapiens
  Table A; Target 38134; HLA-A*23:01; MAGEA11; ENSG00000185247; TAA
KIIDLVHLL

SEQ ID NO: 38135 - protein, 9 aa, Homo sapiens
  Table A; Target 38135; HLA-A*24:02; MAGEA11; ENSG00000185247; TAA
KIIDLVHLL

SEQ ID NO: 38136 - protein, 9 aa, Homo sapiens
  Table A; Target 38136; HLA-A*31:01; MAGEA11; ENSG00000185247; TAA
KIIDLVHLL

SEQ ID NO: 38137 - protein, 9 aa, Homo sapiens
  Table A; Target 38137; HLA-A*32:01; MAGEA11; ENSG00000185247; TAA
KIIDLVHLL

SEQ ID NO: 38138 - protein, 9 aa, Homo sapiens
  Table A; Target 38138; HLA-A*68:02; MAGEA11; ENSG00000185247; TAA
KIIDLVHLL

SEQ ID NO: 38139 - protein, 9 aa, Homo sapiens
  Table A; Target 38139; HLA-B*57:01; MAGEA11; ENSG00000185247; TAA
KIIDLVHLL

SEQ ID NO: 38140 - protein, 9 aa, Homo sapiens
  Table A; Target 38140; HLA-B*58:01; MAGEA11; ENSG00000185247; TAA
KIIDLVHLL

SEQ ID NO: 38141 - protein, 9 aa, Homo sapiens
  Table A; Target 38141; HLA-C*02:02; MAGEA11; ENSG00000185247; TAA
KIIDLVHLL

SEQ ID NO: 38142 - protein, 10 aa, Homo sapiens
  Table A; Target 38142; HLA-A*02:01; MAGEA11; ENSG00000185247; TAA
KIIDLVHLLL

SEQ ID NO: 38143 - protein, 10 aa, Homo sapiens
  Table A; Target 38143; HLA-A*02:04; MAGEA11; ENSG00000185247; TAA
KIIDLVHLLL

SEQ ID NO: 38144 - protein, 10 aa, Homo sapiens
  Table A; Target 38144; HLA-A*02:07; MAGEA11; ENSG00000185247; TAA
KIIDLVHLLL

SEQ ID NO: 38145 - protein, 10 aa, Homo sapiens
  Table A; Target 38145; HLA-A*31:01; MAGEA11; ENSG00000185247; TAA
KIIDLVHLLL

SEQ ID NO: 38146 - protein, 11 aa, Homo sapiens
  Table A; Target 38146; HLA-A*31:01; MAGEA11; ENSG00000185247; TAA
KIIDLVHLLLR

SEQ ID NO: 38147 - protein, 9 aa, Homo sapiens
  Table A; Target 38147; HLA-A*02:01; MAGEA11; ENSG00000185247; TAA
KVLEYIANA

SEQ ID NO: 38148 - protein, 9 aa, Homo sapiens
  Table A; Target 38148; HLA-A*02:03; MAGEA11; ENSG00000185247; TAA
KVLEYIANA

SEQ ID NO: 38149 - protein, 9 aa, Homo sapiens
  Table A; Target 38149; HLA-A*02:04; MAGEA11; ENSG00000185247; TAA
KVLEYIANA

SEQ ID NO: 38150 - protein, 9 aa, Homo sapiens
  Table A; Target 38150; HLA-A*02:07; MAGEA11; ENSG00000185247; TAA
KVLEYIANA

SEQ ID NO: 38151 - protein, 9 aa, Homo sapiens
  Table A; Target 38151; HLA-A*31:01; MAGEA11; ENSG00000185247; TAA
KVLEYIANA

SEQ ID NO: 38152 - protein, 9 aa, Homo sapiens
  Table A; Target 38152; HLA-B*40:02; MAGEA11; ENSG00000185247; TAA
KVLEYIANA

SEQ ID NO: 38153 - protein, 9 aa, Homo sapiens
  Table A; Target 38153; HLA-B*55:01; MAGEA11; ENSG00000185247; TAA
KVLEYIANA

SEQ ID NO: 38154 - protein, 9 aa, Homo sapiens
  Table A; Target 38154; HLA-B*56:01; MAGEA11; ENSG00000185247; TAA
KVLEYIANA

SEQ ID NO: 38155 - protein, 11 aa, Homo sapiens
  Table A; Target 38155; HLA-C*04:01; MAGEA11; ENSG00000185247; TAA
KVLEYIANANG

SEQ ID NO: 38156 - protein, 10 aa, Homo sapiens
  Table A; Target 38156; HLA-B*27:02; MAGEA11; ENSG00000185247; TAA
LEYIANANGR

SEQ ID NO: 38157 - protein, 9 aa, Homo sapiens
  Table A; Target 38157; HLA-B*08:01; MAGEA11; ENSG00000185247; TAA
LGLVGAQAL

SEQ ID NO: 38158 - protein, 9 aa, Homo sapiens
  Table A; Target 38158; HLA-B*35:03; MAGEA11; ENSG00000185247; TAA
LGLVGAQAL

SEQ ID NO: 38159 - protein, 9 aa, Homo sapiens
  Table A; Target 38159; HLA-B*46:01; MAGEA11; ENSG00000185247; TAA
LGLVGAQAL

SEQ ID NO: 38160 - protein, 9 aa, Homo sapiens
  Table A; Target 38160; HLA-C*01:02; MAGEA11; ENSG00000185247; TAA
LGLVGAQAL

SEQ ID NO: 38161 - protein, 9 aa, Homo sapiens
  Table A; Target 38161; HLA-C*03:03; MAGEA11; ENSG00000185247; TAA
LGLVGAQAL

SEQ ID NO: 38162 - protein, 9 aa, Homo sapiens
  Table A; Target 38162; HLA-C*03:04; MAGEA11; ENSG00000185247; TAA
LGLVGAQAL

SEQ ID NO: 38163 - protein, 9 aa, Homo sapiens
  Table A; Target 38163; HLA-C*14:02; MAGEA11; ENSG00000185247; TAA
LGLVGAQAL

SEQ ID NO: 38164 - protein, 8 aa, Homo sapiens
  Table A; Target 38164; HLA-C*12:03; MAGEA11; ENSG00000185247; TAA
LGSVIKNY

SEQ ID NO: 38165 - protein, 8 aa, Homo sapiens
  Table A; Target 38165; HLA-C*16:01; MAGEA11; ENSG00000185247; TAA
LGSVIKNY

SEQ ID NO: 38166 - protein, 8 aa, Homo sapiens
  Table A; Target 38166; HLA-C*16:02; MAGEA11; ENSG00000185247; TAA
LGSVIKNY

SEQ ID NO: 38167 - protein, 10 aa, Homo sapiens
  Table A; Target 38167; HLA-A*02:01; MAGEA11; ENSG00000185247; TAA
LLFGIDVKEV

SEQ ID NO: 38168 - protein, 10 aa, Homo sapiens
  Table A; Target 38168; HLA-A*02:03; MAGEA11; ENSG00000185247; TAA
LLFGIDVKEV

SEQ ID NO: 38169 - protein, 10 aa, Homo sapiens
  Table A; Target 38169; HLA-A*02:04; MAGEA11; ENSG00000185247; TAA
LLFGIDVKEV

SEQ ID NO: 38170 - protein, 10 aa, Homo sapiens
  Table A; Target 38170; HLA-A*02:07; MAGEA11; ENSG00000185247; TAA
LLFGIDVKEV

SEQ ID NO: 38171 - protein, 9 aa, Homo sapiens
  Table A; Target 38171; HLA-C*01:02; MAGEA11; ENSG00000185247; TAA
LNVGTLEEL

SEQ ID NO: 38172 - protein, 9 aa, Homo sapiens
  Table A; Target 38172; HLA-B*55:01; MAGEA11; ENSG00000185247; TAA
LPAAESPSP

SEQ ID NO: 38173 - protein, 10 aa, Homo sapiens
  Table A; Target 38173; HLA-B*15:01; MAGEA11; ENSG00000185247; TAA
LQAEEQEAAF

SEQ ID NO: 38174 - protein, 10 aa, Homo sapiens
  Table A; Target 38174; HLA-B*27:05; MAGEA11; ENSG00000185247; TAA
LQAEEQEAAF

SEQ ID NO: 38175 - protein, 10 aa, Homo sapiens
  Table A; Target 38175; HLA-C*07:04; MAGEA11; ENSG00000185247; TAA
LQAEEQEAAF

SEQ ID NO: 38176 - protein, 11 aa, Homo sapiens
  Table A; Target 38176; HLA-B*27:05; MAGEA11; ENSG00000185247; TAA
LQAEEQEAAFF

SEQ ID NO: 38177 - protein, 11 aa, Homo sapiens
  Table A; Target 38177; HLA-B*38:01; MAGEA11; ENSG00000185247; TAA
LQAEEQEAAFF

SEQ ID NO: 38178 - protein, 10 aa, Homo sapiens
  Table A; Target 38178; HLA-B*27:05; MAGEA11; ENSG00000185247; TAA
LQAQEEDLGL

SEQ ID NO: 38179 - protein, 9 aa, Homo sapiens
  Table A; Target 38179; HLA-C*05:01; MAGEA11; ENSG00000185247; TAA
LSDEGSGSQ

SEQ ID NO: 38180 - protein, 10 aa, Homo sapiens
  Table A; Target 38180; HLA-A*01:01; MAGEA11; ENSG00000185247; TAA
LSDEGSGSQE

SEQ ID NO: 38181 - protein, 11 aa, Homo sapiens
  Table A; Target 38181; HLA-A*01:01; MAGEA11; ENSG00000185247; TAA
LSDEGSGSQEK

SEQ ID NO: 38182 - protein, 8 aa, Homo sapiens
  Table A; Target 38182; HLA-C*03:04; MAGEA11; ENSG00000185247; TAA
LSYDGIQC

SEQ ID NO: 38183 - protein, 9 aa, Homo sapiens
  Table A; Target 38183; HLA-A*03:02; MAGEA11; ENSG00000185247; TAA
LTQNWVQEK

SEQ ID NO: 38184 - protein, 9 aa, Homo sapiens
  Table A; Target 38184; HLA-A*11:01; MAGEA11; ENSG00000185247; TAA
LTQNWVQEK

SEQ ID NO: 38185 - protein, 10 aa, Homo sapiens
  Table A; Target 38185; HLA-A*01:01; MAGEA11; ENSG00000185247; TAA
LTQNWVQEKY

SEQ ID NO: 38186 - protein, 10 aa, Homo sapiens
  Table A; Target 38186; HLA-A*29:02; MAGEA11; ENSG00000185247; TAA
LTQNWVQEKY

SEQ ID NO: 38187 - protein, 10 aa, Homo sapiens
  Table A; Target 38187; HLA-A*30:02; MAGEA11; ENSG00000185247; TAA
LTQNWVQEKY

SEQ ID NO: 38188 - protein, 10 aa, Homo sapiens
  Table A; Target 38188; HLA-B*57:01; MAGEA11; ENSG00000185247; TAA
LTQNWVQEKY

SEQ ID NO: 38189 - protein, 10 aa, Homo sapiens
  Table A; Target 38189; HLA-B*58:01; MAGEA11; ENSG00000185247; TAA
LTQNWVQEKY

SEQ ID NO: 38190 - protein, 9 aa, Homo sapiens
  Table A; Target 38190; HLA-A*01:01; MAGEA11; ENSG00000185247; TAA
LVTSLNLSY

SEQ ID NO: 38191 - protein, 9 aa, Homo sapiens
  Table A; Target 38191; HLA-A*03:01; MAGEA11; ENSG00000185247; TAA
LVTSLNLSY

SEQ ID NO: 38192 - protein, 9 aa, Homo sapiens
  Table A; Target 38192; HLA-A*25:01; MAGEA11; ENSG00000185247; TAA
LVTSLNLSY

SEQ ID NO: 38193 - protein, 9 aa, Homo sapiens
  Table A; Target 38193; HLA-A*26:01; MAGEA11; ENSG00000185247; TAA
LVTSLNLSY

SEQ ID NO: 38194 - protein, 9 aa, Homo sapiens
  Table A; Target 38194; HLA-A*29:02; MAGEA11; ENSG00000185247; TAA
LVTSLNLSY

SEQ ID NO: 38195 - protein, 9 aa, Homo sapiens
  Table A; Target 38195; HLA-A*30:02; MAGEA11; ENSG00000185247; TAA
LVTSLNLSY

SEQ ID NO: 38196 - protein, 9 aa, Homo sapiens
  Table A; Target 38196; HLA-A*32:01; MAGEA11; ENSG00000185247; TAA
LVTSLNLSY

SEQ ID NO: 38197 - protein, 9 aa, Homo sapiens
  Table A; Target 38197; HLA-B*15:01; MAGEA11; ENSG00000185247; TAA
LVTSLNLSY

SEQ ID NO: 38198 - protein, 9 aa, Homo sapiens
  Table A; Target 38198; HLA-B*35:01; MAGEA11; ENSG00000185247; TAA
LVTSLNLSY

SEQ ID NO: 38199 - protein, 9 aa, Homo sapiens
  Table A; Target 38199; HLA-B*57:01; MAGEA11; ENSG00000185247; TAA
LVTSLNLSY

SEQ ID NO: 38200 - protein, 9 aa, Homo sapiens
  Table A; Target 38200; HLA-B*58:01; MAGEA11; ENSG00000185247; TAA
LVTSLNLSY

SEQ ID NO: 38201 - protein, 9 aa, Homo sapiens
  Table A; Target 38201; HLA-C*02:02; MAGEA11; ENSG00000185247; TAA
LVTSLNLSY

SEQ ID NO: 38202 - protein, 9 aa, Homo sapiens
  Table A; Target 38202; HLA-C*07:04; MAGEA11; ENSG00000185247; TAA
LVTSLNLSY

SEQ ID NO: 38203 - protein, 9 aa, Homo sapiens
  Table A; Target 38203; HLA-C*14:02; MAGEA11; ENSG00000185247; TAA
LVTSLNLSY

SEQ ID NO: 38204 - protein, 9 aa, Homo sapiens
  Table A; Target 38204; HLA-C*16:01; MAGEA11; ENSG00000185247; TAA
LVTSLNLSY

SEQ ID NO: 38205 - protein, 9 aa, Homo sapiens
  Table A; Target 38205; HLA-A*23:01; MAGEA11; ENSG00000185247; TAA
LWGPITQIF

SEQ ID NO: 38206 - protein, 9 aa, Homo sapiens
  Table A; Target 38206; HLA-A*24:02; MAGEA11; ENSG00000185247; TAA
LWGPITQIF

SEQ ID NO: 38207 - protein, 8 aa, Homo sapiens
  Table A; Target 38207; HLA-A*30:01; MAGEA11; ENSG00000185247; TAA
MDAIFGSL

SEQ ID NO: 38208 - protein, 8 aa, Homo sapiens
  Table A; Target 38208; HLA-B*18:01; MAGEA11; ENSG00000185247; TAA
MDAIFGSL

SEQ ID NO: 38209 - protein, 8 aa, Homo sapiens
  Table A; Target 38209; HLA-B*37:01; MAGEA11; ENSG00000185247; TAA
MDAIFGSL

SEQ ID NO: 38210 - protein, 8 aa, Homo sapiens
  Table A; Target 38210; HLA-B*40:01; MAGEA11; ENSG00000185247; TAA
MDAIFGSL

SEQ ID NO: 38211 - protein, 8 aa, Homo sapiens
  Table A; Target 38211; HLA-B*40:02; MAGEA11; ENSG00000185247; TAA
MDAIFGSL

SEQ ID NO: 38212 - protein, 8 aa, Homo sapiens
  Table A; Target 38212; HLA-C*04:01; MAGEA11; ENSG00000185247; TAA
MDAIFGSL

SEQ ID NO: 38213 - protein, 8 aa, Homo sapiens
  Table A; Target 38213; HLA-C*06:02; MAGEA11; ENSG00000185247; TAA
MDAIFGSL

SEQ ID NO: 38214 - protein, 8 aa, Homo sapiens
  Table A; Target 38214; HLA-C*07:01; MAGEA11; ENSG00000185247; TAA
MDAIFGSL

SEQ ID NO: 38215 - protein, 8 aa, Homo sapiens
  Table A; Target 38215; HLA-C*07:02; MAGEA11; ENSG00000185247; TAA
MDAIFGSL

SEQ ID NO: 38216 - protein, 8 aa, Homo sapiens
  Table A; Target 38216; HLA-C*12:03; MAGEA11; ENSG00000185247; TAA
MDAIFGSL

SEQ ID NO: 38217 - protein, 8 aa, Homo sapiens
  Table A; Target 38217; HLA-C*16:02; MAGEA11; ENSG00000185247; TAA
MDAIFGSL

SEQ ID NO: 38218 - protein, 9 aa, Homo sapiens
  Table A; Target 38218; HLA-A*03:01; MAGEA11; ENSG00000185247; TAA
MLGSVIKNY

SEQ ID NO: 38219 - protein, 9 aa, Homo sapiens
  Table A; Target 38219; HLA-A*03:02; MAGEA11; ENSG00000185247; TAA
MLGSVIKNY

SEQ ID NO: 38220 - protein, 9 aa, Homo sapiens
  Table A; Target 38220; HLA-A*29:02; MAGEA11; ENSG00000185247; TAA
MLGSVIKNY

SEQ ID NO: 38221 - protein, 9 aa, Homo sapiens
  Table A; Target 38221; HLA-A*30:02; MAGEA11; ENSG00000185247; TAA
MLGSVIKNY

SEQ ID NO: 38222 - protein, 9 aa, Homo sapiens
  Table A; Target 38222; HLA-A*32:01; MAGEA11; ENSG00000185247; TAA
MLGSVIKNY

SEQ ID NO: 38223 - protein, 9 aa, Homo sapiens
  Table A; Target 38223; HLA-B*35:01; MAGEA11; ENSG00000185247; TAA
MLGSVIKNY

SEQ ID NO: 38224 - protein, 9 aa, Homo sapiens
  Table A; Target 38224; HLA-B*44:02; MAGEA11; ENSG00000185247; TAA
MLGSVIKNY

SEQ ID NO: 38225 - protein, 9 aa, Homo sapiens
  Table A; Target 38225; HLA-B*44:03; MAGEA11; ENSG00000185247; TAA
MLGSVIKNY

SEQ ID NO: 38226 - protein, 9 aa, Homo sapiens
  Table A; Target 38226; HLA-C*07:01; MAGEA11; ENSG00000185247; TAA
MLGSVIKNY

SEQ ID NO: 38227 - protein, 9 aa, Homo sapiens
  Table A; Target 38227; HLA-C*07:04; MAGEA11; ENSG00000185247; TAA
MLGSVIKNY

SEQ ID NO: 38228 - protein, 9 aa, Homo sapiens
  Table A; Target 38228; HLA-C*12:03; MAGEA11; ENSG00000185247; TAA
MLGSVIKNY

SEQ ID NO: 38229 - protein, 9 aa, Homo sapiens
  Table A; Target 38229; HLA-C*16:01; MAGEA11; ENSG00000185247; TAA
MLGSVIKNY

SEQ ID NO: 38230 - protein, 9 aa, Homo sapiens
  Table A; Target 38230; HLA-C*16:02; MAGEA11; ENSG00000185247; TAA
MLGSVIKNY

SEQ ID NO: 38231 - protein, 8 aa, Homo sapiens
  Table A; Target 38231; HLA-B*51:01; MAGEA11; ENSG00000185247; TAA
MPKSGLLI

SEQ ID NO: 38232 - protein, 9 aa, Homo sapiens
  Table A; Target 38232; HLA-B*07:02; MAGEA11; ENSG00000185247; TAA
MPKSGLLII

SEQ ID NO: 38233 - protein, 9 aa, Homo sapiens
  Table A; Target 38233; HLA-B*35:03; MAGEA11; ENSG00000185247; TAA
MPKSGLLII

SEQ ID NO: 38234 - protein, 9 aa, Homo sapiens
  Table A; Target 38234; HLA-B*51:01; MAGEA11; ENSG00000185247; TAA
MPKSGLLII

SEQ ID NO: 38235 - protein, 9 aa, Homo sapiens
  Table A; Target 38235; HLA-B*54:01; MAGEA11; ENSG00000185247; TAA
MPKSGLLII

SEQ ID NO: 38236 - protein, 9 aa, Homo sapiens
  Table A; Target 38236; HLA-B*56:01; MAGEA11; ENSG00000185247; TAA
MPKSGLLII

SEQ ID NO: 38237 - protein, 9 aa, Homo sapiens
  Table A; Target 38237; HLA-C*07:02; MAGEA11; ENSG00000185247; TAA
MPKSGLLII

SEQ ID NO: 38238 - protein, 10 aa, Homo sapiens
  Table A; Target 38238; HLA-B*51:01; MAGEA11; ENSG00000185247; TAA
MPKSGLLIIV

SEQ ID NO: 38239 - protein, 10 aa, Homo sapiens
  Table A; Target 38239; HLA-B*54:01; MAGEA11; ENSG00000185247; TAA
MPKSGLLIIV

SEQ ID NO: 38240 - protein, 10 aa, Homo sapiens
  Table A; Target 38240; HLA-B*56:01; MAGEA11; ENSG00000185247; TAA
MPKSGLLIIV

SEQ ID NO: 38241 - protein, 11 aa, Homo sapiens
  Table A; Target 38241; HLA-B*54:01; MAGEA11; ENSG00000185247; TAA
MPKSGLLIIVL

SEQ ID NO: 38242 - protein, 10 aa, Homo sapiens
  Table A; Target 38242; HLA-B*54:01; MAGEA11; ENSG00000185247; TAA
MPLEQRSQHC

SEQ ID NO: 38243 - protein, 9 aa, Homo sapiens
  Table A; Target 38243; HLA-B*13:02; MAGEA11; ENSG00000185247; TAA
MQLLFGIDV

SEQ ID NO: 38244 - protein, 10 aa, Homo sapiens
  Table A; Target 38244; HLA-C*04:01; MAGEA11; ENSG00000185247; TAA
MWEVLSIMGV

SEQ ID NO: 38245 - protein, 10 aa, Homo sapiens
  Table A; Target 38245; HLA-A*25:01; MAGEA11; ENSG00000185247; TAA
NANGRDPTSY

SEQ ID NO: 38246 - protein, 10 aa, Homo sapiens
  Table A; Target 38246; HLA-A*30:02; MAGEA11; ENSG00000185247; TAA
NANGRDPTSY

SEQ ID NO: 38247 - protein, 10 aa, Homo sapiens
  Table A; Target 38247; HLA-B*35:01; MAGEA11; ENSG00000185247; TAA
NANGRDPTSY

SEQ ID NO: 38248 - protein, 10 aa, Homo sapiens
  Table A; Target 38248; HLA-B*40:01; MAGEA11; ENSG00000185247; TAA
NEQSMPKSGL

SEQ ID NO: 38249 - protein, 10 aa, Homo sapiens
  Table A; Target 38249; HLA-B*44:03; MAGEA11; ENSG00000185247; TAA
NEQSMPKSGL

SEQ ID NO: 38250 - protein, 11 aa, Homo sapiens
  Table A; Target 38250; HLA-B*40:01; MAGEA11; ENSG00000185247; TAA
NEQSMPKSGLL

SEQ ID NO: 38251 - protein, 10 aa, Homo sapiens
  Table A; Target 38251; HLA-A*33:01; MAGEA11; ENSG00000185247; TAA
NGRDPTSYPS

SEQ ID NO: 38252 - protein, 10 aa, Homo sapiens
  Table A; Target 38252; HLA-A*29:02; MAGEA11; ENSG00000185247; TAA
NWVQEKYLVY

SEQ ID NO: 38253 - protein, 9 aa, Homo sapiens
  Table A; Target 38253; HLA-A*23:01; MAGEA11; ENSG00000185247; TAA
NYEDYFPEI

SEQ ID NO: 38254 - protein, 9 aa, Homo sapiens
  Table A; Target 38254; HLA-A*24:02; MAGEA11; ENSG00000185247; TAA
NYEDYFPEI

SEQ ID NO: 38255 - protein, 10 aa, Homo sapiens
  Table A; Target 38255; HLA-A*24:02; MAGEA11; ENSG00000185247; TAA
NYEDYFPEIF

SEQ ID NO: 38256 - protein, 8 aa, Homo sapiens
  Table A; Target 38256; HLA-B*51:01; MAGEA11; ENSG00000185247; TAA
PADLTRVI

SEQ ID NO: 38257 - protein, 9 aa, Homo sapiens
  Table A; Target 38257; HLA-B*37:01; MAGEA11; ENSG00000185247; TAA
PDLIDPESF

SEQ ID NO: 38258 - protein, 9 aa, Homo sapiens
  Table A; Target 38258; HLA-B*37:01; MAGEA11; ENSG00000185247; TAA
PEIFREASV

SEQ ID NO: 38259 - protein, 9 aa, Homo sapiens
  Table A; Target 38259; HLA-B*40:02; MAGEA11; ENSG00000185247; TAA
PEIFREASV

SEQ ID NO: 38260 - protein, 9 aa, Homo sapiens
  Table A; Target 38260; HLA-B*49:01; MAGEA11; ENSG00000185247; TAA
PEIFREASV

SEQ ID NO: 38261 - protein, 9 aa, Homo sapiens
  Table A; Target 38261; HLA-B*15:01; MAGEA11; ENSG00000185247; TAA
PQSPQEESF

SEQ ID NO: 38262 - protein, 8 aa, Homo sapiens
  Table A; Target 38262; HLA-C*07:02; MAGEA11; ENSG00000185247; TAA
PTSHSYVL

SEQ ID NO: 38263 - protein, 8 aa, Homo sapiens
  Table A; Target 38263; HLA-A*01:01; MAGEA11; ENSG00000185247; TAA
PTSYPSLY

SEQ ID NO: 38264 - protein, 8 aa, Homo sapiens
  Table A; Target 38264; HLA-A*24:02; MAGEA11; ENSG00000185247; TAA
PYGPQLQW

SEQ ID NO: 38265 - protein, 8 aa, Homo sapiens
  Table A; Target 38265; HLA-C*07:01; MAGEA11; ENSG00000185247; TAA
PYGPQLQW

SEQ ID NO: 38266 - protein, 9 aa, Homo sapiens
  Table A; Target 38266; HLA-B*35:01; MAGEA11; ENSG00000185247; TAA
QAEEQEAAF

SEQ ID NO: 38267 - protein, 9 aa, Homo sapiens
  Table A; Target 38267; HLA-B*35:03; MAGEA11; ENSG00000185247; TAA
QAEEQEAAF

SEQ ID NO: 38268 - protein, 9 aa, Homo sapiens
  Table A; Target 38268; HLA-B*38:01; MAGEA11; ENSG00000185247; TAA
QAEEQEAAF

SEQ ID NO: 38269 - protein, 9 aa, Homo sapiens
  Table A; Target 38269; HLA-B*39:01; MAGEA11; ENSG00000185247; TAA
QAEEQEAAF

SEQ ID NO: 38270 - protein, 9 aa, Homo sapiens
  Table A; Target 38270; HLA-B*55:01; MAGEA11; ENSG00000185247; TAA
QAEEQEAAF

SEQ ID NO: 38271 - protein, 9 aa, Homo sapiens
  Table A; Target 38271; HLA-C*03:03; MAGEA11; ENSG00000185247; TAA
QAEEQEAAF

SEQ ID NO: 38272 - protein, 9 aa, Homo sapiens
  Table A; Target 38272; HLA-C*03:04; MAGEA11; ENSG00000185247; TAA
QAEEQEAAF

SEQ ID NO: 38273 - protein, 9 aa, Homo sapiens
  Table A; Target 38273; HLA-C*05:01; MAGEA11; ENSG00000185247; TAA
QAEEQEAAF

SEQ ID NO: 38274 - protein, 10 aa, Homo sapiens
  Table A; Target 38274; HLA-B*27:02; MAGEA11; ENSG00000185247; TAA
QAEEQEAAFF

SEQ ID NO: 38275 - protein, 10 aa, Homo sapiens
  Table A; Target 38275; HLA-B*27:05; MAGEA11; ENSG00000185247; TAA
QAEEQEAAFF

SEQ ID NO: 38276 - protein, 10 aa, Homo sapiens
  Table A; Target 38276; HLA-B*38:01; MAGEA11; ENSG00000185247; TAA
QAEEQEAAFF

SEQ ID NO: 38277 - protein, 10 aa, Homo sapiens
  Table A; Target 38277; HLA-C*05:01; MAGEA11; ENSG00000185247; TAA
QAEEQEAAFF

SEQ ID NO: 38278 - protein, 9 aa, Homo sapiens
  Table A; Target 38278; HLA-B*35:03; MAGEA11; ENSG00000185247; TAA
QAQEEDLGL

SEQ ID NO: 38279 - protein, 9 aa, Homo sapiens
  Table A; Target 38279; HLA-A*03:01; MAGEA11; ENSG00000185247; TAA
QCNEQSMPK

SEQ ID NO: 38280 - protein, 9 aa, Homo sapiens
  Table A; Target 38280; HLA-A*03:02; MAGEA11; ENSG00000185247; TAA
QCNEQSMPK

SEQ ID NO: 38281 - protein, 9 aa, Homo sapiens
  Table A; Target 38281; HLA-A*11:01; MAGEA11; ENSG00000185247; TAA
QCNEQSMPK

SEQ ID NO: 38282 - protein, 8 aa, Homo sapiens
  Table A; Target 38282; HLA-B*37:01; MAGEA11; ENSG00000185247; TAA
QDLPRVQV

SEQ ID NO: 38283 - protein, 9 aa, Homo sapiens
  Table A; Target 38283; HLA-A*23:01; MAGEA11; ENSG00000185247; TAA
QDLPRVQVF

SEQ ID NO: 38284 - protein, 9 aa, Homo sapiens
  Table A; Target 38284; HLA-A*24:02; MAGEA11; ENSG00000185247; TAA
QDLPRVQVF

SEQ ID NO: 38285 - protein, 9 aa, Homo sapiens
  Table A; Target 38285; HLA-A*30:01; MAGEA11; ENSG00000185247; TAA
QDLPRVQVF

SEQ ID NO: 38286 - protein, 9 aa, Homo sapiens
  Table A; Target 38286; HLA-A*32:01; MAGEA11; ENSG00000185247; TAA
QDLPRVQVF

SEQ ID NO: 38287 - protein, 9 aa, Homo sapiens
  Table A; Target 38287; HLA-B*08:01; MAGEA11; ENSG00000185247; TAA
QDLPRVQVF

SEQ ID NO: 38288 - protein, 9 aa, Homo sapiens
  Table A; Target 38288; HLA-B*15:03; MAGEA11; ENSG00000185247; TAA
QDLPRVQVF

SEQ ID NO: 38289 - protein, 9 aa, Homo sapiens
  Table A; Target 38289; HLA-B*18:01; MAGEA11; ENSG00000185247; TAA
QDLPRVQVF

SEQ ID NO: 38290 - protein, 9 aa, Homo sapiens
  Table A; Target 38290; HLA-B*37:01; MAGEA11; ENSG00000185247; TAA
QDLPRVQVF

SEQ ID NO: 38291 - protein, 9 aa, Homo sapiens
  Table A; Target 38291; HLA-B*38:01; MAGEA11; ENSG00000185247; TAA
QDLPRVQVF

SEQ ID NO: 38292 - protein, 9 aa, Homo sapiens
  Table A; Target 38292; HLA-B*40:02; MAGEA11; ENSG00000185247; TAA
QDLPRVQVF

SEQ ID NO: 38293 - protein, 9 aa, Homo sapiens
  Table A; Target 38293; HLA-B*44:02; MAGEA11; ENSG00000185247; TAA
QDLPRVQVF

SEQ ID NO: 38294 - protein, 9 aa, Homo sapiens
  Table A; Target 38294; HLA-B*44:03; MAGEA11; ENSG00000185247; TAA
QDLPRVQVF

SEQ ID NO: 38295 - protein, 9 aa, Homo sapiens
  Table A; Target 38295; HLA-B*57:01; MAGEA11; ENSG00000185247; TAA
QDLPRVQVF

SEQ ID NO: 38296 - protein, 9 aa, Homo sapiens
  Table A; Target 38296; HLA-C*07:01; MAGEA11; ENSG00000185247; TAA
QDLPRVQVF

SEQ ID NO: 38297 - protein, 9 aa, Homo sapiens
  Table A; Target 38297; HLA-C*07:04; MAGEA11; ENSG00000185247; TAA
QDLPRVQVF

SEQ ID NO: 38298 - protein, 9 aa, Homo sapiens
  Table A; Target 38298; HLA-C*12:03; MAGEA11; ENSG00000185247; TAA
QDLPRVQVF

SEQ ID NO: 38299 - protein, 9 aa, Homo sapiens
  Table A; Target 38299; HLA-C*16:01; MAGEA11; ENSG00000185247; TAA
QDLPRVQVF

SEQ ID NO: 38300 - protein, 9 aa, Homo sapiens
  Table A; Target 38300; HLA-C*16:04; MAGEA11; ENSG00000185247; TAA
QDLPRVQVF

SEQ ID NO: 38301 - protein, 10 aa, Homo sapiens
  Table A; Target 38301; HLA-A*31:01; MAGEA11; ENSG00000185247; TAA
QDLPRVQVFR

SEQ ID NO: 38302 - protein, 9 aa, Homo sapiens
  Table A; Target 38302; HLA-A*30:01; MAGEA11; ENSG00000185247; TAA
QEAAFFSST

SEQ ID NO: 38303 - protein, 9 aa, Homo sapiens
  Table A; Target 38303; HLA-B*18:01; MAGEA11; ENSG00000185247; TAA
QEAAFFSST

SEQ ID NO: 38304 - protein, 9 aa, Homo sapiens
  Table A; Target 38304; HLA-B*40:02; MAGEA11; ENSG00000185247; TAA
QEAAFFSST

SEQ ID NO: 38305 - protein, 9 aa, Homo sapiens
  Table A; Target 38305; HLA-B*49:01; MAGEA11; ENSG00000185247; TAA
QEAAFFSST

SEQ ID NO: 38306 - protein, 10 aa, Homo sapiens
  Table A; Target 38306; HLA-A*30:01; MAGEA11; ENSG00000185247; TAA
QEAAFFSSTL

SEQ ID NO: 38307 - protein, 10 aa, Homo sapiens
  Table A; Target 38307; HLA-B*18:01; MAGEA11; ENSG00000185247; TAA
QEAAFFSSTL

SEQ ID NO: 38308 - protein, 10 aa, Homo sapiens
  Table A; Target 38308; HLA-B*40:01; MAGEA11; ENSG00000185247; TAA
QEAAFFSSTL

SEQ ID NO: 38309 - protein, 10 aa, Homo sapiens
  Table A; Target 38309; HLA-B*40:02; MAGEA11; ENSG00000185247; TAA
QEAAFFSSTL

SEQ ID NO: 38310 - protein, 10 aa, Homo sapiens
  Table A; Target 38310; HLA-B*44:02; MAGEA11; ENSG00000185247; TAA
QEAAFFSSTL

SEQ ID NO: 38311 - protein, 10 aa, Homo sapiens
  Table A; Target 38311; HLA-B*44:03; MAGEA11; ENSG00000185247; TAA
QEAAFFSSTL

SEQ ID NO: 38312 - protein, 10 aa, Homo sapiens
  Table A; Target 38312; HLA-B*49:01; MAGEA11; ENSG00000185247; TAA
QEAAFFSSTL

SEQ ID NO: 38313 - protein, 10 aa, Homo sapiens
  Table A; Target 38313; HLA-A*30:01; MAGEA11; ENSG00000185247; TAA
QEEDLGLVGA

SEQ ID NO: 38314 - protein, 10 aa, Homo sapiens
  Table A; Target 38314; HLA-B*49:01; MAGEA11; ENSG00000185247; TAA
QEEDLGLVGA

SEQ ID NO: 38315 - protein, 9 aa, Homo sapiens
  Table A; Target 38315; HLA-B*49:01; MAGEA11; ENSG00000185247; TAA
QEESFSPTA

SEQ ID NO: 38316 - protein, 10 aa, Homo sapiens
  Table A; Target 38316; HLA-A*30:01; MAGEA11; ENSG00000185247; TAA
QEESFSPTAM

SEQ ID NO: 38317 - protein, 10 aa, Homo sapiens
  Table A; Target 38317; HLA-B*18:01; MAGEA11; ENSG00000185247; TAA
QEESFSPTAM

SEQ ID NO: 38318 - protein, 10 aa, Homo sapiens
  Table A; Target 38318; HLA-B*40:01; MAGEA11; ENSG00000185247; TAA
QEESFSPTAM

SEQ ID NO: 38319 - protein, 9 aa, Homo sapiens
  Table A; Target 38319; HLA-A*02:03; MAGEA11; ENSG00000185247; TAA
QIFPTVRPA

SEQ ID NO: 38320 - protein, 9 aa, Homo sapiens
  Table A; Target 38320; HLA-B*38:01; MAGEA11; ENSG00000185247; TAA
QRITGGEQV

SEQ ID NO: 38321 - protein, 9 aa, Homo sapiens
  Table A; Target 38321; HLA-B*39:01; MAGEA11; ENSG00000185247; TAA
QRITGGEQV

SEQ ID NO: 38322 - protein, 9 aa, Homo sapiens
  Table A; Target 38322; HLA-C*16:04; MAGEA11; ENSG00000185247; TAA
QRITGGEQV

SEQ ID NO: 38323 - protein, 10 aa, Homo sapiens
  Table A; Target 38323; HLA-B*38:01; MAGEA11; ENSG00000185247; TAA
QRITGGEQVL

SEQ ID NO: 38324 - protein, 10 aa, Homo sapiens
  Table A; Target 38324; HLA-B*39:01; MAGEA11; ENSG00000185247; TAA
QRITGGEQVL

SEQ ID NO: 38325 - protein, 8 aa, Homo sapiens
  Table A; Target 38325; HLA-B*08:01; MAGEA11; ENSG00000185247; TAA
QSMPKSGL

SEQ ID NO: 38326 - protein, 8 aa, Homo sapiens
  Table A; Target 38326; HLA-C*16:01; MAGEA11; ENSG00000185247; TAA
QSTERAPY

SEQ ID NO: 38327 - protein, 10 aa, Homo sapiens
  Table A; Target 38327; HLA-A*25:01; MAGEA11; ENSG00000185247; TAA
QVPGTDPACY

SEQ ID NO: 38328 - protein, 10 aa, Homo sapiens
  Table A; Target 38328; HLA-A*26:01; MAGEA11; ENSG00000185247; TAA
QVPGTDPACY

SEQ ID NO: 38329 - protein, 10 aa, Homo sapiens
  Table A; Target 38329; HLA-A*29:02; MAGEA11; ENSG00000185247; TAA
QVPGTDPACY

SEQ ID NO: 38330 - protein, 10 aa, Homo sapiens
  Table A; Target 38330; HLA-A*30:02; MAGEA11; ENSG00000185247; TAA
QVPGTDPACY

SEQ ID NO: 38331 - protein, 10 aa, Homo sapiens
  Table A; Target 38331; HLA-C*07:04; MAGEA11; ENSG00000185247; TAA
QVPGTDPACY

SEQ ID NO: 38332 - protein, 9 aa, Homo sapiens
  Table A; Target 38332; HLA-B*58:01; MAGEA11; ENSG00000185247; TAA
RAHAETSKM

SEQ ID NO: 38333 - protein, 8 aa, Homo sapiens
  Table A; Target 38333; HLA-C*01:02; MAGEA11; ENSG00000185247; TAA
RAPYGPQL

SEQ ID NO: 38334 - protein, 8 aa, Homo sapiens
  Table A; Target 38334; HLA-C*03:04; MAGEA11; ENSG00000185247; TAA
RAPYGPQL

SEQ ID NO: 38335 - protein, 8 aa, Homo sapiens
  Table A; Target 38335; HLA-C*16:01; MAGEA11; ENSG00000185247; TAA
RAPYGPQL

SEQ ID NO: 38336 - protein, 10 aa, Homo sapiens
  Table A; Target 38336; HLA-A*24:02; MAGEA11; ENSG00000185247; TAA
RAPYGPQLQW

SEQ ID NO: 38337 - protein, 10 aa, Homo sapiens
  Table A; Target 38337; HLA-B*57:01; MAGEA11; ENSG00000185247; TAA
RAPYGPQLQW

SEQ ID NO: 38338 - protein, 10 aa, Homo sapiens
  Table A; Target 38338; HLA-B*58:01; MAGEA11; ENSG00000185247; TAA
RAPYGPQLQW

SEQ ID NO: 38339 - protein, 9 aa, Homo sapiens
  Table A; Target 38339; HLA-B*37:01; MAGEA11; ENSG00000185247; TAA
RDPTSYPSL

SEQ ID NO: 38340 - protein, 9 aa, Homo sapiens
  Table A; Target 38340; HLA-C*01:02; MAGEA11; ENSG00000185247; TAA
RDPTSYPSL

SEQ ID NO: 38341 - protein, 9 aa, Homo sapiens
  Table A; Target 38341; HLA-A*30:01; MAGEA11; ENSG00000185247; TAA
REASVCMQL

SEQ ID NO: 38342 - protein, 9 aa, Homo sapiens
  Table A; Target 38342; HLA-B*40:01; MAGEA11; ENSG00000185247; TAA
REASVCMQL

SEQ ID NO: 38343 - protein, 9 aa, Homo sapiens
  Table A; Target 38343; HLA-B*44:03; MAGEA11; ENSG00000185247; TAA
REASVCMQL

SEQ ID NO: 38344 - protein, 10 aa, Homo sapiens
  Table A; Target 38344; HLA-B*40:01; MAGEA11; ENSG00000185247; TAA
REASVCMQLL

SEQ ID NO: 38345 - protein, 9 aa, Homo sapiens
  Table A; Target 38345; HLA-A*30:01; MAGEA11; ENSG00000185247; TAA
REDSGDFGL

SEQ ID NO: 38346 - protein, 9 aa, Homo sapiens
  Table A; Target 38346; HLA-B*37:01; MAGEA11; ENSG00000185247; TAA
REDSGDFGL

SEQ ID NO: 38347 - protein, 9 aa, Homo sapiens
  Table A; Target 38347; HLA-B*38:01; MAGEA11; ENSG00000185247; TAA
REDSGDFGL

SEQ ID NO: 38348 - protein, 9 aa, Homo sapiens
  Table A; Target 38348; HLA-B*40:01; MAGEA11; ENSG00000185247; TAA
REDSGDFGL

SEQ ID NO: 38349 - protein, 9 aa, Homo sapiens
  Table A; Target 38349; HLA-B*44:03; MAGEA11; ENSG00000185247; TAA
REDSGDFGL

SEQ ID NO: 38350 - protein, 11 aa, Homo sapiens
  Table A; Target 38350; HLA-B*49:01; MAGEA11; ENSG00000185247; TAA
REDSGDFGLQV

SEQ ID NO: 38351 - protein, 10 aa, Homo sapiens
  Table A; Target 38351; HLA-B*57:01; MAGEA11; ENSG00000185247; TAA
RITGGEQVLW

SEQ ID NO: 38352 - protein, 10 aa, Homo sapiens
  Table A; Target 38352; HLA-B*58:01; MAGEA11; ENSG00000185247; TAA
RITGGEQVLW

SEQ ID NO: 38353 - protein, 8 aa, Homo sapiens
  Table A; Target 38353; HLA-B*56:01; MAGEA11; ENSG00000185247; TAA
RPADLTRV

SEQ ID NO: 38354 - protein, 9 aa, Homo sapiens
  Table A; Target 38354; HLA-B*07:02; MAGEA11; ENSG00000185247; TAA
RPADLTRVI

SEQ ID NO: 38355 - protein, 9 aa, Homo sapiens
  Table A; Target 38355; HLA-B*51:01; MAGEA11; ENSG00000185247; TAA
RPADLTRVI

SEQ ID NO: 38356 - protein, 9 aa, Homo sapiens
  Table A; Target 38356; HLA-B*56:01; MAGEA11; ENSG00000185247; TAA
RPADLTRVI

SEQ ID NO: 38357 - protein, 9 aa, Homo sapiens
  Table A; Target 38357; HLA-C*07:02; MAGEA11; ENSG00000185247; TAA
RPADLTRVI

SEQ ID NO: 38358 - protein, 10 aa, Homo sapiens
  Table A; Target 38358; HLA-B*07:02; MAGEA11; ENSG00000185247; TAA
RPADLTRVIM

SEQ ID NO: 38359 - protein, 10 aa, Homo sapiens
  Table A; Target 38359; HLA-B*55:01; MAGEA11; ENSG00000185247; TAA
RPADLTRVIM

SEQ ID NO: 38360 - protein, 10 aa, Homo sapiens
  Table A; Target 38360; HLA-C*07:02; MAGEA11; ENSG00000185247; TAA
RPADLTRVIM

SEQ ID NO: 38361 - protein, 11 aa, Homo sapiens
  Table A; Target 38361; HLA-A*30:02; MAGEA11; ENSG00000185247; TAA
RQVPGTDPACY

SEQ ID NO: 38362 - protein, 11 aa, Homo sapiens
  Table A; Target 38362; HLA-A*32:01; MAGEA11; ENSG00000185247; TAA
RQVPGTDPACY

SEQ ID NO: 38363 - protein, 11 aa, Homo sapiens
  Table A; Target 38363; HLA-B*15:01; MAGEA11; ENSG00000185247; TAA
RQVPGTDPACY

SEQ ID NO: 38364 - protein, 11 aa, Homo sapiens
  Table A; Target 38364; HLA-B*15:03; MAGEA11; ENSG00000185247; TAA
RQVPGTDPACY

SEQ ID NO: 38365 - protein, 11 aa, Homo sapiens
  Table A; Target 38365; HLA-B*58:01; MAGEA11; ENSG00000185247; TAA
RQVPGTDPACY

SEQ ID NO: 38366 - protein, 11 aa, Homo sapiens
  Table A; Target 38366; HLA-C*07:04; MAGEA11; ENSG00000185247; TAA
RQVPGTDPACY

SEQ ID NO: 38367 - protein, 9 aa, Homo sapiens
  Table A; Target 38367; HLA-A*03:01; MAGEA11; ENSG00000185247; TAA
RVIMPLEQR

SEQ ID NO: 38368 - protein, 9 aa, Homo sapiens
  Table A; Target 38368; HLA-A*03:02; MAGEA11; ENSG00000185247; TAA
RVIMPLEQR

SEQ ID NO: 38369 - protein, 9 aa, Homo sapiens
  Table A; Target 38369; HLA-A*11:01; MAGEA11; ENSG00000185247; TAA
RVIMPLEQR

SEQ ID NO: 38370 - protein, 9 aa, Homo sapiens
  Table A; Target 38370; HLA-A*31:01; MAGEA11; ENSG00000185247; TAA
RVIMPLEQR

SEQ ID NO: 38371 - protein, 9 aa, Homo sapiens
  Table A; Target 38371; HLA-A*33:01; MAGEA11; ENSG00000185247; TAA
RVIMPLEQR

SEQ ID NO: 38372 - protein, 9 aa, Homo sapiens
  Table A; Target 38372; HLA-A*33:03; MAGEA11; ENSG00000185247; TAA
RVIMPLEQR

SEQ ID NO: 38373 - protein, 9 aa, Homo sapiens
  Table A; Target 38373; HLA-A*68:01; MAGEA11; ENSG00000185247; TAA
RVIMPLEQR

SEQ ID NO: 38374 - protein, 9 aa, Homo sapiens
  Table A; Target 38374; HLA-B*57:01; MAGEA11; ENSG00000185247; TAA
RVIMPLEQR

SEQ ID NO: 38375 - protein, 9 aa, Homo sapiens
  Table A; Target 38375; HLA-C*07:06; MAGEA11; ENSG00000185247; TAA
RVIMPLEQR

SEQ ID NO: 38376 - protein, 8 aa, Homo sapiens
  Table A; Target 38376; HLA-A*03:01; MAGEA11; ENSG00000185247; TAA
RVKGLITK

SEQ ID NO: 38377 - protein, 9 aa, Homo sapiens
  Table A; Target 38377; HLA-A*02:03; MAGEA11; ENSG00000185247; TAA
RVKGLITKA

SEQ ID NO: 38378 - protein, 10 aa, Homo sapiens
  Table A; Target 38378; HLA-C*07:06; MAGEA11; ENSG00000185247; TAA
SEDDFQSTER

SEQ ID NO: 38379 - protein, 8 aa, Homo sapiens
  Table A; Target 38379; HLA-C*05:01; MAGEA11; ENSG00000185247; TAA
SGDFGLQV

SEQ ID NO: 38380 - protein, 10 aa, Homo sapiens
  Table A; Target 38380; HLA-B*38:01; MAGEA11; ENSG00000185247; TAA
SHSYVLVTSL

SEQ ID NO: 38381 - protein, 9 aa, Homo sapiens
  Table A; Target 38381; HLA-A*03:02; MAGEA11; ENSG00000185247; TAA
SIMGVYAGR

SEQ ID NO: 38382 - protein, 9 aa, Homo sapiens
  Table A; Target 38382; HLA-A*11:01; MAGEA11; ENSG00000185247; TAA
SIMGVYAGR

SEQ ID NO: 38383 - protein, 9 aa, Homo sapiens
  Table A; Target 38383; HLA-A*31:01; MAGEA11; ENSG00000185247; TAA
SIMGVYAGR

SEQ ID NO: 38384 - protein, 9 aa, Homo sapiens
  Table A; Target 38384; HLA-A*33:01; MAGEA11; ENSG00000185247; TAA
SIMGVYAGR

SEQ ID NO: 38385 - protein, 9 aa, Homo sapiens
  Table A; Target 38385; HLA-A*33:03; MAGEA11; ENSG00000185247; TAA
SIMGVYAGR

SEQ ID NO: 38386 - protein, 9 aa, Homo sapiens
  Table A; Target 38386; HLA-A*68:01; MAGEA11; ENSG00000185247; TAA
SIMGVYAGR

SEQ ID NO: 38387 - protein, 9 aa, Homo sapiens
  Table A; Target 38387; HLA-C*07:06; MAGEA11; ENSG00000185247; TAA
SIMGVYAGR

SEQ ID NO: 38388 - protein, 8 aa, Homo sapiens
  Table A; Target 38388; HLA-B*15:03; MAGEA11; ENSG00000185247; TAA
SKMKVLEY

SEQ ID NO: 38389 - protein, 11 aa, Homo sapiens
  Table A; Target 38389; HLA-A*02:07; MAGEA11; ENSG00000185247; TAA
SMPKSGLLIIV

SEQ ID NO: 38390 - protein, 10 aa, Homo sapiens
  Table A; Target 38390; HLA-B*35:01; MAGEA11; ENSG00000185247; TAA
SPDLIDPESF

SEQ ID NO: 38391 - protein, 10 aa, Homo sapiens
  Table A; Target 38391; HLA-B*35:03; MAGEA11; ENSG00000185247; TAA
SPDLIDPESF

SEQ ID NO: 38392 - protein, 10 aa, Homo sapiens
  Table A; Target 38392; HLA-B*38:01; MAGEA11; ENSG00000185247; TAA
SPDLIDPESF

SEQ ID NO: 38393 - protein, 10 aa, Homo sapiens
  Table A; Target 38393; HLA-B*55:01; MAGEA11; ENSG00000185247; TAA
SPDLIDPESF

SEQ ID NO: 38394 - protein, 10 aa, Homo sapiens
  Table A; Target 38394; HLA-C*05:01; MAGEA11; ENSG00000185247; TAA
SPDLIDPESF

SEQ ID NO: 38395 - protein, 11 aa, Homo sapiens
  Table A; Target 38395; HLA-B*56:01; MAGEA11; ENSG00000185247; TAA
SPQEESFSPTA

SEQ ID NO: 38396 - protein, 8 aa, Homo sapiens
  Table A; Target 38396; HLA-B*56:01; MAGEA11; ENSG00000185247; TAA
SPTAMDAI

SEQ ID NO: 38397 - protein, 9 aa, Homo sapiens
  Table A; Target 38397; HLA-B*07:02; MAGEA11; ENSG00000185247; TAA
SPTAMDAIF

SEQ ID NO: 38398 - protein, 9 aa, Homo sapiens
  Table A; Target 38398; HLA-B*35:01; MAGEA11; ENSG00000185247; TAA
SPTAMDAIF

SEQ ID NO: 38399 - protein, 9 aa, Homo sapiens
  Table A; Target 38399; HLA-B*35:03; MAGEA11; ENSG00000185247; TAA
SPTAMDAIF

SEQ ID NO: 38400 - protein, 9 aa, Homo sapiens
  Table A; Target 38400; HLA-B*55:01; MAGEA11; ENSG00000185247; TAA
SPTAMDAIF

SEQ ID NO: 38401 - protein, 9 aa, Homo sapiens
  Table A; Target 38401; HLA-C*03:03; MAGEA11; ENSG00000185247; TAA
SPTAMDAIF

SEQ ID NO: 38402 - protein, 9 aa, Homo sapiens
  Table A; Target 38402; HLA-B*13:02; MAGEA11; ENSG00000185247; TAA
SQDILHDKI

SEQ ID NO: 38403 - protein, 9 aa, Homo sapiens
  Table A; Target 38403; HLA-B*38:01; MAGEA11; ENSG00000185247; TAA
SQDILHDKI

SEQ ID NO: 38404 - protein, 9 aa, Homo sapiens
  Table A; Target 38404; HLA-A*02:01; MAGEA11; ENSG00000185247; TAA
SQDLPRVQV

SEQ ID NO: 38405 - protein, 9 aa, Homo sapiens
  Table A; Target 38405; HLA-A*02:07; MAGEA11; ENSG00000185247; TAA
SQDLPRVQV

SEQ ID NO: 38406 - protein, 9 aa, Homo sapiens
  Table A; Target 38406; HLA-B*13:02; MAGEA11; ENSG00000185247; TAA
SQDLPRVQV

SEQ ID NO: 38407 - protein, 9 aa, Homo sapiens
  Table A; Target 38407; HLA-B*38:01; MAGEA11; ENSG00000185247; TAA
SQDLPRVQV

SEQ ID NO: 38408 - protein, 9 aa, Homo sapiens
  Table A; Target 38408; HLA-B*39:01; MAGEA11; ENSG00000185247; TAA
SQDLPRVQV

SEQ ID NO: 38409 - protein, 9 aa, Homo sapiens
  Table A; Target 38409; HLA-C*04:01; MAGEA11; ENSG00000185247; TAA
SQDLPRVQV

SEQ ID NO: 38410 - protein, 9 aa, Homo sapiens
  Table A; Target 38410; HLA-C*05:01; MAGEA11; ENSG00000185247; TAA
SQDLPRVQV

SEQ ID NO: 38411 - protein, 9 aa, Homo sapiens
  Table A; Target 38411; HLA-C*07:02; MAGEA11; ENSG00000185247; TAA
SQDLPRVQV

SEQ ID NO: 38412 - protein, 10 aa, Homo sapiens
  Table A; Target 38412; HLA-B*15:01; MAGEA11; ENSG00000185247; TAA
SQDLPRVQVF

SEQ ID NO: 38413 - protein, 10 aa, Homo sapiens
  Table A; Target 38413; HLA-B*15:03; MAGEA11; ENSG00000185247; TAA
SQDLPRVQVF

SEQ ID NO: 38414 - protein, 10 aa, Homo sapiens
  Table A; Target 38414; HLA-B*37:01; MAGEA11; ENSG00000185247; TAA
SQDLPRVQVF

SEQ ID NO: 38415 - protein, 10 aa, Homo sapiens
  Table A; Target 38415; HLA-B*38:01; MAGEA11; ENSG00000185247; TAA
SQDLPRVQVF

SEQ ID NO: 38416 - protein, 10 aa, Homo sapiens
  Table A; Target 38416; HLA-B*44:02; MAGEA11; ENSG00000185247; TAA
SQDLPRVQVF

SEQ ID NO: 38417 - protein, 10 aa, Homo sapiens
  Table A; Target 38417; HLA-B*44:03; MAGEA11; ENSG00000185247; TAA
SQDLPRVQVF

SEQ ID NO: 38418 - protein, 10 aa, Homo sapiens
  Table A; Target 38418; HLA-C*05:01; MAGEA11; ENSG00000185247; TAA
SQDLPRVQVF

SEQ ID NO: 38419 - protein, 10 aa, Homo sapiens
  Table A; Target 38419; HLA-C*16:04; MAGEA11; ENSG00000185247; TAA
SQDLPRVQVF

SEQ ID NO: 38420 - protein, 11 aa, Homo sapiens
  Table A; Target 38420; HLA-A*68:02; MAGEA11; ENSG00000185247; TAA
STLNVGTLEEL

SEQ ID NO: 38421 - protein, 9 aa, Homo sapiens
  Table A; Target 38421; HLA-A*25:01; MAGEA11; ENSG00000185247; TAA
SVIKNYEDY

SEQ ID NO: 38422 - protein, 9 aa, Homo sapiens
  Table A; Target 38422; HLA-A*26:01; MAGEA11; ENSG00000185247; TAA
SVIKNYEDY

SEQ ID NO: 38423 - protein, 9 aa, Homo sapiens
  Table A; Target 38423; HLA-A*29:02; MAGEA11; ENSG00000185247; TAA
SVIKNYEDY

SEQ ID NO: 38424 - protein, 9 aa, Homo sapiens
  Table A; Target 38424; HLA-A*30:02; MAGEA11; ENSG00000185247; TAA
SVIKNYEDY

SEQ ID NO: 38425 - protein, 9 aa, Homo sapiens
  Table A; Target 38425; HLA-A*32:01; MAGEA11; ENSG00000185247; TAA
SVIKNYEDY

SEQ ID NO: 38426 - protein, 9 aa, Homo sapiens
  Table A; Target 38426; HLA-B*15:01; MAGEA11; ENSG00000185247; TAA
SVIKNYEDY

SEQ ID NO: 38427 - protein, 9 aa, Homo sapiens
  Table A; Target 38427; HLA-B*35:01; MAGEA11; ENSG00000185247; TAA
SVIKNYEDY

SEQ ID NO: 38428 - protein, 9 aa, Homo sapiens
  Table A; Target 38428; HLA-B*46:01; MAGEA11; ENSG00000185247; TAA
SVIKNYEDY

SEQ ID NO: 38429 - protein, 9 aa, Homo sapiens
  Table A; Target 38429; HLA-B*58:01; MAGEA11; ENSG00000185247; TAA
SVIKNYEDY

SEQ ID NO: 38430 - protein, 9 aa, Homo sapiens
  Table A; Target 38430; HLA-C*07:04; MAGEA11; ENSG00000185247; TAA
SVIKNYEDY

SEQ ID NO: 38431 - protein, 10 aa, Homo sapiens
  Table A; Target 38431; HLA-B*57:01; MAGEA11; ENSG00000185247; TAA
SVIKNYEDYF

SEQ ID NO: 38432 - protein, 8 aa, Homo sapiens
  Table A; Target 38432; HLA-A*23:01; MAGEA11; ENSG00000185247; TAA
SYVLVTSL

SEQ ID NO: 38433 - protein, 8 aa, Homo sapiens
  Table A; Target 38433; HLA-A*24:02; MAGEA11; ENSG00000185247; TAA
SYVLVTSL

SEQ ID NO: 38434 - protein, 8 aa, Homo sapiens
  Table A; Target 38434; HLA-B*15:03; MAGEA11; ENSG00000185247; TAA
SYVLVTSL

SEQ ID NO: 38435 - protein, 8 aa, Homo sapiens
  Table A; Target 38435; HLA-B*37:01; MAGEA11; ENSG00000185247; TAA
SYVLVTSL

SEQ ID NO: 38436 - protein, 8 aa, Homo sapiens
  Table A; Target 38436; HLA-B*40:02; MAGEA11; ENSG00000185247; TAA
SYVLVTSL

SEQ ID NO: 38437 - protein, 8 aa, Homo sapiens
  Table A; Target 38437; HLA-C*01:02; MAGEA11; ENSG00000185247; TAA
SYVLVTSL

SEQ ID NO: 38438 - protein, 8 aa, Homo sapiens
  Table A; Target 38438; HLA-C*14:02; MAGEA11; ENSG00000185247; TAA
SYVLVTSL

SEQ ID NO: 38439 - protein, 10 aa, Homo sapiens
  Table A; Target 38439; HLA-A*23:01; MAGEA11; ENSG00000185247; TAA
SYVLVTSLNL

SEQ ID NO: 38440 - protein, 10 aa, Homo sapiens
  Table A; Target 38440; HLA-A*24:02; MAGEA11; ENSG00000185247; TAA
SYVLVTSLNL

SEQ ID NO: 38441 - protein, 10 aa, Homo sapiens
  Table A; Target 38441; HLA-A*23:01; MAGEA11; ENSG00000185247; TAA
TAMDAIFGSL

SEQ ID NO: 38442 - protein, 10 aa, Homo sapiens
  Table A; Target 38442; HLA-A*25:01; MAGEA11; ENSG00000185247; TAA
TAMDAIFGSL

SEQ ID NO: 38443 - protein, 10 aa, Homo sapiens
  Table A; Target 38443; HLA-A*26:01; MAGEA11; ENSG00000185247; TAA
TAMDAIFGSL

SEQ ID NO: 38444 - protein, 10 aa, Homo sapiens
  Table A; Target 38444; HLA-A*30:01; MAGEA11; ENSG00000185247; TAA
TAMDAIFGSL

SEQ ID NO: 38445 - protein, 10 aa, Homo sapiens
  Table A; Target 38445; HLA-A*30:02; MAGEA11; ENSG00000185247; TAA
TAMDAIFGSL

SEQ ID NO: 38446 - protein, 10 aa, Homo sapiens
  Table A; Target 38446; HLA-A*68:01; MAGEA11; ENSG00000185247; TAA
TAMDAIFGSL

SEQ ID NO: 38447 - protein, 10 aa, Homo sapiens
  Table A; Target 38447; HLA-A*68:02; MAGEA11; ENSG00000185247; TAA
TAMDAIFGSL

SEQ ID NO: 38448 - protein, 10 aa, Homo sapiens
  Table A; Target 38448; HLA-B*27:02; MAGEA11; ENSG00000185247; TAA
TAMDAIFGSL

SEQ ID NO: 38449 - protein, 10 aa, Homo sapiens
  Table A; Target 38449; HLA-B*35:01; MAGEA11; ENSG00000185247; TAA
TAMDAIFGSL

SEQ ID NO: 38450 - protein, 10 aa, Homo sapiens
  Table A; Target 38450; HLA-B*35:03; MAGEA11; ENSG00000185247; TAA
TAMDAIFGSL

SEQ ID NO: 38451 - protein, 10 aa, Homo sapiens
  Table A; Target 38451; HLA-B*38:01; MAGEA11; ENSG00000185247; TAA
TAMDAIFGSL

SEQ ID NO: 38452 - protein, 10 aa, Homo sapiens
  Table A; Target 38452; HLA-B*39:01; MAGEA11; ENSG00000185247; TAA
TAMDAIFGSL

SEQ ID NO: 38453 - protein, 10 aa, Homo sapiens
  Table A; Target 38453; HLA-B*40:01; MAGEA11; ENSG00000185247; TAA
TAMDAIFGSL

SEQ ID NO: 38454 - protein, 10 aa, Homo sapiens
  Table A; Target 38454; HLA-B*46:01; MAGEA11; ENSG00000185247; TAA
TAMDAIFGSL

SEQ ID NO: 38455 - protein, 10 aa, Homo sapiens
  Table A; Target 38455; HLA-B*58:01; MAGEA11; ENSG00000185247; TAA
TAMDAIFGSL

SEQ ID NO: 38456 - protein, 10 aa, Homo sapiens
  Table A; Target 38456; HLA-C*01:02; MAGEA11; ENSG00000185247; TAA
TAMDAIFGSL

SEQ ID NO: 38457 - protein, 10 aa, Homo sapiens
  Table A; Target 38457; HLA-C*02:02; MAGEA11; ENSG00000185247; TAA
TAMDAIFGSL

SEQ ID NO: 38458 - protein, 10 aa, Homo sapiens
  Table A; Target 38458; HLA-C*03:03; MAGEA11; ENSG00000185247; TAA
TAMDAIFGSL

SEQ ID NO: 38459 - protein, 10 aa, Homo sapiens
  Table A; Target 38459; HLA-C*03:04; MAGEA11; ENSG00000185247; TAA
TAMDAIFGSL

SEQ ID NO: 38460 - protein, 10 aa, Homo sapiens
  Table A; Target 38460; HLA-C*05:01; MAGEA11; ENSG00000185247; TAA
TAMDAIFGSL

SEQ ID NO: 38461 - protein, 10 aa, Homo sapiens
  Table A; Target 38461; HLA-C*07:02; MAGEA11; ENSG00000185247; TAA
TAMDAIFGSL

SEQ ID NO: 38462 - protein, 10 aa, Homo sapiens
  Table A; Target 38462; HLA-C*07:06; MAGEA11; ENSG00000185247; TAA
TAMDAIFGSL

SEQ ID NO: 38463 - protein, 10 aa, Homo sapiens
  Table A; Target 38463; HLA-C*12:03; MAGEA11; ENSG00000185247; TAA
TAMDAIFGSL

SEQ ID NO: 38464 - protein, 10 aa, Homo sapiens
  Table A; Target 38464; HLA-C*16:04; MAGEA11; ENSG00000185247; TAA
TAMDAIFGSL

SEQ ID NO: 38465 - protein, 8 aa, Homo sapiens
  Table A; Target 38465; HLA-B*37:01; MAGEA11; ENSG00000185247; TAA
TDPACYEF

SEQ ID NO: 38466 - protein, 10 aa, Homo sapiens
  Table A; Target 38466; HLA-A*30:01; MAGEA11; ENSG00000185247; TAA
TERAPYGPQL

SEQ ID NO: 38467 - protein, 10 aa, Homo sapiens
  Table A; Target 38467; HLA-B*40:01; MAGEA11; ENSG00000185247; TAA
TERAPYGPQL

SEQ ID NO: 38468 - protein, 10 aa, Homo sapiens
  Table A; Target 38468; HLA-B*40:02; MAGEA11; ENSG00000185247; TAA
TERAPYGPQL

SEQ ID NO: 38469 - protein, 9 aa, Homo sapiens
  Table A; Target 38469; HLA-A*29:02; MAGEA11; ENSG00000185247; TAA
TQNWVQEKY

SEQ ID NO: 38470 - protein, 9 aa, Homo sapiens
  Table A; Target 38470; HLA-A*30:02; MAGEA11; ENSG00000185247; TAA
TQNWVQEKY

SEQ ID NO: 38471 - protein, 9 aa, Homo sapiens
  Table A; Target 38471; HLA-A*32:01; MAGEA11; ENSG00000185247; TAA
TQNWVQEKY

SEQ ID NO: 38472 - protein, 9 aa, Homo sapiens
  Table A; Target 38472; HLA-B*15:01; MAGEA11; ENSG00000185247; TAA
TQNWVQEKY

SEQ ID NO: 38473 - protein, 9 aa, Homo sapiens
  Table A; Target 38473; HLA-B*15:03; MAGEA11; ENSG00000185247; TAA
TQNWVQEKY

SEQ ID NO: 38474 - protein, 9 aa, Homo sapiens
  Table A; Target 38474; HLA-C*02:02; MAGEA11; ENSG00000185247; TAA
TQNWVQEKY

SEQ ID NO: 38475 - protein, 9 aa, Homo sapiens
  Table A; Target 38475; HLA-C*07:04; MAGEA11; ENSG00000185247; TAA
TQNWVQEKY

SEQ ID NO: 38476 - protein, 9 aa, Homo sapiens
  Table A; Target 38476; HLA-C*16:04; MAGEA11; ENSG00000185247; TAA
TQNWVQEKY

SEQ ID NO: 38477 - protein, 9 aa, Homo sapiens
  Table A; Target 38477; HLA-C*06:02; MAGEA11; ENSG00000185247; TAA
TRVIMPLEQ

SEQ ID NO: 38478 - protein, 9 aa, Homo sapiens
  Table A; Target 38478; HLA-A*32:01; MAGEA11; ENSG00000185247; TAA
TSKMKVLEY

SEQ ID NO: 38479 - protein, 9 aa, Homo sapiens
  Table A; Target 38479; HLA-B*08:01; MAGEA11; ENSG00000185247; TAA
TSKMKVLEY

SEQ ID NO: 38480 - protein, 9 aa, Homo sapiens
  Table A; Target 38480; HLA-B*46:01; MAGEA11; ENSG00000185247; TAA
TSKMKVLEY

SEQ ID NO: 38481 - protein, 9 aa, Homo sapiens
  Table A; Target 38481; HLA-B*57:01; MAGEA11; ENSG00000185247; TAA
TSKMKVLEY

SEQ ID NO: 38482 - protein, 9 aa, Homo sapiens
  Table A; Target 38482; HLA-C*02:02; MAGEA11; ENSG00000185247; TAA
TSKMKVLEY

SEQ ID NO: 38483 - protein, 9 aa, Homo sapiens
  Table A; Target 38483; HLA-C*07:01; MAGEA11; ENSG00000185247; TAA
TSKMKVLEY

SEQ ID NO: 38484 - protein, 9 aa, Homo sapiens
  Table A; Target 38484; HLA-C*12:03; MAGEA11; ENSG00000185247; TAA
TSKMKVLEY

SEQ ID NO: 38485 - protein, 9 aa, Homo sapiens
  Table A; Target 38485; HLA-C*16:01; MAGEA11; ENSG00000185247; TAA
TSKMKVLEY

SEQ ID NO: 38486 - protein, 9 aa, Homo sapiens
  Table A; Target 38486; HLA-C*16:02; MAGEA11; ENSG00000185247; TAA
TSKMKVLEY

SEQ ID NO: 38487 - protein, 9 aa, Homo sapiens
  Table A; Target 38487; HLA-A*31:01; MAGEA11; ENSG00000185247; TAA
TVRPADLTR

SEQ ID NO: 38488 - protein, 9 aa, Homo sapiens
  Table A; Target 38488; HLA-A*33:03; MAGEA11; ENSG00000185247; TAA
TVRPADLTR

SEQ ID NO: 38489 - protein, 9 aa, Homo sapiens
  Table A; Target 38489; HLA-A*68:01; MAGEA11; ENSG00000185247; TAA
TVRPADLTR

SEQ ID NO: 38490 - protein, 8 aa, Homo sapiens
  Table A; Target 38490; HLA-A*30:02; MAGEA11; ENSG00000185247; TAA
VDPTSHSY

SEQ ID NO: 38491 - protein, 8 aa, Homo sapiens
  Table A; Target 38491; HLA-B*15:03; MAGEA11; ENSG00000185247; TAA
VDPTSHSY

SEQ ID NO: 38492 - protein, 8 aa, Homo sapiens
  Table A; Target 38492; HLA-B*37:01; MAGEA11; ENSG00000185247; TAA
VDPTSHSY

SEQ ID NO: 38493 - protein, 8 aa, Homo sapiens
  Table A; Target 38493; HLA-C*01:02; MAGEA11; ENSG00000185247; TAA
VDPTSHSY

SEQ ID NO: 38494 - protein, 8 aa, Homo sapiens
  Table A; Target 38494; HLA-C*04:01; MAGEA11; ENSG00000185247; TAA
VDPTSHSY

SEQ ID NO: 38495 - protein, 8 aa, Homo sapiens
  Table A; Target 38495; HLA-C*07:01; MAGEA11; ENSG00000185247; TAA
VDPTSHSY

SEQ ID NO: 38496 - protein, 8 aa, Homo sapiens
  Table A; Target 38496; HLA-C*14:02; MAGEA11; ENSG00000185247; TAA
VDPTSHSY

SEQ ID NO: 38497 - protein, 8 aa, Homo sapiens
  Table A; Target 38497; HLA-C*16:02; MAGEA11; ENSG00000185247; TAA
VDPTSHSY

SEQ ID NO: 38498 - protein, 9 aa, Homo sapiens
  Table A; Target 38498; HLA-C*02:02; MAGEA11; ENSG00000185247; TAA
VIKNYEDYF

SEQ ID NO: 38499 - protein, 8 aa, Homo sapiens
  Table A; Target 38499; HLA-A*31:01; MAGEA11; ENSG00000185247; TAA
VIMPLEQR

SEQ ID NO: 38500 - protein, 9 aa, Homo sapiens
  Table A; Target 38500; HLA-B*15:03; MAGEA11; ENSG00000185247; TAA
VKEVDPTSH

SEQ ID NO: 38501 - protein, 11 aa, Homo sapiens
  Table A; Target 38501; HLA-B*15:03; MAGEA11; ENSG00000185247; TAA
VKEVDPTSHSY

SEQ ID NO: 38502 - protein, 8 aa, Homo sapiens
  Table A; Target 38502; HLA-A*30:02; MAGEA11; ENSG00000185247; TAA
VLSIMGVY

SEQ ID NO: 38503 - protein, 8 aa, Homo sapiens
  Table A; Target 38503; HLA-B*15:01; MAGEA11; ENSG00000185247; TAA
VLSIMGVY

SEQ ID NO: 38504 - protein, 8 aa, Homo sapiens
  Table A; Target 38504; HLA-B*15:03; MAGEA11; ENSG00000185247; TAA
VLSIMGVY

SEQ ID NO: 38505 - protein, 8 aa, Homo sapiens
  Table A; Target 38505; HLA-B*39:01; MAGEA11; ENSG00000185247; TAA
VLSIMGVY

SEQ ID NO: 38506 - protein, 8 aa, Homo sapiens
  Table A; Target 38506; HLA-B*46:01; MAGEA11; ENSG00000185247; TAA
VLSIMGVY

SEQ ID NO: 38507 - protein, 8 aa, Homo sapiens
  Table A; Target 38507; HLA-C*07:01; MAGEA11; ENSG00000185247; TAA
VLSIMGVY

SEQ ID NO: 38508 - protein, 8 aa, Homo sapiens
  Table A; Target 38508; HLA-A*23:01; MAGEA11; ENSG00000185247; TAA
VLVTSLNL

SEQ ID NO: 38509 - protein, 10 aa, Homo sapiens
  Table A; Target 38509; HLA-A*01:01; MAGEA11; ENSG00000185247; TAA
VLVTSLNLSY

SEQ ID NO: 38510 - protein, 10 aa, Homo sapiens
  Table A; Target 38510; HLA-A*29:02; MAGEA11; ENSG00000185247; TAA
VLVTSLNLSY

SEQ ID NO: 38511 - protein, 10 aa, Homo sapiens
  Table A; Target 38511; HLA-A*30:02; MAGEA11; ENSG00000185247; TAA
VLVTSLNLSY

SEQ ID NO: 38512 - protein, 10 aa, Homo sapiens
  Table A; Target 38512; HLA-B*15:01; MAGEA11; ENSG00000185247; TAA
VLVTSLNLSY

SEQ ID NO: 38513 - protein, 10 aa, Homo sapiens
  Table A; Target 38513; HLA-B*15:03; MAGEA11; ENSG00000185247; TAA
VLVTSLNLSY

SEQ ID NO: 38514 - protein, 10 aa, Homo sapiens
  Table A; Target 38514; HLA-B*46:01; MAGEA11; ENSG00000185247; TAA
VLVTSLNLSY

SEQ ID NO: 38515 - protein, 9 aa, Homo sapiens
  Table A; Target 38515; HLA-A*02:01; MAGEA11; ENSG00000185247; TAA
VLWGPITQI

SEQ ID NO: 38516 - protein, 9 aa, Homo sapiens
  Table A; Target 38516; HLA-A*02:03; MAGEA11; ENSG00000185247; TAA
VLWGPITQI

SEQ ID NO: 38517 - protein, 9 aa, Homo sapiens
  Table A; Target 38517; HLA-A*02:04; MAGEA11; ENSG00000185247; TAA
VLWGPITQI

SEQ ID NO: 38518 - protein, 9 aa, Homo sapiens
  Table A; Target 38518; HLA-A*02:07; MAGEA11; ENSG00000185247; TAA
VLWGPITQI

SEQ ID NO: 38519 - protein, 9 aa, Homo sapiens
  Table A; Target 38519; HLA-A*23:01; MAGEA11; ENSG00000185247; TAA
VLWGPITQI

SEQ ID NO: 38520 - protein, 9 aa, Homo sapiens
  Table A; Target 38520; HLA-B*13:02; MAGEA11; ENSG00000185247; TAA
VLWGPITQI

SEQ ID NO: 38521 - protein, 9 aa, Homo sapiens
  Table A; Target 38521; HLA-B*55:01; MAGEA11; ENSG00000185247; TAA
VLWGPITQI

SEQ ID NO: 38522 - protein, 8 aa, Homo sapiens
  Table A; Target 38522; HLA-B*51:01; MAGEA11; ENSG00000185247; TAA
VMWEVLSI

SEQ ID NO: 38523 - protein, 11 aa, Homo sapiens
  Table A; Target 38523; HLA-A*02:01; MAGEA11; ENSG00000185247; TAA
VMWEVLSIMGV

SEQ ID NO: 38524 - protein, 11 aa, Homo sapiens
  Table A; Target 38524; HLA-A*02:07; MAGEA11; ENSG00000185247; TAA
VMWEVLSIMGV

SEQ ID NO: 38525 - protein, 8 aa, Homo sapiens
  Table A; Target 38525; HLA-B*55:01; MAGEA11; ENSG00000185247; TAA
VPGTDPAC

SEQ ID NO: 38526 - protein, 9 aa, Homo sapiens
  Table A; Target 38526; HLA-B*35:01; MAGEA11; ENSG00000185247; TAA
VPGTDPACY

SEQ ID NO: 38527 - protein, 9 aa, Homo sapiens
  Table A; Target 38527; HLA-B*55:01; MAGEA11; ENSG00000185247; TAA
VPGTDPACY

SEQ ID NO: 38528 - protein, 8 aa, Homo sapiens
  Table A; Target 38528; HLA-B*15:01; MAGEA11; ENSG00000185247; TAA
VQEKYLVY

SEQ ID NO: 38529 - protein, 8 aa, Homo sapiens
  Table A; Target 38529; HLA-B*15:03; MAGEA11; ENSG00000185247; TAA
VQEKYLVY

SEQ ID NO: 38530 - protein, 8 aa, Homo sapiens
  Table A; Target 38530; HLA-C*07:01; MAGEA11; ENSG00000185247; TAA
VQEKYLVY

SEQ ID NO: 38531 - protein, 9 aa, Homo sapiens
  Table A; Target 38531; HLA-A*31:01; MAGEA11; ENSG00000185247; TAA
VQEKYLVYR

SEQ ID NO: 38532 - protein, 8 aa, Homo sapiens
  Table A; Target 38532; HLA-A*01:01; MAGEA11; ENSG00000185247; TAA
VTSLNLSY

SEQ ID NO: 38533 - protein, 9 aa, Homo sapiens
  Table A; Target 38533; HLA-A*23:01; MAGEA11; ENSG00000185247; TAA
VYAGREHFL

SEQ ID NO: 38534 - protein, 9 aa, Homo sapiens
  Table A; Target 38534; HLA-A*24:02; MAGEA11; ENSG00000185247; TAA
VYAGREHFL

SEQ ID NO: 38535 - protein, 10 aa, Homo sapiens
  Table A; Target 38535; HLA-A*24:02; MAGEA11; ENSG00000185247; TAA
VYAGREHFLF

SEQ ID NO: 38536 - protein, 9 aa, Homo sapiens
  Table A; Target 38536; HLA-B*40:02; MAGEA11; ENSG00000185247; TAA
WEVLSIMGV

SEQ ID NO: 38537 - protein, 9 aa, Homo sapiens
  Table A; Target 38537; HLA-B*49:01; MAGEA11; ENSG00000185247; TAA
WEVLSIMGV

SEQ ID NO: 38538 - protein, 9 aa, Homo sapiens
  Table A; Target 38538; HLA-A*03:01; MAGEA11; ENSG00000185247; TAA
WVQEKYLVY

SEQ ID NO: 38539 - protein, 9 aa, Homo sapiens
  Table A; Target 38539; HLA-A*25:01; MAGEA11; ENSG00000185247; TAA
WVQEKYLVY

SEQ ID NO: 38540 - protein, 9 aa, Homo sapiens
  Table A; Target 38540; HLA-A*26:01; MAGEA11; ENSG00000185247; TAA
WVQEKYLVY

SEQ ID NO: 38541 - protein, 9 aa, Homo sapiens
  Table A; Target 38541; HLA-A*29:02; MAGEA11; ENSG00000185247; TAA
WVQEKYLVY

SEQ ID NO: 38542 - protein, 9 aa, Homo sapiens
  Table A; Target 38542; HLA-A*30:02; MAGEA11; ENSG00000185247; TAA
WVQEKYLVY

SEQ ID NO: 38543 - protein, 9 aa, Homo sapiens
  Table A; Target 38543; HLA-B*15:01; MAGEA11; ENSG00000185247; TAA
WVQEKYLVY

SEQ ID NO: 38544 - protein, 9 aa, Homo sapiens
  Table A; Target 38544; HLA-B*35:01; MAGEA11; ENSG00000185247; TAA
WVQEKYLVY

SEQ ID NO: 38545 - protein, 10 aa, Homo sapiens
  Table A; Target 38545; HLA-A*31:01; MAGEA11; ENSG00000185247; TAA
WVQEKYLVYR

SEQ ID NO: 38546 - protein, 10 aa, Homo sapiens
  Table A; Target 38546; HLA-A*33:01; MAGEA11; ENSG00000185247; TAA
WVQEKYLVYR

SEQ ID NO: 38547 - protein, 8 aa, Homo sapiens
  Table A; Target 38547; HLA-C*07:04; MAGEA11; ENSG00000185247; TAA
YAGREHFL

SEQ ID NO: 38548 - protein, 9 aa, Homo sapiens
  Table A; Target 38548; HLA-B*57:01; MAGEA11; ENSG00000185247; TAA
YAGREHFLF

SEQ ID NO: 38549 - protein, 10 aa, Homo sapiens
  Table A; Target 38549; HLA-C*07:01; MAGEA11; ENSG00000185247; TAA
YDGIQCNEQS

SEQ ID NO: 38550 - protein, 8 aa, Homo sapiens
  Table A; Target 38550; HLA-B*18:01; MAGEA11; ENSG00000185247; TAA
YEDYFPEI

SEQ ID NO: 38551 - protein, 8 aa, Homo sapiens
  Table A; Target 38551; HLA-B*49:01; MAGEA11; ENSG00000185247; TAA
YEDYFPEI

SEQ ID NO: 38552 - protein, 9 aa, Homo sapiens
  Table A; Target 38552; HLA-B*18:01; MAGEA11; ENSG00000185247; TAA
YEDYFPEIF

SEQ ID NO: 38553 - protein, 9 aa, Homo sapiens
  Table A; Target 38553; HLA-B*49:01; MAGEA11; ENSG00000185247; TAA
YEDYFPEIF

SEQ ID NO: 38554 - protein, 9 aa, Homo sapiens
  Table A; Target 38554; HLA-A*02:07; MAGEA11; ENSG00000185247; TAA
YFPEIFREA

SEQ ID NO: 38555 - protein, 9 aa, Homo sapiens
  Table A; Target 38555; HLA-A*29:02; MAGEA11; ENSG00000185247; TAA
YFPEIFREA

SEQ ID NO: 38556 - protein, 9 aa, Homo sapiens
  Table A; Target 38556; HLA-B*54:01; MAGEA11; ENSG00000185247; TAA
YFPEIFREA

SEQ ID NO: 38557 - protein, 9 aa, Homo sapiens
  Table A; Target 38557; HLA-B*27:05; MAGEA11; ENSG00000185247; TAA
YPSLYEDAL

SEQ ID NO: 38558 - protein, 9 aa, Homo sapiens
  Table A; Target 38558; HLA-B*35:01; MAGEA11; ENSG00000185247; TAA
YPSLYEDAL

SEQ ID NO: 38559 - protein, 9 aa, Homo sapiens
  Table A; Target 38559; HLA-B*35:03; MAGEA11; ENSG00000185247; TAA
YPSLYEDAL

SEQ ID NO: 38560 - protein, 9 aa, Homo sapiens
  Table A; Target 38560; HLA-B*38:01; MAGEA11; ENSG00000185247; TAA
YPSLYEDAL

SEQ ID NO: 38561 - protein, 9 aa, Homo sapiens
  Table A; Target 38561; HLA-B*39:01; MAGEA11; ENSG00000185247; TAA
YPSLYEDAL

SEQ ID NO: 38562 - protein, 9 aa, Homo sapiens
  Table A; Target 38562; HLA-B*55:01; MAGEA11; ENSG00000185247; TAA
YPSLYEDAL

SEQ ID NO: 38563 - protein, 9 aa, Homo sapiens
  Table A; Target 38563; HLA-C*03:03; MAGEA11; ENSG00000185247; TAA
YPSLYEDAL

SEQ ID NO: 38564 - protein, 9 aa, Homo sapiens
  Table A; Target 38564; HLA-B*27:05; MAGEA11; ENSG00000185247; TAA
YRVKGLITK

SEQ ID NO: 38565 - protein, 9 aa, Homo sapiens
  Table A; Target 38565; HLA-C*06:02; MAGEA11; ENSG00000185247; TAA
YRVKGLITK

SEQ ID NO: 38566 - protein, 9 aa, Homo sapiens
  Table A; Target 38566; HLA-C*07:01; MAGEA11; ENSG00000185247; TAA
YRVKGLITK

SEQ ID NO: 38567 - protein, 9 aa, Homo sapiens
  Table A; Target 38567; HLA-A*02:01; MAGEA11; ENSG00000185247; TAA
YVLVTSLNL

SEQ ID NO: 38568 - protein, 9 aa, Homo sapiens
  Table A; Target 38568; HLA-A*02:04; MAGEA11; ENSG00000185247; TAA
YVLVTSLNL

SEQ ID NO: 38569 - protein, 9 aa, Homo sapiens
  Table A; Target 38569; HLA-A*02:07; MAGEA11; ENSG00000185247; TAA
YVLVTSLNL

SEQ ID NO: 38570 - protein, 9 aa, Homo sapiens
  Table A; Target 38570; HLA-A*23:01; MAGEA11; ENSG00000185247; TAA
YVLVTSLNL

SEQ ID NO: 38571 - protein, 9 aa, Homo sapiens
  Table A; Target 38571; HLA-A*24:02; MAGEA11; ENSG00000185247; TAA
YVLVTSLNL

SEQ ID NO: 38572 - protein, 9 aa, Homo sapiens
  Table A; Target 38572; HLA-B*13:02; MAGEA11; ENSG00000185247; TAA
YVLVTSLNL

SEQ ID NO: 38573 - protein, 9 aa, Homo sapiens
  Table A; Target 38573; HLA-C*01:02; MAGEA11; ENSG00000185247; TAA
YVLVTSLNL

SEQ ID NO: 38574 - protein, 9 aa, Homo sapiens
  Table A; Target 38574; HLA-C*03:03; MAGEA11; ENSG00000185247; TAA
YVLVTSLNL

SEQ ID NO: 38575 - protein, 9 aa, Homo sapiens
  Table A; Target 38575; HLA-C*03:04; MAGEA11; ENSG00000185247; TAA
YVLVTSLNL

SEQ ID NO: 38576 - protein, 11 aa, Homo sapiens
  Table A; Target 38576; HLA-A*01:01; MAGEA11; ENSG00000185247; TAA
YVLVTSLNLSY

SEQ ID NO: 38577 - protein, 11 aa, Homo sapiens
  Table A; Target 38577; HLA-A*29:02; MAGEA11; ENSG00000185247; TAA
YVLVTSLNLSY

SEQ ID NO: 38578 - protein, 11 aa, Homo sapiens
  Table A; Target 38578; HLA-A*30:02; MAGEA11; ENSG00000185247; TAA
YVLVTSLNLSY

SEQ ID NO: 38579 - protein, 9 aa, Homo sapiens
  Table A; Target 38579; HLA-B*38:01; MAGEA11,MAGEA3,MAGEA6; ENSG00000185247,ENSG00000221867,ENSG00000197172; TAA,CTA,CTA
QHCKPEEGL

SEQ ID NO: 38580 - protein, 8 aa, Homo sapiens
  Table A; Target 38580; HLA-C*16:04; MAGEA11,MAGEA4; ENSG00000185247,ENSG00000147381; TAA,TAA
FGIDVKEV

SEQ ID NO: 38581 - protein, 8 aa, Homo sapiens
  Table A; Target 38581; HLA-B*46:01; MAGEA11,MAGEA8; ENSG00000185247,ENSG00000156009; TAA,TAA
FGIDVKEV

SEQ ID NO: 38582 - protein, 8 aa, Homo sapiens
  Table A; Target 38582; HLA-B*51:01; MAGEA11,MAGEA8; ENSG00000185247,ENSG00000156009; TAA,TAA
FGIDVKEV

SEQ ID NO: 38583 - protein, 8 aa, Homo sapiens
  Table A; Target 38583; HLA-C*12:03; MAGEA11,MAGEA8; ENSG00000185247,ENSG00000156009; TAA,TAA
FGIDVKEV

SEQ ID NO: 38584 - protein, 8 aa, Homo sapiens
  Table A; Target 38584; HLA-C*16:02; MAGEA11,MAGEA8; ENSG00000185247,ENSG00000156009; TAA,TAA
FGIDVKEV

SEQ ID NO: 38585 - protein, 8 aa, Homo sapiens
  Table A; Target 38585; HLA-B*37:01; MAGEA11,MAGEB2; ENSG00000185247,ENSG00000099399; TAA,CTA
AETSKMKV

SEQ ID NO: 38586 - protein, 8 aa, Homo sapiens
  Table A; Target 38586; HLA-B*49:01; MAGEA11,MAGEB2,MAGEB4; ENSG00000185247,ENSG00000099399,ENSG00000120289; TAA,CTA,CTA
AETSKMKV

SEQ ID NO: 38587 - protein, 9 aa, Homo sapiens
  Table A; Target 38587; HLA-A*30:01; MAGEA11,MAGEB2,MAGEB4; ENSG00000185247,ENSG00000099399,ENSG00000120289; TAA,CTA,CTA
AETSKMKVL

SEQ ID NO: 38588 - protein, 9 aa, Homo sapiens
  Table A; Target 38588; HLA-B*37:01; MAGEA11,MAGEB2,MAGEB4; ENSG00000185247,ENSG00000099399,ENSG00000120289; TAA,CTA,CTA
AETSKMKVL

SEQ ID NO: 38589 - protein, 9 aa, Homo sapiens
  Table A; Target 38589; HLA-B*40:01; MAGEA11,MAGEB2,MAGEB4; ENSG00000185247,ENSG00000099399,ENSG00000120289; TAA,CTA,CTA
AETSKMKVL

SEQ ID NO: 38590 - protein, 9 aa, Homo sapiens
  Table A; Target 38590; HLA-B*40:02; MAGEA11,MAGEB2,MAGEB4; ENSG00000185247,ENSG00000099399,ENSG00000120289; TAA,CTA,CTA
AETSKMKVL

SEQ ID NO: 38591 - protein, 9 aa, Homo sapiens
  Table A; Target 38591; HLA-B*44:02; MAGEA11,MAGEB2,MAGEB4; ENSG00000185247,ENSG00000099399,ENSG00000120289; TAA,CTA,CTA
AETSKMKVL

SEQ ID NO: 38592 - protein, 9 aa, Homo sapiens
  Table A; Target 38592; HLA-B*44:03; MAGEA11,MAGEB2,MAGEB4; ENSG00000185247,ENSG00000099399,ENSG00000120289; TAA,CTA,CTA
AETSKMKVL

SEQ ID NO: 38593 - protein, 9 aa, Homo sapiens
  Table A; Target 38593; HLA-B*49:01; MAGEA11,MAGEB2,MAGEB4; ENSG00000185247,ENSG00000099399,ENSG00000120289; TAA,CTA,CTA
AETSKMKVL

SEQ ID NO: 38594 - protein, 9 aa, Homo sapiens
  Table A; Target 38594; HLA-C*16:04; MAGEA11,MAGEB2,MAGEB4; ENSG00000185247,ENSG00000099399,ENSG00000120289; TAA,CTA,CTA
AETSKMKVL

SEQ ID NO: 38595 - protein, 8 aa, Homo sapiens
  Table A; Target 38595; HLA-B*08:01; MAGEA11,MAGEB2,MAGEB4; ENSG00000185247,ENSG00000099399,ENSG00000120289; TAA,CTA,CTA
ETSKMKVL

SEQ ID NO: 38596 - protein, 10 aa, Homo sapiens
  Table A; Target 38596; HLA-B*07:02; MAGEA11,MAGEB4; ENSG00000185247,ENSG00000120289; TAA,CTA
GPRAHAETSK

SEQ ID NO: 38597 - protein, 11 aa, Homo sapiens
  Table A; Target 38597; HLA-B*07:02; MAGEA11,MAGEB4; ENSG00000185247,ENSG00000120289; TAA,CTA
GPRAHAETSKM

SEQ ID NO: 38598 - protein, 9 aa, Homo sapiens
  Table A; Target 38598; HLA-C*03:04; MAGEA11,MAGEB4; ENSG00000185247,ENSG00000120289; TAA,CTA
RAHAETSKM

SEQ ID NO: 38599 - protein, 9 aa, Homo sapiens
  Table A; Target 38599; HLA-A*32:01; MAGEA11,MAGEC2; ENSG00000185247,ENSG00000046774; TAA,CTA
GVYAGREHF

SEQ ID NO: 38600 - protein, 9 aa, Homo sapiens
  Table A; Target 38600; HLA-B*15:01; MAGEA11,MAGEC2; ENSG00000185247,ENSG00000046774; TAA,CTA
GVYAGREHF

SEQ ID NO: 38601 - protein, 9 aa, Homo sapiens
  Table A; Target 38601; HLA-B*57:01; MAGEA11,MAGEC2; ENSG00000185247,ENSG00000046774; TAA,CTA
GVYAGREHF

SEQ ID NO: 38602 - protein, 9 aa, Homo sapiens
  Table A; Target 38602; HLA-C*16:01; MAGEA3; ENSG00000221867; CTA
AALSRKVAE

SEQ ID NO: 38603 - protein, 8 aa, Homo sapiens
  Table A; Target 38603; HLA-B*44:03; MAGEA3; ENSG00000221867; CTA
AELVHFLL

SEQ ID NO: 38604 - protein, 9 aa, Homo sapiens
  Table A; Target 38604; HLA-A*30:01; MAGEA3; ENSG00000221867; CTA
AELVHFLLL

SEQ ID NO: 38605 - protein, 9 aa, Homo sapiens
  Table A; Target 38605; HLA-B*37:01; MAGEA3; ENSG00000221867; CTA
AELVHFLLL

SEQ ID NO: 38606 - protein, 9 aa, Homo sapiens
  Table A; Target 38606; HLA-B*44:02; MAGEA3; ENSG00000221867; CTA
AELVHFLLL

SEQ ID NO: 38607 - protein, 9 aa, Homo sapiens
  Table A; Target 38607; HLA-B*44:03; MAGEA3; ENSG00000221867; CTA
AELVHFLLL

SEQ ID NO: 38608 - protein, 9 aa, Homo sapiens
  Table A; Target 38608; HLA-B*49:01; MAGEA3; ENSG00000221867; CTA
AELVHFLLL

SEQ ID NO: 38609 - protein, 11 aa, Homo sapiens
  Table A; Target 38609; HLA-B*44:02; MAGEA3; ENSG00000221867; CTA
AELVHFLLLKY

SEQ ID NO: 38610 - protein, 11 aa, Homo sapiens
  Table A; Target 38610; HLA-B*44:03; MAGEA3; ENSG00000221867; CTA
AELVHFLLLKY

SEQ ID NO: 38611 - protein, 9 aa, Homo sapiens
  Table A; Target 38611; HLA-B*49:01; MAGEA3; ENSG00000221867; CTA
AESPDPPQS

SEQ ID NO: 38612 - protein, 9 aa, Homo sapiens
  Table A; Target 38612; HLA-A*02:01; MAGEA3; ENSG00000221867; CTA
ALSRKVAEL

SEQ ID NO: 38613 - protein, 9 aa, Homo sapiens
  Table A; Target 38613; HLA-A*02:03; MAGEA3; ENSG00000221867; CTA
ALSRKVAEL

SEQ ID NO: 38614 - protein, 9 aa, Homo sapiens
  Table A; Target 38614; HLA-A*02:04; MAGEA3; ENSG00000221867; CTA
ALSRKVAEL

SEQ ID NO: 38615 - protein, 9 aa, Homo sapiens
  Table A; Target 38615; HLA-B*08:01; MAGEA3; ENSG00000221867; CTA
ALSRKVAEL

SEQ ID NO: 38616 - protein, 8 aa, Homo sapiens
  Table A; Target 38616; HLA-A*02:01; MAGEA3; ENSG00000221867; CTA
ALVETSYV

SEQ ID NO: 38617 - protein, 8 aa, Homo sapiens
  Table A; Target 38617; HLA-A*02:03; MAGEA3; ENSG00000221867; CTA
ALVETSYV

SEQ ID NO: 38618 - protein, 8 aa, Homo sapiens
  Table A; Target 38618; HLA-B*13:02; MAGEA3; ENSG00000221867; CTA
ALVETSYV

SEQ ID NO: 38619 - protein, 8 aa, Homo sapiens
  Table A; Target 38619; HLA-B*37:01; MAGEA3; ENSG00000221867; CTA
ALVETSYV

SEQ ID NO: 38620 - protein, 8 aa, Homo sapiens
  Table A; Target 38620; HLA-B*49:01; MAGEA3; ENSG00000221867; CTA
ALVETSYV

SEQ ID NO: 38621 - protein, 8 aa, Homo sapiens
  Table A; Target 38621; HLA-B*55:01; MAGEA3; ENSG00000221867; CTA
ALVETSYV

SEQ ID NO: 38622 - protein, 9 aa, Homo sapiens
  Table A; Target 38622; HLA-A*03:01; MAGEA3; ENSG00000221867; CTA
ALVETSYVK

SEQ ID NO: 38623 - protein, 9 aa, Homo sapiens
  Table A; Target 38623; HLA-A*03:02; MAGEA3; ENSG00000221867; CTA
ALVETSYVK

SEQ ID NO: 38624 - protein, 9 aa, Homo sapiens
  Table A; Target 38624; HLA-A*11:01; MAGEA3; ENSG00000221867; CTA
ALVETSYVK

SEQ ID NO: 38625 - protein, 9 aa, Homo sapiens
  Table A; Target 38625; HLA-B*27:02; MAGEA3; ENSG00000221867; CTA
ALVETSYVK

SEQ ID NO: 38626 - protein, 10 aa, Homo sapiens
  Table A; Target 38626; HLA-A*02:01; MAGEA3; ENSG00000221867; CTA
ALVETSYVKV

SEQ ID NO: 38627 - protein, 10 aa, Homo sapiens
  Table A; Target 38627; HLA-A*02:03; MAGEA3; ENSG00000221867; CTA
ALVETSYVKV

SEQ ID NO: 38628 - protein, 10 aa, Homo sapiens
  Table A; Target 38628; HLA-A*02:04; MAGEA3; ENSG00000221867; CTA
ALVETSYVKV

SEQ ID NO: 38629 - protein, 10 aa, Homo sapiens
  Table A; Target 38629; HLA-A*02:07; MAGEA3; ENSG00000221867; CTA
ALVETSYVKV

SEQ ID NO: 38630 - protein, 10 aa, Homo sapiens
  Table A; Target 38630; HLA-B*55:01; MAGEA3; ENSG00000221867; CTA
ALVETSYVKV

SEQ ID NO: 38631 - protein, 11 aa, Homo sapiens
  Table A; Target 38631; HLA-A*02:03; MAGEA3; ENSG00000221867; CTA
ALVETSYVKVL

SEQ ID NO: 38632 - protein, 11 aa, Homo sapiens
  Table A; Target 38632; HLA-A*02:04; MAGEA3; ENSG00000221867; CTA
ALVETSYVKVL

SEQ ID NO: 38633 - protein, 11 aa, Homo sapiens
  Table A; Target 38633; HLA-A*02:07; MAGEA3; ENSG00000221867; CTA
ALVETSYVKVL

SEQ ID NO: 38634 - protein, 9 aa, Homo sapiens
  Table A; Target 38634; HLA-A*01:01; MAGEA3; ENSG00000221867; CTA
ASSSLQLVF

SEQ ID NO: 38635 - protein, 9 aa, Homo sapiens
  Table A; Target 38635; HLA-A*03:01; MAGEA3; ENSG00000221867; CTA
ASSSLQLVF

SEQ ID NO: 38636 - protein, 9 aa, Homo sapiens
  Table A; Target 38636; HLA-A*11:01; MAGEA3; ENSG00000221867; CTA
ASSSLQLVF

SEQ ID NO: 38637 - protein, 9 aa, Homo sapiens
  Table A; Target 38637; HLA-A*23:01; MAGEA3; ENSG00000221867; CTA
ASSSLQLVF

SEQ ID NO: 38638 - protein, 9 aa, Homo sapiens
  Table A; Target 38638; HLA-A*24:02; MAGEA3; ENSG00000221867; CTA
ASSSLQLVF

SEQ ID NO: 38639 - protein, 9 aa, Homo sapiens
  Table A; Target 38639; HLA-A*29:02; MAGEA3; ENSG00000221867; CTA
ASSSLQLVF

SEQ ID NO: 38640 - protein, 9 aa, Homo sapiens
  Table A; Target 38640; HLA-A*30:02; MAGEA3; ENSG00000221867; CTA
ASSSLQLVF

SEQ ID NO: 38641 - protein, 9 aa, Homo sapiens
  Table A; Target 38641; HLA-A*32:01; MAGEA3; ENSG00000221867; CTA
ASSSLQLVF

SEQ ID NO: 38642 - protein, 9 aa, Homo sapiens
  Table A; Target 38642; HLA-B*15:01; MAGEA3; ENSG00000221867; CTA
ASSSLQLVF

SEQ ID NO: 38643 - protein, 9 aa, Homo sapiens
  Table A; Target 38643; HLA-B*15:03; MAGEA3; ENSG00000221867; CTA
ASSSLQLVF

SEQ ID NO: 38644 - protein, 9 aa, Homo sapiens
  Table A; Target 38644; HLA-B*27:02; MAGEA3; ENSG00000221867; CTA
ASSSLQLVF

SEQ ID NO: 38645 - protein, 9 aa, Homo sapiens
  Table A; Target 38645; HLA-B*44:02; MAGEA3; ENSG00000221867; CTA
ASSSLQLVF

SEQ ID NO: 38646 - protein, 9 aa, Homo sapiens
  Table A; Target 38646; HLA-B*44:03; MAGEA3; ENSG00000221867; CTA
ASSSLQLVF

SEQ ID NO: 38647 - protein, 9 aa, Homo sapiens
  Table A; Target 38647; HLA-B*57:01; MAGEA3; ENSG00000221867; CTA
ASSSLQLVF

SEQ ID NO: 38648 - protein, 9 aa, Homo sapiens
  Table A; Target 38648; HLA-B*58:01; MAGEA3; ENSG00000221867; CTA
ASSSLQLVF

SEQ ID NO: 38649 - protein, 9 aa, Homo sapiens
  Table A; Target 38649; HLA-C*02:02; MAGEA3; ENSG00000221867; CTA
ASSSLQLVF

SEQ ID NO: 38650 - protein, 9 aa, Homo sapiens
  Table A; Target 38650; HLA-C*07:04; MAGEA3; ENSG00000221867; CTA
ASSSLQLVF

SEQ ID NO: 38651 - protein, 9 aa, Homo sapiens
  Table A; Target 38651; HLA-C*07:06; MAGEA3; ENSG00000221867; CTA
ASSSLQLVF

SEQ ID NO: 38652 - protein, 9 aa, Homo sapiens
  Table A; Target 38652; HLA-C*12:03; MAGEA3; ENSG00000221867; CTA
ASSSLQLVF

SEQ ID NO: 38653 - protein, 9 aa, Homo sapiens
  Table A; Target 38653; HLA-C*16:01; MAGEA3; ENSG00000221867; CTA
ASSSLQLVF

SEQ ID NO: 38654 - protein, 9 aa, Homo sapiens
  Table A; Target 38654; HLA-C*16:02; MAGEA3; ENSG00000221867; CTA
ASSSLQLVF

SEQ ID NO: 38655 - protein, 9 aa, Homo sapiens
  Table A; Target 38655; HLA-C*16:04; MAGEA3; ENSG00000221867; CTA
ASSSLQLVF

SEQ ID NO: 38656 - protein, 10 aa, Homo sapiens
  Table A; Target 38656; HLA-C*07:01; MAGEA3; ENSG00000221867; CTA
DGLLGDNQIM

SEQ ID NO: 38657 - protein, 8 aa, Homo sapiens
  Table A; Target 38657; HLA-B*08:01; MAGEA3; ENSG00000221867; CTA
DPIGHLYI

SEQ ID NO: 38658 - protein, 8 aa, Homo sapiens
  Table A; Target 38658; HLA-B*51:01; MAGEA3; ENSG00000221867; CTA
DPIGHLYI

SEQ ID NO: 38659 - protein, 9 aa, Homo sapiens
  Table A; Target 38659; HLA-B*35:01; MAGEA3; ENSG00000221867; CTA
DPIGHLYIF

SEQ ID NO: 38660 - protein, 9 aa, Homo sapiens
  Table A; Target 38660; HLA-B*35:03; MAGEA3; ENSG00000221867; CTA
DPIGHLYIF

SEQ ID NO: 38661 - protein, 9 aa, Homo sapiens
  Table A; Target 38661; HLA-B*51:01; MAGEA3; ENSG00000221867; CTA
DPIGHLYIF

SEQ ID NO: 38662 - protein, 10 aa, Homo sapiens
  Table A; Target 38662; HLA-B*54:01; MAGEA3; ENSG00000221867; CTA
DPIGHLYIFA

SEQ ID NO: 38663 - protein, 8 aa, Homo sapiens
  Table A; Target 38663; HLA-B*27:02; MAGEA3; ENSG00000221867; CTA
DSILGDPK

SEQ ID NO: 38664 - protein, 10 aa, Homo sapiens
  Table A; Target 38664; HLA-A*68:01; MAGEA3; ENSG00000221867; CTA
EALGLVGAQA

SEQ ID NO: 38665 - protein, 9 aa, Homo sapiens
  Table A; Target 38665; HLA-B*27:02; MAGEA3; ENSG00000221867; CTA
EDSILGDPK

SEQ ID NO: 38666 - protein, 11 aa, Homo sapiens
  Table A; Target 38666; HLA-A*02:07; MAGEA3; ENSG00000221867; CTA
ELMEVDPIGHL

SEQ ID NO: 38667 - protein, 11 aa, Homo sapiens
  Table A; Target 38667; HLA-A*25:01; MAGEA3; ENSG00000221867; CTA
ELMEVDPIGHL

SEQ ID NO: 38668 - protein, 11 aa, Homo sapiens
  Table A; Target 38668; HLA-A*26:01; MAGEA3; ENSG00000221867; CTA
ELMEVDPIGHL

SEQ ID NO: 38669 - protein, 11 aa, Homo sapiens
  Table A; Target 38669; HLA-A*68:02; MAGEA3; ENSG00000221867; CTA
ELMEVDPIGHL

SEQ ID NO: 38670 - protein, 10 aa, Homo sapiens
  Table A; Target 38670; HLA-A*26:01; MAGEA3; ENSG00000221867; CTA
ELVHFLLLKY

SEQ ID NO: 38671 - protein, 10 aa, Homo sapiens
  Table A; Target 38671; HLA-A*29:02; MAGEA3; ENSG00000221867; CTA
ELVHFLLLKY

SEQ ID NO: 38672 - protein, 8 aa, Homo sapiens
  Table A; Target 38672; HLA-C*04:01; MAGEA3; ENSG00000221867; CTA
EVDPIGHL

SEQ ID NO: 38673 - protein, 8 aa, Homo sapiens
  Table A; Target 38673; HLA-C*05:01; MAGEA3; ENSG00000221867; CTA
EVDPIGHL

SEQ ID NO: 38674 - protein, 9 aa, Homo sapiens
  Table A; Target 38674; HLA-A*02:07; MAGEA3; ENSG00000221867; CTA
EVDPIGHLY

SEQ ID NO: 38675 - protein, 9 aa, Homo sapiens
  Table A; Target 38675; HLA-A*03:02; MAGEA3; ENSG00000221867; CTA
EVDPIGHLY

SEQ ID NO: 38676 - protein, 9 aa, Homo sapiens
  Table A; Target 38676; HLA-A*11:01; MAGEA3; ENSG00000221867; CTA
EVDPIGHLY

SEQ ID NO: 38677 - protein, 9 aa, Homo sapiens
  Table A; Target 38677; HLA-A*25:01; MAGEA3; ENSG00000221867; CTA
EVDPIGHLY

SEQ ID NO: 38678 - protein, 9 aa, Homo sapiens
  Table A; Target 38678; HLA-A*30:02; MAGEA3; ENSG00000221867; CTA
EVDPIGHLY

SEQ ID NO: 38679 - protein, 9 aa, Homo sapiens
  Table A; Target 38679; HLA-A*32:01; MAGEA3; ENSG00000221867; CTA
EVDPIGHLY

SEQ ID NO: 38680 - protein, 9 aa, Homo sapiens
  Table A; Target 38680; HLA-A*33:01; MAGEA3; ENSG00000221867; CTA
EVDPIGHLY

SEQ ID NO: 38681 - protein, 9 aa, Homo sapiens
  Table A; Target 38681; HLA-A*33:03; MAGEA3; ENSG00000221867; CTA
EVDPIGHLY

SEQ ID NO: 38682 - protein, 9 aa, Homo sapiens
  Table A; Target 38682; HLA-A*68:01; MAGEA3; ENSG00000221867; CTA
EVDPIGHLY

SEQ ID NO: 38683 - protein, 9 aa, Homo sapiens
  Table A; Target 38683; HLA-A*68:02; MAGEA3; ENSG00000221867; CTA
EVDPIGHLY

SEQ ID NO: 38684 - protein, 9 aa, Homo sapiens
  Table A; Target 38684; HLA-B*15:01; MAGEA3; ENSG00000221867; CTA
EVDPIGHLY

SEQ ID NO: 38685 - protein, 9 aa, Homo sapiens
  Table A; Target 38685; HLA-B*15:03; MAGEA3; ENSG00000221867; CTA
EVDPIGHLY

SEQ ID NO: 38686 - protein, 9 aa, Homo sapiens
  Table A; Target 38686; HLA-B*18:01; MAGEA3; ENSG00000221867; CTA
EVDPIGHLY

SEQ ID NO: 38687 - protein, 9 aa, Homo sapiens
  Table A; Target 38687; HLA-B*27:05; MAGEA3; ENSG00000221867; CTA
EVDPIGHLY

SEQ ID NO: 38688 - protein, 9 aa, Homo sapiens
  Table A; Target 38688; HLA-B*35:01; MAGEA3; ENSG00000221867; CTA
EVDPIGHLY

SEQ ID NO: 38689 - protein, 9 aa, Homo sapiens
  Table A; Target 38689; HLA-B*35:03; MAGEA3; ENSG00000221867; CTA
EVDPIGHLY

SEQ ID NO: 38690 - protein, 9 aa, Homo sapiens
  Table A; Target 38690; HLA-B*38:01; MAGEA3; ENSG00000221867; CTA
EVDPIGHLY

SEQ ID NO: 38691 - protein, 9 aa, Homo sapiens
  Table A; Target 38691; HLA-B*39:01; MAGEA3; ENSG00000221867; CTA
EVDPIGHLY

SEQ ID NO: 38692 - protein, 9 aa, Homo sapiens
  Table A; Target 38692; HLA-B*44:02; MAGEA3; ENSG00000221867; CTA
EVDPIGHLY

SEQ ID NO: 38693 - protein, 9 aa, Homo sapiens
  Table A; Target 38693; HLA-B*44:03; MAGEA3; ENSG00000221867; CTA
EVDPIGHLY

SEQ ID NO: 38694 - protein, 9 aa, Homo sapiens
  Table A; Target 38694; HLA-B*55:01; MAGEA3; ENSG00000221867; CTA
EVDPIGHLY

SEQ ID NO: 38695 - protein, 9 aa, Homo sapiens
  Table A; Target 38695; HLA-B*57:01; MAGEA3; ENSG00000221867; CTA
EVDPIGHLY

SEQ ID NO: 38696 - protein, 9 aa, Homo sapiens
  Table A; Target 38696; HLA-B*58:01; MAGEA3; ENSG00000221867; CTA
EVDPIGHLY

SEQ ID NO: 38697 - protein, 9 aa, Homo sapiens
  Table A; Target 38697; HLA-C*02:02; MAGEA3; ENSG00000221867; CTA
EVDPIGHLY

SEQ ID NO: 38698 - protein, 9 aa, Homo sapiens
  Table A; Target 38698; HLA-C*03:03; MAGEA3; ENSG00000221867; CTA
EVDPIGHLY

SEQ ID NO: 38699 - protein, 9 aa, Homo sapiens
  Table A; Target 38699; HLA-C*05:01; MAGEA3; ENSG00000221867; CTA
EVDPIGHLY

SEQ ID NO: 38700 - protein, 9 aa, Homo sapiens
  Table A; Target 38700; HLA-C*07:04; MAGEA3; ENSG00000221867; CTA
EVDPIGHLY

SEQ ID NO: 38701 - protein, 9 aa, Homo sapiens
  Table A; Target 38701; HLA-C*07:06; MAGEA3; ENSG00000221867; CTA
EVDPIGHLY

SEQ ID NO: 38702 - protein, 9 aa, Homo sapiens
  Table A; Target 38702; HLA-C*12:03; MAGEA3; ENSG00000221867; CTA
EVDPIGHLY

SEQ ID NO: 38703 - protein, 9 aa, Homo sapiens
  Table A; Target 38703; HLA-C*16:01; MAGEA3; ENSG00000221867; CTA
EVDPIGHLY

SEQ ID NO: 38704 - protein, 9 aa, Homo sapiens
  Table A; Target 38704; HLA-C*16:02; MAGEA3; ENSG00000221867; CTA
EVDPIGHLY

SEQ ID NO: 38705 - protein, 9 aa, Homo sapiens
  Table A; Target 38705; HLA-C*16:04; MAGEA3; ENSG00000221867; CTA
EVDPIGHLY

SEQ ID NO: 38706 - protein, 10 aa, Homo sapiens
  Table A; Target 38706; HLA-A*01:01; MAGEA3; ENSG00000221867; CTA
EVDPIGHLYI

SEQ ID NO: 38707 - protein, 10 aa, Homo sapiens
  Table A; Target 38707; HLA-A*02:07; MAGEA3; ENSG00000221867; CTA
EVDPIGHLYI

SEQ ID NO: 38708 - protein, 10 aa, Homo sapiens
  Table A; Target 38708; HLA-A*29:02; MAGEA3; ENSG00000221867; CTA
EVDPIGHLYI

SEQ ID NO: 38709 - protein, 10 aa, Homo sapiens
  Table A; Target 38709; HLA-B*38:01; MAGEA3; ENSG00000221867; CTA
EVDPIGHLYI

SEQ ID NO: 38710 - protein, 11 aa, Homo sapiens
  Table A; Target 38710; HLA-A*02:07; MAGEA3; ENSG00000221867; CTA
EVDPIGHLYIF

SEQ ID NO: 38711 - protein, 11 aa, Homo sapiens
  Table A; Target 38711; HLA-A*68:02; MAGEA3; ENSG00000221867; CTA
EVDPIGHLYIF

SEQ ID NO: 38712 - protein, 11 aa, Homo sapiens
  Table A; Target 38712; HLA-A*25:01; MAGEA3; ENSG00000221867; CTA
EVFEGREDSIL

SEQ ID NO: 38713 - protein, 11 aa, Homo sapiens
  Table A; Target 38713; HLA-A*26:01; MAGEA3; ENSG00000221867; CTA
EVFEGREDSIL

SEQ ID NO: 38714 - protein, 11 aa, Homo sapiens
  Table A; Target 38714; HLA-A*68:02; MAGEA3; ENSG00000221867; CTA
EVFEGREDSIL

SEQ ID NO: 38715 - protein, 11 aa, Homo sapiens
  Table A; Target 38715; HLA-B*27:05; MAGEA3; ENSG00000221867; CTA
EVFEGREDSIL

SEQ ID NO: 38716 - protein, 11 aa, Homo sapiens
  Table A; Target 38716; HLA-B*35:03; MAGEA3; ENSG00000221867; CTA
EVFEGREDSIL

SEQ ID NO: 38717 - protein, 9 aa, Homo sapiens
  Table A; Target 38717; HLA-B*40:01; MAGEA3; ENSG00000221867; CTA
FEGREDSIL

SEQ ID NO: 38718 - protein, 9 aa, Homo sapiens
  Table A; Target 38718; HLA-A*02:01; MAGEA3; ENSG00000221867; CTA
FLWGPRALV

SEQ ID NO: 38719 - protein, 9 aa, Homo sapiens
  Table A; Target 38719; HLA-A*02:03; MAGEA3; ENSG00000221867; CTA
FLWGPRALV

SEQ ID NO: 38720 - protein, 9 aa, Homo sapiens
  Table A; Target 38720; HLA-A*02:04; MAGEA3; ENSG00000221867; CTA
FLWGPRALV

SEQ ID NO: 38721 - protein, 9 aa, Homo sapiens
  Table A; Target 38721; HLA-A*02:07; MAGEA3; ENSG00000221867; CTA
FLWGPRALV

SEQ ID NO: 38722 - protein, 11 aa, Homo sapiens
  Table A; Target 38722; HLA-A*02:01; MAGEA3; ENSG00000221867; CTA
FLWGPRALVET

SEQ ID NO: 38723 - protein, 11 aa, Homo sapiens
  Table A; Target 38723; HLA-A*02:04; MAGEA3; ENSG00000221867; CTA
FLWGPRALVET

SEQ ID NO: 38724 - protein, 11 aa, Homo sapiens
  Table A; Target 38724; HLA-A*02:07; MAGEA3; ENSG00000221867; CTA
FLWGPRALVET

SEQ ID NO: 38725 - protein, 9 aa, Homo sapiens
  Table A; Target 38725; HLA-B*56:01; MAGEA3; ENSG00000221867; CTA
FPVIFSKAS

SEQ ID NO: 38726 - protein, 10 aa, Homo sapiens
  Table A; Target 38726; HLA-B*54:01; MAGEA3; ENSG00000221867; CTA
FPVIFSKASS

SEQ ID NO: 38727 - protein, 10 aa, Homo sapiens
  Table A; Target 38727; HLA-B*56:01; MAGEA3; ENSG00000221867; CTA
FPVIFSKASS

SEQ ID NO: 38728 - protein, 8 aa, Homo sapiens
  Table A; Target 38728; HLA-B*08:01; MAGEA3; ENSG00000221867; CTA
FSKASSSL

SEQ ID NO: 38729 - protein, 8 aa, Homo sapiens
  Table A; Target 38729; HLA-B*46:01; MAGEA3; ENSG00000221867; CTA
FSKASSSL

SEQ ID NO: 38730 - protein, 8 aa, Homo sapiens
  Table A; Target 38730; HLA-C*01:02; MAGEA3; ENSG00000221867; CTA
FSKASSSL

SEQ ID NO: 38731 - protein, 8 aa, Homo sapiens
  Table A; Target 38731; HLA-C*03:03; MAGEA3; ENSG00000221867; CTA
FSKASSSL

SEQ ID NO: 38732 - protein, 8 aa, Homo sapiens
  Table A; Target 38732; HLA-C*03:04; MAGEA3; ENSG00000221867; CTA
FSKASSSL

SEQ ID NO: 38733 - protein, 8 aa, Homo sapiens
  Table A; Target 38733; HLA-C*12:03; MAGEA3; ENSG00000221867; CTA
FSKASSSL

SEQ ID NO: 38734 - protein, 8 aa, Homo sapiens
  Table A; Target 38734; HLA-C*14:02; MAGEA3; ENSG00000221867; CTA
FSKASSSL

SEQ ID NO: 38735 - protein, 8 aa, Homo sapiens
  Table A; Target 38735; HLA-C*16:01; MAGEA3; ENSG00000221867; CTA
FSKASSSL

SEQ ID NO: 38736 - protein, 9 aa, Homo sapiens
  Table A; Target 38736; HLA-B*35:01; MAGEA3; ENSG00000221867; CTA
FVQENYLEY

SEQ ID NO: 38737 - protein, 8 aa, Homo sapiens
  Table A; Target 38737; HLA-A*03:02; MAGEA3; ENSG00000221867; CTA
GDNQIMPK

SEQ ID NO: 38738 - protein, 9 aa, Homo sapiens
  Table A; Target 38738; HLA-B*40:02; MAGEA3; ENSG00000221867; CTA
GDNQIMPKA

SEQ ID NO: 38739 - protein, 10 aa, Homo sapiens
  Table A; Target 38739; HLA-B*40:02; MAGEA3; ENSG00000221867; CTA
GEALGLVGAQ

SEQ ID NO: 38740 - protein, 9 aa, Homo sapiens
  Table A; Target 38740; HLA-A*02:01; MAGEA3; ENSG00000221867; CTA
GLLIIVLAI

SEQ ID NO: 38741 - protein, 9 aa, Homo sapiens
  Table A; Target 38741; HLA-A*02:03; MAGEA3; ENSG00000221867; CTA
GLLIIVLAI

SEQ ID NO: 38742 - protein, 9 aa, Homo sapiens
  Table A; Target 38742; HLA-A*02:04; MAGEA3; ENSG00000221867; CTA
GLLIIVLAI

SEQ ID NO: 38743 - protein, 9 aa, Homo sapiens
  Table A; Target 38743; HLA-B*13:02; MAGEA3; ENSG00000221867; CTA
GLLIIVLAI

SEQ ID NO: 38744 - protein, 9 aa, Homo sapiens
  Table A; Target 38744; HLA-B*07:02; MAGEA3; ENSG00000221867; CTA
GPHISYPPL

SEQ ID NO: 38745 - protein, 10 aa, Homo sapiens
  Table A; Target 38745; HLA-A*30:02; MAGEA3; ENSG00000221867; CTA
GPRALVETSY

SEQ ID NO: 38746 - protein, 10 aa, Homo sapiens
  Table A; Target 38746; HLA-B*07:02; MAGEA3; ENSG00000221867; CTA
GPRALVETSY

SEQ ID NO: 38747 - protein, 10 aa, Homo sapiens
  Table A; Target 38747; HLA-B*15:01; MAGEA3; ENSG00000221867; CTA
GPRALVETSY

SEQ ID NO: 38748 - protein, 10 aa, Homo sapiens
  Table A; Target 38748; HLA-B*15:03; MAGEA3; ENSG00000221867; CTA
GPRALVETSY

SEQ ID NO: 38749 - protein, 10 aa, Homo sapiens
  Table A; Target 38749; HLA-B*35:01; MAGEA3; ENSG00000221867; CTA
GPRALVETSY

SEQ ID NO: 38750 - protein, 10 aa, Homo sapiens
  Table A; Target 38750; HLA-B*55:01; MAGEA3; ENSG00000221867; CTA
GPRALVETSY

SEQ ID NO: 38751 - protein, 11 aa, Homo sapiens
  Table A; Target 38751; HLA-B*07:02; MAGEA3; ENSG00000221867; CTA
GPRALVETSYV

SEQ ID NO: 38752 - protein, 11 aa, Homo sapiens
  Table A; Target 38752; HLA-C*07:02; MAGEA3; ENSG00000221867; CTA
GPRALVETSYV

SEQ ID NO: 38753 - protein, 11 aa, Homo sapiens
  Table A; Target 38753; HLA-B*27:02; MAGEA3; ENSG00000221867; CTA
GREDSILGDPK

SEQ ID NO: 38754 - protein, 11 aa, Homo sapiens
  Table A; Target 38754; HLA-B*27:05; MAGEA3; ENSG00000221867; CTA
GREDSILGDPK

SEQ ID NO: 38755 - protein, 10 aa, Homo sapiens
  Table A; Target 38755; HLA-A*29:02; MAGEA3; ENSG00000221867; CTA
HFVQENYLEY

SEQ ID NO: 38756 - protein, 10 aa, Homo sapiens
  Table A; Target 38756; HLA-B*35:01; MAGEA3; ENSG00000221867; CTA
HFVQENYLEY

SEQ ID NO: 38757 - protein, 10 aa, Homo sapiens
  Table A; Target 38757; HLA-B*57:01; MAGEA3; ENSG00000221867; CTA
HISYPPLHEW

SEQ ID NO: 38758 - protein, 9 aa, Homo sapiens
  Table A; Target 38758; HLA-A*23:01; MAGEA3; ENSG00000221867; CTA
IFSKASSSL

SEQ ID NO: 38759 - protein, 9 aa, Homo sapiens
  Table A; Target 38759; HLA-C*01:02; MAGEA3; ENSG00000221867; CTA
IFSKASSSL

SEQ ID NO: 38760 - protein, 9 aa, Homo sapiens
  Table A; Target 38760; HLA-C*14:02; MAGEA3; ENSG00000221867; CTA
IFSKASSSL

SEQ ID NO: 38761 - protein, 9 aa, Homo sapiens
  Table A; Target 38761; HLA-A*31:01; MAGEA3; ENSG00000221867; CTA
IIVLAIIAR

SEQ ID NO: 38762 - protein, 9 aa, Homo sapiens
  Table A; Target 38762; HLA-A*33:03; MAGEA3; ENSG00000221867; CTA
IIVLAIIAR

SEQ ID NO: 38763 - protein, 9 aa, Homo sapiens
  Table A; Target 38763; HLA-A*68:01; MAGEA3; ENSG00000221867; CTA
IIVLAIIAR

SEQ ID NO: 38764 - protein, 9 aa, Homo sapiens
  Table A; Target 38764; HLA-C*07:06; MAGEA3; ENSG00000221867; CTA
IIVLAIIAR

SEQ ID NO: 38765 - protein, 8 aa, Homo sapiens
  Table A; Target 38765; HLA-A*02:03; MAGEA3; ENSG00000221867; CTA
ILGDPKKL

SEQ ID NO: 38766 - protein, 8 aa, Homo sapiens
  Table A; Target 38766; HLA-C*06:02; MAGEA3; ENSG00000221867; CTA
ILGDPKKL

SEQ ID NO: 38767 - protein, 9 aa, Homo sapiens
  Table A; Target 38767; HLA-A*02:01; MAGEA3; ENSG00000221867; CTA
ILGDPKKLL

SEQ ID NO: 38768 - protein, 9 aa, Homo sapiens
  Table A; Target 38768; HLA-A*02:03; MAGEA3; ENSG00000221867; CTA
ILGDPKKLL

SEQ ID NO: 38769 - protein, 9 aa, Homo sapiens
  Table A; Target 38769; HLA-A*02:04; MAGEA3; ENSG00000221867; CTA
ILGDPKKLL

SEQ ID NO: 38770 - protein, 9 aa, Homo sapiens
  Table A; Target 38770; HLA-A*02:07; MAGEA3; ENSG00000221867; CTA
ILGDPKKLL

SEQ ID NO: 38771 - protein, 9 aa, Homo sapiens
  Table A; Target 38771; HLA-A*03:01; MAGEA3; ENSG00000221867; CTA
ILGDPKKLL

SEQ ID NO: 38772 - protein, 9 aa, Homo sapiens
  Table A; Target 38772; HLA-A*24:02; MAGEA3; ENSG00000221867; CTA
IMPKAGLLI

SEQ ID NO: 38773 - protein, 10 aa, Homo sapiens
  Table A; Target 38773; HLA-A*02:07; MAGEA3; ENSG00000221867; CTA
IMPKAGLLII

SEQ ID NO: 38774 - protein, 10 aa, Homo sapiens
  Table A; Target 38774; HLA-A*24:02; MAGEA3; ENSG00000221867; CTA
IMPKAGLLII

SEQ ID NO: 38775 - protein, 11 aa, Homo sapiens
  Table A; Target 38775; HLA-A*02:07; MAGEA3; ENSG00000221867; CTA
IMPKAGLLIIV

SEQ ID NO: 38776 - protein, 9 aa, Homo sapiens
  Table A; Target 38776; HLA-A*01:01; MAGEA3; ENSG00000221867; CTA
ISGGPHISY

SEQ ID NO: 38777 - protein, 9 aa, Homo sapiens
  Table A; Target 38777; HLA-A*29:02; MAGEA3; ENSG00000221867; CTA
ISGGPHISY

SEQ ID NO: 38778 - protein, 9 aa, Homo sapiens
  Table A; Target 38778; HLA-A*30:02; MAGEA3; ENSG00000221867; CTA
ISGGPHISY

SEQ ID NO: 38779 - protein, 9 aa, Homo sapiens
  Table A; Target 38779; HLA-A*32:01; MAGEA3; ENSG00000221867; CTA
ISGGPHISY

SEQ ID NO: 38780 - protein, 9 aa, Homo sapiens
  Table A; Target 38780; HLA-B*15:01; MAGEA3; ENSG00000221867; CTA
ISGGPHISY

SEQ ID NO: 38781 - protein, 9 aa, Homo sapiens
  Table A; Target 38781; HLA-B*15:03; MAGEA3; ENSG00000221867; CTA
ISGGPHISY

SEQ ID NO: 38782 - protein, 9 aa, Homo sapiens
  Table A; Target 38782; HLA-B*35:01; MAGEA3; ENSG00000221867; CTA
ISGGPHISY

SEQ ID NO: 38783 - protein, 9 aa, Homo sapiens
  Table A; Target 38783; HLA-B*46:01; MAGEA3; ENSG00000221867; CTA
ISGGPHISY

SEQ ID NO: 38784 - protein, 9 aa, Homo sapiens
  Table A; Target 38784; HLA-B*57:01; MAGEA3; ENSG00000221867; CTA
ISGGPHISY

SEQ ID NO: 38785 - protein, 9 aa, Homo sapiens
  Table A; Target 38785; HLA-B*58:01; MAGEA3; ENSG00000221867; CTA
ISGGPHISY

SEQ ID NO: 38786 - protein, 9 aa, Homo sapiens
  Table A; Target 38786; HLA-C*01:02; MAGEA3; ENSG00000221867; CTA
ISGGPHISY

SEQ ID NO: 38787 - protein, 9 aa, Homo sapiens
  Table A; Target 38787; HLA-C*02:02; MAGEA3; ENSG00000221867; CTA
ISGGPHISY

SEQ ID NO: 38788 - protein, 9 aa, Homo sapiens
  Table A; Target 38788; HLA-C*03:04; MAGEA3; ENSG00000221867; CTA
ISGGPHISY

SEQ ID NO: 38789 - protein, 9 aa, Homo sapiens
  Table A; Target 38789; HLA-C*07:01; MAGEA3; ENSG00000221867; CTA
ISGGPHISY

SEQ ID NO: 38790 - protein, 9 aa, Homo sapiens
  Table A; Target 38790; HLA-C*07:04; MAGEA3; ENSG00000221867; CTA
ISGGPHISY

SEQ ID NO: 38791 - protein, 9 aa, Homo sapiens
  Table A; Target 38791; HLA-C*12:03; MAGEA3; ENSG00000221867; CTA
ISGGPHISY

SEQ ID NO: 38792 - protein, 9 aa, Homo sapiens
  Table A; Target 38792; HLA-C*14:02; MAGEA3; ENSG00000221867; CTA
ISGGPHISY

SEQ ID NO: 38793 - protein, 9 aa, Homo sapiens
  Table A; Target 38793; HLA-C*16:01; MAGEA3; ENSG00000221867; CTA
ISGGPHISY

SEQ ID NO: 38794 - protein, 9 aa, Homo sapiens
  Table A; Target 38794; HLA-C*16:02; MAGEA3; ENSG00000221867; CTA
ISGGPHISY

SEQ ID NO: 38795 - protein, 9 aa, Homo sapiens
  Table A; Target 38795; HLA-C*16:04; MAGEA3; ENSG00000221867; CTA
ISGGPHISY

SEQ ID NO: 38796 - protein, 9 aa, Homo sapiens
  Table A; Target 38796; HLA-A*24:02; MAGEA3; ENSG00000221867; CTA
ISYPPLHEW

SEQ ID NO: 38797 - protein, 9 aa, Homo sapiens
  Table A; Target 38797; HLA-A*25:01; MAGEA3; ENSG00000221867; CTA
ISYPPLHEW

SEQ ID NO: 38798 - protein, 9 aa, Homo sapiens
  Table A; Target 38798; HLA-A*30:02; MAGEA3; ENSG00000221867; CTA
ISYPPLHEW

SEQ ID NO: 38799 - protein, 9 aa, Homo sapiens
  Table A; Target 38799; HLA-A*31:01; MAGEA3; ENSG00000221867; CTA
ISYPPLHEW

SEQ ID NO: 38800 - protein, 9 aa, Homo sapiens
  Table A; Target 38800; HLA-A*32:01; MAGEA3; ENSG00000221867; CTA
ISYPPLHEW

SEQ ID NO: 38801 - protein, 9 aa, Homo sapiens
  Table A; Target 38801; HLA-A*33:01; MAGEA3; ENSG00000221867; CTA
ISYPPLHEW

SEQ ID NO: 38802 - protein, 9 aa, Homo sapiens
  Table A; Target 38802; HLA-B*58:01; MAGEA3; ENSG00000221867; CTA
ISYPPLHEW

SEQ ID NO: 38803 - protein, 9 aa, Homo sapiens
  Table A; Target 38803; HLA-C*02:02; MAGEA3; ENSG00000221867; CTA
ISYPPLHEW

SEQ ID NO: 38804 - protein, 8 aa, Homo sapiens
  Table A; Target 38804; HLA-A*11:01; MAGEA3; ENSG00000221867; CTA
IVLAIIAR

SEQ ID NO: 38805 - protein, 8 aa, Homo sapiens
  Table A; Target 38805; HLA-A*31:01; MAGEA3; ENSG00000221867; CTA
IVLAIIAR

SEQ ID NO: 38806 - protein, 8 aa, Homo sapiens
  Table A; Target 38806; HLA-A*33:03; MAGEA3; ENSG00000221867; CTA
IVLAIIAR

SEQ ID NO: 38807 - protein, 8 aa, Homo sapiens
  Table A; Target 38807; HLA-B*37:01; MAGEA3; ENSG00000221867; CTA
KASSSLQL

SEQ ID NO: 38808 - protein, 8 aa, Homo sapiens
  Table A; Target 38808; HLA-C*03:04; MAGEA3; ENSG00000221867; CTA
KASSSLQL

SEQ ID NO: 38809 - protein, 8 aa, Homo sapiens
  Table A; Target 38809; HLA-C*16:01; MAGEA3; ENSG00000221867; CTA
KASSSLQL

SEQ ID NO: 38810 - protein, 9 aa, Homo sapiens
  Table A; Target 38810; HLA-B*13:02; MAGEA3; ENSG00000221867; CTA
KASSSLQLV

SEQ ID NO: 38811 - protein, 9 aa, Homo sapiens
  Table A; Target 38811; HLA-B*58:01; MAGEA3; ENSG00000221867; CTA
KASSSLQLV

SEQ ID NO: 38812 - protein, 9 aa, Homo sapiens
  Table A; Target 38812; HLA-C*02:02; MAGEA3; ENSG00000221867; CTA
KASSSLQLV

SEQ ID NO: 38813 - protein, 9 aa, Homo sapiens
  Table A; Target 38813; HLA-C*12:03; MAGEA3; ENSG00000221867; CTA
KASSSLQLV

SEQ ID NO: 38814 - protein, 9 aa, Homo sapiens
  Table A; Target 38814; HLA-C*16:02; MAGEA3; ENSG00000221867; CTA
KASSSLQLV

SEQ ID NO: 38815 - protein, 10 aa, Homo sapiens
  Table A; Target 38815; HLA-A*23:01; MAGEA3; ENSG00000221867; CTA
KASSSLQLVF

SEQ ID NO: 38816 - protein, 10 aa, Homo sapiens
  Table A; Target 38816; HLA-A*24:02; MAGEA3; ENSG00000221867; CTA
KASSSLQLVF

SEQ ID NO: 38817 - protein, 10 aa, Homo sapiens
  Table A; Target 38817; HLA-A*29:02; MAGEA3; ENSG00000221867; CTA
KASSSLQLVF

SEQ ID NO: 38818 - protein, 10 aa, Homo sapiens
  Table A; Target 38818; HLA-A*30:02; MAGEA3; ENSG00000221867; CTA
KASSSLQLVF

SEQ ID NO: 38819 - protein, 10 aa, Homo sapiens
  Table A; Target 38819; HLA-A*32:01; MAGEA3; ENSG00000221867; CTA
KASSSLQLVF

SEQ ID NO: 38820 - protein, 10 aa, Homo sapiens
  Table A; Target 38820; HLA-B*15:03; MAGEA3; ENSG00000221867; CTA
KASSSLQLVF

SEQ ID NO: 38821 - protein, 10 aa, Homo sapiens
  Table A; Target 38821; HLA-B*27:02; MAGEA3; ENSG00000221867; CTA
KASSSLQLVF

SEQ ID NO: 38822 - protein, 10 aa, Homo sapiens
  Table A; Target 38822; HLA-B*57:01; MAGEA3; ENSG00000221867; CTA
KASSSLQLVF

SEQ ID NO: 38823 - protein, 10 aa, Homo sapiens
  Table A; Target 38823; HLA-B*58:01; MAGEA3; ENSG00000221867; CTA
KASSSLQLVF

SEQ ID NO: 38824 - protein, 10 aa, Homo sapiens
  Table A; Target 38824; HLA-C*02:02; MAGEA3; ENSG00000221867; CTA
KASSSLQLVF

SEQ ID NO: 38825 - protein, 10 aa, Homo sapiens
  Table A; Target 38825; HLA-C*07:02; MAGEA3; ENSG00000221867; CTA
KASSSLQLVF

SEQ ID NO: 38826 - protein, 10 aa, Homo sapiens
  Table A; Target 38826; HLA-C*12:03; MAGEA3; ENSG00000221867; CTA
KASSSLQLVF

SEQ ID NO: 38827 - protein, 10 aa, Homo sapiens
  Table A; Target 38827; HLA-C*16:04; MAGEA3; ENSG00000221867; CTA
KASSSLQLVF

SEQ ID NO: 38828 - protein, 10 aa, Homo sapiens
  Table A; Target 38828; HLA-A*03:01; MAGEA3; ENSG00000221867; CTA
KISGGPHISY

SEQ ID NO: 38829 - protein, 10 aa, Homo sapiens
  Table A; Target 38829; HLA-A*29:02; MAGEA3; ENSG00000221867; CTA
KISGGPHISY

SEQ ID NO: 38830 - protein, 10 aa, Homo sapiens
  Table A; Target 38830; HLA-A*30:02; MAGEA3; ENSG00000221867; CTA
KISGGPHISY

SEQ ID NO: 38831 - protein, 10 aa, Homo sapiens
  Table A; Target 38831; HLA-A*32:01; MAGEA3; ENSG00000221867; CTA
KISGGPHISY

SEQ ID NO: 38832 - protein, 10 aa, Homo sapiens
  Table A; Target 38832; HLA-B*15:01; MAGEA3; ENSG00000221867; CTA
KISGGPHISY

SEQ ID NO: 38833 - protein, 10 aa, Homo sapiens
  Table A; Target 38833; HLA-B*46:01; MAGEA3; ENSG00000221867; CTA
KISGGPHISY

SEQ ID NO: 38834 - protein, 10 aa, Homo sapiens
  Table A; Target 38834; HLA-C*02:02; MAGEA3; ENSG00000221867; CTA
KISGGPHISY

SEQ ID NO: 38835 - protein, 10 aa, Homo sapiens
  Table A; Target 38835; HLA-C*16:01; MAGEA3; ENSG00000221867; CTA
KISGGPHISY

SEQ ID NO: 38836 - protein, 10 aa, Homo sapiens
  Table A; Target 38836; HLA-C*16:04; MAGEA3; ENSG00000221867; CTA
KISGGPHISY

SEQ ID NO: 38837 - protein, 8 aa, Homo sapiens
  Table A; Target 38837; HLA-A*32:01; MAGEA3; ENSG00000221867; CTA
KVAELVHF

SEQ ID NO: 38838 - protein, 8 aa, Homo sapiens
  Table A; Target 38838; HLA-B*37:01; MAGEA3; ENSG00000221867; CTA
KVAELVHF

SEQ ID NO: 38839 - protein, 8 aa, Homo sapiens
  Table A; Target 38839; HLA-B*57:01; MAGEA3; ENSG00000221867; CTA
KVAELVHF

SEQ ID NO: 38840 - protein, 8 aa, Homo sapiens
  Table A; Target 38840; HLA-B*58:01; MAGEA3; ENSG00000221867; CTA
KVAELVHF

SEQ ID NO: 38841 - protein, 8 aa, Homo sapiens
  Table A; Target 38841; HLA-C*07:04; MAGEA3; ENSG00000221867; CTA
KVAELVHF

SEQ ID NO: 38842 - protein, 9 aa, Homo sapiens
  Table A; Target 38842; HLA-A*03:01; MAGEA3; ENSG00000221867; CTA
KVAELVHFL

SEQ ID NO: 38843 - protein, 9 aa, Homo sapiens
  Table A; Target 38843; HLA-A*03:02; MAGEA3; ENSG00000221867; CTA
KVAELVHFL

SEQ ID NO: 38844 - protein, 9 aa, Homo sapiens
  Table A; Target 38844; HLA-A*24:02; MAGEA3; ENSG00000221867; CTA
KVAELVHFL

SEQ ID NO: 38845 - protein, 9 aa, Homo sapiens
  Table A; Target 38845; HLA-A*25:01; MAGEA3; ENSG00000221867; CTA
KVAELVHFL

SEQ ID NO: 38846 - protein, 9 aa, Homo sapiens
  Table A; Target 38846; HLA-A*26:01; MAGEA3; ENSG00000221867; CTA
KVAELVHFL

SEQ ID NO: 38847 - protein, 9 aa, Homo sapiens
  Table A; Target 38847; HLA-B*13:02; MAGEA3; ENSG00000221867; CTA
KVAELVHFL

SEQ ID NO: 38848 - protein, 9 aa, Homo sapiens
  Table A; Target 38848; HLA-B*55:01; MAGEA3; ENSG00000221867; CTA
KVAELVHFL

SEQ ID NO: 38849 - protein, 9 aa, Homo sapiens
  Table A; Target 38849; HLA-C*02:02; MAGEA3; ENSG00000221867; CTA
KVAELVHFL

SEQ ID NO: 38850 - protein, 9 aa, Homo sapiens
  Table A; Target 38850; HLA-C*06:02; MAGEA3; ENSG00000221867; CTA
KVAELVHFL

SEQ ID NO: 38851 - protein, 9 aa, Homo sapiens
  Table A; Target 38851; HLA-C*07:04; MAGEA3; ENSG00000221867; CTA
KVAELVHFL

SEQ ID NO: 38852 - protein, 9 aa, Homo sapiens
  Table A; Target 38852; HLA-C*16:02; MAGEA3; ENSG00000221867; CTA
KVAELVHFL

SEQ ID NO: 38853 - protein, 10 aa, Homo sapiens
  Table A; Target 38853; HLA-B*57:01; MAGEA3; ENSG00000221867; CTA
KVAELVHFLL

SEQ ID NO: 38854 - protein, 11 aa, Homo sapiens
  Table A; Target 38854; HLA-A*02:04; MAGEA3; ENSG00000221867; CTA
KVAELVHFLLL

SEQ ID NO: 38855 - protein, 11 aa, Homo sapiens
  Table A; Target 38855; HLA-A*02:07; MAGEA3; ENSG00000221867; CTA
KVAELVHFLLL

SEQ ID NO: 38856 - protein, 11 aa, Homo sapiens
  Table A; Target 38856; HLA-A*03:01; MAGEA3; ENSG00000221867; CTA
KVAELVHFLLL

SEQ ID NO: 38857 - protein, 9 aa, Homo sapiens
  Table A; Target 38857; HLA-A*01:01; MAGEA3; ENSG00000221867; CTA
LGDNQIMPK

SEQ ID NO: 38858 - protein, 10 aa, Homo sapiens
  Table A; Target 38858; HLA-B*27:02; MAGEA3; ENSG00000221867; CTA
LIIVLAIIAR

SEQ ID NO: 38859 - protein, 11 aa, Homo sapiens
  Table A; Target 38859; HLA-A*02:01; MAGEA3; ENSG00000221867; CTA
LLGDNQIMPKA

SEQ ID NO: 38860 - protein, 9 aa, Homo sapiens
  Table A; Target 38860; HLA-A*02:04; MAGEA3; ENSG00000221867; CTA
LLIIVLAII

SEQ ID NO: 38861 - protein, 11 aa, Homo sapiens
  Table A; Target 38861; HLA-A*01:01; MAGEA3; ENSG00000221867; CTA
LMEVDPIGHLY

SEQ ID NO: 38862 - protein, 11 aa, Homo sapiens
  Table A; Target 38862; HLA-A*29:02; MAGEA3; ENSG00000221867; CTA
LMEVDPIGHLY

SEQ ID NO: 38863 - protein, 11 aa, Homo sapiens
  Table A; Target 38863; HLA-A*30:02; MAGEA3; ENSG00000221867; CTA
LMEVDPIGHLY

SEQ ID NO: 38864 - protein, 9 aa, Homo sapiens
  Table A; Target 38864; HLA-B*39:01; MAGEA3; ENSG00000221867; CTA
LQLVFGIEL

SEQ ID NO: 38865 - protein, 8 aa, Homo sapiens
  Table A; Target 38865; HLA-B*08:01; MAGEA3; ENSG00000221867; CTA
LSRKVAEL

SEQ ID NO: 38866 - protein, 10 aa, Homo sapiens
  Table A; Target 38866; HLA-A*01:01; MAGEA3; ENSG00000221867; CTA
LTQHFVQENY

SEQ ID NO: 38867 - protein, 10 aa, Homo sapiens
  Table A; Target 38867; HLA-A*29:02; MAGEA3; ENSG00000221867; CTA
LTQHFVQENY

SEQ ID NO: 38868 - protein, 10 aa, Homo sapiens
  Table A; Target 38868; HLA-A*30:02; MAGEA3; ENSG00000221867; CTA
LTQHFVQENY

SEQ ID NO: 38869 - protein, 10 aa, Homo sapiens
  Table A; Target 38869; HLA-A*32:01; MAGEA3; ENSG00000221867; CTA
LTQHFVQENY

SEQ ID NO: 38870 - protein, 10 aa, Homo sapiens
  Table A; Target 38870; HLA-B*57:01; MAGEA3; ENSG00000221867; CTA
LTQHFVQENY

SEQ ID NO: 38871 - protein, 10 aa, Homo sapiens
  Table A; Target 38871; HLA-C*07:01; MAGEA3; ENSG00000221867; CTA
LTQHFVQENY

SEQ ID NO: 38872 - protein, 8 aa, Homo sapiens
  Table A; Target 38872; HLA-A*03:02; MAGEA3; ENSG00000221867; CTA
LVETSYVK

SEQ ID NO: 38873 - protein, 8 aa, Homo sapiens
  Table A; Target 38873; HLA-B*27:02; MAGEA3; ENSG00000221867; CTA
LVETSYVK

SEQ ID NO: 38874 - protein, 9 aa, Homo sapiens
  Table A; Target 38874; HLA-A*02:07; MAGEA3; ENSG00000221867; CTA
LVETSYVKV

SEQ ID NO: 38875 - protein, 9 aa, Homo sapiens
  Table A; Target 38875; HLA-C*05:01; MAGEA3; ENSG00000221867; CTA
LVETSYVKV

SEQ ID NO: 38876 - protein, 8 aa, Homo sapiens
  Table A; Target 38876; HLA-A*23:01; MAGEA3; ENSG00000221867; CTA
LYIFATCL

SEQ ID NO: 38877 - protein, 8 aa, Homo sapiens
  Table A; Target 38877; HLA-C*14:02; MAGEA3; ENSG00000221867; CTA
LYIFATCL

SEQ ID NO: 38878 - protein, 9 aa, Homo sapiens
  Table A; Target 38878; HLA-A*23:01; MAGEA3; ENSG00000221867; CTA
MEVDPIGHL

SEQ ID NO: 38879 - protein, 9 aa, Homo sapiens
  Table A; Target 38879; HLA-A*25:01; MAGEA3; ENSG00000221867; CTA
MEVDPIGHL

SEQ ID NO: 38880 - protein, 9 aa, Homo sapiens
  Table A; Target 38880; HLA-A*68:02; MAGEA3; ENSG00000221867; CTA
MEVDPIGHL

SEQ ID NO: 38881 - protein, 9 aa, Homo sapiens
  Table A; Target 38881; HLA-B*18:01; MAGEA3; ENSG00000221867; CTA
MEVDPIGHL

SEQ ID NO: 38882 - protein, 9 aa, Homo sapiens
  Table A; Target 38882; HLA-B*27:02; MAGEA3; ENSG00000221867; CTA
MEVDPIGHL

SEQ ID NO: 38883 - protein, 9 aa, Homo sapiens
  Table A; Target 38883; HLA-B*27:05; MAGEA3; ENSG00000221867; CTA
MEVDPIGHL

SEQ ID NO: 38884 - protein, 9 aa, Homo sapiens
  Table A; Target 38884; HLA-B*37:01; MAGEA3; ENSG00000221867; CTA
MEVDPIGHL

SEQ ID NO: 38885 - protein, 9 aa, Homo sapiens
  Table A; Target 38885; HLA-B*38:01; MAGEA3; ENSG00000221867; CTA
MEVDPIGHL

SEQ ID NO: 38886 - protein, 9 aa, Homo sapiens
  Table A; Target 38886; HLA-B*39:01; MAGEA3; ENSG00000221867; CTA
MEVDPIGHL

SEQ ID NO: 38887 - protein, 9 aa, Homo sapiens
  Table A; Target 38887; HLA-B*40:02; MAGEA3; ENSG00000221867; CTA
MEVDPIGHL

SEQ ID NO: 38888 - protein, 9 aa, Homo sapiens
  Table A; Target 38888; HLA-B*44:02; MAGEA3; ENSG00000221867; CTA
MEVDPIGHL

SEQ ID NO: 38889 - protein, 9 aa, Homo sapiens
  Table A; Target 38889; HLA-C*02:02; MAGEA3; ENSG00000221867; CTA
MEVDPIGHL

SEQ ID NO: 38890 - protein, 9 aa, Homo sapiens
  Table A; Target 38890; HLA-C*03:03; MAGEA3; ENSG00000221867; CTA
MEVDPIGHL

SEQ ID NO: 38891 - protein, 9 aa, Homo sapiens
  Table A; Target 38891; HLA-C*03:04; MAGEA3; ENSG00000221867; CTA
MEVDPIGHL

SEQ ID NO: 38892 - protein, 9 aa, Homo sapiens
  Table A; Target 38892; HLA-C*07:04; MAGEA3; ENSG00000221867; CTA
MEVDPIGHL

SEQ ID NO: 38893 - protein, 9 aa, Homo sapiens
  Table A; Target 38893; HLA-C*07:06; MAGEA3; ENSG00000221867; CTA
MEVDPIGHL

SEQ ID NO: 38894 - protein, 9 aa, Homo sapiens
  Table A; Target 38894; HLA-C*16:04; MAGEA3; ENSG00000221867; CTA
MEVDPIGHL

SEQ ID NO: 38895 - protein, 10 aa, Homo sapiens
  Table A; Target 38895; HLA-A*01:01; MAGEA3; ENSG00000221867; CTA
MEVDPIGHLY

SEQ ID NO: 38896 - protein, 10 aa, Homo sapiens
  Table A; Target 38896; HLA-A*23:01; MAGEA3; ENSG00000221867; CTA
MEVDPIGHLY

SEQ ID NO: 38897 - protein, 10 aa, Homo sapiens
  Table A; Target 38897; HLA-A*25:01; MAGEA3; ENSG00000221867; CTA
MEVDPIGHLY

SEQ ID NO: 38898 - protein, 10 aa, Homo sapiens
  Table A; Target 38898; HLA-A*26:01; MAGEA3; ENSG00000221867; CTA
MEVDPIGHLY

SEQ ID NO: 38899 - protein, 10 aa, Homo sapiens
  Table A; Target 38899; HLA-A*29:02; MAGEA3; ENSG00000221867; CTA
MEVDPIGHLY

SEQ ID NO: 38900 - protein, 10 aa, Homo sapiens
  Table A; Target 38900; HLA-A*30:01; MAGEA3; ENSG00000221867; CTA
MEVDPIGHLY

SEQ ID NO: 38901 - protein, 10 aa, Homo sapiens
  Table A; Target 38901; HLA-A*30:02; MAGEA3; ENSG00000221867; CTA
MEVDPIGHLY

SEQ ID NO: 38902 - protein, 10 aa, Homo sapiens
  Table A; Target 38902; HLA-A*32:01; MAGEA3; ENSG00000221867; CTA
MEVDPIGHLY

SEQ ID NO: 38903 - protein, 10 aa, Homo sapiens
  Table A; Target 38903; HLA-A*33:03; MAGEA3; ENSG00000221867; CTA
MEVDPIGHLY

SEQ ID NO: 38904 - protein, 10 aa, Homo sapiens
  Table A; Target 38904; HLA-B*15:01; MAGEA3; ENSG00000221867; CTA
MEVDPIGHLY

SEQ ID NO: 38905 - protein, 10 aa, Homo sapiens
  Table A; Target 38905; HLA-B*15:03; MAGEA3; ENSG00000221867; CTA
MEVDPIGHLY

SEQ ID NO: 38906 - protein, 10 aa, Homo sapiens
  Table A; Target 38906; HLA-B*18:01; MAGEA3; ENSG00000221867; CTA
MEVDPIGHLY

SEQ ID NO: 38907 - protein, 10 aa, Homo sapiens
  Table A; Target 38907; HLA-B*27:02; MAGEA3; ENSG00000221867; CTA
MEVDPIGHLY

SEQ ID NO: 38908 - protein, 10 aa, Homo sapiens
  Table A; Target 38908; HLA-B*27:05; MAGEA3; ENSG00000221867; CTA
MEVDPIGHLY

SEQ ID NO: 38909 - protein, 10 aa, Homo sapiens
  Table A; Target 38909; HLA-B*35:01; MAGEA3; ENSG00000221867; CTA
MEVDPIGHLY

SEQ ID NO: 38910 - protein, 10 aa, Homo sapiens
  Table A; Target 38910; HLA-B*37:01; MAGEA3; ENSG00000221867; CTA
MEVDPIGHLY

SEQ ID NO: 38911 - protein, 10 aa, Homo sapiens
  Table A; Target 38911; HLA-B*40:01; MAGEA3; ENSG00000221867; CTA
MEVDPIGHLY

SEQ ID NO: 38912 - protein, 10 aa, Homo sapiens
  Table A; Target 38912; HLA-B*49:01; MAGEA3; ENSG00000221867; CTA
MEVDPIGHLY

SEQ ID NO: 38913 - protein, 10 aa, Homo sapiens
  Table A; Target 38913; HLA-B*57:01; MAGEA3; ENSG00000221867; CTA
MEVDPIGHLY

SEQ ID NO: 38914 - protein, 10 aa, Homo sapiens
  Table A; Target 38914; HLA-C*02:02; MAGEA3; ENSG00000221867; CTA
MEVDPIGHLY

SEQ ID NO: 38915 - protein, 10 aa, Homo sapiens
  Table A; Target 38915; HLA-C*07:01; MAGEA3; ENSG00000221867; CTA
MEVDPIGHLY

SEQ ID NO: 38916 - protein, 10 aa, Homo sapiens
  Table A; Target 38916; HLA-C*07:04; MAGEA3; ENSG00000221867; CTA
MEVDPIGHLY

SEQ ID NO: 38917 - protein, 10 aa, Homo sapiens
  Table A; Target 38917; HLA-C*07:06; MAGEA3; ENSG00000221867; CTA
MEVDPIGHLY

SEQ ID NO: 38918 - protein, 10 aa, Homo sapiens
  Table A; Target 38918; HLA-C*12:03; MAGEA3; ENSG00000221867; CTA
MEVDPIGHLY

SEQ ID NO: 38919 - protein, 10 aa, Homo sapiens
  Table A; Target 38919; HLA-C*16:01; MAGEA3; ENSG00000221867; CTA
MEVDPIGHLY

SEQ ID NO: 38920 - protein, 10 aa, Homo sapiens
  Table A; Target 38920; HLA-C*16:02; MAGEA3; ENSG00000221867; CTA
MEVDPIGHLY

SEQ ID NO: 38921 - protein, 10 aa, Homo sapiens
  Table A; Target 38921; HLA-C*16:04; MAGEA3; ENSG00000221867; CTA
MEVDPIGHLY

SEQ ID NO: 38922 - protein, 11 aa, Homo sapiens
  Table A; Target 38922; HLA-A*30:01; MAGEA3; ENSG00000221867; CTA
MEVDPIGHLYI

SEQ ID NO: 38923 - protein, 11 aa, Homo sapiens
  Table A; Target 38923; HLA-A*68:02; MAGEA3; ENSG00000221867; CTA
MEVDPIGHLYI

SEQ ID NO: 38924 - protein, 11 aa, Homo sapiens
  Table A; Target 38924; HLA-B*44:02; MAGEA3; ENSG00000221867; CTA
MEVDPIGHLYI

SEQ ID NO: 38925 - protein, 11 aa, Homo sapiens
  Table A; Target 38925; HLA-B*44:03; MAGEA3; ENSG00000221867; CTA
MEVDPIGHLYI

SEQ ID NO: 38926 - protein, 11 aa, Homo sapiens
  Table A; Target 38926; HLA-B*49:01; MAGEA3; ENSG00000221867; CTA
MEVDPIGHLYI

SEQ ID NO: 38927 - protein, 8 aa, Homo sapiens
  Table A; Target 38927; HLA-B*51:01; MAGEA3; ENSG00000221867; CTA
MPKAGLLI

SEQ ID NO: 38928 - protein, 9 aa, Homo sapiens
  Table A; Target 38928; HLA-B*07:02; MAGEA3; ENSG00000221867; CTA
MPKAGLLII

SEQ ID NO: 38929 - protein, 9 aa, Homo sapiens
  Table A; Target 38929; HLA-B*35:03; MAGEA3; ENSG00000221867; CTA
MPKAGLLII

SEQ ID NO: 38930 - protein, 9 aa, Homo sapiens
  Table A; Target 38930; HLA-B*51:01; MAGEA3; ENSG00000221867; CTA
MPKAGLLII

SEQ ID NO: 38931 - protein, 9 aa, Homo sapiens
  Table A; Target 38931; HLA-B*54:01; MAGEA3; ENSG00000221867; CTA
MPKAGLLII

SEQ ID NO: 38932 - protein, 9 aa, Homo sapiens
  Table A; Target 38932; HLA-B*56:01; MAGEA3; ENSG00000221867; CTA
MPKAGLLII

SEQ ID NO: 38933 - protein, 9 aa, Homo sapiens
  Table A; Target 38933; HLA-C*07:02; MAGEA3; ENSG00000221867; CTA
MPKAGLLII

SEQ ID NO: 38934 - protein, 10 aa, Homo sapiens
  Table A; Target 38934; HLA-B*54:01; MAGEA3; ENSG00000221867; CTA
MPKAGLLIIV

SEQ ID NO: 38935 - protein, 10 aa, Homo sapiens
  Table A; Target 38935; HLA-B*56:01; MAGEA3; ENSG00000221867; CTA
MPKAGLLIIV

SEQ ID NO: 38936 - protein, 11 aa, Homo sapiens
  Table A; Target 38936; HLA-B*54:01; MAGEA3; ENSG00000221867; CTA
MPKAGLLIIVL

SEQ ID NO: 38937 - protein, 9 aa, Homo sapiens
  Table A; Target 38937; HLA-C*04:01; MAGEA3; ENSG00000221867; CTA
MVKISGGPH

SEQ ID NO: 38938 - protein, 9 aa, Homo sapiens
  Table A; Target 38938; HLA-B*08:01; MAGEA3; ENSG00000221867; CTA
NQIMPKAGL

SEQ ID NO: 38939 - protein, 9 aa, Homo sapiens
  Table A; Target 38939; HLA-B*15:01; MAGEA3; ENSG00000221867; CTA
NQIMPKAGL

SEQ ID NO: 38940 - protein, 9 aa, Homo sapiens
  Table A; Target 38940; HLA-B*15:03; MAGEA3; ENSG00000221867; CTA
NQIMPKAGL

SEQ ID NO: 38941 - protein, 9 aa, Homo sapiens
  Table A; Target 38941; HLA-B*38:01; MAGEA3; ENSG00000221867; CTA
NQIMPKAGL

SEQ ID NO: 38942 - protein, 9 aa, Homo sapiens
  Table A; Target 38942; HLA-B*39:01; MAGEA3; ENSG00000221867; CTA
NQIMPKAGL

SEQ ID NO: 38943 - protein, 9 aa, Homo sapiens
  Table A; Target 38943; HLA-C*14:02; MAGEA3; ENSG00000221867; CTA
NQIMPKAGL

SEQ ID NO: 38944 - protein, 9 aa, Homo sapiens
  Table A; Target 38944; HLA-B*27:02; MAGEA3; ENSG00000221867; CTA
PRALVETSY

SEQ ID NO: 38945 - protein, 9 aa, Homo sapiens
  Table A; Target 38945; HLA-C*07:01; MAGEA3; ENSG00000221867; CTA
PRALVETSY

SEQ ID NO: 38946 - protein, 9 aa, Homo sapiens
  Table A; Target 38946; HLA-C*07:02; MAGEA3; ENSG00000221867; CTA
PRALVETSY

SEQ ID NO: 38947 - protein, 9 aa, Homo sapiens
  Table A; Target 38947; HLA-C*16:04; MAGEA3; ENSG00000221867; CTA
PRALVETSY

SEQ ID NO: 38948 - protein, 9 aa, Homo sapiens
  Table A; Target 38948; HLA-B*39:01; MAGEA3; ENSG00000221867; CTA
QHFVQENYL

SEQ ID NO: 38949 - protein, 8 aa, Homo sapiens
  Table A; Target 38949; HLA-B*08:01; MAGEA3; ENSG00000221867; CTA
QIMPKAGL

SEQ ID NO: 38950 - protein, 9 aa, Homo sapiens
  Table A; Target 38950; HLA-B*08:01; MAGEA3; ENSG00000221867; CTA
QIMPKAGLL

SEQ ID NO: 38951 - protein, 8 aa, Homo sapiens
  Table A; Target 38951; HLA-B*15:01; MAGEA3; ENSG00000221867; CTA
RALVETSY

SEQ ID NO: 38952 - protein, 8 aa, Homo sapiens
  Table A; Target 38952; HLA-B*15:03; MAGEA3; ENSG00000221867; CTA
RALVETSY

SEQ ID NO: 38953 - protein, 8 aa, Homo sapiens
  Table A; Target 38953; HLA-B*46:01; MAGEA3; ENSG00000221867; CTA
RALVETSY

SEQ ID NO: 38954 - protein, 10 aa, Homo sapiens
  Table A; Target 38954; HLA-B*27:02; MAGEA3; ENSG00000221867; CTA
RALVETSYVK

SEQ ID NO: 38955 - protein, 8 aa, Homo sapiens
  Table A; Target 38955; HLA-A*30:02; MAGEA3; ENSG00000221867; CTA
SGGPHISY

SEQ ID NO: 38956 - protein, 8 aa, Homo sapiens
  Table A; Target 38956; HLA-A*32:01; MAGEA3; ENSG00000221867; CTA
SGGPHISY

SEQ ID NO: 38957 - protein, 8 aa, Homo sapiens
  Table A; Target 38957; HLA-B*15:01; MAGEA3; ENSG00000221867; CTA
SGGPHISY

SEQ ID NO: 38958 - protein, 8 aa, Homo sapiens
  Table A; Target 38958; HLA-B*15:03; MAGEA3; ENSG00000221867; CTA
SGGPHISY

SEQ ID NO: 38959 - protein, 8 aa, Homo sapiens
  Table A; Target 38959; HLA-B*46:01; MAGEA3; ENSG00000221867; CTA
SGGPHISY

SEQ ID NO: 38960 - protein, 8 aa, Homo sapiens
  Table A; Target 38960; HLA-B*58:01; MAGEA3; ENSG00000221867; CTA
SGGPHISY

SEQ ID NO: 38961 - protein, 8 aa, Homo sapiens
  Table A; Target 38961; HLA-C*02:02; MAGEA3; ENSG00000221867; CTA
SGGPHISY

SEQ ID NO: 38962 - protein, 8 aa, Homo sapiens
  Table A; Target 38962; HLA-C*07:01; MAGEA3; ENSG00000221867; CTA
SGGPHISY

SEQ ID NO: 38963 - protein, 8 aa, Homo sapiens
  Table A; Target 38963; HLA-C*07:04; MAGEA3; ENSG00000221867; CTA
SGGPHISY

SEQ ID NO: 38964 - protein, 8 aa, Homo sapiens
  Table A; Target 38964; HLA-C*12:03; MAGEA3; ENSG00000221867; CTA
SGGPHISY

SEQ ID NO: 38965 - protein, 8 aa, Homo sapiens
  Table A; Target 38965; HLA-C*14:02; MAGEA3; ENSG00000221867; CTA
SGGPHISY

SEQ ID NO: 38966 - protein, 8 aa, Homo sapiens
  Table A; Target 38966; HLA-C*16:01; MAGEA3; ENSG00000221867; CTA
SGGPHISY

SEQ ID NO: 38967 - protein, 8 aa, Homo sapiens
  Table A; Target 38967; HLA-C*16:02; MAGEA3; ENSG00000221867; CTA
SGGPHISY

SEQ ID NO: 38968 - protein, 9 aa, Homo sapiens
  Table A; Target 38968; HLA-B*15:03; MAGEA3; ENSG00000221867; CTA
SKASSSLQL

SEQ ID NO: 38969 - protein, 11 aa, Homo sapiens
  Table A; Target 38969; HLA-B*15:03; MAGEA3; ENSG00000221867; CTA
SKASSSLQLVF

SEQ ID NO: 38970 - protein, 9 aa, Homo sapiens
  Table A; Target 38970; HLA-C*04:01; MAGEA3; ENSG00000221867; CTA
SSLPTTMNY

SEQ ID NO: 38971 - protein, 9 aa, Homo sapiens
  Table A; Target 38971; HLA-A*02:01; MAGEA3; ENSG00000221867; CTA
SSLQLVFGI

SEQ ID NO: 38972 - protein, 9 aa, Homo sapiens
  Table A; Target 38972; HLA-A*02:04; MAGEA3; ENSG00000221867; CTA
SSLQLVFGI

SEQ ID NO: 38973 - protein, 9 aa, Homo sapiens
  Table A; Target 38973; HLA-B*13:02; MAGEA3; ENSG00000221867; CTA
SSLQLVFGI

SEQ ID NO: 38974 - protein, 8 aa, Homo sapiens
  Table A; Target 38974; HLA-B*37:01; MAGEA3; ENSG00000221867; CTA
SSSLQLVF

SEQ ID NO: 38975 - protein, 8 aa, Homo sapiens
  Table A; Target 38975; HLA-B*58:01; MAGEA3; ENSG00000221867; CTA
SSSLQLVF

SEQ ID NO: 38976 - protein, 8 aa, Homo sapiens
  Table A; Target 38976; HLA-C*16:01; MAGEA3; ENSG00000221867; CTA
SSSLQLVF

SEQ ID NO: 38977 - protein, 8 aa, Homo sapiens
  Table A; Target 38977; HLA-A*24:02; MAGEA3; ENSG00000221867; CTA
SYPPLHEW

SEQ ID NO: 38978 - protein, 10 aa, Homo sapiens
  Table A; Target 38978; HLA-A*24:02; MAGEA3; ENSG00000221867; CTA
SYPPLHEWVL

SEQ ID NO: 38979 - protein, 9 aa, Homo sapiens
  Table A; Target 38979; HLA-A*31:01; MAGEA3; ENSG00000221867; CTA
SYVKVLHHM

SEQ ID NO: 38980 - protein, 8 aa, Homo sapiens
  Table A; Target 38980; HLA-C*07:04; MAGEA3; ENSG00000221867; CTA
TQHFVQEN

SEQ ID NO: 38981 - protein, 9 aa, Homo sapiens
  Table A; Target 38981; HLA-A*29:02; MAGEA3; ENSG00000221867; CTA
TQHFVQENY

SEQ ID NO: 38982 - protein, 9 aa, Homo sapiens
  Table A; Target 38982; HLA-A*32:01; MAGEA3; ENSG00000221867; CTA
TQHFVQENY

SEQ ID NO: 38983 - protein, 9 aa, Homo sapiens
  Table A; Target 38983; HLA-B*13:02; MAGEA3; ENSG00000221867; CTA
TQHFVQENY

SEQ ID NO: 38984 - protein, 9 aa, Homo sapiens
  Table A; Target 38984; HLA-B*15:03; MAGEA3; ENSG00000221867; CTA
TQHFVQENY

SEQ ID NO: 38985 - protein, 9 aa, Homo sapiens
  Table A; Target 38985; HLA-B*18:01; MAGEA3; ENSG00000221867; CTA
TQHFVQENY

SEQ ID NO: 38986 - protein, 9 aa, Homo sapiens
  Table A; Target 38986; HLA-B*27:02; MAGEA3; ENSG00000221867; CTA
TQHFVQENY

SEQ ID NO: 38987 - protein, 9 aa, Homo sapiens
  Table A; Target 38987; HLA-B*27:05; MAGEA3; ENSG00000221867; CTA
TQHFVQENY

SEQ ID NO: 38988 - protein, 9 aa, Homo sapiens
  Table A; Target 38988; HLA-B*35:01; MAGEA3; ENSG00000221867; CTA
TQHFVQENY

SEQ ID NO: 38989 - protein, 9 aa, Homo sapiens
  Table A; Target 38989; HLA-B*39:01; MAGEA3; ENSG00000221867; CTA
TQHFVQENY

SEQ ID NO: 38990 - protein, 9 aa, Homo sapiens
  Table A; Target 38990; HLA-B*44:02; MAGEA3; ENSG00000221867; CTA
TQHFVQENY

SEQ ID NO: 38991 - protein, 9 aa, Homo sapiens
  Table A; Target 38991; HLA-B*44:03; MAGEA3; ENSG00000221867; CTA
TQHFVQENY

SEQ ID NO: 38992 - protein, 9 aa, Homo sapiens
  Table A; Target 38992; HLA-B*46:01; MAGEA3; ENSG00000221867; CTA
TQHFVQENY

SEQ ID NO: 38993 - protein, 9 aa, Homo sapiens
  Table A; Target 38993; HLA-C*02:02; MAGEA3; ENSG00000221867; CTA
TQHFVQENY

SEQ ID NO: 38994 - protein, 9 aa, Homo sapiens
  Table A; Target 38994; HLA-C*04:01; MAGEA3; ENSG00000221867; CTA
TQHFVQENY

SEQ ID NO: 38995 - protein, 9 aa, Homo sapiens
  Table A; Target 38995; HLA-C*07:01; MAGEA3; ENSG00000221867; CTA
TQHFVQENY

SEQ ID NO: 38996 - protein, 9 aa, Homo sapiens
  Table A; Target 38996; HLA-C*07:04; MAGEA3; ENSG00000221867; CTA
TQHFVQENY

SEQ ID NO: 38997 - protein, 9 aa, Homo sapiens
  Table A; Target 38997; HLA-C*16:01; MAGEA3; ENSG00000221867; CTA
TQHFVQENY

SEQ ID NO: 38998 - protein, 9 aa, Homo sapiens
  Table A; Target 38998; HLA-C*16:04; MAGEA3; ENSG00000221867; CTA
TQHFVQENY

SEQ ID NO: 38999 - protein, 10 aa, Homo sapiens
  Table A; Target 38999; HLA-B*38:01; MAGEA3; ENSG00000221867; CTA
TQHFVQENYL

SEQ ID NO: 39000 - protein, 10 aa, Homo sapiens
  Table A; Target 39000; HLA-B*39:01; MAGEA3; ENSG00000221867; CTA
TQHFVQENYL

SEQ ID NO: 39001 - protein, 8 aa, Homo sapiens
  Table A; Target 39001; HLA-B*15:03; MAGEA3; ENSG00000221867; CTA
VDPIGHLY

SEQ ID NO: 39002 - protein, 8 aa, Homo sapiens
  Table A; Target 39002; HLA-B*18:01; MAGEA3; ENSG00000221867; CTA
VDPIGHLY

SEQ ID NO: 39003 - protein, 8 aa, Homo sapiens
  Table A; Target 39003; HLA-B*37:01; MAGEA3; ENSG00000221867; CTA
VDPIGHLY

SEQ ID NO: 39004 - protein, 8 aa, Homo sapiens
  Table A; Target 39004; HLA-C*01:02; MAGEA3; ENSG00000221867; CTA
VDPIGHLY

SEQ ID NO: 39005 - protein, 8 aa, Homo sapiens
  Table A; Target 39005; HLA-C*04:01; MAGEA3; ENSG00000221867; CTA
VDPIGHLY

SEQ ID NO: 39006 - protein, 8 aa, Homo sapiens
  Table A; Target 39006; HLA-C*06:02; MAGEA3; ENSG00000221867; CTA
VDPIGHLY

SEQ ID NO: 39007 - protein, 8 aa, Homo sapiens
  Table A; Target 39007; HLA-C*07:01; MAGEA3; ENSG00000221867; CTA
VDPIGHLY

SEQ ID NO: 39008 - protein, 8 aa, Homo sapiens
  Table A; Target 39008; HLA-C*07:04; MAGEA3; ENSG00000221867; CTA
VDPIGHLY

SEQ ID NO: 39009 - protein, 8 aa, Homo sapiens
  Table A; Target 39009; HLA-C*12:03; MAGEA3; ENSG00000221867; CTA
VDPIGHLY

SEQ ID NO: 39010 - protein, 10 aa, Homo sapiens
  Table A; Target 39010; HLA-A*24:02; MAGEA3; ENSG00000221867; CTA
VDPIGHLYIF

SEQ ID NO: 39011 - protein, 8 aa, Homo sapiens
  Table A; Target 39011; HLA-A*30:01; MAGEA3; ENSG00000221867; CTA
VETSYVKV

SEQ ID NO: 39012 - protein, 8 aa, Homo sapiens
  Table A; Target 39012; HLA-B*18:01; MAGEA3; ENSG00000221867; CTA
VETSYVKV

SEQ ID NO: 39013 - protein, 8 aa, Homo sapiens
  Table A; Target 39013; HLA-B*37:01; MAGEA3; ENSG00000221867; CTA
VETSYVKV

SEQ ID NO: 39014 - protein, 8 aa, Homo sapiens
  Table A; Target 39014; HLA-B*40:02; MAGEA3; ENSG00000221867; CTA
VETSYVKV

SEQ ID NO: 39015 - protein, 8 aa, Homo sapiens
  Table A; Target 39015; HLA-C*16:02; MAGEA3; ENSG00000221867; CTA
VETSYVKV

SEQ ID NO: 39016 - protein, 9 aa, Homo sapiens
  Table A; Target 39016; HLA-B*18:01; MAGEA3; ENSG00000221867; CTA
VETSYVKVL

SEQ ID NO: 39017 - protein, 9 aa, Homo sapiens
  Table A; Target 39017; HLA-B*27:02; MAGEA3; ENSG00000221867; CTA
VETSYVKVL

SEQ ID NO: 39018 - protein, 9 aa, Homo sapiens
  Table A; Target 39018; HLA-B*27:05; MAGEA3; ENSG00000221867; CTA
VETSYVKVL

SEQ ID NO: 39019 - protein, 9 aa, Homo sapiens
  Table A; Target 39019; HLA-B*37:01; MAGEA3; ENSG00000221867; CTA
VETSYVKVL

SEQ ID NO: 39020 - protein, 9 aa, Homo sapiens
  Table A; Target 39020; HLA-B*40:02; MAGEA3; ENSG00000221867; CTA
VETSYVKVL

SEQ ID NO: 39021 - protein, 9 aa, Homo sapiens
  Table A; Target 39021; HLA-B*44:02; MAGEA3; ENSG00000221867; CTA
VETSYVKVL

SEQ ID NO: 39022 - protein, 9 aa, Homo sapiens
  Table A; Target 39022; HLA-B*49:01; MAGEA3; ENSG00000221867; CTA
VETSYVKVL

SEQ ID NO: 39023 - protein, 9 aa, Homo sapiens
  Table A; Target 39023; HLA-C*02:02; MAGEA3; ENSG00000221867; CTA
VETSYVKVL

SEQ ID NO: 39024 - protein, 9 aa, Homo sapiens
  Table A; Target 39024; HLA-C*06:02; MAGEA3; ENSG00000221867; CTA
VETSYVKVL

SEQ ID NO: 39025 - protein, 9 aa, Homo sapiens
  Table A; Target 39025; HLA-C*07:01; MAGEA3; ENSG00000221867; CTA
VETSYVKVL

SEQ ID NO: 39026 - protein, 9 aa, Homo sapiens
  Table A; Target 39026; HLA-C*07:04; MAGEA3; ENSG00000221867; CTA
VETSYVKVL

SEQ ID NO: 39027 - protein, 9 aa, Homo sapiens
  Table A; Target 39027; HLA-C*16:01; MAGEA3; ENSG00000221867; CTA
VETSYVKVL

SEQ ID NO: 39028 - protein, 9 aa, Homo sapiens
  Table A; Target 39028; HLA-C*16:02; MAGEA3; ENSG00000221867; CTA
VETSYVKVL

SEQ ID NO: 39029 - protein, 9 aa, Homo sapiens
  Table A; Target 39029; HLA-C*16:04; MAGEA3; ENSG00000221867; CTA
VETSYVKVL

SEQ ID NO: 39030 - protein, 10 aa, Homo sapiens
  Table A; Target 39030; HLA-C*04:01; MAGEA3; ENSG00000221867; CTA
VETSYVKVLH

SEQ ID NO: 39031 - protein, 10 aa, Homo sapiens
  Table A; Target 39031; HLA-B*40:01; MAGEA3; ENSG00000221867; CTA
VEVTLGEVPA

SEQ ID NO: 39032 - protein, 10 aa, Homo sapiens
  Table A; Target 39032; HLA-B*07:02; MAGEA3; ENSG00000221867; CTA
VIFSKASSSL

SEQ ID NO: 39033 - protein, 10 aa, Homo sapiens
  Table A; Target 39033; HLA-B*46:01; MAGEA3; ENSG00000221867; CTA
VIFSKASSSL

SEQ ID NO: 39034 - protein, 10 aa, Homo sapiens
  Table A; Target 39034; HLA-C*01:02; MAGEA3; ENSG00000221867; CTA
VIFSKASSSL

SEQ ID NO: 39035 - protein, 9 aa, Homo sapiens
  Table A; Target 39035; HLA-B*15:03; MAGEA3; ENSG00000221867; CTA
VKISGGPHI

SEQ ID NO: 39036 - protein, 9 aa, Homo sapiens
  Table A; Target 39036; HLA-B*38:01; MAGEA3; ENSG00000221867; CTA
VKISGGPHI

SEQ ID NO: 39037 - protein, 11 aa, Homo sapiens
  Table A; Target 39037; HLA-B*15:03; MAGEA3; ENSG00000221867; CTA
VKISGGPHISY

SEQ ID NO: 39038 - protein, 11 aa, Homo sapiens
  Table A; Target 39038; HLA-C*12:03; MAGEA3; ENSG00000221867; CTA
VKISGGPHISY

SEQ ID NO: 39039 - protein, 9 aa, Homo sapiens
  Table A; Target 39039; HLA-A*68:02; MAGEA3; ENSG00000221867; CTA
YIFATCLGL

SEQ ID NO: 39040 - protein, 8 aa, Homo sapiens
  Table A; Target 39040; HLA-B*51:01; MAGEA3; ENSG00000221867; CTA
YPPLHEWV

SEQ ID NO: 39041 - protein, 9 aa, Homo sapiens
  Table A; Target 39041; HLA-A*24:02; MAGEA3; ENSG00000221867; CTA
YPPLHEWVL

SEQ ID NO: 39042 - protein, 9 aa, Homo sapiens
  Table A; Target 39042; HLA-B*35:01; MAGEA3; ENSG00000221867; CTA
YPPLHEWVL

SEQ ID NO: 39043 - protein, 9 aa, Homo sapiens
  Table A; Target 39043; HLA-B*35:03; MAGEA3; ENSG00000221867; CTA
YPPLHEWVL

SEQ ID NO: 39044 - protein, 9 aa, Homo sapiens
  Table A; Target 39044; HLA-B*51:01; MAGEA3; ENSG00000221867; CTA
YPPLHEWVL

SEQ ID NO: 39045 - protein, 9 aa, Homo sapiens
  Table A; Target 39045; HLA-B*54:01; MAGEA3; ENSG00000221867; CTA
YPPLHEWVL

SEQ ID NO: 39046 - protein, 8 aa, Homo sapiens
  Table A; Target 39046; HLA-C*12:03; MAGEA3,MAGEA4; ENSG00000221867,ENSG00000147381; CTA,TAA
ALGLVGAQ

SEQ ID NO: 39047 - protein, 8 aa, Homo sapiens
  Table A; Target 39047; HLA-B*08:01; MAGEA3,MAGEA4; ENSG00000221867,ENSG00000147381; CTA,TAA
ETSYVKVL

SEQ ID NO: 39048 - protein, 9 aa, Homo sapiens
  Table A; Target 39048; HLA-B*55:01; MAGEA3,MAGEA4,MAGEA6; ENSG00000221867,ENSG00000147381,ENSG00000197172; CTA,TAA,CTA
ALGLVGAQA

SEQ ID NO: 39049 - protein, 10 aa, Homo sapiens
  Table A; Target 39049; HLA-C*06:02; MAGEA3,MAGEA4,MAGEA6; ENSG00000221867,ENSG00000147381,ENSG00000197172; CTA,TAA,CTA
ALGLVGAQAP

SEQ ID NO: 39050 - protein, 9 aa, Homo sapiens
  Table A; Target 39050; HLA-B*27:05; MAGEA3,MAGEA4,MAGEA6; ENSG00000221867,ENSG00000147381,ENSG00000197172; CTA,TAA,CTA
EALGLVGAQ

SEQ ID NO: 39051 - protein, 9 aa, Homo sapiens
  Table A; Target 39051; HLA-C*06:02; MAGEA3,MAGEA4,MAGEA6; ENSG00000221867,ENSG00000147381,ENSG00000197172; CTA,TAA,CTA
EALGLVGAQ

SEQ ID NO: 39052 - protein, 9 aa, Homo sapiens
  Table A; Target 39052; HLA-C*07:06; MAGEA3,MAGEA4,MAGEA6; ENSG00000221867,ENSG00000147381,ENSG00000197172; CTA,TAA,CTA
EALGLVGAQ

SEQ ID NO: 39053 - protein, 10 aa, Homo sapiens
  Table A; Target 39053; HLA-B*49:01; MAGEA3,MAGEA4,MAGEA6; ENSG00000221867,ENSG00000147381,ENSG00000197172; CTA,TAA,CTA
QENYLEYRQV

SEQ ID NO: 39054 - protein, 8 aa, Homo sapiens
  Table A; Target 39054; HLA-B*46:01; MAGEA3,MAGEA4,MAGEA6; ENSG00000221867,ENSG00000147381,ENSG00000197172; CTA,TAA,CTA
VQENYLEY

SEQ ID NO: 39055 - protein, 8 aa, Homo sapiens
  Table A; Target 39055; HLA-C*04:01; MAGEA3,MAGEA4,MAGEA6; ENSG00000221867,ENSG00000147381,ENSG00000197172; CTA,TAA,CTA
VQENYLEY

SEQ ID NO: 39056 - protein, 8 aa, Homo sapiens
  Table A; Target 39056; HLA-C*05:01; MAGEA3,MAGEA4,MAGEA6; ENSG00000221867,ENSG00000147381,ENSG00000197172; CTA,TAA,CTA
VQENYLEY

SEQ ID NO: 39057 - protein, 8 aa, Homo sapiens
  Table A; Target 39057; HLA-B*27:05; MAGEA3,MAGEA4,MAGEA6,MAGEA8; ENSG00000221867,ENSG00000147381,ENSG00000197172,ENSG00000156009; CTA,TAA,CTA,TAA
VQENYLEY

SEQ ID NO: 39058 - protein, 8 aa, Homo sapiens
  Table A; Target 39058; HLA-C*07:04; MAGEA3,MAGEA4,MAGEA6,MAGEA8; ENSG00000221867,ENSG00000147381,ENSG00000197172,ENSG00000156009; CTA,TAA,CTA,TAA
VQENYLEY

SEQ ID NO: 39059 - protein, 8 aa, Homo sapiens
  Table A; Target 39059; HLA-C*14:02; MAGEA3,MAGEA4,MAGEA6,MAGEA8; ENSG00000221867,ENSG00000147381,ENSG00000197172,ENSG00000156009; CTA,TAA,CTA,TAA
VQENYLEY

SEQ ID NO: 39060 - protein, 9 aa, Homo sapiens
  Table A; Target 39060; HLA-A*31:01; MAGEA3,MAGEA4,MAGEA6,MAGEA8; ENSG00000221867,ENSG00000147381,ENSG00000197172,ENSG00000156009; CTA,TAA,CTA,TAA
VQENYLEYR

SEQ ID NO: 39061 - protein, 8 aa, Homo sapiens
  Table A; Target 39061; HLA-C*01:02; MAGEA3,MAGEA6; ENSG00000221867,ENSG00000197172; CTA,CTA
AASSSSTL

SEQ ID NO: 39062 - protein, 9 aa, Homo sapiens
  Table A; Target 39062; HLA-B*13:02; MAGEA3,MAGEA6; ENSG00000221867,ENSG00000197172; CTA,CTA
AASSSSTLV

SEQ ID NO: 39063 - protein, 9 aa, Homo sapiens
  Table A; Target 39063; HLA-C*02:02; MAGEA3,MAGEA6; ENSG00000221867,ENSG00000197172; CTA,CTA
AASSSSTLV

SEQ ID NO: 39064 - protein, 9 aa, Homo sapiens
  Table A; Target 39064; HLA-C*12:03; MAGEA3,MAGEA6; ENSG00000221867,ENSG00000197172; CTA,CTA
AASSSSTLV

SEQ ID NO: 39065 - protein, 9 aa, Homo sapiens
  Table A; Target 39065; HLA-C*16:02; MAGEA3,MAGEA6; ENSG00000221867,ENSG00000197172; CTA,CTA
AASSSSTLV

SEQ ID NO: 39066 - protein, 9 aa, Homo sapiens
  Table A; Target 39066; HLA-C*16:04; MAGEA3,MAGEA6; ENSG00000221867,ENSG00000197172; CTA,CTA
AASSSSTLV

SEQ ID NO: 39067 - protein, 8 aa, Homo sapiens
  Table A; Target 39067; HLA-A*30:01; MAGEA3,MAGEA6; ENSG00000221867,ENSG00000197172; CTA,CTA
AEMLGSVV

SEQ ID NO: 39068 - protein, 8 aa, Homo sapiens
  Table A; Target 39068; HLA-B*08:01; MAGEA3,MAGEA6; ENSG00000221867,ENSG00000197172; CTA,CTA
AEMLGSVV

SEQ ID NO: 39069 - protein, 8 aa, Homo sapiens
  Table A; Target 39069; HLA-B*13:02; MAGEA3,MAGEA6; ENSG00000221867,ENSG00000197172; CTA,CTA
AEMLGSVV

SEQ ID NO: 39070 - protein, 8 aa, Homo sapiens
  Table A; Target 39070; HLA-B*18:01; MAGEA3,MAGEA6; ENSG00000221867,ENSG00000197172; CTA,CTA
AEMLGSVV

SEQ ID NO: 39071 - protein, 8 aa, Homo sapiens
  Table A; Target 39071; HLA-B*37:01; MAGEA3,MAGEA6; ENSG00000221867,ENSG00000197172; CTA,CTA
AEMLGSVV

SEQ ID NO: 39072 - protein, 8 aa, Homo sapiens
  Table A; Target 39072; HLA-B*40:01; MAGEA3,MAGEA6; ENSG00000221867,ENSG00000197172; CTA,CTA
AEMLGSVV

SEQ ID NO: 39073 - protein, 8 aa, Homo sapiens
  Table A; Target 39073; HLA-B*40:02; MAGEA3,MAGEA6; ENSG00000221867,ENSG00000197172; CTA,CTA
AEMLGSVV

SEQ ID NO: 39074 - protein, 8 aa, Homo sapiens
  Table A; Target 39074; HLA-B*44:02; MAGEA3,MAGEA6; ENSG00000221867,ENSG00000197172; CTA,CTA
AEMLGSVV

SEQ ID NO: 39075 - protein, 8 aa, Homo sapiens
  Table A; Target 39075; HLA-B*44:03; MAGEA3,MAGEA6; ENSG00000221867,ENSG00000197172; CTA,CTA
AEMLGSVV

SEQ ID NO: 39076 - protein, 9 aa, Homo sapiens
  Table A; Target 39076; HLA-B*40:01; MAGEA3,MAGEA6; ENSG00000221867,ENSG00000197172; CTA,CTA
AEMLGSVVG

SEQ ID NO: 39077 - protein, 9 aa, Homo sapiens
  Table A; Target 39077; HLA-B*40:02; MAGEA3,MAGEA6; ENSG00000221867,ENSG00000197172; CTA,CTA
AEMLGSVVG

SEQ ID NO: 39078 - protein, 9 aa, Homo sapiens
  Table A; Target 39078; HLA-B*49:01; MAGEA3,MAGEA6; ENSG00000221867,ENSG00000197172; CTA,CTA
AEMLGSVVG

SEQ ID NO: 39079 - protein, 10 aa, Homo sapiens
  Table A; Target 39079; HLA-B*44:02; MAGEA3,MAGEA6; ENSG00000221867,ENSG00000197172; CTA,CTA
AEMLGSVVGN

SEQ ID NO: 39080 - protein, 10 aa, Homo sapiens
  Table A; Target 39080; HLA-B*49:01; MAGEA3,MAGEA6; ENSG00000221867,ENSG00000197172; CTA,CTA
AEMLGSVVGN

SEQ ID NO: 39081 - protein, 11 aa, Homo sapiens
  Table A; Target 39081; HLA-A*30:01; MAGEA3,MAGEA6; ENSG00000221867,ENSG00000197172; CTA,CTA
AEMLGSVVGNW

SEQ ID NO: 39082 - protein, 11 aa, Homo sapiens
  Table A; Target 39082; HLA-A*32:01; MAGEA3,MAGEA6; ENSG00000221867,ENSG00000197172; CTA,CTA
AEMLGSVVGNW

SEQ ID NO: 39083 - protein, 11 aa, Homo sapiens
  Table A; Target 39083; HLA-B*27:02; MAGEA3,MAGEA6; ENSG00000221867,ENSG00000197172; CTA,CTA
AEMLGSVVGNW

SEQ ID NO: 39084 - protein, 11 aa, Homo sapiens
  Table A; Target 39084; HLA-B*37:01; MAGEA3,MAGEA6; ENSG00000221867,ENSG00000197172; CTA,CTA
AEMLGSVVGNW

SEQ ID NO: 39085 - protein, 11 aa, Homo sapiens
  Table A; Target 39085; HLA-B*40:01; MAGEA3,MAGEA6; ENSG00000221867,ENSG00000197172; CTA,CTA
AEMLGSVVGNW

SEQ ID NO: 39086 - protein, 11 aa, Homo sapiens
  Table A; Target 39086; HLA-B*49:01; MAGEA3,MAGEA6; ENSG00000221867,ENSG00000197172; CTA,CTA
AEMLGSVVGNW

SEQ ID NO: 39087 - protein, 11 aa, Homo sapiens
  Table A; Target 39087; HLA-B*57:01; MAGEA3,MAGEA6; ENSG00000221867,ENSG00000197172; CTA,CTA
AEMLGSVVGNW

SEQ ID NO: 39088 - protein, 11 aa, Homo sapiens
  Table A; Target 39088; HLA-C*16:04; MAGEA3,MAGEA6; ENSG00000221867,ENSG00000197172; CTA,CTA
AEMLGSVVGNW

SEQ ID NO: 39089 - protein, 10 aa, Homo sapiens
  Table A; Target 39089; HLA-A*30:01; MAGEA3,MAGEA6; ENSG00000221867,ENSG00000197172; CTA,CTA
AESPDPPQSP

SEQ ID NO: 39090 - protein, 10 aa, Homo sapiens
  Table A; Target 39090; HLA-B*40:02; MAGEA3,MAGEA6; ENSG00000221867,ENSG00000197172; CTA,CTA
AESPDPPQSP

SEQ ID NO: 39091 - protein, 10 aa, Homo sapiens
  Table A; Target 39091; HLA-B*44:02; MAGEA3,MAGEA6; ENSG00000221867,ENSG00000197172; CTA,CTA
AESPDPPQSP

SEQ ID NO: 39092 - protein, 10 aa, Homo sapiens
  Table A; Target 39092; HLA-B*49:01; MAGEA3,MAGEA6; ENSG00000221867,ENSG00000197172; CTA,CTA
AESPDPPQSP

SEQ ID NO: 39093 - protein, 9 aa, Homo sapiens
  Table A; Target 39093; HLA-A*02:01; MAGEA3,MAGEA6; ENSG00000221867,ENSG00000197172; CTA,CTA
ALGLVGAQA

SEQ ID NO: 39094 - protein, 9 aa, Homo sapiens
  Table A; Target 39094; HLA-A*02:03; MAGEA3,MAGEA6; ENSG00000221867,ENSG00000197172; CTA,CTA
ALGLVGAQA

SEQ ID NO: 39095 - protein, 9 aa, Homo sapiens
  Table A; Target 39095; HLA-B*56:01; MAGEA3,MAGEA6; ENSG00000221867,ENSG00000197172; CTA,CTA
ALGLVGAQA

SEQ ID NO: 39096 - protein, 11 aa, Homo sapiens
  Table A; Target 39096; HLA-B*56:01; MAGEA3,MAGEA6; ENSG00000221867,ENSG00000197172; CTA,CTA
ALGLVGAQAPA

SEQ ID NO: 39097 - protein, 9 aa, Homo sapiens
  Table A; Target 39097; HLA-B*35:03; MAGEA3,MAGEA6; ENSG00000221867,ENSG00000197172; CTA,CTA
APATEEQEA

SEQ ID NO: 39098 - protein, 9 aa, Homo sapiens
  Table A; Target 39098; HLA-B*55:01; MAGEA3,MAGEA6; ENSG00000221867,ENSG00000197172; CTA,CTA
APATEEQEA

SEQ ID NO: 39099 - protein, 9 aa, Homo sapiens
  Table A; Target 39099; HLA-B*56:01; MAGEA3,MAGEA6; ENSG00000221867,ENSG00000197172; CTA,CTA
APATEEQEA

SEQ ID NO: 39100 - protein, 10 aa, Homo sapiens
  Table A; Target 39100; HLA-B*55:01; MAGEA3,MAGEA6; ENSG00000221867,ENSG00000197172; CTA,CTA
APATEEQEAA

SEQ ID NO: 39101 - protein, 10 aa, Homo sapiens
  Table A; Target 39101; HLA-B*56:01; MAGEA3,MAGEA6; ENSG00000221867,ENSG00000197172; CTA,CTA
APATEEQEAA

SEQ ID NO: 39102 - protein, 9 aa, Homo sapiens
  Table A; Target 39102; HLA-B*15:01; MAGEA3,MAGEA6; ENSG00000221867,ENSG00000197172; CTA,CTA
AQAPATEEQ

SEQ ID NO: 39103 - protein, 11 aa, Homo sapiens
  Table A; Target 39103; HLA-B*13:02; MAGEA3,MAGEA6; ENSG00000221867,ENSG00000197172; CTA,CTA
AQAPATEEQEA

SEQ ID NO: 39104 - protein, 11 aa, Homo sapiens
  Table A; Target 39104; HLA-B*27:05; MAGEA3,MAGEA6; ENSG00000221867,ENSG00000197172; CTA,CTA
AQAPATEEQEA

SEQ ID NO: 39105 - protein, 11 aa, Homo sapiens
  Table A; Target 39105; HLA-B*39:01; MAGEA3,MAGEA6; ENSG00000221867,ENSG00000197172; CTA,CTA
AQAPATEEQEA

SEQ ID NO: 39106 - protein, 8 aa, Homo sapiens
  Table A; Target 39106; HLA-B*37:01; MAGEA3,MAGEA6; ENSG00000221867,ENSG00000197172; CTA,CTA
ASSLPTTM

SEQ ID NO: 39107 - protein, 8 aa, Homo sapiens
  Table A; Target 39107; HLA-C*16:01; MAGEA3,MAGEA6; ENSG00000221867,ENSG00000197172; CTA,CTA
ASSLPTTM

SEQ ID NO: 39108 - protein, 10 aa, Homo sapiens
  Table A; Target 39108; HLA-A*01:01; MAGEA3,MAGEA6; ENSG00000221867,ENSG00000197172; CTA,CTA
ASSLPTTMNY

SEQ ID NO: 39109 - protein, 10 aa, Homo sapiens
  Table A; Target 39109; HLA-A*03:01; MAGEA3,MAGEA6; ENSG00000221867,ENSG00000197172; CTA,CTA
ASSLPTTMNY

SEQ ID NO: 39110 - protein, 10 aa, Homo sapiens
  Table A; Target 39110; HLA-A*11:01; MAGEA3,MAGEA6; ENSG00000221867,ENSG00000197172; CTA,CTA
ASSLPTTMNY

SEQ ID NO: 39111 - protein, 10 aa, Homo sapiens
  Table A; Target 39111; HLA-A*29:02; MAGEA3,MAGEA6; ENSG00000221867,ENSG00000197172; CTA,CTA
ASSLPTTMNY

SEQ ID NO: 39112 - protein, 10 aa, Homo sapiens
  Table A; Target 39112; HLA-A*30:02; MAGEA3,MAGEA6; ENSG00000221867,ENSG00000197172; CTA,CTA
ASSLPTTMNY

SEQ ID NO: 39113 - protein, 10 aa, Homo sapiens
  Table A; Target 39113; HLA-A*32:01; MAGEA3,MAGEA6; ENSG00000221867,ENSG00000197172; CTA,CTA
ASSLPTTMNY

SEQ ID NO: 39114 - protein, 10 aa, Homo sapiens
  Table A; Target 39114; HLA-B*15:01; MAGEA3,MAGEA6; ENSG00000221867,ENSG00000197172; CTA,CTA
ASSLPTTMNY

SEQ ID NO: 39115 - protein, 10 aa, Homo sapiens
  Table A; Target 39115; HLA-B*46:01; MAGEA3,MAGEA6; ENSG00000221867,ENSG00000197172; CTA,CTA
ASSLPTTMNY

SEQ ID NO: 39116 - protein, 10 aa, Homo sapiens
  Table A; Target 39116; HLA-B*58:01; MAGEA3,MAGEA6; ENSG00000221867,ENSG00000197172; CTA,CTA
ASSLPTTMNY

SEQ ID NO: 39117 - protein, 10 aa, Homo sapiens
  Table A; Target 39117; HLA-C*02:02; MAGEA3,MAGEA6; ENSG00000221867,ENSG00000197172; CTA,CTA
ASSLPTTMNY

SEQ ID NO: 39118 - protein, 10 aa, Homo sapiens
  Table A; Target 39118; HLA-C*04:01; MAGEA3,MAGEA6; ENSG00000221867,ENSG00000197172; CTA,CTA
ASSLPTTMNY

SEQ ID NO: 39119 - protein, 10 aa, Homo sapiens
  Table A; Target 39119; HLA-C*16:02; MAGEA3,MAGEA6; ENSG00000221867,ENSG00000197172; CTA,CTA
ASSLPTTMNY

SEQ ID NO: 39120 - protein, 10 aa, Homo sapiens
  Table A; Target 39120; HLA-C*16:04; MAGEA3,MAGEA6; ENSG00000221867,ENSG00000197172; CTA,CTA
ASSLPTTMNY

SEQ ID NO: 39121 - protein, 8 aa, Homo sapiens
  Table A; Target 39121; HLA-A*01:01; MAGEA3,MAGEA6; ENSG00000221867,ENSG00000197172; CTA,CTA
ATCLGLSY

SEQ ID NO: 39122 - protein, 8 aa, Homo sapiens
  Table A; Target 39122; HLA-C*07:01; MAGEA3,MAGEA6; ENSG00000221867,ENSG00000197172; CTA,CTA
ATCLGLSY

SEQ ID NO: 39123 - protein, 10 aa, Homo sapiens
  Table A; Target 39123; HLA-B*35:03; MAGEA3,MAGEA6; ENSG00000221867,ENSG00000197172; CTA,CTA
DGLLGDNQIM

SEQ ID NO: 39124 - protein, 9 aa, Homo sapiens
  Table A; Target 39124; HLA-A*25:01; MAGEA3,MAGEA6; ENSG00000221867,ENSG00000197172; CTA,CTA
EAASSSSTL

SEQ ID NO: 39125 - protein, 9 aa, Homo sapiens
  Table A; Target 39125; HLA-A*26:01; MAGEA3,MAGEA6; ENSG00000221867,ENSG00000197172; CTA,CTA
EAASSSSTL

SEQ ID NO: 39126 - protein, 9 aa, Homo sapiens
  Table A; Target 39126; HLA-A*33:03; MAGEA3,MAGEA6; ENSG00000221867,ENSG00000197172; CTA,CTA
EAASSSSTL

SEQ ID NO: 39127 - protein, 9 aa, Homo sapiens
  Table A; Target 39127; HLA-A*68:01; MAGEA3,MAGEA6; ENSG00000221867,ENSG00000197172; CTA,CTA
EAASSSSTL

SEQ ID NO: 39128 - protein, 9 aa, Homo sapiens
  Table A; Target 39128; HLA-B*07:02; MAGEA3,MAGEA6; ENSG00000221867,ENSG00000197172; CTA,CTA
EAASSSSTL

SEQ ID NO: 39129 - protein, 9 aa, Homo sapiens
  Table A; Target 39129; HLA-B*35:01; MAGEA3,MAGEA6; ENSG00000221867,ENSG00000197172; CTA,CTA
EAASSSSTL

SEQ ID NO: 39130 - protein, 9 aa, Homo sapiens
  Table A; Target 39130; HLA-B*35:03; MAGEA3,MAGEA6; ENSG00000221867,ENSG00000197172; CTA,CTA
EAASSSSTL

SEQ ID NO: 39131 - protein, 9 aa, Homo sapiens
  Table A; Target 39131; HLA-B*38:01; MAGEA3,MAGEA6; ENSG00000221867,ENSG00000197172; CTA,CTA
EAASSSSTL

SEQ ID NO: 39132 - protein, 9 aa, Homo sapiens
  Table A; Target 39132; HLA-B*39:01; MAGEA3,MAGEA6; ENSG00000221867,ENSG00000197172; CTA,CTA
EAASSSSTL

SEQ ID NO: 39133 - protein, 9 aa, Homo sapiens
  Table A; Target 39133; HLA-B*51:01; MAGEA3,MAGEA6; ENSG00000221867,ENSG00000197172; CTA,CTA
EAASSSSTL

SEQ ID NO: 39134 - protein, 9 aa, Homo sapiens
  Table A; Target 39134; HLA-C*01:02; MAGEA3,MAGEA6; ENSG00000221867,ENSG00000197172; CTA,CTA
EAASSSSTL

SEQ ID NO: 39135 - protein, 9 aa, Homo sapiens
  Table A; Target 39135; HLA-C*03:03; MAGEA3,MAGEA6; ENSG00000221867,ENSG00000197172; CTA,CTA
EAASSSSTL

SEQ ID NO: 39136 - protein, 9 aa, Homo sapiens
  Table A; Target 39136; HLA-C*03:04; MAGEA3,MAGEA6; ENSG00000221867,ENSG00000197172; CTA,CTA
EAASSSSTL

SEQ ID NO: 39137 - protein, 9 aa, Homo sapiens
  Table A; Target 39137; HLA-C*05:01; MAGEA3,MAGEA6; ENSG00000221867,ENSG00000197172; CTA,CTA
EAASSSSTL

SEQ ID NO: 39138 - protein, 9 aa, Homo sapiens
  Table A; Target 39138; HLA-C*07:02; MAGEA3,MAGEA6; ENSG00000221867,ENSG00000197172; CTA,CTA
EAASSSSTL

SEQ ID NO: 39139 - protein, 9 aa, Homo sapiens
  Table A; Target 39139; HLA-C*07:06; MAGEA3,MAGEA6; ENSG00000221867,ENSG00000197172; CTA,CTA
EAASSSSTL

SEQ ID NO: 39140 - protein, 9 aa, Homo sapiens
  Table A; Target 39140; HLA-C*12:03; MAGEA3,MAGEA6; ENSG00000221867,ENSG00000197172; CTA,CTA
EAASSSSTL

SEQ ID NO: 39141 - protein, 8 aa, Homo sapiens
  Table A; Target 39141; HLA-B*54:01; MAGEA3,MAGEA6; ENSG00000221867,ENSG00000197172; CTA,CTA
EALGLVGA

SEQ ID NO: 39142 - protein, 9 aa, Homo sapiens
  Table A; Target 39142; HLA-A*26:01; MAGEA3,MAGEA6; ENSG00000221867,ENSG00000197172; CTA,CTA
EALGLVGAQ

SEQ ID NO: 39143 - protein, 9 aa, Homo sapiens
  Table A; Target 39143; HLA-A*33:01; MAGEA3,MAGEA6; ENSG00000221867,ENSG00000197172; CTA,CTA
EALGLVGAQ

SEQ ID NO: 39144 - protein, 9 aa, Homo sapiens
  Table A; Target 39144; HLA-A*33:03; MAGEA3,MAGEA6; ENSG00000221867,ENSG00000197172; CTA,CTA
EALGLVGAQ

SEQ ID NO: 39145 - protein, 9 aa, Homo sapiens
  Table A; Target 39145; HLA-C*04:01; MAGEA3,MAGEA6; ENSG00000221867,ENSG00000197172; CTA,CTA
EALGLVGAQ

SEQ ID NO: 39146 - protein, 9 aa, Homo sapiens
  Table A; Target 39146; HLA-C*07:01; MAGEA3,MAGEA6; ENSG00000221867,ENSG00000197172; CTA,CTA
EALGLVGAQ

SEQ ID NO: 39147 - protein, 9 aa, Homo sapiens
  Table A; Target 39147; HLA-C*12:03; MAGEA3,MAGEA6; ENSG00000221867,ENSG00000197172; CTA,CTA
EALGLVGAQ

SEQ ID NO: 39148 - protein, 10 aa, Homo sapiens
  Table A; Target 39148; HLA-A*33:03; MAGEA3,MAGEA6; ENSG00000221867,ENSG00000197172; CTA,CTA
EALGLVGAQA

SEQ ID NO: 39149 - protein, 10 aa, Homo sapiens
  Table A; Target 39149; HLA-B*54:01; MAGEA3,MAGEA6; ENSG00000221867,ENSG00000197172; CTA,CTA
EALGLVGAQA

SEQ ID NO: 39150 - protein, 10 aa, Homo sapiens
  Table A; Target 39150; HLA-C*07:06; MAGEA3,MAGEA6; ENSG00000221867,ENSG00000197172; CTA,CTA
EALGLVGAQA

SEQ ID NO: 39151 - protein, 9 aa, Homo sapiens
  Table A; Target 39151; HLA-A*25:01; MAGEA3,MAGEA6; ENSG00000221867,ENSG00000197172; CTA,CTA
EARGEALGL

SEQ ID NO: 39152 - protein, 9 aa, Homo sapiens
  Table A; Target 39152; HLA-A*26:01; MAGEA3,MAGEA6; ENSG00000221867,ENSG00000197172; CTA,CTA
EARGEALGL

SEQ ID NO: 39153 - protein, 9 aa, Homo sapiens
  Table A; Target 39153; HLA-A*33:03; MAGEA3,MAGEA6; ENSG00000221867,ENSG00000197172; CTA,CTA
EARGEALGL

SEQ ID NO: 39154 - protein, 9 aa, Homo sapiens
  Table A; Target 39154; HLA-A*68:01; MAGEA3,MAGEA6; ENSG00000221867,ENSG00000197172; CTA,CTA
EARGEALGL

SEQ ID NO: 39155 - protein, 9 aa, Homo sapiens
  Table A; Target 39155; HLA-C*07:06; MAGEA3,MAGEA6; ENSG00000221867,ENSG00000197172; CTA,CTA
EARGEALGL

SEQ ID NO: 39156 - protein, 8 aa, Homo sapiens
  Table A; Target 39156; HLA-B*18:01; MAGEA3,MAGEA6; ENSG00000221867,ENSG00000197172; CTA,CTA
EEEGPSTF

SEQ ID NO: 39157 - protein, 11 aa, Homo sapiens
  Table A; Target 39157; HLA-B*39:01; MAGEA3,MAGEA6; ENSG00000221867,ENSG00000197172; CTA,CTA
EEEGPSTFPDL

SEQ ID NO: 39158 - protein, 11 aa, Homo sapiens
  Table A; Target 39158; HLA-B*40:01; MAGEA3,MAGEA6; ENSG00000221867,ENSG00000197172; CTA,CTA
EEEGPSTFPDL

SEQ ID NO: 39159 - protein, 11 aa, Homo sapiens
  Table A; Target 39159; HLA-B*40:01; MAGEA3,MAGEA6; ENSG00000221867,ENSG00000197172; CTA,CTA
EEGLEARGEAL

SEQ ID NO: 39160 - protein, 11 aa, Homo sapiens
  Table A; Target 39160; HLA-B*44:03; MAGEA3,MAGEA6; ENSG00000221867,ENSG00000197172; CTA,CTA
EEGLEARGEAL

SEQ ID NO: 39161 - protein, 10 aa, Homo sapiens
  Table A; Target 39161; HLA-A*30:01; MAGEA3,MAGEA6; ENSG00000221867,ENSG00000197172; CTA,CTA
EEGPSTFPDL

SEQ ID NO: 39162 - protein, 10 aa, Homo sapiens
  Table A; Target 39162; HLA-B*40:01; MAGEA3,MAGEA6; ENSG00000221867,ENSG00000197172; CTA,CTA
EEGPSTFPDL

SEQ ID NO: 39163 - protein, 10 aa, Homo sapiens
  Table A; Target 39163; HLA-B*40:02; MAGEA3,MAGEA6; ENSG00000221867,ENSG00000197172; CTA,CTA
EEGPSTFPDL

SEQ ID NO: 39164 - protein, 10 aa, Homo sapiens
  Table A; Target 39164; HLA-B*44:02; MAGEA3,MAGEA6; ENSG00000221867,ENSG00000197172; CTA,CTA
EEGPSTFPDL

SEQ ID NO: 39165 - protein, 10 aa, Homo sapiens
  Table A; Target 39165; HLA-B*44:03; MAGEA3,MAGEA6; ENSG00000221867,ENSG00000197172; CTA,CTA
EEGPSTFPDL

SEQ ID NO: 39166 - protein, 10 aa, Homo sapiens
  Table A; Target 39166; HLA-C*16:04; MAGEA3,MAGEA6; ENSG00000221867,ENSG00000197172; CTA,CTA
EEGPSTFPDL

SEQ ID NO: 39167 - protein, 8 aa, Homo sapiens
  Table A; Target 39167; HLA-B*18:01; MAGEA3,MAGEA6; ENSG00000221867,ENSG00000197172; CTA,CTA
EELSVLEV

SEQ ID NO: 39168 - protein, 8 aa, Homo sapiens
  Table A; Target 39168; HLA-B*49:01; MAGEA3,MAGEA6; ENSG00000221867,ENSG00000197172; CTA,CTA
EELSVLEV

SEQ ID NO: 39169 - protein, 8 aa, Homo sapiens
  Table A; Target 39169; HLA-B*51:01; MAGEA3,MAGEA6; ENSG00000221867,ENSG00000197172; CTA,CTA
EELSVLEV

SEQ ID NO: 39170 - protein, 9 aa, Homo sapiens
  Table A; Target 39170; HLA-A*23:01; MAGEA3,MAGEA6; ENSG00000221867,ENSG00000197172; CTA,CTA
EELSVLEVF

SEQ ID NO: 39171 - protein, 9 aa, Homo sapiens
  Table A; Target 39171; HLA-A*30:01; MAGEA3,MAGEA6; ENSG00000221867,ENSG00000197172; CTA,CTA
EELSVLEVF

SEQ ID NO: 39172 - protein, 9 aa, Homo sapiens
  Table A; Target 39172; HLA-B*18:01; MAGEA3,MAGEA6; ENSG00000221867,ENSG00000197172; CTA,CTA
EELSVLEVF

SEQ ID NO: 39173 - protein, 9 aa, Homo sapiens
  Table A; Target 39173; HLA-B*40:01; MAGEA3,MAGEA6; ENSG00000221867,ENSG00000197172; CTA,CTA
EELSVLEVF

SEQ ID NO: 39174 - protein, 9 aa, Homo sapiens
  Table A; Target 39174; HLA-B*44:02; MAGEA3,MAGEA6; ENSG00000221867,ENSG00000197172; CTA,CTA
EELSVLEVF

SEQ ID NO: 39175 - protein, 9 aa, Homo sapiens
  Table A; Target 39175; HLA-B*44:03; MAGEA3,MAGEA6; ENSG00000221867,ENSG00000197172; CTA,CTA
EELSVLEVF

SEQ ID NO: 39176 - protein, 9 aa, Homo sapiens
  Table A; Target 39176; HLA-C*16:04; MAGEA3,MAGEA6; ENSG00000221867,ENSG00000197172; CTA,CTA
EELSVLEVF

SEQ ID NO: 39177 - protein, 8 aa, Homo sapiens
  Table A; Target 39177; HLA-A*33:01; MAGEA3,MAGEA6; ENSG00000221867,ENSG00000197172; CTA,CTA
EFQAALSR

SEQ ID NO: 39178 - protein, 8 aa, Homo sapiens
  Table A; Target 39178; HLA-A*33:03; MAGEA3,MAGEA6; ENSG00000221867,ENSG00000197172; CTA,CTA
EFQAALSR

SEQ ID NO: 39179 - protein, 9 aa, Homo sapiens
  Table A; Target 39179; HLA-A*33:03; MAGEA3,MAGEA6; ENSG00000221867,ENSG00000197172; CTA,CTA
EFQAALSRK

SEQ ID NO: 39180 - protein, 10 aa, Homo sapiens
  Table A; Target 39180; HLA-B*40:01; MAGEA3,MAGEA6; ENSG00000221867,ENSG00000197172; CTA,CTA
EGLEARGEAL

SEQ ID NO: 39181 - protein, 9 aa, Homo sapiens
  Table A; Target 39181; HLA-C*01:02; MAGEA3,MAGEA6; ENSG00000221867,ENSG00000197172; CTA,CTA
EGPSTFPDL

SEQ ID NO: 39182 - protein, 10 aa, Homo sapiens
  Table A; Target 39182; HLA-A*25:01; MAGEA3,MAGEA6; ENSG00000221867,ENSG00000197172; CTA,CTA
ELMEVDPIGH

SEQ ID NO: 39183 - protein, 10 aa, Homo sapiens
  Table A; Target 39183; HLA-A*68:01; MAGEA3,MAGEA6; ENSG00000221867,ENSG00000197172; CTA,CTA
ELMEVDPIGH

SEQ ID NO: 39184 - protein, 10 aa, Homo sapiens
  Table A; Target 39184; HLA-A*25:01; MAGEA3,MAGEA6; ENSG00000221867,ENSG00000197172; CTA,CTA
EMLGSVVGNW

SEQ ID NO: 39185 - protein, 10 aa, Homo sapiens
  Table A; Target 39185; HLA-A*26:01; MAGEA3,MAGEA6; ENSG00000221867,ENSG00000197172; CTA,CTA
EMLGSVVGNW

SEQ ID NO: 39186 - protein, 10 aa, Homo sapiens
  Table A; Target 39186; HLA-A*33:01; MAGEA3,MAGEA6; ENSG00000221867,ENSG00000197172; CTA,CTA
EMLGSVVGNW

SEQ ID NO: 39187 - protein, 10 aa, Homo sapiens
  Table A; Target 39187; HLA-A*33:03; MAGEA3,MAGEA6; ENSG00000221867,ENSG00000197172; CTA,CTA
EMLGSVVGNW

SEQ ID NO: 39188 - protein, 10 aa, Homo sapiens
  Table A; Target 39188; HLA-B*44:02; MAGEA3,MAGEA6; ENSG00000221867,ENSG00000197172; CTA,CTA
EMLGSVVGNW

SEQ ID NO: 39189 - protein, 10 aa, Homo sapiens
  Table A; Target 39189; HLA-B*44:03; MAGEA3,MAGEA6; ENSG00000221867,ENSG00000197172; CTA,CTA
EMLGSVVGNW

SEQ ID NO: 39190 - protein, 10 aa, Homo sapiens
  Table A; Target 39190; HLA-B*57:01; MAGEA3,MAGEA6; ENSG00000221867,ENSG00000197172; CTA,CTA
EMLGSVVGNW

SEQ ID NO: 39191 - protein, 9 aa, Homo sapiens
  Table A; Target 39191; HLA-A*68:01; MAGEA3,MAGEA6; ENSG00000221867,ENSG00000197172; CTA,CTA
EPVTKAEML

SEQ ID NO: 39192 - protein, 11 aa, Homo sapiens
  Table A; Target 39192; HLA-B*38:01; MAGEA3,MAGEA6; ENSG00000221867,ENSG00000197172; CTA,CTA
EQEAASSSSTL

SEQ ID NO: 39193 - protein, 11 aa, Homo sapiens
  Table A; Target 39193; HLA-B*39:01; MAGEA3,MAGEA6; ENSG00000221867,ENSG00000197172; CTA,CTA
EQEAASSSSTL

SEQ ID NO: 39194 - protein, 10 aa, Homo sapiens
  Table A; Target 39194; HLA-A*68:01; MAGEA3,MAGEA6; ENSG00000221867,ENSG00000197172; CTA,CTA
ESEFQAALSR

SEQ ID NO: 39195 - protein, 10 aa, Homo sapiens
  Table A; Target 39195; HLA-C*07:06; MAGEA3,MAGEA6; ENSG00000221867,ENSG00000197172; CTA,CTA
ESEFQAALSR

SEQ ID NO: 39196 - protein, 11 aa, Homo sapiens
  Table A; Target 39196; HLA-A*01:01; MAGEA3,MAGEA6; ENSG00000221867,ENSG00000197172; CTA,CTA
ESEFQAALSRK

SEQ ID NO: 39197 - protein, 11 aa, Homo sapiens
  Table A; Target 39197; HLA-A*68:01; MAGEA3,MAGEA6; ENSG00000221867,ENSG00000197172; CTA,CTA
ESEFQAALSRK

SEQ ID NO: 39198 - protein, 9 aa, Homo sapiens
  Table A; Target 39198; HLA-A*33:01; MAGEA3,MAGEA6; ENSG00000221867,ENSG00000197172; CTA,CTA
ETSYVKVLH

SEQ ID NO: 39199 - protein, 9 aa, Homo sapiens
  Table A; Target 39199; HLA-A*33:03; MAGEA3,MAGEA6; ENSG00000221867,ENSG00000197172; CTA,CTA
ETSYVKVLH

SEQ ID NO: 39200 - protein, 9 aa, Homo sapiens
  Table A; Target 39200; HLA-A*68:01; MAGEA3,MAGEA6; ENSG00000221867,ENSG00000197172; CTA,CTA
ETSYVKVLH

SEQ ID NO: 39201 - protein, 9 aa, Homo sapiens
  Table A; Target 39201; HLA-A*68:02; MAGEA3,MAGEA6; ENSG00000221867,ENSG00000197172; CTA,CTA
ETSYVKVLH

SEQ ID NO: 39202 - protein, 10 aa, Homo sapiens
  Table A; Target 39202; HLA-A*25:01; MAGEA3,MAGEA6; ENSG00000221867,ENSG00000197172; CTA,CTA
EVFEGREDSI

SEQ ID NO: 39203 - protein, 10 aa, Homo sapiens
  Table A; Target 39203; HLA-A*26:01; MAGEA3,MAGEA6; ENSG00000221867,ENSG00000197172; CTA,CTA
EVFEGREDSI

SEQ ID NO: 39204 - protein, 10 aa, Homo sapiens
  Table A; Target 39204; HLA-A*32:01; MAGEA3,MAGEA6; ENSG00000221867,ENSG00000197172; CTA,CTA
EVFEGREDSI

SEQ ID NO: 39205 - protein, 10 aa, Homo sapiens
  Table A; Target 39205; HLA-A*33:01; MAGEA3,MAGEA6; ENSG00000221867,ENSG00000197172; CTA,CTA
EVFEGREDSI

SEQ ID NO: 39206 - protein, 10 aa, Homo sapiens
  Table A; Target 39206; HLA-A*33:03; MAGEA3,MAGEA6; ENSG00000221867,ENSG00000197172; CTA,CTA
EVFEGREDSI

SEQ ID NO: 39207 - protein, 10 aa, Homo sapiens
  Table A; Target 39207; HLA-A*68:01; MAGEA3,MAGEA6; ENSG00000221867,ENSG00000197172; CTA,CTA
EVFEGREDSI

SEQ ID NO: 39208 - protein, 10 aa, Homo sapiens
  Table A; Target 39208; HLA-B*08:01; MAGEA3,MAGEA6; ENSG00000221867,ENSG00000197172; CTA,CTA
EVFEGREDSI

SEQ ID NO: 39209 - protein, 10 aa, Homo sapiens
  Table A; Target 39209; HLA-B*35:01; MAGEA3,MAGEA6; ENSG00000221867,ENSG00000197172; CTA,CTA
EVFEGREDSI

SEQ ID NO: 39210 - protein, 10 aa, Homo sapiens
  Table A; Target 39210; HLA-B*35:03; MAGEA3,MAGEA6; ENSG00000221867,ENSG00000197172; CTA,CTA
EVFEGREDSI

SEQ ID NO: 39211 - protein, 10 aa, Homo sapiens
  Table A; Target 39211; HLA-B*38:01; MAGEA3,MAGEA6; ENSG00000221867,ENSG00000197172; CTA,CTA
EVFEGREDSI

SEQ ID NO: 39212 - protein, 10 aa, Homo sapiens
  Table A; Target 39212; HLA-B*39:01; MAGEA3,MAGEA6; ENSG00000221867,ENSG00000197172; CTA,CTA
EVFEGREDSI

SEQ ID NO: 39213 - protein, 10 aa, Homo sapiens
  Table A; Target 39213; HLA-B*51:01; MAGEA3,MAGEA6; ENSG00000221867,ENSG00000197172; CTA,CTA
EVFEGREDSI

SEQ ID NO: 39214 - protein, 10 aa, Homo sapiens
  Table A; Target 39214; HLA-C*07:01; MAGEA3,MAGEA6; ENSG00000221867,ENSG00000197172; CTA,CTA
EVFEGREDSI

SEQ ID NO: 39215 - protein, 10 aa, Homo sapiens
  Table A; Target 39215; HLA-C*07:06; MAGEA3,MAGEA6; ENSG00000221867,ENSG00000197172; CTA,CTA
EVFEGREDSI

SEQ ID NO: 39216 - protein, 10 aa, Homo sapiens
  Table A; Target 39216; HLA-A*25:01; MAGEA3,MAGEA6; ENSG00000221867,ENSG00000197172; CTA,CTA
EVTLGEVPAA

SEQ ID NO: 39217 - protein, 10 aa, Homo sapiens
  Table A; Target 39217; HLA-A*26:01; MAGEA3,MAGEA6; ENSG00000221867,ENSG00000197172; CTA,CTA
EVTLGEVPAA

SEQ ID NO: 39218 - protein, 9 aa, Homo sapiens
  Table A; Target 39218; HLA-A*01:01; MAGEA3,MAGEA6; ENSG00000221867,ENSG00000197172; CTA,CTA
FATCLGLSY

SEQ ID NO: 39219 - protein, 9 aa, Homo sapiens
  Table A; Target 39219; HLA-A*26:01; MAGEA3,MAGEA6; ENSG00000221867,ENSG00000197172; CTA,CTA
FATCLGLSY

SEQ ID NO: 39220 - protein, 9 aa, Homo sapiens
  Table A; Target 39220; HLA-A*29:02; MAGEA3,MAGEA6; ENSG00000221867,ENSG00000197172; CTA,CTA
FATCLGLSY

SEQ ID NO: 39221 - protein, 9 aa, Homo sapiens
  Table A; Target 39221; HLA-A*30:02; MAGEA3,MAGEA6; ENSG00000221867,ENSG00000197172; CTA,CTA
FATCLGLSY

SEQ ID NO: 39222 - protein, 9 aa, Homo sapiens
  Table A; Target 39222; HLA-B*15:03; MAGEA3,MAGEA6; ENSG00000221867,ENSG00000197172; CTA,CTA
FATCLGLSY

SEQ ID NO: 39223 - protein, 9 aa, Homo sapiens
  Table A; Target 39223; HLA-B*35:01; MAGEA3,MAGEA6; ENSG00000221867,ENSG00000197172; CTA,CTA
FATCLGLSY

SEQ ID NO: 39224 - protein, 9 aa, Homo sapiens
  Table A; Target 39224; HLA-B*46:01; MAGEA3,MAGEA6; ENSG00000221867,ENSG00000197172; CTA,CTA
FATCLGLSY

SEQ ID NO: 39225 - protein, 9 aa, Homo sapiens
  Table A; Target 39225; HLA-C*02:02; MAGEA3,MAGEA6; ENSG00000221867,ENSG00000197172; CTA,CTA
FATCLGLSY

SEQ ID NO: 39226 - protein, 9 aa, Homo sapiens
  Table A; Target 39226; HLA-C*16:01; MAGEA3,MAGEA6; ENSG00000221867,ENSG00000197172; CTA,CTA
FATCLGLSY

SEQ ID NO: 39227 - protein, 9 aa, Homo sapiens
  Table A; Target 39227; HLA-A*02:07; MAGEA3,MAGEA6; ENSG00000221867,ENSG00000197172; CTA,CTA
FFPVIFSKA

SEQ ID NO: 39228 - protein, 9 aa, Homo sapiens
  Table A; Target 39228; HLA-A*29:02; MAGEA3,MAGEA6; ENSG00000221867,ENSG00000197172; CTA,CTA
FFPVIFSKA

SEQ ID NO: 39229 - protein, 8 aa, Homo sapiens
  Table A; Target 39229; HLA-B*51:01; MAGEA3,MAGEA6; ENSG00000221867,ENSG00000197172; CTA,CTA
FGIELMEV

SEQ ID NO: 39230 - protein, 8 aa, Homo sapiens
  Table A; Target 39230; HLA-B*54:01; MAGEA3,MAGEA6; ENSG00000221867,ENSG00000197172; CTA,CTA
FGIELMEV

SEQ ID NO: 39231 - protein, 8 aa, Homo sapiens
  Table A; Target 39231; HLA-B*35:01; MAGEA3,MAGEA6; ENSG00000221867,ENSG00000197172; CTA,CTA
FPDLESEF

SEQ ID NO: 39232 - protein, 8 aa, Homo sapiens
  Table A; Target 39232; HLA-B*35:03; MAGEA3,MAGEA6; ENSG00000221867,ENSG00000197172; CTA,CTA
FPDLESEF

SEQ ID NO: 39233 - protein, 8 aa, Homo sapiens
  Table A; Target 39233; HLA-C*03:03; MAGEA3,MAGEA6; ENSG00000221867,ENSG00000197172; CTA,CTA
FPDLESEF

SEQ ID NO: 39234 - protein, 8 aa, Homo sapiens
  Table A; Target 39234; HLA-C*04:01; MAGEA3,MAGEA6; ENSG00000221867,ENSG00000197172; CTA,CTA
FPDLESEF

SEQ ID NO: 39235 - protein, 8 aa, Homo sapiens
  Table A; Target 39235; HLA-C*05:01; MAGEA3,MAGEA6; ENSG00000221867,ENSG00000197172; CTA,CTA
FPDLESEF

SEQ ID NO: 39236 - protein, 10 aa, Homo sapiens
  Table A; Target 39236; HLA-B*35:03; MAGEA3,MAGEA6; ENSG00000221867,ENSG00000197172; CTA,CTA
FPDLESEFQA

SEQ ID NO: 39237 - protein, 10 aa, Homo sapiens
  Table A; Target 39237; HLA-B*54:01; MAGEA3,MAGEA6; ENSG00000221867,ENSG00000197172; CTA,CTA
FPDLESEFQA

SEQ ID NO: 39238 - protein, 10 aa, Homo sapiens
  Table A; Target 39238; HLA-B*55:01; MAGEA3,MAGEA6; ENSG00000221867,ENSG00000197172; CTA,CTA
FPDLESEFQA

SEQ ID NO: 39239 - protein, 11 aa, Homo sapiens
  Table A; Target 39239; HLA-B*35:03; MAGEA3,MAGEA6; ENSG00000221867,ENSG00000197172; CTA,CTA
FPDLESEFQAA

SEQ ID NO: 39240 - protein, 11 aa, Homo sapiens
  Table A; Target 39240; HLA-B*54:01; MAGEA3,MAGEA6; ENSG00000221867,ENSG00000197172; CTA,CTA
FPDLESEFQAA

SEQ ID NO: 39241 - protein, 11 aa, Homo sapiens
  Table A; Target 39241; HLA-B*55:01; MAGEA3,MAGEA6; ENSG00000221867,ENSG00000197172; CTA,CTA
FPDLESEFQAA

SEQ ID NO: 39242 - protein, 8 aa, Homo sapiens
  Table A; Target 39242; HLA-B*51:01; MAGEA3,MAGEA6; ENSG00000221867,ENSG00000197172; CTA,CTA
FPVIFSKA

SEQ ID NO: 39243 - protein, 8 aa, Homo sapiens
  Table A; Target 39243; HLA-B*54:01; MAGEA3,MAGEA6; ENSG00000221867,ENSG00000197172; CTA,CTA
FPVIFSKA

SEQ ID NO: 39244 - protein, 8 aa, Homo sapiens
  Table A; Target 39244; HLA-B*55:01; MAGEA3,MAGEA6; ENSG00000221867,ENSG00000197172; CTA,CTA
FPVIFSKA

SEQ ID NO: 39245 - protein, 8 aa, Homo sapiens
  Table A; Target 39245; HLA-B*56:01; MAGEA3,MAGEA6; ENSG00000221867,ENSG00000197172; CTA,CTA
FPVIFSKA

SEQ ID NO: 39246 - protein, 9 aa, Homo sapiens
  Table A; Target 39246; HLA-B*54:01; MAGEA3,MAGEA6; ENSG00000221867,ENSG00000197172; CTA,CTA
FPVIFSKAS

SEQ ID NO: 39247 - protein, 9 aa, Homo sapiens
  Table A; Target 39247; HLA-A*02:03; MAGEA3,MAGEA6; ENSG00000221867,ENSG00000197172; CTA,CTA
FQAALSRKV

SEQ ID NO: 39248 - protein, 9 aa, Homo sapiens
  Table A; Target 39248; HLA-B*13:02; MAGEA3,MAGEA6; ENSG00000221867,ENSG00000197172; CTA,CTA
FQAALSRKV

SEQ ID NO: 39249 - protein, 9 aa, Homo sapiens
  Table A; Target 39249; HLA-C*02:02; MAGEA3,MAGEA6; ENSG00000221867,ENSG00000197172; CTA,CTA
FQAALSRKV

SEQ ID NO: 39250 - protein, 9 aa, Homo sapiens
  Table A; Target 39250; HLA-C*06:02; MAGEA3,MAGEA6; ENSG00000221867,ENSG00000197172; CTA,CTA
FQAALSRKV

SEQ ID NO: 39251 - protein, 9 aa, Homo sapiens
  Table A; Target 39251; HLA-A*01:01; MAGEA3,MAGEA6; ENSG00000221867,ENSG00000197172; CTA,CTA
FVQENYLEY

SEQ ID NO: 39252 - protein, 9 aa, Homo sapiens
  Table A; Target 39252; HLA-A*03:01; MAGEA3,MAGEA6; ENSG00000221867,ENSG00000197172; CTA,CTA
FVQENYLEY

SEQ ID NO: 39253 - protein, 9 aa, Homo sapiens
  Table A; Target 39253; HLA-A*03:02; MAGEA3,MAGEA6; ENSG00000221867,ENSG00000197172; CTA,CTA
FVQENYLEY

SEQ ID NO: 39254 - protein, 9 aa, Homo sapiens
  Table A; Target 39254; HLA-A*11:01; MAGEA3,MAGEA6; ENSG00000221867,ENSG00000197172; CTA,CTA
FVQENYLEY

SEQ ID NO: 39255 - protein, 9 aa, Homo sapiens
  Table A; Target 39255; HLA-A*25:01; MAGEA3,MAGEA6; ENSG00000221867,ENSG00000197172; CTA,CTA
FVQENYLEY

SEQ ID NO: 39256 - protein, 9 aa, Homo sapiens
  Table A; Target 39256; HLA-A*30:02; MAGEA3,MAGEA6; ENSG00000221867,ENSG00000197172; CTA,CTA
FVQENYLEY

SEQ ID NO: 39257 - protein, 9 aa, Homo sapiens
  Table A; Target 39257; HLA-A*32:01; MAGEA3,MAGEA6; ENSG00000221867,ENSG00000197172; CTA,CTA
FVQENYLEY

SEQ ID NO: 39258 - protein, 9 aa, Homo sapiens
  Table A; Target 39258; HLA-A*33:01; MAGEA3,MAGEA6; ENSG00000221867,ENSG00000197172; CTA,CTA
FVQENYLEY

SEQ ID NO: 39259 - protein, 9 aa, Homo sapiens
  Table A; Target 39259; HLA-A*33:03; MAGEA3,MAGEA6; ENSG00000221867,ENSG00000197172; CTA,CTA
FVQENYLEY

SEQ ID NO: 39260 - protein, 9 aa, Homo sapiens
  Table A; Target 39260; HLA-A*68:01; MAGEA3,MAGEA6; ENSG00000221867,ENSG00000197172; CTA,CTA
FVQENYLEY

SEQ ID NO: 39261 - protein, 9 aa, Homo sapiens
  Table A; Target 39261; HLA-B*15:01; MAGEA3,MAGEA6; ENSG00000221867,ENSG00000197172; CTA,CTA
FVQENYLEY

SEQ ID NO: 39262 - protein, 9 aa, Homo sapiens
  Table A; Target 39262; HLA-B*15:03; MAGEA3,MAGEA6; ENSG00000221867,ENSG00000197172; CTA,CTA
FVQENYLEY

SEQ ID NO: 39263 - protein, 9 aa, Homo sapiens
  Table A; Target 39263; HLA-B*18:01; MAGEA3,MAGEA6; ENSG00000221867,ENSG00000197172; CTA,CTA
FVQENYLEY

SEQ ID NO: 39264 - protein, 9 aa, Homo sapiens
  Table A; Target 39264; HLA-B*27:02; MAGEA3,MAGEA6; ENSG00000221867,ENSG00000197172; CTA,CTA
FVQENYLEY

SEQ ID NO: 39265 - protein, 9 aa, Homo sapiens
  Table A; Target 39265; HLA-B*39:01; MAGEA3,MAGEA6; ENSG00000221867,ENSG00000197172; CTA,CTA
FVQENYLEY

SEQ ID NO: 39266 - protein, 9 aa, Homo sapiens
  Table A; Target 39266; HLA-B*46:01; MAGEA3,MAGEA6; ENSG00000221867,ENSG00000197172; CTA,CTA
FVQENYLEY

SEQ ID NO: 39267 - protein, 9 aa, Homo sapiens
  Table A; Target 39267; HLA-B*55:01; MAGEA3,MAGEA6; ENSG00000221867,ENSG00000197172; CTA,CTA
FVQENYLEY

SEQ ID NO: 39268 - protein, 9 aa, Homo sapiens
  Table A; Target 39268; HLA-B*58:01; MAGEA3,MAGEA6; ENSG00000221867,ENSG00000197172; CTA,CTA
FVQENYLEY

SEQ ID NO: 39269 - protein, 9 aa, Homo sapiens
  Table A; Target 39269; HLA-C*01:02; MAGEA3,MAGEA6; ENSG00000221867,ENSG00000197172; CTA,CTA
FVQENYLEY

SEQ ID NO: 39270 - protein, 9 aa, Homo sapiens
  Table A; Target 39270; HLA-C*02:02; MAGEA3,MAGEA6; ENSG00000221867,ENSG00000197172; CTA,CTA
FVQENYLEY

SEQ ID NO: 39271 - protein, 9 aa, Homo sapiens
  Table A; Target 39271; HLA-C*03:03; MAGEA3,MAGEA6; ENSG00000221867,ENSG00000197172; CTA,CTA
FVQENYLEY

SEQ ID NO: 39272 - protein, 9 aa, Homo sapiens
  Table A; Target 39272; HLA-C*03:04; MAGEA3,MAGEA6; ENSG00000221867,ENSG00000197172; CTA,CTA
FVQENYLEY

SEQ ID NO: 39273 - protein, 9 aa, Homo sapiens
  Table A; Target 39273; HLA-C*05:01; MAGEA3,MAGEA6; ENSG00000221867,ENSG00000197172; CTA,CTA
FVQENYLEY

SEQ ID NO: 39274 - protein, 9 aa, Homo sapiens
  Table A; Target 39274; HLA-C*07:01; MAGEA3,MAGEA6; ENSG00000221867,ENSG00000197172; CTA,CTA
FVQENYLEY

SEQ ID NO: 39275 - protein, 9 aa, Homo sapiens
  Table A; Target 39275; HLA-C*07:04; MAGEA3,MAGEA6; ENSG00000221867,ENSG00000197172; CTA,CTA
FVQENYLEY

SEQ ID NO: 39276 - protein, 9 aa, Homo sapiens
  Table A; Target 39276; HLA-C*07:06; MAGEA3,MAGEA6; ENSG00000221867,ENSG00000197172; CTA,CTA
FVQENYLEY

SEQ ID NO: 39277 - protein, 9 aa, Homo sapiens
  Table A; Target 39277; HLA-C*12:03; MAGEA3,MAGEA6; ENSG00000221867,ENSG00000197172; CTA,CTA
FVQENYLEY

SEQ ID NO: 39278 - protein, 9 aa, Homo sapiens
  Table A; Target 39278; HLA-C*14:02; MAGEA3,MAGEA6; ENSG00000221867,ENSG00000197172; CTA,CTA
FVQENYLEY

SEQ ID NO: 39279 - protein, 9 aa, Homo sapiens
  Table A; Target 39279; HLA-C*16:01; MAGEA3,MAGEA6; ENSG00000221867,ENSG00000197172; CTA,CTA
FVQENYLEY

SEQ ID NO: 39280 - protein, 9 aa, Homo sapiens
  Table A; Target 39280; HLA-C*16:02; MAGEA3,MAGEA6; ENSG00000221867,ENSG00000197172; CTA,CTA
FVQENYLEY

SEQ ID NO: 39281 - protein, 9 aa, Homo sapiens
  Table A; Target 39281; HLA-C*16:04; MAGEA3,MAGEA6; ENSG00000221867,ENSG00000197172; CTA,CTA
FVQENYLEY

SEQ ID NO: 39282 - protein, 10 aa, Homo sapiens
  Table A; Target 39282; HLA-A*31:01; MAGEA3,MAGEA6; ENSG00000221867,ENSG00000197172; CTA,CTA
FVQENYLEYR

SEQ ID NO: 39283 - protein, 10 aa, Homo sapiens
  Table A; Target 39283; HLA-A*33:01; MAGEA3,MAGEA6; ENSG00000221867,ENSG00000197172; CTA,CTA
FVQENYLEYR

SEQ ID NO: 39284 - protein, 10 aa, Homo sapiens
  Table A; Target 39284; HLA-A*33:03; MAGEA3,MAGEA6; ENSG00000221867,ENSG00000197172; CTA,CTA
FVQENYLEYR

SEQ ID NO: 39285 - protein, 10 aa, Homo sapiens
  Table A; Target 39285; HLA-A*68:01; MAGEA3,MAGEA6; ENSG00000221867,ENSG00000197172; CTA,CTA
FVQENYLEYR

SEQ ID NO: 39286 - protein, 10 aa, Homo sapiens
  Table A; Target 39286; HLA-A*68:02; MAGEA3,MAGEA6; ENSG00000221867,ENSG00000197172; CTA,CTA
FVQENYLEYR

SEQ ID NO: 39287 - protein, 10 aa, Homo sapiens
  Table A; Target 39287; HLA-B*27:02; MAGEA3,MAGEA6; ENSG00000221867,ENSG00000197172; CTA,CTA
FVQENYLEYR

SEQ ID NO: 39288 - protein, 9 aa, Homo sapiens
  Table A; Target 39288; HLA-A*30:02; MAGEA3,MAGEA6; ENSG00000221867,ENSG00000197172; CTA,CTA
GASSLPTTM

SEQ ID NO: 39289 - protein, 9 aa, Homo sapiens
  Table A; Target 39289; HLA-A*32:01; MAGEA3,MAGEA6; ENSG00000221867,ENSG00000197172; CTA,CTA
GASSLPTTM

SEQ ID NO: 39290 - protein, 9 aa, Homo sapiens
  Table A; Target 39290; HLA-B*13:02; MAGEA3,MAGEA6; ENSG00000221867,ENSG00000197172; CTA,CTA
GASSLPTTM

SEQ ID NO: 39291 - protein, 9 aa, Homo sapiens
  Table A; Target 39291; HLA-B*15:01; MAGEA3,MAGEA6; ENSG00000221867,ENSG00000197172; CTA,CTA
GASSLPTTM

SEQ ID NO: 39292 - protein, 9 aa, Homo sapiens
  Table A; Target 39292; HLA-B*15:03; MAGEA3,MAGEA6; ENSG00000221867,ENSG00000197172; CTA,CTA
GASSLPTTM

SEQ ID NO: 39293 - protein, 9 aa, Homo sapiens
  Table A; Target 39293; HLA-B*35:01; MAGEA3,MAGEA6; ENSG00000221867,ENSG00000197172; CTA,CTA
GASSLPTTM

SEQ ID NO: 39294 - protein, 9 aa, Homo sapiens
  Table A; Target 39294; HLA-B*35:03; MAGEA3,MAGEA6; ENSG00000221867,ENSG00000197172; CTA,CTA
GASSLPTTM

SEQ ID NO: 39295 - protein, 9 aa, Homo sapiens
  Table A; Target 39295; HLA-B*39:01; MAGEA3,MAGEA6; ENSG00000221867,ENSG00000197172; CTA,CTA
GASSLPTTM

SEQ ID NO: 39296 - protein, 9 aa, Homo sapiens
  Table A; Target 39296; HLA-C*02:02; MAGEA3,MAGEA6; ENSG00000221867,ENSG00000197172; CTA,CTA
GASSLPTTM

SEQ ID NO: 39297 - protein, 9 aa, Homo sapiens
  Table A; Target 39297; HLA-C*03:03; MAGEA3,MAGEA6; ENSG00000221867,ENSG00000197172; CTA,CTA
GASSLPTTM

SEQ ID NO: 39298 - protein, 9 aa, Homo sapiens
  Table A; Target 39298; HLA-C*03:04; MAGEA3,MAGEA6; ENSG00000221867,ENSG00000197172; CTA,CTA
GASSLPTTM

SEQ ID NO: 39299 - protein, 9 aa, Homo sapiens
  Table A; Target 39299; HLA-C*05:01; MAGEA3,MAGEA6; ENSG00000221867,ENSG00000197172; CTA,CTA
GASSLPTTM

SEQ ID NO: 39300 - protein, 9 aa, Homo sapiens
  Table A; Target 39300; HLA-C*07:04; MAGEA3,MAGEA6; ENSG00000221867,ENSG00000197172; CTA,CTA
GASSLPTTM

SEQ ID NO: 39301 - protein, 9 aa, Homo sapiens
  Table A; Target 39301; HLA-C*12:03; MAGEA3,MAGEA6; ENSG00000221867,ENSG00000197172; CTA,CTA
GASSLPTTM

SEQ ID NO: 39302 - protein, 9 aa, Homo sapiens
  Table A; Target 39302; HLA-C*16:01; MAGEA3,MAGEA6; ENSG00000221867,ENSG00000197172; CTA,CTA
GASSLPTTM

SEQ ID NO: 39303 - protein, 9 aa, Homo sapiens
  Table A; Target 39303; HLA-C*16:02; MAGEA3,MAGEA6; ENSG00000221867,ENSG00000197172; CTA,CTA
GASSLPTTM

SEQ ID NO: 39304 - protein, 9 aa, Homo sapiens
  Table A; Target 39304; HLA-C*16:04; MAGEA3,MAGEA6; ENSG00000221867,ENSG00000197172; CTA,CTA
GASSLPTTM

SEQ ID NO: 39305 - protein, 11 aa, Homo sapiens
  Table A; Target 39305; HLA-A*26:01; MAGEA3,MAGEA6; ENSG00000221867,ENSG00000197172; CTA,CTA
GASSLPTTMNY

SEQ ID NO: 39306 - protein, 11 aa, Homo sapiens
  Table A; Target 39306; HLA-A*29:02; MAGEA3,MAGEA6; ENSG00000221867,ENSG00000197172; CTA,CTA
GASSLPTTMNY

SEQ ID NO: 39307 - protein, 11 aa, Homo sapiens
  Table A; Target 39307; HLA-A*30:02; MAGEA3,MAGEA6; ENSG00000221867,ENSG00000197172; CTA,CTA
GASSLPTTMNY

SEQ ID NO: 39308 - protein, 11 aa, Homo sapiens
  Table A; Target 39308; HLA-C*02:02; MAGEA3,MAGEA6; ENSG00000221867,ENSG00000197172; CTA,CTA
GASSLPTTMNY

SEQ ID NO: 39309 - protein, 11 aa, Homo sapiens
  Table A; Target 39309; HLA-C*16:04; MAGEA3,MAGEA6; ENSG00000221867,ENSG00000197172; CTA,CTA
GASSLPTTMNY

SEQ ID NO: 39310 - protein, 9 aa, Homo sapiens
  Table A; Target 39310; HLA-A*30:01; MAGEA3,MAGEA6; ENSG00000221867,ENSG00000197172; CTA,CTA
GEALGLVGA

SEQ ID NO: 39311 - protein, 9 aa, Homo sapiens
  Table A; Target 39311; HLA-B*13:02; MAGEA3,MAGEA6; ENSG00000221867,ENSG00000197172; CTA,CTA
GEALGLVGA

SEQ ID NO: 39312 - protein, 9 aa, Homo sapiens
  Table A; Target 39312; HLA-B*37:01; MAGEA3,MAGEA6; ENSG00000221867,ENSG00000197172; CTA,CTA
GEALGLVGA

SEQ ID NO: 39313 - protein, 9 aa, Homo sapiens
  Table A; Target 39313; HLA-B*40:01; MAGEA3,MAGEA6; ENSG00000221867,ENSG00000197172; CTA,CTA
GEALGLVGA

SEQ ID NO: 39314 - protein, 9 aa, Homo sapiens
  Table A; Target 39314; HLA-B*40:02; MAGEA3,MAGEA6; ENSG00000221867,ENSG00000197172; CTA,CTA
GEALGLVGA

SEQ ID NO: 39315 - protein, 9 aa, Homo sapiens
  Table A; Target 39315; HLA-B*49:01; MAGEA3,MAGEA6; ENSG00000221867,ENSG00000197172; CTA,CTA
GEALGLVGA

SEQ ID NO: 39316 - protein, 9 aa, Homo sapiens
  Table A; Target 39316; HLA-B*56:01; MAGEA3,MAGEA6; ENSG00000221867,ENSG00000197172; CTA,CTA
GEALGLVGA

SEQ ID NO: 39317 - protein, 11 aa, Homo sapiens
  Table A; Target 39317; HLA-A*30:01; MAGEA3,MAGEA6; ENSG00000221867,ENSG00000197172; CTA,CTA
GEALGLVGAQA

SEQ ID NO: 39318 - protein, 11 aa, Homo sapiens
  Table A; Target 39318; HLA-B*27:05; MAGEA3,MAGEA6; ENSG00000221867,ENSG00000197172; CTA,CTA
GEALGLVGAQA

SEQ ID NO: 39319 - protein, 11 aa, Homo sapiens
  Table A; Target 39319; HLA-B*40:01; MAGEA3,MAGEA6; ENSG00000221867,ENSG00000197172; CTA,CTA
GEALGLVGAQA

SEQ ID NO: 39320 - protein, 11 aa, Homo sapiens
  Table A; Target 39320; HLA-B*40:02; MAGEA3,MAGEA6; ENSG00000221867,ENSG00000197172; CTA,CTA
GEALGLVGAQA

SEQ ID NO: 39321 - protein, 11 aa, Homo sapiens
  Table A; Target 39321; HLA-B*49:01; MAGEA3,MAGEA6; ENSG00000221867,ENSG00000197172; CTA,CTA
GEALGLVGAQA

SEQ ID NO: 39322 - protein, 9 aa, Homo sapiens
  Table A; Target 39322; HLA-A*30:01; MAGEA3,MAGEA6; ENSG00000221867,ENSG00000197172; CTA,CTA
GEVPAAESP

SEQ ID NO: 39323 - protein, 9 aa, Homo sapiens
  Table A; Target 39323; HLA-B*40:01; MAGEA3,MAGEA6; ENSG00000221867,ENSG00000197172; CTA,CTA
GEVPAAESP

SEQ ID NO: 39324 - protein, 9 aa, Homo sapiens
  Table A; Target 39324; HLA-B*40:02; MAGEA3,MAGEA6; ENSG00000221867,ENSG00000197172; CTA,CTA
GEVPAAESP

SEQ ID NO: 39325 - protein, 9 aa, Homo sapiens
  Table A; Target 39325; HLA-B*49:01; MAGEA3,MAGEA6; ENSG00000221867,ENSG00000197172; CTA,CTA
GEVPAAESP

SEQ ID NO: 39326 - protein, 9 aa, Homo sapiens
  Table A; Target 39326; HLA-C*01:02; MAGEA3,MAGEA6; ENSG00000221867,ENSG00000197172; CTA,CTA
GLEARGEAL

SEQ ID NO: 39327 - protein, 9 aa, Homo sapiens
  Table A; Target 39327; HLA-B*15:01; MAGEA3,MAGEA6; ENSG00000221867,ENSG00000197172; CTA,CTA
GLLGDNQIM

SEQ ID NO: 39328 - protein, 8 aa, Homo sapiens
  Table A; Target 39328; HLA-B*07:02; MAGEA3,MAGEA6; ENSG00000221867,ENSG00000197172; CTA,CTA
GPSTFPDL

SEQ ID NO: 39329 - protein, 9 aa, Homo sapiens
  Table A; Target 39329; HLA-A*01:01; MAGEA3,MAGEA6; ENSG00000221867,ENSG00000197172; CTA,CTA
GSDPACYEF

SEQ ID NO: 39330 - protein, 9 aa, Homo sapiens
  Table A; Target 39330; HLA-B*27:05; MAGEA3,MAGEA6; ENSG00000221867,ENSG00000197172; CTA,CTA
GSDPACYEF

SEQ ID NO: 39331 - protein, 9 aa, Homo sapiens
  Table A; Target 39331; HLA-B*38:01; MAGEA3,MAGEA6; ENSG00000221867,ENSG00000197172; CTA,CTA
GSDPACYEF

SEQ ID NO: 39332 - protein, 9 aa, Homo sapiens
  Table A; Target 39332; HLA-B*57:01; MAGEA3,MAGEA6; ENSG00000221867,ENSG00000197172; CTA,CTA
GSDPACYEF

SEQ ID NO: 39333 - protein, 9 aa, Homo sapiens
  Table A; Target 39333; HLA-B*58:01; MAGEA3,MAGEA6; ENSG00000221867,ENSG00000197172; CTA,CTA
GSDPACYEF

SEQ ID NO: 39334 - protein, 9 aa, Homo sapiens
  Table A; Target 39334; HLA-C*05:01; MAGEA3,MAGEA6; ENSG00000221867,ENSG00000197172; CTA,CTA
GSDPACYEF

SEQ ID NO: 39335 - protein, 9 aa, Homo sapiens
  Table A; Target 39335; HLA-A*01:01; MAGEA3,MAGEA6; ENSG00000221867,ENSG00000197172; CTA,CTA
GSVVGNWQY

SEQ ID NO: 39336 - protein, 9 aa, Homo sapiens
  Table A; Target 39336; HLA-A*29:02; MAGEA3,MAGEA6; ENSG00000221867,ENSG00000197172; CTA,CTA
GSVVGNWQY

SEQ ID NO: 39337 - protein, 9 aa, Homo sapiens
  Table A; Target 39337; HLA-A*30:02; MAGEA3,MAGEA6; ENSG00000221867,ENSG00000197172; CTA,CTA
GSVVGNWQY

SEQ ID NO: 39338 - protein, 9 aa, Homo sapiens
  Table A; Target 39338; HLA-B*15:01; MAGEA3,MAGEA6; ENSG00000221867,ENSG00000197172; CTA,CTA
GSVVGNWQY

SEQ ID NO: 39339 - protein, 9 aa, Homo sapiens
  Table A; Target 39339; HLA-B*15:03; MAGEA3,MAGEA6; ENSG00000221867,ENSG00000197172; CTA,CTA
GSVVGNWQY

SEQ ID NO: 39340 - protein, 9 aa, Homo sapiens
  Table A; Target 39340; HLA-B*57:01; MAGEA3,MAGEA6; ENSG00000221867,ENSG00000197172; CTA,CTA
GSVVGNWQY

SEQ ID NO: 39341 - protein, 9 aa, Homo sapiens
  Table A; Target 39341; HLA-B*58:01; MAGEA3,MAGEA6; ENSG00000221867,ENSG00000197172; CTA,CTA
GSVVGNWQY

SEQ ID NO: 39342 - protein, 9 aa, Homo sapiens
  Table A; Target 39342; HLA-C*16:04; MAGEA3,MAGEA6; ENSG00000221867,ENSG00000197172; CTA,CTA
GSVVGNWQY

SEQ ID NO: 39343 - protein, 11 aa, Homo sapiens
  Table A; Target 39343; HLA-A*31:01; MAGEA3,MAGEA6; ENSG00000221867,ENSG00000197172; CTA,CTA
HCKPEEGLEAR

SEQ ID NO: 39344 - protein, 11 aa, Homo sapiens
  Table A; Target 39344; HLA-A*33:01; MAGEA3,MAGEA6; ENSG00000221867,ENSG00000197172; CTA,CTA
HCKPEEGLEAR

SEQ ID NO: 39345 - protein, 11 aa, Homo sapiens
  Table A; Target 39345; HLA-A*33:03; MAGEA3,MAGEA6; ENSG00000221867,ENSG00000197172; CTA,CTA
HCKPEEGLEAR

SEQ ID NO: 39346 - protein, 9 aa, Homo sapiens
  Table A; Target 39346; HLA-B*40:01; MAGEA3,MAGEA6; ENSG00000221867,ENSG00000197172; CTA,CTA
IELMEVDPI

SEQ ID NO: 39347 - protein, 9 aa, Homo sapiens
  Table A; Target 39347; HLA-B*40:02; MAGEA3,MAGEA6; ENSG00000221867,ENSG00000197172; CTA,CTA
IELMEVDPI

SEQ ID NO: 39348 - protein, 9 aa, Homo sapiens
  Table A; Target 39348; HLA-B*49:01; MAGEA3,MAGEA6; ENSG00000221867,ENSG00000197172; CTA,CTA
IELMEVDPI

SEQ ID NO: 39349 - protein, 10 aa, Homo sapiens
  Table A; Target 39349; HLA-A*29:02; MAGEA3,MAGEA6; ENSG00000221867,ENSG00000197172; CTA,CTA
IFATCLGLSY

SEQ ID NO: 39350 - protein, 9 aa, Homo sapiens
  Table A; Target 39350; HLA-C*05:01; MAGEA3,MAGEA6; ENSG00000221867,ENSG00000197172; CTA,CTA
KAEMLGSVV

SEQ ID NO: 39351 - protein, 9 aa, Homo sapiens
  Table A; Target 39351; HLA-A*02:04; MAGEA3,MAGEA6; ENSG00000221867,ENSG00000197172; CTA,CTA
KIWEELSVL

SEQ ID NO: 39352 - protein, 9 aa, Homo sapiens
  Table A; Target 39352; HLA-A*02:07; MAGEA3,MAGEA6; ENSG00000221867,ENSG00000197172; CTA,CTA
KIWEELSVL

SEQ ID NO: 39353 - protein, 11 aa, Homo sapiens
  Table A; Target 39353; HLA-A*02:01; MAGEA3,MAGEA6; ENSG00000221867,ENSG00000197172; CTA,CTA
KIWEELSVLEV

SEQ ID NO: 39354 - protein, 11 aa, Homo sapiens
  Table A; Target 39354; HLA-A*02:03; MAGEA3,MAGEA6; ENSG00000221867,ENSG00000197172; CTA,CTA
KIWEELSVLEV

SEQ ID NO: 39355 - protein, 11 aa, Homo sapiens
  Table A; Target 39355; HLA-A*02:04; MAGEA3,MAGEA6; ENSG00000221867,ENSG00000197172; CTA,CTA
KIWEELSVLEV

SEQ ID NO: 39356 - protein, 11 aa, Homo sapiens
  Table A; Target 39356; HLA-A*02:07; MAGEA3,MAGEA6; ENSG00000221867,ENSG00000197172; CTA,CTA
KIWEELSVLEV

SEQ ID NO: 39357 - protein, 8 aa, Homo sapiens
  Table A; Target 39357; HLA-A*30:01; MAGEA3,MAGEA6; ENSG00000221867,ENSG00000197172; CTA,CTA
LEARGEAL

SEQ ID NO: 39358 - protein, 8 aa, Homo sapiens
  Table A; Target 39358; HLA-B*18:01; MAGEA3,MAGEA6; ENSG00000221867,ENSG00000197172; CTA,CTA
LEARGEAL

SEQ ID NO: 39359 - protein, 8 aa, Homo sapiens
  Table A; Target 39359; HLA-B*37:01; MAGEA3,MAGEA6; ENSG00000221867,ENSG00000197172; CTA,CTA
LEARGEAL

SEQ ID NO: 39360 - protein, 8 aa, Homo sapiens
  Table A; Target 39360; HLA-B*40:01; MAGEA3,MAGEA6; ENSG00000221867,ENSG00000197172; CTA,CTA
LEARGEAL

SEQ ID NO: 39361 - protein, 8 aa, Homo sapiens
  Table A; Target 39361; HLA-B*40:02; MAGEA3,MAGEA6; ENSG00000221867,ENSG00000197172; CTA,CTA
LEARGEAL

SEQ ID NO: 39362 - protein, 8 aa, Homo sapiens
  Table A; Target 39362; HLA-C*03:03; MAGEA3,MAGEA6; ENSG00000221867,ENSG00000197172; CTA,CTA
LEARGEAL

SEQ ID NO: 39363 - protein, 8 aa, Homo sapiens
  Table A; Target 39363; HLA-C*03:04; MAGEA3,MAGEA6; ENSG00000221867,ENSG00000197172; CTA,CTA
LEARGEAL

SEQ ID NO: 39364 - protein, 10 aa, Homo sapiens
  Table A; Target 39364; HLA-A*30:01; MAGEA3,MAGEA6; ENSG00000221867,ENSG00000197172; CTA,CTA
LEARGEALGL

SEQ ID NO: 39365 - protein, 10 aa, Homo sapiens
  Table A; Target 39365; HLA-B*40:01; MAGEA3,MAGEA6; ENSG00000221867,ENSG00000197172; CTA,CTA
LEARGEALGL

SEQ ID NO: 39366 - protein, 10 aa, Homo sapiens
  Table A; Target 39366; HLA-B*40:02; MAGEA3,MAGEA6; ENSG00000221867,ENSG00000197172; CTA,CTA
LEARGEALGL

SEQ ID NO: 39367 - protein, 11 aa, Homo sapiens
  Table A; Target 39367; HLA-B*49:01; MAGEA3,MAGEA6; ENSG00000221867,ENSG00000197172; CTA,CTA
LEARGEALGLV

SEQ ID NO: 39368 - protein, 8 aa, Homo sapiens
  Table A; Target 39368; HLA-B*18:01; MAGEA3,MAGEA6; ENSG00000221867,ENSG00000197172; CTA,CTA
LESEFQAA

SEQ ID NO: 39369 - protein, 8 aa, Homo sapiens
  Table A; Target 39369; HLA-B*49:01; MAGEA3,MAGEA6; ENSG00000221867,ENSG00000197172; CTA,CTA
LESEFQAA

SEQ ID NO: 39370 - protein, 9 aa, Homo sapiens
  Table A; Target 39370; HLA-B*15:03; MAGEA3,MAGEA6; ENSG00000221867,ENSG00000197172; CTA,CTA
LESEFQAAL

SEQ ID NO: 39371 - protein, 9 aa, Homo sapiens
  Table A; Target 39371; HLA-B*18:01; MAGEA3,MAGEA6; ENSG00000221867,ENSG00000197172; CTA,CTA
LESEFQAAL

SEQ ID NO: 39372 - protein, 9 aa, Homo sapiens
  Table A; Target 39372; HLA-B*27:02; MAGEA3,MAGEA6; ENSG00000221867,ENSG00000197172; CTA,CTA
LESEFQAAL

SEQ ID NO: 39373 - protein, 9 aa, Homo sapiens
  Table A; Target 39373; HLA-B*27:05; MAGEA3,MAGEA6; ENSG00000221867,ENSG00000197172; CTA,CTA
LESEFQAAL

SEQ ID NO: 39374 - protein, 9 aa, Homo sapiens
  Table A; Target 39374; HLA-B*37:01; MAGEA3,MAGEA6; ENSG00000221867,ENSG00000197172; CTA,CTA
LESEFQAAL

SEQ ID NO: 39375 - protein, 9 aa, Homo sapiens
  Table A; Target 39375; HLA-B*38:01; MAGEA3,MAGEA6; ENSG00000221867,ENSG00000197172; CTA,CTA
LESEFQAAL

SEQ ID NO: 39376 - protein, 9 aa, Homo sapiens
  Table A; Target 39376; HLA-B*39:01; MAGEA3,MAGEA6; ENSG00000221867,ENSG00000197172; CTA,CTA
LESEFQAAL

SEQ ID NO: 39377 - protein, 9 aa, Homo sapiens
  Table A; Target 39377; HLA-B*40:02; MAGEA3,MAGEA6; ENSG00000221867,ENSG00000197172; CTA,CTA
LESEFQAAL

SEQ ID NO: 39378 - protein, 9 aa, Homo sapiens
  Table A; Target 39378; HLA-B*44:02; MAGEA3,MAGEA6; ENSG00000221867,ENSG00000197172; CTA,CTA
LESEFQAAL

SEQ ID NO: 39379 - protein, 9 aa, Homo sapiens
  Table A; Target 39379; HLA-B*44:03; MAGEA3,MAGEA6; ENSG00000221867,ENSG00000197172; CTA,CTA
LESEFQAAL

SEQ ID NO: 39380 - protein, 9 aa, Homo sapiens
  Table A; Target 39380; HLA-C*02:02; MAGEA3,MAGEA6; ENSG00000221867,ENSG00000197172; CTA,CTA
LESEFQAAL

SEQ ID NO: 39381 - protein, 9 aa, Homo sapiens
  Table A; Target 39381; HLA-C*03:03; MAGEA3,MAGEA6; ENSG00000221867,ENSG00000197172; CTA,CTA
LESEFQAAL

SEQ ID NO: 39382 - protein, 9 aa, Homo sapiens
  Table A; Target 39382; HLA-C*03:04; MAGEA3,MAGEA6; ENSG00000221867,ENSG00000197172; CTA,CTA
LESEFQAAL

SEQ ID NO: 39383 - protein, 9 aa, Homo sapiens
  Table A; Target 39383; HLA-C*07:04; MAGEA3,MAGEA6; ENSG00000221867,ENSG00000197172; CTA,CTA
LESEFQAAL

SEQ ID NO: 39384 - protein, 9 aa, Homo sapiens
  Table A; Target 39384; HLA-C*14:02; MAGEA3,MAGEA6; ENSG00000221867,ENSG00000197172; CTA,CTA
LESEFQAAL

SEQ ID NO: 39385 - protein, 9 aa, Homo sapiens
  Table A; Target 39385; HLA-C*16:04; MAGEA3,MAGEA6; ENSG00000221867,ENSG00000197172; CTA,CTA
LESEFQAAL

SEQ ID NO: 39386 - protein, 10 aa, Homo sapiens
  Table A; Target 39386; HLA-C*01:02; MAGEA3,MAGEA6; ENSG00000221867,ENSG00000197172; CTA,CTA
LGLVGAQAPA

SEQ ID NO: 39387 - protein, 10 aa, Homo sapiens
  Table A; Target 39387; HLA-A*01:01; MAGEA3,MAGEA6; ENSG00000221867,ENSG00000197172; CTA,CTA
LGSVVGNWQY

SEQ ID NO: 39388 - protein, 10 aa, Homo sapiens
  Table A; Target 39388; HLA-C*04:01; MAGEA3,MAGEA6; ENSG00000221867,ENSG00000197172; CTA,CTA
LGSVVGNWQY

SEQ ID NO: 39389 - protein, 9 aa, Homo sapiens
  Table A; Target 39389; HLA-B*35:01; MAGEA3,MAGEA6; ENSG00000221867,ENSG00000197172; CTA,CTA
LPTTMNYPL

SEQ ID NO: 39390 - protein, 9 aa, Homo sapiens
  Table A; Target 39390; HLA-B*35:03; MAGEA3,MAGEA6; ENSG00000221867,ENSG00000197172; CTA,CTA
LPTTMNYPL

SEQ ID NO: 39391 - protein, 10 aa, Homo sapiens
  Table A; Target 39391; HLA-A*24:02; MAGEA3,MAGEA6; ENSG00000221867,ENSG00000197172; CTA,CTA
LPTTMNYPLW

SEQ ID NO: 39392 - protein, 10 aa, Homo sapiens
  Table A; Target 39392; HLA-B*07:02; MAGEA3,MAGEA6; ENSG00000221867,ENSG00000197172; CTA,CTA
LPTTMNYPLW

SEQ ID NO: 39393 - protein, 10 aa, Homo sapiens
  Table A; Target 39393; HLA-B*27:02; MAGEA3,MAGEA6; ENSG00000221867,ENSG00000197172; CTA,CTA
LPTTMNYPLW

SEQ ID NO: 39394 - protein, 10 aa, Homo sapiens
  Table A; Target 39394; HLA-B*57:01; MAGEA3,MAGEA6; ENSG00000221867,ENSG00000197172; CTA,CTA
LPTTMNYPLW

SEQ ID NO: 39395 - protein, 9 aa, Homo sapiens
  Table A; Target 39395; HLA-A*02:01; MAGEA3,MAGEA6; ENSG00000221867,ENSG00000197172; CTA,CTA
LQLVFGIEL

SEQ ID NO: 39396 - protein, 9 aa, Homo sapiens
  Table A; Target 39396; HLA-A*02:04; MAGEA3,MAGEA6; ENSG00000221867,ENSG00000197172; CTA,CTA
LQLVFGIEL

SEQ ID NO: 39397 - protein, 9 aa, Homo sapiens
  Table A; Target 39397; HLA-B*13:02; MAGEA3,MAGEA6; ENSG00000221867,ENSG00000197172; CTA,CTA
LQLVFGIEL

SEQ ID NO: 39398 - protein, 9 aa, Homo sapiens
  Table A; Target 39398; HLA-C*03:04; MAGEA3,MAGEA6; ENSG00000221867,ENSG00000197172; CTA,CTA
LQLVFGIEL

SEQ ID NO: 39399 - protein, 10 aa, Homo sapiens
  Table A; Target 39399; HLA-B*27:02; MAGEA3,MAGEA6; ENSG00000221867,ENSG00000197172; CTA,CTA
LSVLEVFEGR

SEQ ID NO: 39400 - protein, 10 aa, Homo sapiens
  Table A; Target 39400; HLA-B*57:01; MAGEA3,MAGEA6; ENSG00000221867,ENSG00000197172; CTA,CTA
LSVLEVFEGR

SEQ ID NO: 39401 - protein, 9 aa, Homo sapiens
  Table A; Target 39401; HLA-C*05:01; MAGEA3,MAGEA6; ENSG00000221867,ENSG00000197172; CTA,CTA
LVEVTLGEV

SEQ ID NO: 39402 - protein, 10 aa, Homo sapiens
  Table A; Target 39402; HLA-A*02:01; MAGEA3,MAGEA6; ENSG00000221867,ENSG00000197172; CTA,CTA
LVFGIELMEV

SEQ ID NO: 39403 - protein, 10 aa, Homo sapiens
  Table A; Target 39403; HLA-A*02:03; MAGEA3,MAGEA6; ENSG00000221867,ENSG00000197172; CTA,CTA
LVFGIELMEV

SEQ ID NO: 39404 - protein, 10 aa, Homo sapiens
  Table A; Target 39404; HLA-A*02:04; MAGEA3,MAGEA6; ENSG00000221867,ENSG00000197172; CTA,CTA
LVFGIELMEV

SEQ ID NO: 39405 - protein, 10 aa, Homo sapiens
  Table A; Target 39405; HLA-A*02:07; MAGEA3,MAGEA6; ENSG00000221867,ENSG00000197172; CTA,CTA
LVFGIELMEV

SEQ ID NO: 39406 - protein, 10 aa, Homo sapiens
  Table A; Target 39406; HLA-A*68:02; MAGEA3,MAGEA6; ENSG00000221867,ENSG00000197172; CTA,CTA
LVFGIELMEV

SEQ ID NO: 39407 - protein, 9 aa, Homo sapiens
  Table A; Target 39407; HLA-A*01:01; MAGEA3,MAGEA6; ENSG00000221867,ENSG00000197172; CTA,CTA
LVHFLLLKY

SEQ ID NO: 39408 - protein, 9 aa, Homo sapiens
  Table A; Target 39408; HLA-B*57:01; MAGEA3,MAGEA6; ENSG00000221867,ENSG00000197172; CTA,CTA
LVHFLLLKY

SEQ ID NO: 39409 - protein, 8 aa, Homo sapiens
  Table A; Target 39409; HLA-B*18:01; MAGEA3,MAGEA6; ENSG00000221867,ENSG00000197172; CTA,CTA
MEVDPIGH

SEQ ID NO: 39410 - protein, 9 aa, Homo sapiens
  Table A; Target 39410; HLA-A*23:01; MAGEA3,MAGEA6; ENSG00000221867,ENSG00000197172; CTA,CTA
MLGSVVGNW

SEQ ID NO: 39411 - protein, 9 aa, Homo sapiens
  Table A; Target 39411; HLA-A*24:02; MAGEA3,MAGEA6; ENSG00000221867,ENSG00000197172; CTA,CTA
MLGSVVGNW

SEQ ID NO: 39412 - protein, 9 aa, Homo sapiens
  Table A; Target 39412; HLA-A*25:01; MAGEA3,MAGEA6; ENSG00000221867,ENSG00000197172; CTA,CTA
MLGSVVGNW

SEQ ID NO: 39413 - protein, 9 aa, Homo sapiens
  Table A; Target 39413; HLA-A*32:01; MAGEA3,MAGEA6; ENSG00000221867,ENSG00000197172; CTA,CTA
MLGSVVGNW

SEQ ID NO: 39414 - protein, 9 aa, Homo sapiens
  Table A; Target 39414; HLA-A*33:03; MAGEA3,MAGEA6; ENSG00000221867,ENSG00000197172; CTA,CTA
MLGSVVGNW

SEQ ID NO: 39415 - protein, 9 aa, Homo sapiens
  Table A; Target 39415; HLA-B*44:02; MAGEA3,MAGEA6; ENSG00000221867,ENSG00000197172; CTA,CTA
MLGSVVGNW

SEQ ID NO: 39416 - protein, 9 aa, Homo sapiens
  Table A; Target 39416; HLA-B*44:03; MAGEA3,MAGEA6; ENSG00000221867,ENSG00000197172; CTA,CTA
MLGSVVGNW

SEQ ID NO: 39417 - protein, 9 aa, Homo sapiens
  Table A; Target 39417; HLA-B*57:01; MAGEA3,MAGEA6; ENSG00000221867,ENSG00000197172; CTA,CTA
MLGSVVGNW

SEQ ID NO: 39418 - protein, 9 aa, Homo sapiens
  Table A; Target 39418; HLA-B*58:01; MAGEA3,MAGEA6; ENSG00000221867,ENSG00000197172; CTA,CTA
MLGSVVGNW

SEQ ID NO: 39419 - protein, 9 aa, Homo sapiens
  Table A; Target 39419; HLA-C*07:04; MAGEA3,MAGEA6; ENSG00000221867,ENSG00000197172; CTA,CTA
MLGSVVGNW

SEQ ID NO: 39420 - protein, 11 aa, Homo sapiens
  Table A; Target 39420; HLA-A*01:01; MAGEA3,MAGEA6; ENSG00000221867,ENSG00000197172; CTA,CTA
MLGSVVGNWQY

SEQ ID NO: 39421 - protein, 11 aa, Homo sapiens
  Table A; Target 39421; HLA-A*29:02; MAGEA3,MAGEA6; ENSG00000221867,ENSG00000197172; CTA,CTA
MLGSVVGNWQY

SEQ ID NO: 39422 - protein, 10 aa, Homo sapiens
  Table A; Target 39422; HLA-A*29:02; MAGEA3,MAGEA6; ENSG00000221867,ENSG00000197172; CTA,CTA
MNYPLWSQSY

SEQ ID NO: 39423 - protein, 10 aa, Homo sapiens
  Table A; Target 39423; HLA-B*38:01; MAGEA3,MAGEA6; ENSG00000221867,ENSG00000197172; CTA,CTA
NQEEEGPSTF

SEQ ID NO: 39424 - protein, 10 aa, Homo sapiens
  Table A; Target 39424; HLA-B*39:01; MAGEA3,MAGEA6; ENSG00000221867,ENSG00000197172; CTA,CTA
NQEEEGPSTF

SEQ ID NO: 39425 - protein, 10 aa, Homo sapiens
  Table A; Target 39425; HLA-C*05:01; MAGEA3,MAGEA6; ENSG00000221867,ENSG00000197172; CTA,CTA
NQEEEGPSTF

SEQ ID NO: 39426 - protein, 9 aa, Homo sapiens
  Table A; Target 39426; HLA-A*23:01; MAGEA3,MAGEA6; ENSG00000221867,ENSG00000197172; CTA,CTA
NYPLWSQSY

SEQ ID NO: 39427 - protein, 9 aa, Homo sapiens
  Table A; Target 39427; HLA-A*24:02; MAGEA3,MAGEA6; ENSG00000221867,ENSG00000197172; CTA,CTA
NYPLWSQSY

SEQ ID NO: 39428 - protein, 9 aa, Homo sapiens
  Table A; Target 39428; HLA-A*29:02; MAGEA3,MAGEA6; ENSG00000221867,ENSG00000197172; CTA,CTA
NYPLWSQSY

SEQ ID NO: 39429 - protein, 9 aa, Homo sapiens
  Table A; Target 39429; HLA-A*30:02; MAGEA3,MAGEA6; ENSG00000221867,ENSG00000197172; CTA,CTA
NYPLWSQSY

SEQ ID NO: 39430 - protein, 9 aa, Homo sapiens
  Table A; Target 39430; HLA-B*15:03; MAGEA3,MAGEA6; ENSG00000221867,ENSG00000197172; CTA,CTA
NYPLWSQSY

SEQ ID NO: 39431 - protein, 9 aa, Homo sapiens
  Table A; Target 39431; HLA-C*01:02; MAGEA3,MAGEA6; ENSG00000221867,ENSG00000197172; CTA,CTA
NYPLWSQSY

SEQ ID NO: 39432 - protein, 9 aa, Homo sapiens
  Table A; Target 39432; HLA-C*14:02; MAGEA3,MAGEA6; ENSG00000221867,ENSG00000197172; CTA,CTA
NYPLWSQSY

SEQ ID NO: 39433 - protein, 8 aa, Homo sapiens
  Table A; Target 39433; HLA-C*04:01; MAGEA3,MAGEA6; ENSG00000221867,ENSG00000197172; CTA,CTA
PVTKAEML

SEQ ID NO: 39434 - protein, 8 aa, Homo sapiens
  Table A; Target 39434; HLA-C*07:02; MAGEA3,MAGEA6; ENSG00000221867,ENSG00000197172; CTA,CTA
PVTKAEML

SEQ ID NO: 39435 - protein, 8 aa, Homo sapiens
  Table A; Target 39435; HLA-B*08:01; MAGEA3,MAGEA6; ENSG00000221867,ENSG00000197172; CTA,CTA
QAALSRKV

SEQ ID NO: 39436 - protein, 8 aa, Homo sapiens
  Table A; Target 39436; HLA-B*51:01; MAGEA3,MAGEA6; ENSG00000221867,ENSG00000197172; CTA,CTA
QAALSRKV

SEQ ID NO: 39437 - protein, 8 aa, Homo sapiens
  Table A; Target 39437; HLA-C*03:04; MAGEA3,MAGEA6; ENSG00000221867,ENSG00000197172; CTA,CTA
QAALSRKV

SEQ ID NO: 39438 - protein, 8 aa, Homo sapiens
  Table A; Target 39438; HLA-C*06:02; MAGEA3,MAGEA6; ENSG00000221867,ENSG00000197172; CTA,CTA
QAALSRKV

SEQ ID NO: 39439 - protein, 8 aa, Homo sapiens
  Table A; Target 39439; HLA-C*16:01; MAGEA3,MAGEA6; ENSG00000221867,ENSG00000197172; CTA,CTA
QAALSRKV

SEQ ID NO: 39440 - protein, 8 aa, Homo sapiens
  Table A; Target 39440; HLA-C*16:02; MAGEA3,MAGEA6; ENSG00000221867,ENSG00000197172; CTA,CTA
QAALSRKV

SEQ ID NO: 39441 - protein, 9 aa, Homo sapiens
  Table A; Target 39441; HLA-B*54:01; MAGEA3,MAGEA6; ENSG00000221867,ENSG00000197172; CTA,CTA
QAALSRKVA

SEQ ID NO: 39442 - protein, 10 aa, Homo sapiens
  Table A; Target 39442; HLA-A*30:01; MAGEA3,MAGEA6; ENSG00000221867,ENSG00000197172; CTA,CTA
QEAASSSSTL

SEQ ID NO: 39443 - protein, 10 aa, Homo sapiens
  Table A; Target 39443; HLA-B*38:01; MAGEA3,MAGEA6; ENSG00000221867,ENSG00000197172; CTA,CTA
QEAASSSSTL

SEQ ID NO: 39444 - protein, 10 aa, Homo sapiens
  Table A; Target 39444; HLA-B*40:02; MAGEA3,MAGEA6; ENSG00000221867,ENSG00000197172; CTA,CTA
QEAASSSSTL

SEQ ID NO: 39445 - protein, 10 aa, Homo sapiens
  Table A; Target 39445; HLA-B*44:03; MAGEA3,MAGEA6; ENSG00000221867,ENSG00000197172; CTA,CTA
QEAASSSSTL

SEQ ID NO: 39446 - protein, 10 aa, Homo sapiens
  Table A; Target 39446; HLA-B*49:01; MAGEA3,MAGEA6; ENSG00000221867,ENSG00000197172; CTA,CTA
QEAASSSSTL

SEQ ID NO: 39447 - protein, 11 aa, Homo sapiens
  Table A; Target 39447; HLA-B*49:01; MAGEA3,MAGEA6; ENSG00000221867,ENSG00000197172; CTA,CTA
QEAASSSSTLV

SEQ ID NO: 39448 - protein, 9 aa, Homo sapiens
  Table A; Target 39448; HLA-A*30:01; MAGEA3,MAGEA6; ENSG00000221867,ENSG00000197172; CTA,CTA
QEEEGPSTF

SEQ ID NO: 39449 - protein, 9 aa, Homo sapiens
  Table A; Target 39449; HLA-B*18:01; MAGEA3,MAGEA6; ENSG00000221867,ENSG00000197172; CTA,CTA
QEEEGPSTF

SEQ ID NO: 39450 - protein, 9 aa, Homo sapiens
  Table A; Target 39450; HLA-B*37:01; MAGEA3,MAGEA6; ENSG00000221867,ENSG00000197172; CTA,CTA
QEEEGPSTF

SEQ ID NO: 39451 - protein, 9 aa, Homo sapiens
  Table A; Target 39451; HLA-B*38:01; MAGEA3,MAGEA6; ENSG00000221867,ENSG00000197172; CTA,CTA
QEEEGPSTF

SEQ ID NO: 39452 - protein, 9 aa, Homo sapiens
  Table A; Target 39452; HLA-B*40:01; MAGEA3,MAGEA6; ENSG00000221867,ENSG00000197172; CTA,CTA
QEEEGPSTF

SEQ ID NO: 39453 - protein, 9 aa, Homo sapiens
  Table A; Target 39453; HLA-B*44:02; MAGEA3,MAGEA6; ENSG00000221867,ENSG00000197172; CTA,CTA
QEEEGPSTF

SEQ ID NO: 39454 - protein, 9 aa, Homo sapiens
  Table A; Target 39454; HLA-B*44:03; MAGEA3,MAGEA6; ENSG00000221867,ENSG00000197172; CTA,CTA
QEEEGPSTF

SEQ ID NO: 39455 - protein, 9 aa, Homo sapiens
  Table A; Target 39455; HLA-B*49:01; MAGEA3,MAGEA6; ENSG00000221867,ENSG00000197172; CTA,CTA
QEEEGPSTF

SEQ ID NO: 39456 - protein, 9 aa, Homo sapiens
  Table A; Target 39456; HLA-C*02:02; MAGEA3,MAGEA6; ENSG00000221867,ENSG00000197172; CTA,CTA
QEEEGPSTF

SEQ ID NO: 39457 - protein, 9 aa, Homo sapiens
  Table A; Target 39457; HLA-C*05:01; MAGEA3,MAGEA6; ENSG00000221867,ENSG00000197172; CTA,CTA
QEEEGPSTF

SEQ ID NO: 39458 - protein, 9 aa, Homo sapiens
  Table A; Target 39458; HLA-C*16:04; MAGEA3,MAGEA6; ENSG00000221867,ENSG00000197172; CTA,CTA
QEEEGPSTF

SEQ ID NO: 39459 - protein, 11 aa, Homo sapiens
  Table A; Target 39459; HLA-A*02:01; MAGEA3,MAGEA6; ENSG00000221867,ENSG00000197172; CTA,CTA
QLVFGIELMEV

SEQ ID NO: 39460 - protein, 10 aa, Homo sapiens
  Table A; Target 39460; HLA-A*25:01; MAGEA3,MAGEA6; ENSG00000221867,ENSG00000197172; CTA,CTA
QVPGSDPACY

SEQ ID NO: 39461 - protein, 10 aa, Homo sapiens
  Table A; Target 39461; HLA-A*26:01; MAGEA3,MAGEA6; ENSG00000221867,ENSG00000197172; CTA,CTA
QVPGSDPACY

SEQ ID NO: 39462 - protein, 10 aa, Homo sapiens
  Table A; Target 39462; HLA-A*29:02; MAGEA3,MAGEA6; ENSG00000221867,ENSG00000197172; CTA,CTA
QVPGSDPACY

SEQ ID NO: 39463 - protein, 10 aa, Homo sapiens
  Table A; Target 39463; HLA-A*30:02; MAGEA3,MAGEA6; ENSG00000221867,ENSG00000197172; CTA,CTA
QVPGSDPACY

SEQ ID NO: 39464 - protein, 10 aa, Homo sapiens
  Table A; Target 39464; HLA-C*07:04; MAGEA3,MAGEA6; ENSG00000221867,ENSG00000197172; CTA,CTA
QVPGSDPACY

SEQ ID NO: 39465 - protein, 8 aa, Homo sapiens
  Table A; Target 39465; HLA-A*24:02; MAGEA3,MAGEA6; ENSG00000221867,ENSG00000197172; CTA,CTA
QYFFPVIF

SEQ ID NO: 39466 - protein, 10 aa, Homo sapiens
  Table A; Target 39466; HLA-B*27:02; MAGEA3,MAGEA6; ENSG00000221867,ENSG00000197172; CTA,CTA
QYFFPVIFSK

SEQ ID NO: 39467 - protein, 9 aa, Homo sapiens
  Table A; Target 39467; HLA-C*07:02; MAGEA3,MAGEA6; ENSG00000221867,ENSG00000197172; CTA,CTA
RAREPVTKA

SEQ ID NO: 39468 - protein, 9 aa, Homo sapiens
  Table A; Target 39468; HLA-B*07:02; MAGEA3,MAGEA6; ENSG00000221867,ENSG00000197172; CTA,CTA
REPVTKAEM

SEQ ID NO: 39469 - protein, 9 aa, Homo sapiens
  Table A; Target 39469; HLA-C*16:04; MAGEA3,MAGEA6; ENSG00000221867,ENSG00000197172; CTA,CTA
REPVTKAEM

SEQ ID NO: 39470 - protein, 11 aa, Homo sapiens
  Table A; Target 39470; HLA-A*32:01; MAGEA3,MAGEA6; ENSG00000221867,ENSG00000197172; CTA,CTA
RQVPGSDPACY

SEQ ID NO: 39471 - protein, 11 aa, Homo sapiens
  Table A; Target 39471; HLA-B*15:03; MAGEA3,MAGEA6; ENSG00000221867,ENSG00000197172; CTA,CTA
RQVPGSDPACY

SEQ ID NO: 39472 - protein, 11 aa, Homo sapiens
  Table A; Target 39472; HLA-B*39:01; MAGEA3,MAGEA6; ENSG00000221867,ENSG00000197172; CTA,CTA
RQVPGSDPACY

SEQ ID NO: 39473 - protein, 11 aa, Homo sapiens
  Table A; Target 39473; HLA-B*58:01; MAGEA3,MAGEA6; ENSG00000221867,ENSG00000197172; CTA,CTA
RQVPGSDPACY

SEQ ID NO: 39474 - protein, 11 aa, Homo sapiens
  Table A; Target 39474; HLA-C*07:04; MAGEA3,MAGEA6; ENSG00000221867,ENSG00000197172; CTA,CTA
RQVPGSDPACY

SEQ ID NO: 39475 - protein, 11 aa, Homo sapiens
  Table A; Target 39475; HLA-C*16:04; MAGEA3,MAGEA6; ENSG00000221867,ENSG00000197172; CTA,CTA
RQVPGSDPACY

SEQ ID NO: 39476 - protein, 8 aa, Homo sapiens
  Table A; Target 39476; HLA-B*37:01; MAGEA3,MAGEA6; ENSG00000221867,ENSG00000197172; CTA,CTA
SDPACYEF

SEQ ID NO: 39477 - protein, 9 aa, Homo sapiens
  Table A; Target 39477; HLA-B*18:01; MAGEA3,MAGEA6; ENSG00000221867,ENSG00000197172; CTA,CTA
SEFQAALSR

SEQ ID NO: 39478 - protein, 9 aa, Homo sapiens
  Table A; Target 39478; HLA-B*27:02; MAGEA3,MAGEA6; ENSG00000221867,ENSG00000197172; CTA,CTA
SEFQAALSR

SEQ ID NO: 39479 - protein, 9 aa, Homo sapiens
  Table A; Target 39479; HLA-B*27:05; MAGEA3,MAGEA6; ENSG00000221867,ENSG00000197172; CTA,CTA
SEFQAALSR

SEQ ID NO: 39480 - protein, 9 aa, Homo sapiens
  Table A; Target 39480; HLA-B*44:02; MAGEA3,MAGEA6; ENSG00000221867,ENSG00000197172; CTA,CTA
SEFQAALSR

SEQ ID NO: 39481 - protein, 9 aa, Homo sapiens
  Table A; Target 39481; HLA-B*44:03; MAGEA3,MAGEA6; ENSG00000221867,ENSG00000197172; CTA,CTA
SEFQAALSR

SEQ ID NO: 39482 - protein, 9 aa, Homo sapiens
  Table A; Target 39482; HLA-B*49:01; MAGEA3,MAGEA6; ENSG00000221867,ENSG00000197172; CTA,CTA
SEFQAALSR

SEQ ID NO: 39483 - protein, 9 aa, Homo sapiens
  Table A; Target 39483; HLA-C*07:06; MAGEA3,MAGEA6; ENSG00000221867,ENSG00000197172; CTA,CTA
SEFQAALSR

SEQ ID NO: 39484 - protein, 9 aa, Homo sapiens
  Table A; Target 39484; HLA-C*16:04; MAGEA3,MAGEA6; ENSG00000221867,ENSG00000197172; CTA,CTA
SEFQAALSR

SEQ ID NO: 39485 - protein, 8 aa, Homo sapiens
  Table A; Target 39485; HLA-A*29:02; MAGEA3,MAGEA6; ENSG00000221867,ENSG00000197172; CTA,CTA
SLPTTMNY

SEQ ID NO: 39486 - protein, 8 aa, Homo sapiens
  Table A; Target 39486; HLA-A*30:02; MAGEA3,MAGEA6; ENSG00000221867,ENSG00000197172; CTA,CTA
SLPTTMNY

SEQ ID NO: 39487 - protein, 8 aa, Homo sapiens
  Table A; Target 39487; HLA-B*15:01; MAGEA3,MAGEA6; ENSG00000221867,ENSG00000197172; CTA,CTA
SLPTTMNY

SEQ ID NO: 39488 - protein, 8 aa, Homo sapiens
  Table A; Target 39488; HLA-B*46:01; MAGEA3,MAGEA6; ENSG00000221867,ENSG00000197172; CTA,CTA
SLPTTMNY

SEQ ID NO: 39489 - protein, 8 aa, Homo sapiens
  Table A; Target 39489; HLA-C*01:02; MAGEA3,MAGEA6; ENSG00000221867,ENSG00000197172; CTA,CTA
SLPTTMNY

SEQ ID NO: 39490 - protein, 8 aa, Homo sapiens
  Table A; Target 39490; HLA-C*14:02; MAGEA3,MAGEA6; ENSG00000221867,ENSG00000197172; CTA,CTA
SLPTTMNY

SEQ ID NO: 39491 - protein, 10 aa, Homo sapiens
  Table A; Target 39491; HLA-A*02:07; MAGEA3,MAGEA6; ENSG00000221867,ENSG00000197172; CTA,CTA
SLPTTMNYPL

SEQ ID NO: 39492 - protein, 11 aa, Homo sapiens
  Table A; Target 39492; HLA-A*24:02; MAGEA3,MAGEA6; ENSG00000221867,ENSG00000197172; CTA,CTA
SLPTTMNYPLW

SEQ ID NO: 39493 - protein, 10 aa, Homo sapiens
  Table A; Target 39493; HLA-A*02:04; MAGEA3,MAGEA6; ENSG00000221867,ENSG00000197172; CTA,CTA
SLQLVFGIEL

SEQ ID NO: 39494 - protein, 10 aa, Homo sapiens
  Table A; Target 39494; HLA-A*02:07; MAGEA3,MAGEA6; ENSG00000221867,ENSG00000197172; CTA,CTA
SLQLVFGIEL

SEQ ID NO: 39495 - protein, 11 aa, Homo sapiens
  Table A; Target 39495; HLA-C*05:01; MAGEA3,MAGEA6; ENSG00000221867,ENSG00000197172; CTA,CTA
SNQEEEGPSTF

SEQ ID NO: 39496 - protein, 11 aa, Homo sapiens
  Table A; Target 39496; HLA-B*56:01; MAGEA3,MAGEA6; ENSG00000221867,ENSG00000197172; CTA,CTA
SPDPPQSPQGA

SEQ ID NO: 39497 - protein, 8 aa, Homo sapiens
  Table A; Target 39497; HLA-B*07:02; MAGEA3,MAGEA6; ENSG00000221867,ENSG00000197172; CTA,CTA
SPQGASSL

SEQ ID NO: 39498 - protein, 8 aa, Homo sapiens
  Table A; Target 39498; HLA-C*07:02; MAGEA3,MAGEA6; ENSG00000221867,ENSG00000197172; CTA,CTA
SPQGASSL

SEQ ID NO: 39499 - protein, 9 aa, Homo sapiens
  Table A; Target 39499; HLA-A*01:01; MAGEA3,MAGEA6; ENSG00000221867,ENSG00000197172; CTA,CTA
SSLPTTMNY

SEQ ID NO: 39500 - protein, 9 aa, Homo sapiens
  Table A; Target 39500; HLA-A*03:01; MAGEA3,MAGEA6; ENSG00000221867,ENSG00000197172; CTA,CTA
SSLPTTMNY

SEQ ID NO: 39501 - protein, 9 aa, Homo sapiens
  Table A; Target 39501; HLA-A*03:02; MAGEA3,MAGEA6; ENSG00000221867,ENSG00000197172; CTA,CTA
SSLPTTMNY

SEQ ID NO: 39502 - protein, 9 aa, Homo sapiens
  Table A; Target 39502; HLA-A*11:01; MAGEA3,MAGEA6; ENSG00000221867,ENSG00000197172; CTA,CTA
SSLPTTMNY

SEQ ID NO: 39503 - protein, 9 aa, Homo sapiens
  Table A; Target 39503; HLA-A*23:01; MAGEA3,MAGEA6; ENSG00000221867,ENSG00000197172; CTA,CTA
SSLPTTMNY

SEQ ID NO: 39504 - protein, 9 aa, Homo sapiens
  Table A; Target 39504; HLA-A*25:01; MAGEA3,MAGEA6; ENSG00000221867,ENSG00000197172; CTA,CTA
SSLPTTMNY

SEQ ID NO: 39505 - protein, 9 aa, Homo sapiens
  Table A; Target 39505; HLA-A*26:01; MAGEA3,MAGEA6; ENSG00000221867,ENSG00000197172; CTA,CTA
SSLPTTMNY

SEQ ID NO: 39506 - protein, 9 aa, Homo sapiens
  Table A; Target 39506; HLA-A*29:02; MAGEA3,MAGEA6; ENSG00000221867,ENSG00000197172; CTA,CTA
SSLPTTMNY

SEQ ID NO: 39507 - protein, 9 aa, Homo sapiens
  Table A; Target 39507; HLA-A*31:01; MAGEA3,MAGEA6; ENSG00000221867,ENSG00000197172; CTA,CTA
SSLPTTMNY

SEQ ID NO: 39508 - protein, 9 aa, Homo sapiens
  Table A; Target 39508; HLA-A*32:01; MAGEA3,MAGEA6; ENSG00000221867,ENSG00000197172; CTA,CTA
SSLPTTMNY

SEQ ID NO: 39509 - protein, 9 aa, Homo sapiens
  Table A; Target 39509; HLA-B*15:01; MAGEA3,MAGEA6; ENSG00000221867,ENSG00000197172; CTA,CTA
SSLPTTMNY

SEQ ID NO: 39510 - protein, 9 aa, Homo sapiens
  Table A; Target 39510; HLA-B*15:03; MAGEA3,MAGEA6; ENSG00000221867,ENSG00000197172; CTA,CTA
SSLPTTMNY

SEQ ID NO: 39511 - protein, 9 aa, Homo sapiens
  Table A; Target 39511; HLA-B*35:01; MAGEA3,MAGEA6; ENSG00000221867,ENSG00000197172; CTA,CTA
SSLPTTMNY

SEQ ID NO: 39512 - protein, 9 aa, Homo sapiens
  Table A; Target 39512; HLA-B*44:03; MAGEA3,MAGEA6; ENSG00000221867,ENSG00000197172; CTA,CTA
SSLPTTMNY

SEQ ID NO: 39513 - protein, 9 aa, Homo sapiens
  Table A; Target 39513; HLA-B*46:01; MAGEA3,MAGEA6; ENSG00000221867,ENSG00000197172; CTA,CTA
SSLPTTMNY

SEQ ID NO: 39514 - protein, 9 aa, Homo sapiens
  Table A; Target 39514; HLA-B*57:01; MAGEA3,MAGEA6; ENSG00000221867,ENSG00000197172; CTA,CTA
SSLPTTMNY

SEQ ID NO: 39515 - protein, 9 aa, Homo sapiens
  Table A; Target 39515; HLA-C*01:02; MAGEA3,MAGEA6; ENSG00000221867,ENSG00000197172; CTA,CTA
SSLPTTMNY

SEQ ID NO: 39516 - protein, 9 aa, Homo sapiens
  Table A; Target 39516; HLA-C*02:02; MAGEA3,MAGEA6; ENSG00000221867,ENSG00000197172; CTA,CTA
SSLPTTMNY

SEQ ID NO: 39517 - protein, 9 aa, Homo sapiens
  Table A; Target 39517; HLA-C*06:02; MAGEA3,MAGEA6; ENSG00000221867,ENSG00000197172; CTA,CTA
SSLPTTMNY

SEQ ID NO: 39518 - protein, 9 aa, Homo sapiens
  Table A; Target 39518; HLA-C*07:01; MAGEA3,MAGEA6; ENSG00000221867,ENSG00000197172; CTA,CTA
SSLPTTMNY

SEQ ID NO: 39519 - protein, 9 aa, Homo sapiens
  Table A; Target 39519; HLA-C*07:04; MAGEA3,MAGEA6; ENSG00000221867,ENSG00000197172; CTA,CTA
SSLPTTMNY

SEQ ID NO: 39520 - protein, 9 aa, Homo sapiens
  Table A; Target 39520; HLA-C*07:06; MAGEA3,MAGEA6; ENSG00000221867,ENSG00000197172; CTA,CTA
SSLPTTMNY

SEQ ID NO: 39521 - protein, 9 aa, Homo sapiens
  Table A; Target 39521; HLA-C*12:03; MAGEA3,MAGEA6; ENSG00000221867,ENSG00000197172; CTA,CTA
SSLPTTMNY

SEQ ID NO: 39522 - protein, 9 aa, Homo sapiens
  Table A; Target 39522; HLA-C*16:01; MAGEA3,MAGEA6; ENSG00000221867,ENSG00000197172; CTA,CTA
SSLPTTMNY

SEQ ID NO: 39523 - protein, 9 aa, Homo sapiens
  Table A; Target 39523; HLA-C*16:02; MAGEA3,MAGEA6; ENSG00000221867,ENSG00000197172; CTA,CTA
SSLPTTMNY

SEQ ID NO: 39524 - protein, 9 aa, Homo sapiens
  Table A; Target 39524; HLA-C*16:04; MAGEA3,MAGEA6; ENSG00000221867,ENSG00000197172; CTA,CTA
SSLPTTMNY

SEQ ID NO: 39525 - protein, 9 aa, Homo sapiens
  Table A; Target 39525; HLA-A*02:01; MAGEA3,MAGEA6; ENSG00000221867,ENSG00000197172; CTA,CTA
SSSSTLVEV

SEQ ID NO: 39526 - protein, 9 aa, Homo sapiens
  Table A; Target 39526; HLA-A*02:03; MAGEA3,MAGEA6; ENSG00000221867,ENSG00000197172; CTA,CTA
SSSSTLVEV

SEQ ID NO: 39527 - protein, 9 aa, Homo sapiens
  Table A; Target 39527; HLA-A*68:02; MAGEA3,MAGEA6; ENSG00000221867,ENSG00000197172; CTA,CTA
SSSSTLVEV

SEQ ID NO: 39528 - protein, 9 aa, Homo sapiens
  Table A; Target 39528; HLA-B*13:02; MAGEA3,MAGEA6; ENSG00000221867,ENSG00000197172; CTA,CTA
SSSSTLVEV

SEQ ID NO: 39529 - protein, 9 aa, Homo sapiens
  Table A; Target 39529; HLA-B*56:01; MAGEA3,MAGEA6; ENSG00000221867,ENSG00000197172; CTA,CTA
SSSSTLVEV

SEQ ID NO: 39530 - protein, 9 aa, Homo sapiens
  Table A; Target 39530; HLA-C*02:02; MAGEA3,MAGEA6; ENSG00000221867,ENSG00000197172; CTA,CTA
SSSSTLVEV

SEQ ID NO: 39531 - protein, 9 aa, Homo sapiens
  Table A; Target 39531; HLA-C*16:02; MAGEA3,MAGEA6; ENSG00000221867,ENSG00000197172; CTA,CTA
SSSSTLVEV

SEQ ID NO: 39532 - protein, 11 aa, Homo sapiens
  Table A; Target 39532; HLA-B*38:01; MAGEA3,MAGEA6; ENSG00000221867,ENSG00000197172; CTA,CTA
SSSSTLVEVTL

SEQ ID NO: 39533 - protein, 10 aa, Homo sapiens
  Table A; Target 39533; HLA-A*68:02; MAGEA3,MAGEA6; ENSG00000221867,ENSG00000197172; CTA,CTA
SSSTLVEVTL

SEQ ID NO: 39534 - protein, 10 aa, Homo sapiens
  Table A; Target 39534; HLA-C*07:06; MAGEA3,MAGEA6; ENSG00000221867,ENSG00000197172; CTA,CTA
SSSTLVEVTL

SEQ ID NO: 39535 - protein, 9 aa, Homo sapiens
  Table A; Target 39535; HLA-A*23:01; MAGEA3,MAGEA6; ENSG00000221867,ENSG00000197172; CTA,CTA
SSTLVEVTL

SEQ ID NO: 39536 - protein, 9 aa, Homo sapiens
  Table A; Target 39536; HLA-A*30:01; MAGEA3,MAGEA6; ENSG00000221867,ENSG00000197172; CTA,CTA
SSTLVEVTL

SEQ ID NO: 39537 - protein, 9 aa, Homo sapiens
  Table A; Target 39537; HLA-A*68:02; MAGEA3,MAGEA6; ENSG00000221867,ENSG00000197172; CTA,CTA
SSTLVEVTL

SEQ ID NO: 39538 - protein, 9 aa, Homo sapiens
  Table A; Target 39538; HLA-B*13:02; MAGEA3,MAGEA6; ENSG00000221867,ENSG00000197172; CTA,CTA
SSTLVEVTL

SEQ ID NO: 39539 - protein, 9 aa, Homo sapiens
  Table A; Target 39539; HLA-B*35:03; MAGEA3,MAGEA6; ENSG00000221867,ENSG00000197172; CTA,CTA
SSTLVEVTL

SEQ ID NO: 39540 - protein, 9 aa, Homo sapiens
  Table A; Target 39540; HLA-B*38:01; MAGEA3,MAGEA6; ENSG00000221867,ENSG00000197172; CTA,CTA
SSTLVEVTL

SEQ ID NO: 39541 - protein, 9 aa, Homo sapiens
  Table A; Target 39541; HLA-B*39:01; MAGEA3,MAGEA6; ENSG00000221867,ENSG00000197172; CTA,CTA
SSTLVEVTL

SEQ ID NO: 39542 - protein, 9 aa, Homo sapiens
  Table A; Target 39542; HLA-B*40:01; MAGEA3,MAGEA6; ENSG00000221867,ENSG00000197172; CTA,CTA
SSTLVEVTL

SEQ ID NO: 39543 - protein, 9 aa, Homo sapiens
  Table A; Target 39543; HLA-B*57:01; MAGEA3,MAGEA6; ENSG00000221867,ENSG00000197172; CTA,CTA
SSTLVEVTL

SEQ ID NO: 39544 - protein, 9 aa, Homo sapiens
  Table A; Target 39544; HLA-B*58:01; MAGEA3,MAGEA6; ENSG00000221867,ENSG00000197172; CTA,CTA
SSTLVEVTL

SEQ ID NO: 39545 - protein, 9 aa, Homo sapiens
  Table A; Target 39545; HLA-C*02:02; MAGEA3,MAGEA6; ENSG00000221867,ENSG00000197172; CTA,CTA
SSTLVEVTL

SEQ ID NO: 39546 - protein, 9 aa, Homo sapiens
  Table A; Target 39546; HLA-C*03:03; MAGEA3,MAGEA6; ENSG00000221867,ENSG00000197172; CTA,CTA
SSTLVEVTL

SEQ ID NO: 39547 - protein, 9 aa, Homo sapiens
  Table A; Target 39547; HLA-C*03:04; MAGEA3,MAGEA6; ENSG00000221867,ENSG00000197172; CTA,CTA
SSTLVEVTL

SEQ ID NO: 39548 - protein, 9 aa, Homo sapiens
  Table A; Target 39548; HLA-C*04:01; MAGEA3,MAGEA6; ENSG00000221867,ENSG00000197172; CTA,CTA
SSTLVEVTL

SEQ ID NO: 39549 - protein, 9 aa, Homo sapiens
  Table A; Target 39549; HLA-C*05:01; MAGEA3,MAGEA6; ENSG00000221867,ENSG00000197172; CTA,CTA
SSTLVEVTL

SEQ ID NO: 39550 - protein, 9 aa, Homo sapiens
  Table A; Target 39550; HLA-C*07:04; MAGEA3,MAGEA6; ENSG00000221867,ENSG00000197172; CTA,CTA
SSTLVEVTL

SEQ ID NO: 39551 - protein, 9 aa, Homo sapiens
  Table A; Target 39551; HLA-C*07:06; MAGEA3,MAGEA6; ENSG00000221867,ENSG00000197172; CTA,CTA
SSTLVEVTL

SEQ ID NO: 39552 - protein, 9 aa, Homo sapiens
  Table A; Target 39552; HLA-C*12:03; MAGEA3,MAGEA6; ENSG00000221867,ENSG00000197172; CTA,CTA
SSTLVEVTL

SEQ ID NO: 39553 - protein, 9 aa, Homo sapiens
  Table A; Target 39553; HLA-C*16:01; MAGEA3,MAGEA6; ENSG00000221867,ENSG00000197172; CTA,CTA
SSTLVEVTL

SEQ ID NO: 39554 - protein, 9 aa, Homo sapiens
  Table A; Target 39554; HLA-C*16:02; MAGEA3,MAGEA6; ENSG00000221867,ENSG00000197172; CTA,CTA
SSTLVEVTL

SEQ ID NO: 39555 - protein, 9 aa, Homo sapiens
  Table A; Target 39555; HLA-C*16:04; MAGEA3,MAGEA6; ENSG00000221867,ENSG00000197172; CTA,CTA
SSTLVEVTL

SEQ ID NO: 39556 - protein, 10 aa, Homo sapiens
  Table A; Target 39556; HLA-A*25:01; MAGEA3,MAGEA6; ENSG00000221867,ENSG00000197172; CTA,CTA
STFPDLESEF

SEQ ID NO: 39557 - protein, 10 aa, Homo sapiens
  Table A; Target 39557; HLA-A*26:01; MAGEA3,MAGEA6; ENSG00000221867,ENSG00000197172; CTA,CTA
STFPDLESEF

SEQ ID NO: 39558 - protein, 10 aa, Homo sapiens
  Table A; Target 39558; HLA-A*30:02; MAGEA3,MAGEA6; ENSG00000221867,ENSG00000197172; CTA,CTA
STFPDLESEF

SEQ ID NO: 39559 - protein, 10 aa, Homo sapiens
  Table A; Target 39559; HLA-B*57:01; MAGEA3,MAGEA6; ENSG00000221867,ENSG00000197172; CTA,CTA
STFPDLESEF

SEQ ID NO: 39560 - protein, 10 aa, Homo sapiens
  Table A; Target 39560; HLA-B*58:01; MAGEA3,MAGEA6; ENSG00000221867,ENSG00000197172; CTA,CTA
STFPDLESEF

SEQ ID NO: 39561 - protein, 8 aa, Homo sapiens
  Table A; Target 39561; HLA-C*03:03; MAGEA3,MAGEA6; ENSG00000221867,ENSG00000197172; CTA,CTA
STLVEVTL

SEQ ID NO: 39562 - protein, 9 aa, Homo sapiens
  Table A; Target 39562; HLA-A*02:04; MAGEA3,MAGEA6; ENSG00000221867,ENSG00000197172; CTA,CTA
SVLEVFEGR

SEQ ID NO: 39563 - protein, 9 aa, Homo sapiens
  Table A; Target 39563; HLA-A*02:07; MAGEA3,MAGEA6; ENSG00000221867,ENSG00000197172; CTA,CTA
SVLEVFEGR

SEQ ID NO: 39564 - protein, 9 aa, Homo sapiens
  Table A; Target 39564; HLA-A*03:01; MAGEA3,MAGEA6; ENSG00000221867,ENSG00000197172; CTA,CTA
SVLEVFEGR

SEQ ID NO: 39565 - protein, 9 aa, Homo sapiens
  Table A; Target 39565; HLA-A*03:02; MAGEA3,MAGEA6; ENSG00000221867,ENSG00000197172; CTA,CTA
SVLEVFEGR

SEQ ID NO: 39566 - protein, 9 aa, Homo sapiens
  Table A; Target 39566; HLA-A*11:01; MAGEA3,MAGEA6; ENSG00000221867,ENSG00000197172; CTA,CTA
SVLEVFEGR

SEQ ID NO: 39567 - protein, 9 aa, Homo sapiens
  Table A; Target 39567; HLA-A*25:01; MAGEA3,MAGEA6; ENSG00000221867,ENSG00000197172; CTA,CTA
SVLEVFEGR

SEQ ID NO: 39568 - protein, 9 aa, Homo sapiens
  Table A; Target 39568; HLA-A*31:01; MAGEA3,MAGEA6; ENSG00000221867,ENSG00000197172; CTA,CTA
SVLEVFEGR

SEQ ID NO: 39569 - protein, 9 aa, Homo sapiens
  Table A; Target 39569; HLA-A*33:01; MAGEA3,MAGEA6; ENSG00000221867,ENSG00000197172; CTA,CTA
SVLEVFEGR

SEQ ID NO: 39570 - protein, 9 aa, Homo sapiens
  Table A; Target 39570; HLA-A*33:03; MAGEA3,MAGEA6; ENSG00000221867,ENSG00000197172; CTA,CTA
SVLEVFEGR

SEQ ID NO: 39571 - protein, 9 aa, Homo sapiens
  Table A; Target 39571; HLA-A*68:01; MAGEA3,MAGEA6; ENSG00000221867,ENSG00000197172; CTA,CTA
SVLEVFEGR

SEQ ID NO: 39572 - protein, 9 aa, Homo sapiens
  Table A; Target 39572; HLA-A*68:02; MAGEA3,MAGEA6; ENSG00000221867,ENSG00000197172; CTA,CTA
SVLEVFEGR

SEQ ID NO: 39573 - protein, 9 aa, Homo sapiens
  Table A; Target 39573; HLA-B*57:01; MAGEA3,MAGEA6; ENSG00000221867,ENSG00000197172; CTA,CTA
SVLEVFEGR

SEQ ID NO: 39574 - protein, 9 aa, Homo sapiens
  Table A; Target 39574; HLA-C*07:06; MAGEA3,MAGEA6; ENSG00000221867,ENSG00000197172; CTA,CTA
SVLEVFEGR

SEQ ID NO: 39575 - protein, 9 aa, Homo sapiens
  Table A; Target 39575; HLA-A*26:01; MAGEA3,MAGEA6; ENSG00000221867,ENSG00000197172; CTA,CTA
SVVGNWQYF

SEQ ID NO: 39576 - protein, 9 aa, Homo sapiens
  Table A; Target 39576; HLA-A*23:01; MAGEA3,MAGEA6; ENSG00000221867,ENSG00000197172; CTA,CTA
SYVKVLHHM

SEQ ID NO: 39577 - protein, 9 aa, Homo sapiens
  Table A; Target 39577; HLA-A*24:02; MAGEA3,MAGEA6; ENSG00000221867,ENSG00000197172; CTA,CTA
SYVKVLHHM

SEQ ID NO: 39578 - protein, 9 aa, Homo sapiens
  Table A; Target 39578; HLA-A*23:01; MAGEA3,MAGEA6; ENSG00000221867,ENSG00000197172; CTA,CTA
TFPDLESEF

SEQ ID NO: 39579 - protein, 9 aa, Homo sapiens
  Table A; Target 39579; HLA-A*24:02; MAGEA3,MAGEA6; ENSG00000221867,ENSG00000197172; CTA,CTA
TFPDLESEF

SEQ ID NO: 39580 - protein, 9 aa, Homo sapiens
  Table A; Target 39580; HLA-A*29:02; MAGEA3,MAGEA6; ENSG00000221867,ENSG00000197172; CTA,CTA
TFPDLESEF

SEQ ID NO: 39581 - protein, 9 aa, Homo sapiens
  Table A; Target 39581; HLA-C*01:02; MAGEA3,MAGEA6; ENSG00000221867,ENSG00000197172; CTA,CTA
TFPDLESEF

SEQ ID NO: 39582 - protein, 9 aa, Homo sapiens
  Table A; Target 39582; HLA-C*04:01; MAGEA3,MAGEA6; ENSG00000221867,ENSG00000197172; CTA,CTA
TFPDLESEF

SEQ ID NO: 39583 - protein, 9 aa, Homo sapiens
  Table A; Target 39583; HLA-C*14:02; MAGEA3,MAGEA6; ENSG00000221867,ENSG00000197172; CTA,CTA
TFPDLESEF

SEQ ID NO: 39584 - protein, 8 aa, Homo sapiens
  Table A; Target 39584; HLA-A*02:01; MAGEA3,MAGEA6; ENSG00000221867,ENSG00000197172; CTA,CTA
TLGEVPAA

SEQ ID NO: 39585 - protein, 8 aa, Homo sapiens
  Table A; Target 39585; HLA-A*02:03; MAGEA3,MAGEA6; ENSG00000221867,ENSG00000197172; CTA,CTA
TLGEVPAA

SEQ ID NO: 39586 - protein, 8 aa, Homo sapiens
  Table A; Target 39586; HLA-B*55:01; MAGEA3,MAGEA6; ENSG00000221867,ENSG00000197172; CTA,CTA
TLGEVPAA

SEQ ID NO: 39587 - protein, 10 aa, Homo sapiens
  Table A; Target 39587; HLA-A*02:01; MAGEA3,MAGEA6; ENSG00000221867,ENSG00000197172; CTA,CTA
TLVEVTLGEV

SEQ ID NO: 39588 - protein, 10 aa, Homo sapiens
  Table A; Target 39588; HLA-A*02:03; MAGEA3,MAGEA6; ENSG00000221867,ENSG00000197172; CTA,CTA
TLVEVTLGEV

SEQ ID NO: 39589 - protein, 10 aa, Homo sapiens
  Table A; Target 39589; HLA-A*02:07; MAGEA3,MAGEA6; ENSG00000221867,ENSG00000197172; CTA,CTA
TLVEVTLGEV

SEQ ID NO: 39590 - protein, 10 aa, Homo sapiens
  Table A; Target 39590; HLA-A*68:02; MAGEA3,MAGEA6; ENSG00000221867,ENSG00000197172; CTA,CTA
TLVEVTLGEV

SEQ ID NO: 39591 - protein, 10 aa, Homo sapiens
  Table A; Target 39591; HLA-B*55:01; MAGEA3,MAGEA6; ENSG00000221867,ENSG00000197172; CTA,CTA
TLVEVTLGEV

SEQ ID NO: 39592 - protein, 9 aa, Homo sapiens
  Table A; Target 39592; HLA-A*03:01; MAGEA3,MAGEA6; ENSG00000221867,ENSG00000197172; CTA,CTA
TSYVKVLHH

SEQ ID NO: 39593 - protein, 8 aa, Homo sapiens
  Table A; Target 39593; HLA-A*30:01; MAGEA3,MAGEA6; ENSG00000221867,ENSG00000197172; CTA,CTA
VEVTLGEV

SEQ ID NO: 39594 - protein, 8 aa, Homo sapiens
  Table A; Target 39594; HLA-B*18:01; MAGEA3,MAGEA6; ENSG00000221867,ENSG00000197172; CTA,CTA
VEVTLGEV

SEQ ID NO: 39595 - protein, 8 aa, Homo sapiens
  Table A; Target 39595; HLA-B*40:02; MAGEA3,MAGEA6; ENSG00000221867,ENSG00000197172; CTA,CTA
VEVTLGEV

SEQ ID NO: 39596 - protein, 8 aa, Homo sapiens
  Table A; Target 39596; HLA-B*49:01; MAGEA3,MAGEA6; ENSG00000221867,ENSG00000197172; CTA,CTA
VEVTLGEV

SEQ ID NO: 39597 - protein, 9 aa, Homo sapiens
  Table A; Target 39597; HLA-B*18:01; MAGEA3,MAGEA6; ENSG00000221867,ENSG00000197172; CTA,CTA
VEVTLGEVP

SEQ ID NO: 39598 - protein, 9 aa, Homo sapiens
  Table A; Target 39598; HLA-B*40:01; MAGEA3,MAGEA6; ENSG00000221867,ENSG00000197172; CTA,CTA
VEVTLGEVP

SEQ ID NO: 39599 - protein, 9 aa, Homo sapiens
  Table A; Target 39599; HLA-B*40:02; MAGEA3,MAGEA6; ENSG00000221867,ENSG00000197172; CTA,CTA
VEVTLGEVP

SEQ ID NO: 39600 - protein, 9 aa, Homo sapiens
  Table A; Target 39600; HLA-B*49:01; MAGEA3,MAGEA6; ENSG00000221867,ENSG00000197172; CTA,CTA
VEVTLGEVP

SEQ ID NO: 39601 - protein, 10 aa, Homo sapiens
  Table A; Target 39601; HLA-A*30:01; MAGEA3,MAGEA6; ENSG00000221867,ENSG00000197172; CTA,CTA
VEVTLGEVPA

SEQ ID NO: 39602 - protein, 10 aa, Homo sapiens
  Table A; Target 39602; HLA-B*18:01; MAGEA3,MAGEA6; ENSG00000221867,ENSG00000197172; CTA,CTA
VEVTLGEVPA

SEQ ID NO: 39603 - protein, 10 aa, Homo sapiens
  Table A; Target 39603; HLA-B*40:02; MAGEA3,MAGEA6; ENSG00000221867,ENSG00000197172; CTA,CTA
VEVTLGEVPA

SEQ ID NO: 39604 - protein, 11 aa, Homo sapiens
  Table A; Target 39604; HLA-A*30:01; MAGEA3,MAGEA6; ENSG00000221867,ENSG00000197172; CTA,CTA
VEVTLGEVPAA

SEQ ID NO: 39605 - protein, 11 aa, Homo sapiens
  Table A; Target 39605; HLA-B*40:02; MAGEA3,MAGEA6; ENSG00000221867,ENSG00000197172; CTA,CTA
VEVTLGEVPAA

SEQ ID NO: 39606 - protein, 8 aa, Homo sapiens
  Table A; Target 39606; HLA-A*29:02; MAGEA3,MAGEA6; ENSG00000221867,ENSG00000197172; CTA,CTA
VHFLLLKY

SEQ ID NO: 39607 - protein, 8 aa, Homo sapiens
  Table A; Target 39607; HLA-C*07:01; MAGEA3,MAGEA6; ENSG00000221867,ENSG00000197172; CTA,CTA
VHFLLLKY

SEQ ID NO: 39608 - protein, 11 aa, Homo sapiens
  Table A; Target 39608; HLA-C*03:03; MAGEA3,MAGEA6; ENSG00000221867,ENSG00000197172; CTA,CTA
VPAAESPDPPQ

SEQ ID NO: 39609 - protein, 8 aa, Homo sapiens
  Table A; Target 39609; HLA-B*55:01; MAGEA3,MAGEA6; ENSG00000221867,ENSG00000197172; CTA,CTA
VPGSDPAC

SEQ ID NO: 39610 - protein, 9 aa, Homo sapiens
  Table A; Target 39610; HLA-A*30:02; MAGEA3,MAGEA6; ENSG00000221867,ENSG00000197172; CTA,CTA
VPGSDPACY

SEQ ID NO: 39611 - protein, 9 aa, Homo sapiens
  Table A; Target 39611; HLA-B*35:01; MAGEA3,MAGEA6; ENSG00000221867,ENSG00000197172; CTA,CTA
VPGSDPACY

SEQ ID NO: 39612 - protein, 9 aa, Homo sapiens
  Table A; Target 39612; HLA-B*35:03; MAGEA3,MAGEA6; ENSG00000221867,ENSG00000197172; CTA,CTA
VPGSDPACY

SEQ ID NO: 39613 - protein, 9 aa, Homo sapiens
  Table A; Target 39613; HLA-B*55:01; MAGEA3,MAGEA6; ENSG00000221867,ENSG00000197172; CTA,CTA
VPGSDPACY

SEQ ID NO: 39614 - protein, 9 aa, Homo sapiens
  Table A; Target 39614; HLA-C*03:03; MAGEA3,MAGEA6; ENSG00000221867,ENSG00000197172; CTA,CTA
VPGSDPACY

SEQ ID NO: 39615 - protein, 11 aa, Homo sapiens
  Table A; Target 39615; HLA-B*35:01; MAGEA3,MAGEA6; ENSG00000221867,ENSG00000197172; CTA,CTA
VPGSDPACYEF

SEQ ID NO: 39616 - protein, 10 aa, Homo sapiens
  Table A; Target 39616; HLA-A*02:03; MAGEA3,MAGEA6; ENSG00000221867,ENSG00000197172; CTA,CTA
VTKAEMLGSV

SEQ ID NO: 39617 - protein, 10 aa, Homo sapiens
  Table A; Target 39617; HLA-B*40:02; MAGEA3,MAGEA6; ENSG00000221867,ENSG00000197172; CTA,CTA
VTKAEMLGSV

SEQ ID NO: 39618 - protein, 10 aa, Homo sapiens
  Table A; Target 39618; HLA-C*06:02; MAGEA3,MAGEA6; ENSG00000221867,ENSG00000197172; CTA,CTA
VTKAEMLGSV

SEQ ID NO: 39619 - protein, 9 aa, Homo sapiens
  Table A; Target 39619; HLA-A*02:01; MAGEA3,MAGEA6; ENSG00000221867,ENSG00000197172; CTA,CTA
VTLGEVPAA

SEQ ID NO: 39620 - protein, 9 aa, Homo sapiens
  Table A; Target 39620; HLA-A*02:03; MAGEA3,MAGEA6; ENSG00000221867,ENSG00000197172; CTA,CTA
VTLGEVPAA

SEQ ID NO: 39621 - protein, 9 aa, Homo sapiens
  Table A; Target 39621; HLA-A*02:04; MAGEA3,MAGEA6; ENSG00000221867,ENSG00000197172; CTA,CTA
VTLGEVPAA

SEQ ID NO: 39622 - protein, 9 aa, Homo sapiens
  Table A; Target 39622; HLA-B*54:01; MAGEA3,MAGEA6; ENSG00000221867,ENSG00000197172; CTA,CTA
VTLGEVPAA

SEQ ID NO: 39623 - protein, 9 aa, Homo sapiens
  Table A; Target 39623; HLA-B*55:01; MAGEA3,MAGEA6; ENSG00000221867,ENSG00000197172; CTA,CTA
VTLGEVPAA

SEQ ID NO: 39624 - protein, 9 aa, Homo sapiens
  Table A; Target 39624; HLA-B*56:01; MAGEA3,MAGEA6; ENSG00000221867,ENSG00000197172; CTA,CTA
VTLGEVPAA

SEQ ID NO: 39625 - protein, 9 aa, Homo sapiens
  Table A; Target 39625; HLA-A*24:02; MAGEA3,MAGEA6; ENSG00000221867,ENSG00000197172; CTA,CTA
VVGNWQYFF

SEQ ID NO: 39626 - protein, 9 aa, Homo sapiens
  Table A; Target 39626; HLA-B*49:01; MAGEA3,MAGEA6; ENSG00000221867,ENSG00000197172; CTA,CTA
WEELSVLEV

SEQ ID NO: 39627 - protein, 9 aa, Homo sapiens
  Table A; Target 39627; HLA-A*29:02; MAGEA3,MAGEA6; ENSG00000221867,ENSG00000197172; CTA,CTA
YFFPVIFSK

SEQ ID NO: 39628 - protein, 10 aa, Homo sapiens
  Table A; Target 39628; HLA-A*68:02; MAGEA3,MAGEA6; ENSG00000221867,ENSG00000197172; CTA,CTA
YFFPVIFSKA

SEQ ID NO: 39629 - protein, 9 aa, Homo sapiens
  Table A; Target 39629; HLA-A*02:07; MAGEA3,MAGEA6; ENSG00000221867,ENSG00000197172; CTA,CTA
YIFATCLGL

SEQ ID NO: 39630 - protein, 9 aa, Homo sapiens
  Table A; Target 39630; HLA-B*13:02; MAGEA3,MAGEA6; ENSG00000221867,ENSG00000197172; CTA,CTA
YIFATCLGL

SEQ ID NO: 39631 - protein, 8 aa, Homo sapiens
  Table A; Target 39631; HLA-B*35:01; MAGEA3,MAGEA6; ENSG00000221867,ENSG00000197172; CTA,CTA
YPLWSQSY

SEQ ID NO: 39632 - protein, 8 aa, Homo sapiens
  Table A; Target 39632; HLA-B*51:01; MAGEA3,MAGEA6; ENSG00000221867,ENSG00000197172; CTA,CTA
YPLWSQSY

SEQ ID NO: 39633 - protein, 9 aa, Homo sapiens
  Table A; Target 39633; HLA-C*06:02; MAGEA3,MAGEA6; ENSG00000221867,ENSG00000197172; CTA,CTA
YRAREPVTK

SEQ ID NO: 39634 - protein, 8 aa, Homo sapiens
  Table A; Target 39634; HLA-B*08:01; MAGEA3,MAGEA6; ENSG00000221867,ENSG00000197172; CTA,CTA
YVKVLHHM

SEQ ID NO: 39635 - protein, 9 aa, Homo sapiens
  Table A; Target 39635; HLA-A*68:02; MAGEA3,MAGEA6; ENSG00000221867,ENSG00000197172; CTA,CTA
YVKVLHHMV

SEQ ID NO: 39636 - protein, 8 aa, Homo sapiens
  Table A; Target 39636; HLA-C*03:03; MAGEA3,MAGEA6,MAGEA8; ENSG00000221867,ENSG00000197172,ENSG00000156009; CTA,CTA,TAA
AASSSSTL

SEQ ID NO: 39637 - protein, 8 aa, Homo sapiens
  Table A; Target 39637; HLA-C*03:04; MAGEA3,MAGEA6,MAGEA8; ENSG00000221867,ENSG00000197172,ENSG00000156009; CTA,CTA,TAA
AASSSSTL

SEQ ID NO: 39638 - protein, 8 aa, Homo sapiens
  Table A; Target 39638; HLA-C*05:01; MAGEA3,MAGEA6,MAGEA8; ENSG00000221867,ENSG00000197172,ENSG00000156009; CTA,CTA,TAA
AASSSSTL

SEQ ID NO: 39639 - protein, 8 aa, Homo sapiens
  Table A; Target 39639; HLA-C*16:01; MAGEA3,MAGEA6,MAGEA8; ENSG00000221867,ENSG00000197172,ENSG00000156009; CTA,CTA,TAA
AASSSSTL

SEQ ID NO: 39640 - protein, 8 aa, Homo sapiens
  Table A; Target 39640; HLA-B*15:03; MAGEA3,MAGEA6,MAGEA8; ENSG00000221867,ENSG00000197172,ENSG00000156009; CTA,CTA,TAA
VQENYLEY

SEQ ID NO: 39641 - protein, 8 aa, Homo sapiens
  Table A; Target 39641; HLA-A*01:01; MAGEA3,MAGEA6,MAGEA8,MAGEA9; ENSG00000221867,ENSG00000197172,ENSG00000156009,ENSG00000123584; CTA,CTA,TAA,CTA
VQENYLEY

SEQ ID NO: 39642 - protein, 8 aa, Homo sapiens
  Table A; Target 39642; HLA-B*39:01; MAGEA3,MAGEA6,MAGEA8,MAGEA9; ENSG00000221867,ENSG00000197172,ENSG00000156009,ENSG00000123584; CTA,CTA,TAA,CTA
VQENYLEY

SEQ ID NO: 39643 - protein, 8 aa, Homo sapiens
  Table A; Target 39643; HLA-B*37:01; MAGEA3,MAGEA9; ENSG00000221867,ENSG00000123584; CTA,CTA
AELVHFLL

SEQ ID NO: 39644 - protein, 8 aa, Homo sapiens
  Table A; Target 39644; HLA-B*44:02; MAGEA3,MAGEA9; ENSG00000221867,ENSG00000123584; CTA,CTA
AELVHFLL

SEQ ID NO: 39645 - protein, 9 aa, Homo sapiens
  Table A; Target 39645; HLA-A*02:01; MAGEA3,MAGEA9; ENSG00000221867,ENSG00000123584; CTA,CTA
KVAELVHFL

SEQ ID NO: 39646 - protein, 9 aa, Homo sapiens
  Table A; Target 39646; HLA-A*02:03; MAGEA3,MAGEA9; ENSG00000221867,ENSG00000123584; CTA,CTA
KVAELVHFL

SEQ ID NO: 39647 - protein, 9 aa, Homo sapiens
  Table A; Target 39647; HLA-A*02:04; MAGEA3,MAGEA9; ENSG00000221867,ENSG00000123584; CTA,CTA
KVAELVHFL

SEQ ID NO: 39648 - protein, 9 aa, Homo sapiens
  Table A; Target 39648; HLA-A*02:07; MAGEA3,MAGEA9; ENSG00000221867,ENSG00000123584; CTA,CTA
KVAELVHFL

SEQ ID NO: 39649 - protein, 9 aa, Homo sapiens
  Table A; Target 39649; HLA-A*31:01; MAGEA3,MAGEA9; ENSG00000221867,ENSG00000123584; CTA,CTA
KVAELVHFL

SEQ ID NO: 39650 - protein, 9 aa, Homo sapiens
  Table A; Target 39650; HLA-A*32:01; MAGEA3,MAGEA9; ENSG00000221867,ENSG00000123584; CTA,CTA
KVAELVHFL

SEQ ID NO: 39651 - protein, 9 aa, Homo sapiens
  Table A; Target 39651; HLA-B*27:05; MAGEA3,MAGEA9; ENSG00000221867,ENSG00000123584; CTA,CTA
KVAELVHFL

SEQ ID NO: 39652 - protein, 9 aa, Homo sapiens
  Table A; Target 39652; HLA-B*57:01; MAGEA3,MAGEA9; ENSG00000221867,ENSG00000123584; CTA,CTA
KVAELVHFL

SEQ ID NO: 39653 - protein, 9 aa, Homo sapiens
  Table A; Target 39653; HLA-B*58:01; MAGEA3,MAGEA9; ENSG00000221867,ENSG00000123584; CTA,CTA
KVAELVHFL

SEQ ID NO: 39654 - protein, 10 aa, Homo sapiens
  Table A; Target 39654; HLA-A*02:04; MAGEA3,MAGEA9; ENSG00000221867,ENSG00000123584; CTA,CTA
KVAELVHFLL

SEQ ID NO: 39655 - protein, 10 aa, Homo sapiens
  Table A; Target 39655; HLA-A*02:07; MAGEA3,MAGEA9; ENSG00000221867,ENSG00000123584; CTA,CTA
KVAELVHFLL

SEQ ID NO: 39656 - protein, 10 aa, Homo sapiens
  Table A; Target 39656; HLA-A*31:01; MAGEA3,MAGEA9; ENSG00000221867,ENSG00000123584; CTA,CTA
KVAELVHFLL

SEQ ID NO: 39657 - protein, 10 aa, Homo sapiens
  Table A; Target 39657; HLA-A*68:02; MAGEA3,MAGEA9; ENSG00000221867,ENSG00000123584; CTA,CTA
KVAELVHFLL

SEQ ID NO: 39658 - protein, 8 aa, Homo sapiens
  Table A; Target 39658; HLA-C*05:01; MAGEA3,MAGEA9; ENSG00000221867,ENSG00000123584; CTA,CTA
VAELVHFL

SEQ ID NO: 39659 - protein, 9 aa, Homo sapiens
  Table A; Target 39659; HLA-A*02:07; MAGEA3,MAGEA9; ENSG00000221867,ENSG00000123584; CTA,CTA
VAELVHFLL

SEQ ID NO: 39660 - protein, 9 aa, Homo sapiens
  Table A; Target 39660; HLA-B*15:03; MAGEA4; ENSG00000147381; TAA
AAVSSSSPL

SEQ ID NO: 39661 - protein, 9 aa, Homo sapiens
  Table A; Target 39661; HLA-C*05:01; MAGEA4; ENSG00000147381; TAA
AAVSSSSPL

SEQ ID NO: 39662 - protein, 9 aa, Homo sapiens
  Table A; Target 39662; HLA-C*07:04; MAGEA4; ENSG00000147381; TAA
AAVSSSSPL

SEQ ID NO: 39663 - protein, 9 aa, Homo sapiens
  Table A; Target 39663; HLA-C*16:02; MAGEA4; ENSG00000147381; TAA
AAVSSSSPL

SEQ ID NO: 39664 - protein, 8 aa, Homo sapiens
  Table A; Target 39664; HLA-A*30:01; MAGEA4; ENSG00000147381; TAA
AEMLERVI

SEQ ID NO: 39665 - protein, 8 aa, Homo sapiens
  Table A; Target 39665; HLA-B*13:02; MAGEA4; ENSG00000147381; TAA
AEMLERVI

SEQ ID NO: 39666 - protein, 8 aa, Homo sapiens
  Table A; Target 39666; HLA-B*40:02; MAGEA4; ENSG00000147381; TAA
AEMLERVI

SEQ ID NO: 39667 - protein, 9 aa, Homo sapiens
  Table A; Target 39667; HLA-B*44:02; MAGEA4; ENSG00000147381; TAA
AEMLERVIK

SEQ ID NO: 39668 - protein, 11 aa, Homo sapiens
  Table A; Target 39668; HLA-A*30:01; MAGEA4; ENSG00000147381; TAA
AEMLERVIKNY

SEQ ID NO: 39669 - protein, 11 aa, Homo sapiens
  Table A; Target 39669; HLA-C*12:03; MAGEA4; ENSG00000147381; TAA
AEMLERVIKNY

SEQ ID NO: 39670 - protein, 10 aa, Homo sapiens
  Table A; Target 39670; HLA-A*30:01; MAGEA4; ENSG00000147381; TAA
AESAGPPQSP

SEQ ID NO: 39671 - protein, 10 aa, Homo sapiens
  Table A; Target 39671; HLA-B*27:05; MAGEA4; ENSG00000147381; TAA
AESAGPPQSP

SEQ ID NO: 39672 - protein, 8 aa, Homo sapiens
  Table A; Target 39672; HLA-B*49:01; MAGEA4; ENSG00000147381; TAA
AESLFREA

SEQ ID NO: 39673 - protein, 9 aa, Homo sapiens
  Table A; Target 39673; HLA-C*07:02; MAGEA4; ENSG00000147381; TAA
AESLFREAL

SEQ ID NO: 39674 - protein, 9 aa, Homo sapiens
  Table A; Target 39674; HLA-C*16:01; MAGEA4; ENSG00000147381; TAA
AESLFREAL

SEQ ID NO: 39675 - protein, 8 aa, Homo sapiens
  Table A; Target 39675; HLA-B*40:01; MAGEA4; ENSG00000147381; TAA
AETSYVKV

SEQ ID NO: 39676 - protein, 8 aa, Homo sapiens
  Table A; Target 39676; HLA-B*40:02; MAGEA4; ENSG00000147381; TAA
AETSYVKV

SEQ ID NO: 39677 - protein, 8 aa, Homo sapiens
  Table A; Target 39677; HLA-B*44:03; MAGEA4; ENSG00000147381; TAA
AETSYVKV

SEQ ID NO: 39678 - protein, 8 aa, Homo sapiens
  Table A; Target 39678; HLA-C*16:02; MAGEA4; ENSG00000147381; TAA
AETSYVKV

SEQ ID NO: 39679 - protein, 9 aa, Homo sapiens
  Table A; Target 39679; HLA-C*06:02; MAGEA4; ENSG00000147381; TAA
AETSYVKVL

SEQ ID NO: 39680 - protein, 10 aa, Homo sapiens
  Table A; Target 39680; HLA-C*04:01; MAGEA4; ENSG00000147381; TAA
AGPPQSPQGA

SEQ ID NO: 39681 - protein, 10 aa, Homo sapiens
  Table A; Target 39681; HLA-C*07:02; MAGEA4; ENSG00000147381; TAA
AGPPQSPQGA

SEQ ID NO: 39682 - protein, 8 aa, Homo sapiens
  Table A; Target 39682; HLA-B*13:02; MAGEA4; ENSG00000147381; TAA
ALAETSYV

SEQ ID NO: 39683 - protein, 8 aa, Homo sapiens
  Table A; Target 39683; HLA-C*05:01; MAGEA4; ENSG00000147381; TAA
ALAETSYV

SEQ ID NO: 39684 - protein, 9 aa, Homo sapiens
  Table A; Target 39684; HLA-A*02:01; MAGEA4; ENSG00000147381; TAA
ALAETSYVK

SEQ ID NO: 39685 - protein, 9 aa, Homo sapiens
  Table A; Target 39685; HLA-A*30:02; MAGEA4; ENSG00000147381; TAA
ALAETSYVK

SEQ ID NO: 39686 - protein, 9 aa, Homo sapiens
  Table A; Target 39686; HLA-A*32:01; MAGEA4; ENSG00000147381; TAA
ALAETSYVK

SEQ ID NO: 39687 - protein, 9 aa, Homo sapiens
  Table A; Target 39687; HLA-B*46:01; MAGEA4; ENSG00000147381; TAA
ALAETSYVK

SEQ ID NO: 39688 - protein, 9 aa, Homo sapiens
  Table A; Target 39688; HLA-C*01:02; MAGEA4; ENSG00000147381; TAA
ALAETSYVK

SEQ ID NO: 39689 - protein, 9 aa, Homo sapiens
  Table A; Target 39689; HLA-C*06:02; MAGEA4; ENSG00000147381; TAA
ALAETSYVK

SEQ ID NO: 39690 - protein, 10 aa, Homo sapiens
  Table A; Target 39690; HLA-B*13:02; MAGEA4; ENSG00000147381; TAA
ALAETSYVKV

SEQ ID NO: 39691 - protein, 11 aa, Homo sapiens
  Table A; Target 39691; HLA-A*02:01; MAGEA4; ENSG00000147381; TAA
ALAETSYVKVL

SEQ ID NO: 39692 - protein, 9 aa, Homo sapiens
  Table A; Target 39692; HLA-C*06:02; MAGEA4; ENSG00000147381; TAA
ALLEEEEGV

SEQ ID NO: 39693 - protein, 8 aa, Homo sapiens
  Table A; Target 39693; HLA-A*02:07; MAGEA4; ENSG00000147381; TAA
ALPTTISF

SEQ ID NO: 39694 - protein, 8 aa, Homo sapiens
  Table A; Target 39694; HLA-A*24:02; MAGEA4; ENSG00000147381; TAA
ALPTTISF

SEQ ID NO: 39695 - protein, 8 aa, Homo sapiens
  Table A; Target 39695; HLA-B*08:01; MAGEA4; ENSG00000147381; TAA
ALPTTISF

SEQ ID NO: 39696 - protein, 8 aa, Homo sapiens
  Table A; Target 39696; HLA-B*15:03; MAGEA4; ENSG00000147381; TAA
ALPTTISF

SEQ ID NO: 39697 - protein, 9 aa, Homo sapiens
  Table A; Target 39697; HLA-A*02:03; MAGEA4; ENSG00000147381; TAA
ALPTTISFT

SEQ ID NO: 39698 - protein, 9 aa, Homo sapiens
  Table A; Target 39698; HLA-A*02:07; MAGEA4; ENSG00000147381; TAA
ALPTTISFT

SEQ ID NO: 39699 - protein, 9 aa, Homo sapiens
  Table A; Target 39699; HLA-B*08:01; MAGEA4; ENSG00000147381; TAA
ALSNKVDEL

SEQ ID NO: 39700 - protein, 9 aa, Homo sapiens
  Table A; Target 39700; HLA-B*27:05; MAGEA4; ENSG00000147381; TAA
ALSNKVDEL

SEQ ID NO: 39701 - protein, 9 aa, Homo sapiens
  Table A; Target 39701; HLA-B*39:01; MAGEA4; ENSG00000147381; TAA
ALSNKVDEL

SEQ ID NO: 39702 - protein, 9 aa, Homo sapiens
  Table A; Target 39702; HLA-C*14:02; MAGEA4; ENSG00000147381; TAA
ALSNKVDEL

SEQ ID NO: 39703 - protein, 10 aa, Homo sapiens
  Table A; Target 39703; HLA-B*56:01; MAGEA4; ENSG00000147381; TAA
APTTEEQEAA

SEQ ID NO: 39704 - protein, 9 aa, Homo sapiens
  Table A; Target 39704; HLA-B*27:05; MAGEA4; ENSG00000147381; TAA
AQAPTTEEQ

SEQ ID NO: 39705 - protein, 9 aa, Homo sapiens
  Table A; Target 39705; HLA-B*39:01; MAGEA4; ENSG00000147381; TAA
AQAPTTEEQ

SEQ ID NO: 39706 - protein, 11 aa, Homo sapiens
  Table A; Target 39706; HLA-B*13:02; MAGEA4; ENSG00000147381; TAA
AQAPTTEEQEA

SEQ ID NO: 39707 - protein, 11 aa, Homo sapiens
  Table A; Target 39707; HLA-B*38:01; MAGEA4; ENSG00000147381; TAA
AQAPTTEEQEA

SEQ ID NO: 39708 - protein, 11 aa, Homo sapiens
  Table A; Target 39708; HLA-B*39:01; MAGEA4; ENSG00000147381; TAA
AQAPTTEEQEA

SEQ ID NO: 39709 - protein, 8 aa, Homo sapiens
  Table A; Target 39709; HLA-C*05:01; MAGEA4; ENSG00000147381; TAA
AQEEALGL

SEQ ID NO: 39710 - protein, 9 aa, Homo sapiens
  Table A; Target 39710; HLA-C*05:01; MAGEA4; ENSG00000147381; TAA
AQEEALGLV

SEQ ID NO: 39711 - protein, 10 aa, Homo sapiens
  Table A; Target 39711; HLA-A*11:01; MAGEA4; ENSG00000147381; TAA
ASALPTTISF

SEQ ID NO: 39712 - protein, 10 aa, Homo sapiens
  Table A; Target 39712; HLA-A*25:01; MAGEA4; ENSG00000147381; TAA
ASALPTTISF

SEQ ID NO: 39713 - protein, 10 aa, Homo sapiens
  Table A; Target 39713; HLA-B*15:01; MAGEA4; ENSG00000147381; TAA
ASALPTTISF

SEQ ID NO: 39714 - protein, 10 aa, Homo sapiens
  Table A; Target 39714; HLA-B*15:03; MAGEA4; ENSG00000147381; TAA
ASALPTTISF

SEQ ID NO: 39715 - protein, 10 aa, Homo sapiens
  Table A; Target 39715; HLA-C*02:02; MAGEA4; ENSG00000147381; TAA
ASALPTTISF

SEQ ID NO: 39716 - protein, 9 aa, Homo sapiens
  Table A; Target 39716; HLA-C*16:01; MAGEA4; ENSG00000147381; TAA
ASESLKMIF

SEQ ID NO: 39717 - protein, 9 aa, Homo sapiens
  Table A; Target 39717; HLA-C*16:02; MAGEA4; ENSG00000147381; TAA
ASNTYTLVT

SEQ ID NO: 39718 - protein, 8 aa, Homo sapiens
  Table A; Target 39718; HLA-B*37:01; MAGEA4; ENSG00000147381; TAA
AVSSSSPL

SEQ ID NO: 39719 - protein, 9 aa, Homo sapiens
  Table A; Target 39719; HLA-A*02:04; MAGEA4; ENSG00000147381; TAA
AVSSSSPLV

SEQ ID NO: 39720 - protein, 9 aa, Homo sapiens
  Table A; Target 39720; HLA-A*68:02; MAGEA4; ENSG00000147381; TAA
AVSSSSPLV

SEQ ID NO: 39721 - protein, 9 aa, Homo sapiens
  Table A; Target 39721; HLA-B*38:01; MAGEA4; ENSG00000147381; TAA
AVSSSSPLV

SEQ ID NO: 39722 - protein, 9 aa, Homo sapiens
  Table A; Target 39722; HLA-C*04:01; MAGEA4; ENSG00000147381; TAA
AVSSSSPLV

SEQ ID NO: 39723 - protein, 9 aa, Homo sapiens
  Table A; Target 39723; HLA-C*07:04; MAGEA4; ENSG00000147381; TAA
AVSSSSPLV

SEQ ID NO: 39724 - protein, 9 aa, Homo sapiens
  Table A; Target 39724; HLA-C*12:03; MAGEA4; ENSG00000147381; TAA
AVSSSSPLV

SEQ ID NO: 39725 - protein, 9 aa, Homo sapiens
  Table A; Target 39725; HLA-C*16:04; MAGEA4; ENSG00000147381; TAA
AVSSSSPLV

SEQ ID NO: 39726 - protein, 11 aa, Homo sapiens
  Table A; Target 39726; HLA-A*31:01; MAGEA4; ENSG00000147381; TAA
AVSSSSPLVPG

SEQ ID NO: 39727 - protein, 9 aa, Homo sapiens
  Table A; Target 39727; HLA-A*33:01; MAGEA4; ENSG00000147381; TAA
DAESLFREA

SEQ ID NO: 39728 - protein, 8 aa, Homo sapiens
  Table A; Target 39728; HLA-B*08:01; MAGEA4; ENSG00000147381; TAA
DELAHFLL

SEQ ID NO: 39729 - protein, 8 aa, Homo sapiens
  Table A; Target 39729; HLA-B*44:03; MAGEA4; ENSG00000147381; TAA
DELAHFLL

SEQ ID NO: 39730 - protein, 8 aa, Homo sapiens
  Table A; Target 39730; HLA-C*07:01; MAGEA4; ENSG00000147381; TAA
DELAHFLL

SEQ ID NO: 39731 - protein, 10 aa, Homo sapiens
  Table A; Target 39731; HLA-C*07:01; MAGEA4; ENSG00000147381; TAA
DGLLGNNQIF

SEQ ID NO: 39732 - protein, 8 aa, Homo sapiens
  Table A; Target 39732; HLA-B*15:03; MAGEA4; ENSG00000147381; TAA
DGREHTVY

SEQ ID NO: 39733 - protein, 8 aa, Homo sapiens
  Table A; Target 39733; HLA-C*07:01; MAGEA4; ENSG00000147381; TAA
DGREHTVY

SEQ ID NO: 39734 - protein, 9 aa, Homo sapiens
  Table A; Target 39734; HLA-A*25:01; MAGEA4; ENSG00000147381; TAA
DPASNTYTL

SEQ ID NO: 39735 - protein, 9 aa, Homo sapiens
  Table A; Target 39735; HLA-A*33:01; MAGEA4; ENSG00000147381; TAA
DPASNTYTL

SEQ ID NO: 39736 - protein, 9 aa, Homo sapiens
  Table A; Target 39736; HLA-A*68:02; MAGEA4; ENSG00000147381; TAA
DPASNTYTL

SEQ ID NO: 39737 - protein, 9 aa, Homo sapiens
  Table A; Target 39737; HLA-B*08:01; MAGEA4; ENSG00000147381; TAA
DPASNTYTL

SEQ ID NO: 39738 - protein, 9 aa, Homo sapiens
  Table A; Target 39738; HLA-B*54:01; MAGEA4; ENSG00000147381; TAA
DPASNTYTL

SEQ ID NO: 39739 - protein, 9 aa, Homo sapiens
  Table A; Target 39739; HLA-C*07:06; MAGEA4; ENSG00000147381; TAA
DPASNTYTL

SEQ ID NO: 39740 - protein, 11 aa, Homo sapiens
  Table A; Target 39740; HLA-B*27:02; MAGEA4; ENSG00000147381; TAA
DPASNTYTLVT

SEQ ID NO: 39741 - protein, 10 aa, Homo sapiens
  Table A; Target 39741; HLA-A*33:03; MAGEA4; ENSG00000147381; TAA
DVKEVDPASN

SEQ ID NO: 39742 - protein, 11 aa, Homo sapiens
  Table A; Target 39742; HLA-A*68:02; MAGEA4; ENSG00000147381; TAA
EAALLEEEEGV

SEQ ID NO: 39743 - protein, 11 aa, Homo sapiens
  Table A; Target 39743; HLA-B*27:02; MAGEA4; ENSG00000147381; TAA
EAALLEEEEGV

SEQ ID NO: 39744 - protein, 11 aa, Homo sapiens
  Table A; Target 39744; HLA-C*07:01; MAGEA4; ENSG00000147381; TAA
EAALLEEEEGV

SEQ ID NO: 39745 - protein, 10 aa, Homo sapiens
  Table A; Target 39745; HLA-A*25:01; MAGEA4; ENSG00000147381; TAA
EALSNKVDEL

SEQ ID NO: 39746 - protein, 10 aa, Homo sapiens
  Table A; Target 39746; HLA-A*33:03; MAGEA4; ENSG00000147381; TAA
EALSNKVDEL

SEQ ID NO: 39747 - protein, 10 aa, Homo sapiens
  Table A; Target 39747; HLA-A*68:01; MAGEA4; ENSG00000147381; TAA
EALSNKVDEL

SEQ ID NO: 39748 - protein, 9 aa, Homo sapiens
  Table A; Target 39748; HLA-A*33:01; MAGEA4; ENSG00000147381; TAA
EAQEEALGL

SEQ ID NO: 39749 - protein, 9 aa, Homo sapiens
  Table A; Target 39749; HLA-A*33:03; MAGEA4; ENSG00000147381; TAA
EAQEEALGL

SEQ ID NO: 39750 - protein, 9 aa, Homo sapiens
  Table A; Target 39750; HLA-C*05:01; MAGEA4; ENSG00000147381; TAA
EAQEEALGL

SEQ ID NO: 39751 - protein, 9 aa, Homo sapiens
  Table A; Target 39751; HLA-B*44:02; MAGEA4; ENSG00000147381; TAA
EEALGLVGA

SEQ ID NO: 39752 - protein, 10 aa, Homo sapiens
  Table A; Target 39752; HLA-B*07:02; MAGEA4; ENSG00000147381; TAA
EEALGLVGAQ

SEQ ID NO: 39753 - protein, 10 aa, Homo sapiens
  Table A; Target 39753; HLA-C*07:01; MAGEA4; ENSG00000147381; TAA
EEALGLVGAQ

SEQ ID NO: 39754 - protein, 11 aa, Homo sapiens
  Table A; Target 39754; HLA-A*30:01; MAGEA4; ENSG00000147381; TAA
EEALGLVGAQA

SEQ ID NO: 39755 - protein, 11 aa, Homo sapiens
  Table A; Target 39755; HLA-B*44:02; MAGEA4; ENSG00000147381; TAA
EEALGLVGAQA

SEQ ID NO: 39756 - protein, 11 aa, Homo sapiens
  Table A; Target 39756; HLA-B*40:01; MAGEA4; ENSG00000147381; TAA
EEGVEAQEEAL

SEQ ID NO: 39757 - protein, 9 aa, Homo sapiens
  Table A; Target 39757; HLA-A*29:02; MAGEA4; ENSG00000147381; TAA
EELGVMGVY

SEQ ID NO: 39758 - protein, 9 aa, Homo sapiens
  Table A; Target 39758; HLA-A*30:01; MAGEA4; ENSG00000147381; TAA
EELGVMGVY

SEQ ID NO: 39759 - protein, 9 aa, Homo sapiens
  Table A; Target 39759; HLA-A*33:03; MAGEA4; ENSG00000147381; TAA
EELGVMGVY

SEQ ID NO: 39760 - protein, 9 aa, Homo sapiens
  Table A; Target 39760; HLA-B*27:05; MAGEA4; ENSG00000147381; TAA
EELGVMGVY

SEQ ID NO: 39761 - protein, 9 aa, Homo sapiens
  Table A; Target 39761; HLA-B*35:01; MAGEA4; ENSG00000147381; TAA
EELGVMGVY

SEQ ID NO: 39762 - protein, 9 aa, Homo sapiens
  Table A; Target 39762; HLA-B*39:01; MAGEA4; ENSG00000147381; TAA
EELGVMGVY

SEQ ID NO: 39763 - protein, 9 aa, Homo sapiens
  Table A; Target 39763; HLA-B*40:02; MAGEA4; ENSG00000147381; TAA
EELGVMGVY

SEQ ID NO: 39764 - protein, 9 aa, Homo sapiens
  Table A; Target 39764; HLA-B*49:01; MAGEA4; ENSG00000147381; TAA
EELGVMGVY

SEQ ID NO: 39765 - protein, 9 aa, Homo sapiens
  Table A; Target 39765; HLA-C*07:01; MAGEA4; ENSG00000147381; TAA
EELGVMGVY

SEQ ID NO: 39766 - protein, 9 aa, Homo sapiens
  Table A; Target 39766; HLA-C*07:06; MAGEA4; ENSG00000147381; TAA
EELGVMGVY

SEQ ID NO: 39767 - protein, 8 aa, Homo sapiens
  Table A; Target 39767; HLA-B*18:01; MAGEA4; ENSG00000147381; TAA
EEVPAAES

SEQ ID NO: 39768 - protein, 9 aa, Homo sapiens
  Table A; Target 39768; HLA-A*68:01; MAGEA4; ENSG00000147381; TAA
EHTVYGEPR

SEQ ID NO: 39769 - protein, 9 aa, Homo sapiens
  Table A; Target 39769; HLA-C*07:06; MAGEA4; ENSG00000147381; TAA
EHTVYGEPR

SEQ ID NO: 39770 - protein, 9 aa, Homo sapiens
  Table A; Target 39770; HLA-A*33:01; MAGEA4; ENSG00000147381; TAA
EHVVRVNAR

SEQ ID NO: 39771 - protein, 9 aa, Homo sapiens
  Table A; Target 39771; HLA-A*26:01; MAGEA4; ENSG00000147381; TAA
EIWEELGVM

SEQ ID NO: 39772 - protein, 11 aa, Homo sapiens
  Table A; Target 39772; HLA-A*02:01; MAGEA4; ENSG00000147381; TAA
EIWEELGVMGV

SEQ ID NO: 39773 - protein, 11 aa, Homo sapiens
  Table A; Target 39773; HLA-A*02:07; MAGEA4; ENSG00000147381; TAA
EIWEELGVMGV

SEQ ID NO: 39774 - protein, 9 aa, Homo sapiens
  Table A; Target 39774; HLA-A*03:01; MAGEA4; ENSG00000147381; TAA
ELAHFLLRK

SEQ ID NO: 39775 - protein, 10 aa, Homo sapiens
  Table A; Target 39775; HLA-A*26:01; MAGEA4; ENSG00000147381; TAA
ELAHFLLRKY

SEQ ID NO: 39776 - protein, 10 aa, Homo sapiens
  Table A; Target 39776; HLA-A*29:02; MAGEA4; ENSG00000147381; TAA
ELAHFLLRKY

SEQ ID NO: 39777 - protein, 8 aa, Homo sapiens
  Table A; Target 39777; HLA-B*18:01; MAGEA4; ENSG00000147381; TAA
ELGVMGVY

SEQ ID NO: 39778 - protein, 8 aa, Homo sapiens
  Table A; Target 39778; HLA-B*39:01; MAGEA4; ENSG00000147381; TAA
ELGVMGVY

SEQ ID NO: 39779 - protein, 8 aa, Homo sapiens
  Table A; Target 39779; HLA-C*12:03; MAGEA4; ENSG00000147381; TAA
ELGVMGVY

SEQ ID NO: 39780 - protein, 10 aa, Homo sapiens
  Table A; Target 39780; HLA-C*07:01; MAGEA4; ENSG00000147381; TAA
ELGVMGVYDG

SEQ ID NO: 39781 - protein, 8 aa, Homo sapiens
  Table A; Target 39781; HLA-C*16:01; MAGEA4; ENSG00000147381; TAA
ELVTKAEM

SEQ ID NO: 39782 - protein, 9 aa, Homo sapiens
  Table A; Target 39782; HLA-A*24:02; MAGEA4; ENSG00000147381; TAA
ELVTKAEML

SEQ ID NO: 39783 - protein, 11 aa, Homo sapiens
  Table A; Target 39783; HLA-A*33:03; MAGEA4; ENSG00000147381; TAA
ELVTKAEMLER

SEQ ID NO: 39784 - protein, 11 aa, Homo sapiens
  Table A; Target 39784; HLA-A*68:01; MAGEA4; ENSG00000147381; TAA
ELVTKAEMLER

SEQ ID NO: 39785 - protein, 10 aa, Homo sapiens
  Table A; Target 39785; HLA-A*26:01; MAGEA4; ENSG00000147381; TAA
EMLERVIKNY

SEQ ID NO: 39786 - protein, 10 aa, Homo sapiens
  Table A; Target 39786; HLA-B*44:03; MAGEA4; ENSG00000147381; TAA
EMLERVIKNY

SEQ ID NO: 39787 - protein, 9 aa, Homo sapiens
  Table A; Target 39787; HLA-A*33:03; MAGEA4; ENSG00000147381; TAA
ENYLEYRQV

SEQ ID NO: 39788 - protein, 9 aa, Homo sapiens
  Table A; Target 39788; HLA-B*51:01; MAGEA4; ENSG00000147381; TAA
ENYLEYRQV

SEQ ID NO: 39789 - protein, 11 aa, Homo sapiens
  Table A; Target 39789; HLA-C*07:01; MAGEA4; ENSG00000147381; TAA
ESAGPPQSPQG

SEQ ID NO: 39790 - protein, 11 aa, Homo sapiens
  Table A; Target 39790; HLA-A*33:03; MAGEA4; ENSG00000147381; TAA
ESLFREALSNK

SEQ ID NO: 39791 - protein, 8 aa, Homo sapiens
  Table A; Target 39791; HLA-C*12:03; MAGEA4; ENSG00000147381; TAA
ETSYVKVL

SEQ ID NO: 39792 - protein, 10 aa, Homo sapiens
  Table A; Target 39792; HLA-A*26:01; MAGEA4; ENSG00000147381; TAA
ETSYVKVLEH

SEQ ID NO: 39793 - protein, 10 aa, Homo sapiens
  Table A; Target 39793; HLA-A*33:03; MAGEA4; ENSG00000147381; TAA
ETSYVKVLEH

SEQ ID NO: 39794 - protein, 9 aa, Homo sapiens
  Table A; Target 39794; HLA-A*11:01; MAGEA4; ENSG00000147381; TAA
EVDPASNTY

SEQ ID NO: 39795 - protein, 9 aa, Homo sapiens
  Table A; Target 39795; HLA-B*27:05; MAGEA4; ENSG00000147381; TAA
EVDPASNTY

SEQ ID NO: 39796 - protein, 9 aa, Homo sapiens
  Table A; Target 39796; HLA-C*01:02; MAGEA4; ENSG00000147381; TAA
EVDPASNTY

SEQ ID NO: 39797 - protein, 9 aa, Homo sapiens
  Table A; Target 39797; HLA-C*03:04; MAGEA4; ENSG00000147381; TAA
EVDPASNTY

SEQ ID NO: 39798 - protein, 9 aa, Homo sapiens
  Table A; Target 39798; HLA-C*04:01; MAGEA4; ENSG00000147381; TAA
EVDPASNTY

SEQ ID NO: 39799 - protein, 9 aa, Homo sapiens
  Table A; Target 39799; HLA-C*16:01; MAGEA4; ENSG00000147381; TAA
EVDPASNTY

SEQ ID NO: 39800 - protein, 10 aa, Homo sapiens
  Table A; Target 39800; HLA-A*01:01; MAGEA4; ENSG00000147381; TAA
EVDPASNTYT

SEQ ID NO: 39801 - protein, 11 aa, Homo sapiens
  Table A; Target 39801; HLA-A*03:02; MAGEA4; ENSG00000147381; TAA
EVDPASNTYTL

SEQ ID NO: 39802 - protein, 11 aa, Homo sapiens
  Table A; Target 39802; HLA-A*23:01; MAGEA4; ENSG00000147381; TAA
EVDPASNTYTL

SEQ ID NO: 39803 - protein, 11 aa, Homo sapiens
  Table A; Target 39803; HLA-A*33:01; MAGEA4; ENSG00000147381; TAA
EVDPASNTYTL

SEQ ID NO: 39804 - protein, 11 aa, Homo sapiens
  Table A; Target 39804; HLA-B*27:02; MAGEA4; ENSG00000147381; TAA
EVDPASNTYTL

SEQ ID NO: 39805 - protein, 11 aa, Homo sapiens
  Table A; Target 39805; HLA-B*35:01; MAGEA4; ENSG00000147381; TAA
EVDPASNTYTL

SEQ ID NO: 39806 - protein, 11 aa, Homo sapiens
  Table A; Target 39806; HLA-B*55:01; MAGEA4; ENSG00000147381; TAA
EVDPASNTYTL

SEQ ID NO: 39807 - protein, 11 aa, Homo sapiens
  Table A; Target 39807; HLA-B*58:01; MAGEA4; ENSG00000147381; TAA
EVDPASNTYTL

SEQ ID NO: 39808 - protein, 11 aa, Homo sapiens
  Table A; Target 39808; HLA-C*03:04; MAGEA4; ENSG00000147381; TAA
EVDPASNTYTL

SEQ ID NO: 39809 - protein, 11 aa, Homo sapiens
  Table A; Target 39809; HLA-C*07:04; MAGEA4; ENSG00000147381; TAA
EVDPASNTYTL

SEQ ID NO: 39810 - protein, 8 aa, Homo sapiens
  Table A; Target 39810; HLA-C*03:03; MAGEA4; ENSG00000147381; TAA
FGIDVKEV

SEQ ID NO: 39811 - protein, 8 aa, Homo sapiens
  Table A; Target 39811; HLA-C*06:02; MAGEA4; ENSG00000147381; TAA
FGIDVKEV

SEQ ID NO: 39812 - protein, 8 aa, Homo sapiens
  Table A; Target 39812; HLA-B*40:02; MAGEA4; ENSG00000147381; TAA
FGKASESL

SEQ ID NO: 39813 - protein, 8 aa, Homo sapiens
  Table A; Target 39813; HLA-C*03:03; MAGEA4; ENSG00000147381; TAA
FGKASESL

SEQ ID NO: 39814 - protein, 8 aa, Homo sapiens
  Table A; Target 39814; HLA-C*12:03; MAGEA4; ENSG00000147381; TAA
FGKASESL

SEQ ID NO: 39815 - protein, 8 aa, Homo sapiens
  Table A; Target 39815; HLA-C*16:01; MAGEA4; ENSG00000147381; TAA
FGKASESL

SEQ ID NO: 39816 - protein, 9 aa, Homo sapiens
  Table A; Target 39816; HLA-C*04:01; MAGEA4; ENSG00000147381; TAA
FGKASESLK

SEQ ID NO: 39817 - protein, 8 aa, Homo sapiens
  Table A; Target 39817; HLA-A*02:07; MAGEA4; ENSG00000147381; TAA
FLWGPRAL

SEQ ID NO: 39818 - protein, 9 aa, Homo sapiens
  Table A; Target 39818; HLA-A*02:03; MAGEA4; ENSG00000147381; TAA
FLWGPRALA

SEQ ID NO: 39819 - protein, 9 aa, Homo sapiens
  Table A; Target 39819; HLA-A*02:07; MAGEA4; ENSG00000147381; TAA
FLWGPRALA

SEQ ID NO: 39820 - protein, 9 aa, Homo sapiens
  Table A; Target 39820; HLA-B*54:01; MAGEA4; ENSG00000147381; TAA
FLWGPRALA

SEQ ID NO: 39821 - protein, 8 aa, Homo sapiens
  Table A; Target 39821; HLA-B*08:01; MAGEA4; ENSG00000147381; TAA
FPKTGLLI

SEQ ID NO: 39822 - protein, 10 aa, Homo sapiens
  Table A; Target 39822; HLA-B*54:01; MAGEA4; ENSG00000147381; TAA
FPKTGLLIIV

SEQ ID NO: 39823 - protein, 8 aa, Homo sapiens
  Table A; Target 39823; HLA-B*51:01; MAGEA4; ENSG00000147381; TAA
FPVIFGKA

SEQ ID NO: 39824 - protein, 9 aa, Homo sapiens
  Table A; Target 39824; HLA-B*56:01; MAGEA4; ENSG00000147381; TAA
FPVIFGKAS

SEQ ID NO: 39825 - protein, 11 aa, Homo sapiens
  Table A; Target 39825; HLA-B*54:01; MAGEA4; ENSG00000147381; TAA
FPVIFGKASES

SEQ ID NO: 39826 - protein, 9 aa, Homo sapiens
  Table A; Target 39826; HLA-B*27:05; MAGEA4; ENSG00000147381; TAA
FREALSNKV

SEQ ID NO: 39827 - protein, 9 aa, Homo sapiens
  Table A; Target 39827; HLA-B*38:01; MAGEA4; ENSG00000147381; TAA
FREALSNKV

SEQ ID NO: 39828 - protein, 9 aa, Homo sapiens
  Table A; Target 39828; HLA-A*02:03; MAGEA4; ENSG00000147381; TAA
GASALPTTI

SEQ ID NO: 39829 - protein, 9 aa, Homo sapiens
  Table A; Target 39829; HLA-A*30:01; MAGEA4; ENSG00000147381; TAA
GASALPTTI

SEQ ID NO: 39830 - protein, 11 aa, Homo sapiens
  Table A; Target 39830; HLA-B*44:02; MAGEA4; ENSG00000147381; TAA
GEPRKLLTQDW

SEQ ID NO: 39831 - protein, 9 aa, Homo sapiens
  Table A; Target 39831; HLA-A*23:01; MAGEA4; ENSG00000147381; TAA
GLLGNNQIF

SEQ ID NO: 39832 - protein, 9 aa, Homo sapiens
  Table A; Target 39832; HLA-A*29:02; MAGEA4; ENSG00000147381; TAA
GLLGNNQIF

SEQ ID NO: 39833 - protein, 9 aa, Homo sapiens
  Table A; Target 39833; HLA-B*15:03; MAGEA4; ENSG00000147381; TAA
GLLGNNQIF

SEQ ID NO: 39834 - protein, 11 aa, Homo sapiens
  Table A; Target 39834; HLA-A*02:04; MAGEA4; ENSG00000147381; TAA
GLLGNNQIFPK

SEQ ID NO: 39835 - protein, 11 aa, Homo sapiens
  Table A; Target 39835; HLA-A*29:02; MAGEA4; ENSG00000147381; TAA
GLLGNNQIFPK

SEQ ID NO: 39836 - protein, 11 aa, Homo sapiens
  Table A; Target 39836; HLA-B*27:02; MAGEA4; ENSG00000147381; TAA
GLLGNNQIFPK

SEQ ID NO: 39837 - protein, 8 aa, Homo sapiens
  Table A; Target 39837; HLA-A*11:01; MAGEA4; ENSG00000147381; TAA
GNNQIFPK

SEQ ID NO: 39838 - protein, 9 aa, Homo sapiens
  Table A; Target 39838; HLA-B*56:01; MAGEA4; ENSG00000147381; TAA
GPPQSPQGA

SEQ ID NO: 39839 - protein, 11 aa, Homo sapiens
  Table A; Target 39839; HLA-B*07:02; MAGEA4; ENSG00000147381; TAA
GPRALAETSYV

SEQ ID NO: 39840 - protein, 9 aa, Homo sapiens
  Table A; Target 39840; HLA-A*24:02; MAGEA4; ENSG00000147381; TAA
GSNPARYEF

SEQ ID NO: 39841 - protein, 9 aa, Homo sapiens
  Table A; Target 39841; HLA-B*07:02; MAGEA4; ENSG00000147381; TAA
GSNPARYEF

SEQ ID NO: 39842 - protein, 9 aa, Homo sapiens
  Table A; Target 39842; HLA-B*27:05; MAGEA4; ENSG00000147381; TAA
GSNPARYEF

SEQ ID NO: 39843 - protein, 9 aa, Homo sapiens
  Table A; Target 39843; HLA-B*37:01; MAGEA4; ENSG00000147381; TAA
GSNPARYEF

SEQ ID NO: 39844 - protein, 9 aa, Homo sapiens
  Table A; Target 39844; HLA-C*07:02; MAGEA4; ENSG00000147381; TAA
GSNPARYEF

SEQ ID NO: 39845 - protein, 9 aa, Homo sapiens
  Table A; Target 39845; HLA-C*16:02; MAGEA4; ENSG00000147381; TAA
GSNPARYEF

SEQ ID NO: 39846 - protein, 10 aa, Homo sapiens
  Table A; Target 39846; HLA-B*27:05; MAGEA4; ENSG00000147381; TAA
GTIAMEGDSA

SEQ ID NO: 39847 - protein, 9 aa, Homo sapiens
  Table A; Target 39847; HLA-A*33:01; MAGEA4; ENSG00000147381; TAA
GVMGVYDGR

SEQ ID NO: 39848 - protein, 10 aa, Homo sapiens
  Table A; Target 39848; HLA-A*03:02; MAGEA4; ENSG00000147381; TAA
GVYDGREHTV

SEQ ID NO: 39849 - protein, 10 aa, Homo sapiens
  Table A; Target 39849; HLA-A*11:01; MAGEA4; ENSG00000147381; TAA
GVYDGREHTV

SEQ ID NO: 39850 - protein, 10 aa, Homo sapiens
  Table A; Target 39850; HLA-A*23:01; MAGEA4; ENSG00000147381; TAA
GVYDGREHTV

SEQ ID NO: 39851 - protein, 10 aa, Homo sapiens
  Table A; Target 39851; HLA-B*08:01; MAGEA4; ENSG00000147381; TAA
GVYDGREHTV

SEQ ID NO: 39852 - protein, 10 aa, Homo sapiens
  Table A; Target 39852; HLA-B*15:03; MAGEA4; ENSG00000147381; TAA
GVYDGREHTV

SEQ ID NO: 39853 - protein, 10 aa, Homo sapiens
  Table A; Target 39853; HLA-B*38:01; MAGEA4; ENSG00000147381; TAA
GVYDGREHTV

SEQ ID NO: 39854 - protein, 10 aa, Homo sapiens
  Table A; Target 39854; HLA-C*05:01; MAGEA4; ENSG00000147381; TAA
GVYDGREHTV

SEQ ID NO: 39855 - protein, 10 aa, Homo sapiens
  Table A; Target 39855; HLA-C*07:04; MAGEA4; ENSG00000147381; TAA
GVYDGREHTV

SEQ ID NO: 39856 - protein, 10 aa, Homo sapiens
  Table A; Target 39856; HLA-C*16:01; MAGEA4; ENSG00000147381; TAA
GVYDGREHTV

SEQ ID NO: 39857 - protein, 11 aa, Homo sapiens
  Table A; Target 39857; HLA-B*44:03; MAGEA4; ENSG00000147381; TAA
GVYDGREHTVY

SEQ ID NO: 39858 - protein, 11 aa, Homo sapiens
  Table A; Target 39858; HLA-B*57:01; MAGEA4; ENSG00000147381; TAA
GVYDGREHTVY

SEQ ID NO: 39859 - protein, 10 aa, Homo sapiens
  Table A; Target 39859; HLA-B*55:01; MAGEA4; ENSG00000147381; TAA
HCKPEEGVEA

SEQ ID NO: 39860 - protein, 8 aa, Homo sapiens
  Table A; Target 39860; HLA-C*07:06; MAGEA4; ENSG00000147381; TAA
HTVYGEPR

SEQ ID NO: 39861 - protein, 8 aa, Homo sapiens
  Table A; Target 39861; HLA-A*68:01; MAGEA4; ENSG00000147381; TAA
HVVRVNAR

SEQ ID NO: 39862 - protein, 8 aa, Homo sapiens
  Table A; Target 39862; HLA-B*46:01; MAGEA4; ENSG00000147381; TAA
IAMEGDSA

SEQ ID NO: 39863 - protein, 8 aa, Homo sapiens
  Table A; Target 39863; HLA-B*56:01; MAGEA4; ENSG00000147381; TAA
IAMEGDSA

SEQ ID NO: 39864 - protein, 8 aa, Homo sapiens
  Table A; Target 39864; HLA-C*06:02; MAGEA4; ENSG00000147381; TAA
IAYPSLRE

SEQ ID NO: 39865 - protein, 8 aa, Homo sapiens
  Table A; Target 39865; HLA-C*07:01; MAGEA4; ENSG00000147381; TAA
IAYPSLRE

SEQ ID NO: 39866 - protein, 9 aa, Homo sapiens
  Table A; Target 39866; HLA-A*02:04; MAGEA4; ENSG00000147381; TAA
IAYPSLREA

SEQ ID NO: 39867 - protein, 9 aa, Homo sapiens
  Table A; Target 39867; HLA-A*02:07; MAGEA4; ENSG00000147381; TAA
IAYPSLREA

SEQ ID NO: 39868 - protein, 9 aa, Homo sapiens
  Table A; Target 39868; HLA-A*32:01; MAGEA4; ENSG00000147381; TAA
IAYPSLREA

SEQ ID NO: 39869 - protein, 9 aa, Homo sapiens
  Table A; Target 39869; HLA-B*13:02; MAGEA4; ENSG00000147381; TAA
IAYPSLREA

SEQ ID NO: 39870 - protein, 9 aa, Homo sapiens
  Table A; Target 39870; HLA-B*40:02; MAGEA4; ENSG00000147381; TAA
IAYPSLREA

SEQ ID NO: 39871 - protein, 9 aa, Homo sapiens
  Table A; Target 39871; HLA-C*01:02; MAGEA4; ENSG00000147381; TAA
IAYPSLREA

SEQ ID NO: 39872 - protein, 9 aa, Homo sapiens
  Table A; Target 39872; HLA-C*16:04; MAGEA4; ENSG00000147381; TAA
IAYPSLREA

SEQ ID NO: 39873 - protein, 11 aa, Homo sapiens
  Table A; Target 39873; HLA-A*24:02; MAGEA4; ENSG00000147381; TAA
IAYPSLREAAL

SEQ ID NO: 39874 - protein, 11 aa, Homo sapiens
  Table A; Target 39874; HLA-B*08:01; MAGEA4; ENSG00000147381; TAA
IAYPSLREAAL

SEQ ID NO: 39875 - protein, 11 aa, Homo sapiens
  Table A; Target 39875; HLA-B*35:01; MAGEA4; ENSG00000147381; TAA
IAYPSLREAAL

SEQ ID NO: 39876 - protein, 11 aa, Homo sapiens
  Table A; Target 39876; HLA-B*40:01; MAGEA4; ENSG00000147381; TAA
IAYPSLREAAL

SEQ ID NO: 39877 - protein, 11 aa, Homo sapiens
  Table A; Target 39877; HLA-B*40:02; MAGEA4; ENSG00000147381; TAA
IAYPSLREAAL

SEQ ID NO: 39878 - protein, 11 aa, Homo sapiens
  Table A; Target 39878; HLA-B*51:01; MAGEA4; ENSG00000147381; TAA
IAYPSLREAAL

SEQ ID NO: 39879 - protein, 11 aa, Homo sapiens
  Table A; Target 39879; HLA-B*54:01; MAGEA4; ENSG00000147381; TAA
IAYPSLREAAL

SEQ ID NO: 39880 - protein, 11 aa, Homo sapiens
  Table A; Target 39880; HLA-B*58:01; MAGEA4; ENSG00000147381; TAA
IAYPSLREAAL

SEQ ID NO: 39881 - protein, 11 aa, Homo sapiens
  Table A; Target 39881; HLA-C*12:03; MAGEA4; ENSG00000147381; TAA
IAYPSLREAAL

SEQ ID NO: 39882 - protein, 11 aa, Homo sapiens
  Table A; Target 39882; HLA-C*16:04; MAGEA4; ENSG00000147381; TAA
IAYPSLREAAL

SEQ ID NO: 39883 - protein, 8 aa, Homo sapiens
  Table A; Target 39883; HLA-C*06:02; MAGEA4; ENSG00000147381; TAA
IDVKEVDP

SEQ ID NO: 39884 - protein, 9 aa, Homo sapiens
  Table A; Target 39884; HLA-A*24:02; MAGEA4; ENSG00000147381; TAA
IFGKASESL

SEQ ID NO: 39885 - protein, 10 aa, Homo sapiens
  Table A; Target 39885; HLA-A*23:01; MAGEA4; ENSG00000147381; TAA
IFPKTGLLII

SEQ ID NO: 39886 - protein, 9 aa, Homo sapiens
  Table A; Target 39886; HLA-B*07:02; MAGEA4; ENSG00000147381; TAA
IIVLGTIAM

SEQ ID NO: 39887 - protein, 9 aa, Homo sapiens
  Table A; Target 39887; HLA-B*15:03; MAGEA4; ENSG00000147381; TAA
IIVLGTIAM

SEQ ID NO: 39888 - protein, 9 aa, Homo sapiens
  Table A; Target 39888; HLA-C*02:02; MAGEA4; ENSG00000147381; TAA
IIVLGTIAM

SEQ ID NO: 39889 - protein, 8 aa, Homo sapiens
  Table A; Target 39889; HLA-B*08:01; MAGEA4; ENSG00000147381; TAA
IVLGTIAM

SEQ ID NO: 39890 - protein, 8 aa, Homo sapiens
  Table A; Target 39890; HLA-B*15:01; MAGEA4; ENSG00000147381; TAA
IVLGTIAM

SEQ ID NO: 39891 - protein, 8 aa, Homo sapiens
  Table A; Target 39891; HLA-B*35:01; MAGEA4; ENSG00000147381; TAA
IVLGTIAM

SEQ ID NO: 39892 - protein, 8 aa, Homo sapiens
  Table A; Target 39892; HLA-B*35:03; MAGEA4; ENSG00000147381; TAA
IVLGTIAM

SEQ ID NO: 39893 - protein, 8 aa, Homo sapiens
  Table A; Target 39893; HLA-B*37:01; MAGEA4; ENSG00000147381; TAA
IVLGTIAM

SEQ ID NO: 39894 - protein, 8 aa, Homo sapiens
  Table A; Target 39894; HLA-B*39:01; MAGEA4; ENSG00000147381; TAA
IVLGTIAM

SEQ ID NO: 39895 - protein, 8 aa, Homo sapiens
  Table A; Target 39895; HLA-C*03:04; MAGEA4; ENSG00000147381; TAA
IVLGTIAM

SEQ ID NO: 39896 - protein, 8 aa, Homo sapiens
  Table A; Target 39896; HLA-C*04:01; MAGEA4; ENSG00000147381; TAA
IVLGTIAM

SEQ ID NO: 39897 - protein, 8 aa, Homo sapiens
  Table A; Target 39897; HLA-C*07:04; MAGEA4; ENSG00000147381; TAA
IVLGTIAM

SEQ ID NO: 39898 - protein, 10 aa, Homo sapiens
  Table A; Target 39898; HLA-C*07:01; MAGEA4; ENSG00000147381; TAA
IVLGTIAMEG

SEQ ID NO: 39899 - protein, 10 aa, Homo sapiens
  Table A; Target 39899; HLA-C*07:02; MAGEA4; ENSG00000147381; TAA
IVLGTIAMEG

SEQ ID NO: 39900 - protein, 8 aa, Homo sapiens
  Table A; Target 39900; HLA-C*03:03; MAGEA4; ENSG00000147381; TAA
KASESLKM

SEQ ID NO: 39901 - protein, 8 aa, Homo sapiens
  Table A; Target 39901; HLA-C*05:01; MAGEA4; ENSG00000147381; TAA
KASESLKM

SEQ ID NO: 39902 - protein, 9 aa, Homo sapiens
  Table A; Target 39902; HLA-B*58:01; MAGEA4; ENSG00000147381; TAA
KASESLKMI

SEQ ID NO: 39903 - protein, 9 aa, Homo sapiens
  Table A; Target 39903; HLA-C*06:02; MAGEA4; ENSG00000147381; TAA
KASESLKMI

SEQ ID NO: 39904 - protein, 9 aa, Homo sapiens
  Table A; Target 39904; HLA-C*12:03; MAGEA4; ENSG00000147381; TAA
KASESLKMI

SEQ ID NO: 39905 - protein, 10 aa, Homo sapiens
  Table A; Target 39905; HLA-B*58:01; MAGEA4; ENSG00000147381; TAA
KASESLKMIF

SEQ ID NO: 39906 - protein, 10 aa, Homo sapiens
  Table A; Target 39906; HLA-C*04:01; MAGEA4; ENSG00000147381; TAA
KASESLKMIF

SEQ ID NO: 39907 - protein, 10 aa, Homo sapiens
  Table A; Target 39907; HLA-C*12:03; MAGEA4; ENSG00000147381; TAA
KASESLKMIF

SEQ ID NO: 39908 - protein, 9 aa, Homo sapiens
  Table A; Target 39908; HLA-C*16:04; MAGEA4; ENSG00000147381; TAA
KELVTKAEM

SEQ ID NO: 39909 - protein, 9 aa, Homo sapiens
  Table A; Target 39909; HLA-A*30:01; MAGEA4; ENSG00000147381; TAA
KEVDPASNT

SEQ ID NO: 39910 - protein, 9 aa, Homo sapiens
  Table A; Target 39910; HLA-B*40:02; MAGEA4; ENSG00000147381; TAA
KEVDPASNT

SEQ ID NO: 39911 - protein, 9 aa, Homo sapiens
  Table A; Target 39911; HLA-B*44:03; MAGEA4; ENSG00000147381; TAA
KEVDPASNT

SEQ ID NO: 39912 - protein, 9 aa, Homo sapiens
  Table A; Target 39912; HLA-C*16:04; MAGEA4; ENSG00000147381; TAA
KEVDPASNT

SEQ ID NO: 39913 - protein, 10 aa, Homo sapiens
  Table A; Target 39913; HLA-A*23:01; MAGEA4; ENSG00000147381; TAA
KEVDPASNTY

SEQ ID NO: 39914 - protein, 10 aa, Homo sapiens
  Table A; Target 39914; HLA-C*04:01; MAGEA4; ENSG00000147381; TAA
KEVDPASNTY

SEQ ID NO: 39915 - protein, 10 aa, Homo sapiens
  Table A; Target 39915; HLA-C*07:04; MAGEA4; ENSG00000147381; TAA
KEVDPASNTY

SEQ ID NO: 39916 - protein, 11 aa, Homo sapiens
  Table A; Target 39916; HLA-B*40:02; MAGEA4; ENSG00000147381; TAA
KEVDPASNTYT

SEQ ID NO: 39917 - protein, 11 aa, Homo sapiens
  Table A; Target 39917; HLA-C*04:01; MAGEA4; ENSG00000147381; TAA
KEVDPASNTYT

SEQ ID NO: 39918 - protein, 9 aa, Homo sapiens
  Table A; Target 39918; HLA-A*03:01; MAGEA4; ENSG00000147381; TAA
KMIFGIDVK

SEQ ID NO: 39919 - protein, 9 aa, Homo sapiens
  Table A; Target 39919; HLA-A*03:02; MAGEA4; ENSG00000147381; TAA
KMIFGIDVK

SEQ ID NO: 39920 - protein, 11 aa, Homo sapiens
  Table A; Target 39920; HLA-A*02:03; MAGEA4; ENSG00000147381; TAA
KMIFGIDVKEV

SEQ ID NO: 39921 - protein, 8 aa, Homo sapiens
  Table A; Target 39921; HLA-B*55:01; MAGEA4; ENSG00000147381; TAA
KPEEGVEA

SEQ ID NO: 39922 - protein, 8 aa, Homo sapiens
  Table A; Target 39922; HLA-B*56:01; MAGEA4; ENSG00000147381; TAA
KPEEGVEA

SEQ ID NO: 39923 - protein, 8 aa, Homo sapiens
  Table A; Target 39923; HLA-A*02:07; MAGEA4; ENSG00000147381; TAA
KVDELAHF

SEQ ID NO: 39924 - protein, 9 aa, Homo sapiens
  Table A; Target 39924; HLA-A*01:01; MAGEA4; ENSG00000147381; TAA
KVDELAHFL

SEQ ID NO: 39925 - protein, 9 aa, Homo sapiens
  Table A; Target 39925; HLA-A*03:01; MAGEA4; ENSG00000147381; TAA
KVDELAHFL

SEQ ID NO: 39926 - protein, 9 aa, Homo sapiens
  Table A; Target 39926; HLA-B*40:01; MAGEA4; ENSG00000147381; TAA
KVDELAHFL

SEQ ID NO: 39927 - protein, 9 aa, Homo sapiens
  Table A; Target 39927; HLA-B*55:01; MAGEA4; ENSG00000147381; TAA
KVDELAHFL

SEQ ID NO: 39928 - protein, 9 aa, Homo sapiens
  Table A; Target 39928; HLA-C*02:02; MAGEA4; ENSG00000147381; TAA
KVDELAHFL

SEQ ID NO: 39929 - protein, 10 aa, Homo sapiens
  Table A; Target 39929; HLA-A*03:01; MAGEA4; ENSG00000147381; TAA
KVDELAHFLL

SEQ ID NO: 39930 - protein, 10 aa, Homo sapiens
  Table A; Target 39930; HLA-A*68:02; MAGEA4; ENSG00000147381; TAA
KVDELAHFLL

SEQ ID NO: 39931 - protein, 8 aa, Homo sapiens
  Table A; Target 39931; HLA-B*08:01; MAGEA4; ENSG00000147381; TAA
KVLEHVVR

SEQ ID NO: 39932 - protein, 8 aa, Homo sapiens
  Table A; Target 39932; HLA-B*57:01; MAGEA4; ENSG00000147381; TAA
KVLEHVVR

SEQ ID NO: 39933 - protein, 9 aa, Homo sapiens
  Table A; Target 39933; HLA-A*32:01; MAGEA4; ENSG00000147381; TAA
KVLEHVVRV

SEQ ID NO: 39934 - protein, 9 aa, Homo sapiens
  Table A; Target 39934; HLA-C*12:03; MAGEA4; ENSG00000147381; TAA
KVLEHVVRV

SEQ ID NO: 39935 - protein, 10 aa, Homo sapiens
  Table A; Target 39935; HLA-A*03:01; MAGEA4; ENSG00000147381; TAA
KVLEHVVRVN

SEQ ID NO: 39936 - protein, 10 aa, Homo sapiens
  Table A; Target 39936; HLA-A*31:01; MAGEA4; ENSG00000147381; TAA
KYRAKELVTK

SEQ ID NO: 39937 - protein, 9 aa, Homo sapiens
  Table A; Target 39937; HLA-A*01:01; MAGEA4; ENSG00000147381; TAA
LAETSYVKV

SEQ ID NO: 39938 - protein, 9 aa, Homo sapiens
  Table A; Target 39938; HLA-B*51:01; MAGEA4; ENSG00000147381; TAA
LAETSYVKV

SEQ ID NO: 39939 - protein, 9 aa, Homo sapiens
  Table A; Target 39939; HLA-B*57:01; MAGEA4; ENSG00000147381; TAA
LAHFLLRKY

SEQ ID NO: 39940 - protein, 9 aa, Homo sapiens
  Table A; Target 39940; HLA-B*18:01; MAGEA4; ENSG00000147381; TAA
LEHVVRVNA

SEQ ID NO: 39941 - protein, 9 aa, Homo sapiens
  Table A; Target 39941; HLA-B*49:01; MAGEA4; ENSG00000147381; TAA
LEHVVRVNA

SEQ ID NO: 39942 - protein, 8 aa, Homo sapiens
  Table A; Target 39942; HLA-B*37:01; MAGEA4; ENSG00000147381; TAA
LERVIKNY

SEQ ID NO: 39943 - protein, 11 aa, Homo sapiens
  Table A; Target 39943; HLA-C*06:02; MAGEA4; ENSG00000147381; TAA
LGLVGAQAPTT

SEQ ID NO: 39944 - protein, 9 aa, Homo sapiens
  Table A; Target 39944; HLA-A*68:01; MAGEA4; ENSG00000147381; TAA
LGNNQIFPK

SEQ ID NO: 39945 - protein, 10 aa, Homo sapiens
  Table A; Target 39945; HLA-C*01:02; MAGEA4; ENSG00000147381; TAA
LIIVLGTIAM

SEQ ID NO: 39946 - protein, 8 aa, Homo sapiens
  Table A; Target 39946; HLA-C*05:01; MAGEA4; ENSG00000147381; TAA
LLEEEEGV

SEQ ID NO: 39947 - protein, 10 aa, Homo sapiens
  Table A; Target 39947; HLA-A*11:01; MAGEA4; ENSG00000147381; TAA
LLGNNQIFPK

SEQ ID NO: 39948 - protein, 9 aa, Homo sapiens
  Table A; Target 39948; HLA-A*02:04; MAGEA4; ENSG00000147381; TAA
LLIIVLGTI

SEQ ID NO: 39949 - protein, 9 aa, Homo sapiens
  Table A; Target 39949; HLA-A*02:07; MAGEA4; ENSG00000147381; TAA
LLIIVLGTI

SEQ ID NO: 39950 - protein, 9 aa, Homo sapiens
  Table A; Target 39950; HLA-B*35:01; MAGEA4; ENSG00000147381; TAA
LPTTISFTC

SEQ ID NO: 39951 - protein, 8 aa, Homo sapiens
  Table A; Target 39951; HLA-B*58:01; MAGEA4; ENSG00000147381; TAA
LSNKVDEL

SEQ ID NO: 39952 - protein, 8 aa, Homo sapiens
  Table A; Target 39952; HLA-C*03:04; MAGEA4; ENSG00000147381; TAA
LSNKVDEL

SEQ ID NO: 39953 - protein, 8 aa, Homo sapiens
  Table A; Target 39953; HLA-C*12:03; MAGEA4; ENSG00000147381; TAA
LSNKVDEL

SEQ ID NO: 39954 - protein, 8 aa, Homo sapiens
  Table A; Target 39954; HLA-C*16:01; MAGEA4; ENSG00000147381; TAA
LSNKVDEL

SEQ ID NO: 39955 - protein, 9 aa, Homo sapiens
  Table A; Target 39955; HLA-C*06:02; MAGEA4; ENSG00000147381; TAA
LSYDGLLGN

SEQ ID NO: 39956 - protein, 9 aa, Homo sapiens
  Table A; Target 39956; HLA-C*07:01; MAGEA4; ENSG00000147381; TAA
LSYDGLLGN

SEQ ID NO: 39957 - protein, 9 aa, Homo sapiens
  Table A; Target 39957; HLA-C*12:03; MAGEA4; ENSG00000147381; TAA
LSYDGLLGN

SEQ ID NO: 39958 - protein, 10 aa, Homo sapiens
  Table A; Target 39958; HLA-C*07:01; MAGEA4; ENSG00000147381; TAA
LSYDGLLGNN

SEQ ID NO: 39959 - protein, 10 aa, Homo sapiens
  Table A; Target 39959; HLA-C*04:01; MAGEA4; ENSG00000147381; TAA
LTQDWVQENY

SEQ ID NO: 39960 - protein, 9 aa, Homo sapiens
  Table A; Target 39960; HLA-A*02:03; MAGEA4; ENSG00000147381; TAA
LVPGTLEEV

SEQ ID NO: 39961 - protein, 8 aa, Homo sapiens
  Table A; Target 39961; HLA-B*27:02; MAGEA4; ENSG00000147381; TAA
MIFGIDVK

SEQ ID NO: 39962 - protein, 9 aa, Homo sapiens
  Table A; Target 39962; HLA-A*68:02; MAGEA4; ENSG00000147381; TAA
MIFGIDVKE

SEQ ID NO: 39963 - protein, 10 aa, Homo sapiens
  Table A; Target 39963; HLA-A*26:01; MAGEA4; ENSG00000147381; TAA
MIFGIDVKEV

SEQ ID NO: 39964 - protein, 9 aa, Homo sapiens
  Table A; Target 39964; HLA-A*02:07; MAGEA4; ENSG00000147381; TAA
MLERVIKNY

SEQ ID NO: 39965 - protein, 9 aa, Homo sapiens
  Table A; Target 39965; HLA-A*32:01; MAGEA4; ENSG00000147381; TAA
MLERVIKNY

SEQ ID NO: 39966 - protein, 9 aa, Homo sapiens
  Table A; Target 39966; HLA-B*44:03; MAGEA4; ENSG00000147381; TAA
MLERVIKNY

SEQ ID NO: 39967 - protein, 9 aa, Homo sapiens
  Table A; Target 39967; HLA-B*57:01; MAGEA4; ENSG00000147381; TAA
MLERVIKNY

SEQ ID NO: 39968 - protein, 9 aa, Homo sapiens
  Table A; Target 39968; HLA-C*03:03; MAGEA4; ENSG00000147381; TAA
MLERVIKNY

SEQ ID NO: 39969 - protein, 9 aa, Homo sapiens
  Table A; Target 39969; HLA-C*06:02; MAGEA4; ENSG00000147381; TAA
MLERVIKNY

SEQ ID NO: 39970 - protein, 9 aa, Homo sapiens
  Table A; Target 39970; HLA-C*07:01; MAGEA4; ENSG00000147381; TAA
MLERVIKNY

SEQ ID NO: 39971 - protein, 8 aa, Homo sapiens
  Table A; Target 39971; HLA-B*08:01; MAGEA4; ENSG00000147381; TAA
NARVRIAY

SEQ ID NO: 39972 - protein, 8 aa, Homo sapiens
  Table A; Target 39972; HLA-B*46:01; MAGEA4; ENSG00000147381; TAA
NARVRIAY

SEQ ID NO: 39973 - protein, 9 aa, Homo sapiens
  Table A; Target 39973; HLA-B*07:02; MAGEA4; ENSG00000147381; TAA
NQIFPKTGL

SEQ ID NO: 39974 - protein, 9 aa, Homo sapiens
  Table A; Target 39974; HLA-C*01:02; MAGEA4; ENSG00000147381; TAA
NQIFPKTGL

SEQ ID NO: 39975 - protein, 9 aa, Homo sapiens
  Table A; Target 39975; HLA-C*07:04; MAGEA4; ENSG00000147381; TAA
NQIFPKTGL

SEQ ID NO: 39976 - protein, 9 aa, Homo sapiens
  Table A; Target 39976; HLA-C*14:02; MAGEA4; ENSG00000147381; TAA
NQIFPKTGL

SEQ ID NO: 39977 - protein, 8 aa, Homo sapiens
  Table A; Target 39977; HLA-C*12:03; MAGEA4; ENSG00000147381; TAA
NTYTLVTC

SEQ ID NO: 39978 - protein, 9 aa, Homo sapiens
  Table A; Target 39978; HLA-A*33:03; MAGEA4; ENSG00000147381; TAA
NTYTLVTCL

SEQ ID NO: 39979 - protein, 9 aa, Homo sapiens
  Table A; Target 39979; HLA-B*13:02; MAGEA4; ENSG00000147381; TAA
NTYTLVTCL

SEQ ID NO: 39980 - protein, 9 aa, Homo sapiens
  Table A; Target 39980; HLA-B*35:01; MAGEA4; ENSG00000147381; TAA
NTYTLVTCL

SEQ ID NO: 39981 - protein, 9 aa, Homo sapiens
  Table A; Target 39981; HLA-B*35:03; MAGEA4; ENSG00000147381; TAA
NTYTLVTCL

SEQ ID NO: 39982 - protein, 9 aa, Homo sapiens
  Table A; Target 39982; HLA-B*40:02; MAGEA4; ENSG00000147381; TAA
NTYTLVTCL

SEQ ID NO: 39983 - protein, 9 aa, Homo sapiens
  Table A; Target 39983; HLA-B*51:01; MAGEA4; ENSG00000147381; TAA
NTYTLVTCL

SEQ ID NO: 39984 - protein, 9 aa, Homo sapiens
  Table A; Target 39984; HLA-C*01:02; MAGEA4; ENSG00000147381; TAA
NTYTLVTCL

SEQ ID NO: 39985 - protein, 9 aa, Homo sapiens
  Table A; Target 39985; HLA-C*02:02; MAGEA4; ENSG00000147381; TAA
NTYTLVTCL

SEQ ID NO: 39986 - protein, 9 aa, Homo sapiens
  Table A; Target 39986; HLA-C*03:03; MAGEA4; ENSG00000147381; TAA
NTYTLVTCL

SEQ ID NO: 39987 - protein, 9 aa, Homo sapiens
  Table A; Target 39987; HLA-C*07:04; MAGEA4; ENSG00000147381; TAA
NTYTLVTCL

SEQ ID NO: 39988 - protein, 8 aa, Homo sapiens
  Table A; Target 39988; HLA-A*23:01; MAGEA4; ENSG00000147381; TAA
PASNTYTL

SEQ ID NO: 39989 - protein, 8 aa, Homo sapiens
  Table A; Target 39989; HLA-A*30:02; MAGEA4; ENSG00000147381; TAA
PGSNPARY

SEQ ID NO: 39990 - protein, 10 aa, Homo sapiens
  Table A; Target 39990; HLA-B*56:01; MAGEA4; ENSG00000147381; TAA
PPQSPQGASA

SEQ ID NO: 39991 - protein, 11 aa, Homo sapiens
  Table A; Target 39991; HLA-B*07:02; MAGEA4; ENSG00000147381; TAA
PPQSPQGASAL

SEQ ID NO: 39992 - protein, 11 aa, Homo sapiens
  Table A; Target 39992; HLA-C*07:02; MAGEA4; ENSG00000147381; TAA
PPQSPQGASAL

SEQ ID NO: 39993 - protein, 9 aa, Homo sapiens
  Table A; Target 39993; HLA-B*07:02; MAGEA4; ENSG00000147381; TAA
PRALAETSY

SEQ ID NO: 39994 - protein, 9 aa, Homo sapiens
  Table A; Target 39994; HLA-C*06:02; MAGEA4; ENSG00000147381; TAA
PRALAETSY

SEQ ID NO: 39995 - protein, 9 aa, Homo sapiens
  Table A; Target 39995; HLA-C*07:02; MAGEA4; ENSG00000147381; TAA
PRALAETSY

SEQ ID NO: 39996 - protein, 9 aa, Homo sapiens
  Table A; Target 39996; HLA-C*16:04; MAGEA4; ENSG00000147381; TAA
PRALAETSY

SEQ ID NO: 39997 - protein, 11 aa, Homo sapiens
  Table A; Target 39997; HLA-C*07:01; MAGEA4; ENSG00000147381; TAA
PSTSPDAESLF

SEQ ID NO: 39998 - protein, 8 aa, Homo sapiens
  Table A; Target 39998; HLA-C*07:01; MAGEA4; ENSG00000147381; TAA
QDWVQENY

SEQ ID NO: 39999 - protein, 11 aa, Homo sapiens
  Table A; Target 39999; HLA-B*49:01; MAGEA4; ENSG00000147381; TAA
QEAAVSSSSPL

SEQ ID NO: 40000 - protein, 10 aa, Homo sapiens
  Table A; Target 40000; HLA-B*40:01; MAGEA4; ENSG00000147381; TAA
QEEALGLVGA

SEQ ID NO: 40001 - protein, 10 aa, Homo sapiens
  Table A; Target 40001; HLA-B*44:02; MAGEA4; ENSG00000147381; TAA
QENYLEYRQV

SEQ ID NO: 40002 - protein, 9 aa, Homo sapiens
  Table A; Target 40002; HLA-B*08:01; MAGEA4; ENSG00000147381; TAA
QIFPKTGLL

SEQ ID NO: 40003 - protein, 9 aa, Homo sapiens
  Table A; Target 40003; HLA-B*15:03; MAGEA4; ENSG00000147381; TAA
QIFPKTGLL

SEQ ID NO: 40004 - protein, 10 aa, Homo sapiens
  Table A; Target 40004; HLA-A*02:03; MAGEA4; ENSG00000147381; TAA
QIFPKTGLLI

SEQ ID NO: 40005 - protein, 9 aa, Homo sapiens
  Table A; Target 40005; HLA-C*07:06; MAGEA4; ENSG00000147381; TAA
QVPGSNPAR

SEQ ID NO: 40006 - protein, 10 aa, Homo sapiens
  Table A; Target 40006; HLA-B*15:01; MAGEA4; ENSG00000147381; TAA
QVPGSNPARY

SEQ ID NO: 40007 - protein, 8 aa, Homo sapiens
  Table A; Target 40007; HLA-B*57:01; MAGEA4; ENSG00000147381; TAA
RAKELVTK

SEQ ID NO: 40008 - protein, 8 aa, Homo sapiens
  Table A; Target 40008; HLA-B*58:01; MAGEA4; ENSG00000147381; TAA
RAKELVTK

SEQ ID NO: 40009 - protein, 9 aa, Homo sapiens
  Table A; Target 40009; HLA-A*02:03; MAGEA4; ENSG00000147381; TAA
RAKELVTKA

SEQ ID NO: 40010 - protein, 9 aa, Homo sapiens
  Table A; Target 40010; HLA-A*32:01; MAGEA4; ENSG00000147381; TAA
RAKELVTKA

SEQ ID NO: 40011 - protein, 9 aa, Homo sapiens
  Table A; Target 40011; HLA-B*56:01; MAGEA4; ENSG00000147381; TAA
RAKELVTKA

SEQ ID NO: 40012 - protein, 8 aa, Homo sapiens
  Table A; Target 40012; HLA-B*15:01; MAGEA4; ENSG00000147381; TAA
RALAETSY

SEQ ID NO: 40013 - protein, 9 aa, Homo sapiens
  Table A; Target 40013; HLA-C*05:01; MAGEA4; ENSG00000147381; TAA
RALAETSYV

SEQ ID NO: 40014 - protein, 10 aa, Homo sapiens
  Table A; Target 40014; HLA-A*03:01; MAGEA4; ENSG00000147381; TAA
RALAETSYVK

SEQ ID NO: 40015 - protein, 11 aa, Homo sapiens
  Table A; Target 40015; HLA-B*40:02; MAGEA4; ENSG00000147381; TAA
REALSNKVDEL

SEQ ID NO: 40016 - protein, 9 aa, Homo sapiens
  Table A; Target 40016; HLA-A*03:01; MAGEA4; ENSG00000147381; TAA
RIAYPSLRE

SEQ ID NO: 40017 - protein, 9 aa, Homo sapiens
  Table A; Target 40017; HLA-B*15:01; MAGEA4; ENSG00000147381; TAA
RQVPGSNPA

SEQ ID NO: 40018 - protein, 9 aa, Homo sapiens
  Table A; Target 40018; HLA-C*07:04; MAGEA4; ENSG00000147381; TAA
RQVPGSNPA

SEQ ID NO: 40019 - protein, 10 aa, Homo sapiens
  Table A; Target 40019; HLA-A*30:02; MAGEA4; ENSG00000147381; TAA
RQVPGSNPAR

SEQ ID NO: 40020 - protein, 10 aa, Homo sapiens
  Table A; Target 40020; HLA-B*27:05; MAGEA4; ENSG00000147381; TAA
RQVPGSNPAR

SEQ ID NO: 40021 - protein, 11 aa, Homo sapiens
  Table A; Target 40021; HLA-C*16:01; MAGEA4; ENSG00000147381; TAA
RQVPGSNPARY

SEQ ID NO: 40022 - protein, 10 aa, Homo sapiens
  Table A; Target 40022; HLA-A*03:01; MAGEA4; ENSG00000147381; TAA
RVNARVRIAY

SEQ ID NO: 40023 - protein, 10 aa, Homo sapiens
  Table A; Target 40023; HLA-A*30:02; MAGEA4; ENSG00000147381; TAA
RVNARVRIAY

SEQ ID NO: 40024 - protein, 9 aa, Homo sapiens
  Table A; Target 40024; HLA-A*31:01; MAGEA4; ENSG00000147381; TAA
RVRIAYPSL

SEQ ID NO: 40025 - protein, 9 aa, Homo sapiens
  Table A; Target 40025; HLA-B*57:01; MAGEA4; ENSG00000147381; TAA
RVRIAYPSL

SEQ ID NO: 40026 - protein, 9 aa, Homo sapiens
  Table A; Target 40026; HLA-C*07:02; MAGEA4; ENSG00000147381; TAA
RVRIAYPSL

SEQ ID NO: 40027 - protein, 9 aa, Homo sapiens
  Table A; Target 40027; HLA-C*01:02; MAGEA4; ENSG00000147381; TAA
SAGPPQSPQ

SEQ ID NO: 40028 - protein, 9 aa, Homo sapiens
  Table A; Target 40028; HLA-C*04:01; MAGEA4; ENSG00000147381; TAA
SAGPPQSPQ

SEQ ID NO: 40029 - protein, 9 aa, Homo sapiens
  Table A; Target 40029; HLA-A*68:02; MAGEA4; ENSG00000147381; TAA
SALPTTISF

SEQ ID NO: 40030 - protein, 9 aa, Homo sapiens
  Table A; Target 40030; HLA-B*13:02; MAGEA4; ENSG00000147381; TAA
SALPTTISF

SEQ ID NO: 40031 - protein, 9 aa, Homo sapiens
  Table A; Target 40031; HLA-B*27:05; MAGEA4; ENSG00000147381; TAA
SALPTTISF

SEQ ID NO: 40032 - protein, 9 aa, Homo sapiens
  Table A; Target 40032; HLA-B*40:01; MAGEA4; ENSG00000147381; TAA
SALPTTISF

SEQ ID NO: 40033 - protein, 9 aa, Homo sapiens
  Table A; Target 40033; HLA-B*40:02; MAGEA4; ENSG00000147381; TAA
SALPTTISF

SEQ ID NO: 40034 - protein, 10 aa, Homo sapiens
  Table A; Target 40034; HLA-A*02:03; MAGEA4; ENSG00000147381; TAA
SLKMIFGIDV

SEQ ID NO: 40035 - protein, 9 aa, Homo sapiens
  Table A; Target 40035; HLA-C*07:06; MAGEA4; ENSG00000147381; TAA
SPDAESLFR

SEQ ID NO: 40036 - protein, 8 aa, Homo sapiens
  Table A; Target 40036; HLA-B*35:03; MAGEA4; ENSG00000147381; TAA
SPLVPGTL

SEQ ID NO: 40037 - protein, 11 aa, Homo sapiens
  Table A; Target 40037; HLA-B*54:01; MAGEA4; ENSG00000147381; TAA
SPLVPGTLEEV

SEQ ID NO: 40038 - protein, 9 aa, Homo sapiens
  Table A; Target 40038; HLA-B*39:01; MAGEA4; ENSG00000147381; TAA
SQEEEGPST

SEQ ID NO: 40039 - protein, 9 aa, Homo sapiens
  Table A; Target 40039; HLA-A*02:07; MAGEA4; ENSG00000147381; TAA
SSPLVPGTL

SEQ ID NO: 40040 - protein, 9 aa, Homo sapiens
  Table A; Target 40040; HLA-A*31:01; MAGEA4; ENSG00000147381; TAA
SSPLVPGTL

SEQ ID NO: 40041 - protein, 9 aa, Homo sapiens
  Table A; Target 40041; HLA-A*32:01; MAGEA4; ENSG00000147381; TAA
SSPLVPGTL

SEQ ID NO: 40042 - protein, 9 aa, Homo sapiens
  Table A; Target 40042; HLA-B*15:03; MAGEA4; ENSG00000147381; TAA
SSPLVPGTL

SEQ ID NO: 40043 - protein, 9 aa, Homo sapiens
  Table A; Target 40043; HLA-B*40:01; MAGEA4; ENSG00000147381; TAA
SSPLVPGTL

SEQ ID NO: 40044 - protein, 9 aa, Homo sapiens
  Table A; Target 40044; HLA-B*40:02; MAGEA4; ENSG00000147381; TAA
SSPLVPGTL

SEQ ID NO: 40045 - protein, 9 aa, Homo sapiens
  Table A; Target 40045; HLA-C*03:03; MAGEA4; ENSG00000147381; TAA
SSPLVPGTL

SEQ ID NO: 40046 - protein, 9 aa, Homo sapiens
  Table A; Target 40046; HLA-C*05:01; MAGEA4; ENSG00000147381; TAA
SSPLVPGTL

SEQ ID NO: 40047 - protein, 9 aa, Homo sapiens
  Table A; Target 40047; HLA-C*06:02; MAGEA4; ENSG00000147381; TAA
SSPLVPGTL

SEQ ID NO: 40048 - protein, 10 aa, Homo sapiens
  Table A; Target 40048; HLA-A*30:02; MAGEA4; ENSG00000147381; TAA
SSSPLVPGTL

SEQ ID NO: 40049 - protein, 9 aa, Homo sapiens
  Table A; Target 40049; HLA-C*03:03; MAGEA4; ENSG00000147381; TAA
STSPDAESL

SEQ ID NO: 40050 - protein, 9 aa, Homo sapiens
  Table A; Target 40050; HLA-C*03:04; MAGEA4; ENSG00000147381; TAA
STSPDAESL

SEQ ID NO: 40051 - protein, 10 aa, Homo sapiens
  Table A; Target 40051; HLA-B*57:01; MAGEA4; ENSG00000147381; TAA
STSPDAESLF

SEQ ID NO: 40052 - protein, 11 aa, Homo sapiens
  Table A; Target 40052; HLA-B*27:02; MAGEA4; ENSG00000147381; TAA
STSPDAESLFR

SEQ ID NO: 40053 - protein, 11 aa, Homo sapiens
  Table A; Target 40053; HLA-B*27:05; MAGEA4; ENSG00000147381; TAA
SYDGLLGNNQI

SEQ ID NO: 40054 - protein, 11 aa, Homo sapiens
  Table A; Target 40054; HLA-B*55:01; MAGEA4; ENSG00000147381; TAA
SYDGLLGNNQI

SEQ ID NO: 40055 - protein, 8 aa, Homo sapiens
  Table A; Target 40055; HLA-C*07:01; MAGEA4; ENSG00000147381; TAA
SYVKVLEH

SEQ ID NO: 40056 - protein, 9 aa, Homo sapiens
  Table A; Target 40056; HLA-A*68:02; MAGEA4; ENSG00000147381; TAA
SYVKVLEHV

SEQ ID NO: 40057 - protein, 10 aa, Homo sapiens
  Table A; Target 40057; HLA-A*24:02; MAGEA4; ENSG00000147381; TAA
SYVKVLEHVV

SEQ ID NO: 40058 - protein, 9 aa, Homo sapiens
  Table A; Target 40058; HLA-B*39:01; MAGEA4; ENSG00000147381; TAA
TIAMEGDSA

SEQ ID NO: 40059 - protein, 9 aa, Homo sapiens
  Table A; Target 40059; HLA-A*32:01; MAGEA4; ENSG00000147381; TAA
TQDWVQENY

SEQ ID NO: 40060 - protein, 9 aa, Homo sapiens
  Table A; Target 40060; HLA-B*27:05; MAGEA4; ENSG00000147381; TAA
TQDWVQENY

SEQ ID NO: 40061 - protein, 10 aa, Homo sapiens
  Table A; Target 40061; HLA-C*07:06; MAGEA4; ENSG00000147381; TAA
TSPDAESLFR

SEQ ID NO: 40062 - protein, 8 aa, Homo sapiens
  Table A; Target 40062; HLA-C*04:01; MAGEA4; ENSG00000147381; TAA
TSYVKVLE

SEQ ID NO: 40063 - protein, 8 aa, Homo sapiens
  Table A; Target 40063; HLA-C*06:02; MAGEA4; ENSG00000147381; TAA
TSYVKVLE

SEQ ID NO: 40064 - protein, 8 aa, Homo sapiens
  Table A; Target 40064; HLA-C*07:01; MAGEA4; ENSG00000147381; TAA
TSYVKVLE

SEQ ID NO: 40065 - protein, 8 aa, Homo sapiens
  Table A; Target 40065; HLA-C*12:03; MAGEA4; ENSG00000147381; TAA
TSYVKVLE

SEQ ID NO: 40066 - protein, 9 aa, Homo sapiens
  Table A; Target 40066; HLA-A*33:01; MAGEA4; ENSG00000147381; TAA
TSYVKVLEH

SEQ ID NO: 40067 - protein, 9 aa, Homo sapiens
  Table A; Target 40067; HLA-C*07:01; MAGEA4; ENSG00000147381; TAA
TSYVKVLEH

SEQ ID NO: 40068 - protein, 9 aa, Homo sapiens
  Table A; Target 40068; HLA-C*16:02; MAGEA4; ENSG00000147381; TAA
TSYVKVLEH

SEQ ID NO: 40069 - protein, 10 aa, Homo sapiens
  Table A; Target 40069; HLA-A*02:03; MAGEA4; ENSG00000147381; TAA
TSYVKVLEHV

SEQ ID NO: 40070 - protein, 9 aa, Homo sapiens
  Table A; Target 40070; HLA-A*03:02; MAGEA4; ENSG00000147381; TAA
TVYGEPRKL

SEQ ID NO: 40071 - protein, 9 aa, Homo sapiens
  Table A; Target 40071; HLA-A*11:01; MAGEA4; ENSG00000147381; TAA
TVYGEPRKL

SEQ ID NO: 40072 - protein, 9 aa, Homo sapiens
  Table A; Target 40072; HLA-A*25:01; MAGEA4; ENSG00000147381; TAA
TVYGEPRKL

SEQ ID NO: 40073 - protein, 9 aa, Homo sapiens
  Table A; Target 40073; HLA-A*31:01; MAGEA4; ENSG00000147381; TAA
TVYGEPRKL

SEQ ID NO: 40074 - protein, 9 aa, Homo sapiens
  Table A; Target 40074; HLA-A*68:01; MAGEA4; ENSG00000147381; TAA
TVYGEPRKL

SEQ ID NO: 40075 - protein, 9 aa, Homo sapiens
  Table A; Target 40075; HLA-C*03:03; MAGEA4; ENSG00000147381; TAA
TVYGEPRKL

SEQ ID NO: 40076 - protein, 9 aa, Homo sapiens
  Table A; Target 40076; HLA-C*07:06; MAGEA4; ENSG00000147381; TAA
TVYGEPRKL

SEQ ID NO: 40077 - protein, 9 aa, Homo sapiens
  Table A; Target 40077; HLA-C*16:02; MAGEA4; ENSG00000147381; TAA
TVYGEPRKL

SEQ ID NO: 40078 - protein, 8 aa, Homo sapiens
  Table A; Target 40078; HLA-C*04:01; MAGEA4; ENSG00000147381; TAA
TYTLVTCL

SEQ ID NO: 40079 - protein, 8 aa, Homo sapiens
  Table A; Target 40079; HLA-C*07:04; MAGEA4; ENSG00000147381; TAA
TYTLVTCL

SEQ ID NO: 40080 - protein, 9 aa, Homo sapiens
  Table A; Target 40080; HLA-C*07:01; MAGEA4; ENSG00000147381; TAA
TYTLVTCLG

SEQ ID NO: 40081 - protein, 10 aa, Homo sapiens
  Table A; Target 40081; HLA-C*07:01; MAGEA4; ENSG00000147381; TAA
TYTLVTCLGL

SEQ ID NO: 40082 - protein, 8 aa, Homo sapiens
  Table A; Target 40082; HLA-A*30:01; MAGEA4; ENSG00000147381; TAA
VDELAHFL

SEQ ID NO: 40083 - protein, 8 aa, Homo sapiens
  Table A; Target 40083; HLA-C*06:02; MAGEA4; ENSG00000147381; TAA
VDELAHFL

SEQ ID NO: 40084 - protein, 8 aa, Homo sapiens
  Table A; Target 40084; HLA-C*07:01; MAGEA4; ENSG00000147381; TAA
VDELAHFL

SEQ ID NO: 40085 - protein, 9 aa, Homo sapiens
  Table A; Target 40085; HLA-B*37:01; MAGEA4; ENSG00000147381; TAA
VDELAHFLL

SEQ ID NO: 40086 - protein, 8 aa, Homo sapiens
  Table A; Target 40086; HLA-C*06:02; MAGEA4; ENSG00000147381; TAA
VDPASNTY

SEQ ID NO: 40087 - protein, 8 aa, Homo sapiens
  Table A; Target 40087; HLA-C*07:02; MAGEA4; ENSG00000147381; TAA
VDPASNTY

SEQ ID NO: 40088 - protein, 10 aa, Homo sapiens
  Table A; Target 40088; HLA-B*07:02; MAGEA4; ENSG00000147381; TAA
VDPASNTYTL

SEQ ID NO: 40089 - protein, 10 aa, Homo sapiens
  Table A; Target 40089; HLA-C*01:02; MAGEA4; ENSG00000147381; TAA
VDPASNTYTL

SEQ ID NO: 40090 - protein, 10 aa, Homo sapiens
  Table A; Target 40090; HLA-C*07:02; MAGEA4; ENSG00000147381; TAA
VDPASNTYTL

SEQ ID NO: 40091 - protein, 10 aa, Homo sapiens
  Table A; Target 40091; HLA-B*40:02; MAGEA4; ENSG00000147381; TAA
VEAQEEALGL

SEQ ID NO: 40092 - protein, 10 aa, Homo sapiens
  Table A; Target 40092; HLA-B*44:03; MAGEA4; ENSG00000147381; TAA
VEAQEEALGL

SEQ ID NO: 40093 - protein, 10 aa, Homo sapiens
  Table A; Target 40093; HLA-B*49:01; MAGEA4; ENSG00000147381; TAA
VEAQEEALGL

SEQ ID NO: 40094 - protein, 10 aa, Homo sapiens
  Table A; Target 40094; HLA-B*15:01; MAGEA4; ENSG00000147381; TAA
VIFGKASESL

SEQ ID NO: 40095 - protein, 10 aa, Homo sapiens
  Table A; Target 40095; HLA-B*46:01; MAGEA4; ENSG00000147381; TAA
VIFGKASESL

SEQ ID NO: 40096 - protein, 11 aa, Homo sapiens
  Table A; Target 40096; HLA-C*07:01; MAGEA4; ENSG00000147381; TAA
VKEVDPASNTY

SEQ ID NO: 40097 - protein, 9 aa, Homo sapiens
  Table A; Target 40097; HLA-C*07:01; MAGEA4; ENSG00000147381; TAA
VLEHVVRVN

SEQ ID NO: 40098 - protein, 10 aa, Homo sapiens
  Table A; Target 40098; HLA-A*02:07; MAGEA4; ENSG00000147381; TAA
VLEHVVRVNA

SEQ ID NO: 40099 - protein, 9 aa, Homo sapiens
  Table A; Target 40099; HLA-A*30:02; MAGEA4; ENSG00000147381; TAA
VNARVRIAY

SEQ ID NO: 40100 - protein, 9 aa, Homo sapiens
  Table A; Target 40100; HLA-B*46:01; MAGEA4; ENSG00000147381; TAA
VNARVRIAY

SEQ ID NO: 40101 - protein, 9 aa, Homo sapiens
  Table A; Target 40101; HLA-B*57:01; MAGEA4; ENSG00000147381; TAA
VNARVRIAY

SEQ ID NO: 40102 - protein, 9 aa, Homo sapiens
  Table A; Target 40102; HLA-A*01:01; MAGEA4; ENSG00000147381; TAA
VPGSNPARY

SEQ ID NO: 40103 - protein, 9 aa, Homo sapiens
  Table A; Target 40103; HLA-C*03:03; MAGEA4; ENSG00000147381; TAA
VPGSNPARY

SEQ ID NO: 40104 - protein, 9 aa, Homo sapiens
  Table A; Target 40104; HLA-C*07:04; MAGEA4; ENSG00000147381; TAA
VPGSNPARY

SEQ ID NO: 40105 - protein, 8 aa, Homo sapiens
  Table A; Target 40105; HLA-B*51:01; MAGEA4; ENSG00000147381; TAA
VPGTLEEV

SEQ ID NO: 40106 - protein, 10 aa, Homo sapiens
  Table A; Target 40106; HLA-B*55:01; MAGEA4; ENSG00000147381; TAA
VPGTLEEVPA

SEQ ID NO: 40107 - protein, 11 aa, Homo sapiens
  Table A; Target 40107; HLA-B*56:01; MAGEA4; ENSG00000147381; TAA
VPGTLEEVPAA

SEQ ID NO: 40108 - protein, 8 aa, Homo sapiens
  Table A; Target 40108; HLA-C*07:02; MAGEA4; ENSG00000147381; TAA
VRIAYPSL

SEQ ID NO: 40109 - protein, 9 aa, Homo sapiens
  Table A; Target 40109; HLA-A*31:01; MAGEA4; ENSG00000147381; TAA
VRIAYPSLR

SEQ ID NO: 40110 - protein, 9 aa, Homo sapiens
  Table A; Target 40110; HLA-C*06:02; MAGEA4; ENSG00000147381; TAA
VRIAYPSLR

SEQ ID NO: 40111 - protein, 8 aa, Homo sapiens
  Table A; Target 40111; HLA-C*04:01; MAGEA4; ENSG00000147381; TAA
VSSSSPLV

SEQ ID NO: 40112 - protein, 8 aa, Homo sapiens
  Table A; Target 40112; HLA-C*06:02; MAGEA4; ENSG00000147381; TAA
VSSSSPLV

SEQ ID NO: 40113 - protein, 8 aa, Homo sapiens
  Table A; Target 40113; HLA-B*46:01; MAGEA4; ENSG00000147381; TAA
VTCLGLSY

SEQ ID NO: 40114 - protein, 9 aa, Homo sapiens
  Table A; Target 40114; HLA-B*40:02; MAGEA4; ENSG00000147381; TAA
VTKAEMLER

SEQ ID NO: 40115 - protein, 9 aa, Homo sapiens
  Table A; Target 40115; HLA-C*06:02; MAGEA4; ENSG00000147381; TAA
VTKAEMLER

SEQ ID NO: 40116 - protein, 10 aa, Homo sapiens
  Table A; Target 40116; HLA-A*02:03; MAGEA4; ENSG00000147381; TAA
VTKAEMLERV

SEQ ID NO: 40117 - protein, 9 aa, Homo sapiens
  Table A; Target 40117; HLA-A*31:01; MAGEA4; ENSG00000147381; TAA
VVRVNARVR

SEQ ID NO: 40118 - protein, 9 aa, Homo sapiens
  Table A; Target 40118; HLA-B*37:01; MAGEA4; ENSG00000147381; TAA
VYDGREHTV

SEQ ID NO: 40119 - protein, 9 aa, Homo sapiens
  Table A; Target 40119; HLA-B*39:01; MAGEA4; ENSG00000147381; TAA
VYDGREHTV

SEQ ID NO: 40120 - protein, 9 aa, Homo sapiens
  Table A; Target 40120; HLA-C*03:03; MAGEA4; ENSG00000147381; TAA
VYDGREHTV

SEQ ID NO: 40121 - protein, 9 aa, Homo sapiens
  Table A; Target 40121; HLA-C*06:02; MAGEA4; ENSG00000147381; TAA
VYDGREHTV

SEQ ID NO: 40122 - protein, 9 aa, Homo sapiens
  Table A; Target 40122; HLA-C*07:04; MAGEA4; ENSG00000147381; TAA
VYDGREHTV

SEQ ID NO: 40123 - protein, 9 aa, Homo sapiens
  Table A; Target 40123; HLA-C*12:03; MAGEA4; ENSG00000147381; TAA
VYDGREHTV

SEQ ID NO: 40124 - protein, 10 aa, Homo sapiens
  Table A; Target 40124; HLA-A*01:01; MAGEA4; ENSG00000147381; TAA
VYDGREHTVY

SEQ ID NO: 40125 - protein, 10 aa, Homo sapiens
  Table A; Target 40125; HLA-A*23:01; MAGEA4; ENSG00000147381; TAA
VYDGREHTVY

SEQ ID NO: 40126 - protein, 10 aa, Homo sapiens
  Table A; Target 40126; HLA-B*15:01; MAGEA4; ENSG00000147381; TAA
VYDGREHTVY

SEQ ID NO: 40127 - protein, 8 aa, Homo sapiens
  Table A; Target 40127; HLA-C*14:02; MAGEA4; ENSG00000147381; TAA
VYGEPRKL

SEQ ID NO: 40128 - protein, 8 aa, Homo sapiens
  Table A; Target 40128; HLA-C*16:01; MAGEA4; ENSG00000147381; TAA
VYGEPRKL

SEQ ID NO: 40129 - protein, 9 aa, Homo sapiens
  Table A; Target 40129; HLA-C*02:02; MAGEA4; ENSG00000147381; TAA
WVQENYLEY

SEQ ID NO: 40130 - protein, 9 aa, Homo sapiens
  Table A; Target 40130; HLA-C*03:03; MAGEA4; ENSG00000147381; TAA
WVQENYLEY

SEQ ID NO: 40131 - protein, 9 aa, Homo sapiens
  Table A; Target 40131; HLA-C*07:01; MAGEA4; ENSG00000147381; TAA
WVQENYLEY

SEQ ID NO: 40132 - protein, 9 aa, Homo sapiens
  Table A; Target 40132; HLA-C*14:02; MAGEA4; ENSG00000147381; TAA
WVQENYLEY

SEQ ID NO: 40133 - protein, 8 aa, Homo sapiens
  Table A; Target 40133; HLA-C*07:01; MAGEA4; ENSG00000147381; TAA
YDGLLGNN

SEQ ID NO: 40134 - protein, 8 aa, Homo sapiens
  Table A; Target 40134; HLA-B*40:02; MAGEA4; ENSG00000147381; TAA
YDGREHTV

SEQ ID NO: 40135 - protein, 8 aa, Homo sapiens
  Table A; Target 40135; HLA-C*04:01; MAGEA4; ENSG00000147381; TAA
YDGREHTV

SEQ ID NO: 40136 - protein, 8 aa, Homo sapiens
  Table A; Target 40136; HLA-C*12:03; MAGEA4; ENSG00000147381; TAA
YDGREHTV

SEQ ID NO: 40137 - protein, 8 aa, Homo sapiens
  Table A; Target 40137; HLA-C*16:02; MAGEA4; ENSG00000147381; TAA
YDGREHTV

SEQ ID NO: 40138 - protein, 9 aa, Homo sapiens
  Table A; Target 40138; HLA-B*15:01; MAGEA4; ENSG00000147381; TAA
YDGREHTVY

SEQ ID NO: 40139 - protein, 9 aa, Homo sapiens
  Table A; Target 40139; HLA-B*15:03; MAGEA4; ENSG00000147381; TAA
YDGREHTVY

SEQ ID NO: 40140 - protein, 9 aa, Homo sapiens
  Table A; Target 40140; HLA-C*07:04; MAGEA4; ENSG00000147381; TAA
YDGREHTVY

SEQ ID NO: 40141 - protein, 9 aa, Homo sapiens
  Table A; Target 40141; HLA-C*12:03; MAGEA4; ENSG00000147381; TAA
YDGREHTVY

SEQ ID NO: 40142 - protein, 9 aa, Homo sapiens
  Table A; Target 40142; HLA-B*49:01; MAGEA4; ENSG00000147381; TAA
YEFLWGPRA

SEQ ID NO: 40143 - protein, 10 aa, Homo sapiens
  Table A; Target 40143; HLA-A*30:01; MAGEA4; ENSG00000147381; TAA
YEFLWGPRAL

SEQ ID NO: 40144 - protein, 10 aa, Homo sapiens
  Table A; Target 40144; HLA-B*40:02; MAGEA4; ENSG00000147381; TAA
YEFLWGPRAL

SEQ ID NO: 40145 - protein, 9 aa, Homo sapiens
  Table A; Target 40145; HLA-B*40:02; MAGEA4; ENSG00000147381; TAA
YPSLREAAL

SEQ ID NO: 40146 - protein, 9 aa, Homo sapiens
  Table A; Target 40146; HLA-C*05:01; MAGEA4; ENSG00000147381; TAA
YPSLREAAL

SEQ ID NO: 40147 - protein, 9 aa, Homo sapiens
  Table A; Target 40147; HLA-C*16:02; MAGEA4; ENSG00000147381; TAA
YPSLREAAL

SEQ ID NO: 40148 - protein, 10 aa, Homo sapiens
  Table A; Target 40148; HLA-B*35:03; MAGEA4; ENSG00000147381; TAA
YPSLREAALL

SEQ ID NO: 40149 - protein, 9 aa, Homo sapiens
  Table A; Target 40149; HLA-C*07:02; MAGEA4; ENSG00000147381; TAA
YRAKELVTK

SEQ ID NO: 40150 - protein, 10 aa, Homo sapiens
  Table A; Target 40150; HLA-B*27:05; MAGEA4; ENSG00000147381; TAA
YRQVPGSNPA

SEQ ID NO: 40151 - protein, 8 aa, Homo sapiens
  Table A; Target 40151; HLA-A*68:02; MAGEA4; ENSG00000147381; TAA
YVKVLEHV

SEQ ID NO: 40152 - protein, 8 aa, Homo sapiens
  Table A; Target 40152; HLA-B*13:02; MAGEA4; ENSG00000147381; TAA
YVKVLEHV

SEQ ID NO: 40153 - protein, 8 aa, Homo sapiens
  Table A; Target 40153; HLA-B*40:02; MAGEA4; ENSG00000147381; TAA
YVKVLEHV

SEQ ID NO: 40154 - protein, 8 aa, Homo sapiens
  Table A; Target 40154; HLA-C*06:02; MAGEA4; ENSG00000147381; TAA
YVKVLEHV

SEQ ID NO: 40155 - protein, 8 aa, Homo sapiens
  Table A; Target 40155; HLA-C*12:03; MAGEA4; ENSG00000147381; TAA
YVKVLEHV

SEQ ID NO: 40156 - protein, 9 aa, Homo sapiens
  Table A; Target 40156; HLA-A*31:01; MAGEA4; ENSG00000147381; TAA
YVKVLEHVV

SEQ ID NO: 40157 - protein, 9 aa, Homo sapiens
  Table A; Target 40157; HLA-B*55:01; MAGEA4; ENSG00000147381; TAA
YVKVLEHVV

SEQ ID NO: 40158 - protein, 9 aa, Homo sapiens
  Table A; Target 40158; HLA-B*57:01; MAGEA4; ENSG00000147381; TAA
YVKVLEHVV

SEQ ID NO: 40159 - protein, 9 aa, Homo sapiens
  Table A; Target 40159; HLA-C*06:02; MAGEA4; ENSG00000147381; TAA
YVKVLEHVV

SEQ ID NO: 40160 - protein, 10 aa, Homo sapiens
  Table A; Target 40160; HLA-A*33:03; MAGEA4; ENSG00000147381; TAA
YVKVLEHVVR

SEQ ID NO: 40161 - protein, 9 aa, Homo sapiens
  Table A; Target 40161; HLA-A*33:01; MAGEA4,MAGEA6; ENSG00000147381,ENSG00000197172; TAA,CTA
ENYLEYRQV

SEQ ID NO: 40162 - protein, 8 aa, Homo sapiens
  Table A; Target 40162; HLA-C*12:03; MAGEA4,MAGEA6; ENSG00000147381,ENSG00000197172; TAA,CTA
VQENYLEY

SEQ ID NO: 40163 - protein, 10 aa, Homo sapiens
  Table A; Target 40163; HLA-C*07:02; MAGEA4,MAGEA8; ENSG00000147381,ENSG00000156009; TAA,TAA
GPRALAETSY

SEQ ID NO: 40164 - protein, 9 aa, Homo sapiens
  Table A; Target 40164; HLA-B*40:02; MAGEA4,MAGEA8; ENSG00000147381,ENSG00000156009; TAA,TAA
KVLEHVVRV

SEQ ID NO: 40165 - protein, 10 aa, Homo sapiens
  Table A; Target 40165; HLA-A*11:01; MAGEA4,MAGEA8; ENSG00000147381,ENSG00000156009; TAA,TAA
RALAETSYVK

SEQ ID NO: 40166 - protein, 11 aa, Homo sapiens
  Table A; Target 40166; HLA-A*31:01; MAGEA4,MAGEA8; ENSG00000147381,ENSG00000156009; TAA,TAA
SYVKVLEHVVR

SEQ ID NO: 40167 - protein, 10 aa, Homo sapiens
  Table A; Target 40167; HLA-A*31:01; MAGEA4,MAGEA8; ENSG00000147381,ENSG00000156009; TAA,TAA
WVQENYLEYR

SEQ ID NO: 40168 - protein, 9 aa, Homo sapiens
  Table A; Target 40168; HLA-B*58:01; MAGEA4,MAGEA8; ENSG00000147381,ENSG00000156009; TAA,TAA
YVKVLEHVV

SEQ ID NO: 40169 - protein, 9 aa, Homo sapiens
  Table A; Target 40169; HLA-C*07:02; MAGEA4,MAGEA8; ENSG00000147381,ENSG00000156009; TAA,TAA
YVKVLEHVV

SEQ ID NO: 40170 - protein, 9 aa, Homo sapiens
  Table A; Target 40170; HLA-C*16:01; MAGEA4,MAGEA8; ENSG00000147381,ENSG00000156009; TAA,TAA
YVKVLEHVV

SEQ ID NO: 40171 - protein, 9 aa, Homo sapiens
  Table A; Target 40171; HLA-B*08:01; MAGEA6; ENSG00000197172; CTA
AALSRKVAK

SEQ ID NO: 40172 - protein, 9 aa, Homo sapiens
  Table A; Target 40172; HLA-C*16:01; MAGEA6; ENSG00000197172; CTA
AALSRKVAK

SEQ ID NO: 40173 - protein, 8 aa, Homo sapiens
  Table A; Target 40173; HLA-A*02:01; MAGEA6; ENSG00000197172; CTA
ALIETSYV

SEQ ID NO: 40174 - protein, 8 aa, Homo sapiens
  Table A; Target 40174; HLA-A*02:03; MAGEA6; ENSG00000197172; CTA
ALIETSYV

SEQ ID NO: 40175 - protein, 8 aa, Homo sapiens
  Table A; Target 40175; HLA-A*02:07; MAGEA6; ENSG00000197172; CTA
ALIETSYV

SEQ ID NO: 40176 - protein, 8 aa, Homo sapiens
  Table A; Target 40176; HLA-B*13:02; MAGEA6; ENSG00000197172; CTA
ALIETSYV

SEQ ID NO: 40177 - protein, 8 aa, Homo sapiens
  Table A; Target 40177; HLA-B*49:01; MAGEA6; ENSG00000197172; CTA
ALIETSYV

SEQ ID NO: 40178 - protein, 8 aa, Homo sapiens
  Table A; Target 40178; HLA-B*55:01; MAGEA6; ENSG00000197172; CTA
ALIETSYV

SEQ ID NO: 40179 - protein, 9 aa, Homo sapiens
  Table A; Target 40179; HLA-A*01:01; MAGEA6; ENSG00000197172; CTA
ALIETSYVK

SEQ ID NO: 40180 - protein, 9 aa, Homo sapiens
  Table A; Target 40180; HLA-A*03:01; MAGEA6; ENSG00000197172; CTA
ALIETSYVK

SEQ ID NO: 40181 - protein, 9 aa, Homo sapiens
  Table A; Target 40181; HLA-A*03:02; MAGEA6; ENSG00000197172; CTA
ALIETSYVK

SEQ ID NO: 40182 - protein, 9 aa, Homo sapiens
  Table A; Target 40182; HLA-A*11:01; MAGEA6; ENSG00000197172; CTA
ALIETSYVK

SEQ ID NO: 40183 - protein, 9 aa, Homo sapiens
  Table A; Target 40183; HLA-A*29:02; MAGEA6; ENSG00000197172; CTA
ALIETSYVK

SEQ ID NO: 40184 - protein, 9 aa, Homo sapiens
  Table A; Target 40184; HLA-B*46:01; MAGEA6; ENSG00000197172; CTA
ALIETSYVK

SEQ ID NO: 40185 - protein, 10 aa, Homo sapiens
  Table A; Target 40185; HLA-A*02:01; MAGEA6; ENSG00000197172; CTA
ALIETSYVKV

SEQ ID NO: 40186 - protein, 10 aa, Homo sapiens
  Table A; Target 40186; HLA-A*02:03; MAGEA6; ENSG00000197172; CTA
ALIETSYVKV

SEQ ID NO: 40187 - protein, 10 aa, Homo sapiens
  Table A; Target 40187; HLA-A*02:04; MAGEA6; ENSG00000197172; CTA
ALIETSYVKV

SEQ ID NO: 40188 - protein, 10 aa, Homo sapiens
  Table A; Target 40188; HLA-A*02:07; MAGEA6; ENSG00000197172; CTA
ALIETSYVKV

SEQ ID NO: 40189 - protein, 10 aa, Homo sapiens
  Table A; Target 40189; HLA-B*13:02; MAGEA6; ENSG00000197172; CTA
ALIETSYVKV

SEQ ID NO: 40190 - protein, 10 aa, Homo sapiens
  Table A; Target 40190; HLA-B*55:01; MAGEA6; ENSG00000197172; CTA
ALIETSYVKV

SEQ ID NO: 40191 - protein, 11 aa, Homo sapiens
  Table A; Target 40191; HLA-A*02:01; MAGEA6; ENSG00000197172; CTA
ALIETSYVKVL

SEQ ID NO: 40192 - protein, 11 aa, Homo sapiens
  Table A; Target 40192; HLA-A*02:03; MAGEA6; ENSG00000197172; CTA
ALIETSYVKVL

SEQ ID NO: 40193 - protein, 11 aa, Homo sapiens
  Table A; Target 40193; HLA-A*02:04; MAGEA6; ENSG00000197172; CTA
ALIETSYVKVL

SEQ ID NO: 40194 - protein, 11 aa, Homo sapiens
  Table A; Target 40194; HLA-A*02:07; MAGEA6; ENSG00000197172; CTA
ALIETSYVKVL

SEQ ID NO: 40195 - protein, 11 aa, Homo sapiens
  Table A; Target 40195; HLA-C*16:02; MAGEA6; ENSG00000197172; CTA
ALIETSYVKVL

SEQ ID NO: 40196 - protein, 9 aa, Homo sapiens
  Table A; Target 40196; HLA-A*02:03; MAGEA6; ENSG00000197172; CTA
ALSRKVAKL

SEQ ID NO: 40197 - protein, 9 aa, Homo sapiens
  Table A; Target 40197; HLA-A*02:04; MAGEA6; ENSG00000197172; CTA
ALSRKVAKL

SEQ ID NO: 40198 - protein, 8 aa, Homo sapiens
  Table A; Target 40198; HLA-C*05:01; MAGEA6; ENSG00000197172; CTA
ASDSLQLV

SEQ ID NO: 40199 - protein, 9 aa, Homo sapiens
  Table A; Target 40199; HLA-A*01:01; MAGEA6; ENSG00000197172; CTA
ASDSLQLVF

SEQ ID NO: 40200 - protein, 9 aa, Homo sapiens
  Table A; Target 40200; HLA-A*02:07; MAGEA6; ENSG00000197172; CTA
ASDSLQLVF

SEQ ID NO: 40201 - protein, 9 aa, Homo sapiens
  Table A; Target 40201; HLA-A*11:01; MAGEA6; ENSG00000197172; CTA
ASDSLQLVF

SEQ ID NO: 40202 - protein, 9 aa, Homo sapiens
  Table A; Target 40202; HLA-A*29:02; MAGEA6; ENSG00000197172; CTA
ASDSLQLVF

SEQ ID NO: 40203 - protein, 9 aa, Homo sapiens
  Table A; Target 40203; HLA-A*32:01; MAGEA6; ENSG00000197172; CTA
ASDSLQLVF

SEQ ID NO: 40204 - protein, 9 aa, Homo sapiens
  Table A; Target 40204; HLA-B*27:05; MAGEA6; ENSG00000197172; CTA
ASDSLQLVF

SEQ ID NO: 40205 - protein, 9 aa, Homo sapiens
  Table A; Target 40205; HLA-B*35:01; MAGEA6; ENSG00000197172; CTA
ASDSLQLVF

SEQ ID NO: 40206 - protein, 9 aa, Homo sapiens
  Table A; Target 40206; HLA-B*38:01; MAGEA6; ENSG00000197172; CTA
ASDSLQLVF

SEQ ID NO: 40207 - protein, 9 aa, Homo sapiens
  Table A; Target 40207; HLA-B*44:03; MAGEA6; ENSG00000197172; CTA
ASDSLQLVF

SEQ ID NO: 40208 - protein, 9 aa, Homo sapiens
  Table A; Target 40208; HLA-B*57:01; MAGEA6; ENSG00000197172; CTA
ASDSLQLVF

SEQ ID NO: 40209 - protein, 9 aa, Homo sapiens
  Table A; Target 40209; HLA-B*58:01; MAGEA6; ENSG00000197172; CTA
ASDSLQLVF

SEQ ID NO: 40210 - protein, 9 aa, Homo sapiens
  Table A; Target 40210; HLA-C*02:02; MAGEA6; ENSG00000197172; CTA
ASDSLQLVF

SEQ ID NO: 40211 - protein, 9 aa, Homo sapiens
  Table A; Target 40211; HLA-C*03:04; MAGEA6; ENSG00000197172; CTA
ASDSLQLVF

SEQ ID NO: 40212 - protein, 9 aa, Homo sapiens
  Table A; Target 40212; HLA-C*04:01; MAGEA6; ENSG00000197172; CTA
ASDSLQLVF

SEQ ID NO: 40213 - protein, 9 aa, Homo sapiens
  Table A; Target 40213; HLA-C*05:01; MAGEA6; ENSG00000197172; CTA
ASDSLQLVF

SEQ ID NO: 40214 - protein, 9 aa, Homo sapiens
  Table A; Target 40214; HLA-C*12:03; MAGEA6; ENSG00000197172; CTA
ASDSLQLVF

SEQ ID NO: 40215 - protein, 9 aa, Homo sapiens
  Table A; Target 40215; HLA-C*16:04; MAGEA6; ENSG00000197172; CTA
ASDSLQLVF

SEQ ID NO: 40216 - protein, 8 aa, Homo sapiens
  Table A; Target 40216; HLA-B*08:01; MAGEA6; ENSG00000197172; CTA
DPIGHVYI

SEQ ID NO: 40217 - protein, 8 aa, Homo sapiens
  Table A; Target 40217; HLA-B*51:01; MAGEA6; ENSG00000197172; CTA
DPIGHVYI

SEQ ID NO: 40218 - protein, 9 aa, Homo sapiens
  Table A; Target 40218; HLA-A*25:01; MAGEA6; ENSG00000197172; CTA
DPIGHVYIF

SEQ ID NO: 40219 - protein, 9 aa, Homo sapiens
  Table A; Target 40219; HLA-A*26:01; MAGEA6; ENSG00000197172; CTA
DPIGHVYIF

SEQ ID NO: 40220 - protein, 9 aa, Homo sapiens
  Table A; Target 40220; HLA-A*33:01; MAGEA6; ENSG00000197172; CTA
DPIGHVYIF

SEQ ID NO: 40221 - protein, 9 aa, Homo sapiens
  Table A; Target 40221; HLA-B*35:01; MAGEA6; ENSG00000197172; CTA
DPIGHVYIF

SEQ ID NO: 40222 - protein, 9 aa, Homo sapiens
  Table A; Target 40222; HLA-B*35:03; MAGEA6; ENSG00000197172; CTA
DPIGHVYIF

SEQ ID NO: 40223 - protein, 9 aa, Homo sapiens
  Table A; Target 40223; HLA-B*51:01; MAGEA6; ENSG00000197172; CTA
DPIGHVYIF

SEQ ID NO: 40224 - protein, 10 aa, Homo sapiens
  Table A; Target 40224; HLA-B*54:01; MAGEA6; ENSG00000197172; CTA
DPIGHVYIFA

SEQ ID NO: 40225 - protein, 9 aa, Homo sapiens
  Table A; Target 40225; HLA-A*26:01; MAGEA6; ENSG00000197172; CTA
DPKKLLTQY

SEQ ID NO: 40226 - protein, 9 aa, Homo sapiens
  Table A; Target 40226; HLA-A*33:01; MAGEA6; ENSG00000197172; CTA
DPKKLLTQY

SEQ ID NO: 40227 - protein, 9 aa, Homo sapiens
  Table A; Target 40227; HLA-B*18:01; MAGEA6; ENSG00000197172; CTA
DPKKLLTQY

SEQ ID NO: 40228 - protein, 9 aa, Homo sapiens
  Table A; Target 40228; HLA-B*35:01; MAGEA6; ENSG00000197172; CTA
DPKKLLTQY

SEQ ID NO: 40229 - protein, 8 aa, Homo sapiens
  Table A; Target 40229; HLA-A*33:01; MAGEA6; ENSG00000197172; CTA
DSIFGDPK

SEQ ID NO: 40230 - protein, 8 aa, Homo sapiens
  Table A; Target 40230; HLA-A*68:01; MAGEA6; ENSG00000197172; CTA
DSIFGDPK

SEQ ID NO: 40231 - protein, 9 aa, Homo sapiens
  Table A; Target 40231; HLA-A*33:01; MAGEA6; ENSG00000197172; CTA
DSIFGDPKK

SEQ ID NO: 40232 - protein, 9 aa, Homo sapiens
  Table A; Target 40232; HLA-A*68:01; MAGEA6; ENSG00000197172; CTA
DSIFGDPKK

SEQ ID NO: 40233 - protein, 10 aa, Homo sapiens
  Table A; Target 40233; HLA-A*68:01; MAGEA6; ENSG00000197172; CTA
DSIFGDPKKL

SEQ ID NO: 40234 - protein, 9 aa, Homo sapiens
  Table A; Target 40234; HLA-B*27:02; MAGEA6; ENSG00000197172; CTA
EDSIFGDPK

SEQ ID NO: 40235 - protein, 9 aa, Homo sapiens
  Table A; Target 40235; HLA-A*33:01; MAGEA6; ENSG00000197172; CTA
EFQAALSRK

SEQ ID NO: 40236 - protein, 10 aa, Homo sapiens
  Table A; Target 40236; HLA-A*26:01; MAGEA6; ENSG00000197172; CTA
ELMEVDPIGH

SEQ ID NO: 40237 - protein, 11 aa, Homo sapiens
  Table A; Target 40237; HLA-A*68:02; MAGEA6; ENSG00000197172; CTA
ELMEVDPIGHV

SEQ ID NO: 40238 - protein, 8 aa, Homo sapiens
  Table A; Target 40238; HLA-C*04:01; MAGEA6; ENSG00000197172; CTA
EVDPIGHV

SEQ ID NO: 40239 - protein, 8 aa, Homo sapiens
  Table A; Target 40239; HLA-C*05:01; MAGEA6; ENSG00000197172; CTA
EVDPIGHV

SEQ ID NO: 40240 - protein, 9 aa, Homo sapiens
  Table A; Target 40240; HLA-A*02:07; MAGEA6; ENSG00000197172; CTA
EVDPIGHVY

SEQ ID NO: 40241 - protein, 9 aa, Homo sapiens
  Table A; Target 40241; HLA-A*03:02; MAGEA6; ENSG00000197172; CTA
EVDPIGHVY

SEQ ID NO: 40242 - protein, 9 aa, Homo sapiens
  Table A; Target 40242; HLA-A*11:01; MAGEA6; ENSG00000197172; CTA
EVDPIGHVY

SEQ ID NO: 40243 - protein, 9 aa, Homo sapiens
  Table A; Target 40243; HLA-A*23:01; MAGEA6; ENSG00000197172; CTA
EVDPIGHVY

SEQ ID NO: 40244 - protein, 9 aa, Homo sapiens
  Table A; Target 40244; HLA-A*25:01; MAGEA6; ENSG00000197172; CTA
EVDPIGHVY

SEQ ID NO: 40245 - protein, 9 aa, Homo sapiens
  Table A; Target 40245; HLA-A*29:02; MAGEA6; ENSG00000197172; CTA
EVDPIGHVY

SEQ ID NO: 40246 - protein, 9 aa, Homo sapiens
  Table A; Target 40246; HLA-A*32:01; MAGEA6; ENSG00000197172; CTA
EVDPIGHVY

SEQ ID NO: 40247 - protein, 9 aa, Homo sapiens
  Table A; Target 40247; HLA-A*33:01; MAGEA6; ENSG00000197172; CTA
EVDPIGHVY

SEQ ID NO: 40248 - protein, 9 aa, Homo sapiens
  Table A; Target 40248; HLA-A*33:03; MAGEA6; ENSG00000197172; CTA
EVDPIGHVY

SEQ ID NO: 40249 - protein, 9 aa, Homo sapiens
  Table A; Target 40249; HLA-A*68:01; MAGEA6; ENSG00000197172; CTA
EVDPIGHVY

SEQ ID NO: 40250 - protein, 9 aa, Homo sapiens
  Table A; Target 40250; HLA-A*68:02; MAGEA6; ENSG00000197172; CTA
EVDPIGHVY

SEQ ID NO: 40251 - protein, 9 aa, Homo sapiens
  Table A; Target 40251; HLA-B*15:01; MAGEA6; ENSG00000197172; CTA
EVDPIGHVY

SEQ ID NO: 40252 - protein, 9 aa, Homo sapiens
  Table A; Target 40252; HLA-B*15:03; MAGEA6; ENSG00000197172; CTA
EVDPIGHVY

SEQ ID NO: 40253 - protein, 9 aa, Homo sapiens
  Table A; Target 40253; HLA-B*18:01; MAGEA6; ENSG00000197172; CTA
EVDPIGHVY

SEQ ID NO: 40254 - protein, 9 aa, Homo sapiens
  Table A; Target 40254; HLA-B*27:02; MAGEA6; ENSG00000197172; CTA
EVDPIGHVY

SEQ ID NO: 40255 - protein, 9 aa, Homo sapiens
  Table A; Target 40255; HLA-B*27:05; MAGEA6; ENSG00000197172; CTA
EVDPIGHVY

SEQ ID NO: 40256 - protein, 9 aa, Homo sapiens
  Table A; Target 40256; HLA-B*35:03; MAGEA6; ENSG00000197172; CTA
EVDPIGHVY

SEQ ID NO: 40257 - protein, 9 aa, Homo sapiens
  Table A; Target 40257; HLA-B*38:01; MAGEA6; ENSG00000197172; CTA
EVDPIGHVY

SEQ ID NO: 40258 - protein, 9 aa, Homo sapiens
  Table A; Target 40258; HLA-B*39:01; MAGEA6; ENSG00000197172; CTA
EVDPIGHVY

SEQ ID NO: 40259 - protein, 9 aa, Homo sapiens
  Table A; Target 40259; HLA-B*44:02; MAGEA6; ENSG00000197172; CTA
EVDPIGHVY

SEQ ID NO: 40260 - protein, 9 aa, Homo sapiens
  Table A; Target 40260; HLA-B*44:03; MAGEA6; ENSG00000197172; CTA
EVDPIGHVY

SEQ ID NO: 40261 - protein, 9 aa, Homo sapiens
  Table A; Target 40261; HLA-B*46:01; MAGEA6; ENSG00000197172; CTA
EVDPIGHVY

SEQ ID NO: 40262 - protein, 9 aa, Homo sapiens
  Table A; Target 40262; HLA-B*55:01; MAGEA6; ENSG00000197172; CTA
EVDPIGHVY

SEQ ID NO: 40263 - protein, 9 aa, Homo sapiens
  Table A; Target 40263; HLA-B*57:01; MAGEA6; ENSG00000197172; CTA
EVDPIGHVY

SEQ ID NO: 40264 - protein, 9 aa, Homo sapiens
  Table A; Target 40264; HLA-B*58:01; MAGEA6; ENSG00000197172; CTA
EVDPIGHVY

SEQ ID NO: 40265 - protein, 9 aa, Homo sapiens
  Table A; Target 40265; HLA-C*02:02; MAGEA6; ENSG00000197172; CTA
EVDPIGHVY

SEQ ID NO: 40266 - protein, 9 aa, Homo sapiens
  Table A; Target 40266; HLA-C*03:03; MAGEA6; ENSG00000197172; CTA
EVDPIGHVY

SEQ ID NO: 40267 - protein, 9 aa, Homo sapiens
  Table A; Target 40267; HLA-C*03:04; MAGEA6; ENSG00000197172; CTA
EVDPIGHVY

SEQ ID NO: 40268 - protein, 9 aa, Homo sapiens
  Table A; Target 40268; HLA-C*04:01; MAGEA6; ENSG00000197172; CTA
EVDPIGHVY

SEQ ID NO: 40269 - protein, 9 aa, Homo sapiens
  Table A; Target 40269; HLA-C*05:01; MAGEA6; ENSG00000197172; CTA
EVDPIGHVY

SEQ ID NO: 40270 - protein, 9 aa, Homo sapiens
  Table A; Target 40270; HLA-C*07:04; MAGEA6; ENSG00000197172; CTA
EVDPIGHVY

SEQ ID NO: 40271 - protein, 9 aa, Homo sapiens
  Table A; Target 40271; HLA-C*07:06; MAGEA6; ENSG00000197172; CTA
EVDPIGHVY

SEQ ID NO: 40272 - protein, 9 aa, Homo sapiens
  Table A; Target 40272; HLA-C*12:03; MAGEA6; ENSG00000197172; CTA
EVDPIGHVY

SEQ ID NO: 40273 - protein, 9 aa, Homo sapiens
  Table A; Target 40273; HLA-C*16:01; MAGEA6; ENSG00000197172; CTA
EVDPIGHVY

SEQ ID NO: 40274 - protein, 9 aa, Homo sapiens
  Table A; Target 40274; HLA-C*16:02; MAGEA6; ENSG00000197172; CTA
EVDPIGHVY

SEQ ID NO: 40275 - protein, 9 aa, Homo sapiens
  Table A; Target 40275; HLA-C*16:04; MAGEA6; ENSG00000197172; CTA
EVDPIGHVY

SEQ ID NO: 40276 - protein, 10 aa, Homo sapiens
  Table A; Target 40276; HLA-A*01:01; MAGEA6; ENSG00000197172; CTA
EVDPIGHVYI

SEQ ID NO: 40277 - protein, 10 aa, Homo sapiens
  Table A; Target 40277; HLA-A*02:07; MAGEA6; ENSG00000197172; CTA
EVDPIGHVYI

SEQ ID NO: 40278 - protein, 10 aa, Homo sapiens
  Table A; Target 40278; HLA-A*68:01; MAGEA6; ENSG00000197172; CTA
EVDPIGHVYI

SEQ ID NO: 40279 - protein, 10 aa, Homo sapiens
  Table A; Target 40279; HLA-B*13:02; MAGEA6; ENSG00000197172; CTA
EVDPIGHVYI

SEQ ID NO: 40280 - protein, 10 aa, Homo sapiens
  Table A; Target 40280; HLA-B*38:01; MAGEA6; ENSG00000197172; CTA
EVDPIGHVYI

SEQ ID NO: 40281 - protein, 10 aa, Homo sapiens
  Table A; Target 40281; HLA-C*05:01; MAGEA6; ENSG00000197172; CTA
EVDPIGHVYI

SEQ ID NO: 40282 - protein, 11 aa, Homo sapiens
  Table A; Target 40282; HLA-A*01:01; MAGEA6; ENSG00000197172; CTA
EVDPIGHVYIF

SEQ ID NO: 40283 - protein, 11 aa, Homo sapiens
  Table A; Target 40283; HLA-A*02:07; MAGEA6; ENSG00000197172; CTA
EVDPIGHVYIF

SEQ ID NO: 40284 - protein, 11 aa, Homo sapiens
  Table A; Target 40284; HLA-A*68:02; MAGEA6; ENSG00000197172; CTA
EVDPIGHVYIF

SEQ ID NO: 40285 - protein, 11 aa, Homo sapiens
  Table A; Target 40285; HLA-A*25:01; MAGEA6; ENSG00000197172; CTA
EVFEGREDSIF

SEQ ID NO: 40286 - protein, 11 aa, Homo sapiens
  Table A; Target 40286; HLA-A*26:01; MAGEA6; ENSG00000197172; CTA
EVFEGREDSIF

SEQ ID NO: 40287 - protein, 11 aa, Homo sapiens
  Table A; Target 40287; HLA-B*35:01; MAGEA6; ENSG00000197172; CTA
EVFEGREDSIF

SEQ ID NO: 40288 - protein, 11 aa, Homo sapiens
  Table A; Target 40288; HLA-C*12:03; MAGEA6; ENSG00000197172; CTA
EVFEGREDSIF

SEQ ID NO: 40289 - protein, 8 aa, Homo sapiens
  Table A; Target 40289; HLA-B*08:01; MAGEA6; ENSG00000197172; CTA
FGDPKKLL

SEQ ID NO: 40290 - protein, 8 aa, Homo sapiens
  Table A; Target 40290; HLA-C*04:01; MAGEA6; ENSG00000197172; CTA
FGDPKKLL

SEQ ID NO: 40291 - protein, 11 aa, Homo sapiens
  Table A; Target 40291; HLA-A*01:01; MAGEA6; ENSG00000197172; CTA
FGDPKKLLTQY

SEQ ID NO: 40292 - protein, 9 aa, Homo sapiens
  Table A; Target 40292; HLA-A*02:03; MAGEA6; ENSG00000197172; CTA
FLIIILAII

SEQ ID NO: 40293 - protein, 9 aa, Homo sapiens
  Table A; Target 40293; HLA-A*02:04; MAGEA6; ENSG00000197172; CTA
FLIIILAII

SEQ ID NO: 40294 - protein, 9 aa, Homo sapiens
  Table A; Target 40294; HLA-A*02:01; MAGEA6; ENSG00000197172; CTA
FLWGPRALI

SEQ ID NO: 40295 - protein, 9 aa, Homo sapiens
  Table A; Target 40295; HLA-A*02:04; MAGEA6; ENSG00000197172; CTA
FLWGPRALI

SEQ ID NO: 40296 - protein, 9 aa, Homo sapiens
  Table A; Target 40296; HLA-A*02:07; MAGEA6; ENSG00000197172; CTA
FLWGPRALI

SEQ ID NO: 40297 - protein, 11 aa, Homo sapiens
  Table A; Target 40297; HLA-A*02:01; MAGEA6; ENSG00000197172; CTA
FLWGPRALIET

SEQ ID NO: 40298 - protein, 11 aa, Homo sapiens
  Table A; Target 40298; HLA-A*02:04; MAGEA6; ENSG00000197172; CTA
FLWGPRALIET

SEQ ID NO: 40299 - protein, 11 aa, Homo sapiens
  Table A; Target 40299; HLA-A*02:07; MAGEA6; ENSG00000197172; CTA
FLWGPRALIET

SEQ ID NO: 40300 - protein, 9 aa, Homo sapiens
  Table A; Target 40300; HLA-A*68:02; MAGEA6; ENSG00000197172; CTA
FQAALSRKV

SEQ ID NO: 40301 - protein, 9 aa, Homo sapiens
  Table A; Target 40301; HLA-B*27:05; MAGEA6; ENSG00000197172; CTA
FQAALSRKV

SEQ ID NO: 40302 - protein, 9 aa, Homo sapiens
  Table A; Target 40302; HLA-C*16:02; MAGEA6; ENSG00000197172; CTA
FQAALSRKV

SEQ ID NO: 40303 - protein, 8 aa, Homo sapiens
  Table A; Target 40303; HLA-C*03:03; MAGEA6; ENSG00000197172; CTA
FSKASDSL

SEQ ID NO: 40304 - protein, 8 aa, Homo sapiens
  Table A; Target 40304; HLA-C*03:04; MAGEA6; ENSG00000197172; CTA
FSKASDSL

SEQ ID NO: 40305 - protein, 8 aa, Homo sapiens
  Table A; Target 40305; HLA-C*12:03; MAGEA6; ENSG00000197172; CTA
FSKASDSL

SEQ ID NO: 40306 - protein, 8 aa, Homo sapiens
  Table A; Target 40306; HLA-C*16:01; MAGEA6; ENSG00000197172; CTA
FSKASDSL

SEQ ID NO: 40307 - protein, 9 aa, Homo sapiens
  Table A; Target 40307; HLA-A*02:07; MAGEA6; ENSG00000197172; CTA
FVQENYLEY

SEQ ID NO: 40308 - protein, 9 aa, Homo sapiens
  Table A; Target 40308; HLA-B*13:02; MAGEA6; ENSG00000197172; CTA
FVQENYLEY

SEQ ID NO: 40309 - protein, 9 aa, Homo sapiens
  Table A; Target 40309; HLA-B*27:05; MAGEA6; ENSG00000197172; CTA
FVQENYLEY

SEQ ID NO: 40310 - protein, 9 aa, Homo sapiens
  Table A; Target 40310; HLA-B*35:03; MAGEA6; ENSG00000197172; CTA
FVQENYLEY

SEQ ID NO: 40311 - protein, 9 aa, Homo sapiens
  Table A; Target 40311; HLA-B*57:01; MAGEA6; ENSG00000197172; CTA
FVQENYLEY

SEQ ID NO: 40312 - protein, 10 aa, Homo sapiens
  Table A; Target 40312; HLA-C*07:06; MAGEA6; ENSG00000197172; CTA
FVQENYLEYR

SEQ ID NO: 40313 - protein, 10 aa, Homo sapiens
  Table A; Target 40313; HLA-A*30:02; MAGEA6; ENSG00000197172; CTA
GPRALIETSY

SEQ ID NO: 40314 - protein, 10 aa, Homo sapiens
  Table A; Target 40314; HLA-B*07:02; MAGEA6; ENSG00000197172; CTA
GPRALIETSY

SEQ ID NO: 40315 - protein, 10 aa, Homo sapiens
  Table A; Target 40315; HLA-B*15:01; MAGEA6; ENSG00000197172; CTA
GPRALIETSY

SEQ ID NO: 40316 - protein, 10 aa, Homo sapiens
  Table A; Target 40316; HLA-B*15:03; MAGEA6; ENSG00000197172; CTA
GPRALIETSY

SEQ ID NO: 40317 - protein, 10 aa, Homo sapiens
  Table A; Target 40317; HLA-B*35:01; MAGEA6; ENSG00000197172; CTA
GPRALIETSY

SEQ ID NO: 40318 - protein, 10 aa, Homo sapiens
  Table A; Target 40318; HLA-B*55:01; MAGEA6; ENSG00000197172; CTA
GPRALIETSY

SEQ ID NO: 40319 - protein, 9 aa, Homo sapiens
  Table A; Target 40319; HLA-B*07:02; MAGEA6; ENSG00000197172; CTA
GPRISYPLL

SEQ ID NO: 40320 - protein, 9 aa, Homo sapiens
  Table A; Target 40320; HLA-C*07:02; MAGEA6; ENSG00000197172; CTA
GPRISYPLL

SEQ ID NO: 40321 - protein, 11 aa, Homo sapiens
  Table A; Target 40321; HLA-B*27:05; MAGEA6; ENSG00000197172; CTA
GREDSIFGDPK

SEQ ID NO: 40322 - protein, 10 aa, Homo sapiens
  Table A; Target 40322; HLA-A*33:01; MAGEA6; ENSG00000197172; CTA
HMVKISGGPR

SEQ ID NO: 40323 - protein, 9 aa, Homo sapiens
  Table A; Target 40323; HLA-A*68:02; MAGEA6; ENSG00000197172; CTA
HVYIFATCL

SEQ ID NO: 40324 - protein, 8 aa, Homo sapiens
  Table A; Target 40324; HLA-A*30:01; MAGEA6; ENSG00000197172; CTA
IETSYVKV

SEQ ID NO: 40325 - protein, 8 aa, Homo sapiens
  Table A; Target 40325; HLA-B*18:01; MAGEA6; ENSG00000197172; CTA
IETSYVKV

SEQ ID NO: 40326 - protein, 8 aa, Homo sapiens
  Table A; Target 40326; HLA-B*37:01; MAGEA6; ENSG00000197172; CTA
IETSYVKV

SEQ ID NO: 40327 - protein, 8 aa, Homo sapiens
  Table A; Target 40327; HLA-B*40:02; MAGEA6; ENSG00000197172; CTA
IETSYVKV

SEQ ID NO: 40328 - protein, 8 aa, Homo sapiens
  Table A; Target 40328; HLA-B*49:01; MAGEA6; ENSG00000197172; CTA
IETSYVKV

SEQ ID NO: 40329 - protein, 9 aa, Homo sapiens
  Table A; Target 40329; HLA-B*18:01; MAGEA6; ENSG00000197172; CTA
IETSYVKVL

SEQ ID NO: 40330 - protein, 9 aa, Homo sapiens
  Table A; Target 40330; HLA-B*27:05; MAGEA6; ENSG00000197172; CTA
IETSYVKVL

SEQ ID NO: 40331 - protein, 9 aa, Homo sapiens
  Table A; Target 40331; HLA-B*37:01; MAGEA6; ENSG00000197172; CTA
IETSYVKVL

SEQ ID NO: 40332 - protein, 9 aa, Homo sapiens
  Table A; Target 40332; HLA-B*40:02; MAGEA6; ENSG00000197172; CTA
IETSYVKVL

SEQ ID NO: 40333 - protein, 9 aa, Homo sapiens
  Table A; Target 40333; HLA-B*44:02; MAGEA6; ENSG00000197172; CTA
IETSYVKVL

SEQ ID NO: 40334 - protein, 9 aa, Homo sapiens
  Table A; Target 40334; HLA-B*49:01; MAGEA6; ENSG00000197172; CTA
IETSYVKVL

SEQ ID NO: 40335 - protein, 9 aa, Homo sapiens
  Table A; Target 40335; HLA-C*02:02; MAGEA6; ENSG00000197172; CTA
IETSYVKVL

SEQ ID NO: 40336 - protein, 9 aa, Homo sapiens
  Table A; Target 40336; HLA-C*06:02; MAGEA6; ENSG00000197172; CTA
IETSYVKVL

SEQ ID NO: 40337 - protein, 9 aa, Homo sapiens
  Table A; Target 40337; HLA-C*07:01; MAGEA6; ENSG00000197172; CTA
IETSYVKVL

SEQ ID NO: 40338 - protein, 9 aa, Homo sapiens
  Table A; Target 40338; HLA-C*07:04; MAGEA6; ENSG00000197172; CTA
IETSYVKVL

SEQ ID NO: 40339 - protein, 9 aa, Homo sapiens
  Table A; Target 40339; HLA-C*12:03; MAGEA6; ENSG00000197172; CTA
IETSYVKVL

SEQ ID NO: 40340 - protein, 9 aa, Homo sapiens
  Table A; Target 40340; HLA-C*14:02; MAGEA6; ENSG00000197172; CTA
IETSYVKVL

SEQ ID NO: 40341 - protein, 9 aa, Homo sapiens
  Table A; Target 40341; HLA-C*16:01; MAGEA6; ENSG00000197172; CTA
IETSYVKVL

SEQ ID NO: 40342 - protein, 9 aa, Homo sapiens
  Table A; Target 40342; HLA-C*16:02; MAGEA6; ENSG00000197172; CTA
IETSYVKVL

SEQ ID NO: 40343 - protein, 9 aa, Homo sapiens
  Table A; Target 40343; HLA-C*16:04; MAGEA6; ENSG00000197172; CTA
IETSYVKVL

SEQ ID NO: 40344 - protein, 10 aa, Homo sapiens
  Table A; Target 40344; HLA-C*04:01; MAGEA6; ENSG00000197172; CTA
IETSYVKVLH

SEQ ID NO: 40345 - protein, 9 aa, Homo sapiens
  Table A; Target 40345; HLA-C*14:02; MAGEA6; ENSG00000197172; CTA
IFSKASDSL

SEQ ID NO: 40346 - protein, 9 aa, Homo sapiens
  Table A; Target 40346; HLA-A*03:01; MAGEA6; ENSG00000197172; CTA
IIILAIIAK

SEQ ID NO: 40347 - protein, 9 aa, Homo sapiens
  Table A; Target 40347; HLA-A*03:02; MAGEA6; ENSG00000197172; CTA
IIILAIIAK

SEQ ID NO: 40348 - protein, 9 aa, Homo sapiens
  Table A; Target 40348; HLA-A*11:01; MAGEA6; ENSG00000197172; CTA
IIILAIIAK

SEQ ID NO: 40349 - protein, 8 aa, Homo sapiens
  Table A; Target 40349; HLA-A*03:01; MAGEA6; ENSG00000197172; CTA
IILAIIAK

SEQ ID NO: 40350 - protein, 8 aa, Homo sapiens
  Table A; Target 40350; HLA-A*03:02; MAGEA6; ENSG00000197172; CTA
IILAIIAK

SEQ ID NO: 40351 - protein, 8 aa, Homo sapiens
  Table A; Target 40351; HLA-A*11:01; MAGEA6; ENSG00000197172; CTA
IILAIIAK

SEQ ID NO: 40352 - protein, 8 aa, Homo sapiens
  Table A; Target 40352; HLA-B*27:02; MAGEA6; ENSG00000197172; CTA
IILAIIAK

SEQ ID NO: 40353 - protein, 9 aa, Homo sapiens
  Table A; Target 40353; HLA-A*01:01; MAGEA6; ENSG00000197172; CTA
ISGGPRISY

SEQ ID NO: 40354 - protein, 9 aa, Homo sapiens
  Table A; Target 40354; HLA-A*25:01; MAGEA6; ENSG00000197172; CTA
ISGGPRISY

SEQ ID NO: 40355 - protein, 9 aa, Homo sapiens
  Table A; Target 40355; HLA-A*29:02; MAGEA6; ENSG00000197172; CTA
ISGGPRISY

SEQ ID NO: 40356 - protein, 9 aa, Homo sapiens
  Table A; Target 40356; HLA-A*30:02; MAGEA6; ENSG00000197172; CTA
ISGGPRISY

SEQ ID NO: 40357 - protein, 9 aa, Homo sapiens
  Table A; Target 40357; HLA-A*32:01; MAGEA6; ENSG00000197172; CTA
ISGGPRISY

SEQ ID NO: 40358 - protein, 9 aa, Homo sapiens
  Table A; Target 40358; HLA-B*15:01; MAGEA6; ENSG00000197172; CTA
ISGGPRISY

SEQ ID NO: 40359 - protein, 9 aa, Homo sapiens
  Table A; Target 40359; HLA-B*15:03; MAGEA6; ENSG00000197172; CTA
ISGGPRISY

SEQ ID NO: 40360 - protein, 9 aa, Homo sapiens
  Table A; Target 40360; HLA-B*35:01; MAGEA6; ENSG00000197172; CTA
ISGGPRISY

SEQ ID NO: 40361 - protein, 9 aa, Homo sapiens
  Table A; Target 40361; HLA-B*46:01; MAGEA6; ENSG00000197172; CTA
ISGGPRISY

SEQ ID NO: 40362 - protein, 9 aa, Homo sapiens
  Table A; Target 40362; HLA-B*57:01; MAGEA6; ENSG00000197172; CTA
ISGGPRISY

SEQ ID NO: 40363 - protein, 9 aa, Homo sapiens
  Table A; Target 40363; HLA-B*58:01; MAGEA6; ENSG00000197172; CTA
ISGGPRISY

SEQ ID NO: 40364 - protein, 9 aa, Homo sapiens
  Table A; Target 40364; HLA-C*01:02; MAGEA6; ENSG00000197172; CTA
ISGGPRISY

SEQ ID NO: 40365 - protein, 9 aa, Homo sapiens
  Table A; Target 40365; HLA-C*02:02; MAGEA6; ENSG00000197172; CTA
ISGGPRISY

SEQ ID NO: 40366 - protein, 9 aa, Homo sapiens
  Table A; Target 40366; HLA-C*07:01; MAGEA6; ENSG00000197172; CTA
ISGGPRISY

SEQ ID NO: 40367 - protein, 9 aa, Homo sapiens
  Table A; Target 40367; HLA-C*07:04; MAGEA6; ENSG00000197172; CTA
ISGGPRISY

SEQ ID NO: 40368 - protein, 9 aa, Homo sapiens
  Table A; Target 40368; HLA-C*12:03; MAGEA6; ENSG00000197172; CTA
ISGGPRISY

SEQ ID NO: 40369 - protein, 9 aa, Homo sapiens
  Table A; Target 40369; HLA-C*16:02; MAGEA6; ENSG00000197172; CTA
ISGGPRISY

SEQ ID NO: 40370 - protein, 9 aa, Homo sapiens
  Table A; Target 40370; HLA-C*16:04; MAGEA6; ENSG00000197172; CTA
ISGGPRISY

SEQ ID NO: 40371 - protein, 10 aa, Homo sapiens
  Table A; Target 40371; HLA-C*07:02; MAGEA6; ENSG00000197172; CTA
ISGGPRISYP

SEQ ID NO: 40372 - protein, 9 aa, Homo sapiens
  Table A; Target 40372; HLA-A*24:02; MAGEA6; ENSG00000197172; CTA
ISYPLLHEW

SEQ ID NO: 40373 - protein, 9 aa, Homo sapiens
  Table A; Target 40373; HLA-A*25:01; MAGEA6; ENSG00000197172; CTA
ISYPLLHEW

SEQ ID NO: 40374 - protein, 9 aa, Homo sapiens
  Table A; Target 40374; HLA-A*31:01; MAGEA6; ENSG00000197172; CTA
ISYPLLHEW

SEQ ID NO: 40375 - protein, 9 aa, Homo sapiens
  Table A; Target 40375; HLA-A*33:01; MAGEA6; ENSG00000197172; CTA
ISYPLLHEW

SEQ ID NO: 40376 - protein, 9 aa, Homo sapiens
  Table A; Target 40376; HLA-B*44:02; MAGEA6; ENSG00000197172; CTA
ISYPLLHEW

SEQ ID NO: 40377 - protein, 9 aa, Homo sapiens
  Table A; Target 40377; HLA-B*58:01; MAGEA6; ENSG00000197172; CTA
ISYPLLHEW

SEQ ID NO: 40378 - protein, 9 aa, Homo sapiens
  Table A; Target 40378; HLA-C*02:02; MAGEA6; ENSG00000197172; CTA
ISYPLLHEW

SEQ ID NO: 40379 - protein, 8 aa, Homo sapiens
  Table A; Target 40379; HLA-C*03:04; MAGEA6; ENSG00000197172; CTA
KASDSLQL

SEQ ID NO: 40380 - protein, 9 aa, Homo sapiens
  Table A; Target 40380; HLA-A*02:03; MAGEA6; ENSG00000197172; CTA
KASDSLQLV

SEQ ID NO: 40381 - protein, 9 aa, Homo sapiens
  Table A; Target 40381; HLA-A*03:02; MAGEA6; ENSG00000197172; CTA
KASDSLQLV

SEQ ID NO: 40382 - protein, 9 aa, Homo sapiens
  Table A; Target 40382; HLA-B*13:02; MAGEA6; ENSG00000197172; CTA
KASDSLQLV

SEQ ID NO: 40383 - protein, 9 aa, Homo sapiens
  Table A; Target 40383; HLA-B*58:01; MAGEA6; ENSG00000197172; CTA
KASDSLQLV

SEQ ID NO: 40384 - protein, 9 aa, Homo sapiens
  Table A; Target 40384; HLA-C*02:02; MAGEA6; ENSG00000197172; CTA
KASDSLQLV

SEQ ID NO: 40385 - protein, 9 aa, Homo sapiens
  Table A; Target 40385; HLA-C*12:03; MAGEA6; ENSG00000197172; CTA
KASDSLQLV

SEQ ID NO: 40386 - protein, 9 aa, Homo sapiens
  Table A; Target 40386; HLA-C*16:02; MAGEA6; ENSG00000197172; CTA
KASDSLQLV

SEQ ID NO: 40387 - protein, 10 aa, Homo sapiens
  Table A; Target 40387; HLA-A*03:01; MAGEA6; ENSG00000197172; CTA
KASDSLQLVF

SEQ ID NO: 40388 - protein, 10 aa, Homo sapiens
  Table A; Target 40388; HLA-A*23:01; MAGEA6; ENSG00000197172; CTA
KASDSLQLVF

SEQ ID NO: 40389 - protein, 10 aa, Homo sapiens
  Table A; Target 40389; HLA-A*24:02; MAGEA6; ENSG00000197172; CTA
KASDSLQLVF

SEQ ID NO: 40390 - protein, 10 aa, Homo sapiens
  Table A; Target 40390; HLA-A*29:02; MAGEA6; ENSG00000197172; CTA
KASDSLQLVF

SEQ ID NO: 40391 - protein, 10 aa, Homo sapiens
  Table A; Target 40391; HLA-A*30:02; MAGEA6; ENSG00000197172; CTA
KASDSLQLVF

SEQ ID NO: 40392 - protein, 10 aa, Homo sapiens
  Table A; Target 40392; HLA-A*32:01; MAGEA6; ENSG00000197172; CTA
KASDSLQLVF

SEQ ID NO: 40393 - protein, 10 aa, Homo sapiens
  Table A; Target 40393; HLA-B*15:03; MAGEA6; ENSG00000197172; CTA
KASDSLQLVF

SEQ ID NO: 40394 - protein, 10 aa, Homo sapiens
  Table A; Target 40394; HLA-B*27:02; MAGEA6; ENSG00000197172; CTA
KASDSLQLVF

SEQ ID NO: 40395 - protein, 10 aa, Homo sapiens
  Table A; Target 40395; HLA-B*35:01; MAGEA6; ENSG00000197172; CTA
KASDSLQLVF

SEQ ID NO: 40396 - protein, 10 aa, Homo sapiens
  Table A; Target 40396; HLA-B*44:03; MAGEA6; ENSG00000197172; CTA
KASDSLQLVF

SEQ ID NO: 40397 - protein, 10 aa, Homo sapiens
  Table A; Target 40397; HLA-B*57:01; MAGEA6; ENSG00000197172; CTA
KASDSLQLVF

SEQ ID NO: 40398 - protein, 10 aa, Homo sapiens
  Table A; Target 40398; HLA-B*58:01; MAGEA6; ENSG00000197172; CTA
KASDSLQLVF

SEQ ID NO: 40399 - protein, 10 aa, Homo sapiens
  Table A; Target 40399; HLA-C*02:02; MAGEA6; ENSG00000197172; CTA
KASDSLQLVF

SEQ ID NO: 40400 - protein, 10 aa, Homo sapiens
  Table A; Target 40400; HLA-C*12:03; MAGEA6; ENSG00000197172; CTA
KASDSLQLVF

SEQ ID NO: 40401 - protein, 10 aa, Homo sapiens
  Table A; Target 40401; HLA-C*16:04; MAGEA6; ENSG00000197172; CTA
KASDSLQLVF

SEQ ID NO: 40402 - protein, 10 aa, Homo sapiens
  Table A; Target 40402; HLA-A*03:01; MAGEA6; ENSG00000197172; CTA
KISGGPRISY

SEQ ID NO: 40403 - protein, 10 aa, Homo sapiens
  Table A; Target 40403; HLA-A*30:02; MAGEA6; ENSG00000197172; CTA
KISGGPRISY

SEQ ID NO: 40404 - protein, 10 aa, Homo sapiens
  Table A; Target 40404; HLA-A*32:01; MAGEA6; ENSG00000197172; CTA
KISGGPRISY

SEQ ID NO: 40405 - protein, 10 aa, Homo sapiens
  Table A; Target 40405; HLA-B*15:01; MAGEA6; ENSG00000197172; CTA
KISGGPRISY

SEQ ID NO: 40406 - protein, 10 aa, Homo sapiens
  Table A; Target 40406; HLA-B*15:03; MAGEA6; ENSG00000197172; CTA
KISGGPRISY

SEQ ID NO: 40407 - protein, 10 aa, Homo sapiens
  Table A; Target 40407; HLA-C*16:01; MAGEA6; ENSG00000197172; CTA
KISGGPRISY

SEQ ID NO: 40408 - protein, 9 aa, Homo sapiens
  Table A; Target 40408; HLA-A*03:01; MAGEA6; ENSG00000197172; CTA
KLVHFLLLK

SEQ ID NO: 40409 - protein, 10 aa, Homo sapiens
  Table A; Target 40409; HLA-A*03:01; MAGEA6; ENSG00000197172; CTA
KLVHFLLLKY

SEQ ID NO: 40410 - protein, 10 aa, Homo sapiens
  Table A; Target 40410; HLA-A*29:02; MAGEA6; ENSG00000197172; CTA
KLVHFLLLKY

SEQ ID NO: 40411 - protein, 10 aa, Homo sapiens
  Table A; Target 40411; HLA-B*57:01; MAGEA6; ENSG00000197172; CTA
KLVHFLLLKY

SEQ ID NO: 40412 - protein, 8 aa, Homo sapiens
  Table A; Target 40412; HLA-B*57:01; MAGEA6; ENSG00000197172; CTA
KVAKLVHF

SEQ ID NO: 40413 - protein, 9 aa, Homo sapiens
  Table A; Target 40413; HLA-A*02:03; MAGEA6; ENSG00000197172; CTA
KVAKLVHFL

SEQ ID NO: 40414 - protein, 9 aa, Homo sapiens
  Table A; Target 40414; HLA-A*02:04; MAGEA6; ENSG00000197172; CTA
KVAKLVHFL

SEQ ID NO: 40415 - protein, 9 aa, Homo sapiens
  Table A; Target 40415; HLA-A*68:02; MAGEA6; ENSG00000197172; CTA
KVAKLVHFL

SEQ ID NO: 40416 - protein, 8 aa, Homo sapiens
  Table A; Target 40416; HLA-B*27:02; MAGEA6; ENSG00000197172; CTA
LIETSYVK

SEQ ID NO: 40417 - protein, 9 aa, Homo sapiens
  Table A; Target 40417; HLA-A*02:07; MAGEA6; ENSG00000197172; CTA
LIETSYVKV

SEQ ID NO: 40418 - protein, 9 aa, Homo sapiens
  Table A; Target 40418; HLA-C*05:01; MAGEA6; ENSG00000197172; CTA
LIETSYVKV

SEQ ID NO: 40419 - protein, 10 aa, Homo sapiens
  Table A; Target 40419; HLA-B*27:02; MAGEA6; ENSG00000197172; CTA
LIIILAIIAK

SEQ ID NO: 40420 - protein, 11 aa, Homo sapiens
  Table A; Target 40420; HLA-A*01:01; MAGEA6; ENSG00000197172; CTA
LMEVDPIGHVY

SEQ ID NO: 40421 - protein, 11 aa, Homo sapiens
  Table A; Target 40421; HLA-A*29:02; MAGEA6; ENSG00000197172; CTA
LMEVDPIGHVY

SEQ ID NO: 40422 - protein, 11 aa, Homo sapiens
  Table A; Target 40422; HLA-A*30:02; MAGEA6; ENSG00000197172; CTA
LMEVDPIGHVY

SEQ ID NO: 40423 - protein, 10 aa, Homo sapiens
  Table A; Target 40423; HLA-A*01:01; MAGEA6; ENSG00000197172; CTA
LTQYFVQENY

SEQ ID NO: 40424 - protein, 10 aa, Homo sapiens
  Table A; Target 40424; HLA-A*30:02; MAGEA6; ENSG00000197172; CTA
LTQYFVQENY

SEQ ID NO: 40425 - protein, 10 aa, Homo sapiens
  Table A; Target 40425; HLA-B*57:01; MAGEA6; ENSG00000197172; CTA
LTQYFVQENY

SEQ ID NO: 40426 - protein, 9 aa, Homo sapiens
  Table A; Target 40426; HLA-A*30:01; MAGEA6; ENSG00000197172; CTA
MEVDPIGHV

SEQ ID NO: 40427 - protein, 9 aa, Homo sapiens
  Table A; Target 40427; HLA-A*68:02; MAGEA6; ENSG00000197172; CTA
MEVDPIGHV

SEQ ID NO: 40428 - protein, 9 aa, Homo sapiens
  Table A; Target 40428; HLA-B*13:02; MAGEA6; ENSG00000197172; CTA
MEVDPIGHV

SEQ ID NO: 40429 - protein, 9 aa, Homo sapiens
  Table A; Target 40429; HLA-B*18:01; MAGEA6; ENSG00000197172; CTA
MEVDPIGHV

SEQ ID NO: 40430 - protein, 9 aa, Homo sapiens
  Table A; Target 40430; HLA-B*40:01; MAGEA6; ENSG00000197172; CTA
MEVDPIGHV

SEQ ID NO: 40431 - protein, 9 aa, Homo sapiens
  Table A; Target 40431; HLA-B*40:02; MAGEA6; ENSG00000197172; CTA
MEVDPIGHV

SEQ ID NO: 40432 - protein, 9 aa, Homo sapiens
  Table A; Target 40432; HLA-B*44:02; MAGEA6; ENSG00000197172; CTA
MEVDPIGHV

SEQ ID NO: 40433 - protein, 9 aa, Homo sapiens
  Table A; Target 40433; HLA-B*44:03; MAGEA6; ENSG00000197172; CTA
MEVDPIGHV

SEQ ID NO: 40434 - protein, 9 aa, Homo sapiens
  Table A; Target 40434; HLA-C*16:04; MAGEA6; ENSG00000197172; CTA
MEVDPIGHV

SEQ ID NO: 40435 - protein, 10 aa, Homo sapiens
  Table A; Target 40435; HLA-A*01:01; MAGEA6; ENSG00000197172; CTA
MEVDPIGHVY

SEQ ID NO: 40436 - protein, 10 aa, Homo sapiens
  Table A; Target 40436; HLA-A*23:01; MAGEA6; ENSG00000197172; CTA
MEVDPIGHVY

SEQ ID NO: 40437 - protein, 10 aa, Homo sapiens
  Table A; Target 40437; HLA-A*25:01; MAGEA6; ENSG00000197172; CTA
MEVDPIGHVY

SEQ ID NO: 40438 - protein, 10 aa, Homo sapiens
  Table A; Target 40438; HLA-A*26:01; MAGEA6; ENSG00000197172; CTA
MEVDPIGHVY

SEQ ID NO: 40439 - protein, 10 aa, Homo sapiens
  Table A; Target 40439; HLA-A*29:02; MAGEA6; ENSG00000197172; CTA
MEVDPIGHVY

SEQ ID NO: 40440 - protein, 10 aa, Homo sapiens
  Table A; Target 40440; HLA-A*30:01; MAGEA6; ENSG00000197172; CTA
MEVDPIGHVY

SEQ ID NO: 40441 - protein, 10 aa, Homo sapiens
  Table A; Target 40441; HLA-A*30:02; MAGEA6; ENSG00000197172; CTA
MEVDPIGHVY

SEQ ID NO: 40442 - protein, 10 aa, Homo sapiens
  Table A; Target 40442; HLA-A*32:01; MAGEA6; ENSG00000197172; CTA
MEVDPIGHVY

SEQ ID NO: 40443 - protein, 10 aa, Homo sapiens
  Table A; Target 40443; HLA-A*33:03; MAGEA6; ENSG00000197172; CTA
MEVDPIGHVY

SEQ ID NO: 40444 - protein, 10 aa, Homo sapiens
  Table A; Target 40444; HLA-A*68:02; MAGEA6; ENSG00000197172; CTA
MEVDPIGHVY

SEQ ID NO: 40445 - protein, 10 aa, Homo sapiens
  Table A; Target 40445; HLA-B*15:01; MAGEA6; ENSG00000197172; CTA
MEVDPIGHVY

SEQ ID NO: 40446 - protein, 10 aa, Homo sapiens
  Table A; Target 40446; HLA-B*15:03; MAGEA6; ENSG00000197172; CTA
MEVDPIGHVY

SEQ ID NO: 40447 - protein, 10 aa, Homo sapiens
  Table A; Target 40447; HLA-B*27:02; MAGEA6; ENSG00000197172; CTA
MEVDPIGHVY

SEQ ID NO: 40448 - protein, 10 aa, Homo sapiens
  Table A; Target 40448; HLA-B*27:05; MAGEA6; ENSG00000197172; CTA
MEVDPIGHVY

SEQ ID NO: 40449 - protein, 10 aa, Homo sapiens
  Table A; Target 40449; HLA-B*35:01; MAGEA6; ENSG00000197172; CTA
MEVDPIGHVY

SEQ ID NO: 40450 - protein, 10 aa, Homo sapiens
  Table A; Target 40450; HLA-B*37:01; MAGEA6; ENSG00000197172; CTA
MEVDPIGHVY

SEQ ID NO: 40451 - protein, 10 aa, Homo sapiens
  Table A; Target 40451; HLA-B*38:01; MAGEA6; ENSG00000197172; CTA
MEVDPIGHVY

SEQ ID NO: 40452 - protein, 10 aa, Homo sapiens
  Table A; Target 40452; HLA-B*39:01; MAGEA6; ENSG00000197172; CTA
MEVDPIGHVY

SEQ ID NO: 40453 - protein, 10 aa, Homo sapiens
  Table A; Target 40453; HLA-B*40:01; MAGEA6; ENSG00000197172; CTA
MEVDPIGHVY

SEQ ID NO: 40454 - protein, 10 aa, Homo sapiens
  Table A; Target 40454; HLA-B*40:02; MAGEA6; ENSG00000197172; CTA
MEVDPIGHVY

SEQ ID NO: 40455 - protein, 10 aa, Homo sapiens
  Table A; Target 40455; HLA-B*49:01; MAGEA6; ENSG00000197172; CTA
MEVDPIGHVY

SEQ ID NO: 40456 - protein, 10 aa, Homo sapiens
  Table A; Target 40456; HLA-B*57:01; MAGEA6; ENSG00000197172; CTA
MEVDPIGHVY

SEQ ID NO: 40457 - protein, 10 aa, Homo sapiens
  Table A; Target 40457; HLA-C*02:02; MAGEA6; ENSG00000197172; CTA
MEVDPIGHVY

SEQ ID NO: 40458 - protein, 10 aa, Homo sapiens
  Table A; Target 40458; HLA-C*07:04; MAGEA6; ENSG00000197172; CTA
MEVDPIGHVY

SEQ ID NO: 40459 - protein, 10 aa, Homo sapiens
  Table A; Target 40459; HLA-C*07:06; MAGEA6; ENSG00000197172; CTA
MEVDPIGHVY

SEQ ID NO: 40460 - protein, 10 aa, Homo sapiens
  Table A; Target 40460; HLA-C*12:03; MAGEA6; ENSG00000197172; CTA
MEVDPIGHVY

SEQ ID NO: 40461 - protein, 10 aa, Homo sapiens
  Table A; Target 40461; HLA-C*14:02; MAGEA6; ENSG00000197172; CTA
MEVDPIGHVY

SEQ ID NO: 40462 - protein, 10 aa, Homo sapiens
  Table A; Target 40462; HLA-C*16:01; MAGEA6; ENSG00000197172; CTA
MEVDPIGHVY

SEQ ID NO: 40463 - protein, 10 aa, Homo sapiens
  Table A; Target 40463; HLA-C*16:02; MAGEA6; ENSG00000197172; CTA
MEVDPIGHVY

SEQ ID NO: 40464 - protein, 10 aa, Homo sapiens
  Table A; Target 40464; HLA-C*16:04; MAGEA6; ENSG00000197172; CTA
MEVDPIGHVY

SEQ ID NO: 40465 - protein, 11 aa, Homo sapiens
  Table A; Target 40465; HLA-A*30:01; MAGEA6; ENSG00000197172; CTA
MEVDPIGHVYI

SEQ ID NO: 40466 - protein, 11 aa, Homo sapiens
  Table A; Target 40466; HLA-A*68:02; MAGEA6; ENSG00000197172; CTA
MEVDPIGHVYI

SEQ ID NO: 40467 - protein, 11 aa, Homo sapiens
  Table A; Target 40467; HLA-B*38:01; MAGEA6; ENSG00000197172; CTA
MEVDPIGHVYI

SEQ ID NO: 40468 - protein, 11 aa, Homo sapiens
  Table A; Target 40468; HLA-B*40:01; MAGEA6; ENSG00000197172; CTA
MEVDPIGHVYI

SEQ ID NO: 40469 - protein, 11 aa, Homo sapiens
  Table A; Target 40469; HLA-B*44:02; MAGEA6; ENSG00000197172; CTA
MEVDPIGHVYI

SEQ ID NO: 40470 - protein, 11 aa, Homo sapiens
  Table A; Target 40470; HLA-B*44:03; MAGEA6; ENSG00000197172; CTA
MEVDPIGHVYI

SEQ ID NO: 40471 - protein, 11 aa, Homo sapiens
  Table A; Target 40471; HLA-B*49:01; MAGEA6; ENSG00000197172; CTA
MEVDPIGHVYI

SEQ ID NO: 40472 - protein, 8 aa, Homo sapiens
  Table A; Target 40472; HLA-B*54:01; MAGEA6; ENSG00000197172; CTA
MPKTGFLI

SEQ ID NO: 40473 - protein, 9 aa, Homo sapiens
  Table A; Target 40473; HLA-B*07:02; MAGEA6; ENSG00000197172; CTA
MPKTGFLII

SEQ ID NO: 40474 - protein, 9 aa, Homo sapiens
  Table A; Target 40474; HLA-A*31:01; MAGEA6; ENSG00000197172; CTA
MVKISGGPR

SEQ ID NO: 40475 - protein, 9 aa, Homo sapiens
  Table A; Target 40475; HLA-A*33:01; MAGEA6; ENSG00000197172; CTA
MVKISGGPR

SEQ ID NO: 40476 - protein, 9 aa, Homo sapiens
  Table A; Target 40476; HLA-A*33:03; MAGEA6; ENSG00000197172; CTA
MVKISGGPR

SEQ ID NO: 40477 - protein, 9 aa, Homo sapiens
  Table A; Target 40477; HLA-A*68:01; MAGEA6; ENSG00000197172; CTA
MVKISGGPR

SEQ ID NO: 40478 - protein, 9 aa, Homo sapiens
  Table A; Target 40478; HLA-C*04:01; MAGEA6; ENSG00000197172; CTA
MVKISGGPR

SEQ ID NO: 40479 - protein, 9 aa, Homo sapiens
  Table A; Target 40479; HLA-C*16:01; MAGEA6; ENSG00000197172; CTA
NQIMPKTGF

SEQ ID NO: 40480 - protein, 9 aa, Homo sapiens
  Table A; Target 40480; HLA-B*07:02; MAGEA6; ENSG00000197172; CTA
PRALIETSY

SEQ ID NO: 40481 - protein, 9 aa, Homo sapiens
  Table A; Target 40481; HLA-B*27:02; MAGEA6; ENSG00000197172; CTA
PRALIETSY

SEQ ID NO: 40482 - protein, 9 aa, Homo sapiens
  Table A; Target 40482; HLA-B*27:05; MAGEA6; ENSG00000197172; CTA
PRALIETSY

SEQ ID NO: 40483 - protein, 9 aa, Homo sapiens
  Table A; Target 40483; HLA-C*07:01; MAGEA6; ENSG00000197172; CTA
PRALIETSY

SEQ ID NO: 40484 - protein, 9 aa, Homo sapiens
  Table A; Target 40484; HLA-C*07:02; MAGEA6; ENSG00000197172; CTA
PRALIETSY

SEQ ID NO: 40485 - protein, 9 aa, Homo sapiens
  Table A; Target 40485; HLA-C*16:04; MAGEA6; ENSG00000197172; CTA
PRALIETSY

SEQ ID NO: 40486 - protein, 9 aa, Homo sapiens
  Table A; Target 40486; HLA-C*16:01; MAGEA6; ENSG00000197172; CTA
QAALSRKVA

SEQ ID NO: 40487 - protein, 8 aa, Homo sapiens
  Table A; Target 40487; HLA-A*30:02; MAGEA6; ENSG00000197172; CTA
QYFVQENY

SEQ ID NO: 40488 - protein, 8 aa, Homo sapiens
  Table A; Target 40488; HLA-B*15:03; MAGEA6; ENSG00000197172; CTA
QYFVQENY

SEQ ID NO: 40489 - protein, 8 aa, Homo sapiens
  Table A; Target 40489; HLA-C*14:02; MAGEA6; ENSG00000197172; CTA
QYFVQENY

SEQ ID NO: 40490 - protein, 9 aa, Homo sapiens
  Table A; Target 40490; HLA-A*23:01; MAGEA6; ENSG00000197172; CTA
QYFVQENYL

SEQ ID NO: 40491 - protein, 9 aa, Homo sapiens
  Table A; Target 40491; HLA-A*24:02; MAGEA6; ENSG00000197172; CTA
QYFVQENYL

SEQ ID NO: 40492 - protein, 9 aa, Homo sapiens
  Table A; Target 40492; HLA-C*04:01; MAGEA6; ENSG00000197172; CTA
QYFVQENYL

SEQ ID NO: 40493 - protein, 9 aa, Homo sapiens
  Table A; Target 40493; HLA-C*14:02; MAGEA6; ENSG00000197172; CTA
QYFVQENYL

SEQ ID NO: 40494 - protein, 11 aa, Homo sapiens
  Table A; Target 40494; HLA-A*29:02; MAGEA6; ENSG00000197172; CTA
QYFVQENYLEY

SEQ ID NO: 40495 - protein, 8 aa, Homo sapiens
  Table A; Target 40495; HLA-B*15:01; MAGEA6; ENSG00000197172; CTA
RALIETSY

SEQ ID NO: 40496 - protein, 10 aa, Homo sapiens
  Table A; Target 40496; HLA-B*57:01; MAGEA6; ENSG00000197172; CTA
RISYPLLHEW

SEQ ID NO: 40497 - protein, 8 aa, Homo sapiens
  Table A; Target 40497; HLA-A*30:01; MAGEA6; ENSG00000197172; CTA
SDSLQLVF

SEQ ID NO: 40498 - protein, 8 aa, Homo sapiens
  Table A; Target 40498; HLA-B*18:01; MAGEA6; ENSG00000197172; CTA
SDSLQLVF

SEQ ID NO: 40499 - protein, 8 aa, Homo sapiens
  Table A; Target 40499; HLA-B*37:01; MAGEA6; ENSG00000197172; CTA
SDSLQLVF

SEQ ID NO: 40500 - protein, 8 aa, Homo sapiens
  Table A; Target 40500; HLA-C*07:01; MAGEA6; ENSG00000197172; CTA
SDSLQLVF

SEQ ID NO: 40501 - protein, 8 aa, Homo sapiens
  Table A; Target 40501; HLA-C*07:04; MAGEA6; ENSG00000197172; CTA
SDSLQLVF

SEQ ID NO: 40502 - protein, 11 aa, Homo sapiens
  Table A; Target 40502; HLA-B*49:01; MAGEA6; ENSG00000197172; CTA
SEFQAALSRKV

SEQ ID NO: 40503 - protein, 8 aa, Homo sapiens
  Table A; Target 40503; HLA-A*30:02; MAGEA6; ENSG00000197172; CTA
SGGPRISY

SEQ ID NO: 40504 - protein, 8 aa, Homo sapiens
  Table A; Target 40504; HLA-A*32:01; MAGEA6; ENSG00000197172; CTA
SGGPRISY

SEQ ID NO: 40505 - protein, 8 aa, Homo sapiens
  Table A; Target 40505; HLA-B*08:01; MAGEA6; ENSG00000197172; CTA
SGGPRISY

SEQ ID NO: 40506 - protein, 8 aa, Homo sapiens
  Table A; Target 40506; HLA-B*15:01; MAGEA6; ENSG00000197172; CTA
SGGPRISY

SEQ ID NO: 40507 - protein, 8 aa, Homo sapiens
  Table A; Target 40507; HLA-B*15:03; MAGEA6; ENSG00000197172; CTA
SGGPRISY

SEQ ID NO: 40508 - protein, 8 aa, Homo sapiens
  Table A; Target 40508; HLA-C*01:02; MAGEA6; ENSG00000197172; CTA
SGGPRISY

SEQ ID NO: 40509 - protein, 8 aa, Homo sapiens
  Table A; Target 40509; HLA-C*06:02; MAGEA6; ENSG00000197172; CTA
SGGPRISY

SEQ ID NO: 40510 - protein, 8 aa, Homo sapiens
  Table A; Target 40510; HLA-C*07:01; MAGEA6; ENSG00000197172; CTA
SGGPRISY

SEQ ID NO: 40511 - protein, 8 aa, Homo sapiens
  Table A; Target 40511; HLA-C*07:04; MAGEA6; ENSG00000197172; CTA
SGGPRISY

SEQ ID NO: 40512 - protein, 8 aa, Homo sapiens
  Table A; Target 40512; HLA-C*12:03; MAGEA6; ENSG00000197172; CTA
SGGPRISY

SEQ ID NO: 40513 - protein, 8 aa, Homo sapiens
  Table A; Target 40513; HLA-C*16:02; MAGEA6; ENSG00000197172; CTA
SGGPRISY

SEQ ID NO: 40514 - protein, 9 aa, Homo sapiens
  Table A; Target 40514; HLA-A*02:03; MAGEA6; ENSG00000197172; CTA
SIFGDPKKL

SEQ ID NO: 40515 - protein, 9 aa, Homo sapiens
  Table A; Target 40515; HLA-A*02:04; MAGEA6; ENSG00000197172; CTA
SIFGDPKKL

SEQ ID NO: 40516 - protein, 9 aa, Homo sapiens
  Table A; Target 40516; HLA-A*03:02; MAGEA6; ENSG00000197172; CTA
SIFGDPKKL

SEQ ID NO: 40517 - protein, 9 aa, Homo sapiens
  Table A; Target 40517; HLA-A*68:02; MAGEA6; ENSG00000197172; CTA
SIFGDPKKL

SEQ ID NO: 40518 - protein, 9 aa, Homo sapiens
  Table A; Target 40518; HLA-B*44:03; MAGEA6; ENSG00000197172; CTA
SIFGDPKKL

SEQ ID NO: 40519 - protein, 9 aa, Homo sapiens
  Table A; Target 40519; HLA-C*02:02; MAGEA6; ENSG00000197172; CTA
SIFGDPKKL

SEQ ID NO: 40520 - protein, 9 aa, Homo sapiens
  Table A; Target 40520; HLA-C*12:03; MAGEA6; ENSG00000197172; CTA
SIFGDPKKL

SEQ ID NO: 40521 - protein, 9 aa, Homo sapiens
  Table A; Target 40521; HLA-C*16:02; MAGEA6; ENSG00000197172; CTA
SIFGDPKKL

SEQ ID NO: 40522 - protein, 9 aa, Homo sapiens
  Table A; Target 40522; HLA-C*16:04; MAGEA6; ENSG00000197172; CTA
SIFGDPKKL

SEQ ID NO: 40523 - protein, 9 aa, Homo sapiens
  Table A; Target 40523; HLA-B*38:01; MAGEA6; ENSG00000197172; CTA
SKASDSLQL

SEQ ID NO: 40524 - protein, 11 aa, Homo sapiens
  Table A; Target 40524; HLA-B*15:03; MAGEA6; ENSG00000197172; CTA
SKASDSLQLVF

SEQ ID NO: 40525 - protein, 8 aa, Homo sapiens
  Table A; Target 40525; HLA-A*24:02; MAGEA6; ENSG00000197172; CTA
SYPLLHEW

SEQ ID NO: 40526 - protein, 10 aa, Homo sapiens
  Table A; Target 40526; HLA-A*24:02; MAGEA6; ENSG00000197172; CTA
SYPLLHEWAL

SEQ ID NO: 40527 - protein, 9 aa, Homo sapiens
  Table A; Target 40527; HLA-B*54:01; MAGEA6; ENSG00000197172; CTA
TGFLIIILA

SEQ ID NO: 40528 - protein, 9 aa, Homo sapiens
  Table A; Target 40528; HLA-A*26:01; MAGEA6; ENSG00000197172; CTA
TQYFVQENY

SEQ ID NO: 40529 - protein, 9 aa, Homo sapiens
  Table A; Target 40529; HLA-A*29:02; MAGEA6; ENSG00000197172; CTA
TQYFVQENY

SEQ ID NO: 40530 - protein, 9 aa, Homo sapiens
  Table A; Target 40530; HLA-A*30:02; MAGEA6; ENSG00000197172; CTA
TQYFVQENY

SEQ ID NO: 40531 - protein, 9 aa, Homo sapiens
  Table A; Target 40531; HLA-A*32:01; MAGEA6; ENSG00000197172; CTA
TQYFVQENY

SEQ ID NO: 40532 - protein, 9 aa, Homo sapiens
  Table A; Target 40532; HLA-B*13:02; MAGEA6; ENSG00000197172; CTA
TQYFVQENY

SEQ ID NO: 40533 - protein, 9 aa, Homo sapiens
  Table A; Target 40533; HLA-B*18:01; MAGEA6; ENSG00000197172; CTA
TQYFVQENY

SEQ ID NO: 40534 - protein, 9 aa, Homo sapiens
  Table A; Target 40534; HLA-B*27:02; MAGEA6; ENSG00000197172; CTA
TQYFVQENY

SEQ ID NO: 40535 - protein, 9 aa, Homo sapiens
  Table A; Target 40535; HLA-B*27:05; MAGEA6; ENSG00000197172; CTA
TQYFVQENY

SEQ ID NO: 40536 - protein, 9 aa, Homo sapiens
  Table A; Target 40536; HLA-B*35:01; MAGEA6; ENSG00000197172; CTA
TQYFVQENY

SEQ ID NO: 40537 - protein, 9 aa, Homo sapiens
  Table A; Target 40537; HLA-B*38:01; MAGEA6; ENSG00000197172; CTA
TQYFVQENY

SEQ ID NO: 40538 - protein, 9 aa, Homo sapiens
  Table A; Target 40538; HLA-B*39:01; MAGEA6; ENSG00000197172; CTA
TQYFVQENY

SEQ ID NO: 40539 - protein, 9 aa, Homo sapiens
  Table A; Target 40539; HLA-B*44:02; MAGEA6; ENSG00000197172; CTA
TQYFVQENY

SEQ ID NO: 40540 - protein, 9 aa, Homo sapiens
  Table A; Target 40540; HLA-B*44:03; MAGEA6; ENSG00000197172; CTA
TQYFVQENY

SEQ ID NO: 40541 - protein, 9 aa, Homo sapiens
  Table A; Target 40541; HLA-B*46:01; MAGEA6; ENSG00000197172; CTA
TQYFVQENY

SEQ ID NO: 40542 - protein, 9 aa, Homo sapiens
  Table A; Target 40542; HLA-B*58:01; MAGEA6; ENSG00000197172; CTA
TQYFVQENY

SEQ ID NO: 40543 - protein, 9 aa, Homo sapiens
  Table A; Target 40543; HLA-C*02:02; MAGEA6; ENSG00000197172; CTA
TQYFVQENY

SEQ ID NO: 40544 - protein, 9 aa, Homo sapiens
  Table A; Target 40544; HLA-C*07:04; MAGEA6; ENSG00000197172; CTA
TQYFVQENY

SEQ ID NO: 40545 - protein, 9 aa, Homo sapiens
  Table A; Target 40545; HLA-C*07:06; MAGEA6; ENSG00000197172; CTA
TQYFVQENY

SEQ ID NO: 40546 - protein, 9 aa, Homo sapiens
  Table A; Target 40546; HLA-C*16:02; MAGEA6; ENSG00000197172; CTA
TQYFVQENY

SEQ ID NO: 40547 - protein, 9 aa, Homo sapiens
  Table A; Target 40547; HLA-C*16:04; MAGEA6; ENSG00000197172; CTA
TQYFVQENY

SEQ ID NO: 40548 - protein, 10 aa, Homo sapiens
  Table A; Target 40548; HLA-A*68:02; MAGEA6; ENSG00000197172; CTA
TQYFVQENYL

SEQ ID NO: 40549 - protein, 10 aa, Homo sapiens
  Table A; Target 40549; HLA-B*13:02; MAGEA6; ENSG00000197172; CTA
TQYFVQENYL

SEQ ID NO: 40550 - protein, 10 aa, Homo sapiens
  Table A; Target 40550; HLA-B*27:05; MAGEA6; ENSG00000197172; CTA
TQYFVQENYL

SEQ ID NO: 40551 - protein, 10 aa, Homo sapiens
  Table A; Target 40551; HLA-B*38:01; MAGEA6; ENSG00000197172; CTA
TQYFVQENYL

SEQ ID NO: 40552 - protein, 8 aa, Homo sapiens
  Table A; Target 40552; HLA-B*08:01; MAGEA6; ENSG00000197172; CTA
VAKLVHFL

SEQ ID NO: 40553 - protein, 8 aa, Homo sapiens
  Table A; Target 40553; HLA-B*15:03; MAGEA6; ENSG00000197172; CTA
VDPIGHVY

SEQ ID NO: 40554 - protein, 8 aa, Homo sapiens
  Table A; Target 40554; HLA-B*18:01; MAGEA6; ENSG00000197172; CTA
VDPIGHVY

SEQ ID NO: 40555 - protein, 8 aa, Homo sapiens
  Table A; Target 40555; HLA-B*37:01; MAGEA6; ENSG00000197172; CTA
VDPIGHVY

SEQ ID NO: 40556 - protein, 8 aa, Homo sapiens
  Table A; Target 40556; HLA-C*01:02; MAGEA6; ENSG00000197172; CTA
VDPIGHVY

SEQ ID NO: 40557 - protein, 8 aa, Homo sapiens
  Table A; Target 40557; HLA-C*04:01; MAGEA6; ENSG00000197172; CTA
VDPIGHVY

SEQ ID NO: 40558 - protein, 8 aa, Homo sapiens
  Table A; Target 40558; HLA-C*06:02; MAGEA6; ENSG00000197172; CTA
VDPIGHVY

SEQ ID NO: 40559 - protein, 8 aa, Homo sapiens
  Table A; Target 40559; HLA-C*07:01; MAGEA6; ENSG00000197172; CTA
VDPIGHVY

SEQ ID NO: 40560 - protein, 8 aa, Homo sapiens
  Table A; Target 40560; HLA-C*07:04; MAGEA6; ENSG00000197172; CTA
VDPIGHVY

SEQ ID NO: 40561 - protein, 8 aa, Homo sapiens
  Table A; Target 40561; HLA-C*12:03; MAGEA6; ENSG00000197172; CTA
VDPIGHVY

SEQ ID NO: 40562 - protein, 8 aa, Homo sapiens
  Table A; Target 40562; HLA-C*14:02; MAGEA6; ENSG00000197172; CTA
VDPIGHVY

SEQ ID NO: 40563 - protein, 8 aa, Homo sapiens
  Table A; Target 40563; HLA-C*16:01; MAGEA6; ENSG00000197172; CTA
VDPIGHVY

SEQ ID NO: 40564 - protein, 9 aa, Homo sapiens
  Table A; Target 40564; HLA-A*24:02; MAGEA6; ENSG00000197172; CTA
VDPIGHVYI

SEQ ID NO: 40565 - protein, 11 aa, Homo sapiens
  Table A; Target 40565; HLA-B*15:03; MAGEA6; ENSG00000197172; CTA
VKISGGPRISY

SEQ ID NO: 40566 - protein, 8 aa, Homo sapiens
  Table A; Target 40566; HLA-A*30:02; MAGEA6; ENSG00000197172; CTA
VQENYLEY

SEQ ID NO: 40567 - protein, 8 aa, Homo sapiens
  Table A; Target 40567; HLA-A*23:01; MAGEA6; ENSG00000197172; CTA
VYIFATCL

SEQ ID NO: 40568 - protein, 8 aa, Homo sapiens
  Table A; Target 40568; HLA-A*24:02; MAGEA6; ENSG00000197172; CTA
VYIFATCL

SEQ ID NO: 40569 - protein, 8 aa, Homo sapiens
  Table A; Target 40569; HLA-C*14:02; MAGEA6; ENSG00000197172; CTA
VYIFATCL

SEQ ID NO: 40570 - protein, 10 aa, Homo sapiens
  Table A; Target 40570; HLA-A*23:01; MAGEA6; ENSG00000197172; CTA
YFVQENYLEY

SEQ ID NO: 40571 - protein, 8 aa, Homo sapiens
  Table A; Target 40571; HLA-B*54:01; MAGEA6; ENSG00000197172; CTA
YPLLHEWA

SEQ ID NO: 40572 - protein, 9 aa, Homo sapiens
  Table A; Target 40572; HLA-B*08:01; MAGEA6; ENSG00000197172; CTA
YPLLHEWAL

SEQ ID NO: 40573 - protein, 9 aa, Homo sapiens
  Table A; Target 40573; HLA-B*35:01; MAGEA6; ENSG00000197172; CTA
YPLLHEWAL

SEQ ID NO: 40574 - protein, 9 aa, Homo sapiens
  Table A; Target 40574; HLA-B*35:03; MAGEA6; ENSG00000197172; CTA
YPLLHEWAL

SEQ ID NO: 40575 - protein, 9 aa, Homo sapiens
  Table A; Target 40575; HLA-B*51:01; MAGEA6; ENSG00000197172; CTA
YPLLHEWAL

SEQ ID NO: 40576 - protein, 9 aa, Homo sapiens
  Table A; Target 40576; HLA-B*54:01; MAGEA6; ENSG00000197172; CTA
YPLLHEWAL

SEQ ID NO: 40577 - protein, 9 aa, Homo sapiens
  Table A; Target 40577; HLA-B*55:01; MAGEA6; ENSG00000197172; CTA
YPLLHEWAL

SEQ ID NO: 40578 - protein, 9 aa, Homo sapiens
  Table A; Target 40578; HLA-B*56:01; MAGEA6; ENSG00000197172; CTA
YPLLHEWAL

SEQ ID NO: 40579 - protein, 9 aa, Homo sapiens
  Table A; Target 40579; HLA-B*13:02; MAGEA8; ENSG00000156009; TAA
AASSSSTLI

SEQ ID NO: 40580 - protein, 9 aa, Homo sapiens
  Table A; Target 40580; HLA-B*38:01; MAGEA8; ENSG00000156009; TAA
AASSSSTLI

SEQ ID NO: 40581 - protein, 9 aa, Homo sapiens
  Table A; Target 40581; HLA-B*49:01; MAGEA8; ENSG00000156009; TAA
AASSSSTLI

SEQ ID NO: 40582 - protein, 9 aa, Homo sapiens
  Table A; Target 40582; HLA-C*02:02; MAGEA8; ENSG00000156009; TAA
AASSSSTLI

SEQ ID NO: 40583 - protein, 9 aa, Homo sapiens
  Table A; Target 40583; HLA-C*16:02; MAGEA8; ENSG00000156009; TAA
AASSSSTLI

SEQ ID NO: 40584 - protein, 10 aa, Homo sapiens
  Table A; Target 40584; HLA-C*03:03; MAGEA8; ENSG00000156009; TAA
AASSSSTLIM

SEQ ID NO: 40585 - protein, 10 aa, Homo sapiens
  Table A; Target 40585; HLA-C*03:04; MAGEA8; ENSG00000156009; TAA
AASSSSTLIM

SEQ ID NO: 40586 - protein, 8 aa, Homo sapiens
  Table A; Target 40586; HLA-B*37:01; MAGEA8; ENSG00000156009; TAA
AELVRFLL

SEQ ID NO: 40587 - protein, 8 aa, Homo sapiens
  Table A; Target 40587; HLA-B*44:02; MAGEA8; ENSG00000156009; TAA
AELVRFLL

SEQ ID NO: 40588 - protein, 8 aa, Homo sapiens
  Table A; Target 40588; HLA-B*44:03; MAGEA8; ENSG00000156009; TAA
AELVRFLL

SEQ ID NO: 40589 - protein, 9 aa, Homo sapiens
  Table A; Target 40589; HLA-B*44:02; MAGEA8; ENSG00000156009; TAA
AELVRFLLR

SEQ ID NO: 40590 - protein, 11 aa, Homo sapiens
  Table A; Target 40590; HLA-B*15:01; MAGEA8; ENSG00000156009; TAA
AEMLESVIKNY

SEQ ID NO: 40591 - protein, 11 aa, Homo sapiens
  Table A; Target 40591; HLA-B*40:02; MAGEA8; ENSG00000156009; TAA
AEMLESVIKNY

SEQ ID NO: 40592 - protein, 11 aa, Homo sapiens
  Table A; Target 40592; HLA-B*57:01; MAGEA8; ENSG00000156009; TAA
AEMLESVIKNY

SEQ ID NO: 40593 - protein, 11 aa, Homo sapiens
  Table A; Target 40593; HLA-C*12:03; MAGEA8; ENSG00000156009; TAA
AEMLESVIKNY

SEQ ID NO: 40594 - protein, 9 aa, Homo sapiens
  Table A; Target 40594; HLA-A*30:01; MAGEA8; ENSG00000156009; TAA
AETSYVKVL

SEQ ID NO: 40595 - protein, 9 aa, Homo sapiens
  Table A; Target 40595; HLA-B*46:01; MAGEA8; ENSG00000156009; TAA
AIWEALSVM

SEQ ID NO: 40596 - protein, 11 aa, Homo sapiens
  Table A; Target 40596; HLA-A*02:04; MAGEA8; ENSG00000156009; TAA
AIWEALSVMGL

SEQ ID NO: 40597 - protein, 11 aa, Homo sapiens
  Table A; Target 40597; HLA-A*02:07; MAGEA8; ENSG00000156009; TAA
AIWEALSVMGL

SEQ ID NO: 40598 - protein, 9 aa, Homo sapiens
  Table A; Target 40598; HLA-A*11:01; MAGEA8; ENSG00000156009; TAA
ALAETSYVK

SEQ ID NO: 40599 - protein, 9 aa, Homo sapiens
  Table A; Target 40599; HLA-A*68:01; MAGEA8; ENSG00000156009; TAA
ALAETSYVK

SEQ ID NO: 40600 - protein, 9 aa, Homo sapiens
  Table A; Target 40600; HLA-B*27:02; MAGEA8; ENSG00000156009; TAA
ALAETSYVK

SEQ ID NO: 40601 - protein, 9 aa, Homo sapiens
  Table A; Target 40601; HLA-A*01:01; MAGEA8; ENSG00000156009; TAA
ALDEKVAEL

SEQ ID NO: 40602 - protein, 9 aa, Homo sapiens
  Table A; Target 40602; HLA-A*02:03; MAGEA8; ENSG00000156009; TAA
ALDEKVAEL

SEQ ID NO: 40603 - protein, 9 aa, Homo sapiens
  Table A; Target 40603; HLA-A*02:04; MAGEA8; ENSG00000156009; TAA
ALDEKVAEL

SEQ ID NO: 40604 - protein, 9 aa, Homo sapiens
  Table A; Target 40604; HLA-A*02:07; MAGEA8; ENSG00000156009; TAA
ALDEKVAEL

SEQ ID NO: 40605 - protein, 9 aa, Homo sapiens
  Table A; Target 40605; HLA-A*03:02; MAGEA8; ENSG00000156009; TAA
ALDEKVAEL

SEQ ID NO: 40606 - protein, 9 aa, Homo sapiens
  Table A; Target 40606; HLA-A*32:01; MAGEA8; ENSG00000156009; TAA
ALDEKVAEL

SEQ ID NO: 40607 - protein, 9 aa, Homo sapiens
  Table A; Target 40607; HLA-B*07:02; MAGEA8; ENSG00000156009; TAA
ALDEKVAEL

SEQ ID NO: 40608 - protein, 9 aa, Homo sapiens
  Table A; Target 40608; HLA-B*08:01; MAGEA8; ENSG00000156009; TAA
ALDEKVAEL

SEQ ID NO: 40609 - protein, 9 aa, Homo sapiens
  Table A; Target 40609; HLA-B*35:03; MAGEA8; ENSG00000156009; TAA
ALDEKVAEL

SEQ ID NO: 40610 - protein, 9 aa, Homo sapiens
  Table A; Target 40610; HLA-B*38:01; MAGEA8; ENSG00000156009; TAA
ALDEKVAEL

SEQ ID NO: 40611 - protein, 9 aa, Homo sapiens
  Table A; Target 40611; HLA-B*39:01; MAGEA8; ENSG00000156009; TAA
ALDEKVAEL

SEQ ID NO: 40612 - protein, 9 aa, Homo sapiens
  Table A; Target 40612; HLA-B*40:01; MAGEA8; ENSG00000156009; TAA
ALDEKVAEL

SEQ ID NO: 40613 - protein, 9 aa, Homo sapiens
  Table A; Target 40613; HLA-B*46:01; MAGEA8; ENSG00000156009; TAA
ALDEKVAEL

SEQ ID NO: 40614 - protein, 9 aa, Homo sapiens
  Table A; Target 40614; HLA-B*55:01; MAGEA8; ENSG00000156009; TAA
ALDEKVAEL

SEQ ID NO: 40615 - protein, 9 aa, Homo sapiens
  Table A; Target 40615; HLA-C*01:02; MAGEA8; ENSG00000156009; TAA
ALDEKVAEL

SEQ ID NO: 40616 - protein, 9 aa, Homo sapiens
  Table A; Target 40616; HLA-C*04:01; MAGEA8; ENSG00000156009; TAA
ALDEKVAEL

SEQ ID NO: 40617 - protein, 9 aa, Homo sapiens
  Table A; Target 40617; HLA-C*05:01; MAGEA8; ENSG00000156009; TAA
ALDEKVAEL

SEQ ID NO: 40618 - protein, 9 aa, Homo sapiens
  Table A; Target 40618; HLA-C*07:04; MAGEA8; ENSG00000156009; TAA
ALDEKVAEL

SEQ ID NO: 40619 - protein, 9 aa, Homo sapiens
  Table A; Target 40619; HLA-C*14:02; MAGEA8; ENSG00000156009; TAA
ALDEKVAEL

SEQ ID NO: 40620 - protein, 9 aa, Homo sapiens
  Table A; Target 40620; HLA-C*16:02; MAGEA8; ENSG00000156009; TAA
ALDEKVAEL

SEQ ID NO: 40621 - protein, 10 aa, Homo sapiens
  Table A; Target 40621; HLA-A*02:01; MAGEA8; ENSG00000156009; TAA
ALDEKVAELV

SEQ ID NO: 40622 - protein, 10 aa, Homo sapiens
  Table A; Target 40622; HLA-A*02:07; MAGEA8; ENSG00000156009; TAA
ALDEKVAELV

SEQ ID NO: 40623 - protein, 10 aa, Homo sapiens
  Table A; Target 40623; HLA-B*55:01; MAGEA8; ENSG00000156009; TAA
ALDEKVAELV

SEQ ID NO: 40624 - protein, 8 aa, Homo sapiens
  Table A; Target 40624; HLA-A*02:01; MAGEA8; ENSG00000156009; TAA
ALGEEKGV

SEQ ID NO: 40625 - protein, 8 aa, Homo sapiens
  Table A; Target 40625; HLA-A*02:03; MAGEA8; ENSG00000156009; TAA
ALGEEKGV

SEQ ID NO: 40626 - protein, 8 aa, Homo sapiens
  Table A; Target 40626; HLA-B*55:01; MAGEA8; ENSG00000156009; TAA
ALGEEKGV

SEQ ID NO: 40627 - protein, 8 aa, Homo sapiens
  Table A; Target 40627; HLA-A*30:02; MAGEA8; ENSG00000156009; TAA
ALSVMGLY

SEQ ID NO: 40628 - protein, 8 aa, Homo sapiens
  Table A; Target 40628; HLA-B*15:01; MAGEA8; ENSG00000156009; TAA
ALSVMGLY

SEQ ID NO: 40629 - protein, 9 aa, Homo sapiens
  Table A; Target 40629; HLA-B*35:03; MAGEA8; ENSG00000156009; TAA
APEEAIWEA

SEQ ID NO: 40630 - protein, 9 aa, Homo sapiens
  Table A; Target 40630; HLA-B*54:01; MAGEA8; ENSG00000156009; TAA
APEEAIWEA

SEQ ID NO: 40631 - protein, 9 aa, Homo sapiens
  Table A; Target 40631; HLA-B*55:01; MAGEA8; ENSG00000156009; TAA
APEEAIWEA

SEQ ID NO: 40632 - protein, 9 aa, Homo sapiens
  Table A; Target 40632; HLA-B*56:01; MAGEA8; ENSG00000156009; TAA
APEEAIWEA

SEQ ID NO: 40633 - protein, 10 aa, Homo sapiens
  Table A; Target 40633; HLA-B*35:03; MAGEA8; ENSG00000156009; TAA
APEEAIWEAL

SEQ ID NO: 40634 - protein, 9 aa, Homo sapiens
  Table A; Target 40634; HLA-B*35:03; MAGEA8; ENSG00000156009; TAA
APGLMDVQI

SEQ ID NO: 40635 - protein, 9 aa, Homo sapiens
  Table A; Target 40635; HLA-A*01:01; MAGEA8; ENSG00000156009; TAA
APGSDPVRY

SEQ ID NO: 40636 - protein, 9 aa, Homo sapiens
  Table A; Target 40636; HLA-A*29:02; MAGEA8; ENSG00000156009; TAA
APGSDPVRY

SEQ ID NO: 40637 - protein, 9 aa, Homo sapiens
  Table A; Target 40637; HLA-A*30:02; MAGEA8; ENSG00000156009; TAA
APGSDPVRY

SEQ ID NO: 40638 - protein, 9 aa, Homo sapiens
  Table A; Target 40638; HLA-B*15:01; MAGEA8; ENSG00000156009; TAA
APGSDPVRY

SEQ ID NO: 40639 - protein, 9 aa, Homo sapiens
  Table A; Target 40639; HLA-B*35:01; MAGEA8; ENSG00000156009; TAA
APGSDPVRY

SEQ ID NO: 40640 - protein, 9 aa, Homo sapiens
  Table A; Target 40640; HLA-B*44:03; MAGEA8; ENSG00000156009; TAA
APGSDPVRY

SEQ ID NO: 40641 - protein, 9 aa, Homo sapiens
  Table A; Target 40641; HLA-B*55:01; MAGEA8; ENSG00000156009; TAA
APGSDPVRY

SEQ ID NO: 40642 - protein, 9 aa, Homo sapiens
  Table A; Target 40642; HLA-C*03:03; MAGEA8; ENSG00000156009; TAA
APGSDPVRY

SEQ ID NO: 40643 - protein, 11 aa, Homo sapiens
  Table A; Target 40643; HLA-B*07:02; MAGEA8; ENSG00000156009; TAA
APGSDPVRYEF

SEQ ID NO: 40644 - protein, 11 aa, Homo sapiens
  Table A; Target 40644; HLA-B*35:01; MAGEA8; ENSG00000156009; TAA
APGSDPVRYEF

SEQ ID NO: 40645 - protein, 11 aa, Homo sapiens
  Table A; Target 40645; HLA-B*55:01; MAGEA8; ENSG00000156009; TAA
APGSDPVRYEF

SEQ ID NO: 40646 - protein, 8 aa, Homo sapiens
  Table A; Target 40646; HLA-B*13:02; MAGEA8; ENSG00000156009; TAA
AQGEAPGL

SEQ ID NO: 40647 - protein, 8 aa, Homo sapiens
  Table A; Target 40647; HLA-B*27:05; MAGEA8; ENSG00000156009; TAA
AQGEAPGL

SEQ ID NO: 40648 - protein, 8 aa, Homo sapiens
  Table A; Target 40648; HLA-B*39:01; MAGEA8; ENSG00000156009; TAA
AQGEAPGL

SEQ ID NO: 40649 - protein, 9 aa, Homo sapiens
  Table A; Target 40649; HLA-B*27:05; MAGEA8; ENSG00000156009; TAA
AQGEAPGLM

SEQ ID NO: 40650 - protein, 9 aa, Homo sapiens
  Table A; Target 40650; HLA-C*05:01; MAGEA8; ENSG00000156009; TAA
AQGEAPGLM

SEQ ID NO: 40651 - protein, 11 aa, Homo sapiens
  Table A; Target 40651; HLA-A*02:01; MAGEA8; ENSG00000156009; TAA
AQGEAPGLMDV

SEQ ID NO: 40652 - protein, 11 aa, Homo sapiens
  Table A; Target 40652; HLA-B*13:02; MAGEA8; ENSG00000156009; TAA
AQGEAPGLMDV

SEQ ID NO: 40653 - protein, 9 aa, Homo sapiens
  Table A; Target 40653; HLA-B*58:01; MAGEA8; ENSG00000156009; TAA
ASECMQVIF

SEQ ID NO: 40654 - protein, 9 aa, Homo sapiens
  Table A; Target 40654; HLA-A*01:01; MAGEA8; ENSG00000156009; TAA
ASSSSTLIM

SEQ ID NO: 40655 - protein, 9 aa, Homo sapiens
  Table A; Target 40655; HLA-A*03:01; MAGEA8; ENSG00000156009; TAA
ASSSSTLIM

SEQ ID NO: 40656 - protein, 9 aa, Homo sapiens
  Table A; Target 40656; HLA-A*11:01; MAGEA8; ENSG00000156009; TAA
ASSSSTLIM

SEQ ID NO: 40657 - protein, 9 aa, Homo sapiens
  Table A; Target 40657; HLA-B*46:01; MAGEA8; ENSG00000156009; TAA
ASSSSTLIM

SEQ ID NO: 40658 - protein, 9 aa, Homo sapiens
  Table A; Target 40658; HLA-B*58:01; MAGEA8; ENSG00000156009; TAA
ASSSSTLIM

SEQ ID NO: 40659 - protein, 9 aa, Homo sapiens
  Table A; Target 40659; HLA-C*01:02; MAGEA8; ENSG00000156009; TAA
ASSSSTLIM

SEQ ID NO: 40660 - protein, 9 aa, Homo sapiens
  Table A; Target 40660; HLA-C*02:02; MAGEA8; ENSG00000156009; TAA
ASSSSTLIM

SEQ ID NO: 40661 - protein, 9 aa, Homo sapiens
  Table A; Target 40661; HLA-C*03:03; MAGEA8; ENSG00000156009; TAA
ASSSSTLIM

SEQ ID NO: 40662 - protein, 9 aa, Homo sapiens
  Table A; Target 40662; HLA-C*03:04; MAGEA8; ENSG00000156009; TAA
ASSSSTLIM

SEQ ID NO: 40663 - protein, 9 aa, Homo sapiens
  Table A; Target 40663; HLA-C*07:04; MAGEA8; ENSG00000156009; TAA
ASSSSTLIM

SEQ ID NO: 40664 - protein, 9 aa, Homo sapiens
  Table A; Target 40664; HLA-C*12:03; MAGEA8; ENSG00000156009; TAA
ASSSSTLIM

SEQ ID NO: 40665 - protein, 9 aa, Homo sapiens
  Table A; Target 40665; HLA-C*14:02; MAGEA8; ENSG00000156009; TAA
ASSSSTLIM

SEQ ID NO: 40666 - protein, 9 aa, Homo sapiens
  Table A; Target 40666; HLA-C*16:01; MAGEA8; ENSG00000156009; TAA
ASSSSTLIM

SEQ ID NO: 40667 - protein, 9 aa, Homo sapiens
  Table A; Target 40667; HLA-C*16:02; MAGEA8; ENSG00000156009; TAA
ASSSSTLIM

SEQ ID NO: 40668 - protein, 9 aa, Homo sapiens
  Table A; Target 40668; HLA-C*16:04; MAGEA8; ENSG00000156009; TAA
ASSSSTLIM

SEQ ID NO: 40669 - protein, 8 aa, Homo sapiens
  Table A; Target 40669; HLA-B*49:01; MAGEA8; ENSG00000156009; TAA
DEKVAELV

SEQ ID NO: 40670 - protein, 8 aa, Homo sapiens
  Table A; Target 40670; HLA-B*51:01; MAGEA8; ENSG00000156009; TAA
DEKVAELV

SEQ ID NO: 40671 - protein, 9 aa, Homo sapiens
  Table A; Target 40671; HLA-A*33:01; MAGEA8; ENSG00000156009; TAA
DEKVAELVR

SEQ ID NO: 40672 - protein, 9 aa, Homo sapiens
  Table A; Target 40672; HLA-B*18:01; MAGEA8; ENSG00000156009; TAA
DEKVAELVR

SEQ ID NO: 40673 - protein, 10 aa, Homo sapiens
  Table A; Target 40673; HLA-B*18:01; MAGEA8; ENSG00000156009; TAA
DEKVAELVRF

SEQ ID NO: 40674 - protein, 10 aa, Homo sapiens
  Table A; Target 40674; HLA-B*44:02; MAGEA8; ENSG00000156009; TAA
DEKVAELVRF

SEQ ID NO: 40675 - protein, 8 aa, Homo sapiens
  Table A; Target 40675; HLA-B*08:01; MAGEA8; ENSG00000156009; TAA
DGREHSVY

SEQ ID NO: 40676 - protein, 8 aa, Homo sapiens
  Table A; Target 40676; HLA-B*18:01; MAGEA8; ENSG00000156009; TAA
DGREHSVY

SEQ ID NO: 40677 - protein, 9 aa, Homo sapiens
  Table A; Target 40677; HLA-A*33:01; MAGEA8; ENSG00000156009; TAA
DGREHSVYW

SEQ ID NO: 40678 - protein, 10 aa, Homo sapiens
  Table A; Target 40678; HLA-B*51:01; MAGEA8; ENSG00000156009; TAA
DPAGHSYILV

SEQ ID NO: 40679 - protein, 8 aa, Homo sapiens
  Table A; Target 40679; HLA-B*35:03; MAGEA8; ENSG00000156009; TAA
DPAHLESL

SEQ ID NO: 40680 - protein, 9 aa, Homo sapiens
  Table A; Target 40680; HLA-A*26:01; MAGEA8; ENSG00000156009; TAA
DPAHLESLF

SEQ ID NO: 40681 - protein, 9 aa, Homo sapiens
  Table A; Target 40681; HLA-B*35:01; MAGEA8; ENSG00000156009; TAA
DPAHLESLF

SEQ ID NO: 40682 - protein, 9 aa, Homo sapiens
  Table A; Target 40682; HLA-B*38:01; MAGEA8; ENSG00000156009; TAA
DQSTPKTGL

SEQ ID NO: 40683 - protein, 9 aa, Homo sapiens
  Table A; Target 40683; HLA-B*39:01; MAGEA8; ENSG00000156009; TAA
DQSTPKTGL

SEQ ID NO: 40684 - protein, 10 aa, Homo sapiens
  Table A; Target 40684; HLA-C*07:06; MAGEA8; ENSG00000156009; TAA
DVKEVDPAGH

SEQ ID NO: 40685 - protein, 11 aa, Homo sapiens
  Table A; Target 40685; HLA-A*03:02; MAGEA8; ENSG00000156009; TAA
DVQIPTAEEQK

SEQ ID NO: 40686 - protein, 11 aa, Homo sapiens
  Table A; Target 40686; HLA-A*33:01; MAGEA8; ENSG00000156009; TAA
DVQIPTAEEQK

SEQ ID NO: 40687 - protein, 11 aa, Homo sapiens
  Table A; Target 40687; HLA-A*68:01; MAGEA8; ENSG00000156009; TAA
DVQIPTAEEQK

SEQ ID NO: 40688 - protein, 11 aa, Homo sapiens
  Table A; Target 40688; HLA-B*27:02; MAGEA8; ENSG00000156009; TAA
DVQIPTAEEQK

SEQ ID NO: 40689 - protein, 9 aa, Homo sapiens
  Table A; Target 40689; HLA-A*26:01; MAGEA8; ENSG00000156009; TAA
EAIWEALSV

SEQ ID NO: 40690 - protein, 9 aa, Homo sapiens
  Table A; Target 40690; HLA-A*68:02; MAGEA8; ENSG00000156009; TAA
EAIWEALSV

SEQ ID NO: 40691 - protein, 9 aa, Homo sapiens
  Table A; Target 40691; HLA-B*51:01; MAGEA8; ENSG00000156009; TAA
EAIWEALSV

SEQ ID NO: 40692 - protein, 9 aa, Homo sapiens
  Table A; Target 40692; HLA-B*54:01; MAGEA8; ENSG00000156009; TAA
EAIWEALSV

SEQ ID NO: 40693 - protein, 10 aa, Homo sapiens
  Table A; Target 40693; HLA-A*25:01; MAGEA8; ENSG00000156009; TAA
EAIWEALSVM

SEQ ID NO: 40694 - protein, 10 aa, Homo sapiens
  Table A; Target 40694; HLA-A*26:01; MAGEA8; ENSG00000156009; TAA
EAIWEALSVM

SEQ ID NO: 40695 - protein, 10 aa, Homo sapiens
  Table A; Target 40695; HLA-B*35:01; MAGEA8; ENSG00000156009; TAA
EAIWEALSVM

SEQ ID NO: 40696 - protein, 10 aa, Homo sapiens
  Table A; Target 40696; HLA-A*25:01; MAGEA8; ENSG00000156009; TAA
EALDEKVAEL

SEQ ID NO: 40697 - protein, 10 aa, Homo sapiens
  Table A; Target 40697; HLA-A*26:01; MAGEA8; ENSG00000156009; TAA
EALDEKVAEL

SEQ ID NO: 40698 - protein, 10 aa, Homo sapiens
  Table A; Target 40698; HLA-A*33:01; MAGEA8; ENSG00000156009; TAA
EALDEKVAEL

SEQ ID NO: 40699 - protein, 10 aa, Homo sapiens
  Table A; Target 40699; HLA-A*33:03; MAGEA8; ENSG00000156009; TAA
EALDEKVAEL

SEQ ID NO: 40700 - protein, 10 aa, Homo sapiens
  Table A; Target 40700; HLA-A*68:01; MAGEA8; ENSG00000156009; TAA
EALDEKVAEL

SEQ ID NO: 40701 - protein, 10 aa, Homo sapiens
  Table A; Target 40701; HLA-B*35:03; MAGEA8; ENSG00000156009; TAA
EALDEKVAEL

SEQ ID NO: 40702 - protein, 10 aa, Homo sapiens
  Table A; Target 40702; HLA-C*07:06; MAGEA8; ENSG00000156009; TAA
EALDEKVAEL

SEQ ID NO: 40703 - protein, 11 aa, Homo sapiens
  Table A; Target 40703; HLA-A*68:02; MAGEA8; ENSG00000156009; TAA
EALDEKVAELV

SEQ ID NO: 40704 - protein, 9 aa, Homo sapiens
  Table A; Target 40704; HLA-B*51:01; MAGEA8; ENSG00000156009; TAA
EALGEEKGV

SEQ ID NO: 40705 - protein, 8 aa, Homo sapiens
  Table A; Target 40705; HLA-B*51:01; MAGEA8; ENSG00000156009; TAA
EALSVMGL

SEQ ID NO: 40706 - protein, 9 aa, Homo sapiens
  Table A; Target 40706; HLA-A*01:01; MAGEA8; ENSG00000156009; TAA
EALSVMGLY

SEQ ID NO: 40707 - protein, 9 aa, Homo sapiens
  Table A; Target 40707; HLA-A*25:01; MAGEA8; ENSG00000156009; TAA
EALSVMGLY

SEQ ID NO: 40708 - protein, 9 aa, Homo sapiens
  Table A; Target 40708; HLA-A*26:01; MAGEA8; ENSG00000156009; TAA
EALSVMGLY

SEQ ID NO: 40709 - protein, 9 aa, Homo sapiens
  Table A; Target 40709; HLA-A*29:02; MAGEA8; ENSG00000156009; TAA
EALSVMGLY

SEQ ID NO: 40710 - protein, 9 aa, Homo sapiens
  Table A; Target 40710; HLA-A*30:02; MAGEA8; ENSG00000156009; TAA
EALSVMGLY

SEQ ID NO: 40711 - protein, 9 aa, Homo sapiens
  Table A; Target 40711; HLA-A*33:01; MAGEA8; ENSG00000156009; TAA
EALSVMGLY

SEQ ID NO: 40712 - protein, 9 aa, Homo sapiens
  Table A; Target 40712; HLA-A*33:03; MAGEA8; ENSG00000156009; TAA
EALSVMGLY

SEQ ID NO: 40713 - protein, 9 aa, Homo sapiens
  Table A; Target 40713; HLA-B*35:01; MAGEA8; ENSG00000156009; TAA
EALSVMGLY

SEQ ID NO: 40714 - protein, 9 aa, Homo sapiens
  Table A; Target 40714; HLA-B*44:03; MAGEA8; ENSG00000156009; TAA
EALSVMGLY

SEQ ID NO: 40715 - protein, 8 aa, Homo sapiens
  Table A; Target 40715; HLA-B*51:01; MAGEA8; ENSG00000156009; TAA
EAPGLMDV

SEQ ID NO: 40716 - protein, 10 aa, Homo sapiens
  Table A; Target 40716; HLA-A*68:01; MAGEA8; ENSG00000156009; TAA
EAPGLMDVQI

SEQ ID NO: 40717 - protein, 10 aa, Homo sapiens
  Table A; Target 40717; HLA-A*68:02; MAGEA8; ENSG00000156009; TAA
EAPGLMDVQI

SEQ ID NO: 40718 - protein, 8 aa, Homo sapiens
  Table A; Target 40718; HLA-B*18:01; MAGEA8; ENSG00000156009; TAA
EEAIWEAL

SEQ ID NO: 40719 - protein, 10 aa, Homo sapiens
  Table A; Target 40719; HLA-B*44:02; MAGEA8; ENSG00000156009; TAA
EEALGEEKGV

SEQ ID NO: 40720 - protein, 10 aa, Homo sapiens
  Table A; Target 40720; HLA-B*44:03; MAGEA8; ENSG00000156009; TAA
EEALGEEKGV

SEQ ID NO: 40721 - protein, 10 aa, Homo sapiens
  Table A; Target 40721; HLA-B*49:01; MAGEA8; ENSG00000156009; TAA
EEALGEEKGV

SEQ ID NO: 40722 - protein, 9 aa, Homo sapiens
  Table A; Target 40722; HLA-B*39:01; MAGEA8; ENSG00000156009; TAA
EEEGPSTSP

SEQ ID NO: 40723 - protein, 11 aa, Homo sapiens
  Table A; Target 40723; HLA-B*39:01; MAGEA8; ENSG00000156009; TAA
EEEGPSTSPDP

SEQ ID NO: 40724 - protein, 11 aa, Homo sapiens
  Table A; Target 40724; HLA-B*39:01; MAGEA8; ENSG00000156009; TAA
EEGPSTSPDPA

SEQ ID NO: 40725 - protein, 9 aa, Homo sapiens
  Table A; Target 40725; HLA-B*51:01; MAGEA8; ENSG00000156009; TAA
EGASSSLTV

SEQ ID NO: 40726 - protein, 9 aa, Homo sapiens
  Table A; Target 40726; HLA-A*33:03; MAGEA8; ENSG00000156009; TAA
EHVVRVNAR

SEQ ID NO: 40727 - protein, 8 aa, Homo sapiens
  Table A; Target 40727; HLA-B*08:01; MAGEA8; ENSG00000156009; TAA
ESLFREAL

SEQ ID NO: 40728 - protein, 11 aa, Homo sapiens
  Table A; Target 40728; HLA-A*33:01; MAGEA8; ENSG00000156009; TAA
ESLFREALDEK

SEQ ID NO: 40729 - protein, 9 aa, Homo sapiens
  Table A; Target 40729; HLA-A*68:02; MAGEA8; ENSG00000156009; TAA
ETSYVKVLE

SEQ ID NO: 40730 - protein, 10 aa, Homo sapiens
  Table A; Target 40730; HLA-A*68:01; MAGEA8; ENSG00000156009; TAA
ETSYVKVLEH

SEQ ID NO: 40731 - protein, 11 aa, Homo sapiens
  Table A; Target 40731; HLA-A*68:02; MAGEA8; ENSG00000156009; TAA
ETSYVKVLEHV

SEQ ID NO: 40732 - protein, 9 aa, Homo sapiens
  Table A; Target 40732; HLA-B*38:01; MAGEA8; ENSG00000156009; TAA
EVDPAGHSY

SEQ ID NO: 40733 - protein, 9 aa, Homo sapiens
  Table A; Target 40733; HLA-B*46:01; MAGEA8; ENSG00000156009; TAA
EVDPAGHSY

SEQ ID NO: 40734 - protein, 9 aa, Homo sapiens
  Table A; Target 40734; HLA-B*55:01; MAGEA8; ENSG00000156009; TAA
EVDPAGHSY

SEQ ID NO: 40735 - protein, 9 aa, Homo sapiens
  Table A; Target 40735; HLA-C*02:02; MAGEA8; ENSG00000156009; TAA
EVDPAGHSY

SEQ ID NO: 40736 - protein, 10 aa, Homo sapiens
  Table A; Target 40736; HLA-A*26:01; MAGEA8; ENSG00000156009; TAA
EVDPAGHSYI

SEQ ID NO: 40737 - protein, 11 aa, Homo sapiens
  Table A; Target 40737; HLA-B*35:03; MAGEA8; ENSG00000156009; TAA
EVDPAGHSYIL

SEQ ID NO: 40738 - protein, 8 aa, Homo sapiens
  Table A; Target 40738; HLA-B*54:01; MAGEA8; ENSG00000156009; TAA
FPDIFSKA

SEQ ID NO: 40739 - protein, 8 aa, Homo sapiens
  Table A; Target 40739; HLA-B*55:01; MAGEA8; ENSG00000156009; TAA
FPDIFSKA

SEQ ID NO: 40740 - protein, 8 aa, Homo sapiens
  Table A; Target 40740; HLA-B*56:01; MAGEA8; ENSG00000156009; TAA
FPDIFSKA

SEQ ID NO: 40741 - protein, 8 aa, Homo sapiens
  Table A; Target 40741; HLA-A*11:01; MAGEA8; ENSG00000156009; TAA
GDDQSTPK

SEQ ID NO: 40742 - protein, 11 aa, Homo sapiens
  Table A; Target 40742; HLA-B*40:01; MAGEA8; ENSG00000156009; TAA
GDDQSTPKTGL

SEQ ID NO: 40743 - protein, 9 aa, Homo sapiens
  Table A; Target 40743; HLA-A*30:01; MAGEA8; ENSG00000156009; TAA
GEAPGLMDV

SEQ ID NO: 40744 - protein, 9 aa, Homo sapiens
  Table A; Target 40744; HLA-B*13:02; MAGEA8; ENSG00000156009; TAA
GEAPGLMDV

SEQ ID NO: 40745 - protein, 9 aa, Homo sapiens
  Table A; Target 40745; HLA-B*18:01; MAGEA8; ENSG00000156009; TAA
GEAPGLMDV

SEQ ID NO: 40746 - protein, 9 aa, Homo sapiens
  Table A; Target 40746; HLA-B*37:01; MAGEA8; ENSG00000156009; TAA
GEAPGLMDV

SEQ ID NO: 40747 - protein, 9 aa, Homo sapiens
  Table A; Target 40747; HLA-B*40:01; MAGEA8; ENSG00000156009; TAA
GEAPGLMDV

SEQ ID NO: 40748 - protein, 9 aa, Homo sapiens
  Table A; Target 40748; HLA-B*40:02; MAGEA8; ENSG00000156009; TAA
GEAPGLMDV

SEQ ID NO: 40749 - protein, 9 aa, Homo sapiens
  Table A; Target 40749; HLA-B*44:03; MAGEA8; ENSG00000156009; TAA
GEAPGLMDV

SEQ ID NO: 40750 - protein, 9 aa, Homo sapiens
  Table A; Target 40750; HLA-B*49:01; MAGEA8; ENSG00000156009; TAA
GEAPGLMDV

SEQ ID NO: 40751 - protein, 9 aa, Homo sapiens
  Table A; Target 40751; HLA-C*02:02; MAGEA8; ENSG00000156009; TAA
GEAPGLMDV

SEQ ID NO: 40752 - protein, 9 aa, Homo sapiens
  Table A; Target 40752; HLA-C*16:04; MAGEA8; ENSG00000156009; TAA
GEAPGLMDV

SEQ ID NO: 40753 - protein, 11 aa, Homo sapiens
  Table A; Target 40753; HLA-A*30:01; MAGEA8; ENSG00000156009; TAA
GEAPGLMDVQI

SEQ ID NO: 40754 - protein, 11 aa, Homo sapiens
  Table A; Target 40754; HLA-B*40:01; MAGEA8; ENSG00000156009; TAA
GEAPGLMDVQI

SEQ ID NO: 40755 - protein, 11 aa, Homo sapiens
  Table A; Target 40755; HLA-B*44:02; MAGEA8; ENSG00000156009; TAA
GEAPGLMDVQI

SEQ ID NO: 40756 - protein, 11 aa, Homo sapiens
  Table A; Target 40756; HLA-B*44:03; MAGEA8; ENSG00000156009; TAA
GEAPGLMDVQI

SEQ ID NO: 40757 - protein, 11 aa, Homo sapiens
  Table A; Target 40757; HLA-B*49:01; MAGEA8; ENSG00000156009; TAA
GEAPGLMDVQI

SEQ ID NO: 40758 - protein, 11 aa, Homo sapiens
  Table A; Target 40758; HLA-A*03:01; MAGEA8; ENSG00000156009; TAA
GLLGDDQSTPK

SEQ ID NO: 40759 - protein, 11 aa, Homo sapiens
  Table A; Target 40759; HLA-A*03:02; MAGEA8; ENSG00000156009; TAA
GLLGDDQSTPK

SEQ ID NO: 40760 - protein, 11 aa, Homo sapiens
  Table A; Target 40760; HLA-A*11:01; MAGEA8; ENSG00000156009; TAA
GLLGDDQSTPK

SEQ ID NO: 40761 - protein, 11 aa, Homo sapiens
  Table A; Target 40761; HLA-B*27:02; MAGEA8; ENSG00000156009; TAA
GLLGDDQSTPK

SEQ ID NO: 40762 - protein, 11 aa, Homo sapiens
  Table A; Target 40762; HLA-B*27:05; MAGEA8; ENSG00000156009; TAA
GLLGDDQSTPK

SEQ ID NO: 40763 - protein, 9 aa, Homo sapiens
  Table A; Target 40763; HLA-A*02:01; MAGEA8; ENSG00000156009; TAA
GLMDVQIPT

SEQ ID NO: 40764 - protein, 10 aa, Homo sapiens
  Table A; Target 40764; HLA-A*02:01; MAGEA8; ENSG00000156009; TAA
GLMDVQIPTA

SEQ ID NO: 40765 - protein, 10 aa, Homo sapiens
  Table A; Target 40765; HLA-A*02:03; MAGEA8; ENSG00000156009; TAA
GLMDVQIPTA

SEQ ID NO: 40766 - protein, 10 aa, Homo sapiens
  Table A; Target 40766; HLA-A*02:04; MAGEA8; ENSG00000156009; TAA
GLMDVQIPTA

SEQ ID NO: 40767 - protein, 10 aa, Homo sapiens
  Table A; Target 40767; HLA-A*02:07; MAGEA8; ENSG00000156009; TAA
GLMDVQIPTA

SEQ ID NO: 40768 - protein, 10 aa, Homo sapiens
  Table A; Target 40768; HLA-B*55:01; MAGEA8; ENSG00000156009; TAA
GLMDVQIPTA

SEQ ID NO: 40769 - protein, 10 aa, Homo sapiens
  Table A; Target 40769; HLA-B*56:01; MAGEA8; ENSG00000156009; TAA
GLMDVQIPTA

SEQ ID NO: 40770 - protein, 11 aa, Homo sapiens
  Table A; Target 40770; HLA-A*02:01; MAGEA8; ENSG00000156009; TAA
GLQAQGEAPGL

SEQ ID NO: 40771 - protein, 11 aa, Homo sapiens
  Table A; Target 40771; HLA-A*02:04; MAGEA8; ENSG00000156009; TAA
GLQAQGEAPGL

SEQ ID NO: 40772 - protein, 11 aa, Homo sapiens
  Table A; Target 40772; HLA-B*27:05; MAGEA8; ENSG00000156009; TAA
GLQAQGEAPGL

SEQ ID NO: 40773 - protein, 10 aa, Homo sapiens
  Table A; Target 40773; HLA-A*02:03; MAGEA8; ENSG00000156009; TAA
GLYDGREHSV

SEQ ID NO: 40774 - protein, 10 aa, Homo sapiens
  Table A; Target 40774; HLA-A*02:04; MAGEA8; ENSG00000156009; TAA
GLYDGREHSV

SEQ ID NO: 40775 - protein, 10 aa, Homo sapiens
  Table A; Target 40775; HLA-A*02:07; MAGEA8; ENSG00000156009; TAA
GLYDGREHSV

SEQ ID NO: 40776 - protein, 10 aa, Homo sapiens
  Table A; Target 40776; HLA-A*03:01; MAGEA8; ENSG00000156009; TAA
GLYDGREHSV

SEQ ID NO: 40777 - protein, 10 aa, Homo sapiens
  Table A; Target 40777; HLA-A*30:01; MAGEA8; ENSG00000156009; TAA
GLYDGREHSV

SEQ ID NO: 40778 - protein, 10 aa, Homo sapiens
  Table A; Target 40778; HLA-A*32:01; MAGEA8; ENSG00000156009; TAA
GLYDGREHSV

SEQ ID NO: 40779 - protein, 10 aa, Homo sapiens
  Table A; Target 40779; HLA-B*08:01; MAGEA8; ENSG00000156009; TAA
GLYDGREHSV

SEQ ID NO: 40780 - protein, 10 aa, Homo sapiens
  Table A; Target 40780; HLA-B*13:02; MAGEA8; ENSG00000156009; TAA
GLYDGREHSV

SEQ ID NO: 40781 - protein, 10 aa, Homo sapiens
  Table A; Target 40781; HLA-B*15:01; MAGEA8; ENSG00000156009; TAA
GLYDGREHSV

SEQ ID NO: 40782 - protein, 10 aa, Homo sapiens
  Table A; Target 40782; HLA-B*37:01; MAGEA8; ENSG00000156009; TAA
GLYDGREHSV

SEQ ID NO: 40783 - protein, 10 aa, Homo sapiens
  Table A; Target 40783; HLA-B*46:01; MAGEA8; ENSG00000156009; TAA
GLYDGREHSV

SEQ ID NO: 40784 - protein, 10 aa, Homo sapiens
  Table A; Target 40784; HLA-B*55:01; MAGEA8; ENSG00000156009; TAA
GLYDGREHSV

SEQ ID NO: 40785 - protein, 10 aa, Homo sapiens
  Table A; Target 40785; HLA-C*01:02; MAGEA8; ENSG00000156009; TAA
GLYDGREHSV

SEQ ID NO: 40786 - protein, 10 aa, Homo sapiens
  Table A; Target 40786; HLA-C*02:02; MAGEA8; ENSG00000156009; TAA
GLYDGREHSV

SEQ ID NO: 40787 - protein, 10 aa, Homo sapiens
  Table A; Target 40787; HLA-C*06:02; MAGEA8; ENSG00000156009; TAA
GLYDGREHSV

SEQ ID NO: 40788 - protein, 10 aa, Homo sapiens
  Table A; Target 40788; HLA-C*12:03; MAGEA8; ENSG00000156009; TAA
GLYDGREHSV

SEQ ID NO: 40789 - protein, 10 aa, Homo sapiens
  Table A; Target 40789; HLA-C*16:02; MAGEA8; ENSG00000156009; TAA
GLYDGREHSV

SEQ ID NO: 40790 - protein, 10 aa, Homo sapiens
  Table A; Target 40790; HLA-C*16:04; MAGEA8; ENSG00000156009; TAA
GLYDGREHSV

SEQ ID NO: 40791 - protein, 11 aa, Homo sapiens
  Table A; Target 40791; HLA-A*01:01; MAGEA8; ENSG00000156009; TAA
GLYDGREHSVY

SEQ ID NO: 40792 - protein, 11 aa, Homo sapiens
  Table A; Target 40792; HLA-A*03:01; MAGEA8; ENSG00000156009; TAA
GLYDGREHSVY

SEQ ID NO: 40793 - protein, 11 aa, Homo sapiens
  Table A; Target 40793; HLA-A*26:01; MAGEA8; ENSG00000156009; TAA
GLYDGREHSVY

SEQ ID NO: 40794 - protein, 11 aa, Homo sapiens
  Table A; Target 40794; HLA-A*29:02; MAGEA8; ENSG00000156009; TAA
GLYDGREHSVY

SEQ ID NO: 40795 - protein, 11 aa, Homo sapiens
  Table A; Target 40795; HLA-A*30:02; MAGEA8; ENSG00000156009; TAA
GLYDGREHSVY

SEQ ID NO: 40796 - protein, 11 aa, Homo sapiens
  Table A; Target 40796; HLA-A*32:01; MAGEA8; ENSG00000156009; TAA
GLYDGREHSVY

SEQ ID NO: 40797 - protein, 11 aa, Homo sapiens
  Table A; Target 40797; HLA-B*15:01; MAGEA8; ENSG00000156009; TAA
GLYDGREHSVY

SEQ ID NO: 40798 - protein, 11 aa, Homo sapiens
  Table A; Target 40798; HLA-B*15:03; MAGEA8; ENSG00000156009; TAA
GLYDGREHSVY

SEQ ID NO: 40799 - protein, 11 aa, Homo sapiens
  Table A; Target 40799; HLA-B*46:01; MAGEA8; ENSG00000156009; TAA
GLYDGREHSVY

SEQ ID NO: 40800 - protein, 11 aa, Homo sapiens
  Table A; Target 40800; HLA-C*02:02; MAGEA8; ENSG00000156009; TAA
GLYDGREHSVY

SEQ ID NO: 40801 - protein, 11 aa, Homo sapiens
  Table A; Target 40801; HLA-C*07:04; MAGEA8; ENSG00000156009; TAA
GLYDGREHSVY

SEQ ID NO: 40802 - protein, 11 aa, Homo sapiens
  Table A; Target 40802; HLA-C*12:03; MAGEA8; ENSG00000156009; TAA
GLYDGREHSVY

SEQ ID NO: 40803 - protein, 11 aa, Homo sapiens
  Table A; Target 40803; HLA-C*16:04; MAGEA8; ENSG00000156009; TAA
GLYDGREHSVY

SEQ ID NO: 40804 - protein, 9 aa, Homo sapiens
  Table A; Target 40804; HLA-A*01:01; MAGEA8; ENSG00000156009; TAA
GSDPVRYEF

SEQ ID NO: 40805 - protein, 9 aa, Homo sapiens
  Table A; Target 40805; HLA-A*02:07; MAGEA8; ENSG00000156009; TAA
GSDPVRYEF

SEQ ID NO: 40806 - protein, 9 aa, Homo sapiens
  Table A; Target 40806; HLA-A*23:01; MAGEA8; ENSG00000156009; TAA
GSDPVRYEF

SEQ ID NO: 40807 - protein, 9 aa, Homo sapiens
  Table A; Target 40807; HLA-A*24:02; MAGEA8; ENSG00000156009; TAA
GSDPVRYEF

SEQ ID NO: 40808 - protein, 9 aa, Homo sapiens
  Table A; Target 40808; HLA-A*29:02; MAGEA8; ENSG00000156009; TAA
GSDPVRYEF

SEQ ID NO: 40809 - protein, 9 aa, Homo sapiens
  Table A; Target 40809; HLA-A*30:02; MAGEA8; ENSG00000156009; TAA
GSDPVRYEF

SEQ ID NO: 40810 - protein, 9 aa, Homo sapiens
  Table A; Target 40810; HLA-A*31:01; MAGEA8; ENSG00000156009; TAA
GSDPVRYEF

SEQ ID NO: 40811 - protein, 9 aa, Homo sapiens
  Table A; Target 40811; HLA-A*32:01; MAGEA8; ENSG00000156009; TAA
GSDPVRYEF

SEQ ID NO: 40812 - protein, 9 aa, Homo sapiens
  Table A; Target 40812; HLA-B*15:01; MAGEA8; ENSG00000156009; TAA
GSDPVRYEF

SEQ ID NO: 40813 - protein, 9 aa, Homo sapiens
  Table A; Target 40813; HLA-B*35:01; MAGEA8; ENSG00000156009; TAA
GSDPVRYEF

SEQ ID NO: 40814 - protein, 9 aa, Homo sapiens
  Table A; Target 40814; HLA-B*38:01; MAGEA8; ENSG00000156009; TAA
GSDPVRYEF

SEQ ID NO: 40815 - protein, 9 aa, Homo sapiens
  Table A; Target 40815; HLA-B*44:03; MAGEA8; ENSG00000156009; TAA
GSDPVRYEF

SEQ ID NO: 40816 - protein, 9 aa, Homo sapiens
  Table A; Target 40816; HLA-B*57:01; MAGEA8; ENSG00000156009; TAA
GSDPVRYEF

SEQ ID NO: 40817 - protein, 9 aa, Homo sapiens
  Table A; Target 40817; HLA-B*58:01; MAGEA8; ENSG00000156009; TAA
GSDPVRYEF

SEQ ID NO: 40818 - protein, 9 aa, Homo sapiens
  Table A; Target 40818; HLA-C*02:02; MAGEA8; ENSG00000156009; TAA
GSDPVRYEF

SEQ ID NO: 40819 - protein, 9 aa, Homo sapiens
  Table A; Target 40819; HLA-C*03:03; MAGEA8; ENSG00000156009; TAA
GSDPVRYEF

SEQ ID NO: 40820 - protein, 9 aa, Homo sapiens
  Table A; Target 40820; HLA-C*03:04; MAGEA8; ENSG00000156009; TAA
GSDPVRYEF

SEQ ID NO: 40821 - protein, 9 aa, Homo sapiens
  Table A; Target 40821; HLA-C*04:01; MAGEA8; ENSG00000156009; TAA
GSDPVRYEF

SEQ ID NO: 40822 - protein, 9 aa, Homo sapiens
  Table A; Target 40822; HLA-C*05:01; MAGEA8; ENSG00000156009; TAA
GSDPVRYEF

SEQ ID NO: 40823 - protein, 9 aa, Homo sapiens
  Table A; Target 40823; HLA-C*16:01; MAGEA8; ENSG00000156009; TAA
GSDPVRYEF

SEQ ID NO: 40824 - protein, 9 aa, Homo sapiens
  Table A; Target 40824; HLA-C*16:02; MAGEA8; ENSG00000156009; TAA
GSDPVRYEF

SEQ ID NO: 40825 - protein, 9 aa, Homo sapiens
  Table A; Target 40825; HLA-C*16:04; MAGEA8; ENSG00000156009; TAA
GSDPVRYEF

SEQ ID NO: 40826 - protein, 10 aa, Homo sapiens
  Table A; Target 40826; HLA-B*57:01; MAGEA8; ENSG00000156009; TAA
GSRAPEEAIW

SEQ ID NO: 40827 - protein, 11 aa, Homo sapiens
  Table A; Target 40827; HLA-A*30:01; MAGEA8; ENSG00000156009; TAA
HEEALGEEKGV

SEQ ID NO: 40828 - protein, 11 aa, Homo sapiens
  Table A; Target 40828; HLA-B*40:02; MAGEA8; ENSG00000156009; TAA
HEEALGEEKGV

SEQ ID NO: 40829 - protein, 11 aa, Homo sapiens
  Table A; Target 40829; HLA-B*44:03; MAGEA8; ENSG00000156009; TAA
HEEALGEEKGV

SEQ ID NO: 40830 - protein, 11 aa, Homo sapiens
  Table A; Target 40830; HLA-B*49:01; MAGEA8; ENSG00000156009; TAA
HEEALGEEKGV

SEQ ID NO: 40831 - protein, 9 aa, Homo sapiens
  Table A; Target 40831; HLA-A*02:07; MAGEA8; ENSG00000156009; TAA
HFPDIFSKA

SEQ ID NO: 40832 - protein, 9 aa, Homo sapiens
  Table A; Target 40832; HLA-A*24:02; MAGEA8; ENSG00000156009; TAA
HFPDIFSKA

SEQ ID NO: 40833 - protein, 9 aa, Homo sapiens
  Table A; Target 40833; HLA-A*29:02; MAGEA8; ENSG00000156009; TAA
HFPDIFSKA

SEQ ID NO: 40834 - protein, 9 aa, Homo sapiens
  Table A; Target 40834; HLA-A*68:02; MAGEA8; ENSG00000156009; TAA
HFPDIFSKA

SEQ ID NO: 40835 - protein, 9 aa, Homo sapiens
  Table A; Target 40835; HLA-B*54:01; MAGEA8; ENSG00000156009; TAA
HFPDIFSKA

SEQ ID NO: 40836 - protein, 9 aa, Homo sapiens
  Table A; Target 40836; HLA-B*40:02; MAGEA8; ENSG00000156009; TAA
HSYILVTCL

SEQ ID NO: 40837 - protein, 9 aa, Homo sapiens
  Table A; Target 40837; HLA-A*68:02; MAGEA8; ENSG00000156009; TAA
HVVRVNARV

SEQ ID NO: 40838 - protein, 8 aa, Homo sapiens
  Table A; Target 40838; HLA-C*03:03; MAGEA8; ENSG00000156009; TAA
IIVLGMIL

SEQ ID NO: 40839 - protein, 8 aa, Homo sapiens
  Table A; Target 40839; HLA-C*03:04; MAGEA8; ENSG00000156009; TAA
IIVLGMIL

SEQ ID NO: 40840 - protein, 10 aa, Homo sapiens
  Table A; Target 40840; HLA-A*29:02; MAGEA8; ENSG00000156009; TAA
ILVTCLGLSY

SEQ ID NO: 40841 - protein, 8 aa, Homo sapiens
  Table A; Target 40841; HLA-A*02:01; MAGEA8; ENSG00000156009; TAA
IMGTLEEV

SEQ ID NO: 40842 - protein, 8 aa, Homo sapiens
  Table A; Target 40842; HLA-A*02:03; MAGEA8; ENSG00000156009; TAA
IMGTLEEV

SEQ ID NO: 40843 - protein, 8 aa, Homo sapiens
  Table A; Target 40843; HLA-B*46:01; MAGEA8; ENSG00000156009; TAA
IMGTLEEV

SEQ ID NO: 40844 - protein, 8 aa, Homo sapiens
  Table A; Target 40844; HLA-B*55:01; MAGEA8; ENSG00000156009; TAA
IMGTLEEV

SEQ ID NO: 40845 - protein, 9 aa, Homo sapiens
  Table A; Target 40845; HLA-B*35:03; MAGEA8; ENSG00000156009; TAA
IPTAEEQKA

SEQ ID NO: 40846 - protein, 9 aa, Homo sapiens
  Table A; Target 40846; HLA-B*54:01; MAGEA8; ENSG00000156009; TAA
IPTAEEQKA

SEQ ID NO: 40847 - protein, 9 aa, Homo sapiens
  Table A; Target 40847; HLA-B*55:01; MAGEA8; ENSG00000156009; TAA
IPTAEEQKA

SEQ ID NO: 40848 - protein, 9 aa, Homo sapiens
  Table A; Target 40848; HLA-B*56:01; MAGEA8; ENSG00000156009; TAA
IPTAEEQKA

SEQ ID NO: 40849 - protein, 10 aa, Homo sapiens
  Table A; Target 40849; HLA-B*54:01; MAGEA8; ENSG00000156009; TAA
IPTAEEQKAA

SEQ ID NO: 40850 - protein, 10 aa, Homo sapiens
  Table A; Target 40850; HLA-B*55:01; MAGEA8; ENSG00000156009; TAA
IPTAEEQKAA

SEQ ID NO: 40851 - protein, 10 aa, Homo sapiens
  Table A; Target 40851; HLA-B*56:01; MAGEA8; ENSG00000156009; TAA
IPTAEEQKAA

SEQ ID NO: 40852 - protein, 11 aa, Homo sapiens
  Table A; Target 40852; HLA-B*27:05; MAGEA8; ENSG00000156009; TAA
ISYPSLHEEAL

SEQ ID NO: 40853 - protein, 11 aa, Homo sapiens
  Table A; Target 40853; HLA-B*46:01; MAGEA8; ENSG00000156009; TAA
ISYPSLHEEAL

SEQ ID NO: 40854 - protein, 11 aa, Homo sapiens
  Table A; Target 40854; HLA-B*57:01; MAGEA8; ENSG00000156009; TAA
ISYPSLHEEAL

SEQ ID NO: 40855 - protein, 11 aa, Homo sapiens
  Table A; Target 40855; HLA-B*58:01; MAGEA8; ENSG00000156009; TAA
ISYPSLHEEAL

SEQ ID NO: 40856 - protein, 11 aa, Homo sapiens
  Table A; Target 40856; HLA-C*03:04; MAGEA8; ENSG00000156009; TAA
ISYPSLHEEAL

SEQ ID NO: 40857 - protein, 11 aa, Homo sapiens
  Table A; Target 40857; HLA-A*29:02; MAGEA8; ENSG00000156009; TAA
IWEALSVMGLY

SEQ ID NO: 40858 - protein, 9 aa, Homo sapiens
  Table A; Target 40858; HLA-A*32:01; MAGEA8; ENSG00000156009; TAA
KAASSSSTL

SEQ ID NO: 40859 - protein, 9 aa, Homo sapiens
  Table A; Target 40859; HLA-B*07:02; MAGEA8; ENSG00000156009; TAA
KAASSSSTL

SEQ ID NO: 40860 - protein, 9 aa, Homo sapiens
  Table A; Target 40860; HLA-B*15:01; MAGEA8; ENSG00000156009; TAA
KAASSSSTL

SEQ ID NO: 40861 - protein, 9 aa, Homo sapiens
  Table A; Target 40861; HLA-B*15:03; MAGEA8; ENSG00000156009; TAA
KAASSSSTL

SEQ ID NO: 40862 - protein, 9 aa, Homo sapiens
  Table A; Target 40862; HLA-B*35:03; MAGEA8; ENSG00000156009; TAA
KAASSSSTL

SEQ ID NO: 40863 - protein, 9 aa, Homo sapiens
  Table A; Target 40863; HLA-B*40:01; MAGEA8; ENSG00000156009; TAA
KAASSSSTL

SEQ ID NO: 40864 - protein, 9 aa, Homo sapiens
  Table A; Target 40864; HLA-B*40:02; MAGEA8; ENSG00000156009; TAA
KAASSSSTL

SEQ ID NO: 40865 - protein, 9 aa, Homo sapiens
  Table A; Target 40865; HLA-B*46:01; MAGEA8; ENSG00000156009; TAA
KAASSSSTL

SEQ ID NO: 40866 - protein, 9 aa, Homo sapiens
  Table A; Target 40866; HLA-B*58:01; MAGEA8; ENSG00000156009; TAA
KAASSSSTL

SEQ ID NO: 40867 - protein, 9 aa, Homo sapiens
  Table A; Target 40867; HLA-C*01:02; MAGEA8; ENSG00000156009; TAA
KAASSSSTL

SEQ ID NO: 40868 - protein, 9 aa, Homo sapiens
  Table A; Target 40868; HLA-C*02:02; MAGEA8; ENSG00000156009; TAA
KAASSSSTL

SEQ ID NO: 40869 - protein, 9 aa, Homo sapiens
  Table A; Target 40869; HLA-C*03:03; MAGEA8; ENSG00000156009; TAA
KAASSSSTL

SEQ ID NO: 40870 - protein, 9 aa, Homo sapiens
  Table A; Target 40870; HLA-C*03:04; MAGEA8; ENSG00000156009; TAA
KAASSSSTL

SEQ ID NO: 40871 - protein, 9 aa, Homo sapiens
  Table A; Target 40871; HLA-C*05:01; MAGEA8; ENSG00000156009; TAA
KAASSSSTL

SEQ ID NO: 40872 - protein, 9 aa, Homo sapiens
  Table A; Target 40872; HLA-C*07:02; MAGEA8; ENSG00000156009; TAA
KAASSSSTL

SEQ ID NO: 40873 - protein, 9 aa, Homo sapiens
  Table A; Target 40873; HLA-C*12:03; MAGEA8; ENSG00000156009; TAA
KAASSSSTL

SEQ ID NO: 40874 - protein, 9 aa, Homo sapiens
  Table A; Target 40874; HLA-C*14:02; MAGEA8; ENSG00000156009; TAA
KAASSSSTL

SEQ ID NO: 40875 - protein, 9 aa, Homo sapiens
  Table A; Target 40875; HLA-C*16:01; MAGEA8; ENSG00000156009; TAA
KAASSSSTL

SEQ ID NO: 40876 - protein, 9 aa, Homo sapiens
  Table A; Target 40876; HLA-C*16:02; MAGEA8; ENSG00000156009; TAA
KAASSSSTL

SEQ ID NO: 40877 - protein, 9 aa, Homo sapiens
  Table A; Target 40877; HLA-C*16:04; MAGEA8; ENSG00000156009; TAA
KAASSSSTL

SEQ ID NO: 40878 - protein, 10 aa, Homo sapiens
  Table A; Target 40878; HLA-B*07:02; MAGEA8; ENSG00000156009; TAA
KAASSSSTLI

SEQ ID NO: 40879 - protein, 10 aa, Homo sapiens
  Table A; Target 40879; HLA-B*58:01; MAGEA8; ENSG00000156009; TAA
KAASSSSTLI

SEQ ID NO: 40880 - protein, 11 aa, Homo sapiens
  Table A; Target 40880; HLA-C*03:04; MAGEA8; ENSG00000156009; TAA
KAASSSSTLIM

SEQ ID NO: 40881 - protein, 8 aa, Homo sapiens
  Table A; Target 40881; HLA-C*05:01; MAGEA8; ENSG00000156009; TAA
KAEEGLQA

SEQ ID NO: 40882 - protein, 9 aa, Homo sapiens
  Table A; Target 40882; HLA-B*58:01; MAGEA8; ENSG00000156009; TAA
KASECMQVI

SEQ ID NO: 40883 - protein, 9 aa, Homo sapiens
  Table A; Target 40883; HLA-C*12:03; MAGEA8; ENSG00000156009; TAA
KASECMQVI

SEQ ID NO: 40884 - protein, 9 aa, Homo sapiens
  Table A; Target 40884; HLA-C*16:02; MAGEA8; ENSG00000156009; TAA
KASECMQVI

SEQ ID NO: 40885 - protein, 9 aa, Homo sapiens
  Table A; Target 40885; HLA-B*40:02; MAGEA8; ENSG00000156009; TAA
KEPVTKAEM

SEQ ID NO: 40886 - protein, 9 aa, Homo sapiens
  Table A; Target 40886; HLA-B*44:03; MAGEA8; ENSG00000156009; TAA
KEPVTKAEM

SEQ ID NO: 40887 - protein, 9 aa, Homo sapiens
  Table A; Target 40887; HLA-C*01:02; MAGEA8; ENSG00000156009; TAA
KEPVTKAEM

SEQ ID NO: 40888 - protein, 10 aa, Homo sapiens
  Table A; Target 40888; HLA-B*40:02; MAGEA8; ENSG00000156009; TAA
KEPVTKAEML

SEQ ID NO: 40889 - protein, 10 aa, Homo sapiens
  Table A; Target 40889; HLA-A*26:01; MAGEA8; ENSG00000156009; TAA
KEVDPAGHSY

SEQ ID NO: 40890 - protein, 10 aa, Homo sapiens
  Table A; Target 40890; HLA-B*39:01; MAGEA8; ENSG00000156009; TAA
KEVDPAGHSY

SEQ ID NO: 40891 - protein, 10 aa, Homo sapiens
  Table A; Target 40891; HLA-B*40:02; MAGEA8; ENSG00000156009; TAA
KEVDPAGHSY

SEQ ID NO: 40892 - protein, 10 aa, Homo sapiens
  Table A; Target 40892; HLA-B*49:01; MAGEA8; ENSG00000156009; TAA
KEVDPAGHSY

SEQ ID NO: 40893 - protein, 10 aa, Homo sapiens
  Table A; Target 40893; HLA-B*57:01; MAGEA8; ENSG00000156009; TAA
KEVDPAGHSY

SEQ ID NO: 40894 - protein, 10 aa, Homo sapiens
  Table A; Target 40894; HLA-B*58:01; MAGEA8; ENSG00000156009; TAA
KEVDPAGHSY

SEQ ID NO: 40895 - protein, 10 aa, Homo sapiens
  Table A; Target 40895; HLA-C*14:02; MAGEA8; ENSG00000156009; TAA
KEVDPAGHSY

SEQ ID NO: 40896 - protein, 10 aa, Homo sapiens
  Table A; Target 40896; HLA-B*57:01; MAGEA8; ENSG00000156009; TAA
KLRKLLTQEW

SEQ ID NO: 40897 - protein, 8 aa, Homo sapiens
  Table A; Target 40897; HLA-B*57:01; MAGEA8; ENSG00000156009; TAA
KVAELVRF

SEQ ID NO: 40898 - protein, 9 aa, Homo sapiens
  Table A; Target 40898; HLA-A*02:03; MAGEA8; ENSG00000156009; TAA
KVAELVRFL

SEQ ID NO: 40899 - protein, 9 aa, Homo sapiens
  Table A; Target 40899; HLA-A*02:04; MAGEA8; ENSG00000156009; TAA
KVAELVRFL

SEQ ID NO: 40900 - protein, 9 aa, Homo sapiens
  Table A; Target 40900; HLA-A*02:07; MAGEA8; ENSG00000156009; TAA
KVAELVRFL

SEQ ID NO: 40901 - protein, 9 aa, Homo sapiens
  Table A; Target 40901; HLA-A*03:01; MAGEA8; ENSG00000156009; TAA
KVAELVRFL

SEQ ID NO: 40902 - protein, 9 aa, Homo sapiens
  Table A; Target 40902; HLA-A*31:01; MAGEA8; ENSG00000156009; TAA
KVAELVRFL

SEQ ID NO: 40903 - protein, 9 aa, Homo sapiens
  Table A; Target 40903; HLA-A*32:01; MAGEA8; ENSG00000156009; TAA
KVAELVRFL

SEQ ID NO: 40904 - protein, 9 aa, Homo sapiens
  Table A; Target 40904; HLA-A*68:02; MAGEA8; ENSG00000156009; TAA
KVAELVRFL

SEQ ID NO: 40905 - protein, 9 aa, Homo sapiens
  Table A; Target 40905; HLA-B*27:05; MAGEA8; ENSG00000156009; TAA
KVAELVRFL

SEQ ID NO: 40906 - protein, 9 aa, Homo sapiens
  Table A; Target 40906; HLA-B*57:01; MAGEA8; ENSG00000156009; TAA
KVAELVRFL

SEQ ID NO: 40907 - protein, 9 aa, Homo sapiens
  Table A; Target 40907; HLA-C*06:02; MAGEA8; ENSG00000156009; TAA
KVAELVRFL

SEQ ID NO: 40908 - protein, 10 aa, Homo sapiens
  Table A; Target 40908; HLA-A*02:04; MAGEA8; ENSG00000156009; TAA
KVAELVRFLL

SEQ ID NO: 40909 - protein, 10 aa, Homo sapiens
  Table A; Target 40909; HLA-A*02:07; MAGEA8; ENSG00000156009; TAA
KVAELVRFLL

SEQ ID NO: 40910 - protein, 10 aa, Homo sapiens
  Table A; Target 40910; HLA-A*31:01; MAGEA8; ENSG00000156009; TAA
KVAELVRFLL

SEQ ID NO: 40911 - protein, 10 aa, Homo sapiens
  Table A; Target 40911; HLA-B*57:01; MAGEA8; ENSG00000156009; TAA
KVAELVRFLL

SEQ ID NO: 40912 - protein, 11 aa, Homo sapiens
  Table A; Target 40912; HLA-A*31:01; MAGEA8; ENSG00000156009; TAA
KVAELVRFLLR

SEQ ID NO: 40913 - protein, 8 aa, Homo sapiens
  Table A; Target 40913; HLA-A*31:01; MAGEA8; ENSG00000156009; TAA
KVLEHVVR

SEQ ID NO: 40914 - protein, 9 aa, Homo sapiens
  Table A; Target 40914; HLA-A*02:03; MAGEA8; ENSG00000156009; TAA
KVLEHVVRV

SEQ ID NO: 40915 - protein, 9 aa, Homo sapiens
  Table A; Target 40915; HLA-A*02:04; MAGEA8; ENSG00000156009; TAA
KVLEHVVRV

SEQ ID NO: 40916 - protein, 9 aa, Homo sapiens
  Table A; Target 40916; HLA-A*02:07; MAGEA8; ENSG00000156009; TAA
KVLEHVVRV

SEQ ID NO: 40917 - protein, 9 aa, Homo sapiens
  Table A; Target 40917; HLA-A*03:01; MAGEA8; ENSG00000156009; TAA
KVLEHVVRV

SEQ ID NO: 40918 - protein, 9 aa, Homo sapiens
  Table A; Target 40918; HLA-A*03:02; MAGEA8; ENSG00000156009; TAA
KVLEHVVRV

SEQ ID NO: 40919 - protein, 9 aa, Homo sapiens
  Table A; Target 40919; HLA-A*31:01; MAGEA8; ENSG00000156009; TAA
KVLEHVVRV

SEQ ID NO: 40920 - protein, 9 aa, Homo sapiens
  Table A; Target 40920; HLA-A*68:02; MAGEA8; ENSG00000156009; TAA
KVLEHVVRV

SEQ ID NO: 40921 - protein, 9 aa, Homo sapiens
  Table A; Target 40921; HLA-B*13:02; MAGEA8; ENSG00000156009; TAA
KVLEHVVRV

SEQ ID NO: 40922 - protein, 9 aa, Homo sapiens
  Table A; Target 40922; HLA-B*37:01; MAGEA8; ENSG00000156009; TAA
KVLEHVVRV

SEQ ID NO: 40923 - protein, 9 aa, Homo sapiens
  Table A; Target 40923; HLA-B*55:01; MAGEA8; ENSG00000156009; TAA
KVLEHVVRV

SEQ ID NO: 40924 - protein, 9 aa, Homo sapiens
  Table A; Target 40924; HLA-C*02:02; MAGEA8; ENSG00000156009; TAA
KVLEHVVRV

SEQ ID NO: 40925 - protein, 11 aa, Homo sapiens
  Table A; Target 40925; HLA-A*31:01; MAGEA8; ENSG00000156009; TAA
KVLEHVVRVNA

SEQ ID NO: 40926 - protein, 10 aa, Homo sapiens
  Table A; Target 40926; HLA-A*03:02; MAGEA8; ENSG00000156009; TAA
KYQIKEPVTK

SEQ ID NO: 40927 - protein, 10 aa, Homo sapiens
  Table A; Target 40927; HLA-A*31:01; MAGEA8; ENSG00000156009; TAA
KYQIKEPVTK

SEQ ID NO: 40928 - protein, 10 aa, Homo sapiens
  Table A; Target 40928; HLA-C*06:02; MAGEA8; ENSG00000156009; TAA
KYQIKEPVTK

SEQ ID NO: 40929 - protein, 10 aa, Homo sapiens
  Table A; Target 40929; HLA-C*07:02; MAGEA8; ENSG00000156009; TAA
KYQIKEPVTK

SEQ ID NO: 40930 - protein, 8 aa, Homo sapiens
  Table A; Target 40930; HLA-A*30:01; MAGEA8; ENSG00000156009; TAA
LDEKVAEL

SEQ ID NO: 40931 - protein, 8 aa, Homo sapiens
  Table A; Target 40931; HLA-B*18:01; MAGEA8; ENSG00000156009; TAA
LDEKVAEL

SEQ ID NO: 40932 - protein, 8 aa, Homo sapiens
  Table A; Target 40932; HLA-B*40:01; MAGEA8; ENSG00000156009; TAA
LDEKVAEL

SEQ ID NO: 40933 - protein, 8 aa, Homo sapiens
  Table A; Target 40933; HLA-B*40:02; MAGEA8; ENSG00000156009; TAA
LDEKVAEL

SEQ ID NO: 40934 - protein, 8 aa, Homo sapiens
  Table A; Target 40934; HLA-C*07:04; MAGEA8; ENSG00000156009; TAA
LDEKVAEL

SEQ ID NO: 40935 - protein, 9 aa, Homo sapiens
  Table A; Target 40935; HLA-B*40:02; MAGEA8; ENSG00000156009; TAA
LEHVVRVNA

SEQ ID NO: 40936 - protein, 9 aa, Homo sapiens
  Table A; Target 40936; HLA-A*30:01; MAGEA8; ENSG00000156009; TAA
LESLFREAL

SEQ ID NO: 40937 - protein, 9 aa, Homo sapiens
  Table A; Target 40937; HLA-B*18:01; MAGEA8; ENSG00000156009; TAA
LESLFREAL

SEQ ID NO: 40938 - protein, 9 aa, Homo sapiens
  Table A; Target 40938; HLA-B*37:01; MAGEA8; ENSG00000156009; TAA
LESLFREAL

SEQ ID NO: 40939 - protein, 9 aa, Homo sapiens
  Table A; Target 40939; HLA-B*40:01; MAGEA8; ENSG00000156009; TAA
LESLFREAL

SEQ ID NO: 40940 - protein, 8 aa, Homo sapiens
  Table A; Target 40940; HLA-B*15:01; MAGEA8; ENSG00000156009; TAA
LESVIKNY

SEQ ID NO: 40941 - protein, 9 aa, Homo sapiens
  Table A; Target 40941; HLA-A*03:02; MAGEA8; ENSG00000156009; TAA
LGDDQSTPK

SEQ ID NO: 40942 - protein, 9 aa, Homo sapiens
  Table A; Target 40942; HLA-A*11:01; MAGEA8; ENSG00000156009; TAA
LGDDQSTPK

SEQ ID NO: 40943 - protein, 9 aa, Homo sapiens
  Table A; Target 40943; HLA-B*27:02; MAGEA8; ENSG00000156009; TAA
LGDDQSTPK

SEQ ID NO: 40944 - protein, 9 aa, Homo sapiens
  Table A; Target 40944; HLA-C*05:01; MAGEA8; ENSG00000156009; TAA
LGDDQSTPK

SEQ ID NO: 40945 - protein, 9 aa, Homo sapiens
  Table A; Target 40945; HLA-A*02:01; MAGEA8; ENSG00000156009; TAA
LIMGTLEEV

SEQ ID NO: 40946 - protein, 9 aa, Homo sapiens
  Table A; Target 40946; HLA-A*02:03; MAGEA8; ENSG00000156009; TAA
LIMGTLEEV

SEQ ID NO: 40947 - protein, 9 aa, Homo sapiens
  Table A; Target 40947; HLA-A*02:04; MAGEA8; ENSG00000156009; TAA
LIMGTLEEV

SEQ ID NO: 40948 - protein, 9 aa, Homo sapiens
  Table A; Target 40948; HLA-A*02:07; MAGEA8; ENSG00000156009; TAA
LIMGTLEEV

SEQ ID NO: 40949 - protein, 9 aa, Homo sapiens
  Table A; Target 40949; HLA-A*68:02; MAGEA8; ENSG00000156009; TAA
LIMGTLEEV

SEQ ID NO: 40950 - protein, 9 aa, Homo sapiens
  Table A; Target 40950; HLA-B*13:02; MAGEA8; ENSG00000156009; TAA
LIMGTLEEV

SEQ ID NO: 40951 - protein, 9 aa, Homo sapiens
  Table A; Target 40951; HLA-B*46:01; MAGEA8; ENSG00000156009; TAA
LIMGTLEEV

SEQ ID NO: 40952 - protein, 9 aa, Homo sapiens
  Table A; Target 40952; HLA-B*55:01; MAGEA8; ENSG00000156009; TAA
LIMGTLEEV

SEQ ID NO: 40953 - protein, 10 aa, Homo sapiens
  Table A; Target 40953; HLA-A*03:01; MAGEA8; ENSG00000156009; TAA
LLGDDQSTPK

SEQ ID NO: 40954 - protein, 10 aa, Homo sapiens
  Table A; Target 40954; HLA-A*03:02; MAGEA8; ENSG00000156009; TAA
LLGDDQSTPK

SEQ ID NO: 40955 - protein, 10 aa, Homo sapiens
  Table A; Target 40955; HLA-A*11:01; MAGEA8; ENSG00000156009; TAA
LLGDDQSTPK

SEQ ID NO: 40956 - protein, 10 aa, Homo sapiens
  Table A; Target 40956; HLA-B*27:02; MAGEA8; ENSG00000156009; TAA
LLGDDQSTPK

SEQ ID NO: 40957 - protein, 9 aa, Homo sapiens
  Table A; Target 40957; HLA-A*01:01; MAGEA8; ENSG00000156009; TAA
LLGQKSQRY

SEQ ID NO: 40958 - protein, 9 aa, Homo sapiens
  Table A; Target 40958; HLA-A*29:02; MAGEA8; ENSG00000156009; TAA
LLGQKSQRY

SEQ ID NO: 40959 - protein, 10 aa, Homo sapiens
  Table A; Target 40959; HLA-A*03:01; MAGEA8; ENSG00000156009; TAA
LLGQKSQRYK

SEQ ID NO: 40960 - protein, 9 aa, Homo sapiens
  Table A; Target 40960; HLA-A*02:01; MAGEA8; ENSG00000156009; TAA
LMDVQIPTA

SEQ ID NO: 40961 - protein, 10 aa, Homo sapiens
  Table A; Target 40961; HLA-B*27:05; MAGEA8; ENSG00000156009; TAA
LQAQGEAPGL

SEQ ID NO: 40962 - protein, 10 aa, Homo sapiens
  Table A; Target 40962; HLA-B*38:01; MAGEA8; ENSG00000156009; TAA
LQAQGEAPGL

SEQ ID NO: 40963 - protein, 10 aa, Homo sapiens
  Table A; Target 40963; HLA-B*39:01; MAGEA8; ENSG00000156009; TAA
LQAQGEAPGL

SEQ ID NO: 40964 - protein, 10 aa, Homo sapiens
  Table A; Target 40964; HLA-B*27:02; MAGEA8; ENSG00000156009; TAA
LSVMGLYDGR

SEQ ID NO: 40965 - protein, 10 aa, Homo sapiens
  Table A; Target 40965; HLA-A*01:01; MAGEA8; ENSG00000156009; TAA
LTQEWVQENY

SEQ ID NO: 40966 - protein, 10 aa, Homo sapiens
  Table A; Target 40966; HLA-A*29:02; MAGEA8; ENSG00000156009; TAA
LTQEWVQENY

SEQ ID NO: 40967 - protein, 10 aa, Homo sapiens
  Table A; Target 40967; HLA-A*30:02; MAGEA8; ENSG00000156009; TAA
LTQEWVQENY

SEQ ID NO: 40968 - protein, 10 aa, Homo sapiens
  Table A; Target 40968; HLA-B*57:01; MAGEA8; ENSG00000156009; TAA
LTQEWVQENY

SEQ ID NO: 40969 - protein, 10 aa, Homo sapiens
  Table A; Target 40969; HLA-B*58:01; MAGEA8; ENSG00000156009; TAA
LTQEWVQENY

SEQ ID NO: 40970 - protein, 11 aa, Homo sapiens
  Table A; Target 40970; HLA-C*04:01; MAGEA8; ENSG00000156009; TAA
LTQEWVQENYL

SEQ ID NO: 40971 - protein, 8 aa, Homo sapiens
  Table A; Target 40971; HLA-C*03:04; MAGEA8; ENSG00000156009; TAA
LTVTDSTL

SEQ ID NO: 40972 - protein, 9 aa, Homo sapiens
  Table A; Target 40972; HLA-A*25:01; MAGEA8; ENSG00000156009; TAA
LTVTDSTLW

SEQ ID NO: 40973 - protein, 9 aa, Homo sapiens
  Table A; Target 40973; HLA-A*32:01; MAGEA8; ENSG00000156009; TAA
LTVTDSTLW

SEQ ID NO: 40974 - protein, 9 aa, Homo sapiens
  Table A; Target 40974; HLA-B*57:01; MAGEA8; ENSG00000156009; TAA
LTVTDSTLW

SEQ ID NO: 40975 - protein, 9 aa, Homo sapiens
  Table A; Target 40975; HLA-B*58:01; MAGEA8; ENSG00000156009; TAA
LTVTDSTLW

SEQ ID NO: 40976 - protein, 9 aa, Homo sapiens
  Table A; Target 40976; HLA-C*16:04; MAGEA8; ENSG00000156009; TAA
LTVTDSTLW

SEQ ID NO: 40977 - protein, 9 aa, Homo sapiens
  Table A; Target 40977; HLA-A*24:02; MAGEA8; ENSG00000156009; TAA
LYDGREHSV

SEQ ID NO: 40978 - protein, 9 aa, Homo sapiens
  Table A; Target 40978; HLA-C*04:01; MAGEA8; ENSG00000156009; TAA
LYDGREHSV

SEQ ID NO: 40979 - protein, 9 aa, Homo sapiens
  Table A; Target 40979; HLA-C*14:02; MAGEA8; ENSG00000156009; TAA
LYDGREHSV

SEQ ID NO: 40980 - protein, 10 aa, Homo sapiens
  Table A; Target 40980; HLA-A*29:02; MAGEA8; ENSG00000156009; TAA
LYDGREHSVY

SEQ ID NO: 40981 - protein, 11 aa, Homo sapiens
  Table A; Target 40981; HLA-A*24:02; MAGEA8; ENSG00000156009; TAA
LYDGREHSVYW

SEQ ID NO: 40982 - protein, 8 aa, Homo sapiens
  Table A; Target 40982; HLA-A*30:01; MAGEA8; ENSG00000156009; TAA
MDVQIPTA

SEQ ID NO: 40983 - protein, 8 aa, Homo sapiens
  Table A; Target 40983; HLA-B*40:02; MAGEA8; ENSG00000156009; TAA
MDVQIPTA

SEQ ID NO: 40984 - protein, 8 aa, Homo sapiens
  Table A; Target 40984; HLA-B*54:01; MAGEA8; ENSG00000156009; TAA
MDVQIPTA

SEQ ID NO: 40985 - protein, 10 aa, Homo sapiens
  Table A; Target 40985; HLA-A*29:02; MAGEA8; ENSG00000156009; TAA
MLLGQKSQRY

SEQ ID NO: 40986 - protein, 10 aa, Homo sapiens
  Table A; Target 40986; HLA-A*30:02; MAGEA8; ENSG00000156009; TAA
MLLGQKSQRY

SEQ ID NO: 40987 - protein, 11 aa, Homo sapiens
  Table A; Target 40987; HLA-A*03:01; MAGEA8; ENSG00000156009; TAA
MLLGQKSQRYK

SEQ ID NO: 40988 - protein, 9 aa, Homo sapiens
  Table A; Target 40988; HLA-A*30:01; MAGEA8; ENSG00000156009; TAA
MQVIFGIDV

SEQ ID NO: 40989 - protein, 9 aa, Homo sapiens
  Table A; Target 40989; HLA-A*68:02; MAGEA8; ENSG00000156009; TAA
MQVIFGIDV

SEQ ID NO: 40990 - protein, 9 aa, Homo sapiens
  Table A; Target 40990; HLA-B*13:02; MAGEA8; ENSG00000156009; TAA
MQVIFGIDV

SEQ ID NO: 40991 - protein, 9 aa, Homo sapiens
  Table A; Target 40991; HLA-B*15:03; MAGEA8; ENSG00000156009; TAA
MQVIFGIDV

SEQ ID NO: 40992 - protein, 9 aa, Homo sapiens
  Table A; Target 40992; HLA-B*40:02; MAGEA8; ENSG00000156009; TAA
MQVIFGIDV

SEQ ID NO: 40993 - protein, 9 aa, Homo sapiens
  Table A; Target 40993; HLA-C*04:01; MAGEA8; ENSG00000156009; TAA
MQVIFGIDV

SEQ ID NO: 40994 - protein, 9 aa, Homo sapiens
  Table A; Target 40994; HLA-C*06:02; MAGEA8; ENSG00000156009; TAA
MQVIFGIDV

SEQ ID NO: 40995 - protein, 8 aa, Homo sapiens
  Table A; Target 40995; HLA-B*08:01; MAGEA8; ENSG00000156009; TAA
NARVRISY

SEQ ID NO: 40996 - protein, 8 aa, Homo sapiens
  Table A; Target 40996; HLA-C*16:01; MAGEA8; ENSG00000156009; TAA
NARVRISY

SEQ ID NO: 40997 - protein, 9 aa, Homo sapiens
  Table A; Target 40997; HLA-A*31:01; MAGEA8; ENSG00000156009; TAA
NHFPDIFSK

SEQ ID NO: 40998 - protein, 9 aa, Homo sapiens
  Table A; Target 40998; HLA-A*68:02; MAGEA8; ENSG00000156009; TAA
NHFPDIFSK

SEQ ID NO: 40999 - protein, 9 aa, Homo sapiens
  Table A; Target 40999; HLA-B*27:05; MAGEA8; ENSG00000156009; TAA
NHFPDIFSK

SEQ ID NO: 41000 - protein, 9 aa, Homo sapiens
  Table A; Target 41000; HLA-A*24:02; MAGEA8; ENSG00000156009; TAA
NYKNHFPDI

SEQ ID NO: 41001 - protein, 10 aa, Homo sapiens
  Table A; Target 41001; HLA-A*24:02; MAGEA8; ENSG00000156009; TAA
NYKNHFPDIF

SEQ ID NO: 41002 - protein, 9 aa, Homo sapiens
  Table A; Target 41002; HLA-C*14:02; MAGEA8; ENSG00000156009; TAA
NYLEYRQAP

SEQ ID NO: 41003 - protein, 9 aa, Homo sapiens
  Table A; Target 41003; HLA-B*07:02; MAGEA8; ENSG00000156009; TAA
PDPAHLESL

SEQ ID NO: 41004 - protein, 10 aa, Homo sapiens
  Table A; Target 41004; HLA-A*24:02; MAGEA8; ENSG00000156009; TAA
PGSDPVRYEF

SEQ ID NO: 41005 - protein, 10 aa, Homo sapiens
  Table A; Target 41005; HLA-B*07:02; MAGEA8; ENSG00000156009; TAA
PGSDPVRYEF

SEQ ID NO: 41006 - protein, 9 aa, Homo sapiens
  Table A; Target 41006; HLA-A*68:01; MAGEA8; ENSG00000156009; TAA
QAPGSDPVR

SEQ ID NO: 41007 - protein, 10 aa, Homo sapiens
  Table A; Target 41007; HLA-A*01:01; MAGEA8; ENSG00000156009; TAA
QAPGSDPVRY

SEQ ID NO: 41008 - protein, 10 aa, Homo sapiens
  Table A; Target 41008; HLA-A*26:01; MAGEA8; ENSG00000156009; TAA
QAPGSDPVRY

SEQ ID NO: 41009 - protein, 10 aa, Homo sapiens
  Table A; Target 41009; HLA-A*29:02; MAGEA8; ENSG00000156009; TAA
QAPGSDPVRY

SEQ ID NO: 41010 - protein, 10 aa, Homo sapiens
  Table A; Target 41010; HLA-A*30:02; MAGEA8; ENSG00000156009; TAA
QAPGSDPVRY

SEQ ID NO: 41011 - protein, 10 aa, Homo sapiens
  Table A; Target 41011; HLA-B*35:01; MAGEA8; ENSG00000156009; TAA
QAPGSDPVRY

SEQ ID NO: 41012 - protein, 10 aa, Homo sapiens
  Table A; Target 41012; HLA-B*55:01; MAGEA8; ENSG00000156009; TAA
QAPGSDPVRY

SEQ ID NO: 41013 - protein, 9 aa, Homo sapiens
  Table A; Target 41013; HLA-B*35:03; MAGEA8; ENSG00000156009; TAA
QAQGEAPGL

SEQ ID NO: 41014 - protein, 9 aa, Homo sapiens
  Table A; Target 41014; HLA-B*38:01; MAGEA8; ENSG00000156009; TAA
QAQGEAPGL

SEQ ID NO: 41015 - protein, 9 aa, Homo sapiens
  Table A; Target 41015; HLA-C*03:03; MAGEA8; ENSG00000156009; TAA
QAQGEAPGL

SEQ ID NO: 41016 - protein, 9 aa, Homo sapiens
  Table A; Target 41016; HLA-C*03:04; MAGEA8; ENSG00000156009; TAA
QAQGEAPGL

SEQ ID NO: 41017 - protein, 10 aa, Homo sapiens
  Table A; Target 41017; HLA-B*39:01; MAGEA8; ENSG00000156009; TAA
QAQGEAPGLM

SEQ ID NO: 41018 - protein, 10 aa, Homo sapiens
  Table A; Target 41018; HLA-C*07:01; MAGEA8; ENSG00000156009; TAA
QAQGEAPGLM

SEQ ID NO: 41019 - protein, 8 aa, Homo sapiens
  Table A; Target 41019; HLA-B*18:01; MAGEA8; ENSG00000156009; TAA
QEWVQENY

SEQ ID NO: 41020 - protein, 8 aa, Homo sapiens
  Table A; Target 41020; HLA-B*44:03; MAGEA8; ENSG00000156009; TAA
QEWVQENY

SEQ ID NO: 41021 - protein, 9 aa, Homo sapiens
  Table A; Target 41021; HLA-A*30:01; MAGEA8; ENSG00000156009; TAA
QEWVQENYL

SEQ ID NO: 41022 - protein, 9 aa, Homo sapiens
  Table A; Target 41022; HLA-B*18:01; MAGEA8; ENSG00000156009; TAA
QEWVQENYL

SEQ ID NO: 41023 - protein, 9 aa, Homo sapiens
  Table A; Target 41023; HLA-B*37:01; MAGEA8; ENSG00000156009; TAA
QEWVQENYL

SEQ ID NO: 41024 - protein, 9 aa, Homo sapiens
  Table A; Target 41024; HLA-B*40:01; MAGEA8; ENSG00000156009; TAA
QEWVQENYL

SEQ ID NO: 41025 - protein, 9 aa, Homo sapiens
  Table A; Target 41025; HLA-B*40:02; MAGEA8; ENSG00000156009; TAA
QEWVQENYL

SEQ ID NO: 41026 - protein, 9 aa, Homo sapiens
  Table A; Target 41026; HLA-B*44:02; MAGEA8; ENSG00000156009; TAA
QEWVQENYL

SEQ ID NO: 41027 - protein, 9 aa, Homo sapiens
  Table A; Target 41027; HLA-B*44:03; MAGEA8; ENSG00000156009; TAA
QEWVQENYL

SEQ ID NO: 41028 - protein, 9 aa, Homo sapiens
  Table A; Target 41028; HLA-B*49:01; MAGEA8; ENSG00000156009; TAA
QEWVQENYL

SEQ ID NO: 41029 - protein, 11 aa, Homo sapiens
  Table A; Target 41029; HLA-B*44:02; MAGEA8; ENSG00000156009; TAA
QEWVQENYLEY

SEQ ID NO: 41030 - protein, 11 aa, Homo sapiens
  Table A; Target 41030; HLA-B*44:03; MAGEA8; ENSG00000156009; TAA
QEWVQENYLEY

SEQ ID NO: 41031 - protein, 8 aa, Homo sapiens
  Table A; Target 41031; HLA-A*03:01; MAGEA8; ENSG00000156009; TAA
QIKEPVTK

SEQ ID NO: 41032 - protein, 8 aa, Homo sapiens
  Table A; Target 41032; HLA-A*03:02; MAGEA8; ENSG00000156009; TAA
QIKEPVTK

SEQ ID NO: 41033 - protein, 8 aa, Homo sapiens
  Table A; Target 41033; HLA-A*11:01; MAGEA8; ENSG00000156009; TAA
QIKEPVTK

SEQ ID NO: 41034 - protein, 8 aa, Homo sapiens
  Table A; Target 41034; HLA-A*31:01; MAGEA8; ENSG00000156009; TAA
QIKEPVTK

SEQ ID NO: 41035 - protein, 8 aa, Homo sapiens
  Table A; Target 41035; HLA-C*04:01; MAGEA8; ENSG00000156009; TAA
QIKEPVTK

SEQ ID NO: 41036 - protein, 8 aa, Homo sapiens
  Table A; Target 41036; HLA-C*06:02; MAGEA8; ENSG00000156009; TAA
QIKEPVTK

SEQ ID NO: 41037 - protein, 8 aa, Homo sapiens
  Table A; Target 41037; HLA-C*07:01; MAGEA8; ENSG00000156009; TAA
QIKEPVTK

SEQ ID NO: 41038 - protein, 8 aa, Homo sapiens
  Table A; Target 41038; HLA-C*07:02; MAGEA8; ENSG00000156009; TAA
QIKEPVTK

SEQ ID NO: 41039 - protein, 8 aa, Homo sapiens
  Table A; Target 41039; HLA-C*16:01; MAGEA8; ENSG00000156009; TAA
QIKEPVTK

SEQ ID NO: 41040 - protein, 9 aa, Homo sapiens
  Table A; Target 41040; HLA-A*02:03; MAGEA8; ENSG00000156009; TAA
QIKEPVTKA

SEQ ID NO: 41041 - protein, 9 aa, Homo sapiens
  Table A; Target 41041; HLA-A*31:01; MAGEA8; ENSG00000156009; TAA
QIKEPVTKA

SEQ ID NO: 41042 - protein, 9 aa, Homo sapiens
  Table A; Target 41042; HLA-A*32:01; MAGEA8; ENSG00000156009; TAA
QIKEPVTKA

SEQ ID NO: 41043 - protein, 9 aa, Homo sapiens
  Table A; Target 41043; HLA-B*08:01; MAGEA8; ENSG00000156009; TAA
QIKEPVTKA

SEQ ID NO: 41044 - protein, 9 aa, Homo sapiens
  Table A; Target 41044; HLA-B*54:01; MAGEA8; ENSG00000156009; TAA
QIKEPVTKA

SEQ ID NO: 41045 - protein, 9 aa, Homo sapiens
  Table A; Target 41045; HLA-B*55:01; MAGEA8; ENSG00000156009; TAA
QIKEPVTKA

SEQ ID NO: 41046 - protein, 9 aa, Homo sapiens
  Table A; Target 41046; HLA-B*27:05; MAGEA8; ENSG00000156009; TAA
QRYKAEEGL

SEQ ID NO: 41047 - protein, 9 aa, Homo sapiens
  Table A; Target 41047; HLA-B*38:01; MAGEA8; ENSG00000156009; TAA
QRYKAEEGL

SEQ ID NO: 41048 - protein, 9 aa, Homo sapiens
  Table A; Target 41048; HLA-C*06:02; MAGEA8; ENSG00000156009; TAA
QRYKAEEGL

SEQ ID NO: 41049 - protein, 9 aa, Homo sapiens
  Table A; Target 41049; HLA-C*07:01; MAGEA8; ENSG00000156009; TAA
QRYKAEEGL

SEQ ID NO: 41050 - protein, 9 aa, Homo sapiens
  Table A; Target 41050; HLA-C*07:04; MAGEA8; ENSG00000156009; TAA
QRYKAEEGL

SEQ ID NO: 41051 - protein, 9 aa, Homo sapiens
  Table A; Target 41051; HLA-C*05:01; MAGEA8; ENSG00000156009; TAA
QSDEGSSSN

SEQ ID NO: 41052 - protein, 10 aa, Homo sapiens
  Table A; Target 41052; HLA-C*01:02; MAGEA8; ENSG00000156009; TAA
QSPEGASSSL

SEQ ID NO: 41053 - protein, 8 aa, Homo sapiens
  Table A; Target 41053; HLA-B*08:01; MAGEA8; ENSG00000156009; TAA
QSTPKTGL

SEQ ID NO: 41054 - protein, 9 aa, Homo sapiens
  Table A; Target 41054; HLA-C*16:02; MAGEA8; ENSG00000156009; TAA
QSTPKTGLL

SEQ ID NO: 41055 - protein, 9 aa, Homo sapiens
  Table A; Target 41055; HLA-A*03:02; MAGEA8; ENSG00000156009; TAA
QVIFGIDVK

SEQ ID NO: 41056 - protein, 9 aa, Homo sapiens
  Table A; Target 41056; HLA-A*11:01; MAGEA8; ENSG00000156009; TAA
QVIFGIDVK

SEQ ID NO: 41057 - protein, 9 aa, Homo sapiens
  Table A; Target 41057; HLA-A*68:01; MAGEA8; ENSG00000156009; TAA
QVIFGIDVK

SEQ ID NO: 41058 - protein, 9 aa, Homo sapiens
  Table A; Target 41058; HLA-C*07:06; MAGEA8; ENSG00000156009; TAA
QVIFGIDVK

SEQ ID NO: 41059 - protein, 11 aa, Homo sapiens
  Table A; Target 41059; HLA-A*30:01; MAGEA8; ENSG00000156009; TAA
REALDEKVAEL

SEQ ID NO: 41060 - protein, 11 aa, Homo sapiens
  Table A; Target 41060; HLA-B*40:01; MAGEA8; ENSG00000156009; TAA
REALDEKVAEL

SEQ ID NO: 41061 - protein, 9 aa, Homo sapiens
  Table A; Target 41061; HLA-B*44:02; MAGEA8; ENSG00000156009; TAA
REHSVYWKL

SEQ ID NO: 41062 - protein, 9 aa, Homo sapiens
  Table A; Target 41062; HLA-B*44:03; MAGEA8; ENSG00000156009; TAA
REHSVYWKL

SEQ ID NO: 41063 - protein, 9 aa, Homo sapiens
  Table A; Target 41063; HLA-A*02:01; MAGEA8; ENSG00000156009; TAA
RQAPGSDPV

SEQ ID NO: 41064 - protein, 9 aa, Homo sapiens
  Table A; Target 41064; HLA-B*13:02; MAGEA8; ENSG00000156009; TAA
RQAPGSDPV

SEQ ID NO: 41065 - protein, 9 aa, Homo sapiens
  Table A; Target 41065; HLA-B*27:05; MAGEA8; ENSG00000156009; TAA
RQAPGSDPV

SEQ ID NO: 41066 - protein, 9 aa, Homo sapiens
  Table A; Target 41066; HLA-B*39:01; MAGEA8; ENSG00000156009; TAA
RQAPGSDPV

SEQ ID NO: 41067 - protein, 9 aa, Homo sapiens
  Table A; Target 41067; HLA-C*06:02; MAGEA8; ENSG00000156009; TAA
RQAPGSDPV

SEQ ID NO: 41068 - protein, 11 aa, Homo sapiens
  Table A; Target 41068; HLA-A*03:02; MAGEA8; ENSG00000156009; TAA
RQAPGSDPVRY

SEQ ID NO: 41069 - protein, 11 aa, Homo sapiens
  Table A; Target 41069; HLA-A*29:02; MAGEA8; ENSG00000156009; TAA
RQAPGSDPVRY

SEQ ID NO: 41070 - protein, 11 aa, Homo sapiens
  Table A; Target 41070; HLA-A*30:02; MAGEA8; ENSG00000156009; TAA
RQAPGSDPVRY

SEQ ID NO: 41071 - protein, 11 aa, Homo sapiens
  Table A; Target 41071; HLA-A*32:01; MAGEA8; ENSG00000156009; TAA
RQAPGSDPVRY

SEQ ID NO: 41072 - protein, 11 aa, Homo sapiens
  Table A; Target 41072; HLA-B*15:01; MAGEA8; ENSG00000156009; TAA
RQAPGSDPVRY

SEQ ID NO: 41073 - protein, 11 aa, Homo sapiens
  Table A; Target 41073; HLA-B*15:03; MAGEA8; ENSG00000156009; TAA
RQAPGSDPVRY

SEQ ID NO: 41074 - protein, 11 aa, Homo sapiens
  Table A; Target 41074; HLA-B*44:03; MAGEA8; ENSG00000156009; TAA
RQAPGSDPVRY

SEQ ID NO: 41075 - protein, 11 aa, Homo sapiens
  Table A; Target 41075; HLA-B*57:01; MAGEA8; ENSG00000156009; TAA
RQAPGSDPVRY

SEQ ID NO: 41076 - protein, 11 aa, Homo sapiens
  Table A; Target 41076; HLA-B*58:01; MAGEA8; ENSG00000156009; TAA
RQAPGSDPVRY

SEQ ID NO: 41077 - protein, 11 aa, Homo sapiens
  Table A; Target 41077; HLA-C*02:02; MAGEA8; ENSG00000156009; TAA
RQAPGSDPVRY

SEQ ID NO: 41078 - protein, 11 aa, Homo sapiens
  Table A; Target 41078; HLA-C*07:04; MAGEA8; ENSG00000156009; TAA
RQAPGSDPVRY

SEQ ID NO: 41079 - protein, 11 aa, Homo sapiens
  Table A; Target 41079; HLA-C*16:04; MAGEA8; ENSG00000156009; TAA
RQAPGSDPVRY

SEQ ID NO: 41080 - protein, 10 aa, Homo sapiens
  Table A; Target 41080; HLA-A*30:02; MAGEA8; ENSG00000156009; TAA
RVNARVRISY

SEQ ID NO: 41081 - protein, 10 aa, Homo sapiens
  Table A; Target 41081; HLA-A*32:01; MAGEA8; ENSG00000156009; TAA
RVNARVRISY

SEQ ID NO: 41082 - protein, 9 aa, Homo sapiens
  Table A; Target 41082; HLA-B*07:02; MAGEA8; ENSG00000156009; TAA
RVRISYPSL

SEQ ID NO: 41083 - protein, 8 aa, Homo sapiens
  Table A; Target 41083; HLA-B*37:01; MAGEA8; ENSG00000156009; TAA
SDPVRYEF

SEQ ID NO: 41084 - protein, 8 aa, Homo sapiens
  Table A; Target 41084; HLA-B*18:01; MAGEA8; ENSG00000156009; TAA
SECMQVIF

SEQ ID NO: 41085 - protein, 9 aa, Homo sapiens
  Table A; Target 41085; HLA-C*14:02; MAGEA8; ENSG00000156009; TAA
SLTVTDSTL

SEQ ID NO: 41086 - protein, 10 aa, Homo sapiens
  Table A; Target 41086; HLA-B*07:02; MAGEA8; ENSG00000156009; TAA
SPDPAHLESL

SEQ ID NO: 41087 - protein, 10 aa, Homo sapiens
  Table A; Target 41087; HLA-B*35:01; MAGEA8; ENSG00000156009; TAA
SPDPAHLESL

SEQ ID NO: 41088 - protein, 10 aa, Homo sapiens
  Table A; Target 41088; HLA-B*35:03; MAGEA8; ENSG00000156009; TAA
SPDPAHLESL

SEQ ID NO: 41089 - protein, 10 aa, Homo sapiens
  Table A; Target 41089; HLA-B*38:01; MAGEA8; ENSG00000156009; TAA
SPDPAHLESL

SEQ ID NO: 41090 - protein, 10 aa, Homo sapiens
  Table A; Target 41090; HLA-B*55:01; MAGEA8; ENSG00000156009; TAA
SPDPAHLESL

SEQ ID NO: 41091 - protein, 10 aa, Homo sapiens
  Table A; Target 41091; HLA-C*07:02; MAGEA8; ENSG00000156009; TAA
SPDPAHLESL

SEQ ID NO: 41092 - protein, 11 aa, Homo sapiens
  Table A; Target 41092; HLA-B*55:01; MAGEA8; ENSG00000156009; TAA
SPDPAHLESLF

SEQ ID NO: 41093 - protein, 9 aa, Homo sapiens
  Table A; Target 41093; HLA-B*07:02; MAGEA8; ENSG00000156009; TAA
SPEGASSSL

SEQ ID NO: 41094 - protein, 9 aa, Homo sapiens
  Table A; Target 41094; HLA-B*35:01; MAGEA8; ENSG00000156009; TAA
SPEGASSSL

SEQ ID NO: 41095 - protein, 9 aa, Homo sapiens
  Table A; Target 41095; HLA-B*35:03; MAGEA8; ENSG00000156009; TAA
SPEGASSSL

SEQ ID NO: 41096 - protein, 9 aa, Homo sapiens
  Table A; Target 41096; HLA-C*05:01; MAGEA8; ENSG00000156009; TAA
SPEGASSSL

SEQ ID NO: 41097 - protein, 9 aa, Homo sapiens
  Table A; Target 41097; HLA-C*07:02; MAGEA8; ENSG00000156009; TAA
SPEGASSSL

SEQ ID NO: 41098 - protein, 10 aa, Homo sapiens
  Table A; Target 41098; HLA-B*56:01; MAGEA8; ENSG00000156009; TAA
SPSPPQSPEG

SEQ ID NO: 41099 - protein, 11 aa, Homo sapiens
  Table A; Target 41099; HLA-B*56:01; MAGEA8; ENSG00000156009; TAA
SPSPPQSPEGA

SEQ ID NO: 41100 - protein, 11 aa, Homo sapiens
  Table A; Target 41100; HLA-A*25:01; MAGEA8; ENSG00000156009; TAA
SSLTVTDSTLW

SEQ ID NO: 41101 - protein, 11 aa, Homo sapiens
  Table A; Target 41101; HLA-B*57:01; MAGEA8; ENSG00000156009; TAA
SSLTVTDSTLW

SEQ ID NO: 41102 - protein, 11 aa, Homo sapiens
  Table A; Target 41102; HLA-B*58:01; MAGEA8; ENSG00000156009; TAA
SSLTVTDSTLW

SEQ ID NO: 41103 - protein, 8 aa, Homo sapiens
  Table A; Target 41103; HLA-C*16:01; MAGEA8; ENSG00000156009; TAA
SSSSTLIM

SEQ ID NO: 41104 - protein, 9 aa, Homo sapiens
  Table A; Target 41104; HLA-B*58:01; MAGEA8; ENSG00000156009; TAA
SSTLIMGTL

SEQ ID NO: 41105 - protein, 9 aa, Homo sapiens
  Table A; Target 41105; HLA-A*68:02; MAGEA8; ENSG00000156009; TAA
STSPDPAHL

SEQ ID NO: 41106 - protein, 9 aa, Homo sapiens
  Table A; Target 41106; HLA-A*03:02; MAGEA8; ENSG00000156009; TAA
SVMGLYDGR

SEQ ID NO: 41107 - protein, 9 aa, Homo sapiens
  Table A; Target 41107; HLA-A*11:01; MAGEA8; ENSG00000156009; TAA
SVMGLYDGR

SEQ ID NO: 41108 - protein, 9 aa, Homo sapiens
  Table A; Target 41108; HLA-A*26:01; MAGEA8; ENSG00000156009; TAA
SVMGLYDGR

SEQ ID NO: 41109 - protein, 9 aa, Homo sapiens
  Table A; Target 41109; HLA-A*31:01; MAGEA8; ENSG00000156009; TAA
SVMGLYDGR

SEQ ID NO: 41110 - protein, 9 aa, Homo sapiens
  Table A; Target 41110; HLA-A*33:01; MAGEA8; ENSG00000156009; TAA
SVMGLYDGR

SEQ ID NO: 41111 - protein, 9 aa, Homo sapiens
  Table A; Target 41111; HLA-A*33:03; MAGEA8; ENSG00000156009; TAA
SVMGLYDGR

SEQ ID NO: 41112 - protein, 9 aa, Homo sapiens
  Table A; Target 41112; HLA-A*68:01; MAGEA8; ENSG00000156009; TAA
SVMGLYDGR

SEQ ID NO: 41113 - protein, 9 aa, Homo sapiens
  Table A; Target 41113; HLA-C*07:06; MAGEA8; ENSG00000156009; TAA
SVMGLYDGR

SEQ ID NO: 41114 - protein, 8 aa, Homo sapiens
  Table A; Target 41114; HLA-A*23:01; MAGEA8; ENSG00000156009; TAA
SYILVTCL

SEQ ID NO: 41115 - protein, 8 aa, Homo sapiens
  Table A; Target 41115; HLA-A*24:02; MAGEA8; ENSG00000156009; TAA
SYILVTCL

SEQ ID NO: 41116 - protein, 8 aa, Homo sapiens
  Table A; Target 41116; HLA-C*14:02; MAGEA8; ENSG00000156009; TAA
SYILVTCL

SEQ ID NO: 41117 - protein, 9 aa, Homo sapiens
  Table A; Target 41117; HLA-A*23:01; MAGEA8; ENSG00000156009; TAA
SYVKVLEHV

SEQ ID NO: 41118 - protein, 9 aa, Homo sapiens
  Table A; Target 41118; HLA-A*24:02; MAGEA8; ENSG00000156009; TAA
SYVKVLEHV

SEQ ID NO: 41119 - protein, 9 aa, Homo sapiens
  Table A; Target 41119; HLA-C*04:01; MAGEA8; ENSG00000156009; TAA
TDSGSPSPP

SEQ ID NO: 41120 - protein, 9 aa, Homo sapiens
  Table A; Target 41120; HLA-C*07:04; MAGEA8; ENSG00000156009; TAA
TDSGSPSPP

SEQ ID NO: 41121 - protein, 10 aa, Homo sapiens
  Table A; Target 41121; HLA-C*04:01; MAGEA8; ENSG00000156009; TAA
TDSGSPSPPQ

SEQ ID NO: 41122 - protein, 10 aa, Homo sapiens
  Table A; Target 41122; HLA-A*02:01; MAGEA8; ENSG00000156009; TAA
TLIMGTLEEV

SEQ ID NO: 41123 - protein, 10 aa, Homo sapiens
  Table A; Target 41123; HLA-A*02:03; MAGEA8; ENSG00000156009; TAA
TLIMGTLEEV

SEQ ID NO: 41124 - protein, 10 aa, Homo sapiens
  Table A; Target 41124; HLA-A*02:04; MAGEA8; ENSG00000156009; TAA
TLIMGTLEEV

SEQ ID NO: 41125 - protein, 10 aa, Homo sapiens
  Table A; Target 41125; HLA-B*55:01; MAGEA8; ENSG00000156009; TAA
TLIMGTLEEV

SEQ ID NO: 41126 - protein, 8 aa, Homo sapiens
  Table A; Target 41126; HLA-B*51:01; MAGEA8; ENSG00000156009; TAA
TPKTGLLI

SEQ ID NO: 41127 - protein, 9 aa, Homo sapiens
  Table A; Target 41127; HLA-B*07:02; MAGEA8; ENSG00000156009; TAA
TPKTGLLII

SEQ ID NO: 41128 - protein, 9 aa, Homo sapiens
  Table A; Target 41128; HLA-B*51:01; MAGEA8; ENSG00000156009; TAA
TPKTGLLII

SEQ ID NO: 41129 - protein, 9 aa, Homo sapiens
  Table A; Target 41129; HLA-C*07:02; MAGEA8; ENSG00000156009; TAA
TPKTGLLII

SEQ ID NO: 41130 - protein, 9 aa, Homo sapiens
  Table A; Target 41130; HLA-A*30:02; MAGEA8; ENSG00000156009; TAA
TQEWVQENY

SEQ ID NO: 41131 - protein, 9 aa, Homo sapiens
  Table A; Target 41131; HLA-B*15:01; MAGEA8; ENSG00000156009; TAA
TQEWVQENY

SEQ ID NO: 41132 - protein, 9 aa, Homo sapiens
  Table A; Target 41132; HLA-B*15:03; MAGEA8; ENSG00000156009; TAA
TQEWVQENY

SEQ ID NO: 41133 - protein, 10 aa, Homo sapiens
  Table A; Target 41133; HLA-B*38:01; MAGEA8; ENSG00000156009; TAA
TQEWVQENYL

SEQ ID NO: 41134 - protein, 11 aa, Homo sapiens
  Table A; Target 41134; HLA-A*02:07; MAGEA8; ENSG00000156009; TAA
TSPDPAHLESL

SEQ ID NO: 41135 - protein, 9 aa, Homo sapiens
  Table A; Target 41135; HLA-A*03:01; MAGEA8; ENSG00000156009; TAA
TSYVKVLEH

SEQ ID NO: 41136 - protein, 9 aa, Homo sapiens
  Table A; Target 41136; HLA-A*11:01; MAGEA8; ENSG00000156009; TAA
TSYVKVLEH

SEQ ID NO: 41137 - protein, 9 aa, Homo sapiens
  Table A; Target 41137; HLA-C*02:02; MAGEA8; ENSG00000156009; TAA
TSYVKVLEH

SEQ ID NO: 41138 - protein, 9 aa, Homo sapiens
  Table A; Target 41138; HLA-C*07:06; MAGEA8; ENSG00000156009; TAA
TSYVKVLEH

SEQ ID NO: 41139 - protein, 9 aa, Homo sapiens
  Table A; Target 41139; HLA-C*12:03; MAGEA8; ENSG00000156009; TAA
TSYVKVLEH

SEQ ID NO: 41140 - protein, 10 aa, Homo sapiens
  Table A; Target 41140; HLA-A*68:02; MAGEA8; ENSG00000156009; TAA
TSYVKVLEHV

SEQ ID NO: 41141 - protein, 8 aa, Homo sapiens
  Table A; Target 41141; HLA-A*25:01; MAGEA8; ENSG00000156009; TAA
TVTDSTLW

SEQ ID NO: 41142 - protein, 8 aa, Homo sapiens
  Table A; Target 41142; HLA-A*32:01; MAGEA8; ENSG00000156009; TAA
TVTDSTLW

SEQ ID NO: 41143 - protein, 8 aa, Homo sapiens
  Table A; Target 41143; HLA-B*57:01; MAGEA8; ENSG00000156009; TAA
TVTDSTLW

SEQ ID NO: 41144 - protein, 8 aa, Homo sapiens
  Table A; Target 41144; HLA-B*58:01; MAGEA8; ENSG00000156009; TAA
TVTDSTLW

SEQ ID NO: 41145 - protein, 8 aa, Homo sapiens
  Table A; Target 41145; HLA-C*03:04; MAGEA8; ENSG00000156009; TAA
VAELVRFL

SEQ ID NO: 41146 - protein, 8 aa, Homo sapiens
  Table A; Target 41146; HLA-B*15:03; MAGEA8; ENSG00000156009; TAA
VDPAGHSY

SEQ ID NO: 41147 - protein, 8 aa, Homo sapiens
  Table A; Target 41147; HLA-C*07:01; MAGEA8; ENSG00000156009; TAA
VDPAGHSY

SEQ ID NO: 41148 - protein, 8 aa, Homo sapiens
  Table A; Target 41148; HLA-C*16:02; MAGEA8; ENSG00000156009; TAA
VDPAGHSY

SEQ ID NO: 41149 - protein, 10 aa, Homo sapiens
  Table A; Target 41149; HLA-A*02:01; MAGEA8; ENSG00000156009; TAA
VIFGIDVKEV

SEQ ID NO: 41150 - protein, 10 aa, Homo sapiens
  Table A; Target 41150; HLA-A*02:03; MAGEA8; ENSG00000156009; TAA
VIFGIDVKEV

SEQ ID NO: 41151 - protein, 10 aa, Homo sapiens
  Table A; Target 41151; HLA-A*02:04; MAGEA8; ENSG00000156009; TAA
VIFGIDVKEV

SEQ ID NO: 41152 - protein, 10 aa, Homo sapiens
  Table A; Target 41152; HLA-A*02:07; MAGEA8; ENSG00000156009; TAA
VIFGIDVKEV

SEQ ID NO: 41153 - protein, 10 aa, Homo sapiens
  Table A; Target 41153; HLA-A*68:02; MAGEA8; ENSG00000156009; TAA
VIFGIDVKEV

SEQ ID NO: 41154 - protein, 9 aa, Homo sapiens
  Table A; Target 41154; HLA-A*32:01; MAGEA8; ENSG00000156009; TAA
VNARVRISY

SEQ ID NO: 41155 - protein, 9 aa, Homo sapiens
  Table A; Target 41155; HLA-B*15:03; MAGEA8; ENSG00000156009; TAA
VNARVRISY

SEQ ID NO: 41156 - protein, 9 aa, Homo sapiens
  Table A; Target 41156; HLA-B*57:01; MAGEA8; ENSG00000156009; TAA
VNARVRISY

SEQ ID NO: 41157 - protein, 9 aa, Homo sapiens
  Table A; Target 41157; HLA-C*16:01; MAGEA8; ENSG00000156009; TAA
VNARVRISY

SEQ ID NO: 41158 - protein, 8 aa, Homo sapiens
  Table A; Target 41158; HLA-B*39:01; MAGEA8; ENSG00000156009; TAA
VQIPTAEE

SEQ ID NO: 41159 - protein, 9 aa, Homo sapiens
  Table A; Target 41159; HLA-B*13:02; MAGEA8; ENSG00000156009; TAA
VQIPTAEEQ

SEQ ID NO: 41160 - protein, 9 aa, Homo sapiens
  Table A; Target 41160; HLA-B*15:01; MAGEA8; ENSG00000156009; TAA
VQIPTAEEQ

SEQ ID NO: 41161 - protein, 9 aa, Homo sapiens
  Table A; Target 41161; HLA-B*15:03; MAGEA8; ENSG00000156009; TAA
VQIPTAEEQ

SEQ ID NO: 41162 - protein, 9 aa, Homo sapiens
  Table A; Target 41162; HLA-B*27:05; MAGEA8; ENSG00000156009; TAA
VQIPTAEEQ

SEQ ID NO: 41163 - protein, 9 aa, Homo sapiens
  Table A; Target 41163; HLA-B*39:01; MAGEA8; ENSG00000156009; TAA
VQIPTAEEQ

SEQ ID NO: 41164 - protein, 9 aa, Homo sapiens
  Table A; Target 41164; HLA-B*46:01; MAGEA8; ENSG00000156009; TAA
VQIPTAEEQ

SEQ ID NO: 41165 - protein, 9 aa, Homo sapiens
  Table A; Target 41165; HLA-C*07:04; MAGEA8; ENSG00000156009; TAA
VQIPTAEEQ

SEQ ID NO: 41166 - protein, 10 aa, Homo sapiens
  Table A; Target 41166; HLA-A*03:02; MAGEA8; ENSG00000156009; TAA
VQIPTAEEQK

SEQ ID NO: 41167 - protein, 10 aa, Homo sapiens
  Table A; Target 41167; HLA-A*11:01; MAGEA8; ENSG00000156009; TAA
VQIPTAEEQK

SEQ ID NO: 41168 - protein, 10 aa, Homo sapiens
  Table A; Target 41168; HLA-B*27:02; MAGEA8; ENSG00000156009; TAA
VQIPTAEEQK

SEQ ID NO: 41169 - protein, 10 aa, Homo sapiens
  Table A; Target 41169; HLA-B*27:05; MAGEA8; ENSG00000156009; TAA
VQIPTAEEQK

SEQ ID NO: 41170 - protein, 10 aa, Homo sapiens
  Table A; Target 41170; HLA-C*04:01; MAGEA8; ENSG00000156009; TAA
VQIPTAEEQK

SEQ ID NO: 41171 - protein, 11 aa, Homo sapiens
  Table A; Target 41171; HLA-A*30:01; MAGEA8; ENSG00000156009; TAA
VQIPTAEEQKA

SEQ ID NO: 41172 - protein, 11 aa, Homo sapiens
  Table A; Target 41172; HLA-B*13:02; MAGEA8; ENSG00000156009; TAA
VQIPTAEEQKA

SEQ ID NO: 41173 - protein, 11 aa, Homo sapiens
  Table A; Target 41173; HLA-B*27:05; MAGEA8; ENSG00000156009; TAA
VQIPTAEEQKA

SEQ ID NO: 41174 - protein, 11 aa, Homo sapiens
  Table A; Target 41174; HLA-C*06:02; MAGEA8; ENSG00000156009; TAA
VQIPTAEEQKA

SEQ ID NO: 41175 - protein, 10 aa, Homo sapiens
  Table A; Target 41175; HLA-A*01:01; MAGEA8; ENSG00000156009; TAA
VTDSGSPSPP

SEQ ID NO: 41176 - protein, 11 aa, Homo sapiens
  Table A; Target 41176; HLA-A*01:01; MAGEA8; ENSG00000156009; TAA
VTDSGSPSPPQ

SEQ ID NO: 41177 - protein, 11 aa, Homo sapiens
  Table A; Target 41177; HLA-A*03:02; MAGEA8; ENSG00000156009; TAA
VTDSGSPSPPQ

SEQ ID NO: 41178 - protein, 11 aa, Homo sapiens
  Table A; Target 41178; HLA-A*11:01; MAGEA8; ENSG00000156009; TAA
VTDSGSPSPPQ

SEQ ID NO: 41179 - protein, 11 aa, Homo sapiens
  Table A; Target 41179; HLA-B*27:05; MAGEA8; ENSG00000156009; TAA
VTDSGSPSPPQ

SEQ ID NO: 41180 - protein, 9 aa, Homo sapiens
  Table A; Target 41180; HLA-A*30:01; MAGEA8; ENSG00000156009; TAA
WEALSVMGL

SEQ ID NO: 41181 - protein, 9 aa, Homo sapiens
  Table A; Target 41181; HLA-B*37:01; MAGEA8; ENSG00000156009; TAA
WEALSVMGL

SEQ ID NO: 41182 - protein, 9 aa, Homo sapiens
  Table A; Target 41182; HLA-B*40:01; MAGEA8; ENSG00000156009; TAA
WEALSVMGL

SEQ ID NO: 41183 - protein, 9 aa, Homo sapiens
  Table A; Target 41183; HLA-B*40:02; MAGEA8; ENSG00000156009; TAA
WEALSVMGL

SEQ ID NO: 41184 - protein, 9 aa, Homo sapiens
  Table A; Target 41184; HLA-B*49:01; MAGEA8; ENSG00000156009; TAA
WEALSVMGL

SEQ ID NO: 41185 - protein, 9 aa, Homo sapiens
  Table A; Target 41185; HLA-B*46:01; MAGEA8; ENSG00000156009; TAA
WVQENYLEY

SEQ ID NO: 41186 - protein, 9 aa, Homo sapiens
  Table A; Target 41186; HLA-C*07:04; MAGEA8; ENSG00000156009; TAA
WVQENYLEY

SEQ ID NO: 41187 - protein, 8 aa, Homo sapiens
  Table A; Target 41187; HLA-C*06:02; MAGEA8; ENSG00000156009; TAA
YDGREHSV

SEQ ID NO: 41188 - protein, 8 aa, Homo sapiens
  Table A; Target 41188; HLA-C*07:01; MAGEA8; ENSG00000156009; TAA
YDGREHSV

SEQ ID NO: 41189 - protein, 8 aa, Homo sapiens
  Table A; Target 41189; HLA-C*07:04; MAGEA8; ENSG00000156009; TAA
YDGREHSV

SEQ ID NO: 41190 - protein, 9 aa, Homo sapiens
  Table A; Target 41190; HLA-A*01:01; MAGEA8; ENSG00000156009; TAA
YDGREHSVY

SEQ ID NO: 41191 - protein, 9 aa, Homo sapiens
  Table A; Target 41191; HLA-C*07:01; MAGEA8; ENSG00000156009; TAA
YDGREHSVY

SEQ ID NO: 41192 - protein, 9 aa, Homo sapiens
  Table A; Target 41192; HLA-B*15:03; MAGEA8; ENSG00000156009; TAA
YKAEEGLQA

SEQ ID NO: 41193 - protein, 9 aa, Homo sapiens
  Table A; Target 41193; HLA-B*39:01; MAGEA8; ENSG00000156009; TAA
YKAEEGLQA

SEQ ID NO: 41194 - protein, 8 aa, Homo sapiens
  Table A; Target 41194; HLA-B*54:01; MAGEA8; ENSG00000156009; TAA
YPSLHEEA

SEQ ID NO: 41195 - protein, 8 aa, Homo sapiens
  Table A; Target 41195; HLA-B*55:01; MAGEA8; ENSG00000156009; TAA
YPSLHEEA

SEQ ID NO: 41196 - protein, 8 aa, Homo sapiens
  Table A; Target 41196; HLA-B*56:01; MAGEA8; ENSG00000156009; TAA
YPSLHEEA

SEQ ID NO: 41197 - protein, 9 aa, Homo sapiens
  Table A; Target 41197; HLA-A*30:01; MAGEA8; ENSG00000156009; TAA
YPSLHEEAL

SEQ ID NO: 41198 - protein, 9 aa, Homo sapiens
  Table A; Target 41198; HLA-B*07:02; MAGEA8; ENSG00000156009; TAA
YPSLHEEAL

SEQ ID NO: 41199 - protein, 9 aa, Homo sapiens
  Table A; Target 41199; HLA-B*08:01; MAGEA8; ENSG00000156009; TAA
YPSLHEEAL

SEQ ID NO: 41200 - protein, 9 aa, Homo sapiens
  Table A; Target 41200; HLA-B*27:05; MAGEA8; ENSG00000156009; TAA
YPSLHEEAL

SEQ ID NO: 41201 - protein, 9 aa, Homo sapiens
  Table A; Target 41201; HLA-B*35:01; MAGEA8; ENSG00000156009; TAA
YPSLHEEAL

SEQ ID NO: 41202 - protein, 9 aa, Homo sapiens
  Table A; Target 41202; HLA-B*35:03; MAGEA8; ENSG00000156009; TAA
YPSLHEEAL

SEQ ID NO: 41203 - protein, 9 aa, Homo sapiens
  Table A; Target 41203; HLA-B*37:01; MAGEA8; ENSG00000156009; TAA
YPSLHEEAL

SEQ ID NO: 41204 - protein, 9 aa, Homo sapiens
  Table A; Target 41204; HLA-B*38:01; MAGEA8; ENSG00000156009; TAA
YPSLHEEAL

SEQ ID NO: 41205 - protein, 9 aa, Homo sapiens
  Table A; Target 41205; HLA-B*39:01; MAGEA8; ENSG00000156009; TAA
YPSLHEEAL

SEQ ID NO: 41206 - protein, 9 aa, Homo sapiens
  Table A; Target 41206; HLA-B*40:01; MAGEA8; ENSG00000156009; TAA
YPSLHEEAL

SEQ ID NO: 41207 - protein, 9 aa, Homo sapiens
  Table A; Target 41207; HLA-B*40:02; MAGEA8; ENSG00000156009; TAA
YPSLHEEAL

SEQ ID NO: 41208 - protein, 9 aa, Homo sapiens
  Table A; Target 41208; HLA-B*51:01; MAGEA8; ENSG00000156009; TAA
YPSLHEEAL

SEQ ID NO: 41209 - protein, 9 aa, Homo sapiens
  Table A; Target 41209; HLA-B*54:01; MAGEA8; ENSG00000156009; TAA
YPSLHEEAL

SEQ ID NO: 41210 - protein, 9 aa, Homo sapiens
  Table A; Target 41210; HLA-B*55:01; MAGEA8; ENSG00000156009; TAA
YPSLHEEAL

SEQ ID NO: 41211 - protein, 9 aa, Homo sapiens
  Table A; Target 41211; HLA-B*56:01; MAGEA8; ENSG00000156009; TAA
YPSLHEEAL

SEQ ID NO: 41212 - protein, 9 aa, Homo sapiens
  Table A; Target 41212; HLA-C*01:02; MAGEA8; ENSG00000156009; TAA
YPSLHEEAL

SEQ ID NO: 41213 - protein, 9 aa, Homo sapiens
  Table A; Target 41213; HLA-C*03:03; MAGEA8; ENSG00000156009; TAA
YPSLHEEAL

SEQ ID NO: 41214 - protein, 9 aa, Homo sapiens
  Table A; Target 41214; HLA-C*03:04; MAGEA8; ENSG00000156009; TAA
YPSLHEEAL

SEQ ID NO: 41215 - protein, 9 aa, Homo sapiens
  Table A; Target 41215; HLA-C*05:01; MAGEA8; ENSG00000156009; TAA
YPSLHEEAL

SEQ ID NO: 41216 - protein, 9 aa, Homo sapiens
  Table A; Target 41216; HLA-C*07:02; MAGEA8; ENSG00000156009; TAA
YPSLHEEAL

SEQ ID NO: 41217 - protein, 9 aa, Homo sapiens
  Table A; Target 41217; HLA-C*14:02; MAGEA8; ENSG00000156009; TAA
YPSLHEEAL

SEQ ID NO: 41218 - protein, 9 aa, Homo sapiens
  Table A; Target 41218; HLA-C*16:01; MAGEA8; ENSG00000156009; TAA
YPSLHEEAL

SEQ ID NO: 41219 - protein, 8 aa, Homo sapiens
  Table A; Target 41219; HLA-B*13:02; MAGEA8; ENSG00000156009; TAA
YQIKEPVT

SEQ ID NO: 41220 - protein, 9 aa, Homo sapiens
  Table A; Target 41220; HLA-A*02:01; MAGEA8; ENSG00000156009; TAA
YQIKEPVTK

SEQ ID NO: 41221 - protein, 9 aa, Homo sapiens
  Table A; Target 41221; HLA-A*02:03; MAGEA8; ENSG00000156009; TAA
YQIKEPVTK

SEQ ID NO: 41222 - protein, 9 aa, Homo sapiens
  Table A; Target 41222; HLA-A*03:01; MAGEA8; ENSG00000156009; TAA
YQIKEPVTK

SEQ ID NO: 41223 - protein, 9 aa, Homo sapiens
  Table A; Target 41223; HLA-A*03:02; MAGEA8; ENSG00000156009; TAA
YQIKEPVTK

SEQ ID NO: 41224 - protein, 9 aa, Homo sapiens
  Table A; Target 41224; HLA-A*11:01; MAGEA8; ENSG00000156009; TAA
YQIKEPVTK

SEQ ID NO: 41225 - protein, 9 aa, Homo sapiens
  Table A; Target 41225; HLA-A*31:01; MAGEA8; ENSG00000156009; TAA
YQIKEPVTK

SEQ ID NO: 41226 - protein, 9 aa, Homo sapiens
  Table A; Target 41226; HLA-A*32:01; MAGEA8; ENSG00000156009; TAA
YQIKEPVTK

SEQ ID NO: 41227 - protein, 9 aa, Homo sapiens
  Table A; Target 41227; HLA-A*68:02; MAGEA8; ENSG00000156009; TAA
YQIKEPVTK

SEQ ID NO: 41228 - protein, 9 aa, Homo sapiens
  Table A; Target 41228; HLA-B*13:02; MAGEA8; ENSG00000156009; TAA
YQIKEPVTK

SEQ ID NO: 41229 - protein, 9 aa, Homo sapiens
  Table A; Target 41229; HLA-B*15:01; MAGEA8; ENSG00000156009; TAA
YQIKEPVTK

SEQ ID NO: 41230 - protein, 9 aa, Homo sapiens
  Table A; Target 41230; HLA-B*15:03; MAGEA8; ENSG00000156009; TAA
YQIKEPVTK

SEQ ID NO: 41231 - protein, 9 aa, Homo sapiens
  Table A; Target 41231; HLA-B*27:05; MAGEA8; ENSG00000156009; TAA
YQIKEPVTK

SEQ ID NO: 41232 - protein, 9 aa, Homo sapiens
  Table A; Target 41232; HLA-B*38:01; MAGEA8; ENSG00000156009; TAA
YQIKEPVTK

SEQ ID NO: 41233 - protein, 9 aa, Homo sapiens
  Table A; Target 41233; HLA-B*39:01; MAGEA8; ENSG00000156009; TAA
YQIKEPVTK

SEQ ID NO: 41234 - protein, 9 aa, Homo sapiens
  Table A; Target 41234; HLA-B*40:02; MAGEA8; ENSG00000156009; TAA
YQIKEPVTK

SEQ ID NO: 41235 - protein, 9 aa, Homo sapiens
  Table A; Target 41235; HLA-B*49:01; MAGEA8; ENSG00000156009; TAA
YQIKEPVTK

SEQ ID NO: 41236 - protein, 9 aa, Homo sapiens
  Table A; Target 41236; HLA-B*57:01; MAGEA8; ENSG00000156009; TAA
YQIKEPVTK

SEQ ID NO: 41237 - protein, 9 aa, Homo sapiens
  Table A; Target 41237; HLA-B*58:01; MAGEA8; ENSG00000156009; TAA
YQIKEPVTK

SEQ ID NO: 41238 - protein, 9 aa, Homo sapiens
  Table A; Target 41238; HLA-C*02:02; MAGEA8; ENSG00000156009; TAA
YQIKEPVTK

SEQ ID NO: 41239 - protein, 9 aa, Homo sapiens
  Table A; Target 41239; HLA-C*03:03; MAGEA8; ENSG00000156009; TAA
YQIKEPVTK

SEQ ID NO: 41240 - protein, 9 aa, Homo sapiens
  Table A; Target 41240; HLA-C*03:04; MAGEA8; ENSG00000156009; TAA
YQIKEPVTK

SEQ ID NO: 41241 - protein, 9 aa, Homo sapiens
  Table A; Target 41241; HLA-C*05:01; MAGEA8; ENSG00000156009; TAA
YQIKEPVTK

SEQ ID NO: 41242 - protein, 9 aa, Homo sapiens
  Table A; Target 41242; HLA-C*06:02; MAGEA8; ENSG00000156009; TAA
YQIKEPVTK

SEQ ID NO: 41243 - protein, 9 aa, Homo sapiens
  Table A; Target 41243; HLA-C*07:04; MAGEA8; ENSG00000156009; TAA
YQIKEPVTK

SEQ ID NO: 41244 - protein, 9 aa, Homo sapiens
  Table A; Target 41244; HLA-C*07:06; MAGEA8; ENSG00000156009; TAA
YQIKEPVTK

SEQ ID NO: 41245 - protein, 9 aa, Homo sapiens
  Table A; Target 41245; HLA-C*12:03; MAGEA8; ENSG00000156009; TAA
YQIKEPVTK

SEQ ID NO: 41246 - protein, 9 aa, Homo sapiens
  Table A; Target 41246; HLA-C*16:04; MAGEA8; ENSG00000156009; TAA
YQIKEPVTK

SEQ ID NO: 41247 - protein, 10 aa, Homo sapiens
  Table A; Target 41247; HLA-A*02:03; MAGEA8; ENSG00000156009; TAA
YQIKEPVTKA

SEQ ID NO: 41248 - protein, 10 aa, Homo sapiens
  Table A; Target 41248; HLA-B*13:02; MAGEA8; ENSG00000156009; TAA
YQIKEPVTKA

SEQ ID NO: 41249 - protein, 10 aa, Homo sapiens
  Table A; Target 41249; HLA-B*54:01; MAGEA8; ENSG00000156009; TAA
YQIKEPVTKA

SEQ ID NO: 41250 - protein, 11 aa, Homo sapiens
  Table A; Target 41250; HLA-B*27:05; MAGEA8; ENSG00000156009; TAA
YRQAPGSDPVR

SEQ ID NO: 41251 - protein, 8 aa, Homo sapiens
  Table A; Target 41251; HLA-A*02:03; MAGEA8; ENSG00000156009; TAA
YVKVLEHV

SEQ ID NO: 41252 - protein, 8 aa, Homo sapiens
  Table A; Target 41252; HLA-B*08:01; MAGEA8; ENSG00000156009; TAA
YVKVLEHV

SEQ ID NO: 41253 - protein, 8 aa, Homo sapiens
  Table A; Target 41253; HLA-B*54:01; MAGEA8; ENSG00000156009; TAA
YVKVLEHV

SEQ ID NO: 41254 - protein, 9 aa, Homo sapiens
  Table A; Target 41254; HLA-A*02:01; MAGEA8; ENSG00000156009; TAA
YVKVLEHVV

SEQ ID NO: 41255 - protein, 9 aa, Homo sapiens
  Table A; Target 41255; HLA-A*02:03; MAGEA8; ENSG00000156009; TAA
YVKVLEHVV

SEQ ID NO: 41256 - protein, 9 aa, Homo sapiens
  Table A; Target 41256; HLA-A*02:04; MAGEA8; ENSG00000156009; TAA
YVKVLEHVV

SEQ ID NO: 41257 - protein, 9 aa, Homo sapiens
  Table A; Target 41257; HLA-A*02:07; MAGEA8; ENSG00000156009; TAA
YVKVLEHVV

SEQ ID NO: 41258 - protein, 9 aa, Homo sapiens
  Table A; Target 41258; HLA-A*30:01; MAGEA8; ENSG00000156009; TAA
YVKVLEHVV

SEQ ID NO: 41259 - protein, 9 aa, Homo sapiens
  Table A; Target 41259; HLA-A*32:01; MAGEA8; ENSG00000156009; TAA
YVKVLEHVV

SEQ ID NO: 41260 - protein, 9 aa, Homo sapiens
  Table A; Target 41260; HLA-A*68:02; MAGEA8; ENSG00000156009; TAA
YVKVLEHVV

SEQ ID NO: 41261 - protein, 9 aa, Homo sapiens
  Table A; Target 41261; HLA-B*08:01; MAGEA8; ENSG00000156009; TAA
YVKVLEHVV

SEQ ID NO: 41262 - protein, 9 aa, Homo sapiens
  Table A; Target 41262; HLA-B*13:02; MAGEA8; ENSG00000156009; TAA
YVKVLEHVV

SEQ ID NO: 41263 - protein, 9 aa, Homo sapiens
  Table A; Target 41263; HLA-B*40:02; MAGEA8; ENSG00000156009; TAA
YVKVLEHVV

SEQ ID NO: 41264 - protein, 9 aa, Homo sapiens
  Table A; Target 41264; HLA-B*51:01; MAGEA8; ENSG00000156009; TAA
YVKVLEHVV

SEQ ID NO: 41265 - protein, 9 aa, Homo sapiens
  Table A; Target 41265; HLA-B*54:01; MAGEA8; ENSG00000156009; TAA
YVKVLEHVV

SEQ ID NO: 41266 - protein, 9 aa, Homo sapiens
  Table A; Target 41266; HLA-C*02:02; MAGEA8; ENSG00000156009; TAA
YVKVLEHVV

SEQ ID NO: 41267 - protein, 9 aa, Homo sapiens
  Table A; Target 41267; HLA-C*04:01; MAGEA8; ENSG00000156009; TAA
YVKVLEHVV

SEQ ID NO: 41268 - protein, 9 aa, Homo sapiens
  Table A; Target 41268; HLA-C*07:01; MAGEA8; ENSG00000156009; TAA
YVKVLEHVV

SEQ ID NO: 41269 - protein, 9 aa, Homo sapiens
  Table A; Target 41269; HLA-C*07:04; MAGEA8; ENSG00000156009; TAA
YVKVLEHVV

SEQ ID NO: 41270 - protein, 9 aa, Homo sapiens
  Table A; Target 41270; HLA-C*12:03; MAGEA8; ENSG00000156009; TAA
YVKVLEHVV

SEQ ID NO: 41271 - protein, 9 aa, Homo sapiens
  Table A; Target 41271; HLA-C*16:02; MAGEA8; ENSG00000156009; TAA
YVKVLEHVV

SEQ ID NO: 41272 - protein, 10 aa, Homo sapiens
  Table A; Target 41272; HLA-A*31:01; MAGEA8; ENSG00000156009; TAA
YVKVLEHVVR

SEQ ID NO: 41273 - protein, 10 aa, Homo sapiens
  Table A; Target 41273; HLA-A*33:01; MAGEA8; ENSG00000156009; TAA
YVKVLEHVVR

SEQ ID NO: 41274 - protein, 8 aa, Homo sapiens
  Table A; Target 41274; HLA-B*51:01; MAGEA8,MAGEA9; ENSG00000156009,ENSG00000123584; TAA,CTA
DPAGHSYI

SEQ ID NO: 41275 - protein, 9 aa, Homo sapiens
  Table A; Target 41275; HLA-B*08:01; MAGEA8,MAGEA9; ENSG00000156009,ENSG00000123584; TAA,CTA
DPAGHSYIL

SEQ ID NO: 41276 - protein, 9 aa, Homo sapiens
  Table A; Target 41276; HLA-B*35:01; MAGEA8,MAGEA9; ENSG00000156009,ENSG00000123584; TAA,CTA
DPAGHSYIL

SEQ ID NO: 41277 - protein, 9 aa, Homo sapiens
  Table A; Target 41277; HLA-B*35:03; MAGEA8,MAGEA9; ENSG00000156009,ENSG00000123584; TAA,CTA
DPAGHSYIL

SEQ ID NO: 41278 - protein, 9 aa, Homo sapiens
  Table A; Target 41278; HLA-C*07:02; MAGEA8,MAGEA9; ENSG00000156009,ENSG00000123584; TAA,CTA
DPAGHSYIL

SEQ ID NO: 41279 - protein, 10 aa, Homo sapiens
  Table A; Target 41279; HLA-A*26:01; MAGEA8,MAGEA9; ENSG00000156009,ENSG00000123584; TAA,CTA
DVKEVDPAGH

SEQ ID NO: 41280 - protein, 10 aa, Homo sapiens
  Table A; Target 41280; HLA-A*68:01; MAGEA8,MAGEA9; ENSG00000156009,ENSG00000123584; TAA,CTA
DVKEVDPAGH

SEQ ID NO: 41281 - protein, 9 aa, Homo sapiens
  Table A; Target 41281; HLA-A*25:01; MAGEA8,MAGEA9; ENSG00000156009,ENSG00000123584; TAA,CTA
EVDPAGHSY

SEQ ID NO: 41282 - protein, 9 aa, Homo sapiens
  Table A; Target 41282; HLA-A*26:01; MAGEA8,MAGEA9; ENSG00000156009,ENSG00000123584; TAA,CTA
EVDPAGHSY

SEQ ID NO: 41283 - protein, 9 aa, Homo sapiens
  Table A; Target 41283; HLA-A*29:02; MAGEA8,MAGEA9; ENSG00000156009,ENSG00000123584; TAA,CTA
EVDPAGHSY

SEQ ID NO: 41284 - protein, 9 aa, Homo sapiens
  Table A; Target 41284; HLA-A*30:02; MAGEA8,MAGEA9; ENSG00000156009,ENSG00000123584; TAA,CTA
EVDPAGHSY

SEQ ID NO: 41285 - protein, 9 aa, Homo sapiens
  Table A; Target 41285; HLA-A*32:01; MAGEA8,MAGEA9; ENSG00000156009,ENSG00000123584; TAA,CTA
EVDPAGHSY

SEQ ID NO: 41286 - protein, 9 aa, Homo sapiens
  Table A; Target 41286; HLA-A*33:03; MAGEA8,MAGEA9; ENSG00000156009,ENSG00000123584; TAA,CTA
EVDPAGHSY

SEQ ID NO: 41287 - protein, 9 aa, Homo sapiens
  Table A; Target 41287; HLA-A*68:01; MAGEA8,MAGEA9; ENSG00000156009,ENSG00000123584; TAA,CTA
EVDPAGHSY

SEQ ID NO: 41288 - protein, 9 aa, Homo sapiens
  Table A; Target 41288; HLA-B*15:01; MAGEA8,MAGEA9; ENSG00000156009,ENSG00000123584; TAA,CTA
EVDPAGHSY

SEQ ID NO: 41289 - protein, 9 aa, Homo sapiens
  Table A; Target 41289; HLA-B*15:03; MAGEA8,MAGEA9; ENSG00000156009,ENSG00000123584; TAA,CTA
EVDPAGHSY

SEQ ID NO: 41290 - protein, 9 aa, Homo sapiens
  Table A; Target 41290; HLA-B*18:01; MAGEA8,MAGEA9; ENSG00000156009,ENSG00000123584; TAA,CTA
EVDPAGHSY

SEQ ID NO: 41291 - protein, 9 aa, Homo sapiens
  Table A; Target 41291; HLA-B*35:01; MAGEA8,MAGEA9; ENSG00000156009,ENSG00000123584; TAA,CTA
EVDPAGHSY

SEQ ID NO: 41292 - protein, 9 aa, Homo sapiens
  Table A; Target 41292; HLA-B*39:01; MAGEA8,MAGEA9; ENSG00000156009,ENSG00000123584; TAA,CTA
EVDPAGHSY

SEQ ID NO: 41293 - protein, 9 aa, Homo sapiens
  Table A; Target 41293; HLA-B*44:02; MAGEA8,MAGEA9; ENSG00000156009,ENSG00000123584; TAA,CTA
EVDPAGHSY

SEQ ID NO: 41294 - protein, 9 aa, Homo sapiens
  Table A; Target 41294; HLA-B*44:03; MAGEA8,MAGEA9; ENSG00000156009,ENSG00000123584; TAA,CTA
EVDPAGHSY

SEQ ID NO: 41295 - protein, 9 aa, Homo sapiens
  Table A; Target 41295; HLA-B*58:01; MAGEA8,MAGEA9; ENSG00000156009,ENSG00000123584; TAA,CTA
EVDPAGHSY

SEQ ID NO: 41296 - protein, 9 aa, Homo sapiens
  Table A; Target 41296; HLA-C*03:03; MAGEA8,MAGEA9; ENSG00000156009,ENSG00000123584; TAA,CTA
EVDPAGHSY

SEQ ID NO: 41297 - protein, 9 aa, Homo sapiens
  Table A; Target 41297; HLA-C*03:04; MAGEA8,MAGEA9; ENSG00000156009,ENSG00000123584; TAA,CTA
EVDPAGHSY

SEQ ID NO: 41298 - protein, 9 aa, Homo sapiens
  Table A; Target 41298; HLA-C*05:01; MAGEA8,MAGEA9; ENSG00000156009,ENSG00000123584; TAA,CTA
EVDPAGHSY

SEQ ID NO: 41299 - protein, 9 aa, Homo sapiens
  Table A; Target 41299; HLA-C*07:04; MAGEA8,MAGEA9; ENSG00000156009,ENSG00000123584; TAA,CTA
EVDPAGHSY

SEQ ID NO: 41300 - protein, 9 aa, Homo sapiens
  Table A; Target 41300; HLA-C*07:06; MAGEA8,MAGEA9; ENSG00000156009,ENSG00000123584; TAA,CTA
EVDPAGHSY

SEQ ID NO: 41301 - protein, 9 aa, Homo sapiens
  Table A; Target 41301; HLA-C*16:01; MAGEA8,MAGEA9; ENSG00000156009,ENSG00000123584; TAA,CTA
EVDPAGHSY

SEQ ID NO: 41302 - protein, 9 aa, Homo sapiens
  Table A; Target 41302; HLA-C*16:02; MAGEA8,MAGEA9; ENSG00000156009,ENSG00000123584; TAA,CTA
EVDPAGHSY

SEQ ID NO: 41303 - protein, 9 aa, Homo sapiens
  Table A; Target 41303; HLA-C*16:04; MAGEA8,MAGEA9; ENSG00000156009,ENSG00000123584; TAA,CTA
EVDPAGHSY

SEQ ID NO: 41304 - protein, 10 aa, Homo sapiens
  Table A; Target 41304; HLA-A*01:01; MAGEA8,MAGEA9; ENSG00000156009,ENSG00000123584; TAA,CTA
EVDPAGHSYI

SEQ ID NO: 41305 - protein, 10 aa, Homo sapiens
  Table A; Target 41305; HLA-A*25:01; MAGEA8,MAGEA9; ENSG00000156009,ENSG00000123584; TAA,CTA
EVDPAGHSYI

SEQ ID NO: 41306 - protein, 10 aa, Homo sapiens
  Table A; Target 41306; HLA-A*68:02; MAGEA8,MAGEA9; ENSG00000156009,ENSG00000123584; TAA,CTA
EVDPAGHSYI

SEQ ID NO: 41307 - protein, 10 aa, Homo sapiens
  Table A; Target 41307; HLA-B*38:01; MAGEA8,MAGEA9; ENSG00000156009,ENSG00000123584; TAA,CTA
EVDPAGHSYI

SEQ ID NO: 41308 - protein, 10 aa, Homo sapiens
  Table A; Target 41308; HLA-C*05:01; MAGEA8,MAGEA9; ENSG00000156009,ENSG00000123584; TAA,CTA
EVDPAGHSYI

SEQ ID NO: 41309 - protein, 11 aa, Homo sapiens
  Table A; Target 41309; HLA-A*01:01; MAGEA8,MAGEA9; ENSG00000156009,ENSG00000123584; TAA,CTA
EVDPAGHSYIL

SEQ ID NO: 41310 - protein, 11 aa, Homo sapiens
  Table A; Target 41310; HLA-A*02:07; MAGEA8,MAGEA9; ENSG00000156009,ENSG00000123584; TAA,CTA
EVDPAGHSYIL

SEQ ID NO: 41311 - protein, 11 aa, Homo sapiens
  Table A; Target 41311; HLA-B*38:01; MAGEA8,MAGEA9; ENSG00000156009,ENSG00000123584; TAA,CTA
EVDPAGHSYIL

SEQ ID NO: 41312 - protein, 9 aa, Homo sapiens
  Table A; Target 41312; HLA-B*37:01; MAGEA8,MAGEA9; ENSG00000156009,ENSG00000123584; TAA,CTA
KEPVTKAEM

SEQ ID NO: 41313 - protein, 9 aa, Homo sapiens
  Table A; Target 41313; HLA-B*40:01; MAGEA8,MAGEA9; ENSG00000156009,ENSG00000123584; TAA,CTA
KEPVTKAEM

SEQ ID NO: 41314 - protein, 10 aa, Homo sapiens
  Table A; Target 41314; HLA-B*40:01; MAGEA8,MAGEA9; ENSG00000156009,ENSG00000123584; TAA,CTA
KEPVTKAEML

SEQ ID NO: 41315 - protein, 10 aa, Homo sapiens
  Table A; Target 41315; HLA-A*25:01; MAGEA8,MAGEA9; ENSG00000156009,ENSG00000123584; TAA,CTA
KEVDPAGHSY

SEQ ID NO: 41316 - protein, 10 aa, Homo sapiens
  Table A; Target 41316; HLA-A*29:02; MAGEA8,MAGEA9; ENSG00000156009,ENSG00000123584; TAA,CTA
KEVDPAGHSY

SEQ ID NO: 41317 - protein, 10 aa, Homo sapiens
  Table A; Target 41317; HLA-A*30:01; MAGEA8,MAGEA9; ENSG00000156009,ENSG00000123584; TAA,CTA
KEVDPAGHSY

SEQ ID NO: 41318 - protein, 10 aa, Homo sapiens
  Table A; Target 41318; HLA-A*30:02; MAGEA8,MAGEA9; ENSG00000156009,ENSG00000123584; TAA,CTA
KEVDPAGHSY

SEQ ID NO: 41319 - protein, 10 aa, Homo sapiens
  Table A; Target 41319; HLA-A*32:01; MAGEA8,MAGEA9; ENSG00000156009,ENSG00000123584; TAA,CTA
KEVDPAGHSY

SEQ ID NO: 41320 - protein, 10 aa, Homo sapiens
  Table A; Target 41320; HLA-B*15:01; MAGEA8,MAGEA9; ENSG00000156009,ENSG00000123584; TAA,CTA
KEVDPAGHSY

SEQ ID NO: 41321 - protein, 10 aa, Homo sapiens
  Table A; Target 41321; HLA-B*15:03; MAGEA8,MAGEA9; ENSG00000156009,ENSG00000123584; TAA,CTA
KEVDPAGHSY

SEQ ID NO: 41322 - protein, 10 aa, Homo sapiens
  Table A; Target 41322; HLA-B*18:01; MAGEA8,MAGEA9; ENSG00000156009,ENSG00000123584; TAA,CTA
KEVDPAGHSY

SEQ ID NO: 41323 - protein, 10 aa, Homo sapiens
  Table A; Target 41323; HLA-B*27:02; MAGEA8,MAGEA9; ENSG00000156009,ENSG00000123584; TAA,CTA
KEVDPAGHSY

SEQ ID NO: 41324 - protein, 10 aa, Homo sapiens
  Table A; Target 41324; HLA-B*27:05; MAGEA8,MAGEA9; ENSG00000156009,ENSG00000123584; TAA,CTA
KEVDPAGHSY

SEQ ID NO: 41325 - protein, 10 aa, Homo sapiens
  Table A; Target 41325; HLA-B*37:01; MAGEA8,MAGEA9; ENSG00000156009,ENSG00000123584; TAA,CTA
KEVDPAGHSY

SEQ ID NO: 41326 - protein, 10 aa, Homo sapiens
  Table A; Target 41326; HLA-B*40:01; MAGEA8,MAGEA9; ENSG00000156009,ENSG00000123584; TAA,CTA
KEVDPAGHSY

SEQ ID NO: 41327 - protein, 10 aa, Homo sapiens
  Table A; Target 41327; HLA-C*02:02; MAGEA8,MAGEA9; ENSG00000156009,ENSG00000123584; TAA,CTA
KEVDPAGHSY

SEQ ID NO: 41328 - protein, 10 aa, Homo sapiens
  Table A; Target 41328; HLA-C*16:01; MAGEA8,MAGEA9; ENSG00000156009,ENSG00000123584; TAA,CTA
KEVDPAGHSY

SEQ ID NO: 41329 - protein, 10 aa, Homo sapiens
  Table A; Target 41329; HLA-C*16:02; MAGEA8,MAGEA9; ENSG00000156009,ENSG00000123584; TAA,CTA
KEVDPAGHSY

SEQ ID NO: 41330 - protein, 10 aa, Homo sapiens
  Table A; Target 41330; HLA-C*16:04; MAGEA8,MAGEA9; ENSG00000156009,ENSG00000123584; TAA,CTA
KEVDPAGHSY

SEQ ID NO: 41331 - protein, 11 aa, Homo sapiens
  Table A; Target 41331; HLA-B*40:01; MAGEA8,MAGEA9; ENSG00000156009,ENSG00000123584; TAA,CTA
KEVDPAGHSYI

SEQ ID NO: 41332 - protein, 11 aa, Homo sapiens
  Table A; Target 41332; HLA-B*49:01; MAGEA8,MAGEA9; ENSG00000156009,ENSG00000123584; TAA,CTA
KEVDPAGHSYI

SEQ ID NO: 41333 - protein, 8 aa, Homo sapiens
  Table A; Target 41333; HLA-B*18:01; MAGEA8,MAGEA9; ENSG00000156009,ENSG00000123584; TAA,CTA
LESVIKNY

SEQ ID NO: 41334 - protein, 8 aa, Homo sapiens
  Table A; Target 41334; HLA-A*30:02; MAGEA8,MAGEA9; ENSG00000156009,ENSG00000123584; TAA,CTA
VDPAGHSY

SEQ ID NO: 41335 - protein, 8 aa, Homo sapiens
  Table A; Target 41335; HLA-B*37:01; MAGEA8,MAGEA9; ENSG00000156009,ENSG00000123584; TAA,CTA
VDPAGHSY

SEQ ID NO: 41336 - protein, 8 aa, Homo sapiens
  Table A; Target 41336; HLA-C*01:02; MAGEA8,MAGEA9; ENSG00000156009,ENSG00000123584; TAA,CTA
VDPAGHSY

SEQ ID NO: 41337 - protein, 8 aa, Homo sapiens
  Table A; Target 41337; HLA-C*14:02; MAGEA8,MAGEA9; ENSG00000156009,ENSG00000123584; TAA,CTA
VDPAGHSY

SEQ ID NO: 41338 - protein, 11 aa, Homo sapiens
  Table A; Target 41338; HLA-B*15:03; MAGEA8,MAGEA9; ENSG00000156009,ENSG00000123584; TAA,CTA
VKEVDPAGHSY

SEQ ID NO: 41339 - protein, 9 aa, Homo sapiens
  Table A; Target 41339; HLA-A*01:01; MAGEA8,MAGEA9; ENSG00000156009,ENSG00000123584; TAA,CTA
WVQENYLEY

SEQ ID NO: 41340 - protein, 9 aa, Homo sapiens
  Table A; Target 41340; HLA-A*25:01; MAGEA8,MAGEA9; ENSG00000156009,ENSG00000123584; TAA,CTA
WVQENYLEY

SEQ ID NO: 41341 - protein, 9 aa, Homo sapiens
  Table A; Target 41341; HLA-A*26:01; MAGEA8,MAGEA9; ENSG00000156009,ENSG00000123584; TAA,CTA
WVQENYLEY

SEQ ID NO: 41342 - protein, 9 aa, Homo sapiens
  Table A; Target 41342; HLA-A*29:02; MAGEA8,MAGEA9; ENSG00000156009,ENSG00000123584; TAA,CTA
WVQENYLEY

SEQ ID NO: 41343 - protein, 9 aa, Homo sapiens
  Table A; Target 41343; HLA-A*30:02; MAGEA8,MAGEA9; ENSG00000156009,ENSG00000123584; TAA,CTA
WVQENYLEY

SEQ ID NO: 41344 - protein, 9 aa, Homo sapiens
  Table A; Target 41344; HLA-B*15:01; MAGEA8,MAGEA9; ENSG00000156009,ENSG00000123584; TAA,CTA
WVQENYLEY

SEQ ID NO: 41345 - protein, 9 aa, Homo sapiens
  Table A; Target 41345; HLA-B*35:01; MAGEA8,MAGEA9; ENSG00000156009,ENSG00000123584; TAA,CTA
WVQENYLEY

SEQ ID NO: 41346 - protein, 8 aa, Homo sapiens
  Table A; Target 41346; HLA-B*18:01; MAGEA8,MAGEC2; ENSG00000156009,ENSG00000046774; TAA,CTA
DEKVAELV

SEQ ID NO: 41347 - protein, 8 aa, Homo sapiens
  Table A; Target 41347; HLA-B*37:01; MAGEA8,MAGEC2; ENSG00000156009,ENSG00000046774; TAA,CTA
LDEKVAEL

SEQ ID NO: 41348 - protein, 11 aa, Homo sapiens
  Table A; Target 41348; HLA-B*44:02; MAGEA9; ENSG00000123584; CTA
AELVHFLLHKY

SEQ ID NO: 41349 - protein, 11 aa, Homo sapiens
  Table A; Target 41349; HLA-B*44:02; MAGEA9; ENSG00000123584; CTA
AEMLESVIKNY

SEQ ID NO: 41350 - protein, 11 aa, Homo sapiens
  Table A; Target 41350; HLA-B*44:03; MAGEA9; ENSG00000123584; CTA
AEMLESVIKNY

SEQ ID NO: 41351 - protein, 8 aa, Homo sapiens
  Table A; Target 41351; HLA-B*49:01; MAGEA9; ENSG00000123584; CTA
AETSYEKV

SEQ ID NO: 41352 - protein, 9 aa, Homo sapiens
  Table A; Target 41352; HLA-A*30:01; MAGEA9; ENSG00000123584; CTA
AETSYEKVI

SEQ ID NO: 41353 - protein, 9 aa, Homo sapiens
  Table A; Target 41353; HLA-B*13:02; MAGEA9; ENSG00000123584; CTA
AETSYEKVI

SEQ ID NO: 41354 - protein, 9 aa, Homo sapiens
  Table A; Target 41354; HLA-B*27:02; MAGEA9; ENSG00000123584; CTA
AETSYEKVI

SEQ ID NO: 41355 - protein, 9 aa, Homo sapiens
  Table A; Target 41355; HLA-B*40:01; MAGEA9; ENSG00000123584; CTA
AETSYEKVI

SEQ ID NO: 41356 - protein, 9 aa, Homo sapiens
  Table A; Target 41356; HLA-B*40:02; MAGEA9; ENSG00000123584; CTA
AETSYEKVI

SEQ ID NO: 41357 - protein, 9 aa, Homo sapiens
  Table A; Target 41357; HLA-B*44:02; MAGEA9; ENSG00000123584; CTA
AETSYEKVI

SEQ ID NO: 41358 - protein, 9 aa, Homo sapiens
  Table A; Target 41358; HLA-B*44:03; MAGEA9; ENSG00000123584; CTA
AETSYEKVI

SEQ ID NO: 41359 - protein, 9 aa, Homo sapiens
  Table A; Target 41359; HLA-B*49:01; MAGEA9; ENSG00000123584; CTA
AETSYEKVI

SEQ ID NO: 41360 - protein, 9 aa, Homo sapiens
  Table A; Target 41360; HLA-C*16:02; MAGEA9; ENSG00000123584; CTA
AETSYEKVI

SEQ ID NO: 41361 - protein, 9 aa, Homo sapiens
  Table A; Target 41361; HLA-C*16:04; MAGEA9; ENSG00000123584; CTA
AETSYEKVI

SEQ ID NO: 41362 - protein, 11 aa, Homo sapiens
  Table A; Target 41362; HLA-B*44:02; MAGEA9; ENSG00000123584; CTA
AETSYEKVINY

SEQ ID NO: 41363 - protein, 11 aa, Homo sapiens
  Table A; Target 41363; HLA-B*44:03; MAGEA9; ENSG00000123584; CTA
AETSYEKVINY

SEQ ID NO: 41364 - protein, 9 aa, Homo sapiens
  Table A; Target 41364; HLA-A*03:02; MAGEA9; ENSG00000123584; CTA
AHAETSYEK

SEQ ID NO: 41365 - protein, 9 aa, Homo sapiens
  Table A; Target 41365; HLA-A*11:01; MAGEA9; ENSG00000123584; CTA
AHAETSYEK

SEQ ID NO: 41366 - protein, 9 aa, Homo sapiens
  Table A; Target 41366; HLA-B*27:05; MAGEA9; ENSG00000123584; CTA
AHAETSYEK

SEQ ID NO: 41367 - protein, 10 aa, Homo sapiens
  Table A; Target 41367; HLA-B*38:01; MAGEA9; ENSG00000123584; CTA
AHAETSYEKV

SEQ ID NO: 41368 - protein, 11 aa, Homo sapiens
  Table A; Target 41368; HLA-B*38:01; MAGEA9; ENSG00000123584; CTA
AHAETSYEKVI

SEQ ID NO: 41369 - protein, 9 aa, Homo sapiens
  Table A; Target 41369; HLA-A*02:03; MAGEA9; ENSG00000123584; CTA
ALKLKVAEL

SEQ ID NO: 41370 - protein, 9 aa, Homo sapiens
  Table A; Target 41370; HLA-A*02:04; MAGEA9; ENSG00000123584; CTA
ALKLKVAEL

SEQ ID NO: 41371 - protein, 9 aa, Homo sapiens
  Table A; Target 41371; HLA-B*08:01; MAGEA9; ENSG00000123584; CTA
ALKLKVAEL

SEQ ID NO: 41372 - protein, 9 aa, Homo sapiens
  Table A; Target 41372; HLA-A*02:01; MAGEA9; ENSG00000123584; CTA
ALLIIVLGV

SEQ ID NO: 41373 - protein, 9 aa, Homo sapiens
  Table A; Target 41373; HLA-A*02:03; MAGEA9; ENSG00000123584; CTA
ALLIIVLGV

SEQ ID NO: 41374 - protein, 9 aa, Homo sapiens
  Table A; Target 41374; HLA-A*02:04; MAGEA9; ENSG00000123584; CTA
ALLIIVLGV

SEQ ID NO: 41375 - protein, 9 aa, Homo sapiens
  Table A; Target 41375; HLA-A*02:07; MAGEA9; ENSG00000123584; CTA
ALLIIVLGV

SEQ ID NO: 41376 - protein, 8 aa, Homo sapiens
  Table A; Target 41376; HLA-A*30:02; MAGEA9; ENSG00000123584; CTA
ALSVMGVY

SEQ ID NO: 41377 - protein, 8 aa, Homo sapiens
  Table A; Target 41377; HLA-B*15:01; MAGEA9; ENSG00000123584; CTA
ALSVMGVY

SEQ ID NO: 41378 - protein, 8 aa, Homo sapiens
  Table A; Target 41378; HLA-B*15:03; MAGEA9; ENSG00000123584; CTA
ALSVMGVY

SEQ ID NO: 41379 - protein, 9 aa, Homo sapiens
  Table A; Target 41379; HLA-A*02:01; MAGEA9; ENSG00000123584; CTA
ALSVMGVYV

SEQ ID NO: 41380 - protein, 9 aa, Homo sapiens
  Table A; Target 41380; HLA-A*02:03; MAGEA9; ENSG00000123584; CTA
ALSVMGVYV

SEQ ID NO: 41381 - protein, 9 aa, Homo sapiens
  Table A; Target 41381; HLA-A*02:04; MAGEA9; ENSG00000123584; CTA
ALSVMGVYV

SEQ ID NO: 41382 - protein, 9 aa, Homo sapiens
  Table A; Target 41382; HLA-A*02:07; MAGEA9; ENSG00000123584; CTA
ALSVMGVYV

SEQ ID NO: 41383 - protein, 9 aa, Homo sapiens
  Table A; Target 41383; HLA-B*13:02; MAGEA9; ENSG00000123584; CTA
ALSVMGVYV

SEQ ID NO: 41384 - protein, 9 aa, Homo sapiens
  Table A; Target 41384; HLA-B*37:01; MAGEA9; ENSG00000123584; CTA
ALSVMGVYV

SEQ ID NO: 41385 - protein, 9 aa, Homo sapiens
  Table A; Target 41385; HLA-B*55:01; MAGEA9; ENSG00000123584; CTA
ALSVMGVYV

SEQ ID NO: 41386 - protein, 9 aa, Homo sapiens
  Table A; Target 41386; HLA-C*04:01; MAGEA9; ENSG00000123584; CTA
ALSVMGVYV

SEQ ID NO: 41387 - protein, 11 aa, Homo sapiens
  Table A; Target 41387; HLA-A*03:01; MAGEA9; ENSG00000123584; CTA
ALSVMGVYVGK

SEQ ID NO: 41388 - protein, 11 aa, Homo sapiens
  Table A; Target 41388; HLA-A*03:02; MAGEA9; ENSG00000123584; CTA
ALSVMGVYVGK

SEQ ID NO: 41389 - protein, 9 aa, Homo sapiens
  Table A; Target 41389; HLA-B*54:01; MAGEA9; ENSG00000123584; CTA
APEEVIWEA

SEQ ID NO: 41390 - protein, 9 aa, Homo sapiens
  Table A; Target 41390; HLA-B*56:01; MAGEA9; ENSG00000123584; CTA
APEEVIWEA

SEQ ID NO: 41391 - protein, 10 aa, Homo sapiens
  Table A; Target 41391; HLA-B*35:03; MAGEA9; ENSG00000123584; CTA
APEEVIWEAL

SEQ ID NO: 41392 - protein, 8 aa, Homo sapiens
  Table A; Target 41392; HLA-A*30:02; MAGEA9; ENSG00000123584; CTA
ASSSISVY

SEQ ID NO: 41393 - protein, 8 aa, Homo sapiens
  Table A; Target 41393; HLA-B*15:01; MAGEA9; ENSG00000123584; CTA
ASSSISVY

SEQ ID NO: 41394 - protein, 8 aa, Homo sapiens
  Table A; Target 41394; HLA-B*15:03; MAGEA9; ENSG00000123584; CTA
ASSSISVY

SEQ ID NO: 41395 - protein, 8 aa, Homo sapiens
  Table A; Target 41395; HLA-C*16:01; MAGEA9; ENSG00000123584; CTA
ASSSISVY

SEQ ID NO: 41396 - protein, 9 aa, Homo sapiens
  Table A; Target 41396; HLA-A*01:01; MAGEA9; ENSG00000123584; CTA
ASSSISVYY

SEQ ID NO: 41397 - protein, 9 aa, Homo sapiens
  Table A; Target 41397; HLA-A*03:01; MAGEA9; ENSG00000123584; CTA
ASSSISVYY

SEQ ID NO: 41398 - protein, 9 aa, Homo sapiens
  Table A; Target 41398; HLA-A*03:02; MAGEA9; ENSG00000123584; CTA
ASSSISVYY

SEQ ID NO: 41399 - protein, 9 aa, Homo sapiens
  Table A; Target 41399; HLA-A*11:01; MAGEA9; ENSG00000123584; CTA
ASSSISVYY

SEQ ID NO: 41400 - protein, 9 aa, Homo sapiens
  Table A; Target 41400; HLA-A*26:01; MAGEA9; ENSG00000123584; CTA
ASSSISVYY

SEQ ID NO: 41401 - protein, 9 aa, Homo sapiens
  Table A; Target 41401; HLA-A*29:02; MAGEA9; ENSG00000123584; CTA
ASSSISVYY

SEQ ID NO: 41402 - protein, 9 aa, Homo sapiens
  Table A; Target 41402; HLA-A*30:02; MAGEA9; ENSG00000123584; CTA
ASSSISVYY

SEQ ID NO: 41403 - protein, 9 aa, Homo sapiens
  Table A; Target 41403; HLA-A*31:01; MAGEA9; ENSG00000123584; CTA
ASSSISVYY

SEQ ID NO: 41404 - protein, 9 aa, Homo sapiens
  Table A; Target 41404; HLA-A*32:01; MAGEA9; ENSG00000123584; CTA
ASSSISVYY

SEQ ID NO: 41405 - protein, 9 aa, Homo sapiens
  Table A; Target 41405; HLA-A*68:01; MAGEA9; ENSG00000123584; CTA
ASSSISVYY

SEQ ID NO: 41406 - protein, 9 aa, Homo sapiens
  Table A; Target 41406; HLA-B*15:01; MAGEA9; ENSG00000123584; CTA
ASSSISVYY

SEQ ID NO: 41407 - protein, 9 aa, Homo sapiens
  Table A; Target 41407; HLA-B*15:03; MAGEA9; ENSG00000123584; CTA
ASSSISVYY

SEQ ID NO: 41408 - protein, 9 aa, Homo sapiens
  Table A; Target 41408; HLA-B*27:02; MAGEA9; ENSG00000123584; CTA
ASSSISVYY

SEQ ID NO: 41409 - protein, 9 aa, Homo sapiens
  Table A; Target 41409; HLA-B*27:05; MAGEA9; ENSG00000123584; CTA
ASSSISVYY

SEQ ID NO: 41410 - protein, 9 aa, Homo sapiens
  Table A; Target 41410; HLA-B*44:03; MAGEA9; ENSG00000123584; CTA
ASSSISVYY

SEQ ID NO: 41411 - protein, 9 aa, Homo sapiens
  Table A; Target 41411; HLA-B*46:01; MAGEA9; ENSG00000123584; CTA
ASSSISVYY

SEQ ID NO: 41412 - protein, 9 aa, Homo sapiens
  Table A; Target 41412; HLA-B*57:01; MAGEA9; ENSG00000123584; CTA
ASSSISVYY

SEQ ID NO: 41413 - protein, 9 aa, Homo sapiens
  Table A; Target 41413; HLA-B*58:01; MAGEA9; ENSG00000123584; CTA
ASSSISVYY

SEQ ID NO: 41414 - protein, 9 aa, Homo sapiens
  Table A; Target 41414; HLA-C*02:02; MAGEA9; ENSG00000123584; CTA
ASSSISVYY

SEQ ID NO: 41415 - protein, 9 aa, Homo sapiens
  Table A; Target 41415; HLA-C*07:04; MAGEA9; ENSG00000123584; CTA
ASSSISVYY

SEQ ID NO: 41416 - protein, 9 aa, Homo sapiens
  Table A; Target 41416; HLA-C*07:06; MAGEA9; ENSG00000123584; CTA
ASSSISVYY

SEQ ID NO: 41417 - protein, 9 aa, Homo sapiens
  Table A; Target 41417; HLA-C*12:03; MAGEA9; ENSG00000123584; CTA
ASSSISVYY

SEQ ID NO: 41418 - protein, 9 aa, Homo sapiens
  Table A; Target 41418; HLA-C*16:01; MAGEA9; ENSG00000123584; CTA
ASSSISVYY

SEQ ID NO: 41419 - protein, 9 aa, Homo sapiens
  Table A; Target 41419; HLA-C*16:02; MAGEA9; ENSG00000123584; CTA
ASSSISVYY

SEQ ID NO: 41420 - protein, 9 aa, Homo sapiens
  Table A; Target 41420; HLA-C*16:04; MAGEA9; ENSG00000123584; CTA
ASSSISVYY

SEQ ID NO: 41421 - protein, 9 aa, Homo sapiens
  Table A; Target 41421; HLA-B*35:01; MAGEA9; ENSG00000123584; CTA
DPAQLEFMF

SEQ ID NO: 41422 - protein, 9 aa, Homo sapiens
  Table A; Target 41422; HLA-B*35:03; MAGEA9; ENSG00000123584; CTA
DPAQLEFMF

SEQ ID NO: 41423 - protein, 10 aa, Homo sapiens
  Table A; Target 41423; HLA-A*25:01; MAGEA9; ENSG00000123584; CTA
DSMLGDGHSM

SEQ ID NO: 41424 - protein, 10 aa, Homo sapiens
  Table A; Target 41424; HLA-A*26:01; MAGEA9; ENSG00000123584; CTA
DSMLGDGHSM

SEQ ID NO: 41425 - protein, 10 aa, Homo sapiens
  Table A; Target 41425; HLA-A*33:01; MAGEA9; ENSG00000123584; CTA
DSMLGDGHSM

SEQ ID NO: 41426 - protein, 10 aa, Homo sapiens
  Table A; Target 41426; HLA-C*03:03; MAGEA9; ENSG00000123584; CTA
DSMLGDGHSM

SEQ ID NO: 41427 - protein, 10 aa, Homo sapiens
  Table A; Target 41427; HLA-C*07:06; MAGEA9; ENSG00000123584; CTA
DSMLGDGHSM

SEQ ID NO: 41428 - protein, 8 aa, Homo sapiens
  Table A; Target 41428; HLA-B*51:01; MAGEA9; ENSG00000123584; CTA
EALSVMGV

SEQ ID NO: 41429 - protein, 9 aa, Homo sapiens
  Table A; Target 41429; HLA-A*25:01; MAGEA9; ENSG00000123584; CTA
EALSVMGVY

SEQ ID NO: 41430 - protein, 9 aa, Homo sapiens
  Table A; Target 41430; HLA-A*26:01; MAGEA9; ENSG00000123584; CTA
EALSVMGVY

SEQ ID NO: 41431 - protein, 9 aa, Homo sapiens
  Table A; Target 41431; HLA-A*29:02; MAGEA9; ENSG00000123584; CTA
EALSVMGVY

SEQ ID NO: 41432 - protein, 9 aa, Homo sapiens
  Table A; Target 41432; HLA-A*30:02; MAGEA9; ENSG00000123584; CTA
EALSVMGVY

SEQ ID NO: 41433 - protein, 9 aa, Homo sapiens
  Table A; Target 41433; HLA-A*33:01; MAGEA9; ENSG00000123584; CTA
EALSVMGVY

SEQ ID NO: 41434 - protein, 9 aa, Homo sapiens
  Table A; Target 41434; HLA-A*33:03; MAGEA9; ENSG00000123584; CTA
EALSVMGVY

SEQ ID NO: 41435 - protein, 9 aa, Homo sapiens
  Table A; Target 41435; HLA-B*18:01; MAGEA9; ENSG00000123584; CTA
EALSVMGVY

SEQ ID NO: 41436 - protein, 9 aa, Homo sapiens
  Table A; Target 41436; HLA-B*35:01; MAGEA9; ENSG00000123584; CTA
EALSVMGVY

SEQ ID NO: 41437 - protein, 9 aa, Homo sapiens
  Table A; Target 41437; HLA-C*07:06; MAGEA9; ENSG00000123584; CTA
EALSVMGVY

SEQ ID NO: 41438 - protein, 10 aa, Homo sapiens
  Table A; Target 41438; HLA-A*68:01; MAGEA9; ENSG00000123584; CTA
EALSVMGVYV

SEQ ID NO: 41439 - protein, 10 aa, Homo sapiens
  Table A; Target 41439; HLA-A*68:02; MAGEA9; ENSG00000123584; CTA
EALSVMGVYV

SEQ ID NO: 41440 - protein, 9 aa, Homo sapiens
  Table A; Target 41440; HLA-B*35:03; MAGEA9; ENSG00000123584; CTA
EAQGEDLGL

SEQ ID NO: 41441 - protein, 9 aa, Homo sapiens
  Table A; Target 41441; HLA-B*49:01; MAGEA9; ENSG00000123584; CTA
EEEEPSSSV

SEQ ID NO: 41442 - protein, 8 aa, Homo sapiens
  Table A; Target 41442; HLA-B*18:01; MAGEA9; ENSG00000123584; CTA
EEVIWEAL

SEQ ID NO: 41443 - protein, 10 aa, Homo sapiens
  Table A; Target 41443; HLA-A*29:02; MAGEA9; ENSG00000123584; CTA
ELVHFLLHKY

SEQ ID NO: 41444 - protein, 9 aa, Homo sapiens
  Table A; Target 41444; HLA-A*26:01; MAGEA9; ENSG00000123584; CTA
EPICYPSLY

SEQ ID NO: 41445 - protein, 9 aa, Homo sapiens
  Table A; Target 41445; HLA-B*35:01; MAGEA9; ENSG00000123584; CTA
EPICYPSLY

SEQ ID NO: 41446 - protein, 9 aa, Homo sapiens
  Table A; Target 41446; HLA-A*33:03; MAGEA9; ENSG00000123584; CTA
ESVIKNYKR

SEQ ID NO: 41447 - protein, 9 aa, Homo sapiens
  Table A; Target 41447; HLA-A*68:01; MAGEA9; ENSG00000123584; CTA
ESVIKNYKR

SEQ ID NO: 41448 - protein, 10 aa, Homo sapiens
  Table A; Target 41448; HLA-A*01:01; MAGEA9; ENSG00000123584; CTA
ETSYEKVINY

SEQ ID NO: 41449 - protein, 10 aa, Homo sapiens
  Table A; Target 41449; HLA-A*25:01; MAGEA9; ENSG00000123584; CTA
ETSYEKVINY

SEQ ID NO: 41450 - protein, 10 aa, Homo sapiens
  Table A; Target 41450; HLA-A*26:01; MAGEA9; ENSG00000123584; CTA
ETSYEKVINY

SEQ ID NO: 41451 - protein, 10 aa, Homo sapiens
  Table A; Target 41451; HLA-A*33:03; MAGEA9; ENSG00000123584; CTA
ETSYEKVINY

SEQ ID NO: 41452 - protein, 10 aa, Homo sapiens
  Table A; Target 41452; HLA-A*68:01; MAGEA9; ENSG00000123584; CTA
ETSYEKVINY

SEQ ID NO: 41453 - protein, 11 aa, Homo sapiens
  Table A; Target 41453; HLA-A*68:01; MAGEA9; ENSG00000123584; CTA
ETSYEKVINYL

SEQ ID NO: 41454 - protein, 11 aa, Homo sapiens
  Table A; Target 41454; HLA-A*68:02; MAGEA9; ENSG00000123584; CTA
ETSYEKVINYL

SEQ ID NO: 41455 - protein, 9 aa, Homo sapiens
  Table A; Target 41455; HLA-A*01:01; MAGEA9; ENSG00000123584; CTA
EVDPAGHSY

SEQ ID NO: 41456 - protein, 9 aa, Homo sapiens
  Table A; Target 41456; HLA-A*25:01; MAGEA9; ENSG00000123584; CTA
EVIWEALSV

SEQ ID NO: 41457 - protein, 9 aa, Homo sapiens
  Table A; Target 41457; HLA-A*26:01; MAGEA9; ENSG00000123584; CTA
EVIWEALSV

SEQ ID NO: 41458 - protein, 9 aa, Homo sapiens
  Table A; Target 41458; HLA-A*68:02; MAGEA9; ENSG00000123584; CTA
EVIWEALSV

SEQ ID NO: 41459 - protein, 10 aa, Homo sapiens
  Table A; Target 41459; HLA-A*25:01; MAGEA9; ENSG00000123584; CTA
EVIWEALSVM

SEQ ID NO: 41460 - protein, 10 aa, Homo sapiens
  Table A; Target 41460; HLA-A*26:01; MAGEA9; ENSG00000123584; CTA
EVIWEALSVM

SEQ ID NO: 41461 - protein, 10 aa, Homo sapiens
  Table A; Target 41461; HLA-A*26:01; MAGEA9; ENSG00000123584; CTA
EVLGEEQEGV

SEQ ID NO: 41462 - protein, 8 aa, Homo sapiens
  Table A; Target 41462; HLA-C*03:04; MAGEA9; ENSG00000123584; CTA
FGTDVKEV

SEQ ID NO: 41463 - protein, 8 aa, Homo sapiens
  Table A; Target 41463; HLA-C*16:01; MAGEA9; ENSG00000123584; CTA
FGTDVKEV

SEQ ID NO: 41464 - protein, 8 aa, Homo sapiens
  Table A; Target 41464; HLA-C*16:02; MAGEA9; ENSG00000123584; CTA
FGTDVKEV

SEQ ID NO: 41465 - protein, 9 aa, Homo sapiens
  Table A; Target 41465; HLA-A*02:01; MAGEA9; ENSG00000123584; CTA
FMFQEALKL

SEQ ID NO: 41466 - protein, 9 aa, Homo sapiens
  Table A; Target 41466; HLA-A*02:03; MAGEA9; ENSG00000123584; CTA
FMFQEALKL

SEQ ID NO: 41467 - protein, 9 aa, Homo sapiens
  Table A; Target 41467; HLA-A*02:04; MAGEA9; ENSG00000123584; CTA
FMFQEALKL

SEQ ID NO: 41468 - protein, 9 aa, Homo sapiens
  Table A; Target 41468; HLA-A*02:07; MAGEA9; ENSG00000123584; CTA
FMFQEALKL

SEQ ID NO: 41469 - protein, 9 aa, Homo sapiens
  Table A; Target 41469; HLA-A*29:02; MAGEA9; ENSG00000123584; CTA
FMFQEALKL

SEQ ID NO: 41470 - protein, 9 aa, Homo sapiens
  Table A; Target 41470; HLA-B*13:02; MAGEA9; ENSG00000123584; CTA
FMFQEALKL

SEQ ID NO: 41471 - protein, 9 aa, Homo sapiens
  Table A; Target 41471; HLA-C*02:02; MAGEA9; ENSG00000123584; CTA
FMFQEALKL

SEQ ID NO: 41472 - protein, 8 aa, Homo sapiens
  Table A; Target 41472; HLA-B*54:01; MAGEA9; ENSG00000123584; CTA
FPVIFGKA

SEQ ID NO: 41473 - protein, 8 aa, Homo sapiens
  Table A; Target 41473; HLA-B*56:01; MAGEA9; ENSG00000123584; CTA
FPVIFGKA

SEQ ID NO: 41474 - protein, 9 aa, Homo sapiens
  Table A; Target 41474; HLA-B*54:01; MAGEA9; ENSG00000123584; CTA
FPVIFGKAS

SEQ ID NO: 41475 - protein, 11 aa, Homo sapiens
  Table A; Target 41475; HLA-B*35:01; MAGEA9; ENSG00000123584; CTA
FPVIFGKASEF

SEQ ID NO: 41476 - protein, 9 aa, Homo sapiens
  Table A; Target 41476; HLA-B*13:02; MAGEA9; ENSG00000123584; CTA
FQEALKLKV

SEQ ID NO: 41477 - protein, 9 aa, Homo sapiens
  Table A; Target 41477; HLA-A*24:02; MAGEA9; ENSG00000123584; CTA
FYGEPRKLL

SEQ ID NO: 41478 - protein, 9 aa, Homo sapiens
  Table A; Target 41478; HLA-A*25:01; MAGEA9; ENSG00000123584; CTA
GASSSISVY

SEQ ID NO: 41479 - protein, 9 aa, Homo sapiens
  Table A; Target 41479; HLA-A*26:01; MAGEA9; ENSG00000123584; CTA
GASSSISVY

SEQ ID NO: 41480 - protein, 9 aa, Homo sapiens
  Table A; Target 41480; HLA-A*29:02; MAGEA9; ENSG00000123584; CTA
GASSSISVY

SEQ ID NO: 41481 - protein, 9 aa, Homo sapiens
  Table A; Target 41481; HLA-A*30:02; MAGEA9; ENSG00000123584; CTA
GASSSISVY

SEQ ID NO: 41482 - protein, 9 aa, Homo sapiens
  Table A; Target 41482; HLA-A*32:01; MAGEA9; ENSG00000123584; CTA
GASSSISVY

SEQ ID NO: 41483 - protein, 9 aa, Homo sapiens
  Table A; Target 41483; HLA-B*15:01; MAGEA9; ENSG00000123584; CTA
GASSSISVY

SEQ ID NO: 41484 - protein, 9 aa, Homo sapiens
  Table A; Target 41484; HLA-B*15:03; MAGEA9; ENSG00000123584; CTA
GASSSISVY

SEQ ID NO: 41485 - protein, 9 aa, Homo sapiens
  Table A; Target 41485; HLA-B*27:02; MAGEA9; ENSG00000123584; CTA
GASSSISVY

SEQ ID NO: 41486 - protein, 9 aa, Homo sapiens
  Table A; Target 41486; HLA-B*27:05; MAGEA9; ENSG00000123584; CTA
GASSSISVY

SEQ ID NO: 41487 - protein, 9 aa, Homo sapiens
  Table A; Target 41487; HLA-B*35:01; MAGEA9; ENSG00000123584; CTA
GASSSISVY

SEQ ID NO: 41488 - protein, 9 aa, Homo sapiens
  Table A; Target 41488; HLA-B*39:01; MAGEA9; ENSG00000123584; CTA
GASSSISVY

SEQ ID NO: 41489 - protein, 9 aa, Homo sapiens
  Table A; Target 41489; HLA-B*46:01; MAGEA9; ENSG00000123584; CTA
GASSSISVY

SEQ ID NO: 41490 - protein, 9 aa, Homo sapiens
  Table A; Target 41490; HLA-B*58:01; MAGEA9; ENSG00000123584; CTA
GASSSISVY

SEQ ID NO: 41491 - protein, 9 aa, Homo sapiens
  Table A; Target 41491; HLA-C*02:02; MAGEA9; ENSG00000123584; CTA
GASSSISVY

SEQ ID NO: 41492 - protein, 9 aa, Homo sapiens
  Table A; Target 41492; HLA-C*03:03; MAGEA9; ENSG00000123584; CTA
GASSSISVY

SEQ ID NO: 41493 - protein, 9 aa, Homo sapiens
  Table A; Target 41493; HLA-C*07:04; MAGEA9; ENSG00000123584; CTA
GASSSISVY

SEQ ID NO: 41494 - protein, 9 aa, Homo sapiens
  Table A; Target 41494; HLA-C*07:06; MAGEA9; ENSG00000123584; CTA
GASSSISVY

SEQ ID NO: 41495 - protein, 9 aa, Homo sapiens
  Table A; Target 41495; HLA-C*12:03; MAGEA9; ENSG00000123584; CTA
GASSSISVY

SEQ ID NO: 41496 - protein, 9 aa, Homo sapiens
  Table A; Target 41496; HLA-C*14:02; MAGEA9; ENSG00000123584; CTA
GASSSISVY

SEQ ID NO: 41497 - protein, 9 aa, Homo sapiens
  Table A; Target 41497; HLA-C*16:01; MAGEA9; ENSG00000123584; CTA
GASSSISVY

SEQ ID NO: 41498 - protein, 9 aa, Homo sapiens
  Table A; Target 41498; HLA-C*16:02; MAGEA9; ENSG00000123584; CTA
GASSSISVY

SEQ ID NO: 41499 - protein, 9 aa, Homo sapiens
  Table A; Target 41499; HLA-C*16:04; MAGEA9; ENSG00000123584; CTA
GASSSISVY

SEQ ID NO: 41500 - protein, 10 aa, Homo sapiens
  Table A; Target 41500; HLA-A*01:01; MAGEA9; ENSG00000123584; CTA
GASSSISVYY

SEQ ID NO: 41501 - protein, 10 aa, Homo sapiens
  Table A; Target 41501; HLA-A*26:01; MAGEA9; ENSG00000123584; CTA
GASSSISVYY

SEQ ID NO: 41502 - protein, 10 aa, Homo sapiens
  Table A; Target 41502; HLA-A*29:02; MAGEA9; ENSG00000123584; CTA
GASSSISVYY

SEQ ID NO: 41503 - protein, 10 aa, Homo sapiens
  Table A; Target 41503; HLA-A*30:02; MAGEA9; ENSG00000123584; CTA
GASSSISVYY

SEQ ID NO: 41504 - protein, 10 aa, Homo sapiens
  Table A; Target 41504; HLA-B*15:01; MAGEA9; ENSG00000123584; CTA
GASSSISVYY

SEQ ID NO: 41505 - protein, 10 aa, Homo sapiens
  Table A; Target 41505; HLA-B*15:03; MAGEA9; ENSG00000123584; CTA
GASSSISVYY

SEQ ID NO: 41506 - protein, 10 aa, Homo sapiens
  Table A; Target 41506; HLA-B*27:05; MAGEA9; ENSG00000123584; CTA
GASSSISVYY

SEQ ID NO: 41507 - protein, 10 aa, Homo sapiens
  Table A; Target 41507; HLA-B*58:01; MAGEA9; ENSG00000123584; CTA
GASSSISVYY

SEQ ID NO: 41508 - protein, 10 aa, Homo sapiens
  Table A; Target 41508; HLA-C*02:02; MAGEA9; ENSG00000123584; CTA
GASSSISVYY

SEQ ID NO: 41509 - protein, 10 aa, Homo sapiens
  Table A; Target 41509; HLA-C*03:03; MAGEA9; ENSG00000123584; CTA
GASSSISVYY

SEQ ID NO: 41510 - protein, 10 aa, Homo sapiens
  Table A; Target 41510; HLA-C*07:04; MAGEA9; ENSG00000123584; CTA
GASSSISVYY

SEQ ID NO: 41511 - protein, 10 aa, Homo sapiens
  Table A; Target 41511; HLA-C*07:06; MAGEA9; ENSG00000123584; CTA
GASSSISVYY

SEQ ID NO: 41512 - protein, 10 aa, Homo sapiens
  Table A; Target 41512; HLA-C*12:03; MAGEA9; ENSG00000123584; CTA
GASSSISVYY

SEQ ID NO: 41513 - protein, 10 aa, Homo sapiens
  Table A; Target 41513; HLA-C*16:04; MAGEA9; ENSG00000123584; CTA
GASSSISVYY

SEQ ID NO: 41514 - protein, 8 aa, Homo sapiens
  Table A; Target 41514; HLA-A*03:02; MAGEA9; ENSG00000123584; CTA
GDGHSMPK

SEQ ID NO: 41515 - protein, 8 aa, Homo sapiens
  Table A; Target 41515; HLA-A*11:01; MAGEA9; ENSG00000123584; CTA
GDGHSMPK

SEQ ID NO: 41516 - protein, 9 aa, Homo sapiens
  Table A; Target 41516; HLA-B*49:01; MAGEA9; ENSG00000123584; CTA
GEDLGLMGA

SEQ ID NO: 41517 - protein, 10 aa, Homo sapiens
  Table A; Target 41517; HLA-A*30:02; MAGEA9; ENSG00000123584; CTA
GGASSSISVY

SEQ ID NO: 41518 - protein, 10 aa, Homo sapiens
  Table A; Target 41518; HLA-B*15:01; MAGEA9; ENSG00000123584; CTA
GGASSSISVY

SEQ ID NO: 41519 - protein, 11 aa, Homo sapiens
  Table A; Target 41519; HLA-A*30:02; MAGEA9; ENSG00000123584; CTA
GGASSSISVYY

SEQ ID NO: 41520 - protein, 11 aa, Homo sapiens
  Table A; Target 41520; HLA-B*27:05; MAGEA9; ENSG00000123584; CTA
GGASSSISVYY

SEQ ID NO: 41521 - protein, 9 aa, Homo sapiens
  Table A; Target 41521; HLA-B*38:01; MAGEA9; ENSG00000123584; CTA
GHSMPKAAL

SEQ ID NO: 41522 - protein, 9 aa, Homo sapiens
  Table A; Target 41522; HLA-B*39:01; MAGEA9; ENSG00000123584; CTA
GHSMPKAAL

SEQ ID NO: 41523 - protein, 9 aa, Homo sapiens
  Table A; Target 41523; HLA-A*01:01; MAGEA9; ENSG00000123584; CTA
GSDPAHYEF

SEQ ID NO: 41524 - protein, 9 aa, Homo sapiens
  Table A; Target 41524; HLA-A*30:02; MAGEA9; ENSG00000123584; CTA
GSDPAHYEF

SEQ ID NO: 41525 - protein, 9 aa, Homo sapiens
  Table A; Target 41525; HLA-A*32:01; MAGEA9; ENSG00000123584; CTA
GSDPAHYEF

SEQ ID NO: 41526 - protein, 9 aa, Homo sapiens
  Table A; Target 41526; HLA-B*15:01; MAGEA9; ENSG00000123584; CTA
GSDPAHYEF

SEQ ID NO: 41527 - protein, 9 aa, Homo sapiens
  Table A; Target 41527; HLA-B*57:01; MAGEA9; ENSG00000123584; CTA
GSDPAHYEF

SEQ ID NO: 41528 - protein, 9 aa, Homo sapiens
  Table A; Target 41528; HLA-B*58:01; MAGEA9; ENSG00000123584; CTA
GSDPAHYEF

SEQ ID NO: 41529 - protein, 9 aa, Homo sapiens
  Table A; Target 41529; HLA-C*02:02; MAGEA9; ENSG00000123584; CTA
GSDPAHYEF

SEQ ID NO: 41530 - protein, 9 aa, Homo sapiens
  Table A; Target 41530; HLA-C*03:04; MAGEA9; ENSG00000123584; CTA
GSDPAHYEF

SEQ ID NO: 41531 - protein, 9 aa, Homo sapiens
  Table A; Target 41531; HLA-C*05:01; MAGEA9; ENSG00000123584; CTA
GSDPAHYEF

SEQ ID NO: 41532 - protein, 9 aa, Homo sapiens
  Table A; Target 41532; HLA-C*16:01; MAGEA9; ENSG00000123584; CTA
GSDPAHYEF

SEQ ID NO: 41533 - protein, 9 aa, Homo sapiens
  Table A; Target 41533; HLA-C*16:04; MAGEA9; ENSG00000123584; CTA
GSDPAHYEF

SEQ ID NO: 41534 - protein, 10 aa, Homo sapiens
  Table A; Target 41534; HLA-A*01:01; MAGEA9; ENSG00000123584; CTA
GSDPAHYEFL

SEQ ID NO: 41535 - protein, 11 aa, Homo sapiens
  Table A; Target 41535; HLA-B*57:01; MAGEA9; ENSG00000123584; CTA
GSDPAHYEFLW

SEQ ID NO: 41536 - protein, 10 aa, Homo sapiens
  Table A; Target 41536; HLA-A*30:02; MAGEA9; ENSG00000123584; CTA
GSKAHAETSY

SEQ ID NO: 41537 - protein, 10 aa, Homo sapiens
  Table A; Target 41537; HLA-A*32:01; MAGEA9; ENSG00000123584; CTA
GSKAHAETSY

SEQ ID NO: 41538 - protein, 10 aa, Homo sapiens
  Table A; Target 41538; HLA-B*15:01; MAGEA9; ENSG00000123584; CTA
GSKAHAETSY

SEQ ID NO: 41539 - protein, 10 aa, Homo sapiens
  Table A; Target 41539; HLA-B*15:03; MAGEA9; ENSG00000123584; CTA
GSKAHAETSY

SEQ ID NO: 41540 - protein, 10 aa, Homo sapiens
  Table A; Target 41540; HLA-B*46:01; MAGEA9; ENSG00000123584; CTA
GSKAHAETSY

SEQ ID NO: 41541 - protein, 10 aa, Homo sapiens
  Table A; Target 41541; HLA-B*58:01; MAGEA9; ENSG00000123584; CTA
GSKAHAETSY

SEQ ID NO: 41542 - protein, 10 aa, Homo sapiens
  Table A; Target 41542; HLA-C*02:02; MAGEA9; ENSG00000123584; CTA
GVYVGKEHMF

SEQ ID NO: 41543 - protein, 11 aa, Homo sapiens
  Table A; Target 41543; HLA-A*29:02; MAGEA9; ENSG00000123584; CTA
GVYVGKEHMFY

SEQ ID NO: 41544 - protein, 8 aa, Homo sapiens
  Table A; Target 41544; HLA-B*27:02; MAGEA9; ENSG00000123584; CTA
HAETSYEK

SEQ ID NO: 41545 - protein, 9 aa, Homo sapiens
  Table A; Target 41545; HLA-A*01:01; MAGEA9; ENSG00000123584; CTA
HAETSYEKV

SEQ ID NO: 41546 - protein, 9 aa, Homo sapiens
  Table A; Target 41546; HLA-C*05:01; MAGEA9; ENSG00000123584; CTA
HAETSYEKV

SEQ ID NO: 41547 - protein, 8 aa, Homo sapiens
  Table A; Target 41547; HLA-B*08:01; MAGEA9; ENSG00000123584; CTA
HSMPKAAL

SEQ ID NO: 41548 - protein, 8 aa, Homo sapiens
  Table A; Target 41548; HLA-C*16:01; MAGEA9; ENSG00000123584; CTA
HSMPKAAL

SEQ ID NO: 41549 - protein, 9 aa, Homo sapiens
  Table A; Target 41549; HLA-B*08:01; MAGEA9; ENSG00000123584; CTA
HSMPKAALL

SEQ ID NO: 41550 - protein, 8 aa, Homo sapiens
  Table A; Target 41550; HLA-B*54:01; MAGEA9; ENSG00000123584; CTA
HSYILVTA

SEQ ID NO: 41551 - protein, 9 aa, Homo sapiens
  Table A; Target 41551; HLA-B*15:03; MAGEA9; ENSG00000123584; CTA
HSYILVTAL

SEQ ID NO: 41552 - protein, 9 aa, Homo sapiens
  Table A; Target 41552; HLA-B*18:01; MAGEA9; ENSG00000123584; CTA
HSYILVTAL

SEQ ID NO: 41553 - protein, 9 aa, Homo sapiens
  Table A; Target 41553; HLA-B*40:02; MAGEA9; ENSG00000123584; CTA
HSYILVTAL

SEQ ID NO: 41554 - protein, 9 aa, Homo sapiens
  Table A; Target 41554; HLA-B*51:01; MAGEA9; ENSG00000123584; CTA
HSYILVTAL

SEQ ID NO: 41555 - protein, 9 aa, Homo sapiens
  Table A; Target 41555; HLA-C*03:03; MAGEA9; ENSG00000123584; CTA
HSYILVTAL

SEQ ID NO: 41556 - protein, 9 aa, Homo sapiens
  Table A; Target 41556; HLA-C*03:04; MAGEA9; ENSG00000123584; CTA
HSYILVTAL

SEQ ID NO: 41557 - protein, 9 aa, Homo sapiens
  Table A; Target 41557; HLA-C*12:03; MAGEA9; ENSG00000123584; CTA
HSYILVTAL

SEQ ID NO: 41558 - protein, 8 aa, Homo sapiens
  Table A; Target 41558; HLA-A*23:01; MAGEA9; ENSG00000123584; CTA
IFGKASEF

SEQ ID NO: 41559 - protein, 8 aa, Homo sapiens
  Table A; Target 41559; HLA-C*14:02; MAGEA9; ENSG00000123584; CTA
IFGKASEF

SEQ ID NO: 41560 - protein, 8 aa, Homo sapiens
  Table A; Target 41560; HLA-B*57:01; MAGEA9; ENSG00000123584; CTA
ISVYYTLW

SEQ ID NO: 41561 - protein, 9 aa, Homo sapiens
  Table A; Target 41561; HLA-A*03:01; MAGEA9; ENSG00000123584; CTA
IVLGVILTK

SEQ ID NO: 41562 - protein, 9 aa, Homo sapiens
  Table A; Target 41562; HLA-A*03:02; MAGEA9; ENSG00000123584; CTA
IVLGVILTK

SEQ ID NO: 41563 - protein, 9 aa, Homo sapiens
  Table A; Target 41563; HLA-A*11:01; MAGEA9; ENSG00000123584; CTA
IVLGVILTK

SEQ ID NO: 41564 - protein, 9 aa, Homo sapiens
  Table A; Target 41564; HLA-B*57:01; MAGEA9; ENSG00000123584; CTA
IVLGVILTK

SEQ ID NO: 41565 - protein, 9 aa, Homo sapiens
  Table A; Target 41565; HLA-C*07:06; MAGEA9; ENSG00000123584; CTA
IVLGVILTK

SEQ ID NO: 41566 - protein, 8 aa, Homo sapiens
  Table A; Target 41566; HLA-A*30:02; MAGEA9; ENSG00000123584; CTA
KAHAETSY

SEQ ID NO: 41567 - protein, 8 aa, Homo sapiens
  Table A; Target 41567; HLA-A*32:01; MAGEA9; ENSG00000123584; CTA
KAHAETSY

SEQ ID NO: 41568 - protein, 8 aa, Homo sapiens
  Table A; Target 41568; HLA-B*15:01; MAGEA9; ENSG00000123584; CTA
KAHAETSY

SEQ ID NO: 41569 - protein, 8 aa, Homo sapiens
  Table A; Target 41569; HLA-B*46:01; MAGEA9; ENSG00000123584; CTA
KAHAETSY

SEQ ID NO: 41570 - protein, 8 aa, Homo sapiens
  Table A; Target 41570; HLA-B*58:01; MAGEA9; ENSG00000123584; CTA
KAHAETSY

SEQ ID NO: 41571 - protein, 8 aa, Homo sapiens
  Table A; Target 41571; HLA-C*16:02; MAGEA9; ENSG00000123584; CTA
KAHAETSY

SEQ ID NO: 41572 - protein, 9 aa, Homo sapiens
  Table A; Target 41572; HLA-B*13:02; MAGEA9; ENSG00000123584; CTA
KASEFMQVI

SEQ ID NO: 41573 - protein, 9 aa, Homo sapiens
  Table A; Target 41573; HLA-B*49:01; MAGEA9; ENSG00000123584; CTA
KASEFMQVI

SEQ ID NO: 41574 - protein, 9 aa, Homo sapiens
  Table A; Target 41574; HLA-B*58:01; MAGEA9; ENSG00000123584; CTA
KASEFMQVI

SEQ ID NO: 41575 - protein, 9 aa, Homo sapiens
  Table A; Target 41575; HLA-C*02:02; MAGEA9; ENSG00000123584; CTA
KASEFMQVI

SEQ ID NO: 41576 - protein, 9 aa, Homo sapiens
  Table A; Target 41576; HLA-C*12:03; MAGEA9; ENSG00000123584; CTA
KASEFMQVI

SEQ ID NO: 41577 - protein, 9 aa, Homo sapiens
  Table A; Target 41577; HLA-C*16:02; MAGEA9; ENSG00000123584; CTA
KASEFMQVI

SEQ ID NO: 41578 - protein, 9 aa, Homo sapiens
  Table A; Target 41578; HLA-C*16:04; MAGEA9; ENSG00000123584; CTA
KASEFMQVI

SEQ ID NO: 41579 - protein, 10 aa, Homo sapiens
  Table A; Target 41579; HLA-B*57:01; MAGEA9; ENSG00000123584; CTA
KASEFMQVIF

SEQ ID NO: 41580 - protein, 10 aa, Homo sapiens
  Table A; Target 41580; HLA-C*02:02; MAGEA9; ENSG00000123584; CTA
KASEFMQVIF

SEQ ID NO: 41581 - protein, 10 aa, Homo sapiens
  Table A; Target 41581; HLA-B*44:02; MAGEA9; ENSG00000123584; CTA
KEVDPAGHSY

SEQ ID NO: 41582 - protein, 10 aa, Homo sapiens
  Table A; Target 41582; HLA-B*44:03; MAGEA9; ENSG00000123584; CTA
KEVDPAGHSY

SEQ ID NO: 41583 - protein, 9 aa, Homo sapiens
  Table A; Target 41583; HLA-A*68:02; MAGEA9; ENSG00000123584; CTA
KVAELVHFL

SEQ ID NO: 41584 - protein, 9 aa, Homo sapiens
  Table A; Target 41584; HLA-A*02:01; MAGEA9; ENSG00000123584; CTA
KVINYLVML

SEQ ID NO: 41585 - protein, 9 aa, Homo sapiens
  Table A; Target 41585; HLA-A*02:04; MAGEA9; ENSG00000123584; CTA
KVINYLVML

SEQ ID NO: 41586 - protein, 9 aa, Homo sapiens
  Table A; Target 41586; HLA-A*02:07; MAGEA9; ENSG00000123584; CTA
KVINYLVML

SEQ ID NO: 41587 - protein, 8 aa, Homo sapiens
  Table A; Target 41587; HLA-B*40:01; MAGEA9; ENSG00000123584; CTA
LEAQGEDL

SEQ ID NO: 41588 - protein, 10 aa, Homo sapiens
  Table A; Target 41588; HLA-B*40:01; MAGEA9; ENSG00000123584; CTA
LEAQGEDLGL

SEQ ID NO: 41589 - protein, 8 aa, Homo sapiens
  Table A; Target 41589; HLA-B*18:01; MAGEA9; ENSG00000123584; CTA
LEFMFQEA

SEQ ID NO: 41590 - protein, 8 aa, Homo sapiens
  Table A; Target 41590; HLA-B*49:01; MAGEA9; ENSG00000123584; CTA
LEFMFQEA

SEQ ID NO: 41591 - protein, 9 aa, Homo sapiens
  Table A; Target 41591; HLA-A*30:01; MAGEA9; ENSG00000123584; CTA
LEFMFQEAL

SEQ ID NO: 41592 - protein, 9 aa, Homo sapiens
  Table A; Target 41592; HLA-B*18:01; MAGEA9; ENSG00000123584; CTA
LEFMFQEAL

SEQ ID NO: 41593 - protein, 9 aa, Homo sapiens
  Table A; Target 41593; HLA-B*40:01; MAGEA9; ENSG00000123584; CTA
LEFMFQEAL

SEQ ID NO: 41594 - protein, 9 aa, Homo sapiens
  Table A; Target 41594; HLA-B*40:02; MAGEA9; ENSG00000123584; CTA
LEFMFQEAL

SEQ ID NO: 41595 - protein, 9 aa, Homo sapiens
  Table A; Target 41595; HLA-B*49:01; MAGEA9; ENSG00000123584; CTA
LEFMFQEAL

SEQ ID NO: 41596 - protein, 9 aa, Homo sapiens
  Table A; Target 41596; HLA-A*03:01; MAGEA9; ENSG00000123584; CTA
LGDGHSMPK

SEQ ID NO: 41597 - protein, 9 aa, Homo sapiens
  Table A; Target 41597; HLA-A*03:02; MAGEA9; ENSG00000123584; CTA
LGDGHSMPK

SEQ ID NO: 41598 - protein, 9 aa, Homo sapiens
  Table A; Target 41598; HLA-A*11:01; MAGEA9; ENSG00000123584; CTA
LGDGHSMPK

SEQ ID NO: 41599 - protein, 10 aa, Homo sapiens
  Table A; Target 41599; HLA-B*27:02; MAGEA9; ENSG00000123584; CTA
LSVMGVYVGK

SEQ ID NO: 41600 - protein, 10 aa, Homo sapiens
  Table A; Target 41600; HLA-A*01:01; MAGEA9; ENSG00000123584; CTA
LTQDWVQENY

SEQ ID NO: 41601 - protein, 10 aa, Homo sapiens
  Table A; Target 41601; HLA-A*29:02; MAGEA9; ENSG00000123584; CTA
LTQDWVQENY

SEQ ID NO: 41602 - protein, 10 aa, Homo sapiens
  Table A; Target 41602; HLA-A*30:02; MAGEA9; ENSG00000123584; CTA
LTQDWVQENY

SEQ ID NO: 41603 - protein, 10 aa, Homo sapiens
  Table A; Target 41603; HLA-B*57:01; MAGEA9; ENSG00000123584; CTA
LTQDWVQENY

SEQ ID NO: 41604 - protein, 10 aa, Homo sapiens
  Table A; Target 41604; HLA-B*58:01; MAGEA9; ENSG00000123584; CTA
LTQDWVQENY

SEQ ID NO: 41605 - protein, 11 aa, Homo sapiens
  Table A; Target 41605; HLA-C*04:01; MAGEA9; ENSG00000123584; CTA
LTQDWVQENYL

SEQ ID NO: 41606 - protein, 9 aa, Homo sapiens
  Table A; Target 41606; HLA-A*29:02; MAGEA9; ENSG00000123584; CTA
LVHFLLHKY

SEQ ID NO: 41607 - protein, 8 aa, Homo sapiens
  Table A; Target 41607; HLA-C*14:02; MAGEA9; ENSG00000123584; CTA
MFQEALKL

SEQ ID NO: 41608 - protein, 8 aa, Homo sapiens
  Table A; Target 41608; HLA-A*32:01; MAGEA9; ENSG00000123584; CTA
MLGDGHSM

SEQ ID NO: 41609 - protein, 8 aa, Homo sapiens
  Table A; Target 41609; HLA-C*01:02; MAGEA9; ENSG00000123584; CTA
MLGDGHSM

SEQ ID NO: 41610 - protein, 8 aa, Homo sapiens
  Table A; Target 41610; HLA-C*14:02; MAGEA9; ENSG00000123584; CTA
MLGDGHSM

SEQ ID NO: 41611 - protein, 10 aa, Homo sapiens
  Table A; Target 41611; HLA-A*03:01; MAGEA9; ENSG00000123584; CTA
MLGDGHSMPK

SEQ ID NO: 41612 - protein, 10 aa, Homo sapiens
  Table A; Target 41612; HLA-A*03:02; MAGEA9; ENSG00000123584; CTA
MLGDGHSMPK

SEQ ID NO: 41613 - protein, 10 aa, Homo sapiens
  Table A; Target 41613; HLA-A*11:01; MAGEA9; ENSG00000123584; CTA
MLGDGHSMPK

SEQ ID NO: 41614 - protein, 10 aa, Homo sapiens
  Table A; Target 41614; HLA-C*06:02; MAGEA9; ENSG00000123584; CTA
MLGDGHSMPK

SEQ ID NO: 41615 - protein, 8 aa, Homo sapiens
  Table A; Target 41615; HLA-B*51:01; MAGEA9; ENSG00000123584; CTA
MPKAALLI

SEQ ID NO: 41616 - protein, 9 aa, Homo sapiens
  Table A; Target 41616; HLA-B*51:01; MAGEA9; ENSG00000123584; CTA
MPKAALLII

SEQ ID NO: 41617 - protein, 9 aa, Homo sapiens
  Table A; Target 41617; HLA-B*54:01; MAGEA9; ENSG00000123584; CTA
MPKAALLII

SEQ ID NO: 41618 - protein, 10 aa, Homo sapiens
  Table A; Target 41618; HLA-B*54:01; MAGEA9; ENSG00000123584; CTA
MPKAALLIIV

SEQ ID NO: 41619 - protein, 9 aa, Homo sapiens
  Table A; Target 41619; HLA-A*30:01; MAGEA9; ENSG00000123584; CTA
MQVIFGTDV

SEQ ID NO: 41620 - protein, 9 aa, Homo sapiens
  Table A; Target 41620; HLA-B*13:02; MAGEA9; ENSG00000123584; CTA
MQVIFGTDV

SEQ ID NO: 41621 - protein, 9 aa, Homo sapiens
  Table A; Target 41621; HLA-B*15:03; MAGEA9; ENSG00000123584; CTA
MQVIFGTDV

SEQ ID NO: 41622 - protein, 9 aa, Homo sapiens
  Table A; Target 41622; HLA-B*39:01; MAGEA9; ENSG00000123584; CTA
MQVIFGTDV

SEQ ID NO: 41623 - protein, 9 aa, Homo sapiens
  Table A; Target 41623; HLA-C*04:01; MAGEA9; ENSG00000123584; CTA
MQVIFGTDV

SEQ ID NO: 41624 - protein, 9 aa, Homo sapiens
  Table A; Target 41624; HLA-C*06:02; MAGEA9; ENSG00000123584; CTA
MQVIFGTDV

SEQ ID NO: 41625 - protein, 9 aa, Homo sapiens
  Table A; Target 41625; HLA-A*24:02; MAGEA9; ENSG00000123584; CTA
NYKRYFPVI

SEQ ID NO: 41626 - protein, 9 aa, Homo sapiens
  Table A; Target 41626; HLA-A*33:01; MAGEA9; ENSG00000123584; CTA
NYLVMLNAR

SEQ ID NO: 41627 - protein, 9 aa, Homo sapiens
  Table A; Target 41627; HLA-A*33:03; MAGEA9; ENSG00000123584; CTA
NYLVMLNAR

SEQ ID NO: 41628 - protein, 9 aa, Homo sapiens
  Table A; Target 41628; HLA-C*04:01; MAGEA9; ENSG00000123584; CTA
QFDEGSSSQ

SEQ ID NO: 41629 - protein, 11 aa, Homo sapiens
  Table A; Target 41629; HLA-A*30:02; MAGEA9; ENSG00000123584; CTA
QGGASSSISVY

SEQ ID NO: 41630 - protein, 9 aa, Homo sapiens
  Table A; Target 41630; HLA-A*03:02; MAGEA9; ENSG00000123584; CTA
QVIFGTDVK

SEQ ID NO: 41631 - protein, 9 aa, Homo sapiens
  Table A; Target 41631; HLA-A*11:01; MAGEA9; ENSG00000123584; CTA
QVIFGTDVK

SEQ ID NO: 41632 - protein, 10 aa, Homo sapiens
  Table A; Target 41632; HLA-A*01:01; MAGEA9; ENSG00000123584; CTA
QVPGSDPAHY

SEQ ID NO: 41633 - protein, 10 aa, Homo sapiens
  Table A; Target 41633; HLA-A*25:01; MAGEA9; ENSG00000123584; CTA
QVPGSDPAHY

SEQ ID NO: 41634 - protein, 10 aa, Homo sapiens
  Table A; Target 41634; HLA-A*26:01; MAGEA9; ENSG00000123584; CTA
QVPGSDPAHY

SEQ ID NO: 41635 - protein, 10 aa, Homo sapiens
  Table A; Target 41635; HLA-A*29:02; MAGEA9; ENSG00000123584; CTA
QVPGSDPAHY

SEQ ID NO: 41636 - protein, 10 aa, Homo sapiens
  Table A; Target 41636; HLA-A*30:02; MAGEA9; ENSG00000123584; CTA
QVPGSDPAHY

SEQ ID NO: 41637 - protein, 11 aa, Homo sapiens
  Table A; Target 41637; HLA-A*30:02; MAGEA9; ENSG00000123584; CTA
RQVPGSDPAHY

SEQ ID NO: 41638 - protein, 11 aa, Homo sapiens
  Table A; Target 41638; HLA-A*32:01; MAGEA9; ENSG00000123584; CTA
RQVPGSDPAHY

SEQ ID NO: 41639 - protein, 11 aa, Homo sapiens
  Table A; Target 41639; HLA-B*15:01; MAGEA9; ENSG00000123584; CTA
RQVPGSDPAHY

SEQ ID NO: 41640 - protein, 11 aa, Homo sapiens
  Table A; Target 41640; HLA-B*15:03; MAGEA9; ENSG00000123584; CTA
RQVPGSDPAHY

SEQ ID NO: 41641 - protein, 11 aa, Homo sapiens
  Table A; Target 41641; HLA-B*58:01; MAGEA9; ENSG00000123584; CTA
RQVPGSDPAHY

SEQ ID NO: 41642 - protein, 11 aa, Homo sapiens
  Table A; Target 41642; HLA-C*16:04; MAGEA9; ENSG00000123584; CTA
RQVPGSDPAHY

SEQ ID NO: 41643 - protein, 8 aa, Homo sapiens
  Table A; Target 41643; HLA-A*03:01; MAGEA9; ENSG00000123584; CTA
RVKEPVTK

SEQ ID NO: 41644 - protein, 8 aa, Homo sapiens
  Table A; Target 41644; HLA-A*03:02; MAGEA9; ENSG00000123584; CTA
RVKEPVTK

SEQ ID NO: 41645 - protein, 8 aa, Homo sapiens
  Table A; Target 41645; HLA-A*11:01; MAGEA9; ENSG00000123584; CTA
RVKEPVTK

SEQ ID NO: 41646 - protein, 8 aa, Homo sapiens
  Table A; Target 41646; HLA-A*31:01; MAGEA9; ENSG00000123584; CTA
RVKEPVTK

SEQ ID NO: 41647 - protein, 8 aa, Homo sapiens
  Table A; Target 41647; HLA-B*57:01; MAGEA9; ENSG00000123584; CTA
RVKEPVTK

SEQ ID NO: 41648 - protein, 9 aa, Homo sapiens
  Table A; Target 41648; HLA-A*02:03; MAGEA9; ENSG00000123584; CTA
RVKEPVTKA

SEQ ID NO: 41649 - protein, 9 aa, Homo sapiens
  Table A; Target 41649; HLA-A*32:01; MAGEA9; ENSG00000123584; CTA
RVKEPVTKA

SEQ ID NO: 41650 - protein, 9 aa, Homo sapiens
  Table A; Target 41650; HLA-B*55:01; MAGEA9; ENSG00000123584; CTA
RVKEPVTKA

SEQ ID NO: 41651 - protein, 9 aa, Homo sapiens
  Table A; Target 41651; HLA-B*56:01; MAGEA9; ENSG00000123584; CTA
RVKEPVTKA

SEQ ID NO: 41652 - protein, 9 aa, Homo sapiens
  Table A; Target 41652; HLA-A*03:01; MAGEA9; ENSG00000123584; CTA
RYFPVIFGK

SEQ ID NO: 41653 - protein, 9 aa, Homo sapiens
  Table A; Target 41653; HLA-A*31:01; MAGEA9; ENSG00000123584; CTA
RYFPVIFGK

SEQ ID NO: 41654 - protein, 9 aa, Homo sapiens
  Table A; Target 41654; HLA-B*57:01; MAGEA9; ENSG00000123584; CTA
RYFPVIFGK

SEQ ID NO: 41655 - protein, 8 aa, Homo sapiens
  Table A; Target 41655; HLA-B*37:01; MAGEA9; ENSG00000123584; CTA
SDPAHYEF

SEQ ID NO: 41656 - protein, 8 aa, Homo sapiens
  Table A; Target 41656; HLA-B*18:01; MAGEA9; ENSG00000123584; CTA
SEFMQVIF

SEQ ID NO: 41657 - protein, 8 aa, Homo sapiens
  Table A; Target 41657; HLA-B*37:01; MAGEA9; ENSG00000123584; CTA
SEFMQVIF

SEQ ID NO: 41658 - protein, 8 aa, Homo sapiens
  Table A; Target 41658; HLA-B*44:02; MAGEA9; ENSG00000123584; CTA
SEFMQVIF

SEQ ID NO: 41659 - protein, 8 aa, Homo sapiens
  Table A; Target 41659; HLA-B*44:03; MAGEA9; ENSG00000123584; CTA
SEFMQVIF

SEQ ID NO: 41660 - protein, 9 aa, Homo sapiens
  Table A; Target 41660; HLA-B*15:03; MAGEA9; ENSG00000123584; CTA
SKAHAETSY

SEQ ID NO: 41661 - protein, 9 aa, Homo sapiens
  Table A; Target 41661; HLA-A*32:01; MAGEA9; ENSG00000123584; CTA
SMLGDGHSM

SEQ ID NO: 41662 - protein, 9 aa, Homo sapiens
  Table A; Target 41662; HLA-B*08:01; MAGEA9; ENSG00000123584; CTA
SMLGDGHSM

SEQ ID NO: 41663 - protein, 9 aa, Homo sapiens
  Table A; Target 41663; HLA-B*15:01; MAGEA9; ENSG00000123584; CTA
SMLGDGHSM

SEQ ID NO: 41664 - protein, 9 aa, Homo sapiens
  Table A; Target 41664; HLA-B*35:03; MAGEA9; ENSG00000123584; CTA
SMLGDGHSM

SEQ ID NO: 41665 - protein, 9 aa, Homo sapiens
  Table A; Target 41665; HLA-B*37:01; MAGEA9; ENSG00000123584; CTA
SMLGDGHSM

SEQ ID NO: 41666 - protein, 9 aa, Homo sapiens
  Table A; Target 41666; HLA-B*46:01; MAGEA9; ENSG00000123584; CTA
SMLGDGHSM

SEQ ID NO: 41667 - protein, 9 aa, Homo sapiens
  Table A; Target 41667; HLA-B*55:01; MAGEA9; ENSG00000123584; CTA
SMLGDGHSM

SEQ ID NO: 41668 - protein, 9 aa, Homo sapiens
  Table A; Target 41668; HLA-C*01:02; MAGEA9; ENSG00000123584; CTA
SMLGDGHSM

SEQ ID NO: 41669 - protein, 9 aa, Homo sapiens
  Table A; Target 41669; HLA-C*03:03; MAGEA9; ENSG00000123584; CTA
SMLGDGHSM

SEQ ID NO: 41670 - protein, 9 aa, Homo sapiens
  Table A; Target 41670; HLA-C*14:02; MAGEA9; ENSG00000123584; CTA
SMLGDGHSM

SEQ ID NO: 41671 - protein, 11 aa, Homo sapiens
  Table A; Target 41671; HLA-A*03:01; MAGEA9; ENSG00000123584; CTA
SMLGDGHSMPK

SEQ ID NO: 41672 - protein, 11 aa, Homo sapiens
  Table A; Target 41672; HLA-A*03:02; MAGEA9; ENSG00000123584; CTA
SMLGDGHSMPK

SEQ ID NO: 41673 - protein, 11 aa, Homo sapiens
  Table A; Target 41673; HLA-A*11:01; MAGEA9; ENSG00000123584; CTA
SMLGDGHSMPK

SEQ ID NO: 41674 - protein, 10 aa, Homo sapiens
  Table A; Target 41674; HLA-B*07:02; MAGEA9; ENSG00000123584; CTA
SPQGGASSSI

SEQ ID NO: 41675 - protein, 10 aa, Homo sapiens
  Table A; Target 41675; HLA-C*07:02; MAGEA9; ENSG00000123584; CTA
SPQGGASSSI

SEQ ID NO: 41676 - protein, 10 aa, Homo sapiens
  Table A; Target 41676; HLA-B*39:01; MAGEA9; ENSG00000123584; CTA
SQFDEGSSSQ

SEQ ID NO: 41677 - protein, 9 aa, Homo sapiens
  Table A; Target 41677; HLA-C*05:01; MAGEA9; ENSG00000123584; CTA
SSDSKEEEV

SEQ ID NO: 41678 - protein, 9 aa, Homo sapiens
  Table A; Target 41678; HLA-A*23:01; MAGEA9; ENSG00000123584; CTA
SSISVYYTL

SEQ ID NO: 41679 - protein, 9 aa, Homo sapiens
  Table A; Target 41679; HLA-B*58:01; MAGEA9; ENSG00000123584; CTA
SSISVYYTL

SEQ ID NO: 41680 - protein, 9 aa, Homo sapiens
  Table A; Target 41680; HLA-C*02:02; MAGEA9; ENSG00000123584; CTA
SSISVYYTL

SEQ ID NO: 41681 - protein, 9 aa, Homo sapiens
  Table A; Target 41681; HLA-C*03:03; MAGEA9; ENSG00000123584; CTA
SSISVYYTL

SEQ ID NO: 41682 - protein, 9 aa, Homo sapiens
  Table A; Target 41682; HLA-C*03:04; MAGEA9; ENSG00000123584; CTA
SSISVYYTL

SEQ ID NO: 41683 - protein, 9 aa, Homo sapiens
  Table A; Target 41683; HLA-C*16:04; MAGEA9; ENSG00000123584; CTA
SSISVYYTL

SEQ ID NO: 41684 - protein, 10 aa, Homo sapiens
  Table A; Target 41684; HLA-A*25:01; MAGEA9; ENSG00000123584; CTA
SSISVYYTLW

SEQ ID NO: 41685 - protein, 10 aa, Homo sapiens
  Table A; Target 41685; HLA-B*57:01; MAGEA9; ENSG00000123584; CTA
SSISVYYTLW

SEQ ID NO: 41686 - protein, 8 aa, Homo sapiens
  Table A; Target 41686; HLA-A*30:02; MAGEA9; ENSG00000123584; CTA
SSSISVYY

SEQ ID NO: 41687 - protein, 8 aa, Homo sapiens
  Table A; Target 41687; HLA-C*16:01; MAGEA9; ENSG00000123584; CTA
SSSISVYY

SEQ ID NO: 41688 - protein, 10 aa, Homo sapiens
  Table A; Target 41688; HLA-B*58:01; MAGEA9; ENSG00000123584; CTA
SSVDPAQLEF

SEQ ID NO: 41689 - protein, 9 aa, Homo sapiens
  Table A; Target 41689; HLA-A*01:01; MAGEA9; ENSG00000123584; CTA
SVDPAQLEF

SEQ ID NO: 41690 - protein, 9 aa, Homo sapiens
  Table A; Target 41690; HLA-A*02:07; MAGEA9; ENSG00000123584; CTA
SVDPAQLEF

SEQ ID NO: 41691 - protein, 9 aa, Homo sapiens
  Table A; Target 41691; HLA-A*11:01; MAGEA9; ENSG00000123584; CTA
SVDPAQLEF

SEQ ID NO: 41692 - protein, 9 aa, Homo sapiens
  Table A; Target 41692; HLA-A*25:01; MAGEA9; ENSG00000123584; CTA
SVDPAQLEF

SEQ ID NO: 41693 - protein, 9 aa, Homo sapiens
  Table A; Target 41693; HLA-A*26:01; MAGEA9; ENSG00000123584; CTA
SVDPAQLEF

SEQ ID NO: 41694 - protein, 9 aa, Homo sapiens
  Table A; Target 41694; HLA-A*29:02; MAGEA9; ENSG00000123584; CTA
SVDPAQLEF

SEQ ID NO: 41695 - protein, 9 aa, Homo sapiens
  Table A; Target 41695; HLA-A*32:01; MAGEA9; ENSG00000123584; CTA
SVDPAQLEF

SEQ ID NO: 41696 - protein, 9 aa, Homo sapiens
  Table A; Target 41696; HLA-B*15:01; MAGEA9; ENSG00000123584; CTA
SVDPAQLEF

SEQ ID NO: 41697 - protein, 9 aa, Homo sapiens
  Table A; Target 41697; HLA-B*15:03; MAGEA9; ENSG00000123584; CTA
SVDPAQLEF

SEQ ID NO: 41698 - protein, 9 aa, Homo sapiens
  Table A; Target 41698; HLA-B*35:01; MAGEA9; ENSG00000123584; CTA
SVDPAQLEF

SEQ ID NO: 41699 - protein, 9 aa, Homo sapiens
  Table A; Target 41699; HLA-B*35:03; MAGEA9; ENSG00000123584; CTA
SVDPAQLEF

SEQ ID NO: 41700 - protein, 9 aa, Homo sapiens
  Table A; Target 41700; HLA-B*38:01; MAGEA9; ENSG00000123584; CTA
SVDPAQLEF

SEQ ID NO: 41701 - protein, 9 aa, Homo sapiens
  Table A; Target 41701; HLA-B*46:01; MAGEA9; ENSG00000123584; CTA
SVDPAQLEF

SEQ ID NO: 41702 - protein, 9 aa, Homo sapiens
  Table A; Target 41702; HLA-B*58:01; MAGEA9; ENSG00000123584; CTA
SVDPAQLEF

SEQ ID NO: 41703 - protein, 9 aa, Homo sapiens
  Table A; Target 41703; HLA-C*02:02; MAGEA9; ENSG00000123584; CTA
SVDPAQLEF

SEQ ID NO: 41704 - protein, 9 aa, Homo sapiens
  Table A; Target 41704; HLA-C*03:03; MAGEA9; ENSG00000123584; CTA
SVDPAQLEF

SEQ ID NO: 41705 - protein, 9 aa, Homo sapiens
  Table A; Target 41705; HLA-C*03:04; MAGEA9; ENSG00000123584; CTA
SVDPAQLEF

SEQ ID NO: 41706 - protein, 9 aa, Homo sapiens
  Table A; Target 41706; HLA-C*04:01; MAGEA9; ENSG00000123584; CTA
SVDPAQLEF

SEQ ID NO: 41707 - protein, 9 aa, Homo sapiens
  Table A; Target 41707; HLA-C*05:01; MAGEA9; ENSG00000123584; CTA
SVDPAQLEF

SEQ ID NO: 41708 - protein, 9 aa, Homo sapiens
  Table A; Target 41708; HLA-C*07:04; MAGEA9; ENSG00000123584; CTA
SVDPAQLEF

SEQ ID NO: 41709 - protein, 9 aa, Homo sapiens
  Table A; Target 41709; HLA-C*07:06; MAGEA9; ENSG00000123584; CTA
SVDPAQLEF

SEQ ID NO: 41710 - protein, 9 aa, Homo sapiens
  Table A; Target 41710; HLA-C*16:01; MAGEA9; ENSG00000123584; CTA
SVDPAQLEF

SEQ ID NO: 41711 - protein, 10 aa, Homo sapiens
  Table A; Target 41711; HLA-A*01:01; MAGEA9; ENSG00000123584; CTA
SVDPAQLEFM

SEQ ID NO: 41712 - protein, 10 aa, Homo sapiens
  Table A; Target 41712; HLA-A*02:07; MAGEA9; ENSG00000123584; CTA
SVDPAQLEFM

SEQ ID NO: 41713 - protein, 10 aa, Homo sapiens
  Table A; Target 41713; HLA-C*05:01; MAGEA9; ENSG00000123584; CTA
SVDPAQLEFM

SEQ ID NO: 41714 - protein, 11 aa, Homo sapiens
  Table A; Target 41714; HLA-A*02:07; MAGEA9; ENSG00000123584; CTA
SVDPAQLEFMF

SEQ ID NO: 41715 - protein, 9 aa, Homo sapiens
  Table A; Target 41715; HLA-A*03:01; MAGEA9; ENSG00000123584; CTA
SVMGVYVGK

SEQ ID NO: 41716 - protein, 9 aa, Homo sapiens
  Table A; Target 41716; HLA-A*03:02; MAGEA9; ENSG00000123584; CTA
SVMGVYVGK

SEQ ID NO: 41717 - protein, 9 aa, Homo sapiens
  Table A; Target 41717; HLA-A*11:01; MAGEA9; ENSG00000123584; CTA
SVMGVYVGK

SEQ ID NO: 41718 - protein, 9 aa, Homo sapiens
  Table A; Target 41718; HLA-A*31:01; MAGEA9; ENSG00000123584; CTA
SVMGVYVGK

SEQ ID NO: 41719 - protein, 9 aa, Homo sapiens
  Table A; Target 41719; HLA-A*33:01; MAGEA9; ENSG00000123584; CTA
SVMGVYVGK

SEQ ID NO: 41720 - protein, 9 aa, Homo sapiens
  Table A; Target 41720; HLA-A*33:03; MAGEA9; ENSG00000123584; CTA
SVMGVYVGK

SEQ ID NO: 41721 - protein, 9 aa, Homo sapiens
  Table A; Target 41721; HLA-A*68:01; MAGEA9; ENSG00000123584; CTA
SVMGVYVGK

SEQ ID NO: 41722 - protein, 9 aa, Homo sapiens
  Table A; Target 41722; HLA-C*07:06; MAGEA9; ENSG00000123584; CTA
SVMGVYVGK

SEQ ID NO: 41723 - protein, 10 aa, Homo sapiens
  Table A; Target 41723; HLA-C*06:02; MAGEA9; ENSG00000123584; CTA
SVMGVYVGKE

SEQ ID NO: 41724 - protein, 9 aa, Homo sapiens
  Table A; Target 41724; HLA-A*23:01; MAGEA9; ENSG00000123584; CTA
SYEKVINYL

SEQ ID NO: 41725 - protein, 9 aa, Homo sapiens
  Table A; Target 41725; HLA-A*24:02; MAGEA9; ENSG00000123584; CTA
SYEKVINYL

SEQ ID NO: 41726 - protein, 8 aa, Homo sapiens
  Table A; Target 41726; HLA-A*23:01; MAGEA9; ENSG00000123584; CTA
SYILVTAL

SEQ ID NO: 41727 - protein, 8 aa, Homo sapiens
  Table A; Target 41727; HLA-A*24:02; MAGEA9; ENSG00000123584; CTA
SYILVTAL

SEQ ID NO: 41728 - protein, 8 aa, Homo sapiens
  Table A; Target 41728; HLA-C*14:02; MAGEA9; ENSG00000123584; CTA
SYILVTAL

SEQ ID NO: 41729 - protein, 10 aa, Homo sapiens
  Table A; Target 41729; HLA-A*23:01; MAGEA9; ENSG00000123584; CTA
SYILVTALGL

SEQ ID NO: 41730 - protein, 10 aa, Homo sapiens
  Table A; Target 41730; HLA-A*24:02; MAGEA9; ENSG00000123584; CTA
SYILVTALGL

SEQ ID NO: 41731 - protein, 10 aa, Homo sapiens
  Table A; Target 41731; HLA-C*14:02; MAGEA9; ENSG00000123584; CTA
SYILVTALGL

SEQ ID NO: 41732 - protein, 9 aa, Homo sapiens
  Table A; Target 41732; HLA-A*01:01; MAGEA9; ENSG00000123584; CTA
TQDWVQENY

SEQ ID NO: 41733 - protein, 9 aa, Homo sapiens
  Table A; Target 41733; HLA-A*30:02; MAGEA9; ENSG00000123584; CTA
TQDWVQENY

SEQ ID NO: 41734 - protein, 10 aa, Homo sapiens
  Table A; Target 41734; HLA-B*38:01; MAGEA9; ENSG00000123584; CTA
TQDWVQENYL

SEQ ID NO: 41735 - protein, 9 aa, Homo sapiens
  Table A; Target 41735; HLA-A*01:01; MAGEA9; ENSG00000123584; CTA
TSYEKVINY

SEQ ID NO: 41736 - protein, 9 aa, Homo sapiens
  Table A; Target 41736; HLA-A*03:01; MAGEA9; ENSG00000123584; CTA
TSYEKVINY

SEQ ID NO: 41737 - protein, 9 aa, Homo sapiens
  Table A; Target 41737; HLA-A*11:01; MAGEA9; ENSG00000123584; CTA
TSYEKVINY

SEQ ID NO: 41738 - protein, 9 aa, Homo sapiens
  Table A; Target 41738; HLA-A*25:01; MAGEA9; ENSG00000123584; CTA
TSYEKVINY

SEQ ID NO: 41739 - protein, 9 aa, Homo sapiens
  Table A; Target 41739; HLA-A*26:01; MAGEA9; ENSG00000123584; CTA
TSYEKVINY

SEQ ID NO: 41740 - protein, 9 aa, Homo sapiens
  Table A; Target 41740; HLA-A*29:02; MAGEA9; ENSG00000123584; CTA
TSYEKVINY

SEQ ID NO: 41741 - protein, 9 aa, Homo sapiens
  Table A; Target 41741; HLA-A*30:02; MAGEA9; ENSG00000123584; CTA
TSYEKVINY

SEQ ID NO: 41742 - protein, 9 aa, Homo sapiens
  Table A; Target 41742; HLA-A*32:01; MAGEA9; ENSG00000123584; CTA
TSYEKVINY

SEQ ID NO: 41743 - protein, 9 aa, Homo sapiens
  Table A; Target 41743; HLA-A*33:01; MAGEA9; ENSG00000123584; CTA
TSYEKVINY

SEQ ID NO: 41744 - protein, 9 aa, Homo sapiens
  Table A; Target 41744; HLA-A*33:03; MAGEA9; ENSG00000123584; CTA
TSYEKVINY

SEQ ID NO: 41745 - protein, 9 aa, Homo sapiens
  Table A; Target 41745; HLA-A*68:01; MAGEA9; ENSG00000123584; CTA
TSYEKVINY

SEQ ID NO: 41746 - protein, 9 aa, Homo sapiens
  Table A; Target 41746; HLA-B*08:01; MAGEA9; ENSG00000123584; CTA
TSYEKVINY

SEQ ID NO: 41747 - protein, 9 aa, Homo sapiens
  Table A; Target 41747; HLA-B*15:01; MAGEA9; ENSG00000123584; CTA
TSYEKVINY

SEQ ID NO: 41748 - protein, 9 aa, Homo sapiens
  Table A; Target 41748; HLA-B*15:03; MAGEA9; ENSG00000123584; CTA
TSYEKVINY

SEQ ID NO: 41749 - protein, 9 aa, Homo sapiens
  Table A; Target 41749; HLA-B*18:01; MAGEA9; ENSG00000123584; CTA
TSYEKVINY

SEQ ID NO: 41750 - protein, 9 aa, Homo sapiens
  Table A; Target 41750; HLA-B*35:01; MAGEA9; ENSG00000123584; CTA
TSYEKVINY

SEQ ID NO: 41751 - protein, 9 aa, Homo sapiens
  Table A; Target 41751; HLA-B*39:01; MAGEA9; ENSG00000123584; CTA
TSYEKVINY

SEQ ID NO: 41752 - protein, 9 aa, Homo sapiens
  Table A; Target 41752; HLA-B*44:03; MAGEA9; ENSG00000123584; CTA
TSYEKVINY

SEQ ID NO: 41753 - protein, 9 aa, Homo sapiens
  Table A; Target 41753; HLA-B*46:01; MAGEA9; ENSG00000123584; CTA
TSYEKVINY

SEQ ID NO: 41754 - protein, 9 aa, Homo sapiens
  Table A; Target 41754; HLA-B*57:01; MAGEA9; ENSG00000123584; CTA
TSYEKVINY

SEQ ID NO: 41755 - protein, 9 aa, Homo sapiens
  Table A; Target 41755; HLA-B*58:01; MAGEA9; ENSG00000123584; CTA
TSYEKVINY

SEQ ID NO: 41756 - protein, 9 aa, Homo sapiens
  Table A; Target 41756; HLA-C*01:02; MAGEA9; ENSG00000123584; CTA
TSYEKVINY

SEQ ID NO: 41757 - protein, 9 aa, Homo sapiens
  Table A; Target 41757; HLA-C*02:02; MAGEA9; ENSG00000123584; CTA
TSYEKVINY

SEQ ID NO: 41758 - protein, 9 aa, Homo sapiens
  Table A; Target 41758; HLA-C*07:04; MAGEA9; ENSG00000123584; CTA
TSYEKVINY

SEQ ID NO: 41759 - protein, 9 aa, Homo sapiens
  Table A; Target 41759; HLA-C*07:06; MAGEA9; ENSG00000123584; CTA
TSYEKVINY

SEQ ID NO: 41760 - protein, 9 aa, Homo sapiens
  Table A; Target 41760; HLA-C*12:03; MAGEA9; ENSG00000123584; CTA
TSYEKVINY

SEQ ID NO: 41761 - protein, 9 aa, Homo sapiens
  Table A; Target 41761; HLA-C*14:02; MAGEA9; ENSG00000123584; CTA
TSYEKVINY

SEQ ID NO: 41762 - protein, 9 aa, Homo sapiens
  Table A; Target 41762; HLA-C*16:01; MAGEA9; ENSG00000123584; CTA
TSYEKVINY

SEQ ID NO: 41763 - protein, 9 aa, Homo sapiens
  Table A; Target 41763; HLA-C*16:02; MAGEA9; ENSG00000123584; CTA
TSYEKVINY

SEQ ID NO: 41764 - protein, 9 aa, Homo sapiens
  Table A; Target 41764; HLA-C*16:04; MAGEA9; ENSG00000123584; CTA
TSYEKVINY

SEQ ID NO: 41765 - protein, 10 aa, Homo sapiens
  Table A; Target 41765; HLA-A*68:02; MAGEA9; ENSG00000123584; CTA
TSYEKVINYL

SEQ ID NO: 41766 - protein, 11 aa, Homo sapiens
  Table A; Target 41766; HLA-A*68:02; MAGEA9; ENSG00000123584; CTA
TSYEKVINYLV

SEQ ID NO: 41767 - protein, 9 aa, Homo sapiens
  Table A; Target 41767; HLA-A*26:01; MAGEA9; ENSG00000123584; CTA
VIFGKASEF

SEQ ID NO: 41768 - protein, 9 aa, Homo sapiens
  Table A; Target 41768; HLA-A*30:02; MAGEA9; ENSG00000123584; CTA
VIFGKASEF

SEQ ID NO: 41769 - protein, 9 aa, Homo sapiens
  Table A; Target 41769; HLA-A*32:01; MAGEA9; ENSG00000123584; CTA
VIFGKASEF

SEQ ID NO: 41770 - protein, 9 aa, Homo sapiens
  Table A; Target 41770; HLA-B*15:01; MAGEA9; ENSG00000123584; CTA
VIFGKASEF

SEQ ID NO: 41771 - protein, 9 aa, Homo sapiens
  Table A; Target 41771; HLA-B*15:03; MAGEA9; ENSG00000123584; CTA
VIFGKASEF

SEQ ID NO: 41772 - protein, 9 aa, Homo sapiens
  Table A; Target 41772; HLA-B*46:01; MAGEA9; ENSG00000123584; CTA
VIFGKASEF

SEQ ID NO: 41773 - protein, 9 aa, Homo sapiens
  Table A; Target 41773; HLA-C*02:02; MAGEA9; ENSG00000123584; CTA
VIFGKASEF

SEQ ID NO: 41774 - protein, 9 aa, Homo sapiens
  Table A; Target 41774; HLA-C*07:04; MAGEA9; ENSG00000123584; CTA
VIFGKASEF

SEQ ID NO: 41775 - protein, 10 aa, Homo sapiens
  Table A; Target 41775; HLA-A*02:03; MAGEA9; ENSG00000123584; CTA
VIFGTDVKEV

SEQ ID NO: 41776 - protein, 10 aa, Homo sapiens
  Table A; Target 41776; HLA-C*16:02; MAGEA9; ENSG00000123584; CTA
VIFGTDVKEV

SEQ ID NO: 41777 - protein, 11 aa, Homo sapiens
  Table A; Target 41777; HLA-A*02:07; MAGEA9; ENSG00000123584; CTA
VIWEALSVMGV

SEQ ID NO: 41778 - protein, 10 aa, Homo sapiens
  Table A; Target 41778; HLA-B*15:03; MAGEA9; ENSG00000123584; CTA
VKEPVTKAEM

SEQ ID NO: 41779 - protein, 9 aa, Homo sapiens
  Table A; Target 41779; HLA-A*02:01; MAGEA9; ENSG00000123584; CTA
VLGEEQEGV

SEQ ID NO: 41780 - protein, 9 aa, Homo sapiens
  Table A; Target 41780; HLA-A*02:03; MAGEA9; ENSG00000123584; CTA
VLGEEQEGV

SEQ ID NO: 41781 - protein, 9 aa, Homo sapiens
  Table A; Target 41781; HLA-A*02:07; MAGEA9; ENSG00000123584; CTA
VLGEEQEGV

SEQ ID NO: 41782 - protein, 9 aa, Homo sapiens
  Table A; Target 41782; HLA-B*13:02; MAGEA9; ENSG00000123584; CTA
VLGEEQEGV

SEQ ID NO: 41783 - protein, 9 aa, Homo sapiens
  Table A; Target 41783; HLA-B*55:01; MAGEA9; ENSG00000123584; CTA
VLGEEQEGV

SEQ ID NO: 41784 - protein, 8 aa, Homo sapiens
  Table A; Target 41784; HLA-A*03:01; MAGEA9; ENSG00000123584; CTA
VLGVILTK

SEQ ID NO: 41785 - protein, 8 aa, Homo sapiens
  Table A; Target 41785; HLA-A*03:02; MAGEA9; ENSG00000123584; CTA
VLGVILTK

SEQ ID NO: 41786 - protein, 8 aa, Homo sapiens
  Table A; Target 41786; HLA-A*03:02; MAGEA9; ENSG00000123584; CTA
VMGVYVGK

SEQ ID NO: 41787 - protein, 9 aa, Homo sapiens
  Table A; Target 41787; HLA-A*23:01; MAGEA9; ENSG00000123584; CTA
VMLNAREPI

SEQ ID NO: 41788 - protein, 11 aa, Homo sapiens
  Table A; Target 41788; HLA-A*29:02; MAGEA9; ENSG00000123584; CTA
VMLNAREPICY

SEQ ID NO: 41789 - protein, 9 aa, Homo sapiens
  Table A; Target 41789; HLA-A*30:02; MAGEA9; ENSG00000123584; CTA
VPGSDPAHY

SEQ ID NO: 41790 - protein, 9 aa, Homo sapiens
  Table A; Target 41790; HLA-B*35:01; MAGEA9; ENSG00000123584; CTA
VPGSDPAHY

SEQ ID NO: 41791 - protein, 9 aa, Homo sapiens
  Table A; Target 41791; HLA-B*55:01; MAGEA9; ENSG00000123584; CTA
VPGSDPAHY

SEQ ID NO: 41792 - protein, 9 aa, Homo sapiens
  Table A; Target 41792; HLA-C*03:03; MAGEA9; ENSG00000123584; CTA
VPGSDPAHY

SEQ ID NO: 41793 - protein, 11 aa, Homo sapiens
  Table A; Target 41793; HLA-B*35:01; MAGEA9; ENSG00000123584; CTA
VPGSDPAHYEF

SEQ ID NO: 41794 - protein, 11 aa, Homo sapiens
  Table A; Target 41794; HLA-B*55:01; MAGEA9; ENSG00000123584; CTA
VPGSDPAHYEF

SEQ ID NO: 41795 - protein, 9 aa, Homo sapiens
  Table A; Target 41795; HLA-A*23:01; MAGEA9; ENSG00000123584; CTA
VYVGKEHMF

SEQ ID NO: 41796 - protein, 9 aa, Homo sapiens
  Table A; Target 41796; HLA-A*24:02; MAGEA9; ENSG00000123584; CTA
VYVGKEHMF

SEQ ID NO: 41797 - protein, 10 aa, Homo sapiens
  Table A; Target 41797; HLA-A*29:02; MAGEA9; ENSG00000123584; CTA
VYVGKEHMFY

SEQ ID NO: 41798 - protein, 9 aa, Homo sapiens
  Table A; Target 41798; HLA-A*23:01; MAGEA9; ENSG00000123584; CTA
VYYTLWSQF

SEQ ID NO: 41799 - protein, 9 aa, Homo sapiens
  Table A; Target 41799; HLA-A*24:02; MAGEA9; ENSG00000123584; CTA
VYYTLWSQF

SEQ ID NO: 41800 - protein, 9 aa, Homo sapiens
  Table A; Target 41800; HLA-B*49:01; MAGEA9; ENSG00000123584; CTA
WEALSVMGV

SEQ ID NO: 41801 - protein, 9 aa, Homo sapiens
  Table A; Target 41801; HLA-B*49:01; MAGEA9; ENSG00000123584; CTA
YEFLWGSKA

SEQ ID NO: 41802 - protein, 8 aa, Homo sapiens
  Table A; Target 41802; HLA-A*30:01; MAGEA9; ENSG00000123584; CTA
YEKVINYL

SEQ ID NO: 41803 - protein, 8 aa, Homo sapiens
  Table A; Target 41803; HLA-B*08:01; MAGEA9; ENSG00000123584; CTA
YEKVINYL

SEQ ID NO: 41804 - protein, 8 aa, Homo sapiens
  Table A; Target 41804; HLA-B*18:01; MAGEA9; ENSG00000123584; CTA
YEKVINYL

SEQ ID NO: 41805 - protein, 8 aa, Homo sapiens
  Table A; Target 41805; HLA-B*37:01; MAGEA9; ENSG00000123584; CTA
YEKVINYL

SEQ ID NO: 41806 - protein, 8 aa, Homo sapiens
  Table A; Target 41806; HLA-B*40:02; MAGEA9; ENSG00000123584; CTA
YEKVINYL

SEQ ID NO: 41807 - protein, 8 aa, Homo sapiens
  Table A; Target 41807; HLA-B*49:01; MAGEA9; ENSG00000123584; CTA
YEKVINYL

SEQ ID NO: 41808 - protein, 9 aa, Homo sapiens
  Table A; Target 41808; HLA-B*49:01; MAGEA9; ENSG00000123584; CTA
YEKVINYLV

SEQ ID NO: 41809 - protein, 8 aa, Homo sapiens
  Table A; Target 41809; HLA-B*54:01; MAGEA9; ENSG00000123584; CTA
YPSLYEEV

SEQ ID NO: 41810 - protein, 8 aa, Homo sapiens
  Table A; Target 41810; HLA-B*56:01; MAGEA9; ENSG00000123584; CTA
YPSLYEEV

SEQ ID NO: 41811 - protein, 9 aa, Homo sapiens
  Table A; Target 41811; HLA-B*35:01; MAGEA9; ENSG00000123584; CTA
YPSLYEEVL

SEQ ID NO: 41812 - protein, 9 aa, Homo sapiens
  Table A; Target 41812; HLA-B*35:03; MAGEA9; ENSG00000123584; CTA
YPSLYEEVL

SEQ ID NO: 41813 - protein, 9 aa, Homo sapiens
  Table A; Target 41813; HLA-B*38:01; MAGEA9; ENSG00000123584; CTA
YPSLYEEVL

SEQ ID NO: 41814 - protein, 9 aa, Homo sapiens
  Table A; Target 41814; HLA-B*55:01; MAGEA9; ENSG00000123584; CTA
YPSLYEEVL

SEQ ID NO: 41815 - protein, 9 aa, Homo sapiens
  Table A; Target 41815; HLA-C*03:03; MAGEA9; ENSG00000123584; CTA
YPSLYEEVL

SEQ ID NO: 41816 - protein, 9 aa, Homo sapiens
  Table A; Target 41816; HLA-B*27:02; MAGEA9; ENSG00000123584; CTA
YRVKEPVTK

SEQ ID NO: 41817 - protein, 9 aa, Homo sapiens
  Table A; Target 41817; HLA-B*27:05; MAGEA9; ENSG00000123584; CTA
YRVKEPVTK

SEQ ID NO: 41818 - protein, 9 aa, Homo sapiens
  Table A; Target 41818; HLA-A*01:01; MAGEA9; ENSG00000123584; CTA
YVGKEHMFY

SEQ ID NO: 41819 - protein, 9 aa, Homo sapiens
  Table A; Target 41819; HLA-A*29:02; MAGEA9; ENSG00000123584; CTA
YVGKEHMFY

SEQ ID NO: 41820 - protein, 8 aa, Homo sapiens
  Table A; Target 41820; HLA-A*24:02; MAGEA9; ENSG00000123584; CTA
YYTLWSQF

SEQ ID NO: 41821 - protein, 8 aa, Homo sapiens
  Table A; Target 41821; HLA-B*37:01; MAGEB1; ENSG00000214107; CTA
AETTKMKV

SEQ ID NO: 41822 - protein, 8 aa, Homo sapiens
  Table A; Target 41822; HLA-B*49:01; MAGEB1; ENSG00000214107; CTA
AETTKMKV

SEQ ID NO: 41823 - protein, 9 aa, Homo sapiens
  Table A; Target 41823; HLA-A*30:01; MAGEB1; ENSG00000214107; CTA
AETTKMKVL

SEQ ID NO: 41824 - protein, 9 aa, Homo sapiens
  Table A; Target 41824; HLA-B*37:01; MAGEB1; ENSG00000214107; CTA
AETTKMKVL

SEQ ID NO: 41825 - protein, 9 aa, Homo sapiens
  Table A; Target 41825; HLA-B*40:01; MAGEB1; ENSG00000214107; CTA
AETTKMKVL

SEQ ID NO: 41826 - protein, 9 aa, Homo sapiens
  Table A; Target 41826; HLA-B*40:02; MAGEB1; ENSG00000214107; CTA
AETTKMKVL

SEQ ID NO: 41827 - protein, 9 aa, Homo sapiens
  Table A; Target 41827; HLA-B*44:02; MAGEB1; ENSG00000214107; CTA
AETTKMKVL

SEQ ID NO: 41828 - protein, 9 aa, Homo sapiens
  Table A; Target 41828; HLA-B*44:03; MAGEB1; ENSG00000214107; CTA
AETTKMKVL

SEQ ID NO: 41829 - protein, 9 aa, Homo sapiens
  Table A; Target 41829; HLA-B*49:01; MAGEB1; ENSG00000214107; CTA
AETTKMKVL

SEQ ID NO: 41830 - protein, 9 aa, Homo sapiens
  Table A; Target 41830; HLA-C*16:02; MAGEB1; ENSG00000214107; CTA
AETTKMKVL

SEQ ID NO: 41831 - protein, 9 aa, Homo sapiens
  Table A; Target 41831; HLA-C*16:04; MAGEB1; ENSG00000214107; CTA
AETTKMKVL

SEQ ID NO: 41832 - protein, 11 aa, Homo sapiens
  Table A; Target 41832; HLA-A*02:01; MAGEB1; ENSG00000214107; CTA
ALRDEEERAQV

SEQ ID NO: 41833 - protein, 11 aa, Homo sapiens
  Table A; Target 41833; HLA-A*02:03; MAGEB1; ENSG00000214107; CTA
ALRDEEERAQV

SEQ ID NO: 41834 - protein, 11 aa, Homo sapiens
  Table A; Target 41834; HLA-B*55:01; MAGEB1; ENSG00000214107; CTA
ALRDEEERAQV

SEQ ID NO: 41835 - protein, 8 aa, Homo sapiens
  Table A; Target 41835; HLA-B*07:02; MAGEB1; ENSG00000214107; CTA
APFSRSSH

SEQ ID NO: 41836 - protein, 9 aa, Homo sapiens
  Table A; Target 41836; HLA-B*07:02; MAGEB1; ENSG00000214107; CTA
APFSRSSHP

SEQ ID NO: 41837 - protein, 9 aa, Homo sapiens
  Table A; Target 41837; HLA-B*55:01; MAGEB1; ENSG00000214107; CTA
APFSRSSHP

SEQ ID NO: 41838 - protein, 9 aa, Homo sapiens
  Table A; Target 41838; HLA-B*56:01; MAGEB1; ENSG00000214107; CTA
APFSRSSHP

SEQ ID NO: 41839 - protein, 9 aa, Homo sapiens
  Table A; Target 41839; HLA-C*07:02; MAGEB1; ENSG00000214107; CTA
APFSRSSHP

SEQ ID NO: 41840 - protein, 10 aa, Homo sapiens
  Table A; Target 41840; HLA-B*08:01; MAGEB1; ENSG00000214107; CTA
APFSRSSHPM

SEQ ID NO: 41841 - protein, 10 aa, Homo sapiens
  Table A; Target 41841; HLA-B*35:01; MAGEB1; ENSG00000214107; CTA
APFSRSSHPM

SEQ ID NO: 41842 - protein, 10 aa, Homo sapiens
  Table A; Target 41842; HLA-B*35:03; MAGEB1; ENSG00000214107; CTA
APFSRSSHPM

SEQ ID NO: 41843 - protein, 10 aa, Homo sapiens
  Table A; Target 41843; HLA-B*40:02; MAGEB1; ENSG00000214107; CTA
APFSRSSHPM

SEQ ID NO: 41844 - protein, 10 aa, Homo sapiens
  Table A; Target 41844; HLA-B*54:01; MAGEB1; ENSG00000214107; CTA
APFSRSSHPM

SEQ ID NO: 41845 - protein, 10 aa, Homo sapiens
  Table A; Target 41845; HLA-B*55:01; MAGEB1; ENSG00000214107; CTA
APFSRSSHPM

SEQ ID NO: 41846 - protein, 10 aa, Homo sapiens
  Table A; Target 41846; HLA-B*56:01; MAGEB1; ENSG00000214107; CTA
APFSRSSHPM

SEQ ID NO: 41847 - protein, 10 aa, Homo sapiens
  Table A; Target 41847; HLA-C*04:01; MAGEB1; ENSG00000214107; CTA
APFSRSSHPM

SEQ ID NO: 41848 - protein, 10 aa, Homo sapiens
  Table A; Target 41848; HLA-C*06:02; MAGEB1; ENSG00000214107; CTA
APFSRSSHPM

SEQ ID NO: 41849 - protein, 10 aa, Homo sapiens
  Table A; Target 41849; HLA-C*07:01; MAGEB1; ENSG00000214107; CTA
APFSRSSHPM

SEQ ID NO: 41850 - protein, 10 aa, Homo sapiens
  Table A; Target 41850; HLA-C*07:02; MAGEB1; ENSG00000214107; CTA
APFSRSSHPM

SEQ ID NO: 41851 - protein, 8 aa, Homo sapiens
  Table A; Target 41851; HLA-B*56:01; MAGEB1; ENSG00000214107; CTA
APPTTTAA

SEQ ID NO: 41852 - protein, 9 aa, Homo sapiens
  Table A; Target 41852; HLA-B*07:02; MAGEB1; ENSG00000214107; CTA
APPTTTAAA

SEQ ID NO: 41853 - protein, 9 aa, Homo sapiens
  Table A; Target 41853; HLA-B*54:01; MAGEB1; ENSG00000214107; CTA
APPTTTAAA

SEQ ID NO: 41854 - protein, 9 aa, Homo sapiens
  Table A; Target 41854; HLA-B*55:01; MAGEB1; ENSG00000214107; CTA
APPTTTAAA

SEQ ID NO: 41855 - protein, 9 aa, Homo sapiens
  Table A; Target 41855; HLA-B*56:01; MAGEB1; ENSG00000214107; CTA
APPTTTAAA

SEQ ID NO: 41856 - protein, 9 aa, Homo sapiens
  Table A; Target 41856; HLA-C*01:02; MAGEB1; ENSG00000214107; CTA
APPTTTAAA

SEQ ID NO: 41857 - protein, 9 aa, Homo sapiens
  Table A; Target 41857; HLA-C*14:02; MAGEB1; ENSG00000214107; CTA
APPTTTAAA

SEQ ID NO: 41858 - protein, 10 aa, Homo sapiens
  Table A; Target 41858; HLA-B*56:01; MAGEB1; ENSG00000214107; CTA
APPTTTAAAA

SEQ ID NO: 41859 - protein, 11 aa, Homo sapiens
  Table A; Target 41859; HLA-B*07:02; MAGEB1; ENSG00000214107; CTA
APPTTTAAAAV

SEQ ID NO: 41860 - protein, 11 aa, Homo sapiens
  Table A; Target 41860; HLA-B*56:01; MAGEB1; ENSG00000214107; CTA
APPTTTAAAAV

SEQ ID NO: 41861 - protein, 11 aa, Homo sapiens
  Table A; Target 41861; HLA-C*07:02; MAGEB1; ENSG00000214107; CTA
APPTTTAAAAV

SEQ ID NO: 41862 - protein, 9 aa, Homo sapiens
  Table A; Target 41862; HLA-B*27:05; MAGEB1; ENSG00000214107; CTA
ARSRAPFSR

SEQ ID NO: 41863 - protein, 10 aa, Homo sapiens
  Table A; Target 41863; HLA-C*04:01; MAGEB1; ENSG00000214107; CTA
ASFSQATTST

SEQ ID NO: 41864 - protein, 9 aa, Homo sapiens
  Table A; Target 41864; HLA-B*57:01; MAGEB1; ENSG00000214107; CTA
ASRRLELVF

SEQ ID NO: 41865 - protein, 9 aa, Homo sapiens
  Table A; Target 41865; HLA-C*05:01; MAGEB1; ENSG00000214107; CTA
ATEEEIWKF

SEQ ID NO: 41866 - protein, 10 aa, Homo sapiens
  Table A; Target 41866; HLA-A*01:01; MAGEB1; ENSG00000214107; CTA
ATPRDFPSHY

SEQ ID NO: 41867 - protein, 10 aa, Homo sapiens
  Table A; Target 41867; HLA-A*30:02; MAGEB1; ENSG00000214107; CTA
ATPRDFPSHY

SEQ ID NO: 41868 - protein, 9 aa, Homo sapiens
  Table A; Target 41868; HLA-C*16:01; MAGEB1; ENSG00000214107; CTA
ATTFRARSR

SEQ ID NO: 41869 - protein, 9 aa, Homo sapiens
  Table A; Target 41869; HLA-B*13:02; MAGEB1; ENSG00000214107; CTA
ATTSTESSV

SEQ ID NO: 41870 - protein, 9 aa, Homo sapiens
  Table A; Target 41870; HLA-C*16:02; MAGEB1; ENSG00000214107; CTA
ATTSTESSV

SEQ ID NO: 41871 - protein, 10 aa, Homo sapiens
  Table A; Target 41871; HLA-A*03:02; MAGEB1; ENSG00000214107; CTA
ATTSTESSVK

SEQ ID NO: 41872 - protein, 10 aa, Homo sapiens
  Table A; Target 41872; HLA-A*11:01; MAGEB1; ENSG00000214107; CTA
ATTSTESSVK

SEQ ID NO: 41873 - protein, 10 aa, Homo sapiens
  Table A; Target 41873; HLA-A*24:02; MAGEB1; ENSG00000214107; CTA
AWEAGMLMHF

SEQ ID NO: 41874 - protein, 8 aa, Homo sapiens
  Table A; Target 41874; HLA-A*32:01; MAGEB1; ENSG00000214107; CTA
AYAETTKM

SEQ ID NO: 41875 - protein, 8 aa, Homo sapiens
  Table A; Target 41875; HLA-C*16:02; MAGEB1; ENSG00000214107; CTA
AYAETTKM

SEQ ID NO: 41876 - protein, 9 aa, Homo sapiens
  Table A; Target 41876; HLA-A*03:02; MAGEB1; ENSG00000214107; CTA
AYAETTKMK

SEQ ID NO: 41877 - protein, 9 aa, Homo sapiens
  Table A; Target 41877; HLA-A*33:03; MAGEB1; ENSG00000214107; CTA
AYAETTKMK

SEQ ID NO: 41878 - protein, 9 aa, Homo sapiens
  Table A; Target 41878; HLA-C*16:02; MAGEB1; ENSG00000214107; CTA
AYAETTKMK

SEQ ID NO: 41879 - protein, 11 aa, Homo sapiens
  Table A; Target 41879; HLA-A*24:02; MAGEB1; ENSG00000214107; CTA
AYAETTKMKVL

SEQ ID NO: 41880 - protein, 8 aa, Homo sapiens
  Table A; Target 41880; HLA-C*04:01; MAGEB1; ENSG00000214107; CTA
AYDGEEHL

SEQ ID NO: 41881 - protein, 9 aa, Homo sapiens
  Table A; Target 41881; HLA-A*23:01; MAGEB1; ENSG00000214107; CTA
AYDGEEHLI

SEQ ID NO: 41882 - protein, 9 aa, Homo sapiens
  Table A; Target 41882; HLA-A*24:02; MAGEB1; ENSG00000214107; CTA
AYDGEEHLI

SEQ ID NO: 41883 - protein, 9 aa, Homo sapiens
  Table A; Target 41883; HLA-B*35:03; MAGEB1; ENSG00000214107; CTA
AYDGEEHLI

SEQ ID NO: 41884 - protein, 9 aa, Homo sapiens
  Table A; Target 41884; HLA-B*38:01; MAGEB1; ENSG00000214107; CTA
AYDGEEHLI

SEQ ID NO: 41885 - protein, 9 aa, Homo sapiens
  Table A; Target 41885; HLA-B*55:01; MAGEB1; ENSG00000214107; CTA
AYDGEEHLI

SEQ ID NO: 41886 - protein, 9 aa, Homo sapiens
  Table A; Target 41886; HLA-C*04:01; MAGEB1; ENSG00000214107; CTA
AYDGEEHLI

SEQ ID NO: 41887 - protein, 9 aa, Homo sapiens
  Table A; Target 41887; HLA-C*05:01; MAGEB1; ENSG00000214107; CTA
AYDGEEHLI

SEQ ID NO: 41888 - protein, 9 aa, Homo sapiens
  Table A; Target 41888; HLA-C*07:04; MAGEB1; ENSG00000214107; CTA
AYDGEEHLI

SEQ ID NO: 41889 - protein, 10 aa, Homo sapiens
  Table A; Target 41889; HLA-A*01:01; MAGEB1; ENSG00000214107; CTA
AYDGEEHLIY

SEQ ID NO: 41890 - protein, 10 aa, Homo sapiens
  Table A; Target 41890; HLA-A*29:02; MAGEB1; ENSG00000214107; CTA
AYDGEEHLIY

SEQ ID NO: 41891 - protein, 10 aa, Homo sapiens
  Table A; Target 41891; HLA-A*30:02; MAGEB1; ENSG00000214107; CTA
AYDGEEHLIY

SEQ ID NO: 41892 - protein, 8 aa, Homo sapiens
  Table A; Target 41892; HLA-B*07:02; MAGEB1; ENSG00000214107; CTA
CPSSSPVL

SEQ ID NO: 41893 - protein, 8 aa, Homo sapiens
  Table A; Target 41893; HLA-B*35:01; MAGEB1; ENSG00000214107; CTA
CPSSSPVL

SEQ ID NO: 41894 - protein, 8 aa, Homo sapiens
  Table A; Target 41894; HLA-B*35:03; MAGEB1; ENSG00000214107; CTA
CPSSSPVL

SEQ ID NO: 41895 - protein, 8 aa, Homo sapiens
  Table A; Target 41895; HLA-C*07:02; MAGEB1; ENSG00000214107; CTA
CPSSSPVL

SEQ ID NO: 41896 - protein, 9 aa, Homo sapiens
  Table A; Target 41896; HLA-A*32:01; MAGEB1; ENSG00000214107; CTA
CQGEENASF

SEQ ID NO: 41897 - protein, 9 aa, Homo sapiens
  Table A; Target 41897; HLA-B*15:01; MAGEB1; ENSG00000214107; CTA
CQGEENASF

SEQ ID NO: 41898 - protein, 9 aa, Homo sapiens
  Table A; Target 41898; HLA-B*15:03; MAGEB1; ENSG00000214107; CTA
CQGEENASF

SEQ ID NO: 41899 - protein, 9 aa, Homo sapiens
  Table A; Target 41899; HLA-B*27:05; MAGEB1; ENSG00000214107; CTA
CQGEENASF

SEQ ID NO: 41900 - protein, 9 aa, Homo sapiens
  Table A; Target 41900; HLA-B*38:01; MAGEB1; ENSG00000214107; CTA
CQGEENASF

SEQ ID NO: 41901 - protein, 9 aa, Homo sapiens
  Table A; Target 41901; HLA-C*07:04; MAGEB1; ENSG00000214107; CTA
CQGEENASF

SEQ ID NO: 41902 - protein, 8 aa, Homo sapiens
  Table A; Target 41902; HLA-B*18:01; MAGEB1; ENSG00000214107; CTA
DEEERAQV

SEQ ID NO: 41903 - protein, 9 aa, Homo sapiens
  Table A; Target 41903; HLA-B*18:01; MAGEB1; ENSG00000214107; CTA
DEEERAQVR

SEQ ID NO: 41904 - protein, 10 aa, Homo sapiens
  Table A; Target 41904; HLA-B*39:01; MAGEB1; ENSG00000214107; CTA
DHFTEILNGA

SEQ ID NO: 41905 - protein, 9 aa, Homo sapiens
  Table A; Target 41905; HLA-A*33:01; MAGEB1; ENSG00000214107; CTA
DLVQEKYLK

SEQ ID NO: 41906 - protein, 10 aa, Homo sapiens
  Table A; Target 41906; HLA-A*25:01; MAGEB1; ENSG00000214107; CTA
DLVQEKYLKY

SEQ ID NO: 41907 - protein, 10 aa, Homo sapiens
  Table A; Target 41907; HLA-A*26:01; MAGEB1; ENSG00000214107; CTA
DLVQEKYLKY

SEQ ID NO: 41908 - protein, 9 aa, Homo sapiens
  Table A; Target 41908; HLA-A*33:01; MAGEB1; ENSG00000214107; CTA
DMLKVVDEK

SEQ ID NO: 41909 - protein, 10 aa, Homo sapiens
  Table A; Target 41909; HLA-A*01:01; MAGEB1; ENSG00000214107; CTA
DMLKVVDEKY

SEQ ID NO: 41910 - protein, 10 aa, Homo sapiens
  Table A; Target 41910; HLA-B*18:01; MAGEB1; ENSG00000214107; CTA
DMLKVVDEKY

SEQ ID NO: 41911 - protein, 8 aa, Homo sapiens
  Table A; Target 41911; HLA-C*03:03; MAGEB1; ENSG00000214107; CTA
DNPSGHTY

SEQ ID NO: 41912 - protein, 8 aa, Homo sapiens
  Table A; Target 41912; HLA-C*07:01; MAGEB1; ENSG00000214107; CTA
DNPSGHTY

SEQ ID NO: 41913 - protein, 9 aa, Homo sapiens
  Table A; Target 41913; HLA-B*35:01; MAGEB1; ENSG00000214107; CTA
DPVAWEAGM

SEQ ID NO: 41914 - protein, 9 aa, Homo sapiens
  Table A; Target 41914; HLA-B*35:03; MAGEB1; ENSG00000214107; CTA
DPVAWEAGM

SEQ ID NO: 41915 - protein, 9 aa, Homo sapiens
  Table A; Target 41915; HLA-A*26:01; MAGEB1; ENSG00000214107; CTA
DTPTSSPAA

SEQ ID NO: 41916 - protein, 8 aa, Homo sapiens
  Table A; Target 41916; HLA-C*07:01; MAGEB1; ENSG00000214107; CTA
EAGMLMHF

SEQ ID NO: 41917 - protein, 9 aa, Homo sapiens
  Table A; Target 41917; HLA-A*25:01; MAGEB1; ENSG00000214107; CTA
EDNPSGHTY

SEQ ID NO: 41918 - protein, 9 aa, Homo sapiens
  Table A; Target 41918; HLA-A*26:01; MAGEB1; ENSG00000214107; CTA
EDNPSGHTY

SEQ ID NO: 41919 - protein, 9 aa, Homo sapiens
  Table A; Target 41919; HLA-A*29:02; MAGEB1; ENSG00000214107; CTA
EDNPSGHTY

SEQ ID NO: 41920 - protein, 9 aa, Homo sapiens
  Table A; Target 41920; HLA-A*30:02; MAGEB1; ENSG00000214107; CTA
EDNPSGHTY

SEQ ID NO: 41921 - protein, 9 aa, Homo sapiens
  Table A; Target 41921; HLA-A*32:01; MAGEB1; ENSG00000214107; CTA
EDNPSGHTY

SEQ ID NO: 41922 - protein, 9 aa, Homo sapiens
  Table A; Target 41922; HLA-A*33:01; MAGEB1; ENSG00000214107; CTA
EDNPSGHTY

SEQ ID NO: 41923 - protein, 9 aa, Homo sapiens
  Table A; Target 41923; HLA-A*33:03; MAGEB1; ENSG00000214107; CTA
EDNPSGHTY

SEQ ID NO: 41924 - protein, 9 aa, Homo sapiens
  Table A; Target 41924; HLA-B*15:01; MAGEB1; ENSG00000214107; CTA
EDNPSGHTY

SEQ ID NO: 41925 - protein, 9 aa, Homo sapiens
  Table A; Target 41925; HLA-B*15:03; MAGEB1; ENSG00000214107; CTA
EDNPSGHTY

SEQ ID NO: 41926 - protein, 9 aa, Homo sapiens
  Table A; Target 41926; HLA-B*18:01; MAGEB1; ENSG00000214107; CTA
EDNPSGHTY

SEQ ID NO: 41927 - protein, 9 aa, Homo sapiens
  Table A; Target 41927; HLA-B*27:02; MAGEB1; ENSG00000214107; CTA
EDNPSGHTY

SEQ ID NO: 41928 - protein, 9 aa, Homo sapiens
  Table A; Target 41928; HLA-B*35:01; MAGEB1; ENSG00000214107; CTA
EDNPSGHTY

SEQ ID NO: 41929 - protein, 9 aa, Homo sapiens
  Table A; Target 41929; HLA-B*37:01; MAGEB1; ENSG00000214107; CTA
EDNPSGHTY

SEQ ID NO: 41930 - protein, 9 aa, Homo sapiens
  Table A; Target 41930; HLA-B*38:01; MAGEB1; ENSG00000214107; CTA
EDNPSGHTY

SEQ ID NO: 41931 - protein, 9 aa, Homo sapiens
  Table A; Target 41931; HLA-B*44:02; MAGEB1; ENSG00000214107; CTA
EDNPSGHTY

SEQ ID NO: 41932 - protein, 9 aa, Homo sapiens
  Table A; Target 41932; HLA-B*44:03; MAGEB1; ENSG00000214107; CTA
EDNPSGHTY

SEQ ID NO: 41933 - protein, 9 aa, Homo sapiens
  Table A; Target 41933; HLA-C*04:01; MAGEB1; ENSG00000214107; CTA
EDNPSGHTY

SEQ ID NO: 41934 - protein, 9 aa, Homo sapiens
  Table A; Target 41934; HLA-C*07:01; MAGEB1; ENSG00000214107; CTA
EDNPSGHTY

SEQ ID NO: 41935 - protein, 9 aa, Homo sapiens
  Table A; Target 41935; HLA-C*07:04; MAGEB1; ENSG00000214107; CTA
EDNPSGHTY

SEQ ID NO: 41936 - protein, 9 aa, Homo sapiens
  Table A; Target 41936; HLA-C*07:06; MAGEB1; ENSG00000214107; CTA
EDNPSGHTY

SEQ ID NO: 41937 - protein, 9 aa, Homo sapiens
  Table A; Target 41937; HLA-C*14:02; MAGEB1; ENSG00000214107; CTA
EDNPSGHTY

SEQ ID NO: 41938 - protein, 9 aa, Homo sapiens
  Table A; Target 41938; HLA-C*16:01; MAGEB1; ENSG00000214107; CTA
EDNPSGHTY

SEQ ID NO: 41939 - protein, 9 aa, Homo sapiens
  Table A; Target 41939; HLA-C*16:02; MAGEB1; ENSG00000214107; CTA
EDNPSGHTY

SEQ ID NO: 41940 - protein, 9 aa, Homo sapiens
  Table A; Target 41940; HLA-C*16:04; MAGEB1; ENSG00000214107; CTA
EDNPSGHTY

SEQ ID NO: 41941 - protein, 11 aa, Homo sapiens
  Table A; Target 41941; HLA-A*23:01; MAGEB1; ENSG00000214107; CTA
EDNPSGHTYTL

SEQ ID NO: 41942 - protein, 11 aa, Homo sapiens
  Table A; Target 41942; HLA-A*30:01; MAGEB1; ENSG00000214107; CTA
EDNPSGHTYTL

SEQ ID NO: 41943 - protein, 11 aa, Homo sapiens
  Table A; Target 41943; HLA-A*33:03; MAGEB1; ENSG00000214107; CTA
EDNPSGHTYTL

SEQ ID NO: 41944 - protein, 11 aa, Homo sapiens
  Table A; Target 41944; HLA-B*07:02; MAGEB1; ENSG00000214107; CTA
EDNPSGHTYTL

SEQ ID NO: 41945 - protein, 11 aa, Homo sapiens
  Table A; Target 41945; HLA-B*37:01; MAGEB1; ENSG00000214107; CTA
EDNPSGHTYTL

SEQ ID NO: 41946 - protein, 11 aa, Homo sapiens
  Table A; Target 41946; HLA-B*38:01; MAGEB1; ENSG00000214107; CTA
EDNPSGHTYTL

SEQ ID NO: 41947 - protein, 11 aa, Homo sapiens
  Table A; Target 41947; HLA-B*44:02; MAGEB1; ENSG00000214107; CTA
EDNPSGHTYTL

SEQ ID NO: 41948 - protein, 9 aa, Homo sapiens
  Table A; Target 41948; HLA-B*49:01; MAGEB1; ENSG00000214107; CTA
EECPSSSPV

SEQ ID NO: 41949 - protein, 10 aa, Homo sapiens
  Table A; Target 41949; HLA-A*30:01; MAGEB1; ENSG00000214107; CTA
EECPSSSPVL

SEQ ID NO: 41950 - protein, 10 aa, Homo sapiens
  Table A; Target 41950; HLA-B*38:01; MAGEB1; ENSG00000214107; CTA
EECPSSSPVL

SEQ ID NO: 41951 - protein, 10 aa, Homo sapiens
  Table A; Target 41951; HLA-B*40:01; MAGEB1; ENSG00000214107; CTA
EECPSSSPVL

SEQ ID NO: 41952 - protein, 10 aa, Homo sapiens
  Table A; Target 41952; HLA-B*40:02; MAGEB1; ENSG00000214107; CTA
EECPSSSPVL

SEQ ID NO: 41953 - protein, 10 aa, Homo sapiens
  Table A; Target 41953; HLA-B*44:02; MAGEB1; ENSG00000214107; CTA
EECPSSSPVL

SEQ ID NO: 41954 - protein, 10 aa, Homo sapiens
  Table A; Target 41954; HLA-B*44:03; MAGEB1; ENSG00000214107; CTA
EECPSSSPVL

SEQ ID NO: 41955 - protein, 9 aa, Homo sapiens
  Table A; Target 41955; HLA-A*68:02; MAGEB1; ENSG00000214107; CTA
EEIWKFMNV

SEQ ID NO: 41956 - protein, 9 aa, Homo sapiens
  Table A; Target 41956; HLA-B*49:01; MAGEB1; ENSG00000214107; CTA
EEIWKFMNV

SEQ ID NO: 41957 - protein, 9 aa, Homo sapiens
  Table A; Target 41957; HLA-A*30:01; MAGEB1; ENSG00000214107; CTA
EENASFSQA

SEQ ID NO: 41958 - protein, 9 aa, Homo sapiens
  Table A; Target 41958; HLA-B*18:01; MAGEB1; ENSG00000214107; CTA
EENASFSQA

SEQ ID NO: 41959 - protein, 9 aa, Homo sapiens
  Table A; Target 41959; HLA-B*40:02; MAGEB1; ENSG00000214107; CTA
EENASFSQA

SEQ ID NO: 41960 - protein, 9 aa, Homo sapiens
  Table A; Target 41960; HLA-B*44:02; MAGEB1; ENSG00000214107; CTA
EENASFSQA

SEQ ID NO: 41961 - protein, 9 aa, Homo sapiens
  Table A; Target 41961; HLA-B*49:01; MAGEB1; ENSG00000214107; CTA
EENASFSQA

SEQ ID NO: 41962 - protein, 8 aa, Homo sapiens
  Table A; Target 41962; HLA-B*18:01; MAGEB1; ENSG00000214107; CTA
EETQGLKV

SEQ ID NO: 41963 - protein, 8 aa, Homo sapiens
  Table A; Target 41963; HLA-B*40:02; MAGEB1; ENSG00000214107; CTA
EETQGLKV

SEQ ID NO: 41964 - protein, 8 aa, Homo sapiens
  Table A; Target 41964; HLA-B*44:03; MAGEB1; ENSG00000214107; CTA
EETQGLKV

SEQ ID NO: 41965 - protein, 8 aa, Homo sapiens
  Table A; Target 41965; HLA-B*49:01; MAGEB1; ENSG00000214107; CTA
EETQGLKV

SEQ ID NO: 41966 - protein, 9 aa, Homo sapiens
  Table A; Target 41966; HLA-A*30:01; MAGEB1; ENSG00000214107; CTA
EETQGLKVA

SEQ ID NO: 41967 - protein, 9 aa, Homo sapiens
  Table A; Target 41967; HLA-B*18:01; MAGEB1; ENSG00000214107; CTA
EETQGLKVA

SEQ ID NO: 41968 - protein, 9 aa, Homo sapiens
  Table A; Target 41968; HLA-B*44:02; MAGEB1; ENSG00000214107; CTA
EETQGLKVA

SEQ ID NO: 41969 - protein, 9 aa, Homo sapiens
  Table A; Target 41969; HLA-B*44:03; MAGEB1; ENSG00000214107; CTA
EETQGLKVA

SEQ ID NO: 41970 - protein, 9 aa, Homo sapiens
  Table A; Target 41970; HLA-B*49:01; MAGEB1; ENSG00000214107; CTA
EETQGLKVA

SEQ ID NO: 41971 - protein, 10 aa, Homo sapiens
  Table A; Target 41971; HLA-B*18:01; MAGEB1; ENSG00000214107; CTA
EETQGLKVAH

SEQ ID NO: 41972 - protein, 10 aa, Homo sapiens
  Table A; Target 41972; HLA-B*40:02; MAGEB1; ENSG00000214107; CTA
EETQGLKVAH

SEQ ID NO: 41973 - protein, 10 aa, Homo sapiens
  Table A; Target 41973; HLA-B*44:02; MAGEB1; ENSG00000214107; CTA
EETQGLKVAH

SEQ ID NO: 41974 - protein, 10 aa, Homo sapiens
  Table A; Target 41974; HLA-B*44:03; MAGEB1; ENSG00000214107; CTA
EETQGLKVAH

SEQ ID NO: 41975 - protein, 9 aa, Homo sapiens
  Table A; Target 41975; HLA-A*33:01; MAGEB1; ENSG00000214107; CTA
EHLIYGEPR

SEQ ID NO: 41976 - protein, 9 aa, Homo sapiens
  Table A; Target 41976; HLA-A*33:03; MAGEB1; ENSG00000214107; CTA
EHLIYGEPR

SEQ ID NO: 41977 - protein, 8 aa, Homo sapiens
  Table A; Target 41977; HLA-A*33:01; MAGEB1; ENSG00000214107; CTA
EILNGASR

SEQ ID NO: 41978 - protein, 8 aa, Homo sapiens
  Table A; Target 41978; HLA-A*33:03; MAGEB1; ENSG00000214107; CTA
EILNGASR

SEQ ID NO: 41979 - protein, 9 aa, Homo sapiens
  Table A; Target 41979; HLA-A*33:01; MAGEB1; ENSG00000214107; CTA
EILNGASRR

SEQ ID NO: 41980 - protein, 9 aa, Homo sapiens
  Table A; Target 41980; HLA-A*33:03; MAGEB1; ENSG00000214107; CTA
EILNGASRR

SEQ ID NO: 41981 - protein, 9 aa, Homo sapiens
  Table A; Target 41981; HLA-A*68:02; MAGEB1; ENSG00000214107; CTA
EIWKFMNVL

SEQ ID NO: 41982 - protein, 8 aa, Homo sapiens
  Table A; Target 41982; HLA-B*08:01; MAGEB1; ENSG00000214107; CTA
EPIMKADM

SEQ ID NO: 41983 - protein, 9 aa, Homo sapiens
  Table A; Target 41983; HLA-B*07:02; MAGEB1; ENSG00000214107; CTA
EPIMKADML

SEQ ID NO: 41984 - protein, 9 aa, Homo sapiens
  Table A; Target 41984; HLA-B*08:01; MAGEB1; ENSG00000214107; CTA
EPIMKADML

SEQ ID NO: 41985 - protein, 9 aa, Homo sapiens
  Table A; Target 41985; HLA-B*35:01; MAGEB1; ENSG00000214107; CTA
EPIMKADML

SEQ ID NO: 41986 - protein, 9 aa, Homo sapiens
  Table A; Target 41986; HLA-B*35:03; MAGEB1; ENSG00000214107; CTA
EPIMKADML

SEQ ID NO: 41987 - protein, 9 aa, Homo sapiens
  Table A; Target 41987; HLA-C*07:02; MAGEB1; ENSG00000214107; CTA
EPIMKADML

SEQ ID NO: 41988 - protein, 10 aa, Homo sapiens
  Table A; Target 41988; HLA-A*33:03; MAGEB1; ENSG00000214107; CTA
EQVPNSDPPR

SEQ ID NO: 41989 - protein, 10 aa, Homo sapiens
  Table A; Target 41989; HLA-A*68:01; MAGEB1; ENSG00000214107; CTA
EQVPNSDPPR

SEQ ID NO: 41990 - protein, 10 aa, Homo sapiens
  Table A; Target 41990; HLA-B*27:02; MAGEB1; ENSG00000214107; CTA
EQVPNSDPPR

SEQ ID NO: 41991 - protein, 10 aa, Homo sapiens
  Table A; Target 41991; HLA-B*39:01; MAGEB1; ENSG00000214107; CTA
EQVPNSDPPR

SEQ ID NO: 41992 - protein, 10 aa, Homo sapiens
  Table A; Target 41992; HLA-C*07:06; MAGEB1; ENSG00000214107; CTA
EQVPNSDPPR

SEQ ID NO: 41993 - protein, 11 aa, Homo sapiens
  Table A; Target 41993; HLA-A*25:01; MAGEB1; ENSG00000214107; CTA
EQVPNSDPPRY

SEQ ID NO: 41994 - protein, 11 aa, Homo sapiens
  Table A; Target 41994; HLA-A*26:01; MAGEB1; ENSG00000214107; CTA
EQVPNSDPPRY

SEQ ID NO: 41995 - protein, 11 aa, Homo sapiens
  Table A; Target 41995; HLA-A*29:02; MAGEB1; ENSG00000214107; CTA
EQVPNSDPPRY

SEQ ID NO: 41996 - protein, 11 aa, Homo sapiens
  Table A; Target 41996; HLA-A*30:02; MAGEB1; ENSG00000214107; CTA
EQVPNSDPPRY

SEQ ID NO: 41997 - protein, 11 aa, Homo sapiens
  Table A; Target 41997; HLA-B*15:01; MAGEB1; ENSG00000214107; CTA
EQVPNSDPPRY

SEQ ID NO: 41998 - protein, 11 aa, Homo sapiens
  Table A; Target 41998; HLA-B*38:01; MAGEB1; ENSG00000214107; CTA
EQVPNSDPPRY

SEQ ID NO: 41999 - protein, 11 aa, Homo sapiens
  Table A; Target 41999; HLA-B*39:01; MAGEB1; ENSG00000214107; CTA
EQVPNSDPPRY

SEQ ID NO: 42000 - protein, 11 aa, Homo sapiens
  Table A; Target 42000; HLA-B*44:02; MAGEB1; ENSG00000214107; CTA
EQVPNSDPPRY

SEQ ID NO: 42001 - protein, 11 aa, Homo sapiens
  Table A; Target 42001; HLA-B*44:03; MAGEB1; ENSG00000214107; CTA
EQVPNSDPPRY

SEQ ID NO: 42002 - protein, 11 aa, Homo sapiens
  Table A; Target 42002; HLA-B*58:01; MAGEB1; ENSG00000214107; CTA
EQVPNSDPPRY

SEQ ID NO: 42003 - protein, 11 aa, Homo sapiens
  Table A; Target 42003; HLA-C*16:04; MAGEB1; ENSG00000214107; CTA
EQVPNSDPPRY

SEQ ID NO: 42004 - protein, 9 aa, Homo sapiens
  Table A; Target 42004; HLA-C*06:02; MAGEB1; ENSG00000214107; CTA
ERAQVRSSV

SEQ ID NO: 42005 - protein, 8 aa, Homo sapiens
  Table A; Target 42005; HLA-C*05:01; MAGEB1; ENSG00000214107; CTA
ESDEGAKC

SEQ ID NO: 42006 - protein, 10 aa, Homo sapiens
  Table A; Target 42006; HLA-A*25:01; MAGEB1; ENSG00000214107; CTA
ESSVKDPVAW

SEQ ID NO: 42007 - protein, 10 aa, Homo sapiens
  Table A; Target 42007; HLA-B*57:01; MAGEB1; ENSG00000214107; CTA
ESSVKDPVAW

SEQ ID NO: 42008 - protein, 9 aa, Homo sapiens
  Table A; Target 42008; HLA-A*33:01; MAGEB1; ENSG00000214107; CTA
ETQGLKVAH

SEQ ID NO: 42009 - protein, 9 aa, Homo sapiens
  Table A; Target 42009; HLA-A*33:03; MAGEB1; ENSG00000214107; CTA
ETQGLKVAH

SEQ ID NO: 42010 - protein, 8 aa, Homo sapiens
  Table A; Target 42010; HLA-B*08:01; MAGEB1; ENSG00000214107; CTA
ETTKMKVL

SEQ ID NO: 42011 - protein, 10 aa, Homo sapiens
  Table A; Target 42011; HLA-A*25:01; MAGEB1; ENSG00000214107; CTA
ETTKMKVLEF

SEQ ID NO: 42012 - protein, 10 aa, Homo sapiens
  Table A; Target 42012; HLA-A*26:01; MAGEB1; ENSG00000214107; CTA
ETTKMKVLEF

SEQ ID NO: 42013 - protein, 10 aa, Homo sapiens
  Table A; Target 42013; HLA-B*27:02; MAGEB1; ENSG00000214107; CTA
FITQDLVQEK

SEQ ID NO: 42014 - protein, 11 aa, Homo sapiens
  Table A; Target 42014; HLA-A*29:02; MAGEB1; ENSG00000214107; CTA
FITQDLVQEKY

SEQ ID NO: 42015 - protein, 8 aa, Homo sapiens
  Table A; Target 42015; HLA-A*30:02; MAGEB1; ENSG00000214107; CTA
FMNVLGAY

SEQ ID NO: 42016 - protein, 8 aa, Homo sapiens
  Table A; Target 42016; HLA-B*15:01; MAGEB1; ENSG00000214107; CTA
FMNVLGAY

SEQ ID NO: 42017 - protein, 8 aa, Homo sapiens
  Table A; Target 42017; HLA-B*46:01; MAGEB1; ENSG00000214107; CTA
FMNVLGAY

SEQ ID NO: 42018 - protein, 8 aa, Homo sapiens
  Table A; Target 42018; HLA-C*14:02; MAGEB1; ENSG00000214107; CTA
FMNVLGAY

SEQ ID NO: 42019 - protein, 9 aa, Homo sapiens
  Table A; Target 42019; HLA-B*54:01; MAGEB1; ENSG00000214107; CTA
FPRNGLLMP

SEQ ID NO: 42020 - protein, 9 aa, Homo sapiens
  Table A; Target 42020; HLA-B*56:01; MAGEB1; ENSG00000214107; CTA
FPRNGLLMP

SEQ ID NO: 42021 - protein, 8 aa, Homo sapiens
  Table A; Target 42021; HLA-B*54:01; MAGEB1; ENSG00000214107; CTA
FPSHYEEA

SEQ ID NO: 42022 - protein, 9 aa, Homo sapiens
  Table A; Target 42022; HLA-B*07:02; MAGEB1; ENSG00000214107; CTA
FPSHYEEAL

SEQ ID NO: 42023 - protein, 9 aa, Homo sapiens
  Table A; Target 42023; HLA-B*35:01; MAGEB1; ENSG00000214107; CTA
FPSHYEEAL

SEQ ID NO: 42024 - protein, 9 aa, Homo sapiens
  Table A; Target 42024; HLA-B*35:03; MAGEB1; ENSG00000214107; CTA
FPSHYEEAL

SEQ ID NO: 42025 - protein, 9 aa, Homo sapiens
  Table A; Target 42025; HLA-B*38:01; MAGEB1; ENSG00000214107; CTA
FPSHYEEAL

SEQ ID NO: 42026 - protein, 9 aa, Homo sapiens
  Table A; Target 42026; HLA-B*39:01; MAGEB1; ENSG00000214107; CTA
FPSHYEEAL

SEQ ID NO: 42027 - protein, 9 aa, Homo sapiens
  Table A; Target 42027; HLA-B*54:01; MAGEB1; ENSG00000214107; CTA
FPSHYEEAL

SEQ ID NO: 42028 - protein, 9 aa, Homo sapiens
  Table A; Target 42028; HLA-B*55:01; MAGEB1; ENSG00000214107; CTA
FPSHYEEAL

SEQ ID NO: 42029 - protein, 9 aa, Homo sapiens
  Table A; Target 42029; HLA-B*56:01; MAGEB1; ENSG00000214107; CTA
FPSHYEEAL

SEQ ID NO: 42030 - protein, 9 aa, Homo sapiens
  Table A; Target 42030; HLA-C*03:03; MAGEB1; ENSG00000214107; CTA
FPSHYEEAL

SEQ ID NO: 42031 - protein, 9 aa, Homo sapiens
  Table A; Target 42031; HLA-C*03:04; MAGEB1; ENSG00000214107; CTA
FPSHYEEAL

SEQ ID NO: 42032 - protein, 8 aa, Homo sapiens
  Table A; Target 42032; HLA-C*16:01; MAGEB1; ENSG00000214107; CTA
FSRSSHPM

SEQ ID NO: 42033 - protein, 10 aa, Homo sapiens
  Table A; Target 42033; HLA-A*01:01; MAGEB1; ENSG00000214107; CTA
FTEILNGASR

SEQ ID NO: 42034 - protein, 10 aa, Homo sapiens
  Table A; Target 42034; HLA-A*33:01; MAGEB1; ENSG00000214107; CTA
FTEILNGASR

SEQ ID NO: 42035 - protein, 10 aa, Homo sapiens
  Table A; Target 42035; HLA-A*33:03; MAGEB1; ENSG00000214107; CTA
FTEILNGASR

SEQ ID NO: 42036 - protein, 10 aa, Homo sapiens
  Table A; Target 42036; HLA-A*68:01; MAGEB1; ENSG00000214107; CTA
FTEILNGASR

SEQ ID NO: 42037 - protein, 10 aa, Homo sapiens
  Table A; Target 42037; HLA-B*27:02; MAGEB1; ENSG00000214107; CTA
FTEILNGASR

SEQ ID NO: 42038 - protein, 10 aa, Homo sapiens
  Table A; Target 42038; HLA-C*07:06; MAGEB1; ENSG00000214107; CTA
FTEILNGASR

SEQ ID NO: 42039 - protein, 11 aa, Homo sapiens
  Table A; Target 42039; HLA-A*01:01; MAGEB1; ENSG00000214107; CTA
FTEILNGASRR

SEQ ID NO: 42040 - protein, 9 aa, Homo sapiens
  Table A; Target 42040; HLA-B*46:01; MAGEB1; ENSG00000214107; CTA
GAPPTTTAA

SEQ ID NO: 42041 - protein, 9 aa, Homo sapiens
  Table A; Target 42041; HLA-C*01:02; MAGEB1; ENSG00000214107; CTA
GAPPTTTAA

SEQ ID NO: 42042 - protein, 9 aa, Homo sapiens
  Table A; Target 42042; HLA-C*14:02; MAGEB1; ENSG00000214107; CTA
GAPPTTTAA

SEQ ID NO: 42043 - protein, 8 aa, Homo sapiens
  Table A; Target 42043; HLA-B*07:02; MAGEB1; ENSG00000214107; CTA
GASRRLEL

SEQ ID NO: 42044 - protein, 8 aa, Homo sapiens
  Table A; Target 42044; HLA-C*16:01; MAGEB1; ENSG00000214107; CTA
GASRRLEL

SEQ ID NO: 42045 - protein, 9 aa, Homo sapiens
  Table A; Target 42045; HLA-A*02:01; MAGEB1; ENSG00000214107; CTA
GAYDGEEHL

SEQ ID NO: 42046 - protein, 9 aa, Homo sapiens
  Table A; Target 42046; HLA-A*32:01; MAGEB1; ENSG00000214107; CTA
GAYDGEEHL

SEQ ID NO: 42047 - protein, 9 aa, Homo sapiens
  Table A; Target 42047; HLA-B*13:02; MAGEB1; ENSG00000214107; CTA
GAYDGEEHL

SEQ ID NO: 42048 - protein, 9 aa, Homo sapiens
  Table A; Target 42048; HLA-B*15:01; MAGEB1; ENSG00000214107; CTA
GAYDGEEHL

SEQ ID NO: 42049 - protein, 9 aa, Homo sapiens
  Table A; Target 42049; HLA-B*15:03; MAGEB1; ENSG00000214107; CTA
GAYDGEEHL

SEQ ID NO: 42050 - protein, 9 aa, Homo sapiens
  Table A; Target 42050; HLA-B*27:05; MAGEB1; ENSG00000214107; CTA
GAYDGEEHL

SEQ ID NO: 42051 - protein, 9 aa, Homo sapiens
  Table A; Target 42051; HLA-B*35:03; MAGEB1; ENSG00000214107; CTA
GAYDGEEHL

SEQ ID NO: 42052 - protein, 9 aa, Homo sapiens
  Table A; Target 42052; HLA-B*38:01; MAGEB1; ENSG00000214107; CTA
GAYDGEEHL

SEQ ID NO: 42053 - protein, 9 aa, Homo sapiens
  Table A; Target 42053; HLA-B*39:01; MAGEB1; ENSG00000214107; CTA
GAYDGEEHL

SEQ ID NO: 42054 - protein, 9 aa, Homo sapiens
  Table A; Target 42054; HLA-B*40:01; MAGEB1; ENSG00000214107; CTA
GAYDGEEHL

SEQ ID NO: 42055 - protein, 9 aa, Homo sapiens
  Table A; Target 42055; HLA-B*46:01; MAGEB1; ENSG00000214107; CTA
GAYDGEEHL

SEQ ID NO: 42056 - protein, 9 aa, Homo sapiens
  Table A; Target 42056; HLA-B*55:01; MAGEB1; ENSG00000214107; CTA
GAYDGEEHL

SEQ ID NO: 42057 - protein, 9 aa, Homo sapiens
  Table A; Target 42057; HLA-B*58:01; MAGEB1; ENSG00000214107; CTA
GAYDGEEHL

SEQ ID NO: 42058 - protein, 9 aa, Homo sapiens
  Table A; Target 42058; HLA-C*01:02; MAGEB1; ENSG00000214107; CTA
GAYDGEEHL

SEQ ID NO: 42059 - protein, 9 aa, Homo sapiens
  Table A; Target 42059; HLA-C*02:02; MAGEB1; ENSG00000214107; CTA
GAYDGEEHL

SEQ ID NO: 42060 - protein, 9 aa, Homo sapiens
  Table A; Target 42060; HLA-C*03:03; MAGEB1; ENSG00000214107; CTA
GAYDGEEHL

SEQ ID NO: 42061 - protein, 9 aa, Homo sapiens
  Table A; Target 42061; HLA-C*03:04; MAGEB1; ENSG00000214107; CTA
GAYDGEEHL

SEQ ID NO: 42062 - protein, 9 aa, Homo sapiens
  Table A; Target 42062; HLA-C*05:01; MAGEB1; ENSG00000214107; CTA
GAYDGEEHL

SEQ ID NO: 42063 - protein, 9 aa, Homo sapiens
  Table A; Target 42063; HLA-C*12:03; MAGEB1; ENSG00000214107; CTA
GAYDGEEHL

SEQ ID NO: 42064 - protein, 9 aa, Homo sapiens
  Table A; Target 42064; HLA-C*16:02; MAGEB1; ENSG00000214107; CTA
GAYDGEEHL

SEQ ID NO: 42065 - protein, 9 aa, Homo sapiens
  Table A; Target 42065; HLA-C*16:04; MAGEB1; ENSG00000214107; CTA
GAYDGEEHL

SEQ ID NO: 42066 - protein, 10 aa, Homo sapiens
  Table A; Target 42066; HLA-A*02:01; MAGEB1; ENSG00000214107; CTA
GAYDGEEHLI

SEQ ID NO: 42067 - protein, 10 aa, Homo sapiens
  Table A; Target 42067; HLA-A*23:01; MAGEB1; ENSG00000214107; CTA
GAYDGEEHLI

SEQ ID NO: 42068 - protein, 10 aa, Homo sapiens
  Table A; Target 42068; HLA-A*25:01; MAGEB1; ENSG00000214107; CTA
GAYDGEEHLI

SEQ ID NO: 42069 - protein, 10 aa, Homo sapiens
  Table A; Target 42069; HLA-A*30:01; MAGEB1; ENSG00000214107; CTA
GAYDGEEHLI

SEQ ID NO: 42070 - protein, 10 aa, Homo sapiens
  Table A; Target 42070; HLA-B*13:02; MAGEB1; ENSG00000214107; CTA
GAYDGEEHLI

SEQ ID NO: 42071 - protein, 10 aa, Homo sapiens
  Table A; Target 42071; HLA-B*27:05; MAGEB1; ENSG00000214107; CTA
GAYDGEEHLI

SEQ ID NO: 42072 - protein, 10 aa, Homo sapiens
  Table A; Target 42072; HLA-B*38:01; MAGEB1; ENSG00000214107; CTA
GAYDGEEHLI

SEQ ID NO: 42073 - protein, 10 aa, Homo sapiens
  Table A; Target 42073; HLA-B*40:01; MAGEB1; ENSG00000214107; CTA
GAYDGEEHLI

SEQ ID NO: 42074 - protein, 10 aa, Homo sapiens
  Table A; Target 42074; HLA-B*49:01; MAGEB1; ENSG00000214107; CTA
GAYDGEEHLI

SEQ ID NO: 42075 - protein, 10 aa, Homo sapiens
  Table A; Target 42075; HLA-B*51:01; MAGEB1; ENSG00000214107; CTA
GAYDGEEHLI

SEQ ID NO: 42076 - protein, 10 aa, Homo sapiens
  Table A; Target 42076; HLA-B*57:01; MAGEB1; ENSG00000214107; CTA
GAYDGEEHLI

SEQ ID NO: 42077 - protein, 10 aa, Homo sapiens
  Table A; Target 42077; HLA-B*58:01; MAGEB1; ENSG00000214107; CTA
GAYDGEEHLI

SEQ ID NO: 42078 - protein, 10 aa, Homo sapiens
  Table A; Target 42078; HLA-C*02:02; MAGEB1; ENSG00000214107; CTA
GAYDGEEHLI

SEQ ID NO: 42079 - protein, 10 aa, Homo sapiens
  Table A; Target 42079; HLA-C*05:01; MAGEB1; ENSG00000214107; CTA
GAYDGEEHLI

SEQ ID NO: 42080 - protein, 10 aa, Homo sapiens
  Table A; Target 42080; HLA-C*06:02; MAGEB1; ENSG00000214107; CTA
GAYDGEEHLI

SEQ ID NO: 42081 - protein, 10 aa, Homo sapiens
  Table A; Target 42081; HLA-C*12:03; MAGEB1; ENSG00000214107; CTA
GAYDGEEHLI

SEQ ID NO: 42082 - protein, 10 aa, Homo sapiens
  Table A; Target 42082; HLA-C*16:02; MAGEB1; ENSG00000214107; CTA
GAYDGEEHLI

SEQ ID NO: 42083 - protein, 10 aa, Homo sapiens
  Table A; Target 42083; HLA-C*16:04; MAGEB1; ENSG00000214107; CTA
GAYDGEEHLI

SEQ ID NO: 42084 - protein, 11 aa, Homo sapiens
  Table A; Target 42084; HLA-A*01:01; MAGEB1; ENSG00000214107; CTA
GAYDGEEHLIY

SEQ ID NO: 42085 - protein, 11 aa, Homo sapiens
  Table A; Target 42085; HLA-A*11:01; MAGEB1; ENSG00000214107; CTA
GAYDGEEHLIY

SEQ ID NO: 42086 - protein, 11 aa, Homo sapiens
  Table A; Target 42086; HLA-A*25:01; MAGEB1; ENSG00000214107; CTA
GAYDGEEHLIY

SEQ ID NO: 42087 - protein, 11 aa, Homo sapiens
  Table A; Target 42087; HLA-A*26:01; MAGEB1; ENSG00000214107; CTA
GAYDGEEHLIY

SEQ ID NO: 42088 - protein, 11 aa, Homo sapiens
  Table A; Target 42088; HLA-A*29:02; MAGEB1; ENSG00000214107; CTA
GAYDGEEHLIY

SEQ ID NO: 42089 - protein, 11 aa, Homo sapiens
  Table A; Target 42089; HLA-A*30:02; MAGEB1; ENSG00000214107; CTA
GAYDGEEHLIY

SEQ ID NO: 42090 - protein, 11 aa, Homo sapiens
  Table A; Target 42090; HLA-B*15:01; MAGEB1; ENSG00000214107; CTA
GAYDGEEHLIY

SEQ ID NO: 42091 - protein, 11 aa, Homo sapiens
  Table A; Target 42091; HLA-B*15:03; MAGEB1; ENSG00000214107; CTA
GAYDGEEHLIY

SEQ ID NO: 42092 - protein, 11 aa, Homo sapiens
  Table A; Target 42092; HLA-B*35:01; MAGEB1; ENSG00000214107; CTA
GAYDGEEHLIY

SEQ ID NO: 42093 - protein, 11 aa, Homo sapiens
  Table A; Target 42093; HLA-B*46:01; MAGEB1; ENSG00000214107; CTA
GAYDGEEHLIY

SEQ ID NO: 42094 - protein, 11 aa, Homo sapiens
  Table A; Target 42094; HLA-B*55:01; MAGEB1; ENSG00000214107; CTA
GAYDGEEHLIY

SEQ ID NO: 42095 - protein, 11 aa, Homo sapiens
  Table A; Target 42095; HLA-B*57:01; MAGEB1; ENSG00000214107; CTA
GAYDGEEHLIY

SEQ ID NO: 42096 - protein, 11 aa, Homo sapiens
  Table A; Target 42096; HLA-C*02:02; MAGEB1; ENSG00000214107; CTA
GAYDGEEHLIY

SEQ ID NO: 42097 - protein, 11 aa, Homo sapiens
  Table A; Target 42097; HLA-C*03:03; MAGEB1; ENSG00000214107; CTA
GAYDGEEHLIY

SEQ ID NO: 42098 - protein, 11 aa, Homo sapiens
  Table A; Target 42098; HLA-C*07:01; MAGEB1; ENSG00000214107; CTA
GAYDGEEHLIY

SEQ ID NO: 42099 - protein, 11 aa, Homo sapiens
  Table A; Target 42099; HLA-C*12:03; MAGEB1; ENSG00000214107; CTA
GAYDGEEHLIY

SEQ ID NO: 42100 - protein, 11 aa, Homo sapiens
  Table A; Target 42100; HLA-C*16:01; MAGEB1; ENSG00000214107; CTA
GAYDGEEHLIY

SEQ ID NO: 42101 - protein, 11 aa, Homo sapiens
  Table A; Target 42101; HLA-C*16:04; MAGEB1; ENSG00000214107; CTA
GAYDGEEHLIY

SEQ ID NO: 42102 - protein, 10 aa, Homo sapiens
  Table A; Target 42102; HLA-A*30:01; MAGEB1; ENSG00000214107; CTA
GEENASFSQA

SEQ ID NO: 42103 - protein, 10 aa, Homo sapiens
  Table A; Target 42103; HLA-B*40:01; MAGEB1; ENSG00000214107; CTA
GEENASFSQA

SEQ ID NO: 42104 - protein, 10 aa, Homo sapiens
  Table A; Target 42104; HLA-B*49:01; MAGEB1; ENSG00000214107; CTA
GEENASFSQA

SEQ ID NO: 42105 - protein, 9 aa, Homo sapiens
  Table A; Target 42105; HLA-A*03:02; MAGEB1; ENSG00000214107; CTA
GHTYTLVSK

SEQ ID NO: 42106 - protein, 9 aa, Homo sapiens
  Table A; Target 42106; HLA-B*27:05; MAGEB1; ENSG00000214107; CTA
GHTYTLVSK

SEQ ID NO: 42107 - protein, 9 aa, Homo sapiens
  Table A; Target 42107; HLA-A*02:03; MAGEB1; ENSG00000214107; CTA
GLKVAHATA

SEQ ID NO: 42108 - protein, 9 aa, Homo sapiens
  Table A; Target 42108; HLA-B*08:01; MAGEB1; ENSG00000214107; CTA
GLKVAHATA

SEQ ID NO: 42109 - protein, 10 aa, Homo sapiens
  Table A; Target 42109; HLA-A*02:03; MAGEB1; ENSG00000214107; CTA
GLKVAHATAA

SEQ ID NO: 42110 - protein, 9 aa, Homo sapiens
  Table A; Target 42110; HLA-A*02:01; MAGEB1; ENSG00000214107; CTA
GLLMPLLGV

SEQ ID NO: 42111 - protein, 9 aa, Homo sapiens
  Table A; Target 42111; HLA-A*02:04; MAGEB1; ENSG00000214107; CTA
GLLMPLLGV

SEQ ID NO: 42112 - protein, 9 aa, Homo sapiens
  Table A; Target 42112; HLA-A*31:01; MAGEB1; ENSG00000214107; CTA
GMLMHFILR

SEQ ID NO: 42113 - protein, 10 aa, Homo sapiens
  Table A; Target 42113; HLA-B*07:02; MAGEB1; ENSG00000214107; CTA
GPRAYAETTK

SEQ ID NO: 42114 - protein, 10 aa, Homo sapiens
  Table A; Target 42114; HLA-B*56:01; MAGEB1; ENSG00000214107; CTA
GVIFLKGNSA

SEQ ID NO: 42115 - protein, 9 aa, Homo sapiens
  Table A; Target 42115; HLA-B*54:01; MAGEB1; ENSG00000214107; CTA
HFTEILNGA

SEQ ID NO: 42116 - protein, 9 aa, Homo sapiens
  Table A; Target 42116; HLA-B*55:01; MAGEB1; ENSG00000214107; CTA
HFTEILNGA

SEQ ID NO: 42117 - protein, 8 aa, Homo sapiens
  Table A; Target 42117; HLA-A*03:01; MAGEB1; ENSG00000214107; CTA
HTYTLVSK

SEQ ID NO: 42118 - protein, 8 aa, Homo sapiens
  Table A; Target 42118; HLA-A*03:02; MAGEB1; ENSG00000214107; CTA
HTYTLVSK

SEQ ID NO: 42119 - protein, 8 aa, Homo sapiens
  Table A; Target 42119; HLA-A*11:01; MAGEB1; ENSG00000214107; CTA
HTYTLVSK

SEQ ID NO: 42120 - protein, 9 aa, Homo sapiens
  Table A; Target 42120; HLA-A*02:03; MAGEB1; ENSG00000214107; CTA
HTYTLVSKL

SEQ ID NO: 42121 - protein, 9 aa, Homo sapiens
  Table A; Target 42121; HLA-A*03:01; MAGEB1; ENSG00000214107; CTA
HTYTLVSKL

SEQ ID NO: 42122 - protein, 9 aa, Homo sapiens
  Table A; Target 42122; HLA-A*25:01; MAGEB1; ENSG00000214107; CTA
HTYTLVSKL

SEQ ID NO: 42123 - protein, 9 aa, Homo sapiens
  Table A; Target 42123; HLA-A*26:01; MAGEB1; ENSG00000214107; CTA
HTYTLVSKL

SEQ ID NO: 42124 - protein, 9 aa, Homo sapiens
  Table A; Target 42124; HLA-A*31:01; MAGEB1; ENSG00000214107; CTA
HTYTLVSKL

SEQ ID NO: 42125 - protein, 9 aa, Homo sapiens
  Table A; Target 42125; HLA-A*33:01; MAGEB1; ENSG00000214107; CTA
HTYTLVSKL

SEQ ID NO: 42126 - protein, 9 aa, Homo sapiens
  Table A; Target 42126; HLA-A*33:03; MAGEB1; ENSG00000214107; CTA
HTYTLVSKL

SEQ ID NO: 42127 - protein, 9 aa, Homo sapiens
  Table A; Target 42127; HLA-A*68:01; MAGEB1; ENSG00000214107; CTA
HTYTLVSKL

SEQ ID NO: 42128 - protein, 9 aa, Homo sapiens
  Table A; Target 42128; HLA-A*68:02; MAGEB1; ENSG00000214107; CTA
HTYTLVSKL

SEQ ID NO: 42129 - protein, 9 aa, Homo sapiens
  Table A; Target 42129; HLA-B*27:05; MAGEB1; ENSG00000214107; CTA
HTYTLVSKL

SEQ ID NO: 42130 - protein, 9 aa, Homo sapiens
  Table A; Target 42130; HLA-B*40:02; MAGEB1; ENSG00000214107; CTA
HTYTLVSKL

SEQ ID NO: 42131 - protein, 9 aa, Homo sapiens
  Table A; Target 42131; HLA-B*57:01; MAGEB1; ENSG00000214107; CTA
HTYTLVSKL

SEQ ID NO: 42132 - protein, 9 aa, Homo sapiens
  Table A; Target 42132; HLA-B*58:01; MAGEB1; ENSG00000214107; CTA
HTYTLVSKL

SEQ ID NO: 42133 - protein, 9 aa, Homo sapiens
  Table A; Target 42133; HLA-C*02:02; MAGEB1; ENSG00000214107; CTA
HTYTLVSKL

SEQ ID NO: 42134 - protein, 9 aa, Homo sapiens
  Table A; Target 42134; HLA-C*07:06; MAGEB1; ENSG00000214107; CTA
HTYTLVSKL

SEQ ID NO: 42135 - protein, 9 aa, Homo sapiens
  Table A; Target 42135; HLA-C*12:03; MAGEB1; ENSG00000214107; CTA
HTYTLVSKL

SEQ ID NO: 42136 - protein, 8 aa, Homo sapiens
  Table A; Target 42136; HLA-C*14:02; MAGEB1; ENSG00000214107; CTA
IFLKGNSA

SEQ ID NO: 42137 - protein, 9 aa, Homo sapiens
  Table A; Target 42137; HLA-A*02:03; MAGEB1; ENSG00000214107; CTA
IMKADMLKV

SEQ ID NO: 42138 - protein, 8 aa, Homo sapiens
  Table A; Target 42138; HLA-B*56:01; MAGEB1; ENSG00000214107; CTA
IPQKPQGA

SEQ ID NO: 42139 - protein, 9 aa, Homo sapiens
  Table A; Target 42139; HLA-B*07:02; MAGEB1; ENSG00000214107; CTA
IPQKPQGAP

SEQ ID NO: 42140 - protein, 9 aa, Homo sapiens
  Table A; Target 42140; HLA-B*56:01; MAGEB1; ENSG00000214107; CTA
IPQKPQGAP

SEQ ID NO: 42141 - protein, 10 aa, Homo sapiens
  Table A; Target 42141; HLA-B*54:01; MAGEB1; ENSG00000214107; CTA
IPQKPQGAPP

SEQ ID NO: 42142 - protein, 10 aa, Homo sapiens
  Table A; Target 42142; HLA-B*56:01; MAGEB1; ENSG00000214107; CTA
IPQKPQGAPP

SEQ ID NO: 42143 - protein, 10 aa, Homo sapiens
  Table A; Target 42143; HLA-A*03:02; MAGEB1; ENSG00000214107; CTA
ITQDLVQEKY

SEQ ID NO: 42144 - protein, 10 aa, Homo sapiens
  Table A; Target 42144; HLA-C*07:06; MAGEB1; ENSG00000214107; CTA
ITQDLVQEKY

SEQ ID NO: 42145 - protein, 10 aa, Homo sapiens
  Table A; Target 42145; HLA-C*16:04; MAGEB1; ENSG00000214107; CTA
ITQDLVQEKY

SEQ ID NO: 42146 - protein, 8 aa, Homo sapiens
  Table A; Target 42146; HLA-A*24:02; MAGEB1; ENSG00000214107; CTA
IYGEPRKF

SEQ ID NO: 42147 - protein, 9 aa, Homo sapiens
  Table A; Target 42147; HLA-A*24:02; MAGEB1; ENSG00000214107; CTA
IYGEPRKFI

SEQ ID NO: 42148 - protein, 9 aa, Homo sapiens
  Table A; Target 42148; HLA-B*07:02; MAGEB1; ENSG00000214107; CTA
KAREETQGL

SEQ ID NO: 42149 - protein, 9 aa, Homo sapiens
  Table A; Target 42149; HLA-B*40:02; MAGEB1; ENSG00000214107; CTA
KAREETQGL

SEQ ID NO: 42150 - protein, 9 aa, Homo sapiens
  Table A; Target 42150; HLA-B*57:01; MAGEB1; ENSG00000214107; CTA
KAREETQGL

SEQ ID NO: 42151 - protein, 9 aa, Homo sapiens
  Table A; Target 42151; HLA-B*58:01; MAGEB1; ENSG00000214107; CTA
KAREETQGL

SEQ ID NO: 42152 - protein, 9 aa, Homo sapiens
  Table A; Target 42152; HLA-C*03:04; MAGEB1; ENSG00000214107; CTA
KAREETQGL

SEQ ID NO: 42153 - protein, 9 aa, Homo sapiens
  Table A; Target 42153; HLA-C*07:02; MAGEB1; ENSG00000214107; CTA
KAREETQGL

SEQ ID NO: 42154 - protein, 10 aa, Homo sapiens
  Table A; Target 42154; HLA-A*03:01; MAGEB1; ENSG00000214107; CTA
KAREETQGLK

SEQ ID NO: 42155 - protein, 10 aa, Homo sapiens
  Table A; Target 42155; HLA-A*30:02; MAGEB1; ENSG00000214107; CTA
KCQGEENASF

SEQ ID NO: 42156 - protein, 10 aa, Homo sapiens
  Table A; Target 42156; HLA-A*32:01; MAGEB1; ENSG00000214107; CTA
KCQGEENASF

SEQ ID NO: 42157 - protein, 10 aa, Homo sapiens
  Table A; Target 42157; HLA-B*15:01; MAGEB1; ENSG00000214107; CTA
KCQGEENASF

SEQ ID NO: 42158 - protein, 10 aa, Homo sapiens
  Table A; Target 42158; HLA-B*58:01; MAGEB1; ENSG00000214107; CTA
KCQGEENASF

SEQ ID NO: 42159 - protein, 10 aa, Homo sapiens
  Table A; Target 42159; HLA-A*01:01; MAGEB1; ENSG00000214107; CTA
KEDNPSGHTY

SEQ ID NO: 42160 - protein, 10 aa, Homo sapiens
  Table A; Target 42160; HLA-A*25:01; MAGEB1; ENSG00000214107; CTA
KEDNPSGHTY

SEQ ID NO: 42161 - protein, 10 aa, Homo sapiens
  Table A; Target 42161; HLA-A*29:02; MAGEB1; ENSG00000214107; CTA
KEDNPSGHTY

SEQ ID NO: 42162 - protein, 10 aa, Homo sapiens
  Table A; Target 42162; HLA-A*30:01; MAGEB1; ENSG00000214107; CTA
KEDNPSGHTY

SEQ ID NO: 42163 - protein, 10 aa, Homo sapiens
  Table A; Target 42163; HLA-A*30:02; MAGEB1; ENSG00000214107; CTA
KEDNPSGHTY

SEQ ID NO: 42164 - protein, 10 aa, Homo sapiens
  Table A; Target 42164; HLA-A*32:01; MAGEB1; ENSG00000214107; CTA
KEDNPSGHTY

SEQ ID NO: 42165 - protein, 10 aa, Homo sapiens
  Table A; Target 42165; HLA-B*15:01; MAGEB1; ENSG00000214107; CTA
KEDNPSGHTY

SEQ ID NO: 42166 - protein, 10 aa, Homo sapiens
  Table A; Target 42166; HLA-B*15:03; MAGEB1; ENSG00000214107; CTA
KEDNPSGHTY

SEQ ID NO: 42167 - protein, 10 aa, Homo sapiens
  Table A; Target 42167; HLA-B*18:01; MAGEB1; ENSG00000214107; CTA
KEDNPSGHTY

SEQ ID NO: 42168 - protein, 10 aa, Homo sapiens
  Table A; Target 42168; HLA-B*27:02; MAGEB1; ENSG00000214107; CTA
KEDNPSGHTY

SEQ ID NO: 42169 - protein, 10 aa, Homo sapiens
  Table A; Target 42169; HLA-B*27:05; MAGEB1; ENSG00000214107; CTA
KEDNPSGHTY

SEQ ID NO: 42170 - protein, 10 aa, Homo sapiens
  Table A; Target 42170; HLA-B*37:01; MAGEB1; ENSG00000214107; CTA
KEDNPSGHTY

SEQ ID NO: 42171 - protein, 10 aa, Homo sapiens
  Table A; Target 42171; HLA-B*39:01; MAGEB1; ENSG00000214107; CTA
KEDNPSGHTY

SEQ ID NO: 42172 - protein, 10 aa, Homo sapiens
  Table A; Target 42172; HLA-B*40:01; MAGEB1; ENSG00000214107; CTA
KEDNPSGHTY

SEQ ID NO: 42173 - protein, 10 aa, Homo sapiens
  Table A; Target 42173; HLA-B*40:02; MAGEB1; ENSG00000214107; CTA
KEDNPSGHTY

SEQ ID NO: 42174 - protein, 10 aa, Homo sapiens
  Table A; Target 42174; HLA-B*49:01; MAGEB1; ENSG00000214107; CTA
KEDNPSGHTY

SEQ ID NO: 42175 - protein, 10 aa, Homo sapiens
  Table A; Target 42175; HLA-B*57:01; MAGEB1; ENSG00000214107; CTA
KEDNPSGHTY

SEQ ID NO: 42176 - protein, 10 aa, Homo sapiens
  Table A; Target 42176; HLA-B*58:01; MAGEB1; ENSG00000214107; CTA
KEDNPSGHTY

SEQ ID NO: 42177 - protein, 10 aa, Homo sapiens
  Table A; Target 42177; HLA-C*02:02; MAGEB1; ENSG00000214107; CTA
KEDNPSGHTY

SEQ ID NO: 42178 - protein, 10 aa, Homo sapiens
  Table A; Target 42178; HLA-C*07:04; MAGEB1; ENSG00000214107; CTA
KEDNPSGHTY

SEQ ID NO: 42179 - protein, 10 aa, Homo sapiens
  Table A; Target 42179; HLA-C*12:03; MAGEB1; ENSG00000214107; CTA
KEDNPSGHTY

SEQ ID NO: 42180 - protein, 10 aa, Homo sapiens
  Table A; Target 42180; HLA-C*16:02; MAGEB1; ENSG00000214107; CTA
KEDNPSGHTY

SEQ ID NO: 42181 - protein, 10 aa, Homo sapiens
  Table A; Target 42181; HLA-C*16:04; MAGEB1; ENSG00000214107; CTA
KEDNPSGHTY

SEQ ID NO: 42182 - protein, 11 aa, Homo sapiens
  Table A; Target 42182; HLA-A*30:01; MAGEB1; ENSG00000214107; CTA
KEECPSSSPVL

SEQ ID NO: 42183 - protein, 11 aa, Homo sapiens
  Table A; Target 42183; HLA-B*40:01; MAGEB1; ENSG00000214107; CTA
KEECPSSSPVL

SEQ ID NO: 42184 - protein, 11 aa, Homo sapiens
  Table A; Target 42184; HLA-B*40:02; MAGEB1; ENSG00000214107; CTA
KEECPSSSPVL

SEQ ID NO: 42185 - protein, 9 aa, Homo sapiens
  Table A; Target 42185; HLA-A*23:01; MAGEB1; ENSG00000214107; CTA
KFMNVLGAY

SEQ ID NO: 42186 - protein, 9 aa, Homo sapiens
  Table A; Target 42186; HLA-A*29:02; MAGEB1; ENSG00000214107; CTA
KFMNVLGAY

SEQ ID NO: 42187 - protein, 9 aa, Homo sapiens
  Table A; Target 42187; HLA-A*30:02; MAGEB1; ENSG00000214107; CTA
KFMNVLGAY

SEQ ID NO: 42188 - protein, 9 aa, Homo sapiens
  Table A; Target 42188; HLA-B*15:03; MAGEB1; ENSG00000214107; CTA
KFMNVLGAY

SEQ ID NO: 42189 - protein, 9 aa, Homo sapiens
  Table A; Target 42189; HLA-B*46:01; MAGEB1; ENSG00000214107; CTA
KFMNVLGAY

SEQ ID NO: 42190 - protein, 9 aa, Homo sapiens
  Table A; Target 42190; HLA-C*14:02; MAGEB1; ENSG00000214107; CTA
KFMNVLGAY

SEQ ID NO: 42191 - protein, 11 aa, Homo sapiens
  Table A; Target 42191; HLA-B*57:01; MAGEB1; ENSG00000214107; CTA
KGNSATEEEIW

SEQ ID NO: 42192 - protein, 11 aa, Homo sapiens
  Table A; Target 42192; HLA-B*58:01; MAGEB1; ENSG00000214107; CTA
KGNSATEEEIW

SEQ ID NO: 42193 - protein, 8 aa, Homo sapiens
  Table A; Target 42193; HLA-A*31:01; MAGEB1; ENSG00000214107; CTA
KMNGATPR

SEQ ID NO: 42194 - protein, 10 aa, Homo sapiens
  Table A; Target 42194; HLA-A*30:02; MAGEB1; ENSG00000214107; CTA
KMNGATPRDF

SEQ ID NO: 42195 - protein, 8 aa, Homo sapiens
  Table A; Target 42195; HLA-A*03:01; MAGEB1; ENSG00000214107; CTA
KMREPIMK

SEQ ID NO: 42196 - protein, 9 aa, Homo sapiens
  Table A; Target 42196; HLA-A*02:03; MAGEB1; ENSG00000214107; CTA
KMREPIMKA

SEQ ID NO: 42197 - protein, 9 aa, Homo sapiens
  Table A; Target 42197; HLA-B*07:02; MAGEB1; ENSG00000214107; CTA
KPQGAPPTT

SEQ ID NO: 42198 - protein, 9 aa, Homo sapiens
  Table A; Target 42198; HLA-B*56:01; MAGEB1; ENSG00000214107; CTA
KPQGAPPTT

SEQ ID NO: 42199 - protein, 10 aa, Homo sapiens
  Table A; Target 42199; HLA-B*07:02; MAGEB1; ENSG00000214107; CTA
KPQGAPPTTT

SEQ ID NO: 42200 - protein, 10 aa, Homo sapiens
  Table A; Target 42200; HLA-B*56:01; MAGEB1; ENSG00000214107; CTA
KPQGAPPTTT

SEQ ID NO: 42201 - protein, 10 aa, Homo sapiens
  Table A; Target 42201; HLA-C*07:02; MAGEB1; ENSG00000214107; CTA
KPQGAPPTTT

SEQ ID NO: 42202 - protein, 11 aa, Homo sapiens
  Table A; Target 42202; HLA-B*07:02; MAGEB1; ENSG00000214107; CTA
KPQGAPPTTTA

SEQ ID NO: 42203 - protein, 11 aa, Homo sapiens
  Table A; Target 42203; HLA-B*54:01; MAGEB1; ENSG00000214107; CTA
KPQGAPPTTTA

SEQ ID NO: 42204 - protein, 11 aa, Homo sapiens
  Table A; Target 42204; HLA-B*55:01; MAGEB1; ENSG00000214107; CTA
KPQGAPPTTTA

SEQ ID NO: 42205 - protein, 11 aa, Homo sapiens
  Table A; Target 42205; HLA-B*56:01; MAGEB1; ENSG00000214107; CTA
KPQGAPPTTTA

SEQ ID NO: 42206 - protein, 10 aa, Homo sapiens
  Table A; Target 42206; HLA-A*03:01; MAGEB1; ENSG00000214107; CTA
KVAHATAAEK

SEQ ID NO: 42207 - protein, 10 aa, Homo sapiens
  Table A; Target 42207; HLA-A*03:02; MAGEB1; ENSG00000214107; CTA
KVAHATAAEK

SEQ ID NO: 42208 - protein, 10 aa, Homo sapiens
  Table A; Target 42208; HLA-A*11:01; MAGEB1; ENSG00000214107; CTA
KVAHATAAEK

SEQ ID NO: 42209 - protein, 9 aa, Homo sapiens
  Table A; Target 42209; HLA-A*02:01; MAGEB1; ENSG00000214107; CTA
KVLEFLAKM

SEQ ID NO: 42210 - protein, 9 aa, Homo sapiens
  Table A; Target 42210; HLA-A*02:04; MAGEB1; ENSG00000214107; CTA
KVLEFLAKM

SEQ ID NO: 42211 - protein, 9 aa, Homo sapiens
  Table A; Target 42211; HLA-A*02:07; MAGEB1; ENSG00000214107; CTA
KVLEFLAKM

SEQ ID NO: 42212 - protein, 9 aa, Homo sapiens
  Table A; Target 42212; HLA-A*03:01; MAGEB1; ENSG00000214107; CTA
KVLEFLAKM

SEQ ID NO: 42213 - protein, 9 aa, Homo sapiens
  Table A; Target 42213; HLA-A*29:02; MAGEB1; ENSG00000214107; CTA
KVLEFLAKM

SEQ ID NO: 42214 - protein, 9 aa, Homo sapiens
  Table A; Target 42214; HLA-A*31:01; MAGEB1; ENSG00000214107; CTA
KVLEFLAKM

SEQ ID NO: 42215 - protein, 9 aa, Homo sapiens
  Table A; Target 42215; HLA-B*57:01; MAGEB1; ENSG00000214107; CTA
KVLEFLAKM

SEQ ID NO: 42216 - protein, 9 aa, Homo sapiens
  Table A; Target 42216; HLA-A*23:01; MAGEB1; ENSG00000214107; CTA
KYKDHFTEI

SEQ ID NO: 42217 - protein, 9 aa, Homo sapiens
  Table A; Target 42217; HLA-A*24:02; MAGEB1; ENSG00000214107; CTA
KYKDHFTEI

SEQ ID NO: 42218 - protein, 9 aa, Homo sapiens
  Table A; Target 42218; HLA-A*31:01; MAGEB1; ENSG00000214107; CTA
KYKDHFTEI

SEQ ID NO: 42219 - protein, 10 aa, Homo sapiens
  Table A; Target 42219; HLA-A*24:02; MAGEB1; ENSG00000214107; CTA
KYKDHFTEIL

SEQ ID NO: 42220 - protein, 9 aa, Homo sapiens
  Table A; Target 42220; HLA-A*30:01; MAGEB1; ENSG00000214107; CTA
LELVFGLDL

SEQ ID NO: 42221 - protein, 9 aa, Homo sapiens
  Table A; Target 42221; HLA-B*40:01; MAGEB1; ENSG00000214107; CTA
LELVFGLDL

SEQ ID NO: 42222 - protein, 9 aa, Homo sapiens
  Table A; Target 42222; HLA-B*40:02; MAGEB1; ENSG00000214107; CTA
LELVFGLDL

SEQ ID NO: 42223 - protein, 9 aa, Homo sapiens
  Table A; Target 42223; HLA-B*49:01; MAGEB1; ENSG00000214107; CTA
LELVFGLDL

SEQ ID NO: 42224 - protein, 9 aa, Homo sapiens
  Table A; Target 42224; HLA-C*05:01; MAGEB1; ENSG00000214107; CTA
LGDTPTSSP

SEQ ID NO: 42225 - protein, 9 aa, Homo sapiens
  Table A; Target 42225; HLA-A*03:01; MAGEB1; ENSG00000214107; CTA
LIYGEPRKF

SEQ ID NO: 42226 - protein, 9 aa, Homo sapiens
  Table A; Target 42226; HLA-B*57:01; MAGEB1; ENSG00000214107; CTA
LIYGEPRKF

SEQ ID NO: 42227 - protein, 9 aa, Homo sapiens
  Table A; Target 42227; HLA-C*02:02; MAGEB1; ENSG00000214107; CTA
LIYGEPRKF

SEQ ID NO: 42228 - protein, 11 aa, Homo sapiens
  Table A; Target 42228; HLA-A*30:02; MAGEB1; ENSG00000214107; CTA
LKEDNPSGHTY

SEQ ID NO: 42229 - protein, 11 aa, Homo sapiens
  Table A; Target 42229; HLA-B*15:03; MAGEB1; ENSG00000214107; CTA
LKEDNPSGHTY

SEQ ID NO: 42230 - protein, 9 aa, Homo sapiens
  Table A; Target 42230; HLA-B*15:03; MAGEB1; ENSG00000214107; CTA
LKVAHATAA

SEQ ID NO: 42231 - protein, 8 aa, Homo sapiens
  Table A; Target 42231; HLA-B*15:03; MAGEB1; ENSG00000214107; CTA
LKVVDEKY

SEQ ID NO: 42232 - protein, 9 aa, Homo sapiens
  Table A; Target 42232; HLA-A*29:02; MAGEB1; ENSG00000214107; CTA
LMHFILRKY

SEQ ID NO: 42233 - protein, 9 aa, Homo sapiens
  Table A; Target 42233; HLA-A*31:01; MAGEB1; ENSG00000214107; CTA
LSNDWDFPR

SEQ ID NO: 42234 - protein, 9 aa, Homo sapiens
  Table A; Target 42234; HLA-A*33:01; MAGEB1; ENSG00000214107; CTA
LSNDWDFPR

SEQ ID NO: 42235 - protein, 11 aa, Homo sapiens
  Table A; Target 42235; HLA-B*57:01; MAGEB1; ENSG00000214107; CTA
LTNDGNLSNDW

SEQ ID NO: 42236 - protein, 11 aa, Homo sapiens
  Table A; Target 42236; HLA-B*58:01; MAGEB1; ENSG00000214107; CTA
LTNDGNLSNDW

SEQ ID NO: 42237 - protein, 9 aa, Homo sapiens
  Table A; Target 42237; HLA-A*01:01; MAGEB1; ENSG00000214107; CTA
LVQEKYLKY

SEQ ID NO: 42238 - protein, 9 aa, Homo sapiens
  Table A; Target 42238; HLA-A*03:01; MAGEB1; ENSG00000214107; CTA
LVQEKYLKY

SEQ ID NO: 42239 - protein, 9 aa, Homo sapiens
  Table A; Target 42239; HLA-A*25:01; MAGEB1; ENSG00000214107; CTA
LVQEKYLKY

SEQ ID NO: 42240 - protein, 9 aa, Homo sapiens
  Table A; Target 42240; HLA-A*26:01; MAGEB1; ENSG00000214107; CTA
LVQEKYLKY

SEQ ID NO: 42241 - protein, 9 aa, Homo sapiens
  Table A; Target 42241; HLA-A*29:02; MAGEB1; ENSG00000214107; CTA
LVQEKYLKY

SEQ ID NO: 42242 - protein, 9 aa, Homo sapiens
  Table A; Target 42242; HLA-A*30:02; MAGEB1; ENSG00000214107; CTA
LVQEKYLKY

SEQ ID NO: 42243 - protein, 9 aa, Homo sapiens
  Table A; Target 42243; HLA-A*32:01; MAGEB1; ENSG00000214107; CTA
LVQEKYLKY

SEQ ID NO: 42244 - protein, 9 aa, Homo sapiens
  Table A; Target 42244; HLA-B*15:01; MAGEB1; ENSG00000214107; CTA
LVQEKYLKY

SEQ ID NO: 42245 - protein, 9 aa, Homo sapiens
  Table A; Target 42245; HLA-C*02:02; MAGEB1; ENSG00000214107; CTA
LVQEKYLKY

SEQ ID NO: 42246 - protein, 8 aa, Homo sapiens
  Table A; Target 42246; HLA-B*08:01; MAGEB1; ENSG00000214107; CTA
MLKVVDEK

SEQ ID NO: 42247 - protein, 8 aa, Homo sapiens
  Table A; Target 42247; HLA-C*07:01; MAGEB1; ENSG00000214107; CTA
MLKVVDEK

SEQ ID NO: 42248 - protein, 9 aa, Homo sapiens
  Table A; Target 42248; HLA-A*01:01; MAGEB1; ENSG00000214107; CTA
MLKVVDEKY

SEQ ID NO: 42249 - protein, 9 aa, Homo sapiens
  Table A; Target 42249; HLA-A*29:02; MAGEB1; ENSG00000214107; CTA
MLKVVDEKY

SEQ ID NO: 42250 - protein, 9 aa, Homo sapiens
  Table A; Target 42250; HLA-A*30:02; MAGEB1; ENSG00000214107; CTA
MLKVVDEKY

SEQ ID NO: 42251 - protein, 9 aa, Homo sapiens
  Table A; Target 42251; HLA-A*32:01; MAGEB1; ENSG00000214107; CTA
MLKVVDEKY

SEQ ID NO: 42252 - protein, 9 aa, Homo sapiens
  Table A; Target 42252; HLA-B*15:01; MAGEB1; ENSG00000214107; CTA
MLKVVDEKY

SEQ ID NO: 42253 - protein, 9 aa, Homo sapiens
  Table A; Target 42253; HLA-B*15:03; MAGEB1; ENSG00000214107; CTA
MLKVVDEKY

SEQ ID NO: 42254 - protein, 9 aa, Homo sapiens
  Table A; Target 42254; HLA-B*18:01; MAGEB1; ENSG00000214107; CTA
MLKVVDEKY

SEQ ID NO: 42255 - protein, 9 aa, Homo sapiens
  Table A; Target 42255; HLA-B*35:01; MAGEB1; ENSG00000214107; CTA
MLKVVDEKY

SEQ ID NO: 42256 - protein, 9 aa, Homo sapiens
  Table A; Target 42256; HLA-B*44:02; MAGEB1; ENSG00000214107; CTA
MLKVVDEKY

SEQ ID NO: 42257 - protein, 9 aa, Homo sapiens
  Table A; Target 42257; HLA-B*46:01; MAGEB1; ENSG00000214107; CTA
MLKVVDEKY

SEQ ID NO: 42258 - protein, 9 aa, Homo sapiens
  Table A; Target 42258; HLA-B*57:01; MAGEB1; ENSG00000214107; CTA
MLKVVDEKY

SEQ ID NO: 42259 - protein, 9 aa, Homo sapiens
  Table A; Target 42259; HLA-C*04:01; MAGEB1; ENSG00000214107; CTA
MLKVVDEKY

SEQ ID NO: 42260 - protein, 9 aa, Homo sapiens
  Table A; Target 42260; HLA-C*07:01; MAGEB1; ENSG00000214107; CTA
MLKVVDEKY

SEQ ID NO: 42261 - protein, 9 aa, Homo sapiens
  Table A; Target 42261; HLA-C*07:04; MAGEB1; ENSG00000214107; CTA
MLKVVDEKY

SEQ ID NO: 42262 - protein, 9 aa, Homo sapiens
  Table A; Target 42262; HLA-C*16:04; MAGEB1; ENSG00000214107; CTA
MLKVVDEKY

SEQ ID NO: 42263 - protein, 10 aa, Homo sapiens
  Table A; Target 42263; HLA-C*04:01; MAGEB1; ENSG00000214107; CTA
MLKVVDEKYK

SEQ ID NO: 42264 - protein, 9 aa, Homo sapiens
  Table A; Target 42264; HLA-A*03:01; MAGEB1; ENSG00000214107; CTA
MLMHFILRK

SEQ ID NO: 42265 - protein, 10 aa, Homo sapiens
  Table A; Target 42265; HLA-A*29:02; MAGEB1; ENSG00000214107; CTA
MLMHFILRKY

SEQ ID NO: 42266 - protein, 8 aa, Homo sapiens
  Table A; Target 42266; HLA-B*54:01; MAGEB1; ENSG00000214107; CTA
MPLLGVIF

SEQ ID NO: 42267 - protein, 9 aa, Homo sapiens
  Table A; Target 42267; HLA-B*07:02; MAGEB1; ENSG00000214107; CTA
MPLLGVIFL

SEQ ID NO: 42268 - protein, 11 aa, Homo sapiens
  Table A; Target 42268; HLA-B*54:01; MAGEB1; ENSG00000214107; CTA
MPLLGVIFLKG

SEQ ID NO: 42269 - protein, 9 aa, Homo sapiens
  Table A; Target 42269; HLA-B*44:03; MAGEB1; ENSG00000214107; CTA
NDGNLSNDW

SEQ ID NO: 42270 - protein, 9 aa, Homo sapiens
  Table A; Target 42270; HLA-B*07:02; MAGEB1; ENSG00000214107; CTA
NGASRRLEL

SEQ ID NO: 42271 - protein, 9 aa, Homo sapiens
  Table A; Target 42271; HLA-B*08:01; MAGEB1; ENSG00000214107; CTA
NGASRRLEL

SEQ ID NO: 42272 - protein, 9 aa, Homo sapiens
  Table A; Target 42272; HLA-C*07:02; MAGEB1; ENSG00000214107; CTA
NGASRRLEL

SEQ ID NO: 42273 - protein, 9 aa, Homo sapiens
  Table A; Target 42273; HLA-C*16:01; MAGEB1; ENSG00000214107; CTA
NGASRRLEL

SEQ ID NO: 42274 - protein, 9 aa, Homo sapiens
  Table A; Target 42274; HLA-A*68:01; MAGEB1; ENSG00000214107; CTA
NPSGHTYTL

SEQ ID NO: 42275 - protein, 9 aa, Homo sapiens
  Table A; Target 42275; HLA-A*68:02; MAGEB1; ENSG00000214107; CTA
NPSGHTYTL

SEQ ID NO: 42276 - protein, 9 aa, Homo sapiens
  Table A; Target 42276; HLA-B*08:01; MAGEB1; ENSG00000214107; CTA
NPSGHTYTL

SEQ ID NO: 42277 - protein, 9 aa, Homo sapiens
  Table A; Target 42277; HLA-B*35:01; MAGEB1; ENSG00000214107; CTA
NPSGHTYTL

SEQ ID NO: 42278 - protein, 9 aa, Homo sapiens
  Table A; Target 42278; HLA-B*35:03; MAGEB1; ENSG00000214107; CTA
NPSGHTYTL

SEQ ID NO: 42279 - protein, 9 aa, Homo sapiens
  Table A; Target 42279; HLA-B*37:01; MAGEB1; ENSG00000214107; CTA
NPSGHTYTL

SEQ ID NO: 42280 - protein, 9 aa, Homo sapiens
  Table A; Target 42280; HLA-B*38:01; MAGEB1; ENSG00000214107; CTA
NPSGHTYTL

SEQ ID NO: 42281 - protein, 9 aa, Homo sapiens
  Table A; Target 42281; HLA-B*39:01; MAGEB1; ENSG00000214107; CTA
NPSGHTYTL

SEQ ID NO: 42282 - protein, 9 aa, Homo sapiens
  Table A; Target 42282; HLA-B*40:01; MAGEB1; ENSG00000214107; CTA
NPSGHTYTL

SEQ ID NO: 42283 - protein, 9 aa, Homo sapiens
  Table A; Target 42283; HLA-B*51:01; MAGEB1; ENSG00000214107; CTA
NPSGHTYTL

SEQ ID NO: 42284 - protein, 9 aa, Homo sapiens
  Table A; Target 42284; HLA-B*54:01; MAGEB1; ENSG00000214107; CTA
NPSGHTYTL

SEQ ID NO: 42285 - protein, 9 aa, Homo sapiens
  Table A; Target 42285; HLA-B*55:01; MAGEB1; ENSG00000214107; CTA
NPSGHTYTL

SEQ ID NO: 42286 - protein, 9 aa, Homo sapiens
  Table A; Target 42286; HLA-B*56:01; MAGEB1; ENSG00000214107; CTA
NPSGHTYTL

SEQ ID NO: 42287 - protein, 9 aa, Homo sapiens
  Table A; Target 42287; HLA-C*03:03; MAGEB1; ENSG00000214107; CTA
NPSGHTYTL

SEQ ID NO: 42288 - protein, 9 aa, Homo sapiens
  Table A; Target 42288; HLA-C*07:02; MAGEB1; ENSG00000214107; CTA
NPSGHTYTL

SEQ ID NO: 42289 - protein, 9 aa, Homo sapiens
  Table A; Target 42289; HLA-C*14:02; MAGEB1; ENSG00000214107; CTA
NPSGHTYTL

SEQ ID NO: 42290 - protein, 9 aa, Homo sapiens
  Table A; Target 42290; HLA-C*16:01; MAGEB1; ENSG00000214107; CTA
NPSGHTYTL

SEQ ID NO: 42291 - protein, 9 aa, Homo sapiens
  Table A; Target 42291; HLA-C*16:02; MAGEB1; ENSG00000214107; CTA
NPSGHTYTL

SEQ ID NO: 42292 - protein, 9 aa, Homo sapiens
  Table A; Target 42292; HLA-B*57:01; MAGEB1; ENSG00000214107; CTA
NSATEEEIW

SEQ ID NO: 42293 - protein, 9 aa, Homo sapiens
  Table A; Target 42293; HLA-A*02:07; MAGEB1; ENSG00000214107; CTA
NSDPPRYQF

SEQ ID NO: 42294 - protein, 9 aa, Homo sapiens
  Table A; Target 42294; HLA-A*29:02; MAGEB1; ENSG00000214107; CTA
NSDPPRYQF

SEQ ID NO: 42295 - protein, 9 aa, Homo sapiens
  Table A; Target 42295; HLA-B*38:01; MAGEB1; ENSG00000214107; CTA
NSDPPRYQF

SEQ ID NO: 42296 - protein, 9 aa, Homo sapiens
  Table A; Target 42296; HLA-C*04:01; MAGEB1; ENSG00000214107; CTA
NSDPPRYQF

SEQ ID NO: 42297 - protein, 8 aa, Homo sapiens
  Table A; Target 42297; HLA-A*03:02; MAGEB1; ENSG00000214107; CTA
PAAGIPQK

SEQ ID NO: 42298 - protein, 8 aa, Homo sapiens
  Table A; Target 42298; HLA-A*11:01; MAGEB1; ENSG00000214107; CTA
PAAGIPQK

SEQ ID NO: 42299 - protein, 8 aa, Homo sapiens
  Table A; Target 42299; HLA-B*27:02; MAGEB1; ENSG00000214107; CTA
PAAGIPQK

SEQ ID NO: 42300 - protein, 9 aa, Homo sapiens
  Table A; Target 42300; HLA-C*06:02; MAGEB1; ENSG00000214107; CTA
PAAGIPQKP

SEQ ID NO: 42301 - protein, 9 aa, Homo sapiens
  Table A; Target 42301; HLA-C*16:02; MAGEB1; ENSG00000214107; CTA
PAAGIPQKP

SEQ ID NO: 42302 - protein, 8 aa, Homo sapiens
  Table A; Target 42302; HLA-B*56:01; MAGEB1; ENSG00000214107; CTA
PPTTTAAA

SEQ ID NO: 42303 - protein, 8 aa, Homo sapiens
  Table A; Target 42303; HLA-B*07:02; MAGEB1; ENSG00000214107; CTA
PSGHTYTL

SEQ ID NO: 42304 - protein, 8 aa, Homo sapiens
  Table A; Target 42304; HLA-C*07:01; MAGEB1; ENSG00000214107; CTA
PSGHTYTL

SEQ ID NO: 42305 - protein, 8 aa, Homo sapiens
  Table A; Target 42305; HLA-C*07:02; MAGEB1; ENSG00000214107; CTA
PSGHTYTL

SEQ ID NO: 42306 - protein, 8 aa, Homo sapiens
  Table A; Target 42306; HLA-C*07:04; MAGEB1; ENSG00000214107; CTA
PSGHTYTL

SEQ ID NO: 42307 - protein, 8 aa, Homo sapiens
  Table A; Target 42307; HLA-C*12:03; MAGEB1; ENSG00000214107; CTA
PSGHTYTL

SEQ ID NO: 42308 - protein, 8 aa, Homo sapiens
  Table A; Target 42308; HLA-B*07:02; MAGEB1; ENSG00000214107; CTA
PSHYEEAL

SEQ ID NO: 42309 - protein, 11 aa, Homo sapiens
  Table A; Target 42309; HLA-C*04:01; MAGEB1; ENSG00000214107; CTA
PVLGDTPTSSP

SEQ ID NO: 42310 - protein, 11 aa, Homo sapiens
  Table A; Target 42310; HLA-C*07:02; MAGEB1; ENSG00000214107; CTA
PVLGDTPTSSP

SEQ ID NO: 42311 - protein, 11 aa, Homo sapiens
  Table A; Target 42311; HLA-C*07:06; MAGEB1; ENSG00000214107; CTA
QATTSTESSVK

SEQ ID NO: 42312 - protein, 9 aa, Homo sapiens
  Table A; Target 42312; HLA-A*02:03; MAGEB1; ENSG00000214107; CTA
QGAPPTTTA

SEQ ID NO: 42313 - protein, 9 aa, Homo sapiens
  Table A; Target 42313; HLA-B*15:01; MAGEB1; ENSG00000214107; CTA
QGAPPTTTA

SEQ ID NO: 42314 - protein, 9 aa, Homo sapiens
  Table A; Target 42314; HLA-B*39:01; MAGEB1; ENSG00000214107; CTA
QGAPPTTTA

SEQ ID NO: 42315 - protein, 9 aa, Homo sapiens
  Table A; Target 42315; HLA-B*46:01; MAGEB1; ENSG00000214107; CTA
QGAPPTTTA

SEQ ID NO: 42316 - protein, 9 aa, Homo sapiens
  Table A; Target 42316; HLA-B*54:01; MAGEB1; ENSG00000214107; CTA
QGAPPTTTA

SEQ ID NO: 42317 - protein, 9 aa, Homo sapiens
  Table A; Target 42317; HLA-B*56:01; MAGEB1; ENSG00000214107; CTA
QGAPPTTTA

SEQ ID NO: 42318 - protein, 9 aa, Homo sapiens
  Table A; Target 42318; HLA-C*03:04; MAGEB1; ENSG00000214107; CTA
QGAPPTTTA

SEQ ID NO: 42319 - protein, 9 aa, Homo sapiens
  Table A; Target 42319; HLA-C*05:01; MAGEB1; ENSG00000214107; CTA
QGAPPTTTA

SEQ ID NO: 42320 - protein, 8 aa, Homo sapiens
  Table A; Target 42320; HLA-C*05:01; MAGEB1; ENSG00000214107; CTA
QGEENASF

SEQ ID NO: 42321 - protein, 9 aa, Homo sapiens
  Table A; Target 42321; HLA-A*11:01; MAGEB1; ENSG00000214107; CTA
QVPNSDPPR

SEQ ID NO: 42322 - protein, 9 aa, Homo sapiens
  Table A; Target 42322; HLA-C*07:06; MAGEB1; ENSG00000214107; CTA
QVPNSDPPR

SEQ ID NO: 42323 - protein, 10 aa, Homo sapiens
  Table A; Target 42323; HLA-B*58:01; MAGEB1; ENSG00000214107; CTA
QVPNSDPPRY

SEQ ID NO: 42324 - protein, 9 aa, Homo sapiens
  Table A; Target 42324; HLA-A*03:01; MAGEB1; ENSG00000214107; CTA
QVRSSVRAR

SEQ ID NO: 42325 - protein, 9 aa, Homo sapiens
  Table A; Target 42325; HLA-A*31:01; MAGEB1; ENSG00000214107; CTA
QVRSSVRAR

SEQ ID NO: 42326 - protein, 9 aa, Homo sapiens
  Table A; Target 42326; HLA-A*33:01; MAGEB1; ENSG00000214107; CTA
QVRSSVRAR

SEQ ID NO: 42327 - protein, 9 aa, Homo sapiens
  Table A; Target 42327; HLA-A*33:03; MAGEB1; ENSG00000214107; CTA
QVRSSVRAR

SEQ ID NO: 42328 - protein, 8 aa, Homo sapiens
  Table A; Target 42328; HLA-B*07:02; MAGEB1; ENSG00000214107; CTA
RAQVRSSV

SEQ ID NO: 42329 - protein, 8 aa, Homo sapiens
  Table A; Target 42329; HLA-B*08:01; MAGEB1; ENSG00000214107; CTA
RAQVRSSV

SEQ ID NO: 42330 - protein, 8 aa, Homo sapiens
  Table A; Target 42330; HLA-C*16:01; MAGEB1; ENSG00000214107; CTA
RAQVRSSV

SEQ ID NO: 42331 - protein, 9 aa, Homo sapiens
  Table A; Target 42331; HLA-A*31:01; MAGEB1; ENSG00000214107; CTA
RAQVRSSVR

SEQ ID NO: 42332 - protein, 11 aa, Homo sapiens
  Table A; Target 42332; HLA-A*31:01; MAGEB1; ENSG00000214107; CTA
RAQVRSSVRAR

SEQ ID NO: 42333 - protein, 10 aa, Homo sapiens
  Table A; Target 42333; HLA-A*31:01; MAGEB1; ENSG00000214107; CTA
RARSRAPFSR

SEQ ID NO: 42334 - protein, 9 aa, Homo sapiens
  Table A; Target 42334; HLA-A*03:01; MAGEB1; ENSG00000214107; CTA
RAYAETTKM

SEQ ID NO: 42335 - protein, 9 aa, Homo sapiens
  Table A; Target 42335; HLA-B*07:02; MAGEB1; ENSG00000214107; CTA
RAYAETTKM

SEQ ID NO: 42336 - protein, 9 aa, Homo sapiens
  Table A; Target 42336; HLA-B*37:01; MAGEB1; ENSG00000214107; CTA
RAYAETTKM

SEQ ID NO: 42337 - protein, 9 aa, Homo sapiens
  Table A; Target 42337; HLA-B*40:01; MAGEB1; ENSG00000214107; CTA
RAYAETTKM

SEQ ID NO: 42338 - protein, 9 aa, Homo sapiens
  Table A; Target 42338; HLA-B*55:01; MAGEB1; ENSG00000214107; CTA
RAYAETTKM

SEQ ID NO: 42339 - protein, 9 aa, Homo sapiens
  Table A; Target 42339; HLA-C*16:01; MAGEB1; ENSG00000214107; CTA
RAYAETTKM

SEQ ID NO: 42340 - protein, 10 aa, Homo sapiens
  Table A; Target 42340; HLA-A*03:01; MAGEB1; ENSG00000214107; CTA
RAYAETTKMK

SEQ ID NO: 42341 - protein, 9 aa, Homo sapiens
  Table A; Target 42341; HLA-A*30:01; MAGEB1; ENSG00000214107; CTA
REETQGLKV

SEQ ID NO: 42342 - protein, 9 aa, Homo sapiens
  Table A; Target 42342; HLA-B*37:01; MAGEB1; ENSG00000214107; CTA
REETQGLKV

SEQ ID NO: 42343 - protein, 9 aa, Homo sapiens
  Table A; Target 42343; HLA-B*40:01; MAGEB1; ENSG00000214107; CTA
REETQGLKV

SEQ ID NO: 42344 - protein, 9 aa, Homo sapiens
  Table A; Target 42344; HLA-B*40:02; MAGEB1; ENSG00000214107; CTA
REETQGLKV

SEQ ID NO: 42345 - protein, 9 aa, Homo sapiens
  Table A; Target 42345; HLA-B*44:02; MAGEB1; ENSG00000214107; CTA
REETQGLKV

SEQ ID NO: 42346 - protein, 9 aa, Homo sapiens
  Table A; Target 42346; HLA-B*44:03; MAGEB1; ENSG00000214107; CTA
REETQGLKV

SEQ ID NO: 42347 - protein, 9 aa, Homo sapiens
  Table A; Target 42347; HLA-B*49:01; MAGEB1; ENSG00000214107; CTA
REETQGLKV

SEQ ID NO: 42348 - protein, 10 aa, Homo sapiens
  Table A; Target 42348; HLA-B*40:02; MAGEB1; ENSG00000214107; CTA
REETQGLKVA

SEQ ID NO: 42349 - protein, 9 aa, Homo sapiens
  Table A; Target 42349; HLA-B*37:01; MAGEB1; ENSG00000214107; CTA
REPIMKADM

SEQ ID NO: 42350 - protein, 10 aa, Homo sapiens
  Table A; Target 42350; HLA-B*40:01; MAGEB1; ENSG00000214107; CTA
REPIMKADML

SEQ ID NO: 42351 - protein, 8 aa, Homo sapiens
  Table A; Target 42351; HLA-B*37:01; MAGEB1; ENSG00000214107; CTA
RRTTATTF

SEQ ID NO: 42352 - protein, 9 aa, Homo sapiens
  Table A; Target 42352; HLA-B*27:05; MAGEB1; ENSG00000214107; CTA
RRTTATTFR

SEQ ID NO: 42353 - protein, 8 aa, Homo sapiens
  Table A; Target 42353; HLA-A*31:01; MAGEB1; ENSG00000214107; CTA
RSRAPFSR

SEQ ID NO: 42354 - protein, 8 aa, Homo sapiens
  Table A; Target 42354; HLA-A*31:01; MAGEB1; ENSG00000214107; CTA
RTTATTFR

SEQ ID NO: 42355 - protein, 9 aa, Homo sapiens
  Table A; Target 42355; HLA-A*32:01; MAGEB1; ENSG00000214107; CTA
RTTATTFRA

SEQ ID NO: 42356 - protein, 10 aa, Homo sapiens
  Table A; Target 42356; HLA-A*03:01; MAGEB1; ENSG00000214107; CTA
RTTATTFRAR

SEQ ID NO: 42357 - protein, 10 aa, Homo sapiens
  Table A; Target 42357; HLA-A*31:01; MAGEB1; ENSG00000214107; CTA
RTTATTFRAR

SEQ ID NO: 42358 - protein, 10 aa, Homo sapiens
  Table A; Target 42358; HLA-B*57:01; MAGEB1; ENSG00000214107; CTA
RTTATTFRAR

SEQ ID NO: 42359 - protein, 9 aa, Homo sapiens
  Table A; Target 42359; HLA-C*14:02; MAGEB1; ENSG00000214107; CTA
SFSQATTST

SEQ ID NO: 42360 - protein, 10 aa, Homo sapiens
  Table A; Target 42360; HLA-A*11:01; MAGEB1; ENSG00000214107; CTA
SGHTYTLVSK

SEQ ID NO: 42361 - protein, 9 aa, Homo sapiens
  Table A; Target 42361; HLA-A*03:02; MAGEB1; ENSG00000214107; CTA
SPAAGIPQK

SEQ ID NO: 42362 - protein, 9 aa, Homo sapiens
  Table A; Target 42362; HLA-A*11:01; MAGEB1; ENSG00000214107; CTA
SPAAGIPQK

SEQ ID NO: 42363 - protein, 9 aa, Homo sapiens
  Table A; Target 42363; HLA-B*56:01; MAGEB1; ENSG00000214107; CTA
SPAAGIPQK

SEQ ID NO: 42364 - protein, 10 aa, Homo sapiens
  Table A; Target 42364; HLA-B*56:01; MAGEB1; ENSG00000214107; CTA
SPAAGIPQKP

SEQ ID NO: 42365 - protein, 9 aa, Homo sapiens
  Table A; Target 42365; HLA-B*35:03; MAGEB1; ENSG00000214107; CTA
SPVLGDTPT

SEQ ID NO: 42366 - protein, 10 aa, Homo sapiens
  Table A; Target 42366; HLA-B*56:01; MAGEB1; ENSG00000214107; CTA
SPVLGDTPTS

SEQ ID NO: 42367 - protein, 11 aa, Homo sapiens
  Table A; Target 42367; HLA-B*13:02; MAGEB1; ENSG00000214107; CTA
SQATTSTESSV

SEQ ID NO: 42368 - protein, 11 aa, Homo sapiens
  Table A; Target 42368; HLA-B*27:05; MAGEB1; ENSG00000214107; CTA
SQATTSTESSV

SEQ ID NO: 42369 - protein, 10 aa, Homo sapiens
  Table A; Target 42369; HLA-A*11:01; MAGEB1; ENSG00000214107; CTA
SSPAAGIPQK

SEQ ID NO: 42370 - protein, 9 aa, Homo sapiens
  Table A; Target 42370; HLA-A*25:01; MAGEB1; ENSG00000214107; CTA
SSVKDPVAW

SEQ ID NO: 42371 - protein, 9 aa, Homo sapiens
  Table A; Target 42371; HLA-A*32:01; MAGEB1; ENSG00000214107; CTA
SSVKDPVAW

SEQ ID NO: 42372 - protein, 9 aa, Homo sapiens
  Table A; Target 42372; HLA-B*44:02; MAGEB1; ENSG00000214107; CTA
SSVKDPVAW

SEQ ID NO: 42373 - protein, 9 aa, Homo sapiens
  Table A; Target 42373; HLA-B*44:03; MAGEB1; ENSG00000214107; CTA
SSVKDPVAW

SEQ ID NO: 42374 - protein, 9 aa, Homo sapiens
  Table A; Target 42374; HLA-B*58:01; MAGEB1; ENSG00000214107; CTA
SSVKDPVAW

SEQ ID NO: 42375 - protein, 9 aa, Homo sapiens
  Table A; Target 42375; HLA-C*07:06; MAGEB1; ENSG00000214107; CTA
SSVKDPVAW

SEQ ID NO: 42376 - protein, 9 aa, Homo sapiens
  Table A; Target 42376; HLA-C*16:01; MAGEB1; ENSG00000214107; CTA
SSVKDPVAW

SEQ ID NO: 42377 - protein, 9 aa, Homo sapiens
  Table A; Target 42377; HLA-C*16:04; MAGEB1; ENSG00000214107; CTA
SSVKDPVAW

SEQ ID NO: 42378 - protein, 8 aa, Homo sapiens
  Table A; Target 42378; HLA-A*25:01; MAGEB1; ENSG00000214107; CTA
SVKDPVAW

SEQ ID NO: 42379 - protein, 8 aa, Homo sapiens
  Table A; Target 42379; HLA-A*32:01; MAGEB1; ENSG00000214107; CTA
SVKDPVAW

SEQ ID NO: 42380 - protein, 8 aa, Homo sapiens
  Table A; Target 42380; HLA-B*08:01; MAGEB1; ENSG00000214107; CTA
SVKDPVAW

SEQ ID NO: 42381 - protein, 8 aa, Homo sapiens
  Table A; Target 42381; HLA-B*57:01; MAGEB1; ENSG00000214107; CTA
SVKDPVAW

SEQ ID NO: 42382 - protein, 8 aa, Homo sapiens
  Table A; Target 42382; HLA-B*58:01; MAGEB1; ENSG00000214107; CTA
SVKDPVAW

SEQ ID NO: 42383 - protein, 10 aa, Homo sapiens
  Table A; Target 42383; HLA-A*31:01; MAGEB1; ENSG00000214107; CTA
SVKDPVAWEA

SEQ ID NO: 42384 - protein, 10 aa, Homo sapiens
  Table A; Target 42384; HLA-B*54:01; MAGEB1; ENSG00000214107; CTA
SVKDPVAWEA

SEQ ID NO: 42385 - protein, 10 aa, Homo sapiens
  Table A; Target 42385; HLA-B*56:01; MAGEB1; ENSG00000214107; CTA
SVKDPVAWEA

SEQ ID NO: 42386 - protein, 8 aa, Homo sapiens
  Table A; Target 42386; HLA-A*31:01; MAGEB1; ENSG00000214107; CTA
TATTFRAR

SEQ ID NO: 42387 - protein, 8 aa, Homo sapiens
  Table A; Target 42387; HLA-A*33:03; MAGEB1; ENSG00000214107; CTA
TATTFRAR

SEQ ID NO: 42388 - protein, 8 aa, Homo sapiens
  Table A; Target 42388; HLA-C*16:01; MAGEB1; ENSG00000214107; CTA
TATTFRAR

SEQ ID NO: 42389 - protein, 8 aa, Homo sapiens
  Table A; Target 42389; HLA-C*16:02; MAGEB1; ENSG00000214107; CTA
TATTFRAR

SEQ ID NO: 42390 - protein, 8 aa, Homo sapiens
  Table A; Target 42390; HLA-B*18:01; MAGEB1; ENSG00000214107; CTA
TEEEIWKF

SEQ ID NO: 42391 - protein, 8 aa, Homo sapiens
  Table A; Target 42391; HLA-B*44:02; MAGEB1; ENSG00000214107; CTA
TEEEIWKF

SEQ ID NO: 42392 - protein, 9 aa, Homo sapiens
  Table A; Target 42392; HLA-B*44:02; MAGEB1; ENSG00000214107; CTA
TEEEIWKFM

SEQ ID NO: 42393 - protein, 9 aa, Homo sapiens
  Table A; Target 42393; HLA-A*30:01; MAGEB1; ENSG00000214107; CTA
TEILNGASR

SEQ ID NO: 42394 - protein, 9 aa, Homo sapiens
  Table A; Target 42394; HLA-A*33:03; MAGEB1; ENSG00000214107; CTA
TEILNGASR

SEQ ID NO: 42395 - protein, 9 aa, Homo sapiens
  Table A; Target 42395; HLA-A*68:01; MAGEB1; ENSG00000214107; CTA
TEILNGASR

SEQ ID NO: 42396 - protein, 9 aa, Homo sapiens
  Table A; Target 42396; HLA-B*40:01; MAGEB1; ENSG00000214107; CTA
TEILNGASR

SEQ ID NO: 42397 - protein, 9 aa, Homo sapiens
  Table A; Target 42397; HLA-B*44:02; MAGEB1; ENSG00000214107; CTA
TEILNGASR

SEQ ID NO: 42398 - protein, 9 aa, Homo sapiens
  Table A; Target 42398; HLA-B*44:03; MAGEB1; ENSG00000214107; CTA
TEILNGASR

SEQ ID NO: 42399 - protein, 10 aa, Homo sapiens
  Table A; Target 42399; HLA-B*44:03; MAGEB1; ENSG00000214107; CTA
TEILNGASRR

SEQ ID NO: 42400 - protein, 11 aa, Homo sapiens
  Table A; Target 42400; HLA-B*44:02; MAGEB1; ENSG00000214107; CTA
TEILNGASRRL

SEQ ID NO: 42401 - protein, 11 aa, Homo sapiens
  Table A; Target 42401; HLA-B*44:03; MAGEB1; ENSG00000214107; CTA
TEILNGASRRL

SEQ ID NO: 42402 - protein, 9 aa, Homo sapiens
  Table A; Target 42402; HLA-B*49:01; MAGEB1; ENSG00000214107; CTA
TESDEGAKC

SEQ ID NO: 42403 - protein, 9 aa, Homo sapiens
  Table A; Target 42403; HLA-A*30:01; MAGEB1; ENSG00000214107; CTA
TESSVKDPV

SEQ ID NO: 42404 - protein, 9 aa, Homo sapiens
  Table A; Target 42404; HLA-A*68:02; MAGEB1; ENSG00000214107; CTA
TESSVKDPV

SEQ ID NO: 42405 - protein, 9 aa, Homo sapiens
  Table A; Target 42405; HLA-B*18:01; MAGEB1; ENSG00000214107; CTA
TESSVKDPV

SEQ ID NO: 42406 - protein, 9 aa, Homo sapiens
  Table A; Target 42406; HLA-B*37:01; MAGEB1; ENSG00000214107; CTA
TESSVKDPV

SEQ ID NO: 42407 - protein, 9 aa, Homo sapiens
  Table A; Target 42407; HLA-B*39:01; MAGEB1; ENSG00000214107; CTA
TESSVKDPV

SEQ ID NO: 42408 - protein, 9 aa, Homo sapiens
  Table A; Target 42408; HLA-B*40:01; MAGEB1; ENSG00000214107; CTA
TESSVKDPV

SEQ ID NO: 42409 - protein, 9 aa, Homo sapiens
  Table A; Target 42409; HLA-B*40:02; MAGEB1; ENSG00000214107; CTA
TESSVKDPV

SEQ ID NO: 42410 - protein, 9 aa, Homo sapiens
  Table A; Target 42410; HLA-B*44:03; MAGEB1; ENSG00000214107; CTA
TESSVKDPV

SEQ ID NO: 42411 - protein, 9 aa, Homo sapiens
  Table A; Target 42411; HLA-B*49:01; MAGEB1; ENSG00000214107; CTA
TESSVKDPV

SEQ ID NO: 42412 - protein, 9 aa, Homo sapiens
  Table A; Target 42412; HLA-C*04:01; MAGEB1; ENSG00000214107; CTA
TESSVKDPV

SEQ ID NO: 42413 - protein, 9 aa, Homo sapiens
  Table A; Target 42413; HLA-C*06:02; MAGEB1; ENSG00000214107; CTA
TESSVKDPV

SEQ ID NO: 42414 - protein, 9 aa, Homo sapiens
  Table A; Target 42414; HLA-C*16:04; MAGEB1; ENSG00000214107; CTA
TESSVKDPV

SEQ ID NO: 42415 - protein, 11 aa, Homo sapiens
  Table A; Target 42415; HLA-B*18:01; MAGEB1; ENSG00000214107; CTA
TESSVKDPVAW

SEQ ID NO: 42416 - protein, 11 aa, Homo sapiens
  Table A; Target 42416; HLA-B*27:02; MAGEB1; ENSG00000214107; CTA
TESSVKDPVAW

SEQ ID NO: 42417 - protein, 11 aa, Homo sapiens
  Table A; Target 42417; HLA-B*38:01; MAGEB1; ENSG00000214107; CTA
TESSVKDPVAW

SEQ ID NO: 42418 - protein, 11 aa, Homo sapiens
  Table A; Target 42418; HLA-B*40:01; MAGEB1; ENSG00000214107; CTA
TESSVKDPVAW

SEQ ID NO: 42419 - protein, 11 aa, Homo sapiens
  Table A; Target 42419; HLA-B*44:02; MAGEB1; ENSG00000214107; CTA
TESSVKDPVAW

SEQ ID NO: 42420 - protein, 11 aa, Homo sapiens
  Table A; Target 42420; HLA-B*44:03; MAGEB1; ENSG00000214107; CTA
TESSVKDPVAW

SEQ ID NO: 42421 - protein, 11 aa, Homo sapiens
  Table A; Target 42421; HLA-B*57:01; MAGEB1; ENSG00000214107; CTA
TESSVKDPVAW

SEQ ID NO: 42422 - protein, 11 aa, Homo sapiens
  Table A; Target 42422; HLA-C*16:04; MAGEB1; ENSG00000214107; CTA
TESSVKDPVAW

SEQ ID NO: 42423 - protein, 8 aa, Homo sapiens
  Table A; Target 42423; HLA-B*15:03; MAGEB1; ENSG00000214107; CTA
TKMKVLEF

SEQ ID NO: 42424 - protein, 8 aa, Homo sapiens
  Table A; Target 42424; HLA-B*08:01; MAGEB1; ENSG00000214107; CTA
TLVSKLNL

SEQ ID NO: 42425 - protein, 9 aa, Homo sapiens
  Table A; Target 42425; HLA-A*02:03; MAGEB1; ENSG00000214107; CTA
TLVSKLNLT

SEQ ID NO: 42426 - protein, 9 aa, Homo sapiens
  Table A; Target 42426; HLA-A*30:02; MAGEB1; ENSG00000214107; CTA
TPRDFPSHY

SEQ ID NO: 42427 - protein, 9 aa, Homo sapiens
  Table A; Target 42427; HLA-B*07:02; MAGEB1; ENSG00000214107; CTA
TPRDFPSHY

SEQ ID NO: 42428 - protein, 9 aa, Homo sapiens
  Table A; Target 42428; HLA-B*35:01; MAGEB1; ENSG00000214107; CTA
TPRDFPSHY

SEQ ID NO: 42429 - protein, 8 aa, Homo sapiens
  Table A; Target 42429; HLA-B*54:01; MAGEB1; ENSG00000214107; CTA
TPTSSPAA

SEQ ID NO: 42430 - protein, 8 aa, Homo sapiens
  Table A; Target 42430; HLA-B*55:01; MAGEB1; ENSG00000214107; CTA
TPTSSPAA

SEQ ID NO: 42431 - protein, 8 aa, Homo sapiens
  Table A; Target 42431; HLA-B*56:01; MAGEB1; ENSG00000214107; CTA
TPTSSPAA

SEQ ID NO: 42432 - protein, 10 aa, Homo sapiens
  Table A; Target 42432; HLA-C*04:01; MAGEB1; ENSG00000214107; CTA
TQDLVQEKYL

SEQ ID NO: 42433 - protein, 11 aa, Homo sapiens
  Table A; Target 42433; HLA-A*03:02; MAGEB1; ENSG00000214107; CTA
TSSPAAGIPQK

SEQ ID NO: 42434 - protein, 11 aa, Homo sapiens
  Table A; Target 42434; HLA-A*11:01; MAGEB1; ENSG00000214107; CTA
TSSPAAGIPQK

SEQ ID NO: 42435 - protein, 11 aa, Homo sapiens
  Table A; Target 42435; HLA-A*68:01; MAGEB1; ENSG00000214107; CTA
TSSPAAGIPQK

SEQ ID NO: 42436 - protein, 11 aa, Homo sapiens
  Table A; Target 42436; HLA-C*07:06; MAGEB1; ENSG00000214107; CTA
TSSPAAGIPQK

SEQ ID NO: 42437 - protein, 8 aa, Homo sapiens
  Table A; Target 42437; HLA-C*06:02; MAGEB1; ENSG00000214107; CTA
TTATTFRA

SEQ ID NO: 42438 - protein, 9 aa, Homo sapiens
  Table A; Target 42438; HLA-A*03:01; MAGEB1; ENSG00000214107; CTA
TTATTFRAR

SEQ ID NO: 42439 - protein, 9 aa, Homo sapiens
  Table A; Target 42439; HLA-A*11:01; MAGEB1; ENSG00000214107; CTA
TTATTFRAR

SEQ ID NO: 42440 - protein, 9 aa, Homo sapiens
  Table A; Target 42440; HLA-A*31:01; MAGEB1; ENSG00000214107; CTA
TTATTFRAR

SEQ ID NO: 42441 - protein, 9 aa, Homo sapiens
  Table A; Target 42441; HLA-A*33:01; MAGEB1; ENSG00000214107; CTA
TTATTFRAR

SEQ ID NO: 42442 - protein, 9 aa, Homo sapiens
  Table A; Target 42442; HLA-A*33:03; MAGEB1; ENSG00000214107; CTA
TTATTFRAR

SEQ ID NO: 42443 - protein, 9 aa, Homo sapiens
  Table A; Target 42443; HLA-A*68:01; MAGEB1; ENSG00000214107; CTA
TTATTFRAR

SEQ ID NO: 42444 - protein, 9 aa, Homo sapiens
  Table A; Target 42444; HLA-B*57:01; MAGEB1; ENSG00000214107; CTA
TTATTFRAR

SEQ ID NO: 42445 - protein, 9 aa, Homo sapiens
  Table A; Target 42445; HLA-C*06:02; MAGEB1; ENSG00000214107; CTA
TTATTFRAR

SEQ ID NO: 42446 - protein, 9 aa, Homo sapiens
  Table A; Target 42446; HLA-C*07:06; MAGEB1; ENSG00000214107; CTA
TTATTFRAR

SEQ ID NO: 42447 - protein, 9 aa, Homo sapiens
  Table A; Target 42447; HLA-C*16:01; MAGEB1; ENSG00000214107; CTA
TTATTFRAR

SEQ ID NO: 42448 - protein, 9 aa, Homo sapiens
  Table A; Target 42448; HLA-A*25:01; MAGEB1; ENSG00000214107; CTA
TTKMKVLEF

SEQ ID NO: 42449 - protein, 9 aa, Homo sapiens
  Table A; Target 42449; HLA-A*33:01; MAGEB1; ENSG00000214107; CTA
TTKMKVLEF

SEQ ID NO: 42450 - protein, 9 aa, Homo sapiens
  Table A; Target 42450; HLA-A*33:03; MAGEB1; ENSG00000214107; CTA
TTKMKVLEF

SEQ ID NO: 42451 - protein, 9 aa, Homo sapiens
  Table A; Target 42451; HLA-B*08:01; MAGEB1; ENSG00000214107; CTA
TTKMKVLEF

SEQ ID NO: 42452 - protein, 9 aa, Homo sapiens
  Table A; Target 42452; HLA-B*37:01; MAGEB1; ENSG00000214107; CTA
TTKMKVLEF

SEQ ID NO: 42453 - protein, 9 aa, Homo sapiens
  Table A; Target 42453; HLA-B*57:01; MAGEB1; ENSG00000214107; CTA
TTKMKVLEF

SEQ ID NO: 42454 - protein, 9 aa, Homo sapiens
  Table A; Target 42454; HLA-A*03:02; MAGEB1; ENSG00000214107; CTA
TTSTESSVK

SEQ ID NO: 42455 - protein, 9 aa, Homo sapiens
  Table A; Target 42455; HLA-A*11:01; MAGEB1; ENSG00000214107; CTA
TTSTESSVK

SEQ ID NO: 42456 - protein, 9 aa, Homo sapiens
  Table A; Target 42456; HLA-A*68:01; MAGEB1; ENSG00000214107; CTA
TTSTESSVK

SEQ ID NO: 42457 - protein, 9 aa, Homo sapiens
  Table A; Target 42457; HLA-C*07:06; MAGEB1; ENSG00000214107; CTA
TTSTESSVK

SEQ ID NO: 42458 - protein, 8 aa, Homo sapiens
  Table A; Target 42458; HLA-A*23:01; MAGEB1; ENSG00000214107; CTA
TYTLVSKL

SEQ ID NO: 42459 - protein, 8 aa, Homo sapiens
  Table A; Target 42459; HLA-A*24:02; MAGEB1; ENSG00000214107; CTA
TYTLVSKL

SEQ ID NO: 42460 - protein, 8 aa, Homo sapiens
  Table A; Target 42460; HLA-B*37:01; MAGEB1; ENSG00000214107; CTA
TYTLVSKL

SEQ ID NO: 42461 - protein, 8 aa, Homo sapiens
  Table A; Target 42461; HLA-C*01:02; MAGEB1; ENSG00000214107; CTA
TYTLVSKL

SEQ ID NO: 42462 - protein, 8 aa, Homo sapiens
  Table A; Target 42462; HLA-C*04:01; MAGEB1; ENSG00000214107; CTA
TYTLVSKL

SEQ ID NO: 42463 - protein, 8 aa, Homo sapiens
  Table A; Target 42463; HLA-C*06:02; MAGEB1; ENSG00000214107; CTA
TYTLVSKL

SEQ ID NO: 42464 - protein, 8 aa, Homo sapiens
  Table A; Target 42464; HLA-C*07:01; MAGEB1; ENSG00000214107; CTA
TYTLVSKL

SEQ ID NO: 42465 - protein, 8 aa, Homo sapiens
  Table A; Target 42465; HLA-C*07:02; MAGEB1; ENSG00000214107; CTA
TYTLVSKL

SEQ ID NO: 42466 - protein, 8 aa, Homo sapiens
  Table A; Target 42466; HLA-C*14:02; MAGEB1; ENSG00000214107; CTA
TYTLVSKL

SEQ ID NO: 42467 - protein, 8 aa, Homo sapiens
  Table A; Target 42467; HLA-C*16:02; MAGEB1; ENSG00000214107; CTA
TYTLVSKL

SEQ ID NO: 42468 - protein, 10 aa, Homo sapiens
  Table A; Target 42468; HLA-A*23:01; MAGEB1; ENSG00000214107; CTA
TYTLVSKLNL

SEQ ID NO: 42469 - protein, 10 aa, Homo sapiens
  Table A; Target 42469; HLA-A*24:02; MAGEB1; ENSG00000214107; CTA
TYTLVSKLNL

SEQ ID NO: 42470 - protein, 9 aa, Homo sapiens
  Table A; Target 42470; HLA-A*03:01; MAGEB1; ENSG00000214107; CTA
VAHATAAEK

SEQ ID NO: 42471 - protein, 9 aa, Homo sapiens
  Table A; Target 42471; HLA-A*03:02; MAGEB1; ENSG00000214107; CTA
VAHATAAEK

SEQ ID NO: 42472 - protein, 9 aa, Homo sapiens
  Table A; Target 42472; HLA-A*11:01; MAGEB1; ENSG00000214107; CTA
VAHATAAEK

SEQ ID NO: 42473 - protein, 9 aa, Homo sapiens
  Table A; Target 42473; HLA-A*33:01; MAGEB1; ENSG00000214107; CTA
VAHATAAEK

SEQ ID NO: 42474 - protein, 9 aa, Homo sapiens
  Table A; Target 42474; HLA-B*46:01; MAGEB1; ENSG00000214107; CTA
VAHATAAEK

SEQ ID NO: 42475 - protein, 9 aa, Homo sapiens
  Table A; Target 42475; HLA-C*07:06; MAGEB1; ENSG00000214107; CTA
VAHATAAEK

SEQ ID NO: 42476 - protein, 8 aa, Homo sapiens
  Table A; Target 42476; HLA-C*03:03; MAGEB1; ENSG00000214107; CTA
VAWEAGML

SEQ ID NO: 42477 - protein, 8 aa, Homo sapiens
  Table A; Target 42477; HLA-C*03:04; MAGEB1; ENSG00000214107; CTA
VAWEAGML

SEQ ID NO: 42478 - protein, 9 aa, Homo sapiens
  Table A; Target 42478; HLA-B*15:03; MAGEB1; ENSG00000214107; CTA
VAWEAGMLM

SEQ ID NO: 42479 - protein, 9 aa, Homo sapiens
  Table A; Target 42479; HLA-B*35:01; MAGEB1; ENSG00000214107; CTA
VAWEAGMLM

SEQ ID NO: 42480 - protein, 9 aa, Homo sapiens
  Table A; Target 42480; HLA-B*46:01; MAGEB1; ENSG00000214107; CTA
VAWEAGMLM

SEQ ID NO: 42481 - protein, 9 aa, Homo sapiens
  Table A; Target 42481; HLA-B*51:01; MAGEB1; ENSG00000214107; CTA
VAWEAGMLM

SEQ ID NO: 42482 - protein, 9 aa, Homo sapiens
  Table A; Target 42482; HLA-C*02:02; MAGEB1; ENSG00000214107; CTA
VAWEAGMLM

SEQ ID NO: 42483 - protein, 9 aa, Homo sapiens
  Table A; Target 42483; HLA-C*03:04; MAGEB1; ENSG00000214107; CTA
VAWEAGMLM

SEQ ID NO: 42484 - protein, 9 aa, Homo sapiens
  Table A; Target 42484; HLA-C*05:01; MAGEB1; ENSG00000214107; CTA
VAWEAGMLM

SEQ ID NO: 42485 - protein, 9 aa, Homo sapiens
  Table A; Target 42485; HLA-A*32:01; MAGEB1; ENSG00000214107; CTA
VIFLKGNSA

SEQ ID NO: 42486 - protein, 9 aa, Homo sapiens
  Table A; Target 42486; HLA-B*08:01; MAGEB1; ENSG00000214107; CTA
VIFLKGNSA

SEQ ID NO: 42487 - protein, 9 aa, Homo sapiens
  Table A; Target 42487; HLA-B*54:01; MAGEB1; ENSG00000214107; CTA
VIFLKGNSA

SEQ ID NO: 42488 - protein, 9 aa, Homo sapiens
  Table A; Target 42488; HLA-B*56:01; MAGEB1; ENSG00000214107; CTA
VIFLKGNSA

SEQ ID NO: 42489 - protein, 9 aa, Homo sapiens
  Table A; Target 42489; HLA-A*01:01; MAGEB1; ENSG00000214107; CTA
VPNSDPPRY

SEQ ID NO: 42490 - protein, 9 aa, Homo sapiens
  Table A; Target 42490; HLA-B*15:01; MAGEB1; ENSG00000214107; CTA
VPNSDPPRY

SEQ ID NO: 42491 - protein, 9 aa, Homo sapiens
  Table A; Target 42491; HLA-B*56:01; MAGEB1; ENSG00000214107; CTA
VPNSDPPRY

SEQ ID NO: 42492 - protein, 8 aa, Homo sapiens
  Table A; Target 42492; HLA-A*01:01; MAGEB1; ENSG00000214107; CTA
VQEKYLKY

SEQ ID NO: 42493 - protein, 8 aa, Homo sapiens
  Table A; Target 42493; HLA-C*07:01; MAGEB1; ENSG00000214107; CTA
VQEKYLKY

SEQ ID NO: 42494 - protein, 9 aa, Homo sapiens
  Table A; Target 42494; HLA-A*01:01; MAGEB1; ENSG00000214107; CTA
YAETTKMKV

SEQ ID NO: 42495 - protein, 9 aa, Homo sapiens
  Table A; Target 42495; HLA-B*51:01; MAGEB1; ENSG00000214107; CTA
YAETTKMKV

SEQ ID NO: 42496 - protein, 9 aa, Homo sapiens
  Table A; Target 42496; HLA-C*05:01; MAGEB1; ENSG00000214107; CTA
YAETTKMKV

SEQ ID NO: 42497 - protein, 9 aa, Homo sapiens
  Table A; Target 42497; HLA-C*16:02; MAGEB1; ENSG00000214107; CTA
YAETTKMKV

SEQ ID NO: 42498 - protein, 8 aa, Homo sapiens
  Table A; Target 42498; HLA-B*38:01; MAGEB1; ENSG00000214107; CTA
YDGEEHLI

SEQ ID NO: 42499 - protein, 8 aa, Homo sapiens
  Table A; Target 42499; HLA-C*07:01; MAGEB1; ENSG00000214107; CTA
YDGEEHLI

SEQ ID NO: 42500 - protein, 8 aa, Homo sapiens
  Table A; Target 42500; HLA-C*07:04; MAGEB1; ENSG00000214107; CTA
YDGEEHLI

SEQ ID NO: 42501 - protein, 9 aa, Homo sapiens
  Table A; Target 42501; HLA-A*01:01; MAGEB1; ENSG00000214107; CTA
YDGEEHLIY

SEQ ID NO: 42502 - protein, 9 aa, Homo sapiens
  Table A; Target 42502; HLA-A*29:02; MAGEB1; ENSG00000214107; CTA
YDGEEHLIY

SEQ ID NO: 42503 - protein, 9 aa, Homo sapiens
  Table A; Target 42503; HLA-C*07:01; MAGEB1; ENSG00000214107; CTA
YDGEEHLIY

SEQ ID NO: 42504 - protein, 11 aa, Homo sapiens
  Table A; Target 42504; HLA-B*27:02; MAGEB1; ENSG00000214107; CTA
YEQVPNSDPPR

SEQ ID NO: 42505 - protein, 9 aa, Homo sapiens
  Table A; Target 42505; HLA-A*02:04; MAGEB1; ENSG00000214107; CTA
YTLVSKLNL

SEQ ID NO: 42506 - protein, 9 aa, Homo sapiens
  Table A; Target 42506; HLA-A*23:01; MAGEB1; ENSG00000214107; CTA
YTLVSKLNL

SEQ ID NO: 42507 - protein, 9 aa, Homo sapiens
  Table A; Target 42507; HLA-A*24:02; MAGEB1; ENSG00000214107; CTA
YTLVSKLNL

SEQ ID NO: 42508 - protein, 9 aa, Homo sapiens
  Table A; Target 42508; HLA-C*03:03; MAGEB1; ENSG00000214107; CTA
YTLVSKLNL

SEQ ID NO: 42509 - protein, 9 aa, Homo sapiens
  Table A; Target 42509; HLA-C*03:04; MAGEB1; ENSG00000214107; CTA
YTLVSKLNL

SEQ ID NO: 42510 - protein, 8 aa, Homo sapiens
  Table A; Target 42510; HLA-A*29:02; MAGEB1,MAGEB2; ENSG00000214107,ENSG00000099399; CTA,CTA
FLWGPRAY

SEQ ID NO: 42511 - protein, 10 aa, Homo sapiens
  Table A; Target 42511; HLA-A*03:01; MAGEB1,MAGEB2; ENSG00000214107,ENSG00000099399; CTA,CTA
KMKVLEFLAK

SEQ ID NO: 42512 - protein, 8 aa, Homo sapiens
  Table A; Target 42512; HLA-A*11:01; MAGEB1,MAGEB2; ENSG00000214107,ENSG00000099399; CTA,CTA
KVLEFLAK

SEQ ID NO: 42513 - protein, 9 aa, Homo sapiens
  Table A; Target 42513; HLA-A*02:01; MAGEB1,MAGEB2; ENSG00000214107,ENSG00000099399; CTA,CTA
LLMPLLGVI

SEQ ID NO: 42514 - protein, 9 aa, Homo sapiens
  Table A; Target 42514; HLA-A*02:03; MAGEB1,MAGEB2; ENSG00000214107,ENSG00000099399; CTA,CTA
LLMPLLGVI

SEQ ID NO: 42515 - protein, 9 aa, Homo sapiens
  Table A; Target 42515; HLA-A*02:04; MAGEB1,MAGEB2; ENSG00000214107,ENSG00000099399; CTA,CTA
LLMPLLGVI

SEQ ID NO: 42516 - protein, 11 aa, Homo sapiens
  Table A; Target 42516; HLA-A*02:01; MAGEB1,MAGEB2; ENSG00000214107,ENSG00000099399; CTA,CTA
LLMPLLGVIFL

SEQ ID NO: 42517 - protein, 11 aa, Homo sapiens
  Table A; Target 42517; HLA-A*02:04; MAGEB1,MAGEB2; ENSG00000214107,ENSG00000099399; CTA,CTA
LLMPLLGVIFL

SEQ ID NO: 42518 - protein, 9 aa, Homo sapiens
  Table A; Target 42518; HLA-A*24:02; MAGEB1,MAGEB2; ENSG00000214107,ENSG00000099399; CTA,CTA
LMPLLGVIF

SEQ ID NO: 42519 - protein, 10 aa, Homo sapiens
  Table A; Target 42519; HLA-A*02:07; MAGEB1,MAGEB2; ENSG00000214107,ENSG00000099399; CTA,CTA
LMPLLGVIFL

SEQ ID NO: 42520 - protein, 8 aa, Homo sapiens
  Table A; Target 42520; HLA-B*35:01; MAGEB1,MAGEB2; ENSG00000214107,ENSG00000099399; CTA,CTA
MPLLGVIF

SEQ ID NO: 42521 - protein, 8 aa, Homo sapiens
  Table A; Target 42521; HLA-B*35:03; MAGEB1,MAGEB2; ENSG00000214107,ENSG00000099399; CTA,CTA
MPLLGVIF

SEQ ID NO: 42522 - protein, 9 aa, Homo sapiens
  Table A; Target 42522; HLA-B*35:01; MAGEB1,MAGEB2; ENSG00000214107,ENSG00000099399; CTA,CTA
MPLLGVIFL

SEQ ID NO: 42523 - protein, 9 aa, Homo sapiens
  Table A; Target 42523; HLA-B*35:03; MAGEB1,MAGEB2; ENSG00000214107,ENSG00000099399; CTA,CTA
MPLLGVIFL

SEQ ID NO: 42524 - protein, 9 aa, Homo sapiens
  Table A; Target 42524; HLA-B*51:01; MAGEB1,MAGEB2; ENSG00000214107,ENSG00000099399; CTA,CTA
MPLLGVIFL

SEQ ID NO: 42525 - protein, 9 aa, Homo sapiens
  Table A; Target 42525; HLA-B*54:01; MAGEB1,MAGEB2; ENSG00000214107,ENSG00000099399; CTA,CTA
MPLLGVIFL

SEQ ID NO: 42526 - protein, 9 aa, Homo sapiens
  Table A; Target 42526; HLA-B*58:01; MAGEB1,MAGEB2; ENSG00000214107,ENSG00000099399; CTA,CTA
NSATEEEIW

SEQ ID NO: 42527 - protein, 9 aa, Homo sapiens
  Table A; Target 42527; HLA-A*29:02; MAGEB1,MAGEB2; ENSG00000214107,ENSG00000099399; CTA,CTA
QFLWGPRAY

SEQ ID NO: 42528 - protein, 9 aa, Homo sapiens
  Table A; Target 42528; HLA-C*01:02; MAGEB1,MAGEB2; ENSG00000214107,ENSG00000099399; CTA,CTA
SSPAAGIPQ

SEQ ID NO: 42529 - protein, 9 aa, Homo sapiens
  Table A; Target 42529; HLA-B*07:02; MAGEB1,MAGEB2,MAGEB4; ENSG00000214107,ENSG00000099399,ENSG00000120289; CTA,CTA,CTA
MPRGQKSKL

SEQ ID NO: 42530 - protein, 9 aa, Homo sapiens
  Table A; Target 42530; HLA-C*07:02; MAGEB1,MAGEB2,MAGEB4; ENSG00000214107,ENSG00000099399,ENSG00000120289; CTA,CTA,CTA
MPRGQKSKL

SEQ ID NO: 42531 - protein, 8 aa, Homo sapiens
  Table A; Target 42531; HLA-A*03:01; MAGEB1,MAGEB2,MAGEB4,MAGEC2; ENSG00000214107,ENSG00000099399,ENSG00000120289,ENSG00000046774; CTA,CTA,CTA,CTA
KVLEFLAK

SEQ ID NO: 42532 - protein, 9 aa, Homo sapiens
  Table A; Target 42532; HLA-A*33:01; MAGEB1,MAGEB4; ENSG00000214107,ENSG00000120289; CTA,CTA
EALRDEEER

SEQ ID NO: 42533 - protein, 9 aa, Homo sapiens
  Table A; Target 42533; HLA-A*33:03; MAGEB1,MAGEB4; ENSG00000214107,ENSG00000120289; CTA,CTA
EALRDEEER

SEQ ID NO: 42534 - protein, 9 aa, Homo sapiens
  Table A; Target 42534; HLA-A*01:01; MAGEB1,MAGEB4; ENSG00000214107,ENSG00000120289; CTA,CTA
ITQDLVQEK

SEQ ID NO: 42535 - protein, 9 aa, Homo sapiens
  Table A; Target 42535; HLA-A*03:01; MAGEB1,MAGEB4; ENSG00000214107,ENSG00000120289; CTA,CTA
ITQDLVQEK

SEQ ID NO: 42536 - protein, 9 aa, Homo sapiens
  Table A; Target 42536; HLA-A*03:02; MAGEB1,MAGEB4; ENSG00000214107,ENSG00000120289; CTA,CTA
ITQDLVQEK

SEQ ID NO: 42537 - protein, 9 aa, Homo sapiens
  Table A; Target 42537; HLA-A*31:01; MAGEB1,MAGEB4; ENSG00000214107,ENSG00000120289; CTA,CTA
ITQDLVQEK

SEQ ID NO: 42538 - protein, 9 aa, Homo sapiens
  Table A; Target 42538; HLA-A*33:01; MAGEB1,MAGEB4; ENSG00000214107,ENSG00000120289; CTA,CTA
ITQDLVQEK

SEQ ID NO: 42539 - protein, 9 aa, Homo sapiens
  Table A; Target 42539; HLA-A*33:03; MAGEB1,MAGEB4; ENSG00000214107,ENSG00000120289; CTA,CTA
ITQDLVQEK

SEQ ID NO: 42540 - protein, 9 aa, Homo sapiens
  Table A; Target 42540; HLA-A*68:01; MAGEB1,MAGEB4; ENSG00000214107,ENSG00000120289; CTA,CTA
ITQDLVQEK

SEQ ID NO: 42541 - protein, 9 aa, Homo sapiens
  Table A; Target 42541; HLA-B*27:02; MAGEB1,MAGEB4; ENSG00000214107,ENSG00000120289; CTA,CTA
ITQDLVQEK

SEQ ID NO: 42542 - protein, 9 aa, Homo sapiens
  Table A; Target 42542; HLA-C*07:06; MAGEB1,MAGEB4; ENSG00000214107,ENSG00000120289; CTA,CTA
ITQDLVQEK

SEQ ID NO: 42543 - protein, 9 aa, Homo sapiens
  Table A; Target 42543; HLA-C*16:02; MAGEB1,MAGEB4; ENSG00000214107,ENSG00000120289; CTA,CTA
ITQDLVQEK

SEQ ID NO: 42544 - protein, 10 aa, Homo sapiens
  Table A; Target 42544; HLA-A*01:01; MAGEB1,MAGEB4; ENSG00000214107,ENSG00000120289; CTA,CTA
ITQDLVQEKY

SEQ ID NO: 42545 - protein, 10 aa, Homo sapiens
  Table A; Target 42545; HLA-A*25:01; MAGEB1,MAGEB4; ENSG00000214107,ENSG00000120289; CTA,CTA
ITQDLVQEKY

SEQ ID NO: 42546 - protein, 10 aa, Homo sapiens
  Table A; Target 42546; HLA-A*26:01; MAGEB1,MAGEB4; ENSG00000214107,ENSG00000120289; CTA,CTA
ITQDLVQEKY

SEQ ID NO: 42547 - protein, 10 aa, Homo sapiens
  Table A; Target 42547; HLA-A*29:02; MAGEB1,MAGEB4; ENSG00000214107,ENSG00000120289; CTA,CTA
ITQDLVQEKY

SEQ ID NO: 42548 - protein, 10 aa, Homo sapiens
  Table A; Target 42548; HLA-A*30:02; MAGEB1,MAGEB4; ENSG00000214107,ENSG00000120289; CTA,CTA
ITQDLVQEKY

SEQ ID NO: 42549 - protein, 10 aa, Homo sapiens
  Table A; Target 42549; HLA-A*32:01; MAGEB1,MAGEB4; ENSG00000214107,ENSG00000120289; CTA,CTA
ITQDLVQEKY

SEQ ID NO: 42550 - protein, 10 aa, Homo sapiens
  Table A; Target 42550; HLA-B*15:01; MAGEB1,MAGEB4; ENSG00000214107,ENSG00000120289; CTA,CTA
ITQDLVQEKY

SEQ ID NO: 42551 - protein, 10 aa, Homo sapiens
  Table A; Target 42551; HLA-B*57:01; MAGEB1,MAGEB4; ENSG00000214107,ENSG00000120289; CTA,CTA
ITQDLVQEKY

SEQ ID NO: 42552 - protein, 10 aa, Homo sapiens
  Table A; Target 42552; HLA-B*58:01; MAGEB1,MAGEB4; ENSG00000214107,ENSG00000120289; CTA,CTA
ITQDLVQEKY

SEQ ID NO: 42553 - protein, 10 aa, Homo sapiens
  Table A; Target 42553; HLA-C*16:01; MAGEB1,MAGEB4; ENSG00000214107,ENSG00000120289; CTA,CTA
ITQDLVQEKY

SEQ ID NO: 42554 - protein, 10 aa, Homo sapiens
  Table A; Target 42554; HLA-C*16:02; MAGEB1,MAGEB4; ENSG00000214107,ENSG00000120289; CTA,CTA
ITQDLVQEKY

SEQ ID NO: 42555 - protein, 9 aa, Homo sapiens
  Table A; Target 42555; HLA-A*01:01; MAGEB1,MAGEB4; ENSG00000214107,ENSG00000120289; CTA,CTA
NSDPPRYQF

SEQ ID NO: 42556 - protein, 9 aa, Homo sapiens
  Table A; Target 42556; HLA-A*32:01; MAGEB1,MAGEB4; ENSG00000214107,ENSG00000120289; CTA,CTA
NSDPPRYQF

SEQ ID NO: 42557 - protein, 9 aa, Homo sapiens
  Table A; Target 42557; HLA-B*35:01; MAGEB1,MAGEB4; ENSG00000214107,ENSG00000120289; CTA,CTA
NSDPPRYQF

SEQ ID NO: 42558 - protein, 9 aa, Homo sapiens
  Table A; Target 42558; HLA-B*57:01; MAGEB1,MAGEB4; ENSG00000214107,ENSG00000120289; CTA,CTA
NSDPPRYQF

SEQ ID NO: 42559 - protein, 9 aa, Homo sapiens
  Table A; Target 42559; HLA-B*58:01; MAGEB1,MAGEB4; ENSG00000214107,ENSG00000120289; CTA,CTA
NSDPPRYQF

SEQ ID NO: 42560 - protein, 9 aa, Homo sapiens
  Table A; Target 42560; HLA-C*03:04; MAGEB1,MAGEB4; ENSG00000214107,ENSG00000120289; CTA,CTA
NSDPPRYQF

SEQ ID NO: 42561 - protein, 9 aa, Homo sapiens
  Table A; Target 42561; HLA-C*05:01; MAGEB1,MAGEB4; ENSG00000214107,ENSG00000120289; CTA,CTA
NSDPPRYQF

SEQ ID NO: 42562 - protein, 9 aa, Homo sapiens
  Table A; Target 42562; HLA-C*16:01; MAGEB1,MAGEB4; ENSG00000214107,ENSG00000120289; CTA,CTA
NSDPPRYQF

SEQ ID NO: 42563 - protein, 9 aa, Homo sapiens
  Table A; Target 42563; HLA-A*68:01; MAGEB1,MAGEB4; ENSG00000214107,ENSG00000120289; CTA,CTA
QVPNSDPPR

SEQ ID NO: 42564 - protein, 10 aa, Homo sapiens
  Table A; Target 42564; HLA-A*01:01; MAGEB1,MAGEB4; ENSG00000214107,ENSG00000120289; CTA,CTA
QVPNSDPPRY

SEQ ID NO: 42565 - protein, 10 aa, Homo sapiens
  Table A; Target 42565; HLA-A*25:01; MAGEB1,MAGEB4; ENSG00000214107,ENSG00000120289; CTA,CTA
QVPNSDPPRY

SEQ ID NO: 42566 - protein, 10 aa, Homo sapiens
  Table A; Target 42566; HLA-A*26:01; MAGEB1,MAGEB4; ENSG00000214107,ENSG00000120289; CTA,CTA
QVPNSDPPRY

SEQ ID NO: 42567 - protein, 10 aa, Homo sapiens
  Table A; Target 42567; HLA-A*29:02; MAGEB1,MAGEB4; ENSG00000214107,ENSG00000120289; CTA,CTA
QVPNSDPPRY

SEQ ID NO: 42568 - protein, 10 aa, Homo sapiens
  Table A; Target 42568; HLA-A*30:02; MAGEB1,MAGEB4; ENSG00000214107,ENSG00000120289; CTA,CTA
QVPNSDPPRY

SEQ ID NO: 42569 - protein, 8 aa, Homo sapiens
  Table A; Target 42569; HLA-B*37:01; MAGEB1,MAGEB4; ENSG00000214107,ENSG00000120289; CTA,CTA
SDPPRYQF

SEQ ID NO: 42570 - protein, 9 aa, Homo sapiens
  Table A; Target 42570; HLA-B*37:01; MAGEB1,MAGEB4; ENSG00000214107,ENSG00000120289; CTA,CTA
SDPPRYQFL

SEQ ID NO: 42571 - protein, 9 aa, Homo sapiens
  Table A; Target 42571; HLA-A*29:02; MAGEB1,MAGEB4; ENSG00000214107,ENSG00000120289; CTA,CTA
VPNSDPPRY

SEQ ID NO: 42572 - protein, 9 aa, Homo sapiens
  Table A; Target 42572; HLA-A*30:02; MAGEB1,MAGEB4; ENSG00000214107,ENSG00000120289; CTA,CTA
VPNSDPPRY

SEQ ID NO: 42573 - protein, 9 aa, Homo sapiens
  Table A; Target 42573; HLA-B*35:01; MAGEB1,MAGEB4; ENSG00000214107,ENSG00000120289; CTA,CTA
VPNSDPPRY

SEQ ID NO: 42574 - protein, 9 aa, Homo sapiens
  Table A; Target 42574; HLA-B*35:03; MAGEB1,MAGEB4; ENSG00000214107,ENSG00000120289; CTA,CTA
VPNSDPPRY

SEQ ID NO: 42575 - protein, 9 aa, Homo sapiens
  Table A; Target 42575; HLA-B*55:01; MAGEB1,MAGEB4; ENSG00000214107,ENSG00000120289; CTA,CTA
VPNSDPPRY

SEQ ID NO: 42576 - protein, 9 aa, Homo sapiens
  Table A; Target 42576; HLA-C*16:01; MAGEB1,MAGEB4; ENSG00000214107,ENSG00000120289; CTA,CTA
VPNSDPPRY

SEQ ID NO: 42577 - protein, 9 aa, Homo sapiens
  Table A; Target 42577; HLA-C*16:02; MAGEB1,MAGEB4; ENSG00000214107,ENSG00000120289; CTA,CTA
VPNSDPPRY

SEQ ID NO: 42578 - protein, 11 aa, Homo sapiens
  Table A; Target 42578; HLA-A*23:01; MAGEB1,MAGEB4; ENSG00000214107,ENSG00000120289; CTA,CTA
VPNSDPPRYQF

SEQ ID NO: 42579 - protein, 11 aa, Homo sapiens
  Table A; Target 42579; HLA-B*07:02; MAGEB1,MAGEB4; ENSG00000214107,ENSG00000120289; CTA,CTA
VPNSDPPRYQF

SEQ ID NO: 42580 - protein, 11 aa, Homo sapiens
  Table A; Target 42580; HLA-B*35:01; MAGEB1,MAGEB4; ENSG00000214107,ENSG00000120289; CTA,CTA
VPNSDPPRYQF

SEQ ID NO: 42581 - protein, 11 aa, Homo sapiens
  Table A; Target 42581; HLA-B*55:01; MAGEB1,MAGEB4; ENSG00000214107,ENSG00000120289; CTA,CTA
VPNSDPPRYQF

SEQ ID NO: 42582 - protein, 9 aa, Homo sapiens
  Table A; Target 42582; HLA-A*02:04; MAGEB1,MAGEB4; ENSG00000214107,ENSG00000120289; CTA,CTA
YQFLWGPRA

SEQ ID NO: 42583 - protein, 8 aa, Homo sapiens
  Table A; Target 42583; HLA-A*23:01; MAGEB1,MAGEB6; ENSG00000214107,ENSG00000176746; CTA,CTA
AYAETTKM

SEQ ID NO: 42584 - protein, 8 aa, Homo sapiens
  Table A; Target 42584; HLA-A*24:02; MAGEB1,MAGEB6; ENSG00000214107,ENSG00000176746; CTA,CTA
AYAETTKM

SEQ ID NO: 42585 - protein, 8 aa, Homo sapiens
  Table A; Target 42585; HLA-B*46:01; MAGEB1,MAGEB6; ENSG00000214107,ENSG00000176746; CTA,CTA
AYAETTKM

SEQ ID NO: 42586 - protein, 8 aa, Homo sapiens
  Table A; Target 42586; HLA-C*01:02; MAGEB1,MAGEB6; ENSG00000214107,ENSG00000176746; CTA,CTA
AYAETTKM

SEQ ID NO: 42587 - protein, 8 aa, Homo sapiens
  Table A; Target 42587; HLA-C*04:01; MAGEB1,MAGEB6; ENSG00000214107,ENSG00000176746; CTA,CTA
AYAETTKM

SEQ ID NO: 42588 - protein, 8 aa, Homo sapiens
  Table A; Target 42588; HLA-C*14:02; MAGEB1,MAGEB6; ENSG00000214107,ENSG00000176746; CTA,CTA
AYAETTKM

SEQ ID NO: 42589 - protein, 11 aa, Homo sapiens
  Table A; Target 42589; HLA-B*07:02; MAGEB1,MAGEB6; ENSG00000214107,ENSG00000176746; CTA,CTA
GPRAYAETTKM

SEQ ID NO: 42590 - protein, 11 aa, Homo sapiens
  Table A; Target 42590; HLA-C*07:02; MAGEB1,MAGEB6; ENSG00000214107,ENSG00000176746; CTA,CTA
GPRAYAETTKM

SEQ ID NO: 42591 - protein, 9 aa, Homo sapiens
  Table A; Target 42591; HLA-A*32:01; MAGEB1,MAGEB6; ENSG00000214107,ENSG00000176746; CTA,CTA
RAYAETTKM

SEQ ID NO: 42592 - protein, 9 aa, Homo sapiens
  Table A; Target 42592; HLA-B*15:01; MAGEB1,MAGEB6; ENSG00000214107,ENSG00000176746; CTA,CTA
RAYAETTKM

SEQ ID NO: 42593 - protein, 9 aa, Homo sapiens
  Table A; Target 42593; HLA-B*15:03; MAGEB1,MAGEB6; ENSG00000214107,ENSG00000176746; CTA,CTA
RAYAETTKM

SEQ ID NO: 42594 - protein, 9 aa, Homo sapiens
  Table A; Target 42594; HLA-B*46:01; MAGEB1,MAGEB6; ENSG00000214107,ENSG00000176746; CTA,CTA
RAYAETTKM

SEQ ID NO: 42595 - protein, 9 aa, Homo sapiens
  Table A; Target 42595; HLA-B*58:01; MAGEB1,MAGEB6; ENSG00000214107,ENSG00000176746; CTA,CTA
RAYAETTKM

SEQ ID NO: 42596 - protein, 9 aa, Homo sapiens
  Table A; Target 42596; HLA-C*02:02; MAGEB1,MAGEB6; ENSG00000214107,ENSG00000176746; CTA,CTA
RAYAETTKM

SEQ ID NO: 42597 - protein, 9 aa, Homo sapiens
  Table A; Target 42597; HLA-C*03:03; MAGEB1,MAGEB6; ENSG00000214107,ENSG00000176746; CTA,CTA
RAYAETTKM

SEQ ID NO: 42598 - protein, 9 aa, Homo sapiens
  Table A; Target 42598; HLA-C*03:04; MAGEB1,MAGEB6; ENSG00000214107,ENSG00000176746; CTA,CTA
RAYAETTKM

SEQ ID NO: 42599 - protein, 9 aa, Homo sapiens
  Table A; Target 42599; HLA-C*05:01; MAGEB1,MAGEB6; ENSG00000214107,ENSG00000176746; CTA,CTA
RAYAETTKM

SEQ ID NO: 42600 - protein, 9 aa, Homo sapiens
  Table A; Target 42600; HLA-C*12:03; MAGEB1,MAGEB6; ENSG00000214107,ENSG00000176746; CTA,CTA
RAYAETTKM

SEQ ID NO: 42601 - protein, 9 aa, Homo sapiens
  Table A; Target 42601; HLA-C*16:02; MAGEB1,MAGEB6; ENSG00000214107,ENSG00000176746; CTA,CTA
RAYAETTKM

SEQ ID NO: 42602 - protein, 9 aa, Homo sapiens
  Table A; Target 42602; HLA-C*16:04; MAGEB1,MAGEB6; ENSG00000214107,ENSG00000176746; CTA,CTA
RAYAETTKM

SEQ ID NO: 42603 - protein, 9 aa, Homo sapiens
  Table A; Target 42603; HLA-B*46:01; MAGEB2; ENSG00000099399; CTA
AAAAAGVSS

SEQ ID NO: 42604 - protein, 9 aa, Homo sapiens
  Table A; Target 42604; HLA-C*03:04; MAGEB2; ENSG00000099399; CTA
AAAAAGVSS

SEQ ID NO: 42605 - protein, 11 aa, Homo sapiens
  Table A; Target 42605; HLA-A*03:01; MAGEB2; ENSG00000099399; CTA
AAAAAGVSSTK

SEQ ID NO: 42606 - protein, 11 aa, Homo sapiens
  Table A; Target 42606; HLA-A*03:02; MAGEB2; ENSG00000099399; CTA
AAAAAGVSSTK

SEQ ID NO: 42607 - protein, 11 aa, Homo sapiens
  Table A; Target 42607; HLA-A*11:01; MAGEB2; ENSG00000099399; CTA
AAAAAGVSSTK

SEQ ID NO: 42608 - protein, 11 aa, Homo sapiens
  Table A; Target 42608; HLA-A*31:01; MAGEB2; ENSG00000099399; CTA
AAAAAGVSSTK

SEQ ID NO: 42609 - protein, 11 aa, Homo sapiens
  Table A; Target 42609; HLA-A*68:01; MAGEB2; ENSG00000099399; CTA
AAAAAGVSSTK

SEQ ID NO: 42610 - protein, 11 aa, Homo sapiens
  Table A; Target 42610; HLA-B*27:02; MAGEB2; ENSG00000099399; CTA
AAAAAGVSSTK

SEQ ID NO: 42611 - protein, 11 aa, Homo sapiens
  Table A; Target 42611; HLA-B*27:05; MAGEB2; ENSG00000099399; CTA
AAAAAGVSSTK

SEQ ID NO: 42612 - protein, 11 aa, Homo sapiens
  Table A; Target 42612; HLA-B*57:01; MAGEB2; ENSG00000099399; CTA
AAAAAGVSSTK

SEQ ID NO: 42613 - protein, 11 aa, Homo sapiens
  Table A; Target 42613; HLA-B*58:01; MAGEB2; ENSG00000099399; CTA
AAAAAGVSSTK

SEQ ID NO: 42614 - protein, 11 aa, Homo sapiens
  Table A; Target 42614; HLA-C*02:02; MAGEB2; ENSG00000099399; CTA
AAAAAGVSSTK

SEQ ID NO: 42615 - protein, 11 aa, Homo sapiens
  Table A; Target 42615; HLA-C*03:03; MAGEB2; ENSG00000099399; CTA
AAAAAGVSSTK

SEQ ID NO: 42616 - protein, 11 aa, Homo sapiens
  Table A; Target 42616; HLA-C*03:04; MAGEB2; ENSG00000099399; CTA
AAAAAGVSSTK
